United States Patent Application Publication US 2005/0244851 A1 - sequence listing, part 125

SEQ ID NO: 4877712 - DNA, 25 bp, Homo sapien
agagcggccctgttgctgggtaatc

SEQ ID NO: 4877713 - DNA, 25 bp, Homo sapien
tggagagcggccctgttgctgggta

SEQ ID NO: 4877714 - DNA, 25 bp, Homo sapien
cggccctgttgctgggtaatctgca

SEQ ID NO: 4877715 - DNA, 25 bp, Homo sapien
agcggccctgttgctgggtaatctg

SEQ ID NO: 4877716 - DNA, 25 bp, Homo sapien
tggctccggatatggggcttccctc

SEQ ID NO: 4877717 - DNA, 25 bp, Homo sapien
cttccctcagaaggcctccaggtag

SEQ ID NO: 4877718 - DNA, 25 bp, Homo sapien
aggtagctaagtgtgcctgctgcca

SEQ ID NO: 4877719 - DNA, 25 bp, Homo sapien
atggggcttccctcagaaggcctcc

SEQ ID NO: 4877720 - DNA, 25 bp, Homo sapien
tgctgcaaggcggaccacctgactt

SEQ ID NO: 4877721 - DNA, 25 bp, Homo sapien
ggtgtgctcttccttggcacgaggt

SEQ ID NO: 4877722 - DNA, 25 bp, Homo sapien
accacctgacttaggcgcggcagtg

SEQ ID NO: 4877723 - DNA, 25 bp, Homo sapien
ctgccagtatgaggctgagtggcct

SEQ ID NO: 4877724 - DNA, 25 bp, Homo sapien
tcctcccattctagggtgtgcccaa

SEQ ID NO: 4877725 - DNA, 25 bp, Homo sapien
agggctggtcccagacagccttagg

SEQ ID NO: 4877726 - DNA, 25 bp, Homo sapien
tggtcccagacagccttagggtccc

SEQ ID NO: 4877727 - DNA, 25 bp, Homo sapien
cgagccctatgtgcaggtgacagct

SEQ ID NO: 4877728 - DNA, 25 bp, Homo sapien
cacctgaattagttgaagtggcaat

SEQ ID NO: 4877729 - DNA, 25 bp, Homo sapien
gaccacctgaattagttgaagtggc

SEQ ID NO: 4877730 - DNA, 25 bp, Homo sapien
cacggaccacctgaattagttgaag

SEQ ID NO: 4877731 - DNA, 25 bp, Homo sapien
tgcggcacggaccacctgaattagt

SEQ ID NO: 4877732 - DNA, 25 bp, Homo sapien
ggaatcttggccagctccgagagct

SEQ ID NO: 4877733 - DNA, 25 bp, Homo sapien
agagctccgcgtcgtgggtcctggg

SEQ ID NO: 4877734 - DNA, 25 bp, Homo sapien
agcaccggttcccatcctccgacag

SEQ ID NO: 4877735 - DNA, 25 bp, Homo sapien
catagggtccgatatggaatcttgg

SEQ ID NO: 4877736 - DNA, 25 bp, Homo sapien
cacacagctgagggtcgcttagtgt

SEQ ID NO: 4877737 - DNA, 25 bp, Homo sapien
tgcttccccgcaccgtgtgcaggtg

SEQ ID NO: 4877738 - DNA, 25 bp, Homo sapien
cacagctgagggtcgcttagtgtac

SEQ ID NO: 4877739 - DNA, 25 bp, Homo sapien
agctgagggtcgcttagtgtacatc

SEQ ID NO: 4877740 - DNA, 25 bp, Homo sapien
gtggcgtgggcacggtgaaaggttg

SEQ ID NO: 4877741 - DNA, 25 bp, Homo sapien
gcgtgggcacggtgaaaggttgcca

SEQ ID NO: 4877742 - DNA, 25 bp, Homo sapien
ggcgtgggcacggtgaaaggttgcc

SEQ ID NO: 4877743 - DNA, 25 bp, Homo sapien
cgtgggcacggtgaaaggttgccat

SEQ ID NO: 4877744 - DNA, 25 bp, Homo sapien
tgccgcgcgccatatgcagatgaca

SEQ ID NO: 4877745 - DNA, 25 bp, Homo sapien
cagagggccttcaggtctccgagtg

SEQ ID NO: 4877746 - DNA, 25 bp, Homo sapien
tgtgcagcagcctaaatccgatggc

SEQ ID NO: 4877747 - DNA, 25 bp, Homo sapien
aatcgcctgaattaggctcctggtg

SEQ ID NO: 4877748 - DNA, 25 bp, Homo sapien
cctgtgccctcttttgagcgcgagg

SEQ ID NO: 4877749 - DNA, 25 bp, Homo sapien
cttttgagcgcgaggtcttgagtgc

SEQ ID NO: 4877750 - DNA, 25 bp, Homo sapien
cgcgaggtcttgagtgctgggcact

SEQ ID NO: 4877751 - DNA, 25 bp, Homo sapien
ctcagggcccgcctaacgacgctgc

SEQ ID NO: 4877752 - DNA, 25 bp, Homo sapien
ttgcgcgtggccagaaactgcgtgt

SEQ ID NO: 4877753 - DNA, 25 bp, Homo sapien
agttgggccccagcgcccatgggac

SEQ ID NO: 4877754 - DNA, 25 bp, Homo sapien
gacctcaaaaggcaaccgccttgcg

SEQ ID NO: 4877755 - DNA, 25 bp, Homo sapien
aataatatacggagcagagcagttg

SEQ ID NO: 4877756 - DNA, 25 bp, Homo sapien
aacttctcggacaaggacgtctcca

SEQ ID NO: 4877757 - DNA, 25 bp, Homo sapien
tccaacttctcggacaaggacgtct

SEQ ID NO: 4877758 - DNA, 25 bp, Homo sapien
gaccctccaacttctcggacaagga

SEQ ID NO: 4877759 - DNA, 25 bp, Homo sapien
cttctcggacaaggacgtctccaac

SEQ ID NO: 4877760 - DNA, 25 bp, Homo sapien
gctattggcttcagagacgccacaa

SEQ ID NO: 4877761 - DNA, 25 bp, Homo sapien
tctccacagccaagatcatcttcat

SEQ ID NO: 4877762 - DNA, 25 bp, Homo sapien
cttcatggcccagctattggcttca

SEQ ID NO: 4877763 - DNA, 25 bp, Homo sapien
gcccagcaccagaaagcaaggcagt

SEQ ID NO: 4877764 - DNA, 25 bp, Homo sapien
tccaggagctcaggcgcacctggcc

SEQ ID NO: 4877765 - DNA, 25 bp, Homo sapien
agagaagatgcagttactactccag

SEQ ID NO: 4877766 - DNA, 25 bp, Homo sapien
agaagatgcagttactactccagga

SEQ ID NO: 4877767 - DNA, 25 bp, Homo sapien
atgcagttactactccaggagctca

SEQ ID NO: 4877768 - DNA, 25 bp, Homo sapien
gtcttttctcttcagcgggagcctc

SEQ ID NO: 4877769 - DNA, 25 bp, Homo sapien
gtgtatcatcccgacatcctcatct

SEQ ID NO: 4877770 - DNA, 25 bp, Homo sapien
cttttctcttcagcgggagcctcag

SEQ ID NO: 4877771 - DNA, 25 bp, Homo sapien
cgttcccctggacgcagctttgtgt

SEQ ID NO: 4877772 - DNA, 25 bp, Homo sapien
ttctctctgaagtgctctgtaagag

SEQ ID NO: 4877773 - DNA, 25 bp, Homo sapien
tctctctgaagtgctctgtaagagg

SEQ ID NO: 4877774 - DNA, 25 bp, Homo sapien
tctgaagtgctctgtaagaggaact

SEQ ID NO: 4877775 - DNA, 25 bp, Homo sapien
tctctgaagtgctctgtaagaggaa

SEQ ID NO: 4877776 - DNA, 25 bp, Homo sapien
gcccagttttagaggtattttcatg

SEQ ID NO: 4877777 - DNA, 25 bp, Homo sapien
tcacaaacttaggacagaaaacggc

SEQ ID NO: 4877778 - DNA, 25 bp, Homo sapien
gcaacttaactttaagcagaagtgt

SEQ ID NO: 4877779 - DNA, 25 bp, Homo sapien
taaagtccttctcttatcggacaca

SEQ ID NO: 4877780 - DNA, 25 bp, Homo sapien
cttcgttagaggtgtcttgttttca

SEQ ID NO: 4877781 - DNA, 25 bp, Homo sapien
gttaccacttctgggcagccattgg

SEQ ID NO: 4877782 - DNA, 25 bp, Homo sapien
cgttagaggtgtcttgttttcactg

SEQ ID NO: 4877783 - DNA, 25 bp, Homo sapien
aaagttaccacttctgggcagccat

SEQ ID NO: 4877784 - DNA, 25 bp, Homo sapien
tccatctcatgctgaaagaactggc

SEQ ID NO: 4877785 - DNA, 25 bp, Homo sapien
aatccatctcatgctgaaagaactg

SEQ ID NO: 4877786 - DNA, 25 bp, Homo sapien
ccaaatccatctcatgctgaaagaa

SEQ ID NO: 4877787 - DNA, 25 bp, Homo sapien
caaatccatctcatgctgaaagaac

SEQ ID NO: 4877788 - DNA, 25 bp, Homo sapien
ggtttcacaaactagttatatttca

SEQ ID NO: 4877789 - DNA, 25 bp, Homo sapien
ctgtcagtattagaacaagaaataa

SEQ ID NO: 4877790 - DNA, 25 bp, Homo sapien
taaaataagtattccacaggtttca

SEQ ID NO: 4877791 - DNA, 25 bp, Homo sapien
tattccacaggtttcacaaactagt

SEQ ID NO: 4877792 - DNA, 25 bp, Homo sapien
gattgcttaagcttccaaatagcaa

SEQ ID NO: 4877793 - DNA, 25 bp, Homo sapien
gaaaacagtcttgctaccattgaca

SEQ ID NO: 4877794 - DNA, 25 bp, Homo sapien
caaggtctagcagaatagtttcaca

SEQ ID NO: 4877795 - DNA, 25 bp, Homo sapien
tagacatcggtaatatttggatcag

SEQ ID NO: 4877796 - DNA, 25 bp, Homo sapien
acccatgtgcagggatcatgctgat

SEQ ID NO: 4877797 - DNA, 25 bp, Homo sapien
aaatttgtgtgtcacccatgtgcag

SEQ ID NO: 4877798 - DNA, 25 bp, Homo sapien
agaaatatagaacacctcacaaatt

SEQ ID NO: 4877799 - DNA, 25 bp, Homo sapien
ttgtgtgtcacccatgtgcagggat

SEQ ID NO: 4877800 - DNA, 25 bp, Homo sapien
ccaaacagtcaatcttgtccgatgt

SEQ ID NO: 4877801 - DNA, 25 bp, Homo sapien
ctgccaaacagtcaatcttgtccga

SEQ ID NO: 4877802 - DNA, 25 bp, Homo sapien
cagtcaatcttgtccgatgttccca

SEQ ID NO: 4877803 - DNA, 25 bp, Homo sapien
aacagtcaatcttgtccgatgttcc

SEQ ID NO: 4877804 - DNA, 25 bp, Homo sapien
gatcatgcctatcctttcagagaaa

SEQ ID NO: 4877805 - DNA, 25 bp, Homo sapien
agcatcagcaatcaaagctctccgg

SEQ ID NO: 4877806 - DNA, 25 bp, Homo sapien
tccggccaatagctccaacagaaac

SEQ ID NO: 4877807 - DNA, 25 bp, Homo sapien
tgtttccagcctctgacgttaggac

SEQ ID NO: 4877808 - DNA, 25 bp, Homo sapien
cttccatcgtttcccctggatggca

SEQ ID NO: 4877809 - DNA, 25 bp, Homo sapien
ccatcgtttcccctggatggcagct

SEQ ID NO: 4877810 - DNA, 25 bp, Homo sapien
agatcctgatctaggctccacaacc

SEQ ID NO: 4877811 - DNA, 25 bp, Homo sapien
ttcccaagatcctgatctaggctcc

SEQ ID NO: 4877812 - DNA, 25 bp, Homo sapien
caagtgcttccattgaggacaagga

SEQ ID NO: 4877813 - DNA, 25 bp, Homo sapien
tttcattcaagtgcttccattgagg

SEQ ID NO: 4877814 - DNA, 25 bp, Homo sapien
cattcaagtgcttccattgaggaca

SEQ ID NO: 4877815 - DNA, 25 bp, Homo sapien
tgtttcattcaagtgcttccattga

SEQ ID NO: 4877816 - DNA, 25 bp, Homo sapien
cttgcagaagaagacctcaacctct

SEQ ID NO: 4877817 - DNA, 25 bp, Homo sapien
tctcagaggaagagatcgccatctc

SEQ ID NO: 4877818 - DNA, 25 bp, Homo sapien
gagtagcaactccaagagtagccct

SEQ ID NO: 4877819 - DNA, 25 bp, Homo sapien
gaaactcaatgtctgcagtcttgca

SEQ ID NO: 4877820 - DNA, 25 bp, Homo sapien
caaacctgcaatattgtcagatgtt

SEQ ID NO: 4877821 - DNA, 25 bp, Homo sapien
tcttcttagataggagttctgccaa

SEQ ID NO: 4877822 - DNA, 25 bp, Homo sapien
tcttctttctgttgaacatgcaatc

SEQ ID NO: 4877823 - DNA, 25 bp, Homo sapien
tctgccaaacattccattgaggcct

SEQ ID NO: 4877824 - DNA, 25 bp, Homo sapien
ttcctagggacctttgtgtttgtga

SEQ ID NO: 4877825 - DNA, 25 bp, Homo sapien
tggcaaatgggttgccttcgggaat

SEQ ID NO: 4877826 - DNA, 25 bp, Homo sapien
cctagggacctttgtgtttgtgatg

SEQ ID NO: 4877827 - DNA, 25 bp, Homo sapien
ccttcgggaatgacacaggaggaag

SEQ ID NO: 4877828 - DNA, 25 bp, Homo sapien
tccatccaagctggtgggtccggga

SEQ ID NO: 4877829 - DNA, 25 bp, Homo sapien
caagctggtgggtccgggactcact

SEQ ID NO: 4877830 - DNA, 25 bp, Homo sapien
cctccatccaagctggtgggtccgg

SEQ ID NO: 4877831 - DNA, 25 bp, Homo sapien
atccaagctggtgggtccgggactc

SEQ ID NO: 4877832 - DNA, 25 bp, Homo sapien
taggaaagattgctgaggtcctctg

SEQ ID NO: 4877833 - DNA, 25 bp, Homo sapien
tgggctattataaggccctgtctgc

SEQ ID NO: 4877834 - DNA, 25 bp, Homo sapien
tcatactgataaactggagccacgt

SEQ ID NO: 4877835 - DNA, 25 bp, Homo sapien
gagccacgtactgcggtttgtccta

SEQ ID NO: 4877836 - DNA, 25 bp, Homo sapien
ctggctgttacggttttggctctgc

SEQ ID NO: 4877837 - DNA, 25 bp, Homo sapien
ccggagtctctagctctggctgtta

SEQ ID NO: 4877838 - DNA, 25 bp, Homo sapien
tcctagctgatacgggacagagcca

SEQ ID NO: 4877839 - DNA, 25 bp, Homo sapien
tcacacgcggtatgtattttaagcc

SEQ ID NO: 4877840 - DNA, 25 bp, Homo sapien
taaagagcaccagtacatagagtca

SEQ ID NO: 4877841 - DNA, 25 bp, Homo sapien
cacattcgctgtatgatcctggaca

SEQ ID NO: 4877842 - DNA, 25 bp, Homo sapien
gaatctggcccacagggtgtgcttc

SEQ ID NO: 4877843 - DNA, 25 bp, Homo sapien
tactgagcccttattgtatggatgg

SEQ ID NO: 4877844 - DNA, 25 bp, Homo sapien
tgtgaccttctcagttgtgactgaa

SEQ ID NO: 4877845 - DNA, 25 bp, Homo sapien
tgatgacgcattggagagtaagtgt

SEQ ID NO: 4877846 - DNA, 25 bp, Homo sapien
gagactgagcggcagtgatgcacca

SEQ ID NO: 4877847 - DNA, 25 bp, Homo sapien
tgactgaaggttgttcggactgacc

SEQ ID NO: 4877848 - DNA, 25 bp, Homo sapien
tgaaggtcagttcagcctcgcatat

SEQ ID NO: 4877849 - DNA, 25 bp, Homo sapien
cactggtcctcaatctgcctttggg

SEQ ID NO: 4877850 - DNA, 25 bp, Homo sapien
tcctggctaggtgtcccaagacttg

SEQ ID NO: 4877851 - DNA, 25 bp, Homo sapien
tgtcactgccatactgcgggtctca

SEQ ID NO: 4877852 - DNA, 25 bp, Homo sapien
aggctccagacggtccagagatgtg

SEQ ID NO: 4877853 - DNA, 25 bp, Homo sapien
tggtgggagcagtaagccaagggag

SEQ ID NO: 4877854 - DNA, 25 bp, Homo sapien
atatccaacctcgtggccaggcggc

SEQ ID NO: 4877855 - DNA, 25 bp, Homo sapien
gccaggcggcgcctctaaagagggt

SEQ ID NO: 4877856 - DNA, 25 bp, Homo sapien
ctgttggaggtgtgcactgcatcaa

SEQ ID NO: 4877857 - DNA, 25 bp, Homo sapien
gagatcagtgatgcttctttcaggg

SEQ ID NO: 4877858 - DNA, 25 bp, Homo sapien
cagctgtgtagtggagggcacattt

SEQ ID NO: 4877859 - DNA, 25 bp, Homo sapien
tgcatcaagtaaggccaagatcctg

SEQ ID NO: 4877860 - DNA, 25 bp, Homo sapien
gcctgggagtttgacgctgcagtga

SEQ ID NO: 4877861 - DNA, 25 bp, Homo sapien
acttgagcctgggagtttgacgctg

SEQ ID NO: 4877862 - DNA, 25 bp, Homo sapien
cagtgagccgtgagtgtgccattgc

SEQ ID NO: 4877863 - DNA, 25 bp, Homo sapien
gcagtgagccgtgagtgtgccattg

SEQ ID NO: 4877864 - DNA, 25 bp, Homo sapien
ccttcattccgggagattcttaggc

SEQ ID NO: 4877865 - DNA, 25 bp, Homo sapien
gcctctttcacactccactgcacat

SEQ ID NO: 4877866 - DNA, 25 bp, Homo sapien
ccagttctttctactgttccttcat

SEQ ID NO: 4877867 - DNA, 25 bp, Homo sapien
cattccgggagattcttaggcccca

SEQ ID NO: 4877868 - DNA, 25 bp, Homo sapien
gatgagagtctctatcaccatattt

SEQ ID NO: 4877869 - DNA, 25 bp, Homo sapien
gagagtctctatcaccatatttggc

SEQ ID NO: 4877870 - DNA, 25 bp, Homo sapien
tgagagtctctatcaccatatttgg

SEQ ID NO: 4877871 - DNA, 25 bp, Homo sapien
ttctggtttactcagtgtccttgat

SEQ ID NO: 4877872 - DNA, 25 bp, Homo sapien
gaggcaaggccgtggcctgtctttc

SEQ ID NO: 4877873 - DNA, 25 bp, Homo sapien
agttggacttggcataacctcctgg

SEQ ID NO: 4877874 - DNA, 25 bp, Homo sapien
agttgtcctgggatactctgcctgg

SEQ ID NO: 4877875 - DNA, 25 bp, Homo sapien
tcagcctatcctcattgtcctggac

SEQ ID NO: 4877876 - DNA, 25 bp, Homo sapien
ggtctgagccctgtcttttttgtgg

SEQ ID NO: 4877877 - DNA, 25 bp, Homo sapien
tttcattaagattcgggaacctctg

SEQ ID NO: 4877878 - DNA, 25 bp, Homo sapien
gctgtaactaactcttgctgactgg

SEQ ID NO: 4877879 - DNA, 25 bp, Homo sapien
tcgggaacctctgattcacatccaa

SEQ ID NO: 4877880 - DNA, 25 bp, Homo sapien
ctggccaattgttagtggggatgac

SEQ ID NO: 4877881 - DNA, 25 bp, Homo sapien
ttttcactatagtgatggacattag

SEQ ID NO: 4877882 - DNA, 25 bp, Homo sapien
ggccaattgttagtggggatgacta

SEQ ID NO: 4877883 - DNA, 25 bp, Homo sapien
ctattttcactatagtgatggacat

SEQ ID NO: 4877884 - DNA, 25 bp, Homo sapien
tgaagaagggatgccaaaaggagaa

SEQ ID NO: 4877885 - DNA, 25 bp, Homo sapien
ggcaagtgtaacgatcacccacgta

SEQ ID NO: 4877886 - DNA, 25 bp, Homo sapien
gaggaaatctgtggcaagtgtaacg

SEQ ID NO: 4877887 - DNA, 25 bp, Homo sapien
tctagcatctattgtgaagaaggga

SEQ ID NO: 4877888 - DNA, 25 bp, Homo sapien
agaagttcccctttgttctggctct

SEQ ID NO: 4877889 - DNA, 25 bp, Homo sapien
gtccattagtcacattgctgttcct

SEQ ID NO: 4877890 - DNA, 25 bp, Homo sapien
tttgtgataacatgtctggtggttt

SEQ ID NO: 4877891 - DNA, 25 bp, Homo sapien
taacatgtctggtggtttagaccac

SEQ ID NO: 4877892 - DNA, 25 bp, Homo sapien
tcagcttcataaagaacccacatct

SEQ ID NO: 4877893 - DNA, 25 bp, Homo sapien
tgcccatcttcattgggtatcagcc

SEQ ID NO: 4877894 - DNA, 25 bp, Homo sapien
tgggtatcagccaattctccagaat

SEQ ID NO: 4877895 - DNA, 25 bp, Homo sapien
cttctgctcttgttcagtcatttgc

SEQ ID NO: 4877896 - DNA, 25 bp, Homo sapien
gacagcagcaccctgtttcactgaa

SEQ ID NO: 4877897 - DNA, 25 bp, Homo sapien
gtccaaagagtatttcaaaccagag

SEQ ID NO: 4877898 - DNA, 25 bp, Homo sapien
tgagaatgctgtgttcaccagaaaa

SEQ ID NO: 4877899 - DNA, 25 bp, Homo sapien
caaaccagagtgttgccatatctgc

SEQ ID NO: 4877900 - DNA, 25 bp, Homo sapien
tagtaacagtccagacgtgagcagt

SEQ ID NO: 4877901 - DNA, 25 bp, Homo sapien
acatgaagtgttatcctcccgctgc

SEQ ID NO: 4877902 - DNA, 25 bp, Homo sapien
cagtctaggattagcgaagcagctc

SEQ ID NO: 4877903 - DNA, 25 bp, Homo sapien
tcatggcgtggttgaagctgactca

SEQ ID NO: 4877904 - DNA, 25 bp, Homo sapien
aatgtccctatagcatcccagcatg

SEQ ID NO: 4877905 - DNA, 25 bp, Homo sapien
gagggcaaactctactcagtctatg

SEQ ID NO: 4877906 - DNA, 25 bp, Homo sapien
tgacataacccctgtgtccttggaa

SEQ ID NO: 4877907 - DNA, 25 bp, Homo sapien
taaagcactatacaggaggagccag

SEQ ID NO: 4877908 - DNA, 25 bp, Homo sapien
gactctcagcgctctccccctctgt

SEQ ID NO: 4877909 - DNA, 25 bp, Homo sapien
gtcagctcagtactctcaccttctc

SEQ ID NO: 4877910 - DNA, 25 bp, Homo sapien
tcagctcagtactctcaccttctct

SEQ ID NO: 4877911 - DNA, 25 bp, Homo sapien
agctcagtactctcaccttctctta

SEQ ID NO: 4877912 - DNA, 25 bp, Homo sapien
tccttccgggtaggccgtgagctta

SEQ ID NO: 4877913 - DNA, 25 bp, Homo sapien
tgatttgcctcaggtcccggtttcc

SEQ ID NO: 4877914 - DNA, 25 bp, Homo sapien
gccgtgagcttaattgggataatgc

SEQ ID NO: 4877915 - DNA, 25 bp, Homo sapien
aggctgatttgcctcaggtcccggt

SEQ ID NO: 4877916 - DNA, 25 bp, Homo sapien
caaatccagtcggccacagccagaa

SEQ ID NO: 4877917 - DNA, 25 bp, Homo sapien
tcaaatccagtcggccacagccaga

SEQ ID NO: 4877918 - DNA, 25 bp, Homo sapien
aaatccagtcggccacagccagaat

SEQ ID NO: 4877919 - DNA, 25 bp, Homo sapien
ttgttttgaaaggtgctcatgtatc

SEQ ID NO: 4877920 - DNA, 25 bp, Homo sapien
gaaaggtgctcatgtatctggtcat

SEQ ID NO: 4877921 - DNA, 25 bp, Homo sapien
gggcaccacggcagtcagtgaggtt

SEQ ID NO: 4877922 - DNA, 25 bp, Homo sapien
tcatgtatctggtcatcacactgtt

SEQ ID NO: 4877923 - DNA, 25 bp, Homo sapien
tctctttggcggagttgatattgct

SEQ ID NO: 4877924 - DNA, 25 bp, Homo sapien
tgatattgctgtatattccgggtcc

SEQ ID NO: 4877925 - DNA, 25 bp, Homo sapien
ctctctctctttggcggagttgata

SEQ ID NO: 4877926 - DNA, 25 bp, Homo sapien
ccgggtcctccaaatgagaacaaag

SEQ ID NO: 4877927 - DNA, 25 bp, Homo sapien
tggagacatcttttactctgtgaac

SEQ ID NO: 4877928 - DNA, 25 bp, Homo sapien
tgcgcacttggagacatcttttact

SEQ ID NO: 4877929 - DNA, 25 bp, Homo sapien
ttgtgagtgcgcacttggagacatc

SEQ ID NO: 4877930 - DNA, 25 bp, Homo sapien
tgacatttgtgagtgcgcacttgga

SEQ ID NO: 4877931 - DNA, 25 bp, Homo sapien
aacagagatgtacatggtcaatgta

SEQ ID NO: 4877932 - DNA, 25 bp, Homo sapien
acagagatgtacatggtcaatgtaa

SEQ ID NO: 4877933 - DNA, 25 bp, Homo sapien
tccacatagctattaatgtctcttg

SEQ ID NO: 4877934 - DNA, 25 bp, Homo sapien
agtctccatggttgcaaacatcttg

SEQ ID NO: 4877935 - DNA, 25 bp, Homo sapien
cgtactggggtaacaaggcctatat

SEQ ID NO: 4877936 - DNA, 25 bp, Homo sapien
gcattggtctcttaagcattgatta

SEQ ID NO: 4877937 - DNA, 25 bp, Homo sapien
tgaatgaagctgagctatcagacca

SEQ ID NO: 4877938 - DNA, 25 bp, Homo sapien
gaagctgagctatcagaccagcaat

SEQ ID NO: 4877939 - DNA, 25 bp, Homo sapien
gctgagctatcagaccagcaatgtg

SEQ ID NO: 4877940 - DNA, 25 bp, Homo sapien
gctatcagaccagcaatgtgtaaaa

SEQ ID NO: 4877941 - DNA, 25 bp, Homo sapien
tcctctttccaggaaactgtacttc

SEQ ID NO: 4877942 - DNA, 25 bp, Homo sapien
agccaacacttttactatggttctc

SEQ ID NO: 4877943 - DNA, 25 bp, Homo sapien
tttactatggttctctcctcaccca

SEQ ID NO: 4877944 - DNA, 25 bp, Homo sapien
caggaaactgtacttccccagattt

SEQ ID NO: 4877945 - DNA, 25 bp, Homo sapien
ctggattgtgtttccagatgctcca

SEQ ID NO: 4877946 - DNA, 25 bp, Homo sapien
ctgaaaatggtgtccagagtgatcc

SEQ ID NO: 4877947 - DNA, 25 bp, Homo sapien
ccagatgctccacttgtcagatgac

SEQ ID NO: 4877948 - DNA, 25 bp, Homo sapien
aaatgtgaaggttggtgtcaccacc

SEQ ID NO: 4877949 - DNA, 25 bp, Homo sapien
taagtaaccaagcgcttacttggtg

SEQ ID NO: 4877950 - DNA, 25 bp, Homo sapien
accaagcgcttacttggtgtgctgg

SEQ ID NO: 4877951 - DNA, 25 bp, Homo sapien
agtaaccaagcgcttacttggtgtg

SEQ ID NO: 4877952 - DNA, 25 bp, Homo sapien
taaccaagcgcttacttggtgtgct

SEQ ID NO: 4877953 - DNA, 25 bp, Homo sapien
gaatgtggccttagagatgatgctg

SEQ ID NO: 4877954 - DNA, 25 bp, Homo sapien
gggagcttagaagtggttccaccat

SEQ ID NO: 4877955 - DNA, 25 bp, Homo sapien
catctctgttgttggttatgtctta

SEQ ID NO: 4877956 - DNA, 25 bp, Homo sapien
tagagtgattttactctatccaaga

SEQ ID NO: 4877957 - DNA, 25 bp, Homo sapien
gatttggctcatttaggtagagtga

SEQ ID NO: 4877958 - DNA, 25 bp, Homo sapien
tctccttgacttaaccactgcacag

SEQ ID NO: 4877959 - DNA, 25 bp, Homo sapien
cagcttttgccgtgtgctctgtagt

SEQ ID NO: 4877960 - DNA, 25 bp, Homo sapien
gaagtggacactgtatcatagcaga

SEQ ID NO: 4877961 - DNA, 25 bp, Homo sapien
gctctgtagtatggctctcagggta

SEQ ID NO: 4877962 - DNA, 25 bp, Homo sapien
atatttggctctgaagcttgctgct

SEQ ID NO: 4877963 - DNA, 25 bp, Homo sapien
tatatttggctctgaagcttgctgc

SEQ ID NO: 4877964 - DNA, 25 bp, Homo sapien
cacaggctgcggactggtggcggga

SEQ ID NO: 4877965 - DNA, 25 bp, Homo sapien
gctgcggactggtggcgggataggc

SEQ ID NO: 4877966 - DNA, 25 bp, Homo sapien
gactggtggcgggataggcacaaaa

SEQ ID NO: 4877967 - DNA, 25 bp, Homo sapien
ctggtggcgggataggcacaaaaac

SEQ ID NO: 4877968 - DNA, 25 bp, Homo sapien
gctggcagtgggttcctgggaatga

SEQ ID NO: 4877969 - DNA, 25 bp, Homo sapien
cagtgggttcctgggaatgatcacc

SEQ ID NO: 4877970 - DNA, 25 bp, Homo sapien
gggagctggcagtgggttcctggga

SEQ ID NO: 4877971 - DNA, 25 bp, Homo sapien
ctgagagaatgagaggggagctggc

SEQ ID NO: 4877972 - DNA, 25 bp, Homo sapien
tttaggaccactatcttgtccagtg

SEQ ID NO: 4877973 - DNA, 25 bp, Homo sapien
ctctttaggaccactatcttgtcca

SEQ ID NO: 4877974 - DNA, 25 bp, Homo sapien
tgtccagtggcctggcaaagtcggt

SEQ ID NO: 4877975 - DNA, 25 bp, Homo sapien
gtcggtcttcagcacatacgcgaag

SEQ ID NO: 4877976 - DNA, 25 bp, Homo sapien
ttattcgttggatcgtgcatgtgtg

SEQ ID NO: 4877977 - DNA, 25 bp, Homo sapien
ttcgttggatcgtgcatgtgtgcat

SEQ ID NO: 4877978 - DNA, 25 bp, Homo sapien
tgtgcatgtttctatatccaccaca

SEQ ID NO: 4877979 - DNA, 25 bp, Homo sapien
tgcatgtttctatatccaccacact

SEQ ID NO: 4877980 - DNA, 25 bp, Homo sapien
gaattgtcagaggagcatcagtgtg

SEQ ID NO: 4877981 - DNA, 25 bp, Homo sapien
gattataaggaattgtcagaggagc

SEQ ID NO: 4877982 - DNA, 25 bp, Homo sapien
tcttatacttgactttacacctaac

SEQ ID NO: 4877983 - DNA, 25 bp, Homo sapien
ctctgtaagaaactcatatctctta

SEQ ID NO: 4877984 - DNA, 25 bp, Homo sapien
cactctatcacaagtccttggccat

SEQ ID NO: 4877985 - DNA, 25 bp, Homo sapien
ggccatttcctgttggacaggataa

SEQ ID NO: 4877986 - DNA, 25 bp, Homo sapien
cgcggtttttgtcctggatcttgac

SEQ ID NO: 4877987 - DNA, 25 bp, Homo sapien
gttggacaggataagctccctgcag

SEQ ID NO: 4877988 - DNA, 25 bp, Homo sapien
cagatatggcaggtttaaatcagca

SEQ ID NO: 4877989 - DNA, 25 bp, Homo sapien
tgttcttgcagcagctagtagctct

SEQ ID NO: 4877990 - DNA, 25 bp, Homo sapien
tctggaaaacattgagctctgaaag

SEQ ID NO: 4877991 - DNA, 25 bp, Homo sapien
tgtctcatccgaagtactgtcgaat

SEQ ID NO: 4877992 - DNA, 25 bp, Homo sapien
caaaagttaatcagagcctcctgaa

SEQ ID NO: 4877993 - DNA, 25 bp, Homo sapien
aagaccgagtcaacagctttggaaa

SEQ ID NO: 4877994 - DNA, 25 bp, Homo sapien
tgagtgttgacgcaaaagttaatca

SEQ ID NO: 4877995 - DNA, 25 bp, Homo sapien
aaataaaagaccgagtcaacagctt

SEQ ID NO: 4877996 - DNA, 25 bp, Homo sapien
gctgtcctcggagcttaggcctacc

SEQ ID NO: 4877997 - DNA, 25 bp, Homo sapien
gcatgctgtcctcggagcttaggcc

SEQ ID NO: 4877998 - DNA, 25 bp, Homo sapien
atgctgtcctcggagcttaggccta

SEQ ID NO: 4877999 - DNA, 25 bp, Homo sapien
atagcatgctgtcctcggagcttag

SEQ ID NO: 4878000 - DNA, 25 bp, Homo sapien
aacaggtccagttgttgactcaggc

SEQ ID NO: 4878001 - DNA, 25 bp, Homo sapien
tggagtaacaggtccagttgttgac

SEQ ID NO: 4878002 - DNA, 25 bp, Homo sapien
gatgtgttattggagtaacaggtcc

SEQ ID NO: 4878003 - DNA, 25 bp, Homo sapien
ctgagggatgtgttattggagtaac

SEQ ID NO: 4878004 - DNA, 25 bp, Homo sapien
gggtattaggcaatcccaattcctc

SEQ ID NO: 4878005 - DNA, 25 bp, Homo sapien
tacatctgcctcgtaggttgttggg

SEQ ID NO: 4878006 - DNA, 25 bp, Homo sapien
tgcattacatctgcctcgtaggttg

SEQ ID NO: 4878007 - DNA, 25 bp, Homo sapien
ctacaatgggtattaggcaatccca

SEQ ID NO: 4878008 - DNA, 25 bp, Homo sapien
gagatacttgcactgaccctccaat

SEQ ID NO: 4878009 - DNA, 25 bp, Homo sapien
agtactcgtgggagccataggtgat

SEQ ID NO: 4878010 - DNA, 25 bp, Homo sapien
tccaatgtccaggatggcacacagt

SEQ ID NO: 4878011 - DNA, 25 bp, Homo sapien
tgttgactgatcttaccagacaaag

SEQ ID NO: 4878012 - DNA, 25 bp, Homo sapien
catccggagacctgaaccccaagcc

SEQ ID NO: 4878013 - DNA, 25 bp, Homo sapien
atccggagacctgaaccccaagcca

SEQ ID NO: 4878014 - DNA, 25 bp, Homo sapien
tccggagacctgaaccccaagccat

SEQ ID NO: 4878015 - DNA, 25 bp, Homo sapien
ctgaaaccaggctggcagaacatgg

SEQ ID NO: 4878016 - DNA, 25 bp, Homo sapien
tcaggcaaagactcatcatcaggga

SEQ ID NO: 4878017 - DNA, 25 bp, Homo sapien
caaaggtgattaatctcaggcaaag

SEQ ID NO: 4878018 - DNA, 25 bp, Homo sapien
aggttccatgcaatttctcgaggtg

SEQ ID NO: 4878019 - DNA, 25 bp, Homo sapien
caagcatctccaattgagggagagg

SEQ ID NO: 4878020 - DNA, 25 bp, Homo sapien
tcaagcatctccaattgagggagag

SEQ ID NO: 4878021 - DNA, 25 bp, Homo sapien
aagcatctccaattgagggagaggc

SEQ ID NO: 4878022 - DNA, 25 bp, Homo sapien
tacgcaggcacattccttcactgca

SEQ ID NO: 4878023 - DNA, 25 bp, Homo sapien
tgttgtacgcaggcacattccttca

SEQ ID NO: 4878024 - DNA, 25 bp, Homo sapien
gttgtacgcaggcacattccttcac

SEQ ID NO: 4878025 - DNA, 25 bp, Homo sapien
tgtacgcaggcacattccttcactg

SEQ ID NO: 4878026 - DNA, 25 bp, Homo sapien
gccactatataggaacaatgtaagc

SEQ ID NO: 4878027 - DNA, 25 bp, Homo sapien
tggttctttctgctagtcacacggc

SEQ ID NO: 4878028 - DNA, 25 bp, Homo sapien
caatgtaagcatgagttttccccaa

SEQ ID NO: 4878029 - DNA, 25 bp, Homo sapien
cggctattggagcaaagtttggcca

SEQ ID NO: 4878030 - DNA, 25 bp, Homo sapien
tgctcacactcagaagtttgtgctt

SEQ ID NO: 4878031 - DNA, 25 bp, Homo sapien
gggcaatgctcacactcagaagttt

SEQ ID NO: 4878032 - DNA, 25 bp, Homo sapien
gcaatgctcacactcagaagtttgt

SEQ ID NO: 4878033 - DNA, 25 bp, Homo sapien
gagggcaatgctcacactcagaagt

SEQ ID NO: 4878034 - DNA, 25 bp, Homo sapien
ggcagacgaagaacagtgtttattt

SEQ ID NO: 4878035 - DNA, 25 bp, Homo sapien
tatttgtgtacaaagaacctctgca

SEQ ID NO: 4878036 - DNA, 25 bp, Homo sapien
ttgtgtacaaagaacctctgcacag

SEQ ID NO: 4878037 - DNA, 25 bp, Homo sapien
agaacagtgtttatttgtgtacaaa

SEQ ID NO: 4878038 - DNA, 25 bp, Homo sapien
ttccagcctcacaagtgtttcacat

SEQ ID NO: 4878039 - DNA, 25 bp, Homo sapien
tgagagtggtcccttgacatgatcc

SEQ ID NO: 4878040 - DNA, 25 bp, Homo sapien
aggtgatgagagtggtcccttgaca

SEQ ID NO: 4878041 - DNA, 25 bp, Homo sapien
cagcctcacaagtgtttcacattga

SEQ ID NO: 4878042 - DNA, 25 bp, Homo sapien
acaaagatccagacagttggcaaag

SEQ ID NO: 4878043 - DNA, 25 bp, Homo sapien
tcctttcataacgacaccatcactg

SEQ ID NO: 4878044 - DNA, 25 bp, Homo sapien
cataacgacaccatcactgggaaga

SEQ ID NO: 4878045 - DNA, 25 bp, Homo sapien
gatccagacagttggcaaaggataa

SEQ ID NO: 4878046 - DNA, 25 bp, Homo sapien
tcttgtgtcagtagggtcctgcgaa

SEQ ID NO: 4878047 - DNA, 25 bp, Homo sapien
agggccgaaagtgcatccacagcag

SEQ ID NO: 4878048 - DNA, 25 bp, Homo sapien
agaaaaactctcctgcccagggccg

SEQ ID NO: 4878049 - DNA, 25 bp, Homo sapien
ccctgtggtgtgctgccctgatcac

SEQ ID NO: 4878050 - DNA, 25 bp, Homo sapien
cagtggctccttactgggtctgagc

SEQ ID NO: 4878051 - DNA, 25 bp, Homo sapien
tggctccttactgggtctgagcatc

SEQ ID NO: 4878052 - DNA, 25 bp, Homo sapien
gtctctttcttctgcggtttctagt

SEQ ID NO: 4878053 - DNA, 25 bp, Homo sapien
tgtctctttcttctgcggtttctag

SEQ ID NO: 4878054 - DNA, 25 bp, Homo sapien
ctctgcttctccatgggagaaaacg

SEQ ID NO: 4878055 - DNA, 25 bp, Homo sapien
agatctgctacctggatctctgctt

SEQ ID NO: 4878056 - DNA, 25 bp, Homo sapien
ctacactggaagatctgctacctgg

SEQ ID NO: 4878057 - DNA, 25 bp, Homo sapien
ctgcttctccatgggagaaaacgca

SEQ ID NO: 4878058 - DNA, 25 bp, Homo sapien
tcttactgtttctatgggactgagc

SEQ ID NO: 4878059 - DNA, 25 bp, Homo sapien
tactgtttctatgggactgagctca

SEQ ID NO: 4878060 - DNA, 25 bp, Homo sapien
tgtttctatgggactgagctcagcc

SEQ ID NO: 4878061 - DNA, 25 bp, Homo sapien
tttctatgggactgagctcagcctc

SEQ ID NO: 4878062 - DNA, 25 bp, Homo sapien
ctgtgtggtctctcccataggaata

SEQ ID NO: 4878063 - DNA, 25 bp, Homo sapien
ttgctgaggctccaagatatcctca

SEQ ID NO: 4878064 - DNA, 25 bp, Homo sapien
tggctgatagctattggatagcaca

SEQ ID NO: 4878065 - DNA, 25 bp, Homo sapien
agtcacatgtggctgatagctattg

SEQ ID NO: 4878066 - DNA, 25 bp, Homo sapien
tcccagtccaggaggtcttaggata

SEQ ID NO: 4878067 - DNA, 25 bp, Homo sapien
ggaggaatctccatgcttgactaac

SEQ ID NO: 4878068 - DNA, 25 bp, Homo sapien
tgtccgcttggcagacacctgttga

SEQ ID NO: 4878069 - DNA, 25 bp, Homo sapien
tatagaatcatgcaggatgctccac

SEQ ID NO: 4878070 - DNA, 25 bp, Homo sapien
cctagctgttgaaaaagggatcgtc

SEQ ID NO: 4878071 - DNA, 25 bp, Homo sapien
tgaacacactggattgcccctagct

SEQ ID NO: 4878072 - DNA, 25 bp, Homo sapien
cactctcagggaatgagattcaggc

SEQ ID NO: 4878073 - DNA, 25 bp, Homo sapien
ttcttctgactaccggacttgcctg

SEQ ID NO: 4878074 - DNA, 25 bp, Homo sapien
gtctctcatgcaccccttataccgg

SEQ ID NO: 4878075 - DNA, 25 bp, Homo sapien
tgcacgtgtctctcatgcacccctt

SEQ ID NO: 4878076 - DNA, 25 bp, Homo sapien
tgcatgcacgtgtctctcatgcacc

SEQ ID NO: 4878077 - DNA, 25 bp, Homo sapien
acgtgtctctcatgcaccccttata

SEQ ID NO: 4878078 - DNA, 25 bp, Homo sapien
catgataggagcttggcgcagaaca

SEQ ID NO: 4878079 - DNA, 25 bp, Homo sapien
ggaattaactcctgcactgatggct

SEQ ID NO: 4878080 - DNA, 25 bp, Homo sapien
ctctgggacagtgcaatgggagcca

SEQ ID NO: 4878081 - DNA, 25 bp, Homo sapien
tgccaaccggagtagaatgcccttt

SEQ ID NO: 4878082 - DNA, 25 bp, Homo sapien
ttctctgatgtggtgtttctcactc

SEQ ID NO: 4878083 - DNA, 25 bp, Homo sapien
tctctgatgtggtgtttctcactca

SEQ ID NO: 4878084 - DNA, 25 bp, Homo sapien
tatttgaggcctcacaagctccctc

SEQ ID NO: 4878085 - DNA, 25 bp, Homo sapien
acagctctccggtcatctctggtta

SEQ ID NO: 4878086 - DNA, 25 bp, Homo sapien
aagctccctcgactgactgcattgt

SEQ ID NO: 4878087 - DNA, 25 bp, Homo sapien
ctggtggcatggcaagcacagctct

SEQ ID NO: 4878088 - DNA, 25 bp, Homo sapien
gaaaaagcacccatattccaagatc

SEQ ID NO: 4878089 - DNA, 25 bp, Homo sapien
gcatgtgggtggacagtgcttccat

SEQ ID NO: 4878090 - DNA, 25 bp, Homo sapien
gtgcttcctcattgggcatgtgggt

SEQ ID NO: 4878091 - DNA, 25 bp, Homo sapien
ttgaaaaagcacccatattccaaga

SEQ ID NO: 4878092 - DNA, 25 bp, Homo sapien
ggagctacggttgggtgtgggttga

SEQ ID NO: 4878093 - DNA, 25 bp, Homo sapien
ctatggagctacggttgggtgtggg

SEQ ID NO: 4878094 - DNA, 25 bp, Homo sapien
ctacggttgggtgtgggttgagtga

SEQ ID NO: 4878095 - DNA, 25 bp, Homo sapien
acggttgggtgtgggttgagtgata

SEQ ID NO: 4878096 - DNA, 25 bp, Homo sapien
cagttgttcagtattcacacttatt

SEQ ID NO: 4878097 - DNA, 25 bp, Homo sapien
cttatttcttgtatagcaattgtat

SEQ ID NO: 4878098 - DNA, 25 bp, Homo sapien
ttctctattacagcaacgcatccaa

SEQ ID NO: 4878099 - DNA, 25 bp, Homo sapien
gacccatttacttctgcctatacca

SEQ ID NO: 4878100 - DNA, 25 bp, Homo sapien
gattccagatccctacaacaaagtg

SEQ ID NO: 4878101 - DNA, 25 bp, Homo sapien
ctctggagggaaacacatgcttatt

SEQ ID NO: 4878102 - DNA, 25 bp, Homo sapien
gaaagggcctcattatactccaaaa

SEQ ID NO: 4878103 - DNA, 25 bp, Homo sapien
tccagggtaaccatcaacttgcaag

SEQ ID NO: 4878104 - DNA, 25 bp, Homo sapien
catcttcaatgtaaaggcgagtttt

SEQ ID NO: 4878105 - DNA, 25 bp, Homo sapien
tgtaaaggcgagttttagtatagta

SEQ ID NO: 4878106 - DNA, 25 bp, Homo sapien
acattcttggtagcatcatcttcaa

SEQ ID NO: 4878107 - DNA, 25 bp, Homo sapien
tgtgaaacattcttggtagcatcat

SEQ ID NO: 4878108 - DNA, 25 bp, Homo sapien
caggaagtgcaaaatcgaagggcaa

SEQ ID NO: 4878109 - DNA, 25 bp, Homo sapien
gattcaagatttcaagggctaagca

SEQ ID NO: 4878110 - DNA, 25 bp, Homo sapien
caagcatcatgctgattaggaacga

SEQ ID NO: 4878111 - DNA, 25 bp, Homo sapien
caatatatttagagccaatcggaga

SEQ ID NO: 4878112 - DNA, 25 bp, Homo sapien
cacacctggaatgctgagttcttgg

SEQ ID NO: 4878113 - DNA, 25 bp, Homo sapien
tggattcctgcaagcatagttccct

SEQ ID NO: 4878114 - DNA, 25 bp, Homo sapien
tcacaccaagacacctgagacctgg

SEQ ID NO: 4878115 - DNA, 25 bp, Homo sapien
tttcccagttgcacagccaagatag

SEQ ID NO: 4878116 - DNA, 25 bp, Homo sapien
attcctgagctcagttggcttacga

SEQ ID NO: 4878117 - DNA, 25 bp, Homo sapien
ttacgacaggaagtggatcggcagc

SEQ ID NO: 4878118 - DNA, 25 bp, Homo sapien
ctgagctcagttggcttacgacagg

SEQ ID NO: 4878119 - DNA, 25 bp, Homo sapien
gacaggaagtggatcggcagcctcc

SEQ ID NO: 4878120 - DNA, 25 bp, Homo sapien
tcactactgctgtaacctgaatagg

SEQ ID NO: 4878121 - DNA, 25 bp, Homo sapien
atgcagatgcacgtcaggtggacgt

SEQ ID NO: 4878122 - DNA, 25 bp, Homo sapien
tgtctgcttcgatcatcactactgc

SEQ ID NO: 4878123 - DNA, 25 bp, Homo sapien
caaccttgagagcaacgtgagcaga

SEQ ID NO: 4878124 - DNA, 25 bp, Homo sapien
caaactggcgttctgaactgtttat

SEQ ID NO: 4878125 - DNA, 25 bp, Homo sapien
gcttcctgatactggttccaaactg

SEQ ID NO: 4878126 - DNA, 25 bp, Homo sapien
gatactggttccaaactggcgttct

SEQ ID NO: 4878127 - DNA, 25 bp, Homo sapien
tcctgatactggttccaaactggcg

SEQ ID NO: 4878128 - DNA, 25 bp, Homo sapien
gcttttgggtctgttcgtacttcac

SEQ ID NO: 4878129 - DNA, 25 bp, Homo sapien
tgcttttgggtctgttcgtacttca

SEQ ID NO: 4878130 - DNA, 25 bp, Homo sapien
cccagtgagtttcctttttctgctg

SEQ ID NO: 4878131 - DNA, 25 bp, Homo sapien
accactgtccttatgggcaggccca

SEQ ID NO: 4878132 - DNA, 25 bp, Homo sapien
ccttgcaaagccactttggtgggaa

SEQ ID NO: 4878133 - DNA, 25 bp, Homo sapien
tgggaagggttacctgctacttgga

SEQ ID NO: 4878134 - DNA, 25 bp, Homo sapien
gatctccaggtgatcatctttctct

SEQ ID NO: 4878135 - DNA, 25 bp, Homo sapien
gtctcttcactcaggcttaacaagg

SEQ ID NO: 4878136 - DNA, 25 bp, Homo sapien
ttcactcaggcttaacaaggcatcc

SEQ ID NO: 4878137 - DNA, 25 bp, Homo sapien
cactcaggcttaacaaggcatccac

SEQ ID NO: 4878138 - DNA, 25 bp, Homo sapien
tcttcactcaggcttaacaaggcat

SEQ ID NO: 4878139 - DNA, 25 bp, Homo sapien
taaggctgtcactgttatgacacag

SEQ ID NO: 4878140 - DNA, 25 bp, Homo sapien
tgacacagagggcatttctgtgttc

SEQ ID NO: 4878141 - DNA, 25 bp, Homo sapien
tcactgttatgacacagagggcatt

SEQ ID NO: 4878142 - DNA, 25 bp, Homo sapien
gcagtgggagctgtttaaggctgtc

SEQ ID NO: 4878143 - DNA, 25 bp, Homo sapien
ttcccaaatagtggggcggctgtcc

SEQ ID NO: 4878144 - DNA, 25 bp, Homo sapien
catcctcctcttcacgtctggatgg

SEQ ID NO: 4878145 - DNA, 25 bp, Homo sapien
tcggcctccaccagcaaggttctgg

SEQ ID NO: 4878146 - DNA, 25 bp, Homo sapien
tctggccagatttgttccatttccc

SEQ ID NO: 4878147 - DNA, 25 bp, Homo sapien
aagaaaggcagctgtagatagcctc

SEQ ID NO: 4878148 - DNA, 25 bp, Homo sapien
cctgttggcaatttctgtcagtgta

SEQ ID NO: 4878149 - DNA, 25 bp, Homo sapien
aggcagctgtagatagcctcaccag

SEQ ID NO: 4878150 - DNA, 25 bp, Homo sapien
gcaggtccagagtgacagttctttc

SEQ ID NO: 4878151 - DNA, 25 bp, Homo sapien
cctctcagtgcgagctttaaaatta

SEQ ID NO: 4878152 - DNA, 25 bp, Homo sapien
tcctctcagtgcgagctttaaaatt

SEQ ID NO: 4878153 - DNA, 25 bp, Homo sapien
cgtcctctcagtgcgagctttaaaa

SEQ ID NO: 4878154 - DNA, 25 bp, Homo sapien
tctcagtgcgagctttaaaattatt

SEQ ID NO: 4878155 - DNA, 25 bp, Homo sapien
ggggagaaggtggagagaccctcat

SEQ ID NO: 4878156 - DNA, 25 bp, Homo sapien
agctggatggagaaagcttcaggat

SEQ ID NO: 4878157 - DNA, 25 bp, Homo sapien
cttagctggatggagaaagcttcag

SEQ ID NO: 4878158 - DNA, 25 bp, Homo sapien
atggggagaaggtggagagaccctc

SEQ ID NO: 4878159 - DNA, 25 bp, Homo sapien
ctgagcagaggattggccaagcagg

SEQ ID NO: 4878160 - DNA, 25 bp, Homo sapien
tcctagatgaccaggggccaaggac

SEQ ID NO: 4878161 - DNA, 25 bp, Homo sapien
gatggctgagcagaggattggccaa

SEQ ID NO: 4878162 - DNA, 25 bp, Homo sapien
tgtcccaggtcctagatgaccaggg

SEQ ID NO: 4878163 - DNA, 25 bp, Homo sapien
aatgtcacattcacgattttgtttc

SEQ ID NO: 4878164 - DNA, 25 bp, Homo sapien
ttaatgtcacattcacgattttgtt

SEQ ID NO: 4878165 - DNA, 25 bp, Homo sapien
gtcacattcacgattttgtttctcc

SEQ ID NO: 4878166 - DNA, 25 bp, Homo sapien
tcacattcacgattttgtttctcct

SEQ ID NO: 4878167 - DNA, 25 bp, Homo sapien
atccacagatcatgttggcatctgc

SEQ ID NO: 4878168 - DNA, 25 bp, Homo sapien
tctgcagacagcaaatccagagcct

SEQ ID NO: 4878169 - DNA, 25 bp, Homo sapien
acagatcatgttggcatctgcagac

SEQ ID NO: 4878170 - DNA, 25 bp, Homo sapien
agatcatgttggcatctgcagacag

SEQ ID NO: 4878171 - DNA, 25 bp, Homo sapien
tgcaaatcacgtcagctttgagtct

SEQ ID NO: 4878172 - DNA, 25 bp, Homo sapien
tacggttgattaagaaggttattgc

SEQ ID NO: 4878173 - DNA, 25 bp, Homo sapien
ggcatgtctcccagaattcagactt

SEQ ID NO: 4878174 - DNA, 25 bp, Homo sapien
agctttgagtctggcatgtctccca

SEQ ID NO: 4878175 - DNA, 25 bp, Homo sapien
tcttagagctcttcttaatctttcc

SEQ ID NO: 4878176 - DNA, 25 bp, Homo sapien
gacacagagtcaatttctgcagccc

SEQ ID NO: 4878177 - DNA, 25 bp, Homo sapien
gtagacacagagtcaatttctgcag

SEQ ID NO: 4878178 - DNA, 25 bp, Homo sapien
agagctttcacactgtctggccagc

SEQ ID NO: 4878179 - DNA, 25 bp, Homo sapien
gccttgagagcagcagtagtttctt

SEQ ID NO: 4878180 - DNA, 25 bp, Homo sapien
gtgccttgagagcagcagtagtttc

SEQ ID NO: 4878181 - DNA, 25 bp, Homo sapien
tgccttgagagcagcagtagtttct

SEQ ID NO: 4878182 - DNA, 25 bp, Homo sapien
taggcaaagtatttccctctgttcc

SEQ ID NO: 4878183 - DNA, 25 bp, Homo sapien
ctaggcaaagtatttccctctgttc

SEQ ID NO: 4878184 - DNA, 25 bp, Homo sapien
aatgatgtagaactgattagatggg

SEQ ID NO: 4878185 - DNA, 25 bp, Homo sapien
tcaaatccaagaatgatgtagaact

SEQ ID NO: 4878186 - DNA, 25 bp, Homo sapien
ccaagaatgatgtagaactgattag

SEQ ID NO: 4878187 - DNA, 25 bp, Homo sapien
caaatccaagaatgatgtagaactg

SEQ ID NO: 4878188 - DNA, 25 bp, Homo sapien
gcatttcggttgcttccagcaggca

SEQ ID NO: 4878189 - DNA, 25 bp, Homo sapien
tctgttgggctcagaataagggaca

SEQ ID NO: 4878190 - DNA, 25 bp, Homo sapien
aactaaactgtaaccctgctgaggg

SEQ ID NO: 4878191 - DNA, 25 bp, Homo sapien
cagcaggcaaggtgatcccatttgt

SEQ ID NO: 4878192 - DNA, 25 bp, Homo sapien
agagcaggatttggagtccacatta

SEQ ID NO: 4878193 - DNA, 25 bp, Homo sapien
gcaggatttggagtccacattatgc

SEQ ID NO: 4878194 - DNA, 25 bp, Homo sapien
tttctggagagccttcacaagagca

SEQ ID NO: 4878195 - DNA, 25 bp, Homo sapien
gatgccttttcacgcttgtttgagt

SEQ ID NO: 4878196 - DNA, 25 bp, Homo sapien
ggcatccattttgaaaatcgcatca

SEQ ID NO: 4878197 - DNA, 25 bp, Homo sapien
gcatccattttgaaaatcgcatcat

SEQ ID NO: 4878198 - DNA, 25 bp, Homo sapien
catccattttgaaaatcgcatcatc

SEQ ID NO: 4878199 - DNA, 25 bp, Homo sapien
tcatttggctaaatattggtcacac

SEQ ID NO: 4878200 - DNA, 25 bp, Homo sapien
ctctttctagcttggagactgcaac

SEQ ID NO: 4878201 - DNA, 25 bp, Homo sapien
tctttctagcttggagactgcaacc

SEQ ID NO: 4878202 - DNA, 25 bp, Homo sapien
ctttctagcttggagactgcaaccc

SEQ ID NO: 4878203 - DNA, 25 bp, Homo sapien
tttctagcttggagactgcaacccc

SEQ ID NO: 4878204 - DNA, 25 bp, Homo sapien
tagcaaaggcagaaactccggataa

SEQ ID NO: 4878205 - DNA, 25 bp, Homo sapien
gtagcaaaggcagaaactccggata

SEQ ID NO: 4878206 - DNA, 25 bp, Homo sapien
gttccacgtggctggagcggcctca

SEQ ID NO: 4878207 - DNA, 25 bp, Homo sapien
agttccacgtggctggagcggcctc

SEQ ID NO: 4878208 - DNA, 25 bp, Homo sapien
cacgtggctggagcggcctcagaat

SEQ ID NO: 4878209 - DNA, 25 bp, Homo sapien
tccacgtggctggagcggcctcaga

SEQ ID NO: 4878210 - DNA, 25 bp, Homo sapien
gccacataatgtacaagtagtggaa

SEQ ID NO: 4878211 - DNA, 25 bp, Homo sapien
cataatgtacaagtagtggaataac

SEQ ID NO: 4878212 - DNA, 25 bp, Homo sapien
aagccacataatgtacaagtagtgg

SEQ ID NO: 4878213 - DNA, 25 bp, Homo sapien
cacataatgtacaagtagtggaata

SEQ ID NO: 4878214 - DNA, 25 bp, Homo sapien
gcataaaatgcagaaggcctgaggg

SEQ ID NO: 4878215 - DNA, 25 bp, Homo sapien
gctatgttgatctcaaacgctgggc

SEQ ID NO: 4878216 - DNA, 25 bp, Homo sapien
gcttgtaagtatatgccagcaccta

SEQ ID NO: 4878217 - DNA, 25 bp, Homo sapien
taacagactcagtgttgtagccgaa

SEQ ID NO: 4878218 - DNA, 25 bp, Homo sapien
gataccgctggatctcggactgcca

SEQ ID NO: 4878219 - DNA, 25 bp, Homo sapien
tcagcactggagacgtagagcctgt

SEQ ID NO: 4878220 - DNA, 25 bp, Homo sapien
ggtagtccagccatccaaacgtctt

SEQ ID NO: 4878221 - DNA, 25 bp, Homo sapien
gagataaccccacctggtagtccag

SEQ ID NO: 4878222 - DNA, 25 bp, Homo sapien
gggccgccgagtgttcacggtcgcc

SEQ ID NO: 4878223 - DNA, 25 bp, Homo sapien
acgaagggccgagagcgggctgtag

SEQ ID NO: 4878224 - DNA, 25 bp, Homo sapien
gccgcgatggttcggtctgcaccga

SEQ ID NO: 4878225 - DNA, 25 bp, Homo sapien
tcaggcaggcttcgccggagagtga

SEQ ID NO: 4878226 - DNA, 25 bp, Homo sapien
caccagggcatgactgggttcaaga

SEQ ID NO: 4878227 - DNA, 25 bp, Homo sapien
cagtcataggcataataacaaccca

SEQ ID NO: 4878228 - DNA, 25 bp, Homo sapien
ataaggatacgcagagaagcctgtc

SEQ ID NO: 4878229 - DNA, 25 bp, Homo sapien
tctccttatgaaaggcaccagggca

SEQ ID NO: 4878230 - DNA, 25 bp, Homo sapien
ttcagagcccaggtcttccctaatg

SEQ ID NO: 4878231 - DNA, 25 bp, Homo sapien
tagagaacaagggagtgcaggggag

SEQ ID NO: 4878232 - DNA, 25 bp, Homo sapien
ggaggtaaggaatggggttcagagc

SEQ ID NO: 4878233 - DNA, 25 bp, Homo sapien
ggttcagagcccaggtcttccctaa

SEQ ID NO: 4878234 - DNA, 25 bp, Homo sapien
tgggaattggaagtgggattctaaa

SEQ ID NO: 4878235 - DNA, 25 bp, Homo sapien
ctttccattgggaattggaagtggg

SEQ ID NO: 4878236 - DNA, 25 bp, Homo sapien
cattgggaattggaagtgggattct

SEQ ID NO: 4878237 - DNA, 25 bp, Homo sapien
tctttccattgggaattggaagtgg

SEQ ID NO: 4878238 - DNA, 25 bp, Homo sapien
ctgcagggccctaagagttaatacc

SEQ ID NO: 4878239 - DNA, 25 bp, Homo sapien
tgatcaatctgactctacaatggga

SEQ ID NO: 4878240 - DNA, 25 bp, Homo sapien
cactgcatcataccaggagccagaa

SEQ ID NO: 4878241 - DNA, 25 bp, Homo sapien
tgtctagcacctaaaatgcgatggc

SEQ ID NO: 4878242 - DNA, 25 bp, Homo sapien
ttccagcaactgaatgtacaaggca

SEQ ID NO: 4878243 - DNA, 25 bp, Homo sapien
ccagagccagcccttagagataact

SEQ ID NO: 4878244 - DNA, 25 bp, Homo sapien
cctcctggcatgacagaaagattca

SEQ ID NO: 4878245 - DNA, 25 bp, Homo sapien
cagagtctacatagttcaaagaagc

SEQ ID NO: 4878246 - DNA, 25 bp, Homo sapien
aaaacccattgatcttgccctgatg

SEQ ID NO: 4878247 - DNA, 25 bp, Homo sapien
taggctctgcctaaagtctaaaata

SEQ ID NO: 4878248 - DNA, 25 bp, Homo sapien
agaattctgcaacagtggagaagcc

SEQ ID NO: 4878249 - DNA, 25 bp, Homo sapien
tcactggcgagaatgatcgttttga

SEQ ID NO: 4878250 - DNA, 25 bp, Homo sapien
ctggttccttggctgctatctcctg

SEQ ID NO: 4878251 - DNA, 25 bp, Homo sapien
tttgcatgggccatcctcaatgccc

SEQ ID NO: 4878252 - DNA, 25 bp, Homo sapien
tcacaagggcaggttctgcctgtca

SEQ ID NO: 4878253 - DNA, 25 bp, Homo sapien
tatctcctgttcctcacaagggcag

SEQ ID NO: 4878254 - DNA, 25 bp, Homo sapien
tgatgaagatggctacaactagaca

SEQ ID NO: 4878255 - DNA, 25 bp, Homo sapien
gctgcacaagttatctagaatatgg

SEQ ID NO: 4878256 - DNA, 25 bp, Homo sapien
tgtcatctaggacaggggaccccaa

SEQ ID NO: 4878257 - DNA, 25 bp, Homo sapien
cctgggtttaggaactaggctgcac

SEQ ID NO: 4878258 - DNA, 25 bp, Homo sapien
ccgatacacaaagtgcatggacaat

SEQ ID NO: 4878259 - DNA, 25 bp, Homo sapien
tctggtaggaaacagtgggacccac

SEQ ID NO: 4878260 - DNA, 25 bp, Homo sapien
aacaatagcaatggactctaaagcc

SEQ ID NO: 4878261 - DNA, 25 bp, Homo sapien
agtgggacccacgtgatccgataca

SEQ ID NO: 4878262 - DNA, 25 bp, Homo sapien
aaagacgtatctttgttccactgat

SEQ ID NO: 4878263 - DNA, 25 bp, Homo sapien
ctttgttccactgatgctgcatcac

SEQ ID NO: 4878264 - DNA, 25 bp, Homo sapien
atctttgttccactgatgctgcatc

SEQ ID NO: 4878265 - DNA, 25 bp, Homo sapien
aaaaagacgtatctttgttccactg

SEQ ID NO: 4878266 - DNA, 25 bp, Homo sapien
cactgtacagtgaaggtctaggatt

SEQ ID NO: 4878267 - DNA, 25 bp, Homo sapien
tatgttttagaatgctgccaaggag

SEQ ID NO: 4878268 - DNA, 25 bp, Homo sapien
cttggtaccttctgcaaaatccagg

SEQ ID NO: 4878269 - DNA, 25 bp, Homo sapien
tacagagtctagaatggcaccatcc

SEQ ID NO: 4878270 - DNA, 25 bp, Homo sapien
ctaaaatgccttcgacctgatcaga

SEQ ID NO: 4878271 - DNA, 25 bp, Homo sapien
tctaaaatgccttcgacctgatcag

SEQ ID NO: 4878272 - DNA, 25 bp, Homo sapien
taaaatgccttcgacctgatcagag

SEQ ID NO: 4878273 - DNA, 25 bp, Homo sapien
aacaattaagccattctttatggca

SEQ ID NO: 4878274 - DNA, 25 bp, Homo sapien
tggtgcgctaccacagggactatgg

SEQ ID NO: 4878275 - DNA, 25 bp, Homo sapien
ggcaggagttagaaatcaggtttca

SEQ ID NO: 4878276 - DNA, 25 bp, Homo sapien
ctacacacatgtgcctctaatggtg

SEQ ID NO: 4878277 - DNA, 25 bp, Homo sapien
catgtaggcaaagctagatgttctt

SEQ ID NO: 4878278 - DNA, 25 bp, Homo sapien
tgaaggccactctagtccttgggcc

SEQ ID NO: 4878279 - DNA, 25 bp, Homo sapien
taaggatgccgccaaacagatacca

SEQ ID NO: 4878280 - DNA, 25 bp, Homo sapien
gaacagtgtcacgataattttgtcc

SEQ ID NO: 4878281 - DNA, 25 bp, Homo sapien
tactcagtcacgaaggtgattccga

SEQ ID NO: 4878282 - DNA, 25 bp, Homo sapien
ggcagtaatgcacgaggtcctcaca

SEQ ID NO: 4878283 - DNA, 25 bp, Homo sapien
cctgtgacagacgtgagggctactc

SEQ ID NO: 4878284 - DNA, 25 bp, Homo sapien
aatacagtgagatgtcgtgtggcca

SEQ ID NO: 4878285 - DNA, 25 bp, Homo sapien
atgtgtgcccaaagaccgccatggg

SEQ ID NO: 4878286 - DNA, 25 bp, Homo sapien
tgatgtgtgcccaaagaccgccatg

SEQ ID NO: 4878287 - DNA, 25 bp, Homo sapien
cttgcgatgatactgatgatactcc

SEQ ID NO: 4878288 - DNA, 25 bp, Homo sapien
tctgccagacttgacatttcttgcg

SEQ ID NO: 4878289 - DNA, 25 bp, Homo sapien
tagacagtctggatcactgaagcag

SEQ ID NO: 4878290 - DNA, 25 bp, Homo sapien
gggttacgccaatttaggtctgaca

SEQ ID NO: 4878291 - DNA, 25 bp, Homo sapien
caggtaatccggaagggctcttcga

SEQ ID NO: 4878292 - DNA, 25 bp, Homo sapien
tcttcgaggaagaactgacatgggt

SEQ ID NO: 4878293 - DNA, 25 bp, Homo sapien
gccttttctctggtgcatcatgagc

SEQ ID NO: 4878294 - DNA, 25 bp, Homo sapien
tagccttttctctggtgcatcatga

SEQ ID NO: 4878295 - DNA, 25 bp, Homo sapien
ttagccttttctctggtgcatcatg

SEQ ID NO: 4878296 - DNA, 25 bp, Homo sapien
cttttctctggtgcatcatgagctc

SEQ ID NO: 4878297 - DNA, 25 bp, Homo sapien
caatacacgtgaagagcttaaaaca

SEQ ID NO: 4878298 - DNA, 25 bp, Homo sapien
cattatgacatacagagcaatcctt

SEQ ID NO: 4878299 - DNA, 25 bp, Homo sapien
tgcccctcagcacatacagaaaaga

SEQ ID NO: 4878300 - DNA, 25 bp, Homo sapien
catcttctaagagattgaggctgta

SEQ ID NO: 4878301 - DNA, 25 bp, Homo sapien
taattcaagacgtagacagaacaag

SEQ ID NO: 4878302 - DNA, 25 bp, Homo sapien
gtttctaattcaagacgtagacaga

SEQ ID NO: 4878303 - DNA, 25 bp, Homo sapien
aattcaagacgtagacagaacaaga

SEQ ID NO: 4878304 - DNA, 25 bp, Homo sapien
tctaattcaagacgtagacagaaca

SEQ ID NO: 4878305 - DNA, 25 bp, Homo sapien
gcttaatctcatgacaaatcctaac

SEQ ID NO: 4878306 - DNA, 25 bp, Homo sapien
cagcttaatctcatgacaaatccta

SEQ ID NO: 4878307 - DNA, 25 bp, Homo sapien
agcttaatctcatgacaaatcctaa

SEQ ID NO: 4878308 - DNA, 25 bp, Homo sapien
gagaaatgccgtcaggctgacatgc

SEQ ID NO: 4878309 - DNA, 25 bp, Homo sapien
agagaaatgccgtcaggctgacatg

SEQ ID NO: 4878310 - DNA, 25 bp, Homo sapien
gagagcagccgccatgcgcatatgg

SEQ ID NO: 4878311 - DNA, 25 bp, Homo sapien
aagatgactgtgcaggagccacaag

SEQ ID NO: 4878312 - DNA, 25 bp, Homo sapien
acaagccaacgcctgggagagcagc

SEQ ID NO: 4878313 - DNA, 25 bp, Homo sapien
gagcagccgccatgcgcatatggca

SEQ ID NO: 4878314 - DNA, 25 bp, Homo sapien
agactccccatgtgttatgatttcc

SEQ ID NO: 4878315 - DNA, 25 bp, Homo sapien
gtggctcactccacatgggcagtag

SEQ ID NO: 4878316 - DNA, 25 bp, Homo sapien
tgtggctcactccacatgggcagta

SEQ ID NO: 4878317 - DNA, 25 bp, Homo sapien
actccccatgtgttatgatttccat

SEQ ID NO: 4878318 - DNA, 25 bp, Homo sapien
gggctggtgcatcgcagccttcggt

SEQ ID NO: 4878319 - DNA, 25 bp, Homo sapien
tggtgcatcgcagccttcggtgcct

SEQ ID NO: 4878320 - DNA, 25 bp, Homo sapien
cactattgatgtggccgtcctcaca

SEQ ID NO: 4878321 - DNA, 25 bp, Homo sapien
tgcatcgcagccttcggtgcctcag

SEQ ID NO: 4878322 - DNA, 25 bp, Homo sapien
gttgctggaactacaccccagatgt

SEQ ID NO: 4878323 - DNA, 25 bp, Homo sapien
tgtagttcagggatgccattgaggt

SEQ ID NO: 4878324 - DNA, 25 bp, Homo sapien
gatggtgccttctactctggaactt

SEQ ID NO: 4878325 - DNA, 25 bp, Homo sapien
tgtgatggtgccttctactctggaa

SEQ ID NO: 4878326 - DNA, 25 bp, Homo sapien
ggacctcatggctttagataccata

SEQ ID NO: 4878327 - DNA, 25 bp, Homo sapien
cataaatatgctaatgacctcctca

SEQ ID NO: 4878328 - DNA, 25 bp, Homo sapien
caccagattggtgtatccaatagcc

SEQ ID NO: 4878329 - DNA, 25 bp, Homo sapien
ttttactggagcaccaaaactctgg

SEQ ID NO: 4878330 - DNA, 25 bp, Homo sapien
gaaaccgtctgcctcattgcatgga

SEQ ID NO: 4878331 - DNA, 25 bp, Homo sapien
cttccaagtcgaaaccctcatctac

SEQ ID NO: 4878332 - DNA, 25 bp, Homo sapien
tacatttgctgtactggcaaggagg

SEQ ID NO: 4878333 - DNA, 25 bp, Homo sapien
ggctcacagaatgcagacgtgtact

SEQ ID NO: 4878334 - DNA, 25 bp, Homo sapien
ccaccgttgcaagaacacagtacag

SEQ ID NO: 4878335 - DNA, 25 bp, Homo sapien
tctttaacgttaccagccgagcacc

SEQ ID NO: 4878336 - DNA, 25 bp, Homo sapien
aaagacaaacgccttctgtcgggcg

SEQ ID NO: 4878337 - DNA, 25 bp, Homo sapien
ggctgtccttaacgctgatgctcca

SEQ ID NO: 4878338 - DNA, 25 bp, Homo sapien
catgaactgagcctccttcactgac

SEQ ID NO: 4878339 - DNA, 25 bp, Homo sapien
gaaaggtttttctgcacatccacat

SEQ ID NO: 4878340 - DNA, 25 bp, Homo sapien
aaactgcactctccgctactgatac

SEQ ID NO: 4878341 - DNA, 25 bp, Homo sapien
cctaactgttgattcgcagaaaggt

SEQ ID NO: 4878342 - DNA, 25 bp, Homo sapien
tcccaaaatgagtgtccaagcctaa

SEQ ID NO: 4878343 - DNA, 25 bp, Homo sapien
ctttgggatatcataataccgttgc

SEQ ID NO: 4878344 - DNA, 25 bp, Homo sapien
gcatttgacatcacttagagctact

SEQ ID NO: 4878345 - DNA, 25 bp, Homo sapien
gtctttaagacccagccctaggcat

SEQ ID NO: 4878346 - DNA, 25 bp, Homo sapien
gagctacttcctacatctttccatg

SEQ ID NO: 4878347 - DNA, 25 bp, Homo sapien
aatgagtattttatggatggtaggc

SEQ ID NO: 4878348 - DNA, 25 bp, Homo sapien
ggcagaggtcacaggaatgctgtcc

SEQ ID NO: 4878349 - DNA, 25 bp, Homo sapien
atgagtattttatggatggtaggca

SEQ ID NO: 4878350 - DNA, 25 bp, Homo sapien
aaaaaatgttcccaggctctccatc

SEQ ID NO: 4878351 - DNA, 25 bp, Homo sapien
ttccacttccttagctctttcctgg

SEQ ID NO: 4878352 - DNA, 25 bp, Homo sapien
ctggctgtaggaagagacctggaaa

SEQ ID NO: 4878353 - DNA, 25 bp, Homo sapien
tctttcctggaagatggtctggctg

SEQ ID NO: 4878354 - DNA, 25 bp, Homo sapien
cccgacaacatcctgcataatgcag

SEQ ID NO: 4878355 - DNA, 25 bp, Homo sapien
gagacttcaggttatagcactgagg

SEQ ID NO: 4878356 - DNA, 25 bp, Homo sapien
tagaaaagagatcatatcacccgac

SEQ ID NO: 4878357 - DNA, 25 bp, Homo sapien
tacatattgcagaattctgtctggc

SEQ ID NO: 4878358 - DNA, 25 bp, Homo sapien
ctggcgatggcagatgcaaacctcc

SEQ ID NO: 4878359 - DNA, 25 bp, Homo sapien
ctcagctccgcaagtgctggcgatg

SEQ ID NO: 4878360 - DNA, 25 bp, Homo sapien
ggagcccccggctttcgtatcagag

SEQ ID NO: 4878361 - DNA, 25 bp, Homo sapien
ggctttcgtatcagagcttcttata

SEQ ID NO: 4878362 - DNA, 25 bp, Homo sapien
tggttactaagcagacgagctgagg

SEQ ID NO: 4878363 - DNA, 25 bp, Homo sapien
tgggatcacaagagggagcaacatg

SEQ ID NO: 4878364 - DNA, 25 bp, Homo sapien
gatcatcacgcagccacatacaaga

SEQ ID NO: 4878365 - DNA, 25 bp, Homo sapien
cactaagtacacctgcactcgggta

SEQ ID NO: 4878366 - DNA, 25 bp, Homo sapien
gatgagtcattgacaaggtacaaac

SEQ ID NO: 4878367 - DNA, 25 bp, Homo sapien
gaggatgatgagtcattgacaaggt

SEQ ID NO: 4878368 - DNA, 25 bp, Homo sapien
gagaggatgatgagtcattgacaag

SEQ ID NO: 4878369 - DNA, 25 bp, Homo sapien
gatgatgagtcattgacaaggtaca

SEQ ID NO: 4878370 - DNA, 25 bp, Homo sapien
ggaatctgatctctgagtcattctc

SEQ ID NO: 4878371 - DNA, 25 bp, Homo sapien
gaatctgatctctgagtcattctct

SEQ ID NO: 4878372 - DNA, 25 bp, Homo sapien
aatctgatctctgagtcattctctt

SEQ ID NO: 4878373 - DNA, 25 bp, Homo sapien
tgtcgtgccgactctcctgattcct

SEQ ID NO: 4878374 - DNA, 25 bp, Homo sapien
gtcgtgccgactctcctgattcctg

SEQ ID NO: 4878375 - DNA, 25 bp, Homo sapien
cacctgaacaggcaggcatagtaag

SEQ ID NO: 4878376 - DNA, 25 bp, Homo sapien
taagggacagtcacttgagaggctt

SEQ ID NO: 4878377 - DNA, 25 bp, Homo sapien
tgactgtcatggtgagtgaaagctg

SEQ ID NO: 4878378 - DNA, 25 bp, Homo sapien
gaggaaaggtctccactgactgtca

SEQ ID NO: 4878379 - DNA, 25 bp, Homo sapien
gtgtgcaaccatgctcatttaaaaa

SEQ ID NO: 4878380 - DNA, 25 bp, Homo sapien
gtctcacatctaccaatgaggagat

SEQ ID NO: 4878381 - DNA, 25 bp, Homo sapien
tgtgtgcaaccatgctcatttaaaa

SEQ ID NO: 4878382 - DNA, 25 bp, Homo sapien
atgggggtctcacatctaccaatga

SEQ ID NO: 4878383 - DNA, 25 bp, Homo sapien
aatgttcaactacaactaaacataa

SEQ ID NO: 4878384 - DNA, 25 bp, Homo sapien
ctacaactaaacataaataacccag

SEQ ID NO: 4878385 - DNA, 25 bp, Homo sapien
tactttggcttaaccctcttggaga

SEQ ID NO: 4878386 - DNA, 25 bp, Homo sapien
tataagccagtcaagtgagaaccag

SEQ ID NO: 4878387 - DNA, 25 bp, Homo sapien
taatgtgtagtgaccaaagactgct

SEQ ID NO: 4878388 - DNA, 25 bp, Homo sapien
ggtagcacttcaaagccaggtttca

SEQ ID NO: 4878389 - DNA, 25 bp, Homo sapien
ttgtgcaatatcacataagtcagtc

SEQ ID NO: 4878390 - DNA, 25 bp, Homo sapien
gtgcaatatcacataagtcagtcat

SEQ ID NO: 4878391 - DNA, 25 bp, Homo sapien
cttgtgcaatatcacataagtcagt

SEQ ID NO: 4878392 - DNA, 25 bp, Homo sapien
tgtgcaatatcacataagtcagtca

SEQ ID NO: 4878393 - DNA, 25 bp, Homo sapien
gcattaacatttggcccactacaga

SEQ ID NO: 4878394 - DNA, 25 bp, Homo sapien
tcaccttttcgagaggcattaacat

SEQ ID NO: 4878395 - DNA, 25 bp, Homo sapien
tcgagaggcattaacatttggccca

SEQ ID NO: 4878396 - DNA, 25 bp, Homo sapien
catgttcaccttttcgagaggcatt

SEQ ID NO: 4878397 - DNA, 25 bp, Homo sapien
tggtgatgaccagaatctgcctgtg

SEQ ID NO: 4878398 - DNA, 25 bp, Homo sapien
cctgagctgtgataaatgtcctggt

SEQ ID NO: 4878399 - DNA, 25 bp, Homo sapien
gagctacagccgacgtgattataaa

SEQ ID NO: 4878400 - DNA, 25 bp, Homo sapien
gggctgagccaaaacccttcatggg

SEQ ID NO: 4878401 - DNA, 25 bp, Homo sapien
gtgtgttgcaaccacgttcacaata

SEQ ID NO: 4878402 - DNA, 25 bp, Homo sapien
tagaaactatcaatctcagtgaact

SEQ ID NO: 4878403 - DNA, 25 bp, Homo sapien
cacatgcacatattatgtgtgttgc

SEQ ID NO: 4878404 - DNA, 25 bp, Homo sapien
tgttgcaaccacgttcacaatagca

SEQ ID NO: 4878405 - DNA, 25 bp, Homo sapien
cagtcttcacaaccctcagaacagg

SEQ ID NO: 4878406 - DNA, 25 bp, Homo sapien
gagtatttgtctacatcccttgagg

SEQ ID NO: 4878407 - DNA, 25 bp, Homo sapien
cctcatccgggaagtacaaggagcc

SEQ ID NO: 4878408 - DNA, 25 bp, Homo sapien
cagagaaagccgctgtagccagact

SEQ ID NO: 4878409 - DNA, 25 bp, Homo sapien
tggaccctgcaagtacatgaatgat

SEQ ID NO: 4878410 - DNA, 25 bp, Homo sapien
tacaagttggcaagtgctccagctc

SEQ ID NO: 4878411 - DNA, 25 bp, Homo sapien
tatggcgtaggtggaaatcaattca

SEQ ID NO: 4878412 - DNA, 25 bp, Homo sapien
tatgtaaacggtaaatcctccagca

SEQ ID NO: 4878413 - DNA, 25 bp, Homo sapien
agattgagcaagcaaatggcccata

SEQ ID NO: 4878414 - DNA, 25 bp, Homo sapien
tcactatattttaatccagtcccat

SEQ ID NO: 4878415 - DNA, 25 bp, Homo sapien
gagcaagcaaatggcccatatataa

SEQ ID NO: 4878416 - DNA, 25 bp, Homo sapien
tgctctgcaaacctctttattagat

SEQ ID NO: 4878417 - DNA, 25 bp, Homo sapien
gaaggtgtcacccacgtcaatgctg

SEQ ID NO: 4878418 - DNA, 25 bp, Homo sapien
gctcctacaaccgttctgaaggtgt

SEQ ID NO: 4878419 - DNA, 25 bp, Homo sapien
caggctgactctttgtgctcctaca

SEQ ID NO: 4878420 - DNA, 25 bp, Homo sapien
tgccagcaagtgacaccaggctgac

SEQ ID NO: 4878421 - DNA, 25 bp, Homo sapien
aaagagattcacaggcttgtacata

SEQ ID NO: 4878422 - DNA, 25 bp, Homo sapien
tatgtttggcttgtaattcggaatc

SEQ ID NO: 4878423 - DNA, 25 bp, Homo sapien
tattataaatggctacaccctgttg

SEQ ID NO: 4878424 - DNA, 25 bp, Homo sapien
aaaataacgctatcttgaggaaagt

SEQ ID NO: 4878425 - DNA, 25 bp, Homo sapien
catgggcattcactccagctgttac

SEQ ID NO: 4878426 - DNA, 25 bp, Homo sapien
agaaatgtgtcatctacactgagca

SEQ ID NO: 4878427 - DNA, 25 bp, Homo sapien
ttcaaggcacctttccacattcgca

SEQ ID NO: 4878428 - DNA, 25 bp, Homo sapien
ggcaaaacagtcaaggtttacagga

SEQ ID NO: 4878429 - DNA, 25 bp, Homo sapien
catattctgaggaaagtcgatttgc

SEQ ID NO: 4878430 - DNA, 25 bp, Homo sapien
tctgattccagcgaagaccatctcc

SEQ ID NO: 4878431 - DNA, 25 bp, Homo sapien
ggtacaagccgatgagcaatgaaat

SEQ ID NO: 4878432 - DNA, 25 bp, Homo sapien
tggtgaccccaaagcactcgggaat

SEQ ID NO: 4878433 - DNA, 25 bp, Homo sapien
ctataattctgatgcctgaatcttc

SEQ ID NO: 4878434 - DNA, 25 bp, Homo sapien
ataattctgatgcctgaatcttctc

SEQ ID NO: 4878435 - DNA, 25 bp, Homo sapien
ctctttctgaccttagcattgccat

SEQ ID NO: 4878436 - DNA, 25 bp, Homo sapien
tataattctgatgcctgaatcttct

SEQ ID NO: 4878437 - DNA, 25 bp, Homo sapien
ggcgggtgacatcacggctctagca

SEQ ID NO: 4878438 - DNA, 25 bp, Homo sapien
cggccgagggtcgtgggccgcagct

SEQ ID NO: 4878439 - DNA, 25 bp, Homo sapien
gacatcacggctctagcaacagaga

SEQ ID NO: 4878440 - DNA, 25 bp, Homo sapien
gctcagtagctgttttcccgaccgc

SEQ ID NO: 4878441 - DNA, 25 bp, Homo sapien
tttaatctgcttcgctgcctccttt

SEQ ID NO: 4878442 - DNA, 25 bp, Homo sapien
caggtctttgtgttcaactgcaggc

SEQ ID NO: 4878443 - DNA, 25 bp, Homo sapien
tcacagctcattaaccgccacggtg

SEQ ID NO: 4878444 - DNA, 25 bp, Homo sapien
cgccacggtggctttcatacacttt

SEQ ID NO: 4878445 - DNA, 25 bp, Homo sapien
acatgtacatgaagcgccaagggcg

SEQ ID NO: 4878446 - DNA, 25 bp, Homo sapien
catgtacatgaagcgccaagggcgg

SEQ ID NO: 4878447 - DNA, 25 bp, Homo sapien
tacatgaagcgccaagggcggcggg

SEQ ID NO: 4878448 - DNA, 25 bp, Homo sapien
atgaagcgccaagggcggcgggtgc

SEQ ID NO: 4878449 - DNA, 25 bp, Homo sapien
cccggcagccgtgttggatgctctt

SEQ ID NO: 4878450 - DNA, 25 bp, Homo sapien
tctttccccggcagccgtgttggat

SEQ ID NO: 4878451 - DNA, 25 bp, Homo sapien
gcagccgtgttggatgctcttctgg

SEQ ID NO: 4878452 - DNA, 25 bp, Homo sapien
tgctcttctgggcgcctccgcaagg

SEQ ID NO: 4878453 - DNA, 25 bp, Homo sapien
tcttcggctgactccacaagctggt

SEQ ID NO: 4878454 - DNA, 25 bp, Homo sapien
caagtctgacttagaccgctggagg

SEQ ID NO: 4878455 - DNA, 25 bp, Homo sapien
gctggtcaccttgcggatgtccgaa

SEQ ID NO: 4878456 - DNA, 25 bp, Homo sapien
agctgatcatgcttgcgctgcggaa

SEQ ID NO: 4878457 - DNA, 25 bp, Homo sapien
tgaaacttttggcagatgacgcgtg

SEQ ID NO: 4878458 - DNA, 25 bp, Homo sapien
ttaattaagacacaatagcgcggga

SEQ ID NO: 4878459 - DNA, 25 bp, Homo sapien
caacacaaagagtggagaagctcac

SEQ ID NO: 4878460 - DNA, 25 bp, Homo sapien
tgacgcgtgttcagccaggctctgt

SEQ ID NO: 4878461 - DNA, 25 bp, Homo sapien
caatgactgcttcactaagtggcaa

SEQ ID NO: 4878462 - DNA, 25 bp, Homo sapien
tgataggcagcactagagaccatgg

SEQ ID NO: 4878463 - DNA, 25 bp, Homo sapien
taaacgattaacgtcaggctcacca

SEQ ID NO: 4878464 - DNA, 25 bp, Homo sapien
tacacactgaatcggacacaaaacg

SEQ ID NO: 4878465 - DNA, 25 bp, Homo sapien
acatttcaaaggtgtgcctccaagg

SEQ ID NO: 4878466 - DNA, 25 bp, Homo sapien
cacaagtgtgaactgagatgctgca

SEQ ID NO: 4878467 - DNA, 25 bp, Homo sapien
cgtgcctaccatgatacctgaaatg

SEQ ID NO: 4878468 - DNA, 25 bp, Homo sapien
cagagactgtgttgttgactatggc

SEQ ID NO: 4878469 - DNA, 25 bp, Homo sapien
tgttcagcactgtagaaagtgacat

SEQ ID NO: 4878470 - DNA, 25 bp, Homo sapien
cataagccgagttattttacagggc

SEQ ID NO: 4878471 - DNA, 25 bp, Homo sapien
tagaaagtgacataagccgagttat

SEQ ID NO: 4878472 - DNA, 25 bp, Homo sapien
cttgttcagcactgtagaaagtgac

SEQ ID NO: 4878473 - DNA, 25 bp, Homo sapien
ggtgagtcccaggtattagaggaag

SEQ ID NO: 4878474 - DNA, 25 bp, Homo sapien
aggtgagtcccaggtattagaggaa

SEQ ID NO: 4878475 - DNA, 25 bp, Homo sapien
tgagtcccaggtattagaggaaggg

SEQ ID NO: 4878476 - DNA, 25 bp, Homo sapien
gtgagtcccaggtattagaggaagg

SEQ ID NO: 4878477 - DNA, 25 bp, Homo sapien
aaaacagttatccatgctgtcccag

SEQ ID NO: 4878478 - DNA, 25 bp, Homo sapien
ctaaggtagacagagcataaaatgc

SEQ ID NO: 4878479 - DNA, 25 bp, Homo sapien
gtatgtcggtgtgaacacggccaca

SEQ ID NO: 4878480 - DNA, 25 bp, Homo sapien
tacttgcccacgatatgaacccagt

SEQ ID NO: 4878481 - DNA, 25 bp, Homo sapien
tgatggccccaatagctccaggact

SEQ ID NO: 4878482 - DNA, 25 bp, Homo sapien
tgggagatggcacactctctaactg

SEQ ID NO: 4878483 - DNA, 25 bp, Homo sapien
agctcggccttactgcacctgatgg

SEQ ID NO: 4878484 - DNA, 25 bp, Homo sapien
tctttcagaactgcaagccagatgg

SEQ ID NO: 4878485 - DNA, 25 bp, Homo sapien
taatggatgaggtggataagatcgc

SEQ ID NO: 4878486 - DNA, 25 bp, Homo sapien
ggataagatcgctgctccactgaag

SEQ ID NO: 4878487 - DNA, 25 bp, Homo sapien
ttggcaatagagtaatggatgaggt

SEQ ID NO: 4878488 - DNA, 25 bp, Homo sapien
ctgggcattggcaatagagtaatgg

SEQ ID NO: 4878489 - DNA, 25 bp, Homo sapien
gagaagcaatttgagccctgtggag

SEQ ID NO: 4878490 - DNA, 25 bp, Homo sapien
cagccagtcacagactggtgtgtct

SEQ ID NO: 4878491 - DNA, 25 bp, Homo sapien
ccctgtggagtatacacagttattc

SEQ ID NO: 4878492 - DNA, 25 bp, Homo sapien
tctctcgtggaggagaagcaatttg

SEQ ID NO: 4878493 - DNA, 25 bp, Homo sapien
cttgacgtcccattgccaaatgctc

SEQ ID NO: 4878494 - DNA, 25 bp, Homo sapien
actgtcacttgacgtcccattgcca

SEQ ID NO: 4878495 - DNA, 25 bp, Homo sapien
aagtctcagcccatgctgggcagac

SEQ ID NO: 4878496 - DNA, 25 bp, Homo sapien
tgtcacttgacgtcccattgccaaa

SEQ ID NO: 4878497 - DNA, 25 bp, Homo sapien
tctctggccccactctggcaagatc

SEQ ID NO: 4878498 - DNA, 25 bp, Homo sapien
tctggccccactctggcaagatcct

SEQ ID NO: 4878499 - DNA, 25 bp, Homo sapien
ctggccccactctggcaagatcctc

SEQ ID NO: 4878500 - DNA, 25 bp, Homo sapien
caaatcacagcgttcactcctaagg

SEQ ID NO: 4878501 - DNA, 25 bp, Homo sapien
gatccttcctgatgtatgtccagtg

SEQ ID NO: 4878502 - DNA, 25 bp, Homo sapien
caaataaagagagtgactactgcgg

SEQ ID NO: 4878503 - DNA, 25 bp, Homo sapien
tcctaaggttcgctgaaagcatgtt

SEQ ID NO: 4878504 - DNA, 25 bp, Homo sapien
aggcccagttgctctattcccattc

SEQ ID NO: 4878505 - DNA, 25 bp, Homo sapien
ccactgccacgaactcagcatagat

SEQ ID NO: 4878506 - DNA, 25 bp, Homo sapien
gccacgaactcagcatagatttttc

SEQ ID NO: 4878507 - DNA, 25 bp, Homo sapien
tgggtttttatctccagccaggccc

SEQ ID NO: 4878508 - DNA, 25 bp, Homo sapien
cagagacaacccatatcagtggtat

SEQ ID NO: 4878509 - DNA, 25 bp, Homo sapien
gcaaacatgtcttacctggagggag

SEQ ID NO: 4878510 - DNA, 25 bp, Homo sapien
gcaatggggaaatccgccaccatga

SEQ ID NO: 4878511 - DNA, 25 bp, Homo sapien
taattgactgaagttcaacaggctg

SEQ ID NO: 4878512 - DNA, 25 bp, Homo sapien
ggccatagggtgaagctccaagccc

SEQ ID NO: 4878513 - DNA, 25 bp, Homo sapien
ctgggaaaggccatagggtgaagct

SEQ ID NO: 4878514 - DNA, 25 bp, Homo sapien
tttgtttaagtcctccatgtaagac

SEQ ID NO: 4878515 - DNA, 25 bp, Homo sapien
ctgttttgtttaagtcctccatgta

SEQ ID NO: 4878516 - DNA, 25 bp, Homo sapien
gaaggctttcaagctggagtctgca

SEQ ID NO: 4878517 - DNA, 25 bp, Homo sapien
tcaagggtgaaggctttcaagctgg

SEQ ID NO: 4878518 - DNA, 25 bp, Homo sapien
ggtgaaggctttcaagctggagtct

SEQ ID NO: 4878519 - DNA, 25 bp, Homo sapien
caagggtgaaggctttcaagctgga

SEQ ID NO: 4878520 - DNA, 25 bp, Homo sapien
cagttttgcggttgcctctcctcag

SEQ ID NO: 4878521 - DNA, 25 bp, Homo sapien
gaagtacttccagatggtggatctc

SEQ ID NO: 4878522 - DNA, 25 bp, Homo sapien
aggaacaccgcatcgtgcagctgct

SEQ ID NO: 4878523 - DNA, 25 bp, Homo sapien
tcttatgtcgtttgcagccagggac

SEQ ID NO: 4878524 - DNA, 25 bp, Homo sapien
ttcagccttcgagaatctgacaatt

SEQ ID NO: 4878525 - DNA, 25 bp, Homo sapien
cctgtcttgctaggccctaactctt

SEQ ID NO: 4878526 - DNA, 25 bp, Homo sapien
tttcagccttcgagaatctgacaat

SEQ ID NO: 4878527 - DNA, 25 bp, Homo sapien
catttcagccttcgagaatctgaca

SEQ ID NO: 4878528 - DNA, 25 bp, Homo sapien
gatggcaactgcttatgaacatggg

SEQ ID NO: 4878529 - DNA, 25 bp, Homo sapien
cagtactacaacaatcaggtgatgg

SEQ ID NO: 4878530 - DNA, 25 bp, Homo sapien
aatgtcttagcaccagcaggctttc

SEQ ID NO: 4878531 - DNA, 25 bp, Homo sapien
gatctaggtgggtatgcgaaactcc

SEQ ID NO: 4878532 - DNA, 25 bp, Homo sapien
ctaacattcctatacattaacaaca

SEQ ID NO: 4878533 - DNA, 25 bp, Homo sapien
aacatagtattgtaagacctagtca

SEQ ID NO: 4878534 - DNA, 25 bp, Homo sapien
tattgtaagacctagtcagagcaat

SEQ ID NO: 4878535 - DNA, 25 bp, Homo sapien
ataccctttctcagcactcctattc

SEQ ID NO: 4878536 - DNA, 25 bp, Homo sapien
aagaaaaccccaggatctgatggat

SEQ ID NO: 4878537 - DNA, 25 bp, Homo sapien
tgctaggaacacatctatgcacaca

SEQ ID NO: 4878538 - DNA, 25 bp, Homo sapien
caaaggaaatgttaccatggatccc

SEQ ID NO: 4878539 - DNA, 25 bp, Homo sapien
gaggccactggctagactaataaga

SEQ ID NO: 4878540 - DNA, 25 bp, Homo sapien
cccatgctctgtttaatgagaaaaa

SEQ ID NO: 4878541 - DNA, 25 bp, Homo sapien
tccattaacagcaaaaacgattttc

SEQ ID NO: 4878542 - DNA, 25 bp, Homo sapien
tctaagtaagatagaccccatgctc

SEQ ID NO: 4878543 - DNA, 25 bp, Homo sapien
aattcttcagggttcagtataattg

SEQ ID NO: 4878544 - DNA, 25 bp, Homo sapien
aatatttctaccacttttttgatgt

SEQ ID NO: 4878545 - DNA, 25 bp, Homo sapien
agattccctcttgccatagctcttg

SEQ ID NO: 4878546 - DNA, 25 bp, Homo sapien
ctcttgccatagctcttgctgtatc

SEQ ID NO: 4878547 - DNA, 25 bp, Homo sapien
gacccaatagttattcaagagcatg

SEQ ID NO: 4878548 - DNA, 25 bp, Homo sapien
ttacatgaccttacttcaaagtggc

SEQ ID NO: 4878549 - DNA, 25 bp, Homo sapien
tccatgcaagtgtactagttacaac

SEQ ID NO: 4878550 - DNA, 25 bp, Homo sapien
gatcctatcatccaagtactgaatg

SEQ ID NO: 4878551 - DNA, 25 bp, Homo sapien
tctctccccataaaggtaatgactg

SEQ ID NO: 4878552 - DNA, 25 bp, Homo sapien
taagctccaagatgttgagactcat

SEQ ID NO: 4878553 - DNA, 25 bp, Homo sapien
gatgtaagctccaagatgttgagac

SEQ ID NO: 4878554 - DNA, 25 bp, Homo sapien
gtaagctccaagatgttgagactca

SEQ ID NO: 4878555 - DNA, 25 bp, Homo sapien
tgtaagctccaagatgttgagactc

SEQ ID NO: 4878556 - DNA, 25 bp, Homo sapien
tgttggagaggctcatttgctattt

SEQ ID NO: 4878557 - DNA, 25 bp, Homo sapien
tccctttagaatgttggagaggctc

SEQ ID NO: 4878558 - DNA, 25 bp, Homo sapien
gtgaatagtccctttagaatgttgg

SEQ ID NO: 4878559 - DNA, 25 bp, Homo sapien
ggagaggctcatttgctatttcttt

SEQ ID NO: 4878560 - DNA, 25 bp, Homo sapien
tcttgtaggtagtcagctcagccgg

SEQ ID NO: 4878561 - DNA, 25 bp, Homo sapien
caagctttcacgagtggtgtctaca

SEQ ID NO: 4878562 - DNA, 25 bp, Homo sapien
caagctgttaagtcctagtcctgag

SEQ ID NO: 4878563 - DNA, 25 bp, Homo sapien
taatagcacggtgtgtaccagtggg

SEQ ID NO: 4878564 - DNA, 25 bp, Homo sapien
cagcagtgctgcctaaagttgaggg

SEQ ID NO: 4878565 - DNA, 25 bp, Homo sapien
atgccaccaggtaagtcaccgggag

SEQ ID NO: 4878566 - DNA, 25 bp, Homo sapien
cagtgctgcctaaagttgagggaag

SEQ ID NO: 4878567 - DNA, 25 bp, Homo sapien
acttcatcatgccaccaggtaagtc

SEQ ID NO: 4878568 - DNA, 25 bp, Homo sapien
agcagtagaatatgatcaacaaggc

SEQ ID NO: 4878569 - DNA, 25 bp, Homo sapien
agaatatgatcaacaaggcagacac

SEQ ID NO: 4878570 - DNA, 25 bp, Homo sapien
aagaaagcagtagaatatgatcaac

SEQ ID NO: 4878571 - DNA, 25 bp, Homo sapien
cagtagaatatgatcaacaaggcag

SEQ ID NO: 4878572 - DNA, 25 bp, Homo sapien
tccacatgaggtaggagtggttctc

SEQ ID NO: 4878573 - DNA, 25 bp, Homo sapien
tctgaagtgtgaggtaatggcaccc

SEQ ID NO: 4878574 - DNA, 25 bp, Homo sapien
caggagcagtgactttgtattgcca

SEQ ID NO: 4878575 - DNA, 25 bp, Homo sapien
gctggacgctcaggtcagtttcact

SEQ ID NO: 4878576 - DNA, 25 bp, Homo sapien
tgacagccacagtaatcccatgata

SEQ ID NO: 4878577 - DNA, 25 bp, Homo sapien
ggctacttggtctaacattgctccc

SEQ ID NO: 4878578 - DNA, 25 bp, Homo sapien
tactcaacctgtctactcggacggc

SEQ ID NO: 4878579 - DNA, 25 bp, Homo sapien
aattgctcctgtaaaaatctctggg

SEQ ID NO: 4878580 - DNA, 25 bp, Homo sapien
tcttctgggcatcctttgttgtccc

SEQ ID NO: 4878581 - DNA, 25 bp, Homo sapien
tctgagcctaggagcactttgtggt

SEQ ID NO: 4878582 - DNA, 25 bp, Homo sapien
ttgtcccttgaggtgtggctggtgc

SEQ ID NO: 4878583 - DNA, 25 bp, Homo sapien
tgcctctggtctctcagggttcttc

SEQ ID NO: 4878584 - DNA, 25 bp, Homo sapien
actgccttggcaaacccccttatga

SEQ ID NO: 4878585 - DNA, 25 bp, Homo sapien
ttcttcctcacatccatggctactg

SEQ ID NO: 4878586 - DNA, 25 bp, Homo sapien
tgacctttcctgttgcagtgcccat

SEQ ID NO: 4878587 - DNA, 25 bp, Homo sapien
ccccttatgacctttcctgttgcag

SEQ ID NO: 4878588 - DNA, 25 bp, Homo sapien
catgcttcttgcagggaatgtggat

SEQ ID NO: 4878589 - DNA, 25 bp, Homo sapien
cagggaatgtggattctgctgctgc

SEQ ID NO: 4878590 - DNA, 25 bp, Homo sapien
ttcttgcagggaatgtggattctgc

SEQ ID NO: 4878591 - DNA, 25 bp, Homo sapien
gcttcttcccctcccggcttctgct

SEQ ID NO: 4878592 - DNA, 25 bp, Homo sapien
tgagagttgagggtagaactctcag

SEQ ID NO: 4878593 - DNA, 25 bp, Homo sapien
ggcacagtgcgtgggatgaaaggta

SEQ ID NO: 4878594 - DNA, 25 bp, Homo sapien
agagttgagggtagaactctcagag

SEQ ID NO: 4878595 - DNA, 25 bp, Homo sapien
agttgagggtagaactctcagagtc

SEQ ID NO: 4878596 - DNA, 25 bp, Homo sapien
tgtgcctgctgacctctgacatcca

SEQ ID NO: 4878597 - DNA, 25 bp, Homo sapien
cctgctgacctctgacatccagtcc

SEQ ID NO: 4878598 - DNA, 25 bp, Homo sapien
tgcctgctgacctctgacatccagt

SEQ ID NO: 4878599 - DNA, 25 bp, Homo sapien
tgctgacctctgacatccagtccat

SEQ ID NO: 4878600 - DNA, 25 bp, Homo sapien
ggacacacagcggtagggattcctt

SEQ ID NO: 4878601 - DNA, 25 bp, Homo sapien
tgcacccgtggacacacagcggtag

SEQ ID NO: 4878602 - DNA, 25 bp, Homo sapien
cacacagcggtagggattccttgct

SEQ ID NO: 4878603 - DNA, 25 bp, Homo sapien
cgtggacacacagcggtagggattc

SEQ ID NO: 4878604 - DNA, 25 bp, Homo sapien
caggccgcgcttaggggccttatca

SEQ ID NO: 4878605 - DNA, 25 bp, Homo sapien
aatgggaacacgcagtgcagggctc

SEQ ID NO: 4878606 - DNA, 25 bp, Homo sapien
ggccttatcacatgcgcaccacgtg

SEQ ID NO: 4878607 - DNA, 25 bp, Homo sapien
tcaggcatccggaggatggcgctgc

SEQ ID NO: 4878608 - DNA, 25 bp, Homo sapien
aaaacaatgctgtgcaaacccagct

SEQ ID NO: 4878609 - DNA, 25 bp, Homo sapien
gcagcctcacctttgagtcatgaag

SEQ ID NO: 4878610 - DNA, 25 bp, Homo sapien
ggacccacatggaccttggcggctc

SEQ ID NO: 4878611 - DNA, 25 bp, Homo sapien
catcaaaacaatgctgtgcaaaccc

SEQ ID NO: 4878612 - DNA, 25 bp, Homo sapien
ccagacaggcttctcttcttggctt

SEQ ID NO: 4878613 - DNA, 25 bp, Homo sapien
ctgttttcttcataactatctgcat

SEQ ID NO: 4878614 - DNA, 25 bp, Homo sapien
ttcttggctttctgttttcttcata

SEQ ID NO: 4878615 - DNA, 25 bp, Homo sapien
cccagacaggcttctcttcttggct

SEQ ID NO: 4878616 - DNA, 25 bp, Homo sapien
tatatccaggacctgaatctttgta

SEQ ID NO: 4878617 - DNA, 25 bp, Homo sapien
ctgacttctggtctatatccaggac

SEQ ID NO: 4878618 - DNA, 25 bp, Homo sapien
tctggtctatatccaggacctgaat

SEQ ID NO: 4878619 - DNA, 25 bp, Homo sapien
cagctacaaaggccccagcatcatg

SEQ ID NO: 4878620 - DNA, 25 bp, Homo sapien
taaagccatttgaacgcagcagcgc

SEQ ID NO: 4878621 - DNA, 25 bp, Homo sapien
gctctaaccaaccatttggcggctg

SEQ ID NO: 4878622 - DNA, 25 bp, Homo sapien
tttgggtttgccgatctctcctgcg

SEQ ID NO: 4878623 - DNA, 25 bp, Homo sapien
tgcatcttgaatgaagtcccagctc

SEQ ID NO: 4878624 - DNA, 25 bp, Homo sapien
ccatagctacgtttgcagctctgac

SEQ ID NO: 4878625 - DNA, 25 bp, Homo sapien
tacggcagccatagctacgtttgca

SEQ ID NO: 4878626 - DNA, 25 bp, Homo sapien
aagatgatacggcagccatagctac

SEQ ID NO: 4878627 - DNA, 25 bp, Homo sapien
ggcagccatagctacgtttgcagct

SEQ ID NO: 4878628 - DNA, 25 bp, Homo sapien
taactgtatatcacacttatcctca

SEQ ID NO: 4878629 - DNA, 25 bp, Homo sapien
tcttagacctgttgctccaaactcc

SEQ ID NO: 4878630 - DNA, 25 bp, Homo sapien
gcttgcacttgtttcttagacctgt

SEQ ID NO: 4878631 - DNA, 25 bp, Homo sapien
tgccctttctccttgttgtagcttg

SEQ ID NO: 4878632 - DNA, 25 bp, Homo sapien
aagtccacatccttaattgtgtgct

SEQ ID NO: 4878633 - DNA, 25 bp, Homo sapien
agtccacatccttaattgtgtgctt

SEQ ID NO: 4878634 - DNA, 25 bp, Homo sapien
taagtccacatccttaattgtgtgc

SEQ ID NO: 4878635 - DNA, 25 bp, Homo sapien
gagacaacttgagctaggctggtca

SEQ ID NO: 4878636 - DNA, 25 bp, Homo sapien
gggtgggccctgagacataacatca

SEQ ID NO: 4878637 - DNA, 25 bp, Homo sapien
cctgggacagaatgaagctttcctc

SEQ ID NO: 4878638 - DNA, 25 bp, Homo sapien
gacccggatcttcagaccagtgcct

SEQ ID NO: 4878639 - DNA, 25 bp, Homo sapien
gcgcccccgcttccggtgctggccc

SEQ ID NO: 4878640 - DNA, 25 bp, Homo sapien
ctgccgcaacttccggggccggttg

SEQ ID NO: 4878641 - DNA, 25 bp, Homo sapien
gacgcgcaaggtgcgtgcgcgtccc

SEQ ID NO: 4878642 - DNA, 25 bp, Homo sapien
tggcaaccgcaggaggggcgaagac

SEQ ID NO: 4878643 - DNA, 25 bp, Homo sapien
agacctcctctcctgctcgccgggc

SEQ ID NO: 4878644 - DNA, 25 bp, Homo sapien
gacctcctctcctgctcgccgggct

SEQ ID NO: 4878645 - DNA, 25 bp, Homo sapien
ctgctcgccgggctcagggcctccg

SEQ ID NO: 4878646 - DNA, 25 bp, Homo sapien
accacagtgtcaagacccgacatcg

SEQ ID NO: 4878647 - DNA, 25 bp, Homo sapien
tgggcacttgtgttcacgaccacca

SEQ ID NO: 4878648 - DNA, 25 bp, Homo sapien
agggagacaaagcaccagcgctgga

SEQ ID NO: 4878649 - DNA, 25 bp, Homo sapien
tcaagacccgacatcgggagaccgg

SEQ ID NO: 4878650 - DNA, 25 bp, Homo sapien
cattctaaacgaatagctattttta

SEQ ID NO: 4878651 - DNA, 25 bp, Homo sapien
tcattctaaacgaatagctattttt

SEQ ID NO: 4878652 - DNA, 25 bp, Homo sapien
tccttctaagctcattatgtcagct

SEQ ID NO: 4878653 - DNA, 25 bp, Homo sapien
gtgttccatcactagaagatattat

SEQ ID NO: 4878654 - DNA, 25 bp, Homo sapien
cacagtctgatgactagggtctaaa

SEQ ID NO: 4878655 - DNA, 25 bp, Homo sapien
acagtgttatatctccttatggtcc

SEQ ID NO: 4878656 - DNA, 25 bp, Homo sapien
gacatctttggacaacaactcaaca

SEQ ID NO: 4878657 - DNA, 25 bp, Homo sapien
tacattctagatattggctggatag

SEQ ID NO: 4878658 - DNA, 25 bp, Homo sapien
tgctcctgtggctattcaattataa

SEQ ID NO: 4878659 - DNA, 25 bp, Homo sapien
taattggcatgaccataatctccgg

SEQ ID NO: 4878660 - DNA, 25 bp, Homo sapien
cttgaagactgtggctttaggtcta

SEQ ID NO: 4878661 - DNA, 25 bp, Homo sapien
tgaagactgtggctttaggtctatt

SEQ ID NO: 4878662 - DNA, 25 bp, Homo sapien
aagactgtggctttaggtctattag

SEQ ID NO: 4878663 - DNA, 25 bp, Homo sapien
gaagactgtggctttaggtctatta

SEQ ID NO: 4878664 - DNA, 25 bp, Homo sapien
ttcttctcgggagactcatgctgaa

SEQ ID NO: 4878665 - DNA, 25 bp, Homo sapien
gaagtatctagaggtgaagtgtcat

SEQ ID NO: 4878666 - DNA, 25 bp, Homo sapien
taaggtgttatcaattttgcaagtg

SEQ ID NO: 4878667 - DNA, 25 bp, Homo sapien
cactccccgcctgaattactattaa

SEQ ID NO: 4878668 - DNA, 25 bp, Homo sapien
tgtcagaagctgactggtctacctt

SEQ ID NO: 4878669 - DNA, 25 bp, Homo sapien
tccagccgatgaccaattacagttt

SEQ ID NO: 4878670 - DNA, 25 bp, Homo sapien
aacaacatcttagaaaagtgagaac

SEQ ID NO: 4878671 - DNA, 25 bp, Homo sapien
tgtcttctactcagaaaaaaggcat

SEQ ID NO: 4878672 - DNA, 25 bp, Homo sapien
taacggcaagtctaaagtggcccat

SEQ ID NO: 4878673 - DNA, 25 bp, Homo sapien
tctctgtgcgcaccagtgatgacaa

SEQ ID NO: 4878674 - DNA, 25 bp, Homo sapien
ggcccatgttatgatttgctgtcag

SEQ ID NO: 4878675 - DNA, 25 bp, Homo sapien
aaatacgatgttggtggaggagaac

SEQ ID NO: 4878676 - DNA, 25 bp, Homo sapien
gctagatagttctacttcactcaag

SEQ ID NO: 4878677 - DNA, 25 bp, Homo sapien
ggcttactccctatatcccatgtca

SEQ ID NO: 4878678 - DNA, 25 bp, Homo sapien
cactcacttatggtccagtgttgaa

SEQ ID NO: 4878679 - DNA, 25 bp, Homo sapien
gataacctcttcctatacagatgac

SEQ ID NO: 4878680 - DNA, 25 bp, Homo sapien
tccctttcgctgtttcatagttgaa

SEQ ID NO: 4878681 - DNA, 25 bp, Homo sapien
gtttcatagttgaactctctcctgg

SEQ ID NO: 4878682 - DNA, 25 bp, Homo sapien
gcccaatgggatccaacatctcctt

SEQ ID NO: 4878683 - DNA, 25 bp, Homo sapien
tgtttctttgcccaatgggatccaa

SEQ ID NO: 4878684 - DNA, 25 bp, Homo sapien
ggtcgaactatatttaatccactgt

SEQ ID NO: 4878685 - DNA, 25 bp, Homo sapien
ccagttgaaggtcgaactatattta

SEQ ID NO: 4878686 - DNA, 25 bp, Homo sapien
ttcccagttgaaggtcgaactatat

SEQ ID NO: 4878687 - DNA, 25 bp, Homo sapien
ttgaaggtcgaactatatttaatcc

SEQ ID NO: 4878688 - DNA, 25 bp, Homo sapien
aaagaactacccaatctgtatcctc

SEQ ID NO: 4878689 - DNA, 25 bp, Homo sapien
catagatatattcagaccgcttaca

SEQ ID NO: 4878690 - DNA, 25 bp, Homo sapien
tcagaccgcttacaaaaagaactac

SEQ ID NO: 4878691 - DNA, 25 bp, Homo sapien
ttttctccatagatatattcagacc

SEQ ID NO: 4878692 - DNA, 25 bp, Homo sapien
attgagcatttgttggttcattgta

SEQ ID NO: 4878693 - DNA, 25 bp, Homo sapien
tgttggttcattgtaaggtctcaat

SEQ ID NO: 4878694 - DNA, 25 bp, Homo sapien
taaactgaaaccattgctccacagt

SEQ ID NO: 4878695 - DNA, 25 bp, Homo sapien
tccatcatctaaactgaaaccattg

SEQ ID NO: 4878696 - DNA, 25 bp, Homo sapien
tgggccaatgtccaatgcccctggc

SEQ ID NO: 4878697 - DNA, 25 bp, Homo sapien
tactaattaattcactgattatcac

SEQ ID NO: 4878698 - DNA, 25 bp, Homo sapien
gattatcacattaagatgtttcttc

SEQ ID NO: 4878699 - DNA, 25 bp, Homo sapien
gggtgggcagctacatactaattaa

SEQ ID NO: 4878700 - DNA, 25 bp, Homo sapien
ttcaggcatacatgcaatgagagtc

SEQ ID NO: 4878701 - DNA, 25 bp, Homo sapien
aggcatacatgcaatgagagtcacc

SEQ ID NO: 4878702 - DNA, 25 bp, Homo sapien
caggcatacatgcaatgagagtcac

SEQ ID NO: 4878703 - DNA, 25 bp, Homo sapien
atttcaggcatacatgcaatgagag

SEQ ID NO: 4878704 - DNA, 25 bp, Homo sapien
caatgttctttggatgggtgagagc

SEQ ID NO: 4878705 - DNA, 25 bp, Homo sapien
aagagctggtaagttacaatgttct

SEQ ID NO: 4878706 - DNA, 25 bp, Homo sapien
gaatatctgagtttactttcacaaa

SEQ ID NO: 4878707 - DNA, 25 bp, Homo sapien
tggatgggtgagagcactgaatatc

SEQ ID NO: 4878708 - DNA, 25 bp, Homo sapien
cctttgtttggtatcctgacagtat

SEQ ID NO: 4878709 - DNA, 25 bp, Homo sapien
tgtttggtatcctgacagtatctgt

SEQ ID NO: 4878710 - DNA, 25 bp, Homo sapien
ccaatgccttcagcatacttcttag

SEQ ID NO: 4878711 - DNA, 25 bp, Homo sapien
gctaattagtcttctaaaagacgaa

SEQ ID NO: 4878712 - DNA, 25 bp, Homo sapien
atactgcctcctaggacagcttccc

SEQ ID NO: 4878713 - DNA, 25 bp, Homo sapien
actgcctcctaggacagcttcccac

SEQ ID NO: 4878714 - DNA, 25 bp, Homo sapien
tactgcctcctaggacagcttccca

SEQ ID NO: 4878715 - DNA, 25 bp, Homo sapien
gacttaaaccattatatcctgtatt

SEQ ID NO: 4878716 - DNA, 25 bp, Homo sapien
cattatatcctgtatttgccacccc

SEQ ID NO: 4878717 - DNA, 25 bp, Homo sapien
ccattatatcctgtatttgccaccc

SEQ ID NO: 4878718 - DNA, 25 bp, Homo sapien
caggattgacttaaaccattatatc

SEQ ID NO: 4878719 - DNA, 25 bp, Homo sapien
gatgggaggttccaggctattaaac

SEQ ID NO: 4878720 - DNA, 25 bp, Homo sapien
cagccccacctcagtaatggaggtc

SEQ ID NO: 4878721 - DNA, 25 bp, Homo sapien
gtaatggaggtcacacttcaacatg

SEQ ID NO: 4878722 - DNA, 25 bp, Homo sapien
gctcttgagtgaactaccggggtga

SEQ ID NO: 4878723 - DNA, 25 bp, Homo sapien
actaaaagccttgaacctcaatcta

SEQ ID NO: 4878724 - DNA, 25 bp, Homo sapien
ccactaaaagccttgaacctcaatc

SEQ ID NO: 4878725 - DNA, 25 bp, Homo sapien
cactaaaagccttgaacctcaatct

SEQ ID NO: 4878726 - DNA, 25 bp, Homo sapien
taagaaacctattactaccagcaag

SEQ ID NO: 4878727 - DNA, 25 bp, Homo sapien
tctcttgcagctaggatttcatgat

SEQ ID NO: 4878728 - DNA, 25 bp, Homo sapien
tagtccctagtttcatgggcaccaa

SEQ ID NO: 4878729 - DNA, 25 bp, Homo sapien
tgcaaagtggaaactctgtagctct

SEQ ID NO: 4878730 - DNA, 25 bp, Homo sapien
gctttcttctattatgtgagggtac

SEQ ID NO: 4878731 - DNA, 25 bp, Homo sapien
ttacagcattttggtttgcaccata

SEQ ID NO: 4878732 - DNA, 25 bp, Homo sapien
gcaaatttgcagttttatatctatg

SEQ ID NO: 4878733 - DNA, 25 bp, Homo sapien
atacagtttgttctaccattgcaaa

SEQ ID NO: 4878734 - DNA, 25 bp, Homo sapien
caacaaggtttgtaggcaaatggca

SEQ ID NO: 4878735 - DNA, 25 bp, Homo sapien
ggatgtaggttgtaattccctcaga

SEQ ID NO: 4878736 - DNA, 25 bp, Homo sapien
actgtgcccatgcaagttatgttaa

SEQ ID NO: 4878737 - DNA, 25 bp, Homo sapien
tatcattcaattgatcaagccatag

SEQ ID NO: 4878738 - DNA, 25 bp, Homo sapien
ggcactgaatcatcaataagaacaa

SEQ ID NO: 4878739 - DNA, 25 bp, Homo sapien
gaggaaggtgtactgactatttcag

SEQ ID NO: 4878740 - DNA, 25 bp, Homo sapien
gtatcaaacgactcccatctgctaa

SEQ ID NO: 4878741 - DNA, 25 bp, Homo sapien
ctgtgtgtactattgaatctttgta

SEQ ID NO: 4878742 - DNA, 25 bp, Homo sapien
gtaacacagtgttaagaatatctgc

SEQ ID NO: 4878743 - DNA, 25 bp, Homo sapien
agaatatctgcttctagcagtgtca

SEQ ID NO: 4878744 - DNA, 25 bp, Homo sapien
aataaagttccggacatccaggatc

SEQ ID NO: 4878745 - DNA, 25 bp, Homo sapien
catctgttagctctttattcggaaa

SEQ ID NO: 4878746 - DNA, 25 bp, Homo sapien
gcacatcatctattcccacatgcta

SEQ ID NO: 4878747 - DNA, 25 bp, Homo sapien
tccttattaatacggcacatcatct

SEQ ID NO: 4878748 - DNA, 25 bp, Homo sapien
gaagtattgtccttattaatacggc

SEQ ID NO: 4878749 - DNA, 25 bp, Homo sapien
tttttaatgctgaagtattgtcctt

SEQ ID NO: 4878750 - DNA, 25 bp, Homo sapien
tgaatgtgatcaacgcaagctctgg

SEQ ID NO: 4878751 - DNA, 25 bp, Homo sapien
caacaaattgatcttggcaccgcga

SEQ ID NO: 4878752 - DNA, 25 bp, Homo sapien
tatggaatgttaatgctagggcggc

SEQ ID NO: 4878753 - DNA, 25 bp, Homo sapien
tgaaacttaaagaagggtgcctcgc

SEQ ID NO: 4878754 - DNA, 25 bp, Homo sapien
aaggaggcaatcagacaggccttta

SEQ ID NO: 4878755 - DNA, 25 bp, Homo sapien
tgtccctgacaaaggtgcgccaagg

SEQ ID NO: 4878756 - DNA, 25 bp, Homo sapien
tggatcaatatggaaaggtaggaca

SEQ ID NO: 4878757 - DNA, 25 bp, Homo sapien
cagataatatgctacaaccagttcc

SEQ ID NO: 4878758 - DNA, 25 bp, Homo sapien
cattcacacttggtacttctcctga

SEQ ID NO: 4878759 - DNA, 25 bp, Homo sapien
actggcaagattccattcacacttg

SEQ ID NO: 4878760 - DNA, 25 bp, Homo sapien
gattccattcacacttggtacttct

SEQ ID NO: 4878761 - DNA, 25 bp, Homo sapien
ggcaagattccattcacacttggta

SEQ ID NO: 4878762 - DNA, 25 bp, Homo sapien
ttctgactgataaatactttaaaga

SEQ ID NO: 4878763 - DNA, 25 bp, Homo sapien
tctgactgataaatactttaaagag

SEQ ID NO: 4878764 - DNA, 25 bp, Homo sapien
cgattaaatacgtccttggcctgtt

SEQ ID NO: 4878765 - DNA, 25 bp, Homo sapien
agtgtgttggtgagaagatggttgg

SEQ ID NO: 4878766 - DNA, 25 bp, Homo sapien
ggcataggtttcatagactccacaa

SEQ ID NO: 4878767 - DNA, 25 bp, Homo sapien
tgccttggttgataccaacgcagag

SEQ ID NO: 4878768 - DNA, 25 bp, Homo sapien
tggattatggaatacagcttctcat

SEQ ID NO: 4878769 - DNA, 25 bp, Homo sapien
ttatgagtggattatggaatacagc

SEQ ID NO: 4878770 - DNA, 25 bp, Homo sapien
cactgccttggttgataccaacgca

SEQ ID NO: 4878771 - DNA, 25 bp, Homo sapien
gacttccacacccatcagtcaagtt

SEQ ID NO: 4878772 - DNA, 25 bp, Homo sapien
tgtatagcctgaaagttgagaatgg

SEQ ID NO: 4878773 - DNA, 25 bp, Homo sapien
aagaatcttttatgacatgtgagaa

SEQ ID NO: 4878774 - DNA, 25 bp, Homo sapien
taggacgcagcatgcccattgtttg

SEQ ID NO: 4878775 - DNA, 25 bp, Homo sapien
gctgaaaactctatgtccggcttta

SEQ ID NO: 4878776 - DNA, 25 bp, Homo sapien
ggttcttcgggtgtgatcatatatc

SEQ ID NO: 4878777 - DNA, 25 bp, Homo sapien
ggagtgtattaagtgcagcttgaca

SEQ ID NO: 4878778 - DNA, 25 bp, Homo sapien
agttaaaactggatggaaatagcca

SEQ ID NO: 4878779 - DNA, 25 bp, Homo sapien
gttagataatacagtggagttgacc

SEQ ID NO: 4878780 - DNA, 25 bp, Homo sapien
gatgttagataatacagtggagttg

SEQ ID NO: 4878781 - DNA, 25 bp, Homo sapien
caagatgttagataatacagtggag

SEQ ID NO: 4878782 - DNA, 25 bp, Homo sapien
tgttagataatacagtggagttgac

SEQ ID NO: 4878783 - DNA, 25 bp, Homo sapien
catggccttcacaatactcatgact

SEQ ID NO: 4878784 - DNA, 25 bp, Homo sapien
ttcacaatactcatgacttctttca

SEQ ID NO: 4878785 - DNA, 25 bp, Homo sapien
agaggtcaaggtgctaacattcttc

SEQ ID NO: 4878786 - DNA, 25 bp, Homo sapien
gaggtcaaggtgctaacattcttca

SEQ ID NO: 4878787 - DNA, 25 bp, Homo sapien
aggtcaaggtgctaacattcttcat

SEQ ID NO: 4878788 - DNA, 25 bp, Homo sapien
ccaggatcttgtcccttaacggtgt

SEQ ID NO: 4878789 - DNA, 25 bp, Homo sapien
ggtgttgacaccttgttttgtacca

SEQ ID NO: 4878790 - DNA, 25 bp, Homo sapien
taccagagtcgtggcttacaacaac

SEQ ID NO: 4878791 - DNA, 25 bp, Homo sapien
gatcttgtcccttaacggtgttgac

SEQ ID NO: 4878792 - DNA, 25 bp, Homo sapien
tagtgtgcagaaaacctcgttgctg

SEQ ID NO: 4878793 - DNA, 25 bp, Homo sapien
tcctccagtgcaaaatagactgttg

SEQ ID NO: 4878794 - DNA, 25 bp, Homo sapien
aaatagactgttgggcctgaggaga

SEQ ID NO: 4878795 - DNA, 25 bp, Homo sapien
gactgggcatagatagtggccttcc

SEQ ID NO: 4878796 - DNA, 25 bp, Homo sapien
ggcttgtcctttcttatacccacta

SEQ ID NO: 4878797 - DNA, 25 bp, Homo sapien
aagctgttgccagggggtggtgata

SEQ ID NO: 4878798 - DNA, 25 bp, Homo sapien
actgaggtaccgcttaagcagacgc

SEQ ID NO: 4878799 - DNA, 25 bp, Homo sapien
ttaagcagacgcctccttgacgacc

SEQ ID NO: 4878800 - DNA, 25 bp, Homo sapien
accctcagaagcactcacgtgatgg

SEQ ID NO: 4878801 - DNA, 25 bp, Homo sapien
cacgtgatgggtaggtttctgagat

SEQ ID NO: 4878802 - DNA, 25 bp, Homo sapien
ccactgaagtgcaaactgccacggc

SEQ ID NO: 4878803 - DNA, 25 bp, Homo sapien
gatagcacagcacctgtccgttcct

SEQ ID NO: 4878804 - DNA, 25 bp, Homo sapien
tgccacggctccccatttgcgaggt

SEQ ID NO: 4878805 - DNA, 25 bp, Homo sapien
ccatttgcgaggtagatagcacagc

SEQ ID NO: 4878806 - DNA, 25 bp, Homo sapien
gtaagagagcggtgcgcgcccgagg

SEQ ID NO: 4878807 - DNA, 25 bp, Homo sapien
ctagcccacaaggaaccgctcgccg

SEQ ID NO: 4878808 - DNA, 25 bp, Homo sapien
gagtgtaagagagcggtgcgcgccc

SEQ ID NO: 4878809 - DNA, 25 bp, Homo sapien
ccccgaggcgcgtcatggcaccgcc

SEQ ID NO: 4878810 - DNA, 25 bp, Homo sapien
caaagctaactctgggaaatccttc

SEQ ID NO: 4878811 - DNA, 25 bp, Homo sapien
gaaatccttctaattgtggctggaa

SEQ ID NO: 4878812 - DNA, 25 bp, Homo sapien
tctgaagggctccattaagtcactt

SEQ ID NO: 4878813 - DNA, 25 bp, Homo sapien
tcttagggcaagtccgtacttttga

SEQ ID NO: 4878814 - DNA, 25 bp, Homo sapien
aaatgttgtagctgcaaaccactga

SEQ ID NO: 4878815 - DNA, 25 bp, Homo sapien
tgaggcataggtcaagtgtcacttc

SEQ ID NO: 4878816 - DNA, 25 bp, Homo sapien
ctgactatttgccacccaggtcaca

SEQ ID NO: 4878817 - DNA, 25 bp, Homo sapien
caaaatcctagttagccttgaggca

SEQ ID NO: 4878818 - DNA, 25 bp, Homo sapien
caatatcaacaaccaaaatgcactg

SEQ ID NO: 4878819 - DNA, 25 bp, Homo sapien
tactgctcacctagaatgcaggagc

SEQ ID NO: 4878820 - DNA, 25 bp, Homo sapien
caggagcctcttaactagtttccgg

SEQ ID NO: 4878821 - DNA, 25 bp, Homo sapien
tggctataatctccagtacaatggt

SEQ ID NO: 4878822 - DNA, 25 bp, Homo sapien
ttcatgccacacgtagggacaagct

SEQ ID NO: 4878823 - DNA, 25 bp, Homo sapien
gatcggcctgactagagattctgca

SEQ ID NO: 4878824 - DNA, 25 bp, Homo sapien
gatgcttcttctcgaccagtgtgta

SEQ ID NO: 4878825 - DNA, 25 bp, Homo sapien
taccataggtcctctagagcagcaa

SEQ ID NO: 4878826 - DNA, 25 bp, Homo sapien
taccatggagtttacataaaacatc

SEQ ID NO: 4878827 - DNA, 25 bp, Homo sapien
ccccatactgcattactgatgctac

SEQ ID NO: 4878828 - DNA, 25 bp, Homo sapien
atagttacaggcacttaaacttttg

SEQ ID NO: 4878829 - DNA, 25 bp, Homo sapien
gtcttagacttatatatcagaaata

SEQ ID NO: 4878830 - DNA, 25 bp, Homo sapien
gaattactttgtctaccttcaagtc

SEQ ID NO: 4878831 - DNA, 25 bp, Homo sapien
cttcgagagatggatagagagacat

SEQ ID NO: 4878832 - DNA, 25 bp, Homo sapien
caagtcttcgagagatggatagaga

SEQ ID NO: 4878833 - DNA, 25 bp, Homo sapien
taccttcaagtcttcgagagatgga

SEQ ID NO: 4878834 - DNA, 25 bp, Homo sapien
gaaatgacaactccatgcatgttac

SEQ ID NO: 4878835 - DNA, 25 bp, Homo sapien
cagaaggcactattaccattggaaa

SEQ ID NO: 4878836 - DNA, 25 bp, Homo sapien
taaatttagtgcagcccaagtatag

SEQ ID NO: 4878837 - DNA, 25 bp, Homo sapien
atttcctgtgttataccctttagag

SEQ ID NO: 4878838 - DNA, 25 bp, Homo sapien
cgtgagggataggagcagaagcttc

SEQ ID NO: 4878839 - DNA, 25 bp, Homo sapien
ttccatcgtgagggataggagcaga

SEQ ID NO: 4878840 - DNA, 25 bp, Homo sapien
catcgtgagggataggagcagaagc

SEQ ID NO: 4878841 - DNA, 25 bp, Homo sapien
tccatcgtgagggataggagcagaa

SEQ ID NO: 4878842 - DNA, 25 bp, Homo sapien
agagagctctggatacagtctggga

SEQ ID NO: 4878843 - DNA, 25 bp, Homo sapien
gtattgagagagctctggatacagt

SEQ ID NO: 4878844 - DNA, 25 bp, Homo sapien
tgagagagctctggatacagtctgg

SEQ ID NO: 4878845 - DNA, 25 bp, Homo sapien
agagctctggatacagtctgggata

SEQ ID NO: 4878846 - DNA, 25 bp, Homo sapien
cctgaagtggtgcaccagaaaccac

SEQ ID NO: 4878847 - DNA, 25 bp, Homo sapien
cccctgaagtggtgcaccagaaacc

SEQ ID NO: 4878848 - DNA, 25 bp, Homo sapien
cacatttgcacgtatttcttcttca

SEQ ID NO: 4878849 - DNA, 25 bp, Homo sapien
ccacggccacatttgcacgtatttc

SEQ ID NO: 4878850 - DNA, 25 bp, Homo sapien
attaccagttacaggagccaccata

SEQ ID NO: 4878851 - DNA, 25 bp, Homo sapien
aaatgacttcacgaatcccttgctt

SEQ ID NO: 4878852 - DNA, 25 bp, Homo sapien
catatagtttatactggaaggtctt

SEQ ID NO: 4878853 - DNA, 25 bp, Homo sapien
ccatcttgatccttacacaaaatga

SEQ ID NO: 4878854 - DNA, 25 bp, Homo sapien
tagaacatccccaattgaaaacatt

SEQ ID NO: 4878855 - DNA, 25 bp, Homo sapien
gaagtcccaactatgcctctgcaaa

SEQ ID NO: 4878856 - DNA, 25 bp, Homo sapien
cacttattatgtaagagatttagac

SEQ ID NO: 4878857 - DNA, 25 bp, Homo sapien
tattctcaactacagatgcactatt

SEQ ID NO: 4878858 - DNA, 25 bp, Homo sapien
gggtaaagactcaacatgtccttca

SEQ ID NO: 4878859 - DNA, 25 bp, Homo sapien
ttctatgtggaaaggctggatgcac

SEQ ID NO: 4878860 - DNA, 25 bp, Homo sapien
gatgtatgactgaaaccgaatccaa

SEQ ID NO: 4878861 - DNA, 25 bp, Homo sapien
taaaggctgccctaattagaaagaa

SEQ ID NO: 4878862 - DNA, 25 bp, Homo sapien
gaattagcctggactagctgaacaa

SEQ ID NO: 4878863 - DNA, 25 bp, Homo sapien
gagaattagcctggactagctgaac

SEQ ID NO: 4878864 - DNA, 25 bp, Homo sapien
gaggctggagaattagcctggacta

SEQ ID NO: 4878865 - DNA, 25 bp, Homo sapien
gctggagaattagcctggactagct

SEQ ID NO: 4878866 - DNA, 25 bp, Homo sapien
tttgagctgtttagtaacagcttac

SEQ ID NO: 4878867 - DNA, 25 bp, Homo sapien
catttgagctgtttagtaacagctt

SEQ ID NO: 4878868 - DNA, 25 bp, Homo sapien
atttgagctgtttagtaacagctta

SEQ ID NO: 4878869 - DNA, 25 bp, Homo sapien
ccctctagagttgttatagcagtca

SEQ ID NO: 4878870 - DNA, 25 bp, Homo sapien
ctttggaaagggaggcatgcagcta

SEQ ID NO: 4878871 - DNA, 25 bp, Homo sapien
ttattaaaaggcatccagctgtccc

SEQ ID NO: 4878872 - DNA, 25 bp, Homo sapien
tacgaaatacctaaactgaatgaga

SEQ ID NO: 4878873 - DNA, 25 bp, Homo sapien
gctgcagagctatctttcactatgg

SEQ ID NO: 4878874 - DNA, 25 bp, Homo sapien
ctggctgcagagctatctttcacta

SEQ ID NO: 4878875 - DNA, 25 bp, Homo sapien
ggctgcagagctatctttcactatg

SEQ ID NO: 4878876 - DNA, 25 bp, Homo sapien
tgcagagctatctttcactatggat

SEQ ID NO: 4878877 - DNA, 25 bp, Homo sapien
gagatcatttattccagcccacttg

SEQ ID NO: 4878878 - DNA, 25 bp, Homo sapien
gactggccagaccaagagttcaggc

SEQ ID NO: 4878879 - DNA, 25 bp, Homo sapien
gatgacagcccaaataattccggtg

SEQ ID NO: 4878880 - DNA, 25 bp, Homo sapien
gctgggccactattcatattctaaa

SEQ ID NO: 4878881 - DNA, 25 bp, Homo sapien
gcaggcatgattgtaatagtaacta

SEQ ID NO: 4878882 - DNA, 25 bp, Homo sapien
tgttcaaagataaaagcaggcatga

SEQ ID NO: 4878883 - DNA, 25 bp, Homo sapien
acagtatgtctgcaatttgagagtc

SEQ ID NO: 4878884 - DNA, 25 bp, Homo sapien
gtaatagtaactacagtcccagatg

SEQ ID NO: 4878885 - DNA, 25 bp, Homo sapien
aacaccagtatccattccttgggta

SEQ ID NO: 4878886 - DNA, 25 bp, Homo sapien
aaaacaccagtatccattccttggg

SEQ ID NO: 4878887 - DNA, 25 bp, Homo sapien
caccagtatccattccttgggtaaa

SEQ ID NO: 4878888 - DNA, 25 bp, Homo sapien
taaaacaccagtatccattccttgg

SEQ ID NO: 4878889 - DNA, 25 bp, Homo sapien
gaagcatctctggtaatctagttgt

SEQ ID NO: 4878890 - DNA, 25 bp, Homo sapien
ggtgcattctatccagaagccaaca

SEQ ID NO: 4878891 - DNA, 25 bp, Homo sapien
tctagttgttgacagacactcagtg

SEQ ID NO: 4878892 - DNA, 25 bp, Homo sapien
cctccaagggtagctaggtgcattc

SEQ ID NO: 4878893 - DNA, 25 bp, Homo sapien
attaggcttttcataatgcttggtg

SEQ ID NO: 4878894 - DNA, 25 bp, Homo sapien
ttaaacctcaggaatggtgtggtcc

SEQ ID NO: 4878895 - DNA, 25 bp, Homo sapien
gaatggtgtggtccattaggctttt

SEQ ID NO: 4878896 - DNA, 25 bp, Homo sapien
gtgtggtccattaggcttttcataa

SEQ ID NO: 4878897 - DNA, 25 bp, Homo sapien
gctccgggaaggcttcacgtgcata

SEQ ID NO: 4878898 - DNA, 25 bp, Homo sapien
cgggaaggcttcacgtgcataatac

SEQ ID NO: 4878899 - DNA, 25 bp, Homo sapien
gggaaggcttcacgtgcataataca

SEQ ID NO: 4878900 - DNA, 25 bp, Homo sapien
tccgggaaggcttcacgtgcataat

SEQ ID NO: 4878901 - DNA, 25 bp, Homo sapien
ttaaggcgacagttcaagcatatta

SEQ ID NO: 4878902 - DNA, 25 bp, Homo sapien
tagttaaggcgacagttcaagcata

SEQ ID NO: 4878903 - DNA, 25 bp, Homo sapien
gttaaggcgacagttcaagcatatt

SEQ ID NO: 4878904 - DNA, 25 bp, Homo sapien
catagttaaggcgacagttcaagca

SEQ ID NO: 4878905 - DNA, 25 bp, Homo sapien
aaatcaggataaagtgtcaactatc

SEQ ID NO: 4878906 - DNA, 25 bp, Homo sapien
aatattctaagaccatcccaaagta

SEQ ID NO: 4878907 - DNA, 25 bp, Homo sapien
cataatcttaagagtcaaatgccaa

SEQ ID NO: 4878908 - DNA, 25 bp, Homo sapien
tataccacttaatccacaaatgaac

SEQ ID NO: 4878909 - DNA, 25 bp, Homo sapien
taagtttggtgaaagcaaatgatgc

SEQ ID NO: 4878910 - DNA, 25 bp, Homo sapien
tttggtgaaagcaaatgatgcagta

SEQ ID NO: 4878911 - DNA, 25 bp, Homo sapien
ttggtgaaagcaaatgatgcagtaa

SEQ ID NO: 4878912 - DNA, 25 bp, Homo sapien
agtttggtgaaagcaaatgatgcag

SEQ ID NO: 4878913 - DNA, 25 bp, Homo sapien
cactgagagctgttcttagggcccc

SEQ ID NO: 4878914 - DNA, 25 bp, Homo sapien
gagagctgttcttagggcccctgaa

SEQ ID NO: 4878915 - DNA, 25 bp, Homo sapien
agcactgagagctgttcttagggcc

SEQ ID NO: 4878916 - DNA, 25 bp, Homo sapien
tctcagcactgagagctgttcttag

SEQ ID NO: 4878917 - DNA, 25 bp, Homo sapien
cagtagcctcaatgagttcctgctg

SEQ ID NO: 4878918 - DNA, 25 bp, Homo sapien
tcttgcaggtagtatgacataggag

SEQ ID NO: 4878919 - DNA, 25 bp, Homo sapien
tattgctagggacaatcagtagcct

SEQ ID NO: 4878920 - DNA, 25 bp, Homo sapien
tgagtcagaccacactaatagaatt

SEQ ID NO: 4878921 - DNA, 25 bp, Homo sapien
taagaacctggagaaggattagcag

SEQ ID NO: 4878922 - DNA, 25 bp, Homo sapien
tatcacaattgccacccatcgggtt

SEQ ID NO: 4878923 - DNA, 25 bp, Homo sapien
cagaagacaggactaagtagcagag

SEQ ID NO: 4878924 - DNA, 25 bp, Homo sapien
gctgtacccagattctaagaacctg

SEQ ID NO: 4878925 - DNA, 25 bp, Homo sapien
tccctgactgagaaatgaacccagg

SEQ ID NO: 4878926 - DNA, 25 bp, Homo sapien
gctgcagtgagagcaccaaatccta

SEQ ID NO: 4878927 - DNA, 25 bp, Homo sapien
ctgctgcagtgagagcaccaaatcc

SEQ ID NO: 4878928 - DNA, 25 bp, Homo sapien
gagaaatgaacccaggctgctgcag

SEQ ID NO: 4878929 - DNA, 25 bp, Homo sapien
agagaaaaatagtccaatcagaggt

SEQ ID NO: 4878930 - DNA, 25 bp, Homo sapien
tctgtatgaagccagtccttagaga

SEQ ID NO: 4878931 - DNA, 25 bp, Homo sapien
gccaggctgattaatgaaggtctct

SEQ ID NO: 4878932 - DNA, 25 bp, Homo sapien
tagagggagcacaaagaatcagaga

SEQ ID NO: 4878933 - DNA, 25 bp, Homo sapien
tccccaaagagtatggaagttatat

SEQ ID NO: 4878934 - DNA, 25 bp, Homo sapien
tcagttatagtctgttattgtccgg

SEQ ID NO: 4878935 - DNA, 25 bp, Homo sapien
aattgcctggttaatgcttctgtag

SEQ ID NO: 4878936 - DNA, 25 bp, Homo sapien
ttggaacacttaactgctgtgcccc

SEQ ID NO: 4878937 - DNA, 25 bp, Homo sapien
tccccgcgcagtggaccttgtgttg

SEQ ID NO: 4878938 - DNA, 25 bp, Homo sapien
gcctgattctgaggaaagccaaggt

SEQ ID NO: 4878939 - DNA, 25 bp, Homo sapien
tttagacacaggactagctccatgc

SEQ ID NO: 4878940 - DNA, 25 bp, Homo sapien
gaaagctttgcagtcgaaatcgcgg

SEQ ID NO: 4878941 - DNA, 25 bp, Homo sapien
caacagattggtggtttatgggcca

SEQ ID NO: 4878942 - DNA, 25 bp, Homo sapien
ttaggaagtaacactgccacggcag

SEQ ID NO: 4878943 - DNA, 25 bp, Homo sapien
tagttacgactgagttgccttcacc

SEQ ID NO: 4878944 - DNA, 25 bp, Homo sapien
tccatggcgtttatccggaagaagc

SEQ ID NO: 4878945 - DNA, 25 bp, Homo sapien
ccatctggatcaccacagaccgtga

SEQ ID NO: 4878946 - DNA, 25 bp, Homo sapien
tcgttgtgatggcacagtgtgtagc

SEQ ID NO: 4878947 - DNA, 25 bp, Homo sapien
tcaccacagaccgtgatcgttgtga

SEQ ID NO: 4878948 - DNA, 25 bp, Homo sapien
gaccgtgatcgttgtgatggcacag

SEQ ID NO: 4878949 - DNA, 25 bp, Homo sapien
ctaggctgaaagaacatagtgaatg

SEQ ID NO: 4878950 - DNA, 25 bp, Homo sapien
acaaatagccagtgatacaacagca

SEQ ID NO: 4878951 - DNA, 25 bp, Homo sapien
aacaaatagccagtgatacaacagc

SEQ ID NO: 4878952 - DNA, 25 bp, Homo sapien
gaggggcctgagccacatagaattt

SEQ ID NO: 4878953 - DNA, 25 bp, Homo sapien
agccctggcggagctcctctgaggt

SEQ ID NO: 4878954 - DNA, 25 bp, Homo sapien
gcctgagccacatagaatttctgat

SEQ ID NO: 4878955 - DNA, 25 bp, Homo sapien
ctagccctggcggagctcctctgag

SEQ ID NO: 4878956 - DNA, 25 bp, Homo sapien
acacagccaacaagaccctgtgtga

SEQ ID NO: 4878957 - DNA, 25 bp, Homo sapien
ctaaggctcctaccgccctggagaa

SEQ ID NO: 4878958 - DNA, 25 bp, Homo sapien
tcaggtatggactgaagccccgcta

SEQ ID NO: 4878959 - DNA, 25 bp, Homo sapien
ccaacaagaccctgtgtgacctcat

SEQ ID NO: 4878960 - DNA, 25 bp, Homo sapien
gctcttaatgacagccagatgccca

SEQ ID NO: 4878961 - DNA, 25 bp, Homo sapien
aatgctcttaatgacagccagatgc

SEQ ID NO: 4878962 - DNA, 25 bp, Homo sapien
ggaatgctcttaatgacagccagat

SEQ ID NO: 4878963 - DNA, 25 bp, Homo sapien
tgctcttaatgacagccagatgccc

SEQ ID NO: 4878964 - DNA, 25 bp, Homo sapien
agcacaataccccagtcctggggcc

SEQ ID NO: 4878965 - DNA, 25 bp, Homo sapien
cagcacaataccccagtcctggggc

SEQ ID NO: 4878966 - DNA, 25 bp, Homo sapien
cctggggcccccagcatgactgcac

SEQ ID NO: 4878967 - DNA, 25 bp, Homo sapien
agtcctggggcccccagcatgactg

SEQ ID NO: 4878968 - DNA, 25 bp, Homo sapien
cagactttttgctaactttaccctg

SEQ ID NO: 4878969 - DNA, 25 bp, Homo sapien
gttaccactgtatttgctctcgcct

SEQ ID NO: 4878970 - DNA, 25 bp, Homo sapien
agacacgttccttaatctcccatag

SEQ ID NO: 4878971 - DNA, 25 bp, Homo sapien
actccagcctcagtatgaacgcaga

SEQ ID NO: 4878972 - DNA, 25 bp, Homo sapien
aaccacggccgaaacttctccatct

SEQ ID NO: 4878973 - DNA, 25 bp, Homo sapien
gctgccagtgtgcaaagcctctgcc

SEQ ID NO: 4878974 - DNA, 25 bp, Homo sapien
ctatgaagggcaccaaccacggccg

SEQ ID NO: 4878975 - DNA, 25 bp, Homo sapien
ctgccgcttcctagatctgctatga

SEQ ID NO: 4878976 - DNA, 25 bp, Homo sapien
taaggtctgcatgcagttcacatca

SEQ ID NO: 4878977 - DNA, 25 bp, Homo sapien
tcctgccatgggtcatgtgtgacct

SEQ ID NO: 4878978 - DNA, 25 bp, Homo sapien
tcatgtgtgacctctaaggtctgca

SEQ ID NO: 4878979 - DNA, 25 bp, Homo sapien
tgcagttcacatcacttgcacagaa

SEQ ID NO: 4878980 - DNA, 25 bp, Homo sapien
gaaccctgaataaatcctcagtgag

SEQ ID NO: 4878981 - DNA, 25 bp, Homo sapien
tcagtgaggtccgtggtggacgcct

SEQ ID NO: 4878982 - DNA, 25 bp, Homo sapien
tgcagtgacaaatataacatcctga

SEQ ID NO: 4878983 - DNA, 25 bp, Homo sapien
tcttgcagcataaaagcttgaaggt

SEQ ID NO: 4878984 - DNA, 25 bp, Homo sapien
tgcagatccccacccagtatatcca

SEQ ID NO: 4878985 - DNA, 25 bp, Homo sapien
gatccccacccagtatatccaaggt

SEQ ID NO: 4878986 - DNA, 25 bp, Homo sapien
cagtatatccaaggtgctccctcac

SEQ ID NO: 4878987 - DNA, 25 bp, Homo sapien
acccagtatatccaaggtgctccct

SEQ ID NO: 4878988 - DNA, 25 bp, Homo sapien
ctccacggcctctgcagatcctccc

SEQ ID NO: 4878989 - DNA, 25 bp, Homo sapien
gcctctgcagatcctcccccagagt

SEQ ID NO: 4878990 - DNA, 25 bp, Homo sapien
acggcctctgcagatcctcccccag

SEQ ID NO: 4878991 - DNA, 25 bp, Homo sapien
cagagtctcccaggtgctccctcac

SEQ ID NO: 4878992 - DNA, 25 bp, Homo sapien
tcttgtctggacaggtaggtcacgt

SEQ ID NO: 4878993 - DNA, 25 bp, Homo sapien
gctcttgtctggacaggtaggtcac

SEQ ID NO: 4878994 - DNA, 25 bp, Homo sapien
ttgtctggacaggtaggtcacgtgt

SEQ ID NO: 4878995 - DNA, 25 bp, Homo sapien
ggccgtgtgctgcaaggtgctgcca

SEQ ID NO: 4878996 - DNA, 25 bp, Homo sapien
gtgcatttttagtaacgtggggcca

SEQ ID NO: 4878997 - DNA, 25 bp, Homo sapien
tgcatttttagtaacgtggggccag

SEQ ID NO: 4878998 - DNA, 25 bp, Homo sapien
ttcaggtgcatttttagtaacgtgg

SEQ ID NO: 4878999 - DNA, 25 bp, Homo sapien
caggtgcatttttagtaacgtgggg

SEQ ID NO: 4879000 - DNA, 25 bp, Homo sapien
cccacgcggctaatggagatcttga

SEQ ID NO: 4879001 - DNA, 25 bp, Homo sapien
tagccagaagatcctgagtggtacc

SEQ ID NO: 4879002 - DNA, 25 bp, Homo sapien
gaaacccgaaatgccagaaatggaa

SEQ ID NO: 4879003 - DNA, 25 bp, Homo sapien
gaaaaatcaaagtggtccctcgcag

SEQ ID NO: 4879004 - DNA, 25 bp, Homo sapien
tgtccaagaggagtcataattcctg

SEQ ID NO: 4879005 - DNA, 25 bp, Homo sapien
tactgctaagatgagcctgatgtct

SEQ ID NO: 4879006 - DNA, 25 bp, Homo sapien
tatgatgggaggacctctatggccc

SEQ ID NO: 4879007 - DNA, 25 bp, Homo sapien
tttcacacatttaagagaccccagt

SEQ ID NO: 4879008 - DNA, 25 bp, Homo sapien
cagattgcctgcaaccagagcaagt

SEQ ID NO: 4879009 - DNA, 25 bp, Homo sapien
gattgcctgcaaccagagcaagttg

SEQ ID NO: 4879010 - DNA, 25 bp, Homo sapien
aagccagattgcctgcaaccagagc

SEQ ID NO: 4879011 - DNA, 25 bp, Homo sapien
ggaaaagccagattgcctgcaacca

SEQ ID NO: 4879012 - DNA, 25 bp, Homo sapien
gaaataacactaattcagcacttac

SEQ ID NO: 4879013 - DNA, 25 bp, Homo sapien
gtggtagtgggatgagaaataacac

SEQ ID NO: 4879014 - DNA, 25 bp, Homo sapien
gactatagacattgagaacacaaga

SEQ ID NO: 4879015 - DNA, 25 bp, Homo sapien
aaagtgactatagacattgagaaca

SEQ ID NO: 4879016 - DNA, 25 bp, Homo sapien
gatgcactctgatgcttgacatttg

SEQ ID NO: 4879017 - DNA, 25 bp, Homo sapien
gccatccgctcatccctgaatatgt

SEQ ID NO: 4879018 - DNA, 25 bp, Homo sapien
agacaaatgagccatccgctcatcc

SEQ ID NO: 4879019 - DNA, 25 bp, Homo sapien
gaacaccctaaagctgtctctctgg

SEQ ID NO: 4879020 - DNA, 25 bp, Homo sapien
agcatgcaccttgctttttgattca

SEQ ID NO: 4879021 - DNA, 25 bp, Homo sapien
aagcatgcaccttgctttttgattc

SEQ ID NO: 4879022 - DNA, 25 bp, Homo sapien
ttttgattcagtggaaacccgtaga

SEQ ID NO: 4879023 - DNA, 25 bp, Homo sapien
gattcagtggaaacccgtagaataa

SEQ ID NO: 4879024 - DNA, 25 bp, Homo sapien
gcagcattcctgtaagtggctgtca

SEQ ID NO: 4879025 - DNA, 25 bp, Homo sapien
tctggagcgtccctgtttgacaatt

SEQ ID NO: 4879026 - DNA, 25 bp, Homo sapien
ttgtatgtttacaataagcccaaac

SEQ ID NO: 4879027 - DNA, 25 bp, Homo sapien
aggcttttaaacagctgtatctggc

SEQ ID NO: 4879028 - DNA, 25 bp, Homo sapien
cccggatgagagacaactgagaaca

SEQ ID NO: 4879029 - DNA, 25 bp, Homo sapien
ttcttgttcccggatgagagacaac

SEQ ID NO: 4879030 - DNA, 25 bp, Homo sapien
gaagatgaagttcttgttcccggat

SEQ ID NO: 4879031 - DNA, 25 bp, Homo sapien
tgtagtagatgagaagaagtgaaga

SEQ ID NO: 4879032 - DNA, 25 bp, Homo sapien
caggcggtttgtgcaggaaagcaca

SEQ ID NO: 4879033 - DNA, 25 bp, Homo sapien
ctaaactgagaaggtaattactggg

SEQ ID NO: 4879034 - DNA, 25 bp, Homo sapien
gcacagtgccgtgttgtttacagct

SEQ ID NO: 4879035 - DNA, 25 bp, Homo sapien
gcagctttgactttgacaggcggtt

SEQ ID NO: 4879036 - DNA, 25 bp, Homo sapien
gtaacatgaataaagccaaacctgc

SEQ ID NO: 4879037 - DNA, 25 bp, Homo sapien
tggttctcagctggttctagtcaat

SEQ ID NO: 4879038 - DNA, 25 bp, Homo sapien
tcatacgacataacagaattgccct

SEQ ID NO: 4879039 - DNA, 25 bp, Homo sapien
ggtgagtaaccagatagcaaaagaa

SEQ ID NO: 4879040 - DNA, 25 bp, Homo sapien
gattgtggccatctcggcgcagact

SEQ ID NO: 4879041 - DNA, 25 bp, Homo sapien
tgaagcaactcgcagcatacagagc

SEQ ID NO: 4879042 - DNA, 25 bp, Homo sapien
ccgaggctgcgaagaaggagtacct

SEQ ID NO: 4879043 - DNA, 25 bp, Homo sapien
catgccattggcctttactgaggac

SEQ ID NO: 4879044 - DNA, 25 bp, Homo sapien
tcttcagtatgattaatgataggac

SEQ ID NO: 4879045 - DNA, 25 bp, Homo sapien
cttggccaacaatagaccctcatct

SEQ ID NO: 4879046 - DNA, 25 bp, Homo sapien
gattaatgataggacccagctcctt

SEQ ID NO: 4879047 - DNA, 25 bp, Homo sapien
cagtatgattaatgataggacccag

SEQ ID NO: 4879048 - DNA, 25 bp, Homo sapien
actttgagtcattgcctctttccac

SEQ ID NO: 4879049 - DNA, 25 bp, Homo sapien
ctaactttgagtcattgcctctttc

SEQ ID NO: 4879050 - DNA, 25 bp, Homo sapien
ttgagtcattgcctctttccaccct

SEQ ID NO: 4879051 - DNA, 25 bp, Homo sapien
taactttgagtcattgcctctttcc

SEQ ID NO: 4879052 - DNA, 25 bp, Homo sapien
acttcaaatgcttggtgaacatcca

SEQ ID NO: 4879053 - DNA, 25 bp, Homo sapien
tgacttcaaatgcttggtgaacatc

SEQ ID NO: 4879054 - DNA, 25 bp, Homo sapien
gacttcaaatgcttggtgaacatcc

SEQ ID NO: 4879055 - DNA, 25 bp, Homo sapien
tctgccagtcttaagtgtgaacacc

SEQ ID NO: 4879056 - DNA, 25 bp, Homo sapien
ctcatctgccagtcttaagtgtgaa

SEQ ID NO: 4879057 - DNA, 25 bp, Homo sapien
tgaacaccacccaaggttctgcatc

SEQ ID NO: 4879058 - DNA, 25 bp, Homo sapien
tcttaagtgtgaacaccacccaagg

SEQ ID NO: 4879059 - DNA, 25 bp, Homo sapien
atctctaagatcctgttggacttgg

SEQ ID NO: 4879060 - DNA, 25 bp, Homo sapien
cgatctctaagatcctgttggactt

SEQ ID NO: 4879061 - DNA, 25 bp, Homo sapien
tctggctctatgacatctcactggc

SEQ ID NO: 4879062 - DNA, 25 bp, Homo sapien
gattctggctctatgacatctcact

SEQ ID NO: 4879063 - DNA, 25 bp, Homo sapien
gaagaaatcagagttatctaacaga

SEQ ID NO: 4879064 - DNA, 25 bp, Homo sapien
aagaaatcagagttatctaacagaa

SEQ ID NO: 4879065 - DNA, 25 bp, Homo sapien
gattcccagagctcaaccacaggtg

SEQ ID NO: 4879066 - DNA, 25 bp, Homo sapien
tcatgttgggtcaatagaacaccag

SEQ ID NO: 4879067 - DNA, 25 bp, Homo sapien
ggtggaaatggttctcgaatcccca

SEQ ID NO: 4879068 - DNA, 25 bp, Homo sapien
cagagctcaaccacaggtggaaatg

SEQ ID NO: 4879069 - DNA, 25 bp, Homo sapien
gagacagtttactggtaatgaccat

SEQ ID NO: 4879070 - DNA, 25 bp, Homo sapien
ggagacagtttactggtaatgacca

SEQ ID NO: 4879071 - DNA, 25 bp, Homo sapien
ctgtggcgtgaatggtgagaggtgc

SEQ ID NO: 4879072 - DNA, 25 bp, Homo sapien
ggctgtgcacgaggtgcatctccat

SEQ ID NO: 4879073 - DNA, 25 bp, Homo sapien
ctgtggctgtgcacgaggtgcatct

SEQ ID NO: 4879074 - DNA, 25 bp, Homo sapien
ccatagaagctgtggcgtgaatggt

SEQ ID NO: 4879075 - DNA, 25 bp, Homo sapien
ctttatcacaacagcaggggatggg

SEQ ID NO: 4879076 - DNA, 25 bp, Homo sapien
tgctttatcacaacagcaggggatg

SEQ ID NO: 4879077 - DNA, 25 bp, Homo sapien
tggcctcctgctttatcacaacagc

SEQ ID NO: 4879078 - DNA, 25 bp, Homo sapien
cctgctttatcacaacagcagggga

SEQ ID NO: 4879079 - DNA, 25 bp, Homo sapien
ctagaactgagctctgcgctcctca

SEQ ID NO: 4879080 - DNA, 25 bp, Homo sapien
ttcttctagaactgagctctgcgct

SEQ ID NO: 4879081 - DNA, 25 bp, Homo sapien
tctgtccaggcatgtgtaggggtat

SEQ ID NO: 4879082 - DNA, 25 bp, Homo sapien
ggtggtccttcctccagtgcttctt

SEQ ID NO: 4879083 - DNA, 25 bp, Homo sapien
tagtagaatgtttcgtaatgtgttg

SEQ ID NO: 4879084 - DNA, 25 bp, Homo sapien
cacagaacctggataaagaagacat

SEQ ID NO: 4879085 - DNA, 25 bp, Homo sapien
agaatgtttcgtaatgtgttgaggg

SEQ ID NO: 4879086 - DNA, 25 bp, Homo sapien
aattgttagtagaatgtttcgtaat

SEQ ID NO: 4879087 - DNA, 25 bp, Homo sapien
gcgagggcctggcattgtgataata

SEQ ID NO: 4879088 - DNA, 25 bp, Homo sapien
taccataaggacaaggaccaagttc

SEQ ID NO: 4879089 - DNA, 25 bp, Homo sapien
aggaccaagttcatgcgagggcctg

SEQ ID NO: 4879090 - DNA, 25 bp, Homo sapien
gataccataaggacaaggaccaagt

SEQ ID NO: 4879091 - DNA, 25 bp, Homo sapien
attctctgtgtcaccccatgaacca

SEQ ID NO: 4879092 - DNA, 25 bp, Homo sapien
tgagtctggttaccattctctgtgt

SEQ ID NO: 4879093 - DNA, 25 bp, Homo sapien
gaatgaagttgagtctggttaccat

SEQ ID NO: 4879094 - DNA, 25 bp, Homo sapien
tcaccccatgaaccataatggcctg

SEQ ID NO: 4879095 - DNA, 25 bp, Homo sapien
ccatgggggttaggctccatagctt

SEQ ID NO: 4879096 - DNA, 25 bp, Homo sapien
tctcctttacgaatcctctgaaatc

SEQ ID NO: 4879097 - DNA, 25 bp, Homo sapien
ggccacaaactctcctttacgaatc

SEQ ID NO: 4879098 - DNA, 25 bp, Homo sapien
agccagagggccacaaactctcctt

SEQ ID NO: 4879099 - DNA, 25 bp, Homo sapien
ctcgcgactctcttgtgtcttgaac

SEQ ID NO: 4879100 - DNA, 25 bp, Homo sapien
gtagctcagcactagcaacacctcg

SEQ ID NO: 4879101 - DNA, 25 bp, Homo sapien
acaagagtcctgttgcgtagctcag

SEQ ID NO: 4879102 - DNA, 25 bp, Homo sapien
cgcgactctcttgtgtcttgaacca

SEQ ID NO: 4879103 - DNA, 25 bp, Homo sapien
agagtgatgcacagtgcctcttgcg

SEQ ID NO: 4879104 - DNA, 25 bp, Homo sapien
tcctgcttcccatccgcagagtgat

SEQ ID NO: 4879105 - DNA, 25 bp, Homo sapien
cttcccatccgcagagtgatgcaca

SEQ ID NO: 4879106 - DNA, 25 bp, Homo sapien
cagagtgatgcacagtgcctcttgc

SEQ ID NO: 4879107 - DNA, 25 bp, Homo sapien
tcatggtagttcactccactctaac

SEQ ID NO: 4879108 - DNA, 25 bp, Homo sapien
ccaaaccctggctaaaggcaccttg

SEQ ID NO: 4879109 - DNA, 25 bp, Homo sapien
ttaatgcctcctgaactttgtcccg

SEQ ID NO: 4879110 - DNA, 25 bp, Homo sapien
aaagtgagtgggctactgaaaggaa

SEQ ID NO: 4879111 - DNA, 25 bp, Homo sapien
taaaggcaccttgttgcttaatgcc

SEQ ID NO: 4879112 - DNA, 25 bp, Homo sapien
caatggttggggccattttcaacaa

SEQ ID NO: 4879113 - DNA, 25 bp, Homo sapien
tcaatggttggggccattttcaaca

SEQ ID NO: 4879114 - DNA, 25 bp, Homo sapien
cgtaacccaaatcccatggccggtg

SEQ ID NO: 4879115 - DNA, 25 bp, Homo sapien
ctcttgaaaagggtccagccataaa

SEQ ID NO: 4879116 - DNA, 25 bp, Homo sapien
tgacaggttcatccttctgccattc

SEQ ID NO: 4879117 - DNA, 25 bp, Homo sapien
ttgacaggttcatccttctgccatt

SEQ ID NO: 4879118 - DNA, 25 bp, Homo sapien
gaaaagggtccagccataaatatcc

SEQ ID NO: 4879119 - DNA, 25 bp, Homo sapien
gttagctgttccgacatgaccttga

SEQ ID NO: 4879120 - DNA, 25 bp, Homo sapien
agctgttccgacatgaccttgaatg

SEQ ID NO: 4879121 - DNA, 25 bp, Homo sapien
tcaggttagctgttccgacatgacc

SEQ ID NO: 4879122 - DNA, 25 bp, Homo sapien
catgaccttgaatgtgttgggttgc

SEQ ID NO: 4879123 - DNA, 25 bp, Homo sapien
tgccttcccctggacacttcaaagt

SEQ ID NO: 4879124 - DNA, 25 bp, Homo sapien
attgccttcccctggacacttcaaa

SEQ ID NO: 4879125 - DNA, 25 bp, Homo sapien
tcccctggacacttcaaagtccaca

SEQ ID NO: 4879126 - DNA, 25 bp, Homo sapien
cttcccctggacacttcaaagtcca

SEQ ID NO: 4879127 - DNA, 25 bp, Homo sapien
ctcaggtgatggcttagcagtctct

SEQ ID NO: 4879128 - DNA, 25 bp, Homo sapien
gtctcatgtgatttccagaccaatg

SEQ ID NO: 4879129 - DNA, 25 bp, Homo sapien
tgccacgtggacctccggtcctttc

SEQ ID NO: 4879130 - DNA, 25 bp, Homo sapien
gatttccagaccaatgactcatggg

SEQ ID NO: 4879131 - DNA, 25 bp, Homo sapien
ctgcaggacgtatgactggtcatta

SEQ ID NO: 4879132 - DNA, 25 bp, Homo sapien
tgcaggacgtatgactggtcattac

SEQ ID NO: 4879133 - DNA, 25 bp, Homo sapien
ttctcggggaaaagtgtcaccgcca

SEQ ID NO: 4879134 - DNA, 25 bp, Homo sapien
gccattgaggaggccgcaacattga

SEQ ID NO: 4879135 - DNA, 25 bp, Homo sapien
gaggaggccgcaacattgagacttc

SEQ ID NO: 4879136 - DNA, 25 bp, Homo sapien
atagcctgacaggaagatttgccag

SEQ ID NO: 4879137 - DNA, 25 bp, Homo sapien
gtatctttatgttctttagataaat

SEQ ID NO: 4879138 - DNA, 25 bp, Homo sapien
ctttatgttctttagataaattatg

SEQ ID NO: 4879139 - DNA, 25 bp, Homo sapien
tgtatctttatgttctttagataaa

SEQ ID NO: 4879140 - DNA, 25 bp, Homo sapien
ttgttaaacaatgtccagttactac

SEQ ID NO: 4879141 - DNA, 25 bp, Homo sapien
tttgttaaacaatgtccagttacta

SEQ ID NO: 4879142 - DNA, 25 bp, Homo sapien
gagaaaacattgctctgccaatagt

SEQ ID NO: 4879143 - DNA, 25 bp, Homo sapien
agaaaacattgctctgccaatagtt

SEQ ID NO: 4879144 - DNA, 25 bp, Homo sapien
taaagcaggtcgtcagcattttcct

SEQ ID NO: 4879145 - DNA, 25 bp, Homo sapien
tagcttggatttggattgctttgtc

SEQ ID NO: 4879146 - DNA, 25 bp, Homo sapien
aagctttccagttctagctactttg

SEQ ID NO: 4879147 - DNA, 25 bp, Homo sapien
ttgtctgccgataggaagctttcca

SEQ ID NO: 4879148 - DNA, 25 bp, Homo sapien
ccaagagagctgtcccaatgtattg

SEQ ID NO: 4879149 - DNA, 25 bp, Homo sapien
gagagctgtcccaatgtattgttaa

SEQ ID NO: 4879150 - DNA, 25 bp, Homo sapien
gctgtcccaatgtattgttaagaat

SEQ ID NO: 4879151 - DNA, 25 bp, Homo sapien
acagtaagctgaattctccaagaga

SEQ ID NO: 4879152 - DNA, 25 bp, Homo sapien
agcagcactctgaagtaggtcatca

SEQ ID NO: 4879153 - DNA, 25 bp, Homo sapien
gcactctgaagtaggtcatcacagt

SEQ ID NO: 4879154 - DNA, 25 bp, Homo sapien
taaaacctgtcctctaagatgccag

SEQ ID NO: 4879155 - DNA, 25 bp, Homo sapien
aaaacctgtcctctaagatgccagc

SEQ ID NO: 4879156 - DNA, 25 bp, Homo sapien
gcagtacatggtacctgaatgtcac

SEQ ID NO: 4879157 - DNA, 25 bp, Homo sapien
catttctcagtgtccaagggttaca

SEQ ID NO: 4879158 - DNA, 25 bp, Homo sapien
caaatggcaagtgctgttaatagca

SEQ ID NO: 4879159 - DNA, 25 bp, Homo sapien
tgatagaatcactctgtgcagtaca

SEQ ID NO: 4879160 - DNA, 25 bp, Homo sapien
cacttgcagatttttgtttgggtac

SEQ ID NO: 4879161 - DNA, 25 bp, Homo sapien
gcttccctgaagattccaaggactt

SEQ ID NO: 4879162 - DNA, 25 bp, Homo sapien
tacattttctttcagtgtgcttccc

SEQ ID NO: 4879163 - DNA, 25 bp, Homo sapien
tgtgcaaggcaaaatcttggccact

SEQ ID NO: 4879164 - DNA, 25 bp, Homo sapien
tttcttattctgaggcgctgagtag

SEQ ID NO: 4879165 - DNA, 25 bp, Homo sapien
tctgaggcgctgagtagctctgcat

SEQ ID NO: 4879166 - DNA, 25 bp, Homo sapien
ttcttattctgaggcgctgagtagc

SEQ ID NO: 4879167 - DNA, 25 bp, Homo sapien
tattctgaggcgctgagtagctctg

SEQ ID NO: 4879168 - DNA, 25 bp, Homo sapien
caaggttgccgtagaacacgggcag

SEQ ID NO: 4879169 - DNA, 25 bp, Homo sapien
cagtgtggtgtgagcgcaaggttgc

SEQ ID NO: 4879170 - DNA, 25 bp, Homo sapien
ctgagatcctagaggcagtgtggtg

SEQ ID NO: 4879171 - DNA, 25 bp, Homo sapien
tgtgagcgcaaggttgccgtagaac

SEQ ID NO: 4879172 - DNA, 25 bp, Homo sapien
gctgcactggaatcctcactagcca

SEQ ID NO: 4879173 - DNA, 25 bp, Homo sapien
ttaaatttcccatatgtagtgggat

SEQ ID NO: 4879174 - DNA, 25 bp, Homo sapien
tagtgggatctgcttctagcctttt

SEQ ID NO: 4879175 - DNA, 25 bp, Homo sapien
atttaagatcaaatatatggtcagc

SEQ ID NO: 4879176 - DNA, 25 bp, Homo sapien
caactcatcatagtcagcatgctgg

SEQ ID NO: 4879177 - DNA, 25 bp, Homo sapien
agaccctctgacttggagcgcacaa

SEQ ID NO: 4879178 - DNA, 25 bp, Homo sapien
tcacagggctcgcacttaggagtcc

SEQ ID NO: 4879179 - DNA, 25 bp, Homo sapien
taggagtccctatagcttgtacatc

SEQ ID NO: 4879180 - DNA, 25 bp, Homo sapien
tgtttctgggcagccaggctctccc

SEQ ID NO: 4879181 - DNA, 25 bp, Homo sapien
ctgcccacagtgggcttctgtttct

SEQ ID NO: 4879182 - DNA, 25 bp, Homo sapien
ttctgtttctgggcagccaggctct

SEQ ID NO: 4879183 - DNA, 25 bp, Homo sapien
tttctgggcagccaggctctcccat

SEQ ID NO: 4879184 - DNA, 25 bp, Homo sapien
ctctgttggcgtttttgaaggtatc

SEQ ID NO: 4879185 - DNA, 25 bp, Homo sapien
tgtccaaacatattcagaaatctct

SEQ ID NO: 4879186 - DNA, 25 bp, Homo sapien
gaaggtatctcataatcttccagta

SEQ ID NO: 4879187 - DNA, 25 bp, Homo sapien
cagaaatctctgttggcgtttttga

SEQ ID NO: 4879188 - DNA, 25 bp, Homo sapien
gtgaaaagttgcaaaaactcgagtg

SEQ ID NO: 4879189 - DNA, 25 bp, Homo sapien
aagttgcaaaaactcgagtgaaagg

SEQ ID NO: 4879190 - DNA, 25 bp, Homo sapien
gaaaagttgcaaaaactcgagtgaa

SEQ ID NO: 4879191 - DNA, 25 bp, Homo sapien
ctagtgaaaagttgcaaaaactcga

SEQ ID NO: 4879192 - DNA, 25 bp, Homo sapien
ccattcttgcagtaacctgattcca

SEQ ID NO: 4879193 - DNA, 25 bp, Homo sapien
cattcttgcagtaacctgattccat

SEQ ID NO: 4879194 - DNA, 25 bp, Homo sapien
ataatcatgcgaacatatccattct

SEQ ID NO: 4879195 - DNA, 25 bp, Homo sapien
cttccattgtacagggagcccttca

SEQ ID NO: 4879196 - DNA, 25 bp, Homo sapien
tgtgagacccactcaaaggactgtg

SEQ ID NO: 4879197 - DNA, 25 bp, Homo sapien
gaagctcctcgatgctgtgtccagt

SEQ ID NO: 4879198 - DNA, 25 bp, Homo sapien
gacagtgttgacacacaggcaggct

SEQ ID NO: 4879199 - DNA, 25 bp, Homo sapien
gagcacgtcgcgttcaagtccaaag

SEQ ID NO: 4879200 - DNA, 25 bp, Homo sapien
ggcgagtcatcaccaaacggctttt

SEQ ID NO: 4879201 - DNA, 25 bp, Homo sapien
gacgtgtctaagcagtcccgttgga

SEQ ID NO: 4879202 - DNA, 25 bp, Homo sapien
gagttctctaaaacgctgggcgggc

SEQ ID NO: 4879203 - DNA, 25 bp, Homo sapien
accacaaacggatgtgagggaagga

SEQ ID NO: 4879204 - DNA, 25 bp, Homo sapien
gagagttgagcgcttttcccccctc

SEQ ID NO: 4879205 - DNA, 25 bp, Homo sapien
aggctgcgcgctcggcgccgacggg

SEQ ID NO: 4879206 - DNA, 25 bp, Homo sapien
caagaggcggcggtggagcaggctg

SEQ ID NO: 4879207 - DNA, 25 bp, Homo sapien
cagccattgggccttgacgagcccg

SEQ ID NO: 4879208 - DNA, 25 bp, Homo sapien
ttcgatcggctcgagtccctcggac

SEQ ID NO: 4879209 - DNA, 25 bp, Homo sapien
tcggcagcccctttgtgtgcgacgc

SEQ ID NO: 4879210 - DNA, 25 bp, Homo sapien
cagttgcccactcacagcgtgcaaa

SEQ ID NO: 4879211 - DNA, 25 bp, Homo sapien
tttacacttcgaatcacccctgtgg

SEQ ID NO: 4879212 - DNA, 25 bp, Homo sapien
tttgtgagtccccaaggcagcctca

SEQ ID NO: 4879213 - DNA, 25 bp, Homo sapien
tcccatgaaggacaacaagcaaact

SEQ ID NO: 4879214 - DNA, 25 bp, Homo sapien
tccctttagccggattgtgtgctga

SEQ ID NO: 4879215 - DNA, 25 bp, Homo sapien
tccttcgcagagttttgggccctag

SEQ ID NO: 4879216 - DNA, 25 bp, Homo sapien
catgagatggaggacaatgtcgccc

SEQ ID NO: 4879217 - DNA, 25 bp, Homo sapien
aaatgcacgggaacagacagctatg

SEQ ID NO: 4879218 - DNA, 25 bp, Homo sapien
agataaatctgttggacggcagcca

SEQ ID NO: 4879219 - DNA, 25 bp, Homo sapien
caggcacattttagtatctacaaca

SEQ ID NO: 4879220 - DNA, 25 bp, Homo sapien
gcacattttagtatctacaacagta

SEQ ID NO: 4879221 - DNA, 25 bp, Homo sapien
ttttagtatctacaacagtatttgg

SEQ ID NO: 4879222 - DNA, 25 bp, Homo sapien
tacaggcacattttagtatctacaa

SEQ ID NO: 4879223 - DNA, 25 bp, Homo sapien
tgttggattgaggatagaaatttaa

SEQ ID NO: 4879224 - DNA, 25 bp, Homo sapien
taataaatgttggattgaggataga

SEQ ID NO: 4879225 - DNA, 25 bp, Homo sapien
tggattgaggatagaaatttaagct

SEQ ID NO: 4879226 - DNA, 25 bp, Homo sapien
ttggattgaggatagaaatttaagc

SEQ ID NO: 4879227 - DNA, 25 bp, Homo sapien
tcagattacactgagatggcctctc

SEQ ID NO: 4879228 - DNA, 25 bp, Homo sapien
tacactccgatggaagaaaccagac

SEQ ID NO: 4879229 - DNA, 25 bp, Homo sapien
cccaggagtcaagatgcagataatg

SEQ ID NO: 4879230 - DNA, 25 bp, Homo sapien
tttttgatgggccttggatacagca

SEQ ID NO: 4879231 - DNA, 25 bp, Homo sapien
tccttcatccaactggtcacaaagt

SEQ ID NO: 4879232 - DNA, 25 bp, Homo sapien
ccttcatccaactggtcacaaagtt

SEQ ID NO: 4879233 - DNA, 25 bp, Homo sapien
ctccttcatccaactggtcacaaag

SEQ ID NO: 4879234 - DNA, 25 bp, Homo sapien
agacagagcatggacatgcagcccc

SEQ ID NO: 4879235 - DNA, 25 bp, Homo sapien
gagacagagcatggacatgcagccc

SEQ ID NO: 4879236 - DNA, 25 bp, Homo sapien
taattacaagcctgattatcttcta

SEQ ID NO: 4879237 - DNA, 25 bp, Homo sapien
taatcgttcccctgaaatcctatca

SEQ ID NO: 4879238 - DNA, 25 bp, Homo sapien
tcactctcttgccacattaatcgtt

SEQ ID NO: 4879239 - DNA, 25 bp, Homo sapien
gaggattgatgtaagtctccagcaa

SEQ ID NO: 4879240 - DNA, 25 bp, Homo sapien
ggaagagaaagcgtgggcttctcag

SEQ ID NO: 4879241 - DNA, 25 bp, Homo sapien
agccacacagccgacgtgggtgcag

SEQ ID NO: 4879242 - DNA, 25 bp, Homo sapien
aggcgaaaaatgccagtccacagca

SEQ ID NO: 4879243 - DNA, 25 bp, Homo sapien
gatcgttgctaatgaaggcgaaaaa

SEQ ID NO: 4879244 - DNA, 25 bp, Homo sapien
ttaacccacaccacaagccgtttca

SEQ ID NO: 4879245 - DNA, 25 bp, Homo sapien
taacccacaccacaagccgtttcac

SEQ ID NO: 4879246 - DNA, 25 bp, Homo sapien
ggcgtagcctgtttgccagccacag

SEQ ID NO: 4879247 - DNA, 25 bp, Homo sapien
tccataagaccagtccaagaagggc

SEQ ID NO: 4879248 - DNA, 25 bp, Homo sapien
gcctctacccatgagagtcccatgg

SEQ ID NO: 4879249 - DNA, 25 bp, Homo sapien
tacccgtgcaggagctaggcattct

SEQ ID NO: 4879250 - DNA, 25 bp, Homo sapien
tcatgtgcaataggaaagtaaccca

SEQ ID NO: 4879251 - DNA, 25 bp, Homo sapien
gacccaactcatggtaatagaaaaa

SEQ ID NO: 4879252 - DNA, 25 bp, Homo sapien
tatagttttcaatgatacctccagt

SEQ ID NO: 4879253 - DNA, 25 bp, Homo sapien
ttcctaagattgttaactctgtgac

SEQ ID NO: 4879254 - DNA, 25 bp, Homo sapien
tgcagtttccttaggcccgccaagg

SEQ ID NO: 4879255 - DNA, 25 bp, Homo sapien
aaggcctgttttgttctcatgccac

SEQ ID NO: 4879256 - DNA, 25 bp, Homo sapien
gcttcagcttatctggccctgtggt

SEQ ID NO: 4879257 - DNA, 25 bp, Homo sapien
cctgtggttccctgatgatcagctg

SEQ ID NO: 4879258 - DNA, 25 bp, Homo sapien
taatgtccttcaacctgttttgcac

SEQ ID NO: 4879259 - DNA, 25 bp, Homo sapien
ttaatgtccttcaacctgttttgca

SEQ ID NO: 4879260 - DNA, 25 bp, Homo sapien
cactgtgtgaaggagtttcccacca

SEQ ID NO: 4879261 - DNA, 25 bp, Homo sapien
tcactgtgtgaaggagtttcccacc

SEQ ID NO: 4879262 - DNA, 25 bp, Homo sapien
tcttggctccgggtacttgtttctg

SEQ ID NO: 4879263 - DNA, 25 bp, Homo sapien
agccaggagcactcacacattccag

SEQ ID NO: 4879264 - DNA, 25 bp, Homo sapien
caggacaacgtctacttaatgaagt

SEQ ID NO: 4879265 - DNA, 25 bp, Homo sapien
tggctccgggtacttgtttctgttc

SEQ ID NO: 4879266 - DNA, 25 bp, Homo sapien
tctgggcaaacagaggaccggaatg

SEQ ID NO: 4879267 - DNA, 25 bp, Homo sapien
ggttgtcaatctgccactggatcca

SEQ ID NO: 4879268 - DNA, 25 bp, Homo sapien
gcaccgcatttagtctctgggcaaa

SEQ ID NO: 4879269 - DNA, 25 bp, Homo sapien
ggaccactttcatcaaccctttatg

SEQ ID NO: 4879270 - DNA, 25 bp, Homo sapien
ttgaatccagtctctgtgtgaccat

SEQ ID NO: 4879271 - DNA, 25 bp, Homo sapien
gagtagcgtctgtcatcatcatgac

SEQ ID NO: 4879272 - DNA, 25 bp, Homo sapien
ccagaatacagcgtttgtgtggtga

SEQ ID NO: 4879273 - DNA, 25 bp, Homo sapien
tcatcatgactgtacgaagcacggc

SEQ ID NO: 4879274 - DNA, 25 bp, Homo sapien
tcatagggttaagcggaaggttaga

SEQ ID NO: 4879275 - DNA, 25 bp, Homo sapien
ttcttcttccacgaaggggaatcca

SEQ ID NO: 4879276 - DNA, 25 bp, Homo sapien
ttcttccacgaaggggaatccattc

SEQ ID NO: 4879277 - DNA, 25 bp, Homo sapien
cagtttaggttcttcttccacgaag

SEQ ID NO: 4879278 - DNA, 25 bp, Homo sapien
gccacaaactaatcacatctataca

SEQ ID NO: 4879279 - DNA, 25 bp, Homo sapien
gatacaccaggagaccagtcctcaa

SEQ ID NO: 4879280 - DNA, 25 bp, Homo sapien
cagtcctcaatgtgttcagtggtaa

SEQ ID NO: 4879281 - DNA, 25 bp, Homo sapien
tgacaacggagagaaaccacttggc

SEQ ID NO: 4879282 - DNA, 25 bp, Homo sapien
ttcagaatgaggctttgacaacgga

SEQ ID NO: 4879283 - DNA, 25 bp, Homo sapien
ttgattgggcaacgatttctcttct

SEQ ID NO: 4879284 - DNA, 25 bp, Homo sapien
ttcatccatgctgtgaaagccagca

SEQ ID NO: 4879285 - DNA, 25 bp, Homo sapien
tgttctcccatttgattgggcaacg

SEQ ID NO: 4879286 - DNA, 25 bp, Homo sapien
tcccatttgattgggcaacgatttc

SEQ ID NO: 4879287 - DNA, 25 bp, Homo sapien
tggaagacagatgtaggtcttaaag

SEQ ID NO: 4879288 - DNA, 25 bp, Homo sapien
aggtcttaaaggcagactaaaacag

SEQ ID NO: 4879289 - DNA, 25 bp, Homo sapien
gacagatgtaggtcttaaaggcaga

SEQ ID NO: 4879290 - DNA, 25 bp, Homo sapien
gacactgttgccaacaacagcaaca

SEQ ID NO: 4879291 - DNA, 25 bp, Homo sapien
ttcccatcatagtcaccacatcaat

SEQ ID NO: 4879292 - DNA, 25 bp, Homo sapien
ttcgttcccatcatagtcaccacat

SEQ ID NO: 4879293 - DNA, 25 bp, Homo sapien
tttcgttcccatcatagtcaccaca

SEQ ID NO: 4879294 - DNA, 25 bp, Homo sapien
cgttcccatcatagtcaccacatca

SEQ ID NO: 4879295 - DNA, 25 bp, Homo sapien
tacttcacaagatgagctttgagga

SEQ ID NO: 4879296 - DNA, 25 bp, Homo sapien
gcaaaaagtaccattgtcctcacat

SEQ ID NO: 4879297 - DNA, 25 bp, Homo sapien
caatgcagcaagtccaaaaaaattt

SEQ ID NO: 4879298 - DNA, 25 bp, Homo sapien
tattctactggtaattacattgccg

SEQ ID NO: 4879299 - DNA, 25 bp, Homo sapien
tatttcagagttgcagggctttgcc

SEQ ID NO: 4879300 - DNA, 25 bp, Homo sapien
gactctaggagtaaaggctacacca

SEQ ID NO: 4879301 - DNA, 25 bp, Homo sapien
tttagtcggcaatcaaaatgtccag

SEQ ID NO: 4879302 - DNA, 25 bp, Homo sapien
acatgaatcatacgcttggccccag

SEQ ID NO: 4879303 - DNA, 25 bp, Homo sapien
cagatgctgccggtgtagatactgg

SEQ ID NO: 4879304 - DNA, 25 bp, Homo sapien
tgctgccggtgtagatactgggcat

SEQ ID NO: 4879305 - DNA, 25 bp, Homo sapien
tagatactgggcatttcagtaggca

SEQ ID NO: 4879306 - DNA, 25 bp, Homo sapien
ggcatttcagtaggcacagtcatca

SEQ ID NO: 4879307 - DNA, 25 bp, Homo sapien
tggcagttctctccaagtgatattt

SEQ ID NO: 4879308 - DNA, 25 bp, Homo sapien
taattgatcccgctcaactattctt

SEQ ID NO: 4879309 - DNA, 25 bp, Homo sapien
ggaatctaattgatcccgctcaact

SEQ ID NO: 4879310 - DNA, 25 bp, Homo sapien
cacaaccaaccatagagggcctgac

SEQ ID NO: 4879311 - DNA, 25 bp, Homo sapien
attgatcccgctcaactattctttc

SEQ ID NO: 4879312 - DNA, 25 bp, Homo sapien
caatttgttcccacatttcagtgag

SEQ ID NO: 4879313 - DNA, 25 bp, Homo sapien
ctggccaatttgttcccacatttca

SEQ ID NO: 4879314 - DNA, 25 bp, Homo sapien
ggccaatttgttcccacatttcagt

SEQ ID NO: 4879315 - DNA, 25 bp, Homo sapien
ttgttcccacatttcagtgagaatg

SEQ ID NO: 4879316 - DNA, 25 bp, Homo sapien
ctccctgatttagatcaccaagaga

SEQ ID NO: 4879317 - DNA, 25 bp, Homo sapien
gagactcaactacattctgcccatc

SEQ ID NO: 4879318 - DNA, 25 bp, Homo sapien
gatcaccaagagactcaactacatt

SEQ ID NO: 4879319 - DNA, 25 bp, Homo sapien
gatttagatcaccaagagactcaac

SEQ ID NO: 4879320 - DNA, 25 bp, Homo sapien
cagttgtcctctgggcataacctct

SEQ ID NO: 4879321 - DNA, 25 bp, Homo sapien
gctgaatagtcaaacttggcagggc

SEQ ID NO: 4879322 - DNA, 25 bp, Homo sapien
gaatagtcaaacttggcagggcagg

SEQ ID NO: 4879323 - DNA, 25 bp, Homo sapien
tggagacctgctcagttgtcctctg

SEQ ID NO: 4879324 - DNA, 25 bp, Homo sapien
tatctggcattacgcgcaattctgg

SEQ ID NO: 4879325 - DNA, 25 bp, Homo sapien
aacagtatctggcattacgcgcaat

SEQ ID NO: 4879326 - DNA, 25 bp, Homo sapien
tggcattacgcgcaattctggctgc

SEQ ID NO: 4879327 - DNA, 25 bp, Homo sapien
ttacgcgcaattctggctgctttga

SEQ ID NO: 4879328 - DNA, 25 bp, Homo sapien
tttccatccaagtattatccaggcc

SEQ ID NO: 4879329 - DNA, 25 bp, Homo sapien
cgaccctgcttagcttctgagatca

SEQ ID NO: 4879330 - DNA, 25 bp, Homo sapien
gggcgcgttcagggtgttatggcca

SEQ ID NO: 4879331 - DNA, 25 bp, Homo sapien
gcgcgttcagggtgttatggccata

SEQ ID NO: 4879332 - DNA, 25 bp, Homo sapien
cttttgcagaattcttgattaagca

SEQ ID NO: 4879333 - DNA, 25 bp, Homo sapien
ttttgcagaattcttgattaagcac

SEQ ID NO: 4879334 - DNA, 25 bp, Homo sapien
acttttgcagaattcttgattaagc

SEQ ID NO: 4879335 - DNA, 25 bp, Homo sapien
tacttttgcagaattcttgattaag

SEQ ID NO: 4879336 - DNA, 25 bp, Homo sapien
atcccaggctgtcacggcacactca

SEQ ID NO: 4879337 - DNA, 25 bp, Homo sapien
gctgtcacggcacactcaacatttg

SEQ ID NO: 4879338 - DNA, 25 bp, Homo sapien
gtcacggcacactcaacatttgtca

SEQ ID NO: 4879339 - DNA, 25 bp, Homo sapien
aggctgtcacggcacactcaacatt

SEQ ID NO: 4879340 - DNA, 25 bp, Homo sapien
tttacctccctcaacataaattctg

SEQ ID NO: 4879341 - DNA, 25 bp, Homo sapien
attctttgccacatccagatttatt

SEQ ID NO: 4879342 - DNA, 25 bp, Homo sapien
ttctttgccacatccagatttattt

SEQ ID NO: 4879343 - DNA, 25 bp, Homo sapien
atcaaacactccatttactgacagc

SEQ ID NO: 4879344 - DNA, 25 bp, Homo sapien
catttactgacagcacaaggagcat

SEQ ID NO: 4879345 - DNA, 25 bp, Homo sapien
tttactgacagcacaaggagcatag

SEQ ID NO: 4879346 - DNA, 25 bp, Homo sapien
catcaaacactccatttactgacag

SEQ ID NO: 4879347 - DNA, 25 bp, Homo sapien
ctttcctgccacctgattgcaatat

SEQ ID NO: 4879348 - DNA, 25 bp, Homo sapien
tataccacagtcctatccataacaa

SEQ ID NO: 4879349 - DNA, 25 bp, Homo sapien
tcctgccacctgattgcaatattca

SEQ ID NO: 4879350 - DNA, 25 bp, Homo sapien
ttcactagatataccacagtcctat

SEQ ID NO: 4879351 - DNA, 25 bp, Homo sapien
cagattcctagctatttctaggcag

SEQ ID NO: 4879352 - DNA, 25 bp, Homo sapien
agattcctagctatttctaggcaga

SEQ ID NO: 4879353 - DNA, 25 bp, Homo sapien
gattcctagctatttctaggcagat

SEQ ID NO: 4879354 - DNA, 25 bp, Homo sapien
ttcctagctatttctaggcagattg

SEQ ID NO: 4879355 - DNA, 25 bp, Homo sapien
tccatactgctacttgctacttctt

SEQ ID NO: 4879356 - DNA, 25 bp, Homo sapien
gtcttccatactgctacttgctact

SEQ ID NO: 4879357 - DNA, 25 bp, Homo sapien
agccacaagtcttccatactgctac

SEQ ID NO: 4879358 - DNA, 25 bp, Homo sapien
cacaagtcttccatactgctacttg

SEQ ID NO: 4879359 - DNA, 25 bp, Homo sapien
cctcctggtgcataacagtgcgaag

SEQ ID NO: 4879360 - DNA, 25 bp, Homo sapien
taggaagtccctaggcagtatctga

SEQ ID NO: 4879361 - DNA, 25 bp, Homo sapien
gctgctacgtataactgcctccaag

SEQ ID NO: 4879362 - DNA, 25 bp, Homo sapien
tacctgtataacagtgggaccttga

SEQ ID NO: 4879363 - DNA, 25 bp, Homo sapien
tttctatcttgcctcagtggagaag

SEQ ID NO: 4879364 - DNA, 25 bp, Homo sapien
ttagtttctatcttgcctcagtgga

SEQ ID NO: 4879365 - DNA, 25 bp, Homo sapien
tagtttctatcttgcctcagtggag

SEQ ID NO: 4879366 - DNA, 25 bp, Homo sapien
tatcttgcctcagtggagaaggaag

SEQ ID NO: 4879367 - DNA, 25 bp, Homo sapien
tgtaaaatacaactggacagaaggg

SEQ ID NO: 4879368 - DNA, 25 bp, Homo sapien
attcaatgatgtatggacagccatg

SEQ ID NO: 4879369 - DNA, 25 bp, Homo sapien
cactgacattcaatgatgtatggac

SEQ ID NO: 4879370 - DNA, 25 bp, Homo sapien
cagaaggggtatgatcgaatgctta

SEQ ID NO: 4879371 - DNA, 25 bp, Homo sapien
gcccttttggtccagctgctagagt

SEQ ID NO: 4879372 - DNA, 25 bp, Homo sapien
ccagctgctagagttgggatgtgaa

SEQ ID NO: 4879373 - DNA, 25 bp, Homo sapien
gaaggaggggactgtagatcacaca

SEQ ID NO: 4879374 - DNA, 25 bp, Homo sapien
gatgcctggtaatacgcccttttgg

SEQ ID NO: 4879375 - DNA, 25 bp, Homo sapien
tgcaccttatcagaatgaacatgcc

SEQ ID NO: 4879376 - DNA, 25 bp, Homo sapien
gacttattatcagcttctatgcacc

SEQ ID NO: 4879377 - DNA, 25 bp, Homo sapien
tctttgacagtctgtggctgattgc

SEQ ID NO: 4879378 - DNA, 25 bp, Homo sapien
gattgctgatagtgttagaatagac

SEQ ID NO: 4879379 - DNA, 25 bp, Homo sapien
gatatagctgcggtttggaaacgcc

SEQ ID NO: 4879380 - DNA, 25 bp, Homo sapien
tttggaaacgccaaacgtggtgcta

SEQ ID NO: 4879381 - DNA, 25 bp, Homo sapien
ttgtgacgggatatagctgcggttt

SEQ ID NO: 4879382 - DNA, 25 bp, Homo sapien
cgtggtgctattgaagatcacagat

SEQ ID NO: 4879383 - DNA, 25 bp, Homo sapien
aaataacgtacataaagaagggctg

SEQ ID NO: 4879384 - DNA, 25 bp, Homo sapien
gacaaaccaaatcttgctgtgaagg

SEQ ID NO: 4879385 - DNA, 25 bp, Homo sapien
gcaccttcagtgcatatgagaacta

SEQ ID NO: 4879386 - DNA, 25 bp, Homo sapien
ctgcctgaaactccagattgtggcc

SEQ ID NO: 4879387 - DNA, 25 bp, Homo sapien
agctcaactcctctaaaactgttca

SEQ ID NO: 4879388 - DNA, 25 bp, Homo sapien
tatcagctcaactcctctaaaactg

SEQ ID NO: 4879389 - DNA, 25 bp, Homo sapien
gaaatatcagctcaactcctctaaa

SEQ ID NO: 4879390 - DNA, 25 bp, Homo sapien
agaagaaatatcagctcaactcctc

SEQ ID NO: 4879391 - DNA, 25 bp, Homo sapien
tccgtttggtgatggattttcttcc

SEQ ID NO: 4879392 - DNA, 25 bp, Homo sapien
atgtccgtttggtgatggattttct

SEQ ID NO: 4879393 - DNA, 25 bp, Homo sapien
tgtccgtttggtgatggattttctt

SEQ ID NO: 4879394 - DNA, 25 bp, Homo sapien
catgtggatttcacaggagattctt

SEQ ID NO: 4879395 - DNA, 25 bp, Homo sapien
tctgtgccagtgtggatctttctgg

SEQ ID NO: 4879396 - DNA, 25 bp, Homo sapien
ttctggaagagctaactggttcctc

SEQ ID NO: 4879397 - DNA, 25 bp, Homo sapien
agctaactggttcctcagagcctct

SEQ ID NO: 4879398 - DNA, 25 bp, Homo sapien
ggcaaagttgctggtagctcctgtc

SEQ ID NO: 4879399 - DNA, 25 bp, Homo sapien
agctcctgtcccaagtccataaatg

SEQ ID NO: 4879400 - DNA, 25 bp, Homo sapien
tgtcccaagtccataaatggtttcc

SEQ ID NO: 4879401 - DNA, 25 bp, Homo sapien
tcagaagacataggttgaggcaaag

SEQ ID NO: 4879402 - DNA, 25 bp, Homo sapien
ccttctgtggcagtagggtacacta

SEQ ID NO: 4879403 - DNA, 25 bp, Homo sapien
tacactagcctagaatgtgcccaag

SEQ ID NO: 4879404 - DNA, 25 bp, Homo sapien
tgcccaagtgtgcaggccacaatgg

SEQ ID NO: 4879405 - DNA, 25 bp, Homo sapien
tcattgctgatcatgctgaaacggc

SEQ ID NO: 4879406 - DNA, 25 bp, Homo sapien
tttttcagttgtttggcttttgcga

SEQ ID NO: 4879407 - DNA, 25 bp, Homo sapien
ttttcagttgtttggcttttgcgat

SEQ ID NO: 4879408 - DNA, 25 bp, Homo sapien
tgacttattgtttttccagtcctgc

SEQ ID NO: 4879409 - DNA, 25 bp, Homo sapien
gctttaagctaacaacagcatgaca

SEQ ID NO: 4879410 - DNA, 25 bp, Homo sapien
tctttgcctcttgattgaaggattg

SEQ ID NO: 4879411 - DNA, 25 bp, Homo sapien
ttatggtacaaagttctgttgacag

SEQ ID NO: 4879412 - DNA, 25 bp, Homo sapien
ggaaccttctggagatccacagtag

SEQ ID NO: 4879413 - DNA, 25 bp, Homo sapien
gtgtgattccctccctcagtatgtc

SEQ ID NO: 4879414 - DNA, 25 bp, Homo sapien
cagaacctggagctgtaactgtgtg

SEQ ID NO: 4879415 - DNA, 25 bp, Homo sapien
tgtggctgatagttgcaagagtcca

SEQ ID NO: 4879416 - DNA, 25 bp, Homo sapien
caggtacaccatagaggaattgccc

SEQ ID NO: 4879417 - DNA, 25 bp, Homo sapien
cctggaatgcccatggcggatacat

SEQ ID NO: 4879418 - DNA, 25 bp, Homo sapien
gatacatggcggtaaacatggctgc

SEQ ID NO: 4879419 - DNA, 25 bp, Homo sapien
atcaacaggttggatgccagccacg

SEQ ID NO: 4879420 - DNA, 25 bp, Homo sapien
ttcccttccagcccacaagtgcgtt

SEQ ID NO: 4879421 - DNA, 25 bp, Homo sapien
cccttccagcccacaagtgcgttca

SEQ ID NO: 4879422 - DNA, 25 bp, Homo sapien
gctgctgagcagctgaggtgctgca

SEQ ID NO: 4879423 - DNA, 25 bp, Homo sapien
gctgagcagctgaggtgctgcagcc

SEQ ID NO: 4879424 - DNA, 25 bp, Homo sapien
ctggatcccttcctcgccttcatcc

SEQ ID NO: 4879425 - DNA, 25 bp, Homo sapien
ggatcccttcctcgccttcatcctc

SEQ ID NO: 4879426 - DNA, 25 bp, Homo sapien
atcccttcctcgccttcatcctcac

SEQ ID NO: 4879427 - DNA, 25 bp, Homo sapien
tggatcccttcctcgccttcatcct

SEQ ID NO: 4879428 - DNA, 25 bp, Homo sapien
gtttcagggctgatttggggcttct

SEQ ID NO: 4879429 - DNA, 25 bp, Homo sapien
actcattgcatgtgtttgcggctcg

SEQ ID NO: 4879430 - DNA, 25 bp, Homo sapien
cattgcatgtgtttgcggctcgtgc

SEQ ID NO: 4879431 - DNA, 25 bp, Homo sapien
ggactcattgcatgtgtttgcggct

SEQ ID NO: 4879432 - DNA, 25 bp, Homo sapien
attttcccagacttcaaactgaagt

SEQ ID NO: 4879433 - DNA, 25 bp, Homo sapien
cctcaaagaagtagaaatgctttcc

SEQ ID NO: 4879434 - DNA, 25 bp, Homo sapien
tagaaatgctttccacaattatacc

SEQ ID NO: 4879435 - DNA, 25 bp, Homo sapien
gaagtagaaatgctttccacaatta

SEQ ID NO: 4879436 - DNA, 25 bp, Homo sapien
atgctttccacaattataccaagtg

SEQ ID NO: 4879437 - DNA, 25 bp, Homo sapien
cccatggagatttaagaatccatat

SEQ ID NO: 4879438 - DNA, 25 bp, Homo sapien
agaatattcccatggagatttaaga

SEQ ID NO: 4879439 - DNA, 25 bp, Homo sapien
agaatccatatttccctgcaactat

SEQ ID NO: 4879440 - DNA, 25 bp, Homo sapien
ctgcaagaatattcccatggagatt

SEQ ID NO: 4879441 - DNA, 25 bp, Homo sapien
tatagattgtcctctaactccatct

SEQ ID NO: 4879442 - DNA, 25 bp, Homo sapien
tcctctttatagattgtcctctaac

SEQ ID NO: 4879443 - DNA, 25 bp, Homo sapien
tctttatagattgtcctctaactcc

SEQ ID NO: 4879444 - DNA, 25 bp, Homo sapien
cctcctctttatagattgtcctcta

SEQ ID NO: 4879445 - DNA, 25 bp, Homo sapien
gcagccagtaggctctcaaagaaga

SEQ ID NO: 4879446 - DNA, 25 bp, Homo sapien
gaggttagggagatccccagcacaa

SEQ ID NO: 4879447 - DNA, 25 bp, Homo sapien
gagatactgcagttgtggcagccag

SEQ ID NO: 4879448 - DNA, 25 bp, Homo sapien
aggttcatgcccctggagatactgc

SEQ ID NO: 4879449 - DNA, 25 bp, Homo sapien
tatcccttgggccaccatttgagta

SEQ ID NO: 4879450 - DNA, 25 bp, Homo sapien
tccttatcccttgggccaccatttg

SEQ ID NO: 4879451 - DNA, 25 bp, Homo sapien
tatttgctccttatcccttgggcca

SEQ ID NO: 4879452 - DNA, 25 bp, Homo sapien
gctccttatcccttgggccaccatt

SEQ ID NO: 4879453 - DNA, 25 bp, Homo sapien
ggtacaagcatatttgacaataact

SEQ ID NO: 4879454 - DNA, 25 bp, Homo sapien
tgactgtggatggtacaagcatatt

SEQ ID NO: 4879455 - DNA, 25 bp, Homo sapien
cctctaatctcacttcactggtaca

SEQ ID NO: 4879456 - DNA, 25 bp, Homo sapien
tacaacaccaatgcccgttgatgac

SEQ ID NO: 4879457 - DNA, 25 bp, Homo sapien
actggtacatacaacaccaatgccc

SEQ ID NO: 4879458 - DNA, 25 bp, Homo sapien
catgcggctgccatgcctgtgttga

SEQ ID NO: 4879459 - DNA, 25 bp, Homo sapien
caccagcaaattaatggttggaaaa

SEQ ID NO: 4879460 - DNA, 25 bp, Homo sapien
ccagcaaattaatggttggaaaatt

SEQ ID NO: 4879461 - DNA, 25 bp, Homo sapien
tcttcagagtgacgtggatggctct

SEQ ID NO: 4879462 - DNA, 25 bp, Homo sapien
tgtcaaattgggtgttcaccagcaa

SEQ ID NO: 4879463 - DNA, 25 bp, Homo sapien
tctgttagtgccacacaataaaggg

SEQ ID NO: 4879464 - DNA, 25 bp, Homo sapien
tgtatgtctgttagtgccacacaat

SEQ ID NO: 4879465 - DNA, 25 bp, Homo sapien
ctcaattgtatgtctgttagtgcca

SEQ ID NO: 4879466 - DNA, 25 bp, Homo sapien
ctgttttactcaattgtatgtctgt

SEQ ID NO: 4879467 - DNA, 25 bp, Homo sapien
tcgattaggagggagtaatcgagat

SEQ ID NO: 4879468 - DNA, 25 bp, Homo sapien
cactcgattaggagggagtaatcga

SEQ ID NO: 4879469 - DNA, 25 bp, Homo sapien
gtacactcgattaggagggagtaat

SEQ ID NO: 4879470 - DNA, 25 bp, Homo sapien
cgattaggagggagtaatcgagatt

SEQ ID NO: 4879471 - DNA, 25 bp, Homo sapien
tctgcttaaaggagtataaagtctc

SEQ ID NO: 4879472 - DNA, 25 bp, Homo sapien
ctgcttaaaggagtataaagtctcc

SEQ ID NO: 4879473 - DNA, 25 bp, Homo sapien
gcttaaaggagtataaagtctccat

SEQ ID NO: 4879474 - DNA, 25 bp, Homo sapien
tgcttaaaggagtataaagtctcca

SEQ ID NO: 4879475 - DNA, 25 bp, Homo sapien
aagggatgagcagagtcccgtggga

SEQ ID NO: 4879476 - DNA, 25 bp, Homo sapien
ggctaagtcttcctggaaaggttga

SEQ ID NO: 4879477 - DNA, 25 bp, Homo sapien
tacaggtgttcagtggctaagtctt

SEQ ID NO: 4879478 - DNA, 25 bp, Homo sapien
gggaatacaggtgttcagtggctaa

SEQ ID NO: 4879479 - DNA, 25 bp, Homo sapien
gaaactgttttcttcaacatttcat

SEQ ID NO: 4879480 - DNA, 25 bp, Homo sapien
tttcttcaacatttcatatttacca

SEQ ID NO: 4879481 - DNA, 25 bp, Homo sapien
ccatttgaaactgttttcttcaaca

SEQ ID NO: 4879482 - DNA, 25 bp, Homo sapien
gttttcttcaacatttcatatttac

SEQ ID NO: 4879483 - DNA, 25 bp, Homo sapien
ggaacccaaaagatctgacaaagac

SEQ ID NO: 4879484 - DNA, 25 bp, Homo sapien
tctctaattgcaggcttcagggcca

SEQ ID NO: 4879485 - DNA, 25 bp, Homo sapien
gaagtctgagaaggtcatgacactg

SEQ ID NO: 4879486 - DNA, 25 bp, Homo sapien
catgacactggtgcttgagtccagc

SEQ ID NO: 4879487 - DNA, 25 bp, Homo sapien
ttctcatggaaacctaatacatcat

SEQ ID NO: 4879488 - DNA, 25 bp, Homo sapien
ctgggaaaagttatagctgttgtac

SEQ ID NO: 4879489 - DNA, 25 bp, Homo sapien
taagcttaagctaatgaggatgttt

SEQ ID NO: 4879490 - DNA, 25 bp, Homo sapien
gttatagctgttgtacacaaatccc

SEQ ID NO: 4879491 - DNA, 25 bp, Homo sapien
gggcggctttgtgagttactttatc

SEQ ID NO: 4879492 - DNA, 25 bp, Homo sapien
ccagtcccaactcaagagtcactgc

SEQ ID NO: 4879493 - DNA, 25 bp, Homo sapien
attgctaaagtgaaaccaaaatcag

SEQ ID NO: 4879494 - DNA, 25 bp, Homo sapien
agtgaaaccaaaatcaggtttctgg

SEQ ID NO: 4879495 - DNA, 25 bp, Homo sapien
tgctaaagtgaaaccaaaatcaggt

SEQ ID NO: 4879496 - DNA, 25 bp, Homo sapien
tcatgctattgctaaagtgaaacca

SEQ ID NO: 4879497 - DNA, 25 bp, Homo sapien
aatcgctgtagtctctgattgagaa

SEQ ID NO: 4879498 - DNA, 25 bp, Homo sapien
tctctgtgaagaagcaatcgctgta

SEQ ID NO: 4879499 - DNA, 25 bp, Homo sapien
tccagggcaagttagagacctgtca

SEQ ID NO: 4879500 - DNA, 25 bp, Homo sapien
caattaagggcatctgcggtcagct

SEQ ID NO: 4879501 - DNA, 25 bp, Homo sapien
acttcgatgctcagcttttcaatgg

SEQ ID NO: 4879502 - DNA, 25 bp, Homo sapien
cagttccatttcacggtgggtcata

SEQ ID NO: 4879503 - DNA, 25 bp, Homo sapien
ggcaggttgttaaagttctcacata

SEQ ID NO: 4879504 - DNA, 25 bp, Homo sapien
tgggtgaccagctaccagttccatt

SEQ ID NO: 4879505 - DNA, 25 bp, Homo sapien
ttctcccttcttttcattatgagcc

SEQ ID NO: 4879506 - DNA, 25 bp, Homo sapien
tctcccttcttttcattatgagcca

SEQ ID NO: 4879507 - DNA, 25 bp, Homo sapien
ctcccttcttttcattatgagccat

SEQ ID NO: 4879508 - DNA, 25 bp, Homo sapien
tttctcccttcttttcattatgagc

SEQ ID NO: 4879509 - DNA, 25 bp, Homo sapien
gctctgctcggtgaatgatgtgatc

SEQ ID NO: 4879510 - DNA, 25 bp, Homo sapien
cattgtacaaattcagggacccaga

SEQ ID NO: 4879511 - DNA, 25 bp, Homo sapien
gctcacagattggagttgatatctc

SEQ ID NO: 4879512 - DNA, 25 bp, Homo sapien
aatgtccagttattgagcctctgcc

SEQ ID NO: 4879513 - DNA, 25 bp, Homo sapien
ggcattttggactttgctcactaaa

SEQ ID NO: 4879514 - DNA, 25 bp, Homo sapien
gtgctcctgtggcattttggacttt

SEQ ID NO: 4879515 - DNA, 25 bp, Homo sapien
gcctgtcagaagctgggtcaccctt

SEQ ID NO: 4879516 - DNA, 25 bp, Homo sapien
ccttctgggctgagttcatatgaca

SEQ ID NO: 4879517 - DNA, 25 bp, Homo sapien
cggttggtgctctattaatttgctc

SEQ ID NO: 4879518 - DNA, 25 bp, Homo sapien
gatggctggtgctgtaacggttggt

SEQ ID NO: 4879519 - DNA, 25 bp, Homo sapien
gctgtaacggttggtgctctattaa

SEQ ID NO: 4879520 - DNA, 25 bp, Homo sapien
ggtgctgtaacggttggtgctctat

SEQ ID NO: 4879521 - DNA, 25 bp, Homo sapien
ccattgcccaaggaggtccaagatt

SEQ ID NO: 4879522 - DNA, 25 bp, Homo sapien
ttcttatttttatgggctcttgaca

SEQ ID NO: 4879523 - DNA, 25 bp, Homo sapien
tcttatttttatgggctcttgacat

SEQ ID NO: 4879524 - DNA, 25 bp, Homo sapien
caaggaggtccaagattttcttatt

SEQ ID NO: 4879525 - DNA, 25 bp, Homo sapien
tcttgggaatctcagccatgtgcct

SEQ ID NO: 4879526 - DNA, 25 bp, Homo sapien
tctcagccatgtgcctacggtaatg

SEQ ID NO: 4879527 - DNA, 25 bp, Homo sapien
gggaatctcagccatgtgcctacgg

SEQ ID NO: 4879528 - DNA, 25 bp, Homo sapien
catgtgcctacggtaatgacatcct

SEQ ID NO: 4879529 - DNA, 25 bp, Homo sapien
tcccgaacttgaactagcaccaggt

SEQ ID NO: 4879530 - DNA, 25 bp, Homo sapien
ccaggttccggctgtacttgagaca

SEQ ID NO: 4879531 - DNA, 25 bp, Homo sapien
caatcccgcaataggcatatatggc

SEQ ID NO: 4879532 - DNA, 25 bp, Homo sapien
gagcaggcaacattccaggttagga

SEQ ID NO: 4879533 - DNA, 25 bp, Homo sapien
agggaagttggctgatgatgttgaa

SEQ ID NO: 4879534 - DNA, 25 bp, Homo sapien
atagaattgtaatgggagggaagtt

SEQ ID NO: 4879535 - DNA, 25 bp, Homo sapien
cacagatgttctgaaccagatccac

SEQ ID NO: 4879536 - DNA, 25 bp, Homo sapien
tctgtgttcacagatgttctgaacc

SEQ ID NO: 4879537 - DNA, 25 bp, Homo sapien
ctttcagtttggtcaatagtaacag

SEQ ID NO: 4879538 - DNA, 25 bp, Homo sapien
tcagatctggggataggctgccaca

SEQ ID NO: 4879539 - DNA, 25 bp, Homo sapien
ggtcaatagtaacagagcctttatt

SEQ ID NO: 4879540 - DNA, 25 bp, Homo sapien
tctctatttccgattcagatctggg

SEQ ID NO: 4879541 - DNA, 25 bp, Homo sapien
aatacgatgagtttcggtatctaac

SEQ ID NO: 4879542 - DNA, 25 bp, Homo sapien
caaagtcaatacgatgagtttcggt

SEQ ID NO: 4879543 - DNA, 25 bp, Homo sapien
ttttgtcaaagtcaatacgatgagt

SEQ ID NO: 4879544 - DNA, 25 bp, Homo sapien
gtcaatacgatgagtttcggtatct

SEQ ID NO: 4879545 - DNA, 25 bp, Homo sapien
ttctcttttggtatctgggaagcta

SEQ ID NO: 4879546 - DNA, 25 bp, Homo sapien
ccatcagttgctccatggctctttc

SEQ ID NO: 4879547 - DNA, 25 bp, Homo sapien
ctacaacccatcagttgctccatgg

SEQ ID NO: 4879548 - DNA, 25 bp, Homo sapien
tcttttggtatctgggaagctattt

SEQ ID NO: 4879549 - DNA, 25 bp, Homo sapien
gctgagcgctgtctgcaaataggaa

SEQ ID NO: 4879550 - DNA, 25 bp, Homo sapien
tgctcagtaacaagacatcacagct

SEQ ID NO: 4879551 - DNA, 25 bp, Homo sapien
ttggagcccatcctctcaaaagcca

SEQ ID NO: 4879552 - DNA, 25 bp, Homo sapien
tcttcagatttaattgatgccaggc

SEQ ID NO: 4879553 - DNA, 25 bp, Homo sapien
agctggagggatccccgaatctcct

SEQ ID NO: 4879554 - DNA, 25 bp, Homo sapien
ggagctggagggatccccgaatctc

SEQ ID NO: 4879555 - DNA, 25 bp, Homo sapien
tacttctccacagtgccgcgtctga

SEQ ID NO: 4879556 - DNA, 25 bp, Homo sapien
cgtctgagtgggatggtaaattcaa

SEQ ID NO: 4879557 - DNA, 25 bp, Homo sapien
cagatctagagccttgggtccggat

SEQ ID NO: 4879558 - DNA, 25 bp, Homo sapien
gtttccagctagagccagatctaga

SEQ ID NO: 4879559 - DNA, 25 bp, Homo sapien
gtgaagtttccagctagagccagat

SEQ ID NO: 4879560 - DNA, 25 bp, Homo sapien
tagagccttgggtccggattccaga

SEQ ID NO: 4879561 - DNA, 25 bp, Homo sapien
cagcatatggttcccccatacacct

SEQ ID NO: 4879562 - DNA, 25 bp, Homo sapien
ttttgatctcttcggtaattcccac

SEQ ID NO: 4879563 - DNA, 25 bp, Homo sapien
gcatatggttcccccatacaccttt

SEQ ID NO: 4879564 - DNA, 25 bp, Homo sapien
cacagcatatggttcccccatacac

SEQ ID NO: 4879565 - DNA, 25 bp, Homo sapien
ctgcttggatctgactggaataatc

SEQ ID NO: 4879566 - DNA, 25 bp, Homo sapien
ttctgcttggatctgactggaataa

SEQ ID NO: 4879567 - DNA, 25 bp, Homo sapien
tctgcttggatctgactggaataat

SEQ ID NO: 4879568 - DNA, 25 bp, Homo sapien
ggagaacacatgcacctcctctggc

SEQ ID NO: 4879569 - DNA, 25 bp, Homo sapien
gccctgagccacgtgacaaggagaa

SEQ ID NO: 4879570 - DNA, 25 bp, Homo sapien
tcacgaaggtcgtgtcactggccct

SEQ ID NO: 4879571 - DNA, 25 bp, Homo sapien
tacttgccccaaagtgcagtcttga

SEQ ID NO: 4879572 - DNA, 25 bp, Homo sapien
tgctgagatgccagctataaagctt

SEQ ID NO: 4879573 - DNA, 25 bp, Homo sapien
taatgaggtttccttctacaagaca

SEQ ID NO: 4879574 - DNA, 25 bp, Homo sapien
gccccagatttcgtactatgatgta

SEQ ID NO: 4879575 - DNA, 25 bp, Homo sapien
ctatgatgtatctgggtgtgagtct

SEQ ID NO: 4879576 - DNA, 25 bp, Homo sapien
caaatagtaattaaatgactttcag

SEQ ID NO: 4879577 - DNA, 25 bp, Homo sapien
tgactttcaggataacatctagttg

SEQ ID NO: 4879578 - DNA, 25 bp, Homo sapien
tgtgtttatgtctgtatattgaagc

SEQ ID NO: 4879579 - DNA, 25 bp, Homo sapien
agacttcacccttcacaggtgtgtg

SEQ ID NO: 4879580 - DNA, 25 bp, Homo sapien
cctgaccgggttggtgctgaacagt

SEQ ID NO: 4879581 - DNA, 25 bp, Homo sapien
ctgaccgggttggtgctgaacagtc

SEQ ID NO: 4879582 - DNA, 25 bp, Homo sapien
ctgcacacgtgcagccttatttgta

SEQ ID NO: 4879583 - DNA, 25 bp, Homo sapien
aagactagatctgaagccttccata

SEQ ID NO: 4879584 - DNA, 25 bp, Homo sapien
gcactgttaccactcacatgccaaa

SEQ ID NO: 4879585 - DNA, 25 bp, Homo sapien
cattcatatggcattcctggaacaa

SEQ ID NO: 4879586 - DNA, 25 bp, Homo sapien
gcaccatgtaccaggaatagcttta

SEQ ID NO: 4879587 - DNA, 25 bp, Homo sapien
taggtgccactagcagatgtaagcg

SEQ ID NO: 4879588 - DNA, 25 bp, Homo sapien
tatttgacatattcgaagctgtggt

SEQ ID NO: 4879589 - DNA, 25 bp, Homo sapien
cttagttgccgttagatgtgacaga

SEQ ID NO: 4879590 - DNA, 25 bp, Homo sapien
gtttgtcttcatctaatccagcttt

SEQ ID NO: 4879591 - DNA, 25 bp, Homo sapien
ggacatctgtgatggttgcctgtac

SEQ ID NO: 4879592 - DNA, 25 bp, Homo sapien
tttgtcttcatctaatccagctttg

SEQ ID NO: 4879593 - DNA, 25 bp, Homo sapien
tctgtgatggttgcctgtacacttg

SEQ ID NO: 4879594 - DNA, 25 bp, Homo sapien
tatttgtgttcttactttggtggct

SEQ ID NO: 4879595 - DNA, 25 bp, Homo sapien
aatggtacaggaattctaaggtgac

SEQ ID NO: 4879596 - DNA, 25 bp, Homo sapien
tgtgtaatacaaatctggtcagagt

SEQ ID NO: 4879597 - DNA, 25 bp, Homo sapien
gatgaataatgtgtagtttttcaaa

SEQ ID NO: 4879598 - DNA, 25 bp, Homo sapien
gcatttctccagtctaggtttagtt

SEQ ID NO: 4879599 - DNA, 25 bp, Homo sapien
gaaggatgtgttcacaggagaggcc

SEQ ID NO: 4879600 - DNA, 25 bp, Homo sapien
gatgagggttgcaaagcgtgaattt

SEQ ID NO: 4879601 - DNA, 25 bp, Homo sapien
tatactccctgtgaatgtcaatacc

SEQ ID NO: 4879602 - DNA, 25 bp, Homo sapien
cacagataagttaggttacgggcca

SEQ ID NO: 4879603 - DNA, 25 bp, Homo sapien
taatacagtgattgagcagtggagc

SEQ ID NO: 4879604 - DNA, 25 bp, Homo sapien
cactggcggtcgagtgacacatcaa

SEQ ID NO: 4879605 - DNA, 25 bp, Homo sapien
tcaccacgacatgggcagaggttag

SEQ ID NO: 4879606 - DNA, 25 bp, Homo sapien
gttgtccccgtgaagcagcaccagt

SEQ ID NO: 4879607 - DNA, 25 bp, Homo sapien
gtccccgtgaagcagcaccagtcat

SEQ ID NO: 4879608 - DNA, 25 bp, Homo sapien
catgttgtccccgtgaagcagcacc

SEQ ID NO: 4879609 - DNA, 25 bp, Homo sapien
atgttgtccccgtgaagcagcacca

SEQ ID NO: 4879610 - DNA, 25 bp, Homo sapien
cccagagagtcacgtctggcaggct

SEQ ID NO: 4879611 - DNA, 25 bp, Homo sapien
ggggaagccatgggacctggagagc

SEQ ID NO: 4879612 - DNA, 25 bp, Homo sapien
tcttagagaaactgtagggtggctg

SEQ ID NO: 4879613 - DNA, 25 bp, Homo sapien
agagaaactgtagggtggctgatgg

SEQ ID NO: 4879614 - DNA, 25 bp, Homo sapien
cttagaagatggtcccctcgggagg

SEQ ID NO: 4879615 - DNA, 25 bp, Homo sapien
cagagttccaccctgaagggagcaa

SEQ ID NO: 4879616 - DNA, 25 bp, Homo sapien
actgacgggtgaagagacttaggcc

SEQ ID NO: 4879617 - DNA, 25 bp, Homo sapien
agtgcactgaccatggaccccagtc

SEQ ID NO: 4879618 - DNA, 25 bp, Homo sapien
ttagaggtgaaagagtatctggaaa

SEQ ID NO: 4879619 - DNA, 25 bp, Homo sapien
tttagaggtgaaagagtatctggaa

SEQ ID NO: 4879620 - DNA, 25 bp, Homo sapien
tgacatcgtaaaagatttagaggtg

SEQ ID NO: 4879621 - DNA, 25 bp, Homo sapien
ctgtttgacatcgtaaaagatttag

SEQ ID NO: 4879622 - DNA, 25 bp, Homo sapien
gctccatctgatccactggaactcc

SEQ ID NO: 4879623 - DNA, 25 bp, Homo sapien
tccactctgtttggcagcattgatg

SEQ ID NO: 4879624 - DNA, 25 bp, Homo sapien
ctgatccactggaactccactctgt

SEQ ID NO: 4879625 - DNA, 25 bp, Homo sapien
tcagctccatctgatccactggaac

SEQ ID NO: 4879626 - DNA, 25 bp, Homo sapien
ttaaatgatgtggtctgtctgttgc

SEQ ID NO: 4879627 - DNA, 25 bp, Homo sapien
atgatgtggtctgtctgttgccact

SEQ ID NO: 4879628 - DNA, 25 bp, Homo sapien
aaatgatgtggtctgtctgttgcca

SEQ ID NO: 4879629 - DNA, 25 bp, Homo sapien
atgtggtctgtctgttgccactcac

SEQ ID NO: 4879630 - DNA, 25 bp, Homo sapien
tgaagtgagtcttgtgagtcctctc

SEQ ID NO: 4879631 - DNA, 25 bp, Homo sapien
tacttggaccttaataagccagttc

SEQ ID NO: 4879632 - DNA, 25 bp, Homo sapien
cataagatgtactgcaggccacttc

SEQ ID NO: 4879633 - DNA, 25 bp, Homo sapien
cagagcatatctgggcggttaggct

SEQ ID NO: 4879634 - DNA, 25 bp, Homo sapien
ggagtaagtgaccctatgcagtgac

SEQ ID NO: 4879635 - DNA, 25 bp, Homo sapien
aggagtaagtgaccctatgcagtga

SEQ ID NO: 4879636 - DNA, 25 bp, Homo sapien
gaggagtaagtgaccctatgcagtg

SEQ ID NO: 4879637 - DNA, 25 bp, Homo sapien
tggagccatctttagtccagtggac

SEQ ID NO: 4879638 - DNA, 25 bp, Homo sapien
ctggagccatctttagtccagtgga

SEQ ID NO: 4879639 - DNA, 25 bp, Homo sapien
ggagccatctttagtccagtggacc

SEQ ID NO: 4879640 - DNA, 25 bp, Homo sapien
cctggagccatctttagtccagtgg

SEQ ID NO: 4879641 - DNA, 25 bp, Homo sapien
tccctgaagctgtaaaaggatgcat

SEQ ID NO: 4879642 - DNA, 25 bp, Homo sapien
tgtgagtcctgtagcaaaagctcgg

SEQ ID NO: 4879643 - DNA, 25 bp, Homo sapien
tcctgtggtccgattttttaacaga

SEQ ID NO: 4879644 - DNA, 25 bp, Homo sapien
ttatgtctttgtaacacttgcctcc

SEQ ID NO: 4879645 - DNA, 25 bp, Homo sapien
ctttggtcataagaagtgatgccct

SEQ ID NO: 4879646 - DNA, 25 bp, Homo sapien
tcatggctaaaaatcagatctgaca

SEQ ID NO: 4879647 - DNA, 25 bp, Homo sapien
gaagaatgtggagagcttaccgagc

SEQ ID NO: 4879648 - DNA, 25 bp, Homo sapien
cacattagtgaaaagatatgcggaa

SEQ ID NO: 4879649 - DNA, 25 bp, Homo sapien
gattgccctactctaatttcagaag

SEQ ID NO: 4879650 - DNA, 25 bp, Homo sapien
tacatagtgttatgcatgaactgcg

SEQ ID NO: 4879651 - DNA, 25 bp, Homo sapien
tggcattactgatatgaagggagct

SEQ ID NO: 4879652 - DNA, 25 bp, Homo sapien
tgggctgaccaaatacgatgttatt

SEQ ID NO: 4879653 - DNA, 25 bp, Homo sapien
ttgctgttgtcaattgatggtcctg

SEQ ID NO: 4879654 - DNA, 25 bp, Homo sapien
ttttcttgatatctacactccttgg

SEQ ID NO: 4879655 - DNA, 25 bp, Homo sapien
tctgtcacacccttcttattgttca

SEQ ID NO: 4879656 - DNA, 25 bp, Homo sapien
gatatctacactccttggaatcacc

SEQ ID NO: 4879657 - DNA, 25 bp, Homo sapien
gcctgagtttccgaggcaacaccag

SEQ ID NO: 4879658 - DNA, 25 bp, Homo sapien
ctgcctgagtttccgaggcaacacc

SEQ ID NO: 4879659 - DNA, 25 bp, Homo sapien
tgagtttccgaggcaacaccagcag

SEQ ID NO: 4879660 - DNA, 25 bp, Homo sapien
ctgagtttccgaggcaacaccagca

SEQ ID NO: 4879661 - DNA, 25 bp, Homo sapien
gtcaagttgaggagggcctaactcc

SEQ ID NO: 4879662 - DNA, 25 bp, Homo sapien
cagaaatgctggtctcctcatgctg

SEQ ID NO: 4879663 - DNA, 25 bp, Homo sapien
tgctaccttgatgaggcaaccgaga

SEQ ID NO: 4879664 - DNA, 25 bp, Homo sapien
ctgagtaggagttcgctgggtaaac

SEQ ID NO: 4879665 - DNA, 25 bp, Homo sapien
tgcaatgggatgttctgtggttgct

SEQ ID NO: 4879666 - DNA, 25 bp, Homo sapien
ctgcaatgggatgttctgtggttgc

SEQ ID NO: 4879667 - DNA, 25 bp, Homo sapien
ctgagctgcaatgggatgttctgtg

SEQ ID NO: 4879668 - DNA, 25 bp, Homo sapien
agctgcaatgggatgttctgtggtt

SEQ ID NO: 4879669 - DNA, 25 bp, Homo sapien
taccatcttggcctgagctgatcac

SEQ ID NO: 4879670 - DNA, 25 bp, Homo sapien
caaatttgtgttgtacagcactgga

SEQ ID NO: 4879671 - DNA, 25 bp, Homo sapien
gaatcaaggctgtaccgttggccat

SEQ ID NO: 4879672 - DNA, 25 bp, Homo sapien
aattaacttaccagcgctgacgtgg

SEQ ID NO: 4879673 - DNA, 25 bp, Homo sapien
catgaactgacttctgctctaggca

SEQ ID NO: 4879674 - DNA, 25 bp, Homo sapien
tgtgttgcaaagttggaatccctgc

SEQ ID NO: 4879675 - DNA, 25 bp, Homo sapien
agggaggttagctcagggccacaac

SEQ ID NO: 4879676 - DNA, 25 bp, Homo sapien
tacagagatgcttactgcggtctgg

SEQ ID NO: 4879677 - DNA, 25 bp, Homo sapien
gggagaccaacagtgtgtcaagttt

SEQ ID NO: 4879678 - DNA, 25 bp, Homo sapien
ggcatggactcataaattggataga

SEQ ID NO: 4879679 - DNA, 25 bp, Homo sapien
taaagagaggatctttaatagccaa

SEQ ID NO: 4879680 - DNA, 25 bp, Homo sapien
caaatgtaggaaggatgtgatctca

SEQ ID NO: 4879681 - DNA, 25 bp, Homo sapien
caaagtagcctaactctgtggactg

SEQ ID NO: 4879682 - DNA, 25 bp, Homo sapien
tatgcattcaccattccactggaac

SEQ ID NO: 4879683 - DNA, 25 bp, Homo sapien
ttttatacacgaatagctactctca

SEQ ID NO: 4879684 - DNA, 25 bp, Homo sapien
aaggctcttgggtatttaggctcac

SEQ ID NO: 4879685 - DNA, 25 bp, Homo sapien
cccgcgcccagcgaaggcgcaggca

SEQ ID NO: 4879686 - DNA, 25 bp, Homo sapien
cgcgcccagcgaaggcgcaggcact

SEQ ID NO: 4879687 - DNA, 25 bp, Homo sapien
gcactgctgccgagagcgccgaggg

SEQ ID NO: 4879688 - DNA, 25 bp, Homo sapien
gccccgcgcccagcgaaggcgcagg

SEQ ID NO: 4879689 - DNA, 25 bp, Homo sapien
ggcggccaagcaggagtcgccgcag

SEQ ID NO: 4879690 - DNA, 25 bp, Homo sapien
accttgggagacttgcgggcttctg

SEQ ID NO: 4879691 - DNA, 25 bp, Homo sapien
gaaaatgaataggtgagcagcctct

SEQ ID NO: 4879692 - DNA, 25 bp, Homo sapien
tgaccttgggagacttgcgggcttc

SEQ ID NO: 4879693 - DNA, 25 bp, Homo sapien
agcccatctctctcctccaggaccc

SEQ ID NO: 4879694 - DNA, 25 bp, Homo sapien
ctctctcctccaggaccccttcttt

SEQ ID NO: 4879695 - DNA, 25 bp, Homo sapien
atctctctcctccaggaccccttct

SEQ ID NO: 4879696 - DNA, 25 bp, Homo sapien
ccatctctctcctccaggacccctt

SEQ ID NO: 4879697 - DNA, 25 bp, Homo sapien
tgttacggggtctcctagccctctc

SEQ ID NO: 4879698 - DNA, 25 bp, Homo sapien
ttattgtgttacggggtctcctagc

SEQ ID NO: 4879699 - DNA, 25 bp, Homo sapien
tgtgttacggggtctcctagccctc

SEQ ID NO: 4879700 - DNA, 25 bp, Homo sapien
tattgtgttacggggtctcctagcc

SEQ ID NO: 4879701 - DNA, 25 bp, Homo sapien
cgatttcactaggtgaatgggagct

SEQ ID NO: 4879702 - DNA, 25 bp, Homo sapien
tgtctactgccttctgctagccctg

SEQ ID NO: 4879703 - DNA, 25 bp, Homo sapien
gactctgacagcgaacaccctctgt

SEQ ID NO: 4879704 - DNA, 25 bp, Homo sapien
tagccctgctttgaaacaataccct

SEQ ID NO: 4879705 - DNA, 25 bp, Homo sapien
aatagatccgcaatgagcacttgca

SEQ ID NO: 4879706 - DNA, 25 bp, Homo sapien
cagtcacagatggcatttaagggag

SEQ ID NO: 4879707 - DNA, 25 bp, Homo sapien
tagtgtatctgaattggttttggca

SEQ ID NO: 4879708 - DNA, 25 bp, Homo sapien
tgagacataagcctagagaagtgct

SEQ ID NO: 4879709 - DNA, 25 bp, Homo sapien
ctgcggtccatgttccttagagaag

SEQ ID NO: 4879710 - DNA, 25 bp, Homo sapien
ggattttctatggataagggctttc

SEQ ID NO: 4879711 - DNA, 25 bp, Homo sapien
taagagcactgtactagactgtttg

SEQ ID NO: 4879712 - DNA, 25 bp, Homo sapien
ccatgaagtggtaagggccctagct

SEQ ID NO: 4879713 - DNA, 25 bp, Homo sapien
gaaggtgccctagagcttttggtga

SEQ ID NO: 4879714 - DNA, 25 bp, Homo sapien
tagggcctcaggcataattcgcatg

SEQ ID NO: 4879715 - DNA, 25 bp, Homo sapien
tacagggcattgtgaaagcactaag

SEQ ID NO: 4879716 - DNA, 25 bp, Homo sapien
ggtgctgaattcatgtagggcctca

SEQ ID NO: 4879717 - DNA, 25 bp, Homo sapien
tgggtgtttctgctcttaggattct

SEQ ID NO: 4879718 - DNA, 25 bp, Homo sapien
cagatatatgctgatgctagagggt

SEQ ID NO: 4879719 - DNA, 25 bp, Homo sapien
gttggttagagccacaagtactcat

SEQ ID NO: 4879720 - DNA, 25 bp, Homo sapien
tcttactacagatatatgctgatgc

SEQ ID NO: 4879721 - DNA, 25 bp, Homo sapien
aagcacagcttacatattaatgaga

SEQ ID NO: 4879722 - DNA, 25 bp, Homo sapien
aaaactcttggctgactcattaaat

SEQ ID NO: 4879723 - DNA, 25 bp, Homo sapien
tgcattttcccgcagctgactagta

SEQ ID NO: 4879724 - DNA, 25 bp, Homo sapien
tattaatgagatccactgtttctct

SEQ ID NO: 4879725 - DNA, 25 bp, Homo sapien
tcattttcttgtttttcaaaatggc

SEQ ID NO: 4879726 - DNA, 25 bp, Homo sapien
gctgttcattttcttgtttttcaaa

SEQ ID NO: 4879727 - DNA, 25 bp, Homo sapien
tccagctgttcattttcttgttttt

SEQ ID NO: 4879728 - DNA, 25 bp, Homo sapien
cagctgttcattttcttgtttttca

SEQ ID NO: 4879729 - DNA, 25 bp, Homo sapien
cctcttcttggacacttgcttcact

SEQ ID NO: 4879730 - DNA, 25 bp, Homo sapien
atggaaaaggcagtaggctgtttgt

SEQ ID NO: 4879731 - DNA, 25 bp, Homo sapien
tttgtctttgaggccactacttcct

SEQ ID NO: 4879732 - DNA, 25 bp, Homo sapien
tagtgagcaattcaaatctggttgt

SEQ ID NO: 4879733 - DNA, 25 bp, Homo sapien
tattatagcattgaaacccttcacc

SEQ ID NO: 4879734 - DNA, 25 bp, Homo sapien
tagccttcttattatagcattgaaa

SEQ ID NO: 4879735 - DNA, 25 bp, Homo sapien
ttcctctcttttgggggataataga

SEQ ID NO: 4879736 - DNA, 25 bp, Homo sapien
gaggtgaaggaccatcccttacata

SEQ ID NO: 4879737 - DNA, 25 bp, Homo sapien
taatgctaaatcctcaccaataaca

SEQ ID NO: 4879738 - DNA, 25 bp, Homo sapien
gttgaagtagaaatctgcatcctag

SEQ ID NO: 4879739 - DNA, 25 bp, Homo sapien
tgcatgtccccggtagttaatgcta

SEQ ID NO: 4879740 - DNA, 25 bp, Homo sapien
gctgcatttagtggaagttgaagta

SEQ ID NO: 4879741 - DNA, 25 bp, Homo sapien
taaagtaagccatatcaagaaatga

SEQ ID NO: 4879742 - DNA, 25 bp, Homo sapien
ctgtcattgttattaaacaaccagg

SEQ ID NO: 4879743 - DNA, 25 bp, Homo sapien
gacggatagtaaagtaagccatatc

SEQ ID NO: 4879744 - DNA, 25 bp, Homo sapien
caggaagacggatagtaaagtaagc

SEQ ID NO: 4879745 - DNA, 25 bp, Homo sapien
gcaaatgcactcatcgggagcaggt

SEQ ID NO: 4879746 - DNA, 25 bp, Homo sapien
caagtccgtttgtgtgtagtacagc

SEQ ID NO: 4879747 - DNA, 25 bp, Homo sapien
gatcgtagacctggtgtcagcaagc

SEQ ID NO: 4879748 - DNA, 25 bp, Homo sapien
tagtacagcagcaaggatcgtagac

SEQ ID NO: 4879749 - DNA, 25 bp, Homo sapien
gacctgttgactatttgctactgac

SEQ ID NO: 4879750 - DNA, 25 bp, Homo sapien
gctgcagcctacagacttctttcct

SEQ ID NO: 4879751 - DNA, 25 bp, Homo sapien
tggagcccatacaaactctggcagc

SEQ ID NO: 4879752 - DNA, 25 bp, Homo sapien
ctcgctccggttcttctcaagaggg

SEQ ID NO: 4879753 - DNA, 25 bp, Homo sapien
gatcagataaatgagaaggtaacat

SEQ ID NO: 4879754 - DNA, 25 bp, Homo sapien
aagatcagataaatgagaaggtaac

SEQ ID NO: 4879755 - DNA, 25 bp, Homo sapien
gaagatcagataaatgagaaggtaa

SEQ ID NO: 4879756 - DNA, 25 bp, Homo sapien
agatcagataaatgagaaggtaaca

SEQ ID NO: 4879757 - DNA, 25 bp, Homo sapien
gattagcgtctgtctgcaaagcagc

SEQ ID NO: 4879758 - DNA, 25 bp, Homo sapien
ggaaggaggcaacgctgtcttgtca

SEQ ID NO: 4879759 - DNA, 25 bp, Homo sapien
tatttaaccgcttttgcactcttcc

SEQ ID NO: 4879760 - DNA, 25 bp, Homo sapien
cacaggattgtgttgattacaggaa

SEQ ID NO: 4879761 - DNA, 25 bp, Homo sapien
ctttcctgagacctcgaagacttct

SEQ ID NO: 4879762 - DNA, 25 bp, Homo sapien
aggtgctgtttgatcaaggcacaga

SEQ ID NO: 4879763 - DNA, 25 bp, Homo sapien
ccacactaaggacagcaacacatct

SEQ ID NO: 4879764 - DNA, 25 bp, Homo sapien
tcatgaggacagagcaccacactaa

SEQ ID NO: 4879765 - DNA, 25 bp, Homo sapien
tcactggacggtgcctttcctccaa

SEQ ID NO: 4879766 - DNA, 25 bp, Homo sapien
agaagaagactgtcatcgggaacag

SEQ ID NO: 4879767 - DNA, 25 bp, Homo sapien
cccacttctctatgcccagaagaag

SEQ ID NO: 4879768 - DNA, 25 bp, Homo sapien
gactgtcatcgggaacagtaaccat

SEQ ID NO: 4879769 - DNA, 25 bp, Homo sapien
caggaatccttgctggctctggagg

SEQ ID NO: 4879770 - DNA, 25 bp, Homo sapien
tgtcaccagggttcagagccaagag

SEQ ID NO: 4879771 - DNA, 25 bp, Homo sapien
ctgctgctgtgtaggcctgtttcct

SEQ ID NO: 4879772 - DNA, 25 bp, Homo sapien
cctgtttcctgtcaccagggttcag

SEQ ID NO: 4879773 - DNA, 25 bp, Homo sapien
ggtggatcacattgaactctgtagc

SEQ ID NO: 4879774 - DNA, 25 bp, Homo sapien
tggatcacattgaactctgtagcgc

SEQ ID NO: 4879775 - DNA, 25 bp, Homo sapien
gcaggtggatcacattgaactctgt

SEQ ID NO: 4879776 - DNA, 25 bp, Homo sapien
caggtggatcacattgaactctgta

SEQ ID NO: 4879777 - DNA, 25 bp, Homo sapien
cattcttgagactccggcatggagc

SEQ ID NO: 4879778 - DNA, 25 bp, Homo sapien
tggagcaatccgtctaagcgaccgc

SEQ ID NO: 4879779 - DNA, 25 bp, Homo sapien
gaatagccgtggtgccggattccag

SEQ ID NO: 4879780 - DNA, 25 bp, Homo sapien
cagccttgtcattggccatccatgc

SEQ ID NO: 4879781 - DNA, 25 bp, Homo sapien
atgcctgaggcactgaacaagcagg

SEQ ID NO: 4879782 - DNA, 25 bp, Homo sapien
caccatgcctgaggcactgaacaag

SEQ ID NO: 4879783 - DNA, 25 bp, Homo sapien
ccatgcctgaggcactgaacaagca

SEQ ID NO: 4879784 - DNA, 25 bp, Homo sapien
catgcctgaggcactgaacaagcag

SEQ ID NO: 4879785 - DNA, 25 bp, Homo sapien
gtgggcctaggcctgcaaggagaaa

SEQ ID NO: 4879786 - DNA, 25 bp, Homo sapien
tcaactgagcgctaaggagagtggc

SEQ ID NO: 4879787 - DNA, 25 bp, Homo sapien
gcagggattcctgaactggggcaga

SEQ ID NO: 4879788 - DNA, 25 bp, Homo sapien
tgcaaggagaaagcctggaccatca

SEQ ID NO: 4879789 - DNA, 25 bp, Homo sapien
ctggaggcagcgacatctgcagagc

SEQ ID NO: 4879790 - DNA, 25 bp, Homo sapien
tggaggcagcgacatctgcagagcc

SEQ ID NO: 4879791 - DNA, 25 bp, Homo sapien
aggcagcgacatctgcagagccagc

SEQ ID NO: 4879792 - DNA, 25 bp, Homo sapien
agcgacatctgcagagccagcccca

SEQ ID NO: 4879793 - DNA, 25 bp, Homo sapien
cacaggcaaactctgaattgagctt

SEQ ID NO: 4879794 - DNA, 25 bp, Homo sapien
gatcgtgtgatgagcaaaagtgaca

SEQ ID NO: 4879795 - DNA, 25 bp, Homo sapien
agctgttaaagaggccaagaattcc

SEQ ID NO: 4879796 - DNA, 25 bp, Homo sapien
tctggaaagagacccaagatcgtgt

SEQ ID NO: 4879797 - DNA, 25 bp, Homo sapien
tgctcggctcgcatcaaaggctgcc

SEQ ID NO: 4879798 - DNA, 25 bp, Homo sapien
taaaatggcaacacgaggtgtagtg

SEQ ID NO: 4879799 - DNA, 25 bp, Homo sapien
tgagctatacaaaacacaggcatct

SEQ ID NO: 4879800 - DNA, 25 bp, Homo sapien
tctaagaggtgttgagtttcggcca

SEQ ID NO: 4879801 - DNA, 25 bp, Homo sapien
gacaaagtaaaatattcctgaacat

SEQ ID NO: 4879802 - DNA, 25 bp, Homo sapien
cgacaaagtaaaatattcctgaaca

SEQ ID NO: 4879803 - DNA, 25 bp, Homo sapien
tcatcaatgccgaacaagctctgcc

SEQ ID NO: 4879804 - DNA, 25 bp, Homo sapien
acctgtctgtggagctacttgagcc

SEQ ID NO: 4879805 - DNA, 25 bp, Homo sapien
cactcggcgtgcactggctgtttga

SEQ ID NO: 4879806 - DNA, 25 bp, Homo sapien
ggctgtttgaccacatcccggaaca

SEQ ID NO: 4879807 - DNA, 25 bp, Homo sapien
ttcttggttgggagttccctccatg

SEQ ID NO: 4879808 - DNA, 25 bp, Homo sapien
tggttgggagttccctccatgctac

SEQ ID NO: 4879809 - DNA, 25 bp, Homo sapien
cctccatgctaccgcttttggctct

SEQ ID NO: 4879810 - DNA, 25 bp, Homo sapien
tcttggttgggagttccctccatgc

SEQ ID NO: 4879811 - DNA, 25 bp, Homo sapien
gctgttgaggaggattatgagtaat

SEQ ID NO: 4879812 - DNA, 25 bp, Homo sapien
aagacagccccttgattgtgatggt

SEQ ID NO: 4879813 - DNA, 25 bp, Homo sapien
cttttaccagtgatctcttggaaag

SEQ ID NO: 4879814 - DNA, 25 bp, Homo sapien
ggattatgagtaatgagctttcttg

SEQ ID NO: 4879815 - DNA, 25 bp, Homo sapien
tccatgtgctcattcagtctcttca

SEQ ID NO: 4879816 - DNA, 25 bp, Homo sapien
catctgtgtttacaatcaccaaacc

SEQ ID NO: 4879817 - DNA, 25 bp, Homo sapien
atgatccatgtgctcattcagtctc

SEQ ID NO: 4879818 - DNA, 25 bp, Homo sapien
tcatctgtgtttacaatcaccaaac

SEQ ID NO: 4879819 - DNA, 25 bp, Homo sapien
gcagctactgaaaacccaccctgaa

SEQ ID NO: 4879820 - DNA, 25 bp, Homo sapien
ttgctgaagagttgaactaagcgca

SEQ ID NO: 4879821 - DNA, 25 bp, Homo sapien
tgagaagtgcagctactgaaaaccc

SEQ ID NO: 4879822 - DNA, 25 bp, Homo sapien
aagaccggcaaccttgcttgggaca

SEQ ID NO: 4879823 - DNA, 25 bp, Homo sapien
gcaataaggggatctctctgctcct

SEQ ID NO: 4879824 - DNA, 25 bp, Homo sapien
tctgctcctcatgtgtttggagacc

SEQ ID NO: 4879825 - DNA, 25 bp, Homo sapien
tgctctgtgcatagccttgcaaagg

SEQ ID NO: 4879826 - DNA, 25 bp, Homo sapien
cttgcaaaggctctgcgtttctgtg

SEQ ID NO: 4879827 - DNA, 25 bp, Homo sapien
gaaggctgatcagtgtgaagggtca

SEQ ID NO: 4879828 - DNA, 25 bp, Homo sapien
aaggctgatcagtgtgaagggtcat

SEQ ID NO: 4879829 - DNA, 25 bp, Homo sapien
gaaccacgtggaagtactcagagac

SEQ ID NO: 4879830 - DNA, 25 bp, Homo sapien
tactcagagacttctaagaacactg

SEQ ID NO: 4879831 - DNA, 25 bp, Homo sapien
aaagtgacccatcagaaccacgtgg

SEQ ID NO: 4879832 - DNA, 25 bp, Homo sapien
atttctagctcaatttcaaagtgac

SEQ ID NO: 4879833 - DNA, 25 bp, Homo sapien
tattgtcctaggagtgacctgcttc

SEQ ID NO: 4879834 - DNA, 25 bp, Homo sapien
gcaggatcttccttgtattgtccta

SEQ ID NO: 4879835 - DNA, 25 bp, Homo sapien
cagcatctgagcaggctttgtgtcc

SEQ ID NO: 4879836 - DNA, 25 bp, Homo sapien
ggacctttacaatatctgttgacag

SEQ ID NO: 4879837 - DNA, 25 bp, Homo sapien
ccagatctctaaagatagtttctct

SEQ ID NO: 4879838 - DNA, 25 bp, Homo sapien
tcccagatctctaaagatagtttct

SEQ ID NO: 4879839 - DNA, 25 bp, Homo sapien
cccagatctctaaagatagtttctc

SEQ ID NO: 4879840 - DNA, 25 bp, Homo sapien
tctcccagatctctaaagatagttt

SEQ ID NO: 4879841 - DNA, 25 bp, Homo sapien
ccactcttatgacaccaatcagtac

SEQ ID NO: 4879842 - DNA, 25 bp, Homo sapien
tcatttacgctcaataccataacca

SEQ ID NO: 4879843 - DNA, 25 bp, Homo sapien
taccataaccactcttatgacacca

SEQ ID NO: 4879844 - DNA, 25 bp, Homo sapien
gctcaataccataaccactcttatg

SEQ ID NO: 4879845 - DNA, 25 bp, Homo sapien
gcatgggaggatatgggtgttgaaa

SEQ ID NO: 4879846 - DNA, 25 bp, Homo sapien
catgggaggatatgggtgttgaaaa

SEQ ID NO: 4879847 - DNA, 25 bp, Homo sapien
tggctgcatgggaggatatgggtgt

SEQ ID NO: 4879848 - DNA, 25 bp, Homo sapien
ggaggatatgggtgttgaaaaacat

SEQ ID NO: 4879849 - DNA, 25 bp, Homo sapien
ccatcatgctgggttgctaacatgc

SEQ ID NO: 4879850 - DNA, 25 bp, Homo sapien
tggccctcgttcctgttgcctaata

SEQ ID NO: 4879851 - DNA, 25 bp, Homo sapien
aaagcgattgggatttagtggccct

SEQ ID NO: 4879852 - DNA, 25 bp, Homo sapien
tcattatgtaattagtactgacacc

SEQ ID NO: 4879853 - DNA, 25 bp, Homo sapien
gagcccagccgaacaataacagccg

SEQ ID NO: 4879854 - DNA, 25 bp, Homo sapien
ctgctgctgtcagccgccgggagtg

SEQ ID NO: 4879855 - DNA, 25 bp, Homo sapien
tgaggaagccggacgaactgacacc

SEQ ID NO: 4879856 - DNA, 25 bp, Homo sapien
gccggacgaactgacacccgcagag

SEQ ID NO: 4879857 - DNA, 25 bp, Homo sapien
ggccgcggccgctcagtgccagggc

SEQ ID NO: 4879858 - DNA, 25 bp, Homo sapien
cagtgccagggcacacggctcctcc

SEQ ID NO: 4879859 - DNA, 25 bp, Homo sapien
gtgccagggcacacggctcctcctc

SEQ ID NO: 4879860 - DNA, 25 bp, Homo sapien
gcgccccaaccccggtgccgctcag

SEQ ID NO: 4879861 - DNA, 25 bp, Homo sapien
tacttgaagagataggcgtacgcca

SEQ ID NO: 4879862 - DNA, 25 bp, Homo sapien
ctgtgtcgccgattatgatgtactt

SEQ ID NO: 4879863 - DNA, 25 bp, Homo sapien
cgccgattatgatgtacttgaagag

SEQ ID NO: 4879864 - DNA, 25 bp, Homo sapien
tgatgtacttgaagagataggcgta

SEQ ID NO: 4879865 - DNA, 25 bp, Homo sapien
tcagctgcaagactggccgggtcgg

SEQ ID NO: 4879866 - DNA, 25 bp, Homo sapien
aatcgggcgtcgcaaacggctgcca

SEQ ID NO: 4879867 - DNA, 25 bp, Homo sapien
ttcctgaatcgggcgtcgcaaacgg

SEQ ID NO: 4879868 - DNA, 25 bp, Homo sapien
gctcgcagtgcccacgtcaccagct

SEQ ID NO: 4879869 - DNA, 25 bp, Homo sapien
caggccttgatagatgcgtgctggt

SEQ ID NO: 4879870 - DNA, 25 bp, Homo sapien
gtgcagtcatgtgagtcgggccccg

SEQ ID NO: 4879871 - DNA, 25 bp, Homo sapien
cttgcccaggccttgatagatgcgt

SEQ ID NO: 4879872 - DNA, 25 bp, Homo sapien
gccgcgaagagacctaacgcaaggg

SEQ ID NO: 4879873 - DNA, 25 bp, Homo sapien
gtgcaagagtaaccactgaaatcag

SEQ ID NO: 4879874 - DNA, 25 bp, Homo sapien
aaagggtccaaagttgtgcaagagt

SEQ ID NO: 4879875 - DNA, 25 bp, Homo sapien
catgaccgaagttgtgcaaagggtc

SEQ ID NO: 4879876 - DNA, 25 bp, Homo sapien
tagttacttatagaacctgccacat

SEQ ID NO: 4879877 - DNA, 25 bp, Homo sapien
tgagtctcccacaggaagaggtctt

SEQ ID NO: 4879878 - DNA, 25 bp, Homo sapien
aatgactagtacttctggccgcagg

SEQ ID NO: 4879879 - DNA, 25 bp, Homo sapien
tagagctattgagaatctaatcccc

SEQ ID NO: 4879880 - DNA, 25 bp, Homo sapien
cttcaataaaataacccatgcatgg

SEQ ID NO: 4879881 - DNA, 25 bp, Homo sapien
gttcaaatgatgctctcatctcagc

SEQ ID NO: 4879882 - DNA, 25 bp, Homo sapien
ccgggttcaaatgatgctctcatct

SEQ ID NO: 4879883 - DNA, 25 bp, Homo sapien
gggttcaaatgatgctctcatctca

SEQ ID NO: 4879884 - DNA, 25 bp, Homo sapien
ctcctcagcgcaagcaatccacccg

SEQ ID NO: 4879885 - DNA, 25 bp, Homo sapien
tcacaattgcatttagtcctacgtt

SEQ ID NO: 4879886 - DNA, 25 bp, Homo sapien
tataaacctcataagggcaaggatg

SEQ ID NO: 4879887 - DNA, 25 bp, Homo sapien
caagcacagctagactataaacctc

SEQ ID NO: 4879888 - DNA, 25 bp, Homo sapien
tacacgaccagtttaagagataaca

SEQ ID NO: 4879889 - DNA, 25 bp, Homo sapien
gaagtttcctctagatgtccatgta

SEQ ID NO: 4879890 - DNA, 25 bp, Homo sapien
tctcagctatcgcaagtaggaaata

SEQ ID NO: 4879891 - DNA, 25 bp, Homo sapien
tgcattcaagtctcccatcctcgaa

SEQ ID NO: 4879892 - DNA, 25 bp, Homo sapien
tcctcgaacacactcaagagaaggt

SEQ ID NO: 4879893 - DNA, 25 bp, Homo sapien
cccccgtccggccagctgccctgtc

SEQ ID NO: 4879894 - DNA, 25 bp, Homo sapien
gccccccgtccggccagctgccctg

SEQ ID NO: 4879895 - DNA, 25 bp, Homo sapien
ccgtccggccagctgccctgtccgg

SEQ ID NO: 4879896 - DNA, 25 bp, Homo sapien
cccgtccggccagctgccctgtccg

SEQ ID NO: 4879897 - DNA, 25 bp, Homo sapien
tcctcactacctttagaagatggga

SEQ ID NO: 4879898 - DNA, 25 bp, Homo sapien
ttctaactctactaattggccttga

SEQ ID NO: 4879899 - DNA, 25 bp, Homo sapien
tactaattggccttgatgatttatt

SEQ ID NO: 4879900 - DNA, 25 bp, Homo sapien
aatttgcatatacagctaattctga

SEQ ID NO: 4879901 - DNA, 25 bp, Homo sapien
cttactagaaaacttgtctaaattg

SEQ ID NO: 4879902 - DNA, 25 bp, Homo sapien
ctagaaaacttgtctaaattgttga

SEQ ID NO: 4879903 - DNA, 25 bp, Homo sapien
actagaaaacttgtctaaattgttg

SEQ ID NO: 4879904 - DNA, 25 bp, Homo sapien
cagcaggtacaaagcaagcctctgt

SEQ ID NO: 4879905 - DNA, 25 bp, Homo sapien
acctctcaaaaagcacagtgtgtag

SEQ ID NO: 4879906 - DNA, 25 bp, Homo sapien
tcacttgcaagagtgtgtccctagc

SEQ ID NO: 4879907 - DNA, 25 bp, Homo sapien
ggctctcccataacagaacgtgacc

SEQ ID NO: 4879908 - DNA, 25 bp, Homo sapien
ggccctaccctagttatgcaatcaa

SEQ ID NO: 4879909 - DNA, 25 bp, Homo sapien
acaaaatgacggtctttttgatgca

SEQ ID NO: 4879910 - DNA, 25 bp, Homo sapien
cctgagtgtgtccagtttataacaa

SEQ ID NO: 4879911 - DNA, 25 bp, Homo sapien
gatgcatcagtttggctaggcccta

SEQ ID NO: 4879912 - DNA, 25 bp, Homo sapien
tgtgattcaccctacccatgataga

SEQ ID NO: 4879913 - DNA, 25 bp, Homo sapien
tcatccagctctaatggttcaccaa

SEQ ID NO: 4879914 - DNA, 25 bp, Homo sapien
tcactaagaaccagatctttctgcc

SEQ ID NO: 4879915 - DNA, 25 bp, Homo sapien
taacctattttgtaaaccactgtga

SEQ ID NO: 4879916 - DNA, 25 bp, Homo sapien
ctcaaacttacggaaccgaattcat

SEQ ID NO: 4879917 - DNA, 25 bp, Homo sapien
gctgaaacctcttgtctgtaaactg

SEQ ID NO: 4879918 - DNA, 25 bp, Homo sapien
caatagtaaggtcatgcactggctg

SEQ ID NO: 4879919 - DNA, 25 bp, Homo sapien
ctggctgaaacctcttgtctgtaaa

SEQ ID NO: 4879920 - DNA, 25 bp, Homo sapien
gtaaggtcatgcactggctgaaacc

SEQ ID NO: 4879921 - DNA, 25 bp, Homo sapien
taaacagcgtaacaacaaatccagt

SEQ ID NO: 4879922 - DNA, 25 bp, Homo sapien
tccagcaagctgagtcaaagtttct

SEQ ID NO: 4879923 - DNA, 25 bp, Homo sapien
agtttctgctcttaccatgcttgga

SEQ ID NO: 4879924 - DNA, 25 bp, Homo sapien
gcatcatcactagtagaatggacct

SEQ ID NO: 4879925 - DNA, 25 bp, Homo sapien
tgacggcacatagtgtctatacgtg

SEQ ID NO: 4879926 - DNA, 25 bp, Homo sapien
gtattcagggagtagcaagcagcaa

SEQ ID NO: 4879927 - DNA, 25 bp, Homo sapien
caagcagcaaagacttgacggcaca

SEQ ID NO: 4879928 - DNA, 25 bp, Homo sapien
ttgctcctacgactaccaatttgga

SEQ ID NO: 4879929 - DNA, 25 bp, Homo sapien
aagataaattgctgtgatgggtgtc

SEQ ID NO: 4879930 - DNA, 25 bp, Homo sapien
tatgcagcagagtcaagatactgtc

SEQ ID NO: 4879931 - DNA, 25 bp, Homo sapien
ctggcctgtatttagcttgactgaa

SEQ ID NO: 4879932 - DNA, 25 bp, Homo sapien
taagtaggccttgggccaatgaagg

SEQ ID NO: 4879933 - DNA, 25 bp, Homo sapien
taacctatggtttagccacgagact

SEQ ID NO: 4879934 - DNA, 25 bp, Homo sapien
cagtggtggaaacctgtgaaaatcc

SEQ ID NO: 4879935 - DNA, 25 bp, Homo sapien
caggaatgattataagggcacagct

SEQ ID NO: 4879936 - DNA, 25 bp, Homo sapien
gaacttaagtttacccacagcacca

SEQ ID NO: 4879937 - DNA, 25 bp, Homo sapien
gcatgagcccagcaatcatttctta

SEQ ID NO: 4879938 - DNA, 25 bp, Homo sapien
aacatgtggcatcaagcgatcctct

SEQ ID NO: 4879939 - DNA, 25 bp, Homo sapien
tggtctcaaacatgtggcatcaagc

SEQ ID NO: 4879940 - DNA, 25 bp, Homo sapien
tataggcatgagcccagcaatcatt

SEQ ID NO: 4879941 - DNA, 25 bp, Homo sapien
aacctagacactgcagaagttcaaa

SEQ ID NO: 4879942 - DNA, 25 bp, Homo sapien
cttacagataggactaaaaagtcta

SEQ ID NO: 4879943 - DNA, 25 bp, Homo sapien
aaaattgtaacttacagataggact

SEQ ID NO: 4879944 - DNA, 25 bp, Homo sapien
cctagacactgcagaagttcaaaat

SEQ ID NO: 4879945 - DNA, 25 bp, Homo sapien
aacttcacttatcaaccaggtcagg

SEQ ID NO: 4879946 - DNA, 25 bp, Homo sapien
gaagcaaagagaccagttaaaaggc

SEQ ID NO: 4879947 - DNA, 25 bp, Homo sapien
aaattgacaagtgctgattactgaa

SEQ ID NO: 4879948 - DNA, 25 bp, Homo sapien
ccaggtcaggatggataatttaaaa

SEQ ID NO: 4879949 - DNA, 25 bp, Homo sapien
tggtcttcatgttttgcaggctcag

SEQ ID NO: 4879950 - DNA, 25 bp, Homo sapien
gttttaacatacttcccagacagtg

SEQ ID NO: 4879951 - DNA, 25 bp, Homo sapien
aagtatacaatcctgcacaaatggg

SEQ ID NO: 4879952 - DNA, 25 bp, Homo sapien
gaaataggattacaggacaaaggga

SEQ ID NO: 4879953 - DNA, 25 bp, Homo sapien
tagttatcattcgagcaccgaactc

SEQ ID NO: 4879954 - DNA, 25 bp, Homo sapien
tatcattcgagcaccgaactctaca

SEQ ID NO: 4879955 - DNA, 25 bp, Homo sapien
gtttcccatcaatagttatcattcg

SEQ ID NO: 4879956 - DNA, 25 bp, Homo sapien
catcaatagttatcattcgagcacc

SEQ ID NO: 4879957 - DNA, 25 bp, Homo sapien
taataggtactcaatgaacaagggt

SEQ ID NO: 4879958 - DNA, 25 bp, Homo sapien
gaaaattgctaccttaaggcaccca

SEQ ID NO: 4879959 - DNA, 25 bp, Homo sapien
aaggcacccaatgtatataatacag

SEQ ID NO: 4879960 - DNA, 25 bp, Homo sapien
gaattaagagcaacgtgacttcaag

SEQ ID NO: 4879961 - DNA, 25 bp, Homo sapien
tctgccaatgaacagaaaccagggg

SEQ ID NO: 4879962 - DNA, 25 bp, Homo sapien
ggcaacgtatgtttcttctttgact

SEQ ID NO: 4879963 - DNA, 25 bp, Homo sapien
gaacagaaaccaggggcaacgtatg

SEQ ID NO: 4879964 - DNA, 25 bp, Homo sapien
caggggcaacgtatgtttcttcttt

SEQ ID NO: 4879965 - DNA, 25 bp, Homo sapien
actactgagctttaagcaatcaacc

SEQ ID NO: 4879966 - DNA, 25 bp, Homo sapien
tgcttagcacagaaaaactaaggac

SEQ ID NO: 4879967 - DNA, 25 bp, Homo sapien
tctaaggtttcagttattggtggtc

SEQ ID NO: 4879968 - DNA, 25 bp, Homo sapien
acctgtctcggtctcgtaaaagtgc

SEQ ID NO: 4879969 - DNA, 25 bp, Homo sapien
tgatgaatgacatctttacgcccac

SEQ ID NO: 4879970 - DNA, 25 bp, Homo sapien
atctttacgcccaccatctgctggt

SEQ ID NO: 4879971 - DNA, 25 bp, Homo sapien
aggttgttggaaggccaaggatgca

SEQ ID NO: 4879972 - DNA, 25 bp, Homo sapien
ggatgcagattttatcagttatatc

SEQ ID NO: 4879973 - DNA, 25 bp, Homo sapien
ctgctgcacctctgtaatacgacct

SEQ ID NO: 4879974 - DNA, 25 bp, Homo sapien
tatcgtaaactagtaaagctcctgc

SEQ ID NO: 4879975 - DNA, 25 bp, Homo sapien
cgtgtaatatcgtaaactagtaaag

SEQ ID NO: 4879976 - DNA, 25 bp, Homo sapien
tgtgatggaacgaaaggattcttgc

SEQ ID NO: 4879977 - DNA, 25 bp, Homo sapien
gctggcgggcatcttctaaccaggt

SEQ ID NO: 4879978 - DNA, 25 bp, Homo sapien
tcttctaaccaggttgtcaagtggt

SEQ ID NO: 4879979 - DNA, 25 bp, Homo sapien
tggaattggaatgctggcgggcatc

SEQ ID NO: 4879980 - DNA, 25 bp, Homo sapien
tgtcaagtggttgaatgtatctctc

SEQ ID NO: 4879981 - DNA, 25 bp, Homo sapien
cttttatttccaataagcataatga

SEQ ID NO: 4879982 - DNA, 25 bp, Homo sapien
ttttatttccaataagcataatgac

SEQ ID NO: 4879983 - DNA, 25 bp, Homo sapien
aataaacagtacagtcttcatcact

SEQ ID NO: 4879984 - DNA, 25 bp, Homo sapien
catcactaatgcaatgtaagctcta

SEQ ID NO: 4879985 - DNA, 25 bp, Homo sapien
cagtacagtcttcatcactaatgca

SEQ ID NO: 4879986 - DNA, 25 bp, Homo sapien
cagtcttcatcactaatgcaatgta

SEQ ID NO: 4879987 - DNA, 25 bp, Homo sapien
ctggccctaggctgttcatttaaaa

SEQ ID NO: 4879988 - DNA, 25 bp, Homo sapien
tacctggccctaggctgttcattta

SEQ ID NO: 4879989 - DNA, 25 bp, Homo sapien
gtacctggccctaggctgttcattt

SEQ ID NO: 4879990 - DNA, 25 bp, Homo sapien
cctggccctaggctgttcatttaaa

SEQ ID NO: 4879991 - DNA, 25 bp, Homo sapien
agggtcacattactaatcaacatgg

SEQ ID NO: 4879992 - DNA, 25 bp, Homo sapien
tgtgatgaccattcttttaattaat

SEQ ID NO: 4879993 - DNA, 25 bp, Homo sapien
gaagcatttgtggaaagtgtaccat

SEQ ID NO: 4879994 - DNA, 25 bp, Homo sapien
catactaactgtattattcagggta

SEQ ID NO: 4879995 - DNA, 25 bp, Homo sapien
tcttctacattggaagcagtcttag

SEQ ID NO: 4879996 - DNA, 25 bp, Homo sapien
gcagtcttagcagacgtttccatga

SEQ ID NO: 4879997 - DNA, 25 bp, Homo sapien
tgaagatgagtccatgttctcgtgc

SEQ ID NO: 4879998 - DNA, 25 bp, Homo sapien
tgttctcgtgcaaaagcttcacctt

SEQ ID NO: 4879999 - DNA, 25 bp, Homo sapien
gatgaagattttaaagggcctctta

SEQ ID NO: 4880000 - DNA, 25 bp, Homo sapien
tgttcaaagaccatccgactaaaaa

SEQ ID NO: 4880001 - DNA, 25 bp, Homo sapien
atgatgttcaaagaccatccgacta

SEQ ID NO: 4880002 - DNA, 25 bp, Homo sapien
gaaactttcctactttatgatgttc

SEQ ID NO: 4880003 - DNA, 25 bp, Homo sapien
gaaggcacatgctagctgttgccca

SEQ ID NO: 4880004 - DNA, 25 bp, Homo sapien
tgactgcttactacattgaaggcac

SEQ ID NO: 4880005 - DNA, 25 bp, Homo sapien
ggttaatcagaagagctccaagtat

SEQ ID NO: 4880006 - DNA, 25 bp, Homo sapien
gacctctgttatccttacggcagtg

SEQ ID NO: 4880007 - DNA, 25 bp, Homo sapien
cactccactccaacaagggaaatgg

SEQ ID NO: 4880008 - DNA, 25 bp, Homo sapien
tcactgttggcacctattatctttt

SEQ ID NO: 4880009 - DNA, 25 bp, Homo sapien
gttgaggcattttaatgattgctgc

SEQ ID NO: 4880010 - DNA, 25 bp, Homo sapien
gggtgctacttcattactgcctggg

SEQ ID NO: 4880011 - DNA, 25 bp, Homo sapien
ccagtaataatgagttttcatatgt

SEQ ID NO: 4880012 - DNA, 25 bp, Homo sapien
taataatgagttttcatatgtttgt

SEQ ID NO: 4880013 - DNA, 25 bp, Homo sapien
tctctaatgaccagtaataatgagt

SEQ ID NO: 4880014 - DNA, 25 bp, Homo sapien
tctaatgaccagtaataatgagttt

SEQ ID NO: 4880015 - DNA, 25 bp, Homo sapien
tgtcagttttgctagaggtctgcca

SEQ ID NO: 4880016 - DNA, 25 bp, Homo sapien
tttttgaatacagagcaagccttgc

SEQ ID NO: 4880017 - DNA, 25 bp, Homo sapien
taatctaaggaacaaggccttcgac

SEQ ID NO: 4880018 - DNA, 25 bp, Homo sapien
gcatcaactgctataatcacgtggt

SEQ ID NO: 4880019 - DNA, 25 bp, Homo sapien
tctcccatagagctctgcttattct

SEQ ID NO: 4880020 - DNA, 25 bp, Homo sapien
gcctctcccatagagctctgcttat

SEQ ID NO: 4880021 - DNA, 25 bp, Homo sapien
aaccgcctctcccatagagctctgc

SEQ ID NO: 4880022 - DNA, 25 bp, Homo sapien
ctaaaccgcctctcccatagagctc

SEQ ID NO: 4880023 - DNA, 25 bp, Homo sapien
ccagaggagggatcagacttaacca

SEQ ID NO: 4880024 - DNA, 25 bp, Homo sapien
catacccttggaggatcaagtcgga

SEQ ID NO: 4880025 - DNA, 25 bp, Homo sapien
tcaagtcggaaggaagggcatttca

SEQ ID NO: 4880026 - DNA, 25 bp, Homo sapien
cactgtaaagctgatcgactcctag

SEQ ID NO: 4880027 - DNA, 25 bp, Homo sapien
atgcttgggcaaagataaggtttag

SEQ ID NO: 4880028 - DNA, 25 bp, Homo sapien
ggacagaattctacctacatgtaac

SEQ ID NO: 4880029 - DNA, 25 bp, Homo sapien
aatgggaccaaagcataaccagaat

SEQ ID NO: 4880030 - DNA, 25 bp, Homo sapien
tacctacatgtaacaaatgggacca

SEQ ID NO: 4880031 - DNA, 25 bp, Homo sapien
gaaactcttggtagatggcgatcta

SEQ ID NO: 4880032 - DNA, 25 bp, Homo sapien
tggcaaagctcaaacctaatatctg

SEQ ID NO: 4880033 - DNA, 25 bp, Homo sapien
taatacatcgtacaagtgggaaact

SEQ ID NO: 4880034 - DNA, 25 bp, Homo sapien
gccaccctggtttagaagtacagaa

SEQ ID NO: 4880035 - DNA, 25 bp, Homo sapien
tagaggatacaatacaaacgggttg

SEQ ID NO: 4880036 - DNA, 25 bp, Homo sapien
ctagtaaggcttatgagaggtcaaa

SEQ ID NO: 4880037 - DNA, 25 bp, Homo sapien
tctgaaaggcatgcaattaactcca

SEQ ID NO: 4880038 - DNA, 25 bp, Homo sapien
tgagtcctttgcgtttgaaacccag

SEQ ID NO: 4880039 - DNA, 25 bp, Homo sapien
actgctgaacttgccatcagagctt

SEQ ID NO: 4880040 - DNA, 25 bp, Homo sapien
gactgctgaacttgccatcagagct

SEQ ID NO: 4880041 - DNA, 25 bp, Homo sapien
tgctgaacttgccatcagagctttt

SEQ ID NO: 4880042 - DNA, 25 bp, Homo sapien
catcatgaccatgagaggaaaaaag

SEQ ID NO: 4880043 - DNA, 25 bp, Homo sapien
taaaaactagcttacttctggataa

SEQ ID NO: 4880044 - DNA, 25 bp, Homo sapien
tatgtaaactgcataatcctccatg

SEQ ID NO: 4880045 - DNA, 25 bp, Homo sapien
cacccagctaacgaattgtatagtt

SEQ ID NO: 4880046 - DNA, 25 bp, Homo sapien
tattaatgtcaaagactccttcttg

SEQ ID NO: 4880047 - DNA, 25 bp, Homo sapien
taatgtcaaagactccttcttgaat

SEQ ID NO: 4880048 - DNA, 25 bp, Homo sapien
ctcattattaatgtcaaagactcct

SEQ ID NO: 4880049 - DNA, 25 bp, Homo sapien
cattattaatgtcaaagactccttc

SEQ ID NO: 4880050 - DNA, 25 bp, Homo sapien
gcaatgaatggatagggccacttac

SEQ ID NO: 4880051 - DNA, 25 bp, Homo sapien
ccaaagcagatgacaccatatggtc

SEQ ID NO: 4880052 - DNA, 25 bp, Homo sapien
ctgccagataacagagagagcatct

SEQ ID NO: 4880053 - DNA, 25 bp, Homo sapien
gagagcatcttgcattagtacatag

SEQ ID NO: 4880054 - DNA, 25 bp, Homo sapien
gaagtaccgtcatataagcctagaa

SEQ ID NO: 4880055 - DNA, 25 bp, Homo sapien
gactactgaagtaatagagagcctc

SEQ ID NO: 4880056 - DNA, 25 bp, Homo sapien
gatgatctttggtgaacactctgaa

SEQ ID NO: 4880057 - DNA, 25 bp, Homo sapien
gagagacatacataatggcttccta

SEQ ID NO: 4880058 - DNA, 25 bp, Homo sapien
tgttctgcaacagtagtagccttgg

SEQ ID NO: 4880059 - DNA, 25 bp, Homo sapien
ggcactagctcagtattgacagcag

SEQ ID NO: 4880060 - DNA, 25 bp, Homo sapien
aaggagtcagacttggcattaggcc

SEQ ID NO: 4880061 - DNA, 25 bp, Homo sapien
taataaaaagcatgccctatggctc

SEQ ID NO: 4880062 - DNA, 25 bp, Homo sapien
ggcatatgagtgttctgtgtcatca

SEQ ID NO: 4880063 - DNA, 25 bp, Homo sapien
cacacagagtagttctttcattcat

SEQ ID NO: 4880064 - DNA, 25 bp, Homo sapien
gacatggcagcttgccaagaaccca

SEQ ID NO: 4880065 - DNA, 25 bp, Homo sapien
tccatgttgaatcagctgtacaggc

SEQ ID NO: 4880066 - DNA, 25 bp, Homo sapien
tatctcctaagggatgttccttcct

SEQ ID NO: 4880067 - DNA, 25 bp, Homo sapien
atacagcaagtagattttagcaaca

SEQ ID NO: 4880068 - DNA, 25 bp, Homo sapien
aattctttatcataccaggtacggg

SEQ ID NO: 4880069 - DNA, 25 bp, Homo sapien
tatgaccagacaatatagtttaact

SEQ ID NO: 4880070 - DNA, 25 bp, Homo sapien
tgctgagggccaattttaatgccat

SEQ ID NO: 4880071 - DNA, 25 bp, Homo sapien
cattggtagcagcatgctgagggcc

SEQ ID NO: 4880072 - DNA, 25 bp, Homo sapien
gtagcagcatgctgagggccaattt

SEQ ID NO: 4880073 - DNA, 25 bp, Homo sapien
cctgcatgtgttgcattggtagcag

SEQ ID NO: 4880074 - DNA, 25 bp, Homo sapien
tgaaagaataagtgagtaggccccg

SEQ ID NO: 4880075 - DNA, 25 bp, Homo sapien
tgggcagctagacagtaaaaacaga

SEQ ID NO: 4880076 - DNA, 25 bp, Homo sapien
tacaagaatttgacggattaaagtc

SEQ ID NO: 4880077 - DNA, 25 bp, Homo sapien
gtaggccccgttgggcagctagaca

SEQ ID NO: 4880078 - DNA, 25 bp, Homo sapien
cacatcaattgacctagaaatcaaa

SEQ ID NO: 4880079 - DNA, 25 bp, Homo sapien
taatcacatcaattgacctagaaat

SEQ ID NO: 4880080 - DNA, 25 bp, Homo sapien
tacaattcagttcgtagttaagggc

SEQ ID NO: 4880081 - DNA, 25 bp, Homo sapien
gttcgtagttaagggcacaagacaa

SEQ ID NO: 4880082 - DNA, 25 bp, Homo sapien
cacagtcactgtacatcaaggttga

SEQ ID NO: 4880083 - DNA, 25 bp, Homo sapien
cagatgttgggaaacctaactacac

SEQ ID NO: 4880084 - DNA, 25 bp, Homo sapien
tccttatagccgtgaaaattgacaa

SEQ ID NO: 4880085 - DNA, 25 bp, Homo sapien
cttggcaaattacacccaagcaggt

SEQ ID NO: 4880086 - DNA, 25 bp, Homo sapien
aatttcattatagaccaagggagaa

SEQ ID NO: 4880087 - DNA, 25 bp, Homo sapien
aacaatttcattatagaccaaggga

SEQ ID NO: 4880088 - DNA, 25 bp, Homo sapien
caatttcattatagaccaagggaga

SEQ ID NO: 4880089 - DNA, 25 bp, Homo sapien
ttcattatagaccaagggagaaaaa

SEQ ID NO: 4880090 - DNA, 25 bp, Homo sapien
caaacctttgagagagtactgctga

SEQ ID NO: 4880091 - DNA, 25 bp, Homo sapien
gaactattgagaagtccacctgctg

SEQ ID NO: 4880092 - DNA, 25 bp, Homo sapien
taagaccagtgaatttgatacagcc

SEQ ID NO: 4880093 - DNA, 25 bp, Homo sapien
gtgatttcccacaagagtactgtca

SEQ ID NO: 4880094 - DNA, 25 bp, Homo sapien
taaatttgcaagacgaatggtaaca

SEQ ID NO: 4880095 - DNA, 25 bp, Homo sapien
catgctgccaacctcaggactaaat

SEQ ID NO: 4880096 - DNA, 25 bp, Homo sapien
taaggtgttgcaaagccagacatga

SEQ ID NO: 4880097 - DNA, 25 bp, Homo sapien
ccattagcagataaatagggactat

SEQ ID NO: 4880098 - DNA, 25 bp, Homo sapien
cctgttatgggatacacataaatag

SEQ ID NO: 4880099 - DNA, 25 bp, Homo sapien
aaatgcattttagggacactttgta

SEQ ID NO: 4880100 - DNA, 25 bp, Homo sapien
gcaaattaatgtatccatcactcac

SEQ ID NO: 4880101 - DNA, 25 bp, Homo sapien
tactaatatatagactggcacttag

SEQ ID NO: 4880102 - DNA, 25 bp, Homo sapien
gccctggtcaccactcaatacaatg

SEQ ID NO: 4880103 - DNA, 25 bp, Homo sapien
agtgggaaccccgttgtgtattctg

SEQ ID NO: 4880104 - DNA, 25 bp, Homo sapien
ctgagagcacaccccaaactgaggc

SEQ ID NO: 4880105 - DNA, 25 bp, Homo sapien
accccgttgtgtattctgtacgcca

SEQ ID NO: 4880106 - DNA, 25 bp, Homo sapien
tcacagtgggaaccccgttgtgtat

SEQ ID NO: 4880107 - DNA, 25 bp, Homo sapien
gatcgtctgacccagagtctaaaga

SEQ ID NO: 4880108 - DNA, 25 bp, Homo sapien
tcacatgcaccccaccacaggagaa

SEQ ID NO: 4880109 - DNA, 25 bp, Homo sapien
tcgtctgacccagagtctaaagaca

SEQ ID NO: 4880110 - DNA, 25 bp, Homo sapien
ctggatcgtctgacccagagtctaa

SEQ ID NO: 4880111 - DNA, 25 bp, Homo sapien
gggttgtgaacagaaagccttgtca

SEQ ID NO: 4880112 - DNA, 25 bp, Homo sapien
tggtttgaacgccagcagcatcctc

SEQ ID NO: 4880113 - DNA, 25 bp, Homo sapien
agccttgtcacaagtgtggtttgaa

SEQ ID NO: 4880114 - DNA, 25 bp, Homo sapien
ctggatgggttgtgaacagaaagcc

SEQ ID NO: 4880115 - DNA, 25 bp, Homo sapien
caatcaaggctaacgggtcactacc

SEQ ID NO: 4880116 - DNA, 25 bp, Homo sapien
gcactggttctgtagtttgtggcca

SEQ ID NO: 4880117 - DNA, 25 bp, Homo sapien
tgtggccattagagcgctcatctgt

SEQ ID NO: 4880118 - DNA, 25 bp, Homo sapien
tggcacatcgctaatggcaatcaag

SEQ ID NO: 4880119 - DNA, 25 bp, Homo sapien
gatcatcttaaagggacagcgccgc

SEQ ID NO: 4880120 - DNA, 25 bp, Homo sapien
gattagccgcagatggccgactaga

SEQ ID NO: 4880121 - DNA, 25 bp, Homo sapien
caggacattgtctggtcgcggccgt

SEQ ID NO: 4880122 - DNA, 25 bp, Homo sapien
ccttcctgggatcaaaatgggtgcg

SEQ ID NO: 4880123 - DNA, 25 bp, Homo sapien
cgccgccgtcgccagtccggtagcc

SEQ ID NO: 4880124 - DNA, 25 bp, Homo sapien
atcccgcggggactggtagctgccc

SEQ ID NO: 4880125 - DNA, 25 bp, Homo sapien
gccagtccggtagcccggatgtcgc

SEQ ID NO: 4880126 - DNA, 25 bp, Homo sapien
gtgagccgggcatcccgcggggact

SEQ ID NO: 4880127 - DNA, 25 bp, Homo sapien
ggcgggtggcggcacatgccgcggc

SEQ ID NO: 4880128 - DNA, 25 bp, Homo sapien
gggtggcggcacatgccgcggccgc

SEQ ID NO: 4880129 - DNA, 25 bp, Homo sapien
gccccggagtctgcgaggcggaggc

SEQ ID NO: 4880130 - DNA, 25 bp, Homo sapien
gtcccggccccggagtctgcgaggc

SEQ ID NO: 4880131 - DNA, 25 bp, Homo sapien
ttgccgcttactttcccttttctga

SEQ ID NO: 4880132 - DNA, 25 bp, Homo sapien
aaagcttctttgagctcgcttcacg

SEQ ID NO: 4880133 - DNA, 25 bp, Homo sapien
caaagccatcaaagcttctttgagc

SEQ ID NO: 4880134 - DNA, 25 bp, Homo sapien
ctcgcttcacgtggtcattgatcct

SEQ ID NO: 4880135 - DNA, 25 bp, Homo sapien
gctccaatgttccatgacttgctgt

SEQ ID NO: 4880136 - DNA, 25 bp, Homo sapien
gctgttacccaccttaatctaagta

SEQ ID NO: 4880137 - DNA, 25 bp, Homo sapien
tggactgtgcccctttggctcttct

SEQ ID NO: 4880138 - DNA, 25 bp, Homo sapien
ccttaatctaagtaatattgggcca

SEQ ID NO: 4880139 - DNA, 25 bp, Homo sapien
ttcactcgattcaagtttaatccga

SEQ ID NO: 4880140 - DNA, 25 bp, Homo sapien
gtgtaatttcactcgattcaagttt

SEQ ID NO: 4880141 - DNA, 25 bp, Homo sapien
atagttcccgagcacgagcgcgtcc

SEQ ID NO: 4880142 - DNA, 25 bp, Homo sapien
caagtttaatccgatagttcccgag

SEQ ID NO: 4880143 - DNA, 25 bp, Homo sapien
ctggtgagtttcagggtgtccgggt

SEQ ID NO: 4880144 - DNA, 25 bp, Homo sapien
tggtgagtttcagggtgtccgggtc

SEQ ID NO: 4880145 - DNA, 25 bp, Homo sapien
ctcctccgctgcctagtgccgaggg

SEQ ID NO: 4880146 - DNA, 25 bp, Homo sapien
tccggagttggctcggcagctgcgg

SEQ ID NO: 4880147 - DNA, 25 bp, Homo sapien
aaaacaaaacgcagagcgggctccg

SEQ ID NO: 4880148 - DNA, 25 bp, Homo sapien
ctgcctagtgccgaggggaaaacaa

SEQ ID NO: 4880149 - DNA, 25 bp, Homo sapien
tcccccgcgcgcagacacgctccct

SEQ ID NO: 4880150 - DNA, 25 bp, Homo sapien
tcgtgctcggcgccggcgggaggaa

SEQ ID NO: 4880151 - DNA, 25 bp, Homo sapien
gccggcgggaggaaacgcgctcgcg

SEQ ID NO: 4880152 - DNA, 25 bp, Homo sapien
ggcgccggcgggaggaaacgcgctc

SEQ ID NO: 4880153 - DNA, 25 bp, Homo sapien
ccgcgccgggaggaacgcactttgt

SEQ ID NO: 4880154 - DNA, 25 bp, Homo sapien
agcgcggcgtggtcggtccggagcg

SEQ ID NO: 4880155 - DNA, 25 bp, Homo sapien
cgggaggaacgcactttgttcgcgc

SEQ ID NO: 4880156 - DNA, 25 bp, Homo sapien
gaacgcactttgttcgcgccggtgc

SEQ ID NO: 4880157 - DNA, 25 bp, Homo sapien
cccgcgccgcgtgttcgcgctgccc

SEQ ID NO: 4880158 - DNA, 25 bp, Homo sapien
ccaactccgggctcgcaactccgcg

SEQ ID NO: 4880159 - DNA, 25 bp, Homo sapien
tccgcgcccgcgaccggcactggct

SEQ ID NO: 4880160 - DNA, 25 bp, Homo sapien
gcactggctgagctcgggacgcctc

SEQ ID NO: 4880161 - DNA, 25 bp, Homo sapien
taaagtcgctattatgcagctgccg

SEQ ID NO: 4880162 - DNA, 25 bp, Homo sapien
ggagccgagttgcgttggaaggtta

SEQ ID NO: 4880163 - DNA, 25 bp, Homo sapien
ggaaggttaaagtcgctattatgca

SEQ ID NO: 4880164 - DNA, 25 bp, Homo sapien
gtcgctattatgcagctgccgccgc

SEQ ID NO: 4880165 - DNA, 25 bp, Homo sapien
gggcgctcacaaagcgggcggccgg

SEQ ID NO: 4880166 - DNA, 25 bp, Homo sapien
gtttggggtgcgctcccacggctcc

SEQ ID NO: 4880167 - DNA, 25 bp, Homo sapien
ggagaaaggcggctcggtaatgatg

SEQ ID NO: 4880168 - DNA, 25 bp, Homo sapien
ggctcggtaatgatggctgctcggg

SEQ ID NO: 4880169 - DNA, 25 bp, Homo sapien
gaaagttcaactagctctctaaggt

SEQ ID NO: 4880170 - DNA, 25 bp, Homo sapien
taagctctgcaacagtgggtggcca

SEQ ID NO: 4880171 - DNA, 25 bp, Homo sapien
tgctaggcaccaggaacacaactgt

SEQ ID NO: 4880172 - DNA, 25 bp, Homo sapien
ttccagagccaacaaagacaagacc

SEQ ID NO: 4880173 - DNA, 25 bp, Homo sapien
tccagattctgtggccgtgaaagcc

SEQ ID NO: 4880174 - DNA, 25 bp, Homo sapien
gatgaaacaggaagactaatcacag

SEQ ID NO: 4880175 - DNA, 25 bp, Homo sapien
tcaggtagcaggtacccaacaaaca

SEQ ID NO: 4880176 - DNA, 25 bp, Homo sapien
aacagccgaatcaatgagcaaaacc

SEQ ID NO: 4880177 - DNA, 25 bp, Homo sapien
gctagaaacctatatgccctgagat

SEQ ID NO: 4880178 - DNA, 25 bp, Homo sapien
tgagatctccctcttgagagcgcat

SEQ ID NO: 4880179 - DNA, 25 bp, Homo sapien
tgctcgtgtcaaaggctgcttaaca

SEQ ID NO: 4880180 - DNA, 25 bp, Homo sapien
agcaggcaggatattgtctacaacc

SEQ ID NO: 4880181 - DNA, 25 bp, Homo sapien
ggtctggttaccacaggattctacg

SEQ ID NO: 4880182 - DNA, 25 bp, Homo sapien
taaaatacaactctctccgagggag

SEQ ID NO: 4880183 - DNA, 25 bp, Homo sapien
gattctacgctcaacctggaatgag

SEQ ID NO: 4880184 - DNA, 25 bp, Homo sapien
tctgggtgtaacagcatcgctcatc

SEQ ID NO: 4880185 - DNA, 25 bp, Homo sapien
cccagaagacttgactgagtcacaa

SEQ ID NO: 4880186 - DNA, 25 bp, Homo sapien
gtccctacaaacaacacaagacagg

SEQ ID NO: 4880187 - DNA, 25 bp, Homo sapien
gaagttagtgcaccaagttttcctg

SEQ ID NO: 4880188 - DNA, 25 bp, Homo sapien
tggcacaagcccatctgaagctgaa

SEQ ID NO: 4880189 - DNA, 25 bp, Homo sapien
tagtatgctagcaagcactgccttg

SEQ ID NO: 4880190 - DNA, 25 bp, Homo sapien
gacacagtggcctctaaaaagttaa

SEQ ID NO: 4880191 - DNA, 25 bp, Homo sapien
taactagtaaggtgccatgtaccct

SEQ ID NO: 4880192 - DNA, 25 bp, Homo sapien
tacactgaggatactagggaaagga

SEQ ID NO: 4880193 - DNA, 25 bp, Homo sapien
gttttaggtacgaagacatcccatg

SEQ ID NO: 4880194 - DNA, 25 bp, Homo sapien
tgatccatgacaacactcagctgag

SEQ ID NO: 4880195 - DNA, 25 bp, Homo sapien
caccacgtgctagaaatgtatggcc

SEQ ID NO: 4880196 - DNA, 25 bp, Homo sapien
ttaagacggcaacaatgcaagctcc

SEQ ID NO: 4880197 - DNA, 25 bp, Homo sapien
tactaaatctggtgataaacacagc

SEQ ID NO: 4880198 - DNA, 25 bp, Homo sapien
taagtagaggcttaccatactcaag

SEQ ID NO: 4880199 - DNA, 25 bp, Homo sapien
ctattcgtgtgggagaaagcagtat

SEQ ID NO: 4880200 - DNA, 25 bp, Homo sapien
gactgagtgtatgactgcggaagac

SEQ ID NO: 4880201 - DNA, 25 bp, Homo sapien
gctctgatgcttgtgccaccaaatg

SEQ ID NO: 4880202 - DNA, 25 bp, Homo sapien
tgacactctacaggacagttcccca

SEQ ID NO: 4880203 - DNA, 25 bp, Homo sapien
ggtgactgctctgatgcttgtgcca

SEQ ID NO: 4880204 - DNA, 25 bp, Homo sapien
catggtgctggcatgacactctaca

SEQ ID NO: 4880205 - DNA, 25 bp, Homo sapien
tatatgctacagctctaattcctac

SEQ ID NO: 4880206 - DNA, 25 bp, Homo sapien
caagtagtctagtattaccccttgt

SEQ ID NO: 4880207 - DNA, 25 bp, Homo sapien
aaaactaacttccagcatgtcaact

SEQ ID NO: 4880208 - DNA, 25 bp, Homo sapien
cctacactgttcagacattgttcca

SEQ ID NO: 4880209 - DNA, 25 bp, Homo sapien
ctcaaataacgttgtatccaaaaat

SEQ ID NO: 4880210 - DNA, 25 bp, Homo sapien
atttttggatacaacgttatttgag

SEQ ID NO: 4880211 - DNA, 25 bp, Homo sapien
agggccttccgcgtgccagcgatga

SEQ ID NO: 4880212 - DNA, 25 bp, Homo sapien
ttccggtcaggaagtggccgcagct

SEQ ID NO: 4880213 - DNA, 25 bp, Homo sapien
ccccgagccactgaggcgggcatga

SEQ ID NO: 4880214 - DNA, 25 bp, Homo sapien
cagcgagggccttatgagggccttc

SEQ ID NO: 4880215 - DNA, 25 bp, Homo sapien
tgaacactgttcaatgggccacaaa

SEQ ID NO: 4880216 - DNA, 25 bp, Homo sapien
cactttcccaagtcgcagctgcatt

SEQ ID NO: 4880217 - DNA, 25 bp, Homo sapien
atagtagaccaaaagagtgaaatcc

SEQ ID NO: 4880218 - DNA, 25 bp, Homo sapien
gatattcattcaaagccctattttg

SEQ ID NO: 4880219 - DNA, 25 bp, Homo sapien
tgccctcaaagcctataatccttaa

SEQ ID NO: 4880220 - DNA, 25 bp, Homo sapien
taatccttaactaatcttcttcatg

SEQ ID NO: 4880221 - DNA, 25 bp, Homo sapien
aggagcttgcctgtgcttcacttca

SEQ ID NO: 4880222 - DNA, 25 bp, Homo sapien
gaggtgtttgccctcaaagcctata

SEQ ID NO: 4880223 - DNA, 25 bp, Homo sapien
tattggcatttgctgacccatagga

SEQ ID NO: 4880224 - DNA, 25 bp, Homo sapien
gaggcaaagccttggtctattggca

SEQ ID NO: 4880225 - DNA, 25 bp, Homo sapien
tgtccacaaaggattgcccatgcct

SEQ ID NO: 4880226 - DNA, 25 bp, Homo sapien
cgggtaaccacattctccgaggcct

SEQ ID NO: 4880227 - DNA, 25 bp, Homo sapien
tgatggaactgctgcaccgagtgac

SEQ ID NO: 4880228 - DNA, 25 bp, Homo sapien
tataaatggacgagactgctgcatg

SEQ ID NO: 4880229 - DNA, 25 bp, Homo sapien
ggaaaaatccccacgtgccatatag

SEQ ID NO: 4880230 - DNA, 25 bp, Homo sapien
ccgagtgacgcaaggaaggtgccat

SEQ ID NO: 4880231 - DNA, 25 bp, Homo sapien
aaaagatggctgttgaccaggatgt

SEQ ID NO: 4880232 - DNA, 25 bp, Homo sapien
cagtcaattcccttggtgccgagga

SEQ ID NO: 4880233 - DNA, 25 bp, Homo sapien
ggtatcagtcgttcctggattgctt

SEQ ID NO: 4880234 - DNA, 25 bp, Homo sapien
caggacaaccatttggcctcatgtg

SEQ ID NO: 4880235 - DNA, 25 bp, Homo sapien
gctgcagtggaggacaggttggcaa

SEQ ID NO: 4880236 - DNA, 25 bp, Homo sapien
agtggaggacaggttggcaactgct

SEQ ID NO: 4880237 - DNA, 25 bp, Homo sapien
tgcagtggaggacaggttggcaact

SEQ ID NO: 4880238 - DNA, 25 bp, Homo sapien
ggtgaggctgcagtggaggacaggt

SEQ ID NO: 4880239 - DNA, 25 bp, Homo sapien
cacaggcactttctgcggggtgttc

SEQ ID NO: 4880240 - DNA, 25 bp, Homo sapien
cactttctgcggggtgttctggggt

SEQ ID NO: 4880241 - DNA, 25 bp, Homo sapien
caggcactttctgcggggtgttctg

SEQ ID NO: 4880242 - DNA, 25 bp, Homo sapien
ggcactttctgcggggtgttctggg

SEQ ID NO: 4880243 - DNA, 25 bp, Homo sapien
gactcacacatgtcctctgaaatgc

SEQ ID NO: 4880244 - DNA, 25 bp, Homo sapien
ggtcaaggattcaaacgccacagac

SEQ ID NO: 4880245 - DNA, 25 bp, Homo sapien
tagcaccggacacagcaggcatgga

SEQ ID NO: 4880246 - DNA, 25 bp, Homo sapien
ggctctcctgaagtctagcaccgga

SEQ ID NO: 4880247 - DNA, 25 bp, Homo sapien
tgaaagtccaactgaaagacaagcc

SEQ ID NO: 4880248 - DNA, 25 bp, Homo sapien
caagccacagatattcagactcaag

SEQ ID NO: 4880249 - DNA, 25 bp, Homo sapien
tcacttcaacgaaagtaactcatgg

SEQ ID NO: 4880250 - DNA, 25 bp, Homo sapien
tatgagctctcaaacaaaagtgaga

SEQ ID NO: 4880251 - DNA, 25 bp, Homo sapien
caggattccatgtctgcatggcaca

SEQ ID NO: 4880252 - DNA, 25 bp, Homo sapien
tgtcctttcctgacttggttcctct

SEQ ID NO: 4880253 - DNA, 25 bp, Homo sapien
tcctctatgttctcccttaagtctg

SEQ ID NO: 4880254 - DNA, 25 bp, Homo sapien
tctggttttagcaagatcattctaa

SEQ ID NO: 4880255 - DNA, 25 bp, Homo sapien
attacttgaggagcaatctcacagg

SEQ ID NO: 4880256 - DNA, 25 bp, Homo sapien
tacttgaggagcaatctcacaggtt

SEQ ID NO: 4880257 - DNA, 25 bp, Homo sapien
ttgaggagcaatctcacaggttttt

SEQ ID NO: 4880258 - DNA, 25 bp, Homo sapien
gcaattacttgaggagcaatctcac

SEQ ID NO: 4880259 - DNA, 25 bp, Homo sapien
ttcagacaggaagagtccaggtgag

SEQ ID NO: 4880260 - DNA, 25 bp, Homo sapien
tgtaaggtaacagctgggcagaggt

SEQ ID NO: 4880261 - DNA, 25 bp, Homo sapien
ggcagaggtaggacccgttcagaca

SEQ ID NO: 4880262 - DNA, 25 bp, Homo sapien
aagtggaagatgtaatggcaaagag

SEQ ID NO: 4880263 - DNA, 25 bp, Homo sapien
gaatctatcagcttctctcatccaa

SEQ ID NO: 4880264 - DNA, 25 bp, Homo sapien
gaaacttattctatactcaggtagc

SEQ ID NO: 4880265 - DNA, 25 bp, Homo sapien
caactatacagttgtagaatctatc

SEQ ID NO: 4880266 - DNA, 25 bp, Homo sapien
aaagttagtggctgatgtttctgaa

SEQ ID NO: 4880267 - DNA, 25 bp, Homo sapien
cactggtttctctagaaagggctcc

SEQ ID NO: 4880268 - DNA, 25 bp, Homo sapien
agtcatatccggcactggtttctct

SEQ ID NO: 4880269 - DNA, 25 bp, Homo sapien
tccggcactggtttctctagaaagg

SEQ ID NO: 4880270 - DNA, 25 bp, Homo sapien
tggtttctctagaaagggctccgac

SEQ ID NO: 4880271 - DNA, 25 bp, Homo sapien
taatcatcactcttcactagctgag

SEQ ID NO: 4880272 - DNA, 25 bp, Homo sapien
ttgatggcaggtaatcatcactctt

SEQ ID NO: 4880273 - DNA, 25 bp, Homo sapien
ctagctgagcattcggtccactaac

SEQ ID NO: 4880274 - DNA, 25 bp, Homo sapien
cactcttcactagctgagcattcgg

SEQ ID NO: 4880275 - DNA, 25 bp, Homo sapien
ttgggacccatccagtgagttccta

SEQ ID NO: 4880276 - DNA, 25 bp, Homo sapien
caccagggaagtcatctttaccaaa

SEQ ID NO: 4880277 - DNA, 25 bp, Homo sapien
tcttggttatctaccccaccaggga

SEQ ID NO: 4880278 - DNA, 25 bp, Homo sapien
caaaacctttactgggatcctctgc

SEQ ID NO: 4880279 - DNA, 25 bp, Homo sapien
tgaccagtactagaaggtatcctct

SEQ ID NO: 4880280 - DNA, 25 bp, Homo sapien
gattaagaagtagttttgctatcga

SEQ ID NO: 4880281 - DNA, 25 bp, Homo sapien
catttgtgcaaaatgcctgccagta

SEQ ID NO: 4880282 - DNA, 25 bp, Homo sapien
ttaattgtcatgaaaaacgatatca

SEQ ID NO: 4880283 - DNA, 25 bp, Homo sapien
tgggggtgttttgtctaagtctgaa

SEQ ID NO: 4880284 - DNA, 25 bp, Homo sapien
caaagcacttgcttctgagtcaggt

SEQ ID NO: 4880285 - DNA, 25 bp, Homo sapien
tgcttctgagtcaggtttcttatta

SEQ ID NO: 4880286 - DNA, 25 bp, Homo sapien
gtctgaattttcagaaccttctgtt

SEQ ID NO: 4880287 - DNA, 25 bp, Homo sapien
caggtcttcagtgtagcgctttctc

SEQ ID NO: 4880288 - DNA, 25 bp, Homo sapien
aggtcttcagtgtagcgctttctct

SEQ ID NO: 4880289 - DNA, 25 bp, Homo sapien
ccaggtcttcagtgtagcgctttct

SEQ ID NO: 4880290 - DNA, 25 bp, Homo sapien
ttttttactgaacgactgctcataa

SEQ ID NO: 4880291 - DNA, 25 bp, Homo sapien
tttactgaacgactgctcataattt

SEQ ID NO: 4880292 - DNA, 25 bp, Homo sapien
actgaacgactgctcataatttttt

SEQ ID NO: 4880293 - DNA, 25 bp, Homo sapien
tactgaacgactgctcataattttt

SEQ ID NO: 4880294 - DNA, 25 bp, Homo sapien
tcccagaaagctctgactcttacag

SEQ ID NO: 4880295 - DNA, 25 bp, Homo sapien
tacatgtcagccaaatcaagagttt

SEQ ID NO: 4880296 - DNA, 25 bp, Homo sapien
taatcctatctgctgtagtgtatgc

SEQ ID NO: 4880297 - DNA, 25 bp, Homo sapien
ggcagcagccaattagcaactgctc

SEQ ID NO: 4880298 - DNA, 25 bp, Homo sapien
taaacaccacttacagatgtttggg

SEQ ID NO: 4880299 - DNA, 25 bp, Homo sapien
agggccacgaagactgccacgctca

SEQ ID NO: 4880300 - DNA, 25 bp, Homo sapien
ggccagggccacgaagactgccacg

SEQ ID NO: 4880301 - DNA, 25 bp, Homo sapien
ggccacgaagactgccacgctcagg

SEQ ID NO: 4880302 - DNA, 25 bp, Homo sapien
ggtggccagggccacgaagactgcc

SEQ ID NO: 4880303 - DNA, 25 bp, Homo sapien
gtatttcacatagaattcctcaatt

SEQ ID NO: 4880304 - DNA, 25 bp, Homo sapien
gaattcctcaatttctacctcctct

SEQ ID NO: 4880305 - DNA, 25 bp, Homo sapien
cacatagaattcctcaatttctacc

SEQ ID NO: 4880306 - DNA, 25 bp, Homo sapien
agtttttgtatttcacatagaattc

SEQ ID NO: 4880307 - DNA, 25 bp, Homo sapien
tgaagggacgaagtgtagccccaca

SEQ ID NO: 4880308 - DNA, 25 bp, Homo sapien
gagttcttgtctctagggcctcgca

SEQ ID NO: 4880309 - DNA, 25 bp, Homo sapien
ccccacagggtagaattcatgatca

SEQ ID NO: 4880310 - DNA, 25 bp, Homo sapien
tctacaaggacaacaactcaccgtg

SEQ ID NO: 4880311 - DNA, 25 bp, Homo sapien
tggtaaatctacaagggaactctct

SEQ ID NO: 4880312 - DNA, 25 bp, Homo sapien
gccaactacaacaagagagaatgac

SEQ ID NO: 4880313 - DNA, 25 bp, Homo sapien
gacagaaaacccatggcacctgatg

SEQ ID NO: 4880314 - DNA, 25 bp, Homo sapien
taccataggaaatcgtgttgtaggc

SEQ ID NO: 4880315 - DNA, 25 bp, Homo sapien
cacacactgatctggaggtctctct

SEQ ID NO: 4880316 - DNA, 25 bp, Homo sapien
tgatctggaggtctctctggtagtg

SEQ ID NO: 4880317 - DNA, 25 bp, Homo sapien
ctggaggtctctctggtagtgccat

SEQ ID NO: 4880318 - DNA, 25 bp, Homo sapien
tcacacactgatctggaggtctctc

SEQ ID NO: 4880319 - DNA, 25 bp, Homo sapien
ctagagtctcctggtctggcactgg

SEQ ID NO: 4880320 - DNA, 25 bp, Homo sapien
atctctggggtcactaacaggctga

SEQ ID NO: 4880321 - DNA, 25 bp, Homo sapien
actggcacctggtcaggaactcgga

SEQ ID NO: 4880322 - DNA, 25 bp, Homo sapien
caaatgacttttgaggagggctaga

SEQ ID NO: 4880323 - DNA, 25 bp, Homo sapien
tgcccactgacaatgaagataagag

SEQ ID NO: 4880324 - DNA, 25 bp, Homo sapien
aaggaacttgttctggccctgcttt

SEQ ID NO: 4880325 - DNA, 25 bp, Homo sapien
tctatagatgcccactgacaatgaa

SEQ ID NO: 4880326 - DNA, 25 bp, Homo sapien
gccctgctttgccttaaatcgttta

SEQ ID NO: 4880327 - DNA, 25 bp, Homo sapien
cataatctggattaaaaagctcatc

SEQ ID NO: 4880328 - DNA, 25 bp, Homo sapien
tccggtcaacctccacataatctgg

SEQ ID NO: 4880329 - DNA, 25 bp, Homo sapien
tctccccggtcatctgtgctacgtg

SEQ ID NO: 4880330 - DNA, 25 bp, Homo sapien
tgcaaagtccattatccggtcaacc

SEQ ID NO: 4880331 - DNA, 25 bp, Homo sapien
cgatctttgcttgatctatgtcctg

SEQ ID NO: 4880332 - DNA, 25 bp, Homo sapien
agtttctcaaactcctcgatctttg

SEQ ID NO: 4880333 - DNA, 25 bp, Homo sapien
ggctccctggacattagtttctcaa

SEQ ID NO: 4880334 - DNA, 25 bp, Homo sapien
gaacaccacttcaccagatagtgag

SEQ ID NO: 4880335 - DNA, 25 bp, Homo sapien
ttgtaccaattgaaaagtagccagt

SEQ ID NO: 4880336 - DNA, 25 bp, Homo sapien
ggaactctccgatttcttccaatca

SEQ ID NO: 4880337 - DNA, 25 bp, Homo sapien
atgttgtaccaattgaaaagtagcc

SEQ ID NO: 4880338 - DNA, 25 bp, Homo sapien
ttttatactccctggaactctccga

SEQ ID NO: 4880339 - DNA, 25 bp, Homo sapien
tacaactgaatggtccgacgactag

SEQ ID NO: 4880340 - DNA, 25 bp, Homo sapien
gcaattactaaaaaagggccatgga

SEQ ID NO: 4880341 - DNA, 25 bp, Homo sapien
ctctgtccaggttcggaattccctt

SEQ ID NO: 4880342 - DNA, 25 bp, Homo sapien
gacgactagcttgactcccatgata

SEQ ID NO: 4880343 - DNA, 25 bp, Homo sapien
tgcacagagtaagtacaaagaatac

SEQ ID NO: 4880344 - DNA, 25 bp, Homo sapien
gagtaagtacaaagaatacaacctg

SEQ ID NO: 4880345 - DNA, 25 bp, Homo sapien
tacaaagaatacaacctgtgaaggt

SEQ ID NO: 4880346 - DNA, 25 bp, Homo sapien
taaaatgcacagagtaagtacaaag

SEQ ID NO: 4880347 - DNA, 25 bp, Homo sapien
gccatggaatattccgcagctcagg

SEQ ID NO: 4880348 - DNA, 25 bp, Homo sapien
tgatggcatgaaacttataggaccc

SEQ ID NO: 4880349 - DNA, 25 bp, Homo sapien
tcaatgactacacagcgccatggaa

SEQ ID NO: 4880350 - DNA, 25 bp, Homo sapien
tataggacccctttatcactcgacc

SEQ ID NO: 4880351 - DNA, 25 bp, Homo sapien
cactgaagtaaagcttggcccaaca

SEQ ID NO: 4880352 - DNA, 25 bp, Homo sapien
caaattctgagcaacgggactatca

SEQ ID NO: 4880353 - DNA, 25 bp, Homo sapien
catctcttgggaagctggaagacta

SEQ ID NO: 4880354 - DNA, 25 bp, Homo sapien
tgtgcgaactaaaccaaccccagat

SEQ ID NO: 4880355 - DNA, 25 bp, Homo sapien
gaaggtggatccctactgagaatat

SEQ ID NO: 4880356 - DNA, 25 bp, Homo sapien
taatgcttaagtatcacctggagtg

SEQ ID NO: 4880357 - DNA, 25 bp, Homo sapien
ctatctgggaacacatgaactaata

SEQ ID NO: 4880358 - DNA, 25 bp, Homo sapien
cagatgactgtttaagccttcagga

SEQ ID NO: 4880359 - DNA, 25 bp, Homo sapien
ttcttccacagtgttctggagtggg

SEQ ID NO: 4880360 - DNA, 25 bp, Homo sapien
ggaagcgacttggttccaagaaatg

SEQ ID NO: 4880361 - DNA, 25 bp, Homo sapien
gaagcgacttggttccaagaaatga

SEQ ID NO: 4880362 - DNA, 25 bp, Homo sapien
ttcccgtcagcagcactttgtgttc

SEQ ID NO: 4880363 - DNA, 25 bp, Homo sapien
gcagcacttccgcaattccatcata

SEQ ID NO: 4880364 - DNA, 25 bp, Homo sapien
gataaggtacggatgattgcagcac

SEQ ID NO: 4880365 - DNA, 25 bp, Homo sapien
tctacatcctctttgagacgtctca

SEQ ID NO: 4880366 - DNA, 25 bp, Homo sapien
taggtacgttagcttgaccaccgcc

SEQ ID NO: 4880367 - DNA, 25 bp, Homo sapien
atcacagaaagtgggaagctggtga

SEQ ID NO: 4880368 - DNA, 25 bp, Homo sapien
tcacagaaagtgggaagctggtgaa

SEQ ID NO: 4880369 - DNA, 25 bp, Homo sapien
cgtaacggctgcacaagcttctaaa

SEQ ID NO: 4880370 - DNA, 25 bp, Homo sapien
gtatcagatacataatcatcacaca

SEQ ID NO: 4880371 - DNA, 25 bp, Homo sapien
agcttctaaacatactgtgattagc

SEQ ID NO: 4880372 - DNA, 25 bp, Homo sapien
cacacatgatactctctttagaaga

SEQ ID NO: 4880373 - DNA, 25 bp, Homo sapien
ggaaaagataagcaccctgtggcca

SEQ ID NO: 4880374 - DNA, 25 bp, Homo sapien
caatcagcactagcttgccagcagc

SEQ ID NO: 4880375 - DNA, 25 bp, Homo sapien
gtagtcttccagtatgtccaagcag

SEQ ID NO: 4880376 - DNA, 25 bp, Homo sapien
gcagcagcttgtcaatcagcactag

SEQ ID NO: 4880377 - DNA, 25 bp, Homo sapien
ctatcagaatcaggtttggagaatc

SEQ ID NO: 4880378 - DNA, 25 bp, Homo sapien
tttggagaatctgtcgatagctgcc

SEQ ID NO: 4880379 - DNA, 25 bp, Homo sapien
tcggccgtcgatcctttcatatggg

SEQ ID NO: 4880380 - DNA, 25 bp, Homo sapien
gctgcctggcggaggttgcctctta

SEQ ID NO: 4880381 - DNA, 25 bp, Homo sapien
gtatcagcagcagtgaggttaatgc

SEQ ID NO: 4880382 - DNA, 25 bp, Homo sapien
gaggttaatgcctaaacctcctgcc

SEQ ID NO: 4880383 - DNA, 25 bp, Homo sapien
cagcagcagtgaggttaatgcctaa

SEQ ID NO: 4880384 - DNA, 25 bp, Homo sapien
cagcagtgaggttaatgcctaaacc

SEQ ID NO: 4880385 - DNA, 25 bp, Homo sapien
taaaggcatcaggactttcttgtgc

SEQ ID NO: 4880386 - DNA, 25 bp, Homo sapien
ctttttaaaggcatcaggactttct

SEQ ID NO: 4880387 - DNA, 25 bp, Homo sapien
aaggcatcaggactttcttgtgcat

SEQ ID NO: 4880388 - DNA, 25 bp, Homo sapien
tttaaaggcatcaggactttcttgt

SEQ ID NO: 4880389 - DNA, 25 bp, Homo sapien
tcaaactagccttgtcgaacatttc

SEQ ID NO: 4880390 - DNA, 25 bp, Homo sapien
ggaatttcttgtaatcagcctgtag

SEQ ID NO: 4880391 - DNA, 25 bp, Homo sapien
tcctattctatgacatctagcctga

SEQ ID NO: 4880392 - DNA, 25 bp, Homo sapien
gactgtagcacagctttatccaggc

SEQ ID NO: 4880393 - DNA, 25 bp, Homo sapien
tcatccatgagtgcaccataggccc

SEQ ID NO: 4880394 - DNA, 25 bp, Homo sapien
cataggccccttttcgtagaagatc

SEQ ID NO: 4880395 - DNA, 25 bp, Homo sapien
ctgactcaatggtaatggtgtgggt

SEQ ID NO: 4880396 - DNA, 25 bp, Homo sapien
ggttcgacgtaggaggatctgatca

SEQ ID NO: 4880397 - DNA, 25 bp, Homo sapien
ccagaaatttggatcatccaaggaa

SEQ ID NO: 4880398 - DNA, 25 bp, Homo sapien
ttaaggcatcaatatccaattcagc

SEQ ID NO: 4880399 - DNA, 25 bp, Homo sapien
gaaatttggatcatccaaggaaata

SEQ ID NO: 4880400 - DNA, 25 bp, Homo sapien
agccttcttagcccacttttgccag

SEQ ID NO: 4880401 - DNA, 25 bp, Homo sapien
ttcactgcactgtagagcctggtct

SEQ ID NO: 4880402 - DNA, 25 bp, Homo sapien
tcactcttggagtatcaataaccag

SEQ ID NO: 4880403 - DNA, 25 bp, Homo sapien
tttccaagtctgagaactccatcag

SEQ ID NO: 4880404 - DNA, 25 bp, Homo sapien
tgaaacattcactccttgcatagcc

SEQ ID NO: 4880405 - DNA, 25 bp, Homo sapien
gattaagacagtacaccaggatggt

SEQ ID NO: 4880406 - DNA, 25 bp, Homo sapien
gatcagatcccagatgaagcttttg

SEQ ID NO: 4880407 - DNA, 25 bp, Homo sapien
gcgtccgtgggaaagaatgtctgtc

SEQ ID NO: 4880408 - DNA, 25 bp, Homo sapien
cagtgagttggcgtttatagcgtcc

SEQ ID NO: 4880409 - DNA, 25 bp, Homo sapien
tgttacagtgatgcttcaggtgttt

SEQ ID NO: 4880410 - DNA, 25 bp, Homo sapien
gttacagtgatgcttcaggtgtttc

SEQ ID NO: 4880411 - DNA, 25 bp, Homo sapien
tgcaccaccggctgtgtgctctggg

SEQ ID NO: 4880412 - DNA, 25 bp, Homo sapien
cctgcaccaccggctgtgtgctctg

SEQ ID NO: 4880413 - DNA, 25 bp, Homo sapien
tggagtttctcaatggcgaaaacat

SEQ ID NO: 4880414 - DNA, 25 bp, Homo sapien
tttggaagcacatcagaagttgtag

SEQ ID NO: 4880415 - DNA, 25 bp, Homo sapien
tatacaactttgcttccgagaaagg

SEQ ID NO: 4880416 - DNA, 25 bp, Homo sapien
tactgtacctgggaacctaagctgt

SEQ ID NO: 4880417 - DNA, 25 bp, Homo sapien
tacagcatgcggacacgcagcagga

SEQ ID NO: 4880418 - DNA, 25 bp, Homo sapien
ggtagtacagcatgcggacacgcag

SEQ ID NO: 4880419 - DNA, 25 bp, Homo sapien
cttgagtcagcaccctctaagatct

SEQ ID NO: 4880420 - DNA, 25 bp, Homo sapien
gatcttatccgcctggtctcctatc

SEQ ID NO: 4880421 - DNA, 25 bp, Homo sapien
tatcccaccaatctgcaggaacttc

SEQ ID NO: 4880422 - DNA, 25 bp, Homo sapien
ttcagggatccacacatcggcttca

SEQ ID NO: 4880423 - DNA, 25 bp, Homo sapien
aacttcagcatggaaaggttcaggg

SEQ ID NO: 4880424 - DNA, 25 bp, Homo sapien
ttgaacactccaattaagagggatt

SEQ ID NO: 4880425 - DNA, 25 bp, Homo sapien
gagccgcgagttctcagcactgaca

SEQ ID NO: 4880426 - DNA, 25 bp, Homo sapien
gcccaggaggcacttgtacagatta

SEQ ID NO: 4880427 - DNA, 25 bp, Homo sapien
gaatcgctcactgtatatatcatgc

SEQ ID NO: 4880428 - DNA, 25 bp, Homo sapien
gttaagcccaccgtccactttgaca

SEQ ID NO: 4880429 - DNA, 25 bp, Homo sapien
gcaggaactcgcatggctggctgaa

SEQ ID NO: 4880430 - DNA, 25 bp, Homo sapien
tgtgaatagcatcagtcctgcagga

SEQ ID NO: 4880431 - DNA, 25 bp, Homo sapien
tatacataaggccagcgaacctgtc

SEQ ID NO: 4880432 - DNA, 25 bp, Homo sapien
taagatgacacggttccctctatgg

SEQ ID NO: 4880433 - DNA, 25 bp, Homo sapien
tgtgccgtgcccatccgtgcacaga

SEQ ID NO: 4880434 - DNA, 25 bp, Homo sapien
ctgtgccgtgcccatccgtgcacag

SEQ ID NO: 4880435 - DNA, 25 bp, Homo sapien
accaccatctgctagcatgtctgtt

SEQ ID NO: 4880436 - DNA, 25 bp, Homo sapien
gcataccgactcgttccagaaagca

SEQ ID NO: 4880437 - DNA, 25 bp, Homo sapien
tcagctcgcatggagttgtacttct

SEQ ID NO: 4880438 - DNA, 25 bp, Homo sapien
tgctcggcagctatggccttggcat

SEQ ID NO: 4880439 - DNA, 25 bp, Homo sapien
aaacacaaaaattatttgaatcata

SEQ ID NO: 4880440 - DNA, 25 bp, Homo sapien
acaaacacaaaaattatttgaatca

SEQ ID NO: 4880441 - DNA, 25 bp, Homo sapien
caaacacaaaaattatttgaatcat

SEQ ID NO: 4880442 - DNA, 25 bp, Homo sapien
ttcatctttgaacggtgttctggtt

SEQ ID NO: 4880443 - DNA, 25 bp, Homo sapien
atttcatctttgaacggtgttctgg

SEQ ID NO: 4880444 - DNA, 25 bp, Homo sapien
tttcatctttgaacggtgttctggt

SEQ ID NO: 4880445 - DNA, 25 bp, Homo sapien
tcatctttgaacggtgttctggttg

SEQ ID NO: 4880446 - DNA, 25 bp, Homo sapien
cctctgaaggagaatttgcaaattc

SEQ ID NO: 4880447 - DNA, 25 bp, Homo sapien
catggattcttccttatcctctgaa

SEQ ID NO: 4880448 - DNA, 25 bp, Homo sapien
ctgtggcatgtatttccatggattc

SEQ ID NO: 4880449 - DNA, 25 bp, Homo sapien
tatcctctgaaggagaatttgcaaa

SEQ ID NO: 4880450 - DNA, 25 bp, Homo sapien
tctgcgccggtcagtcttcattagg

SEQ ID NO: 4880451 - DNA, 25 bp, Homo sapien
taggcagtaatgagccggcgcagac

SEQ ID NO: 4880452 - DNA, 25 bp, Homo sapien
cagggttgaagtgttaggccagtaa

SEQ ID NO: 4880453 - DNA, 25 bp, Homo sapien
ccttttatagctgcgctgataggca

SEQ ID NO: 4880454 - DNA, 25 bp, Homo sapien
aaaggctctaaattggttccagtca

SEQ ID NO: 4880455 - DNA, 25 bp, Homo sapien
taccacacggtaaaaatcagcctct

SEQ ID NO: 4880456 - DNA, 25 bp, Homo sapien
tttgtcaagcctggcaaaggctcta

SEQ ID NO: 4880457 - DNA, 25 bp, Homo sapien
catcatctggcttgacgggcattcg

SEQ ID NO: 4880458 - DNA, 25 bp, Homo sapien
ctgtaacacagaagggctcatattt

SEQ ID NO: 4880459 - DNA, 25 bp, Homo sapien
tgatggagaacctgctcgcggatct

SEQ ID NO: 4880460 - DNA, 25 bp, Homo sapien
tggacaaatccaactgccagtgggt

SEQ ID NO: 4880461 - DNA, 25 bp, Homo sapien
cggtacagagttcgagaggctcgct

SEQ ID NO: 4880462 - DNA, 25 bp, Homo sapien
gcggatcttccgtagcagctcaatg

SEQ ID NO: 4880463 - DNA, 25 bp, Homo sapien
tctcgggtttcatctctagcagtgc

SEQ ID NO: 4880464 - DNA, 25 bp, Homo sapien
tgagctactgaaggatctccgtcct

SEQ ID NO: 4880465 - DNA, 25 bp, Homo sapien
cttaggccaaaacgagaaggcaaat

SEQ ID NO: 4880466 - DNA, 25 bp, Homo sapien
tccatgtagaatccatctcgggttt

SEQ ID NO: 4880467 - DNA, 25 bp, Homo sapien
tgggatgaggccttggaaatcaaac

SEQ ID NO: 4880468 - DNA, 25 bp, Homo sapien
ctttgacaactgaggagacgtagtg

SEQ ID NO: 4880469 - DNA, 25 bp, Homo sapien
aacatctggcgcctatttactggcc

SEQ ID NO: 4880470 - DNA, 25 bp, Homo sapien
gcttggccgaccatggagagctcag

SEQ ID NO: 4880471 - DNA, 25 bp, Homo sapien
catgggaggctctccatccactagg

SEQ ID NO: 4880472 - DNA, 25 bp, Homo sapien
gacgtccgtttgtggctcatgaaaa

SEQ ID NO: 4880473 - DNA, 25 bp, Homo sapien
actagggagccattaaggagatgcc

SEQ ID NO: 4880474 - DNA, 25 bp, Homo sapien
cagacactggtgttgagacattagg

SEQ ID NO: 4880475 - DNA, 25 bp, Homo sapien
gagcaatcaacacatcagaacttgg

SEQ ID NO: 4880476 - DNA, 25 bp, Homo sapien
gctggctttcatacaatgctgctga

SEQ ID NO: 4880477 - DNA, 25 bp, Homo sapien
tatttctttagtggaggaagctggc

SEQ ID NO: 4880478 - DNA, 25 bp, Homo sapien
gctgtcaacacgtgcaatcgccatg

SEQ ID NO: 4880479 - DNA, 25 bp, Homo sapien
tctcacacgaagagagagcctctga

SEQ ID NO: 4880480 - DNA, 25 bp, Homo sapien
tgcagaaagttcacaatggtatgaa

SEQ ID NO: 4880481 - DNA, 25 bp, Homo sapien
tctgacaatgtcctatttcaagaaa

SEQ ID NO: 4880482 - DNA, 25 bp, Homo sapien
agcctctgacaatgtcctatttcaa

SEQ ID NO: 4880483 - DNA, 25 bp, Homo sapien
tcccatcttcaagattgataacagg

SEQ ID NO: 4880484 - DNA, 25 bp, Homo sapien
cagcctagtcccatcttcaagattg

SEQ ID NO: 4880485 - DNA, 25 bp, Homo sapien
tcttcaagattgataacagggatcc

SEQ ID NO: 4880486 - DNA, 25 bp, Homo sapien
gttggtggggtctctatatcttctt

SEQ ID NO: 4880487 - DNA, 25 bp, Homo sapien
agtagggtgcagcttcagccattca

SEQ ID NO: 4880488 - DNA, 25 bp, Homo sapien
gtgtaagtagggtgcagcttcagcc

SEQ ID NO: 4880489 - DNA, 25 bp, Homo sapien
acagtgtaagtagggtgcagcttca

SEQ ID NO: 4880490 - DNA, 25 bp, Homo sapien
tcaacagtgtaagtagggtgcagct

SEQ ID NO: 4880491 - DNA, 25 bp, Homo sapien
cagctgtcagggatttctatgttgt

SEQ ID NO: 4880492 - DNA, 25 bp, Homo sapien
gcataacgcgcatcttcaaataact

SEQ ID NO: 4880493 - DNA, 25 bp, Homo sapien
gacctgaagctagtatctgtaatga

SEQ ID NO: 4880494 - DNA, 25 bp, Homo sapien
aagtggaccggcctgcaagattcct

SEQ ID NO: 4880495 - DNA, 25 bp, Homo sapien
tgggctgcactaactggtcaaatct

SEQ ID NO: 4880496 - DNA, 25 bp, Homo sapien
tagcaaacagttcgtgtgacaaacc

SEQ ID NO: 4880497 - DNA, 25 bp, Homo sapien
gcaagaactctaggctgaacccaac

SEQ ID NO: 4880498 - DNA, 25 bp, Homo sapien
caatgaacacagagatgatacccca

SEQ ID NO: 4880499 - DNA, 25 bp, Homo sapien
tctcctgtcaaagtgtttatatcca

SEQ ID NO: 4880500 - DNA, 25 bp, Homo sapien
caatttattagggtttcgacatcta

SEQ ID NO: 4880501 - DNA, 25 bp, Homo sapien
gtttattgacaacaggcaccctttc

SEQ ID NO: 4880502 - DNA, 25 bp, Homo sapien
gacatctatgtcgtttctgtttcgg

SEQ ID NO: 4880503 - DNA, 25 bp, Homo sapien
agactgcttaactatatcagtccag

SEQ ID NO: 4880504 - DNA, 25 bp, Homo sapien
tcagtccagtctggagcaactgcaa

SEQ ID NO: 4880505 - DNA, 25 bp, Homo sapien
agccacctgggtagatccttcattg

SEQ ID NO: 4880506 - DNA, 25 bp, Homo sapien
tccttcattggaggcgccatagctc

SEQ ID NO: 4880507 - DNA, 25 bp, Homo sapien
cttgatagaaatgcagtttgtactt

SEQ ID NO: 4880508 - DNA, 25 bp, Homo sapien
tgatagaaatgcagtttgtacttac

SEQ ID NO: 4880509 - DNA, 25 bp, Homo sapien
tcttgatagaaatgcagtttgtact

SEQ ID NO: 4880510 - DNA, 25 bp, Homo sapien
tttcttgatagaaatgcagtttgta

SEQ ID NO: 4880511 - DNA, 25 bp, Homo sapien
ttgatctcaatgtgagcctctgtgg

SEQ ID NO: 4880512 - DNA, 25 bp, Homo sapien
ggaggcaaacagtggctataaaggc

SEQ ID NO: 4880513 - DNA, 25 bp, Homo sapien
cagtggctataaaggctgtcgaaga

SEQ ID NO: 4880514 - DNA, 25 bp, Homo sapien
ggctgtcgaagacaacttgatctca

SEQ ID NO: 4880515 - DNA, 25 bp, Homo sapien
gcggtcaaacatcgactcaggaaca

SEQ ID NO: 4880516 - DNA, 25 bp, Homo sapien
caaacatcgactcaggaacaaaacc

SEQ ID NO: 4880517 - DNA, 25 bp, Homo sapien
tgagaaggcggtcaaacatcgactc

SEQ ID NO: 4880518 - DNA, 25 bp, Homo sapien
caggcccagtgagaaggcggtcaaa

SEQ ID NO: 4880519 - DNA, 25 bp, Homo sapien
tctggcgatctcacttttgggcctt

SEQ ID NO: 4880520 - DNA, 25 bp, Homo sapien
tggcgatctcacttttgggccttct

SEQ ID NO: 4880521 - DNA, 25 bp, Homo sapien
tgctctggcgatctcacttttgggc

SEQ ID NO: 4880522 - DNA, 25 bp, Homo sapien
ggctgctctggcgatctcacttttg

SEQ ID NO: 4880523 - DNA, 25 bp, Homo sapien
cagatccattcgcagagtcagcagc

SEQ ID NO: 4880524 - DNA, 25 bp, Homo sapien
ctagcgggtttgagggcaatccagc

SEQ ID NO: 4880525 - DNA, 25 bp, Homo sapien
tgtttccagtagcagctgacagagg

SEQ ID NO: 4880526 - DNA, 25 bp, Homo sapien
gttgatccctgacgtggaggccaca

SEQ ID NO: 4880527 - DNA, 25 bp, Homo sapien
taccagtgcattacaagaccacgag

SEQ ID NO: 4880528 - DNA, 25 bp, Homo sapien
gccttattattgctgcgcctcggga

SEQ ID NO: 4880529 - DNA, 25 bp, Homo sapien
gacagaggcgttcacactagcgtgg

SEQ ID NO: 4880530 - DNA, 25 bp, Homo sapien
ggaactgtagttctgtctggcaaga

SEQ ID NO: 4880531 - DNA, 25 bp, Homo sapien
tgcatctattgcgaatacaaaaaaa

SEQ ID NO: 4880532 - DNA, 25 bp, Homo sapien
aaatagagtgaacaccagtttccct

SEQ ID NO: 4880533 - DNA, 25 bp, Homo sapien
cagtttccctatatactacattcta

SEQ ID NO: 4880534 - DNA, 25 bp, Homo sapien
caccagtttccctatatactacatt

SEQ ID NO: 4880535 - DNA, 25 bp, Homo sapien
cccttttgagggagtaataggagct

SEQ ID NO: 4880536 - DNA, 25 bp, Homo sapien
taagtattctcggtctcagatgccc

SEQ ID NO: 4880537 - DNA, 25 bp, Homo sapien
tagatattgtgcctgttaaagcctc

SEQ ID NO: 4880538 - DNA, 25 bp, Homo sapien
ggtttctggcatcgagcgctggtct

SEQ ID NO: 4880539 - DNA, 25 bp, Homo sapien
tgtggaggaaggcaacacacacgaa

SEQ ID NO: 4880540 - DNA, 25 bp, Homo sapien
caatcacaggatctgtaaggtggag

SEQ ID NO: 4880541 - DNA, 25 bp, Homo sapien
gaactgaatctcacagtctgggagg

SEQ ID NO: 4880542 - DNA, 25 bp, Homo sapien
tctgggaggaatttagaccacctgt

SEQ ID NO: 4880543 - DNA, 25 bp, Homo sapien
gggacagcacgcacaatagttgaca

SEQ ID NO: 4880544 - DNA, 25 bp, Homo sapien
tgagtagcaacaagagcatggtcct

SEQ ID NO: 4880545 - DNA, 25 bp, Homo sapien
ggacctcgaggtagatcagattgcc

SEQ ID NO: 4880546 - DNA, 25 bp, Homo sapien
ggccctgggcttcacgactgaacag

SEQ ID NO: 4880547 - DNA, 25 bp, Homo sapien
tcaaggtcgcacatctggaaaggag

SEQ ID NO: 4880548 - DNA, 25 bp, Homo sapien
tgagaccctcactatgcaaatggag

SEQ ID NO: 4880549 - DNA, 25 bp, Homo sapien
caaatggagcaaccccagggaactg

SEQ ID NO: 4880550 - DNA, 25 bp, Homo sapien
tattaggtgcggttcagggctcagt

SEQ ID NO: 4880551 - DNA, 25 bp, Homo sapien
cacactggcgtgatatgcattttca

SEQ ID NO: 4880552 - DNA, 25 bp, Homo sapien
cttaaagcataaatgagacgtcatc

SEQ ID NO: 4880553 - DNA, 25 bp, Homo sapien
tgtatatacatgagcaccagtgtgt

SEQ ID NO: 4880554 - DNA, 25 bp, Homo sapien
gggagtggagctttcaaatcttgag

SEQ ID NO: 4880555 - DNA, 25 bp, Homo sapien
tgttcctagacttcatggaataggc

SEQ ID NO: 4880556 - DNA, 25 bp, Homo sapien
tcataaggatgtgcagaaccagggc

SEQ ID NO: 4880557 - DNA, 25 bp, Homo sapien
gacttcatggaataggcgaatgcta

SEQ ID NO: 4880558 - DNA, 25 bp, Homo sapien
agttcatgaagcggttgttaaacgg

SEQ ID NO: 4880559 - DNA, 25 bp, Homo sapien
aagtcaaggttaaacgctgcggcgg

SEQ ID NO: 4880560 - DNA, 25 bp, Homo sapien
ctcaggacgcccatctggacaggct

SEQ ID NO: 4880561 - DNA, 25 bp, Homo sapien
agggagaagtcaaggttaaacgctg

SEQ ID NO: 4880562 - DNA, 25 bp, Homo sapien
ttcctcccgtgccagaagcgaggag

SEQ ID NO: 4880563 - DNA, 25 bp, Homo sapien
ctgtgttcaaccattctcttaacca

SEQ ID NO: 4880564 - DNA, 25 bp, Homo sapien
aaatattgccccatcctgagatgtg

SEQ ID NO: 4880565 - DNA, 25 bp, Homo sapien
caaatattgccccatcctgagatgt

SEQ ID NO: 4880566 - DNA, 25 bp, Homo sapien
ggttctcaccaaatattgccccatc

SEQ ID NO: 4880567 - DNA, 25 bp, Homo sapien
aatatggttctcaccaaatattgcc

SEQ ID NO: 4880568 - DNA, 25 bp, Homo sapien
aaaccggtgtggtggatgtgtgagt

SEQ ID NO: 4880569 - DNA, 25 bp, Homo sapien
cttccagcgtgcgactaaaccggtg

SEQ ID NO: 4880570 - DNA, 25 bp, Homo sapien
ccaccgtggaagagccaaggtccct

SEQ ID NO: 4880571 - DNA, 25 bp, Homo sapien
catttttgacagcttatatcttctc

SEQ ID NO: 4880572 - DNA, 25 bp, Homo sapien
gataaactttcgacggcaagatggg

SEQ ID NO: 4880573 - DNA, 25 bp, Homo sapien
tgtgtatccgccagacagctgtggg

SEQ ID NO: 4880574 - DNA, 25 bp, Homo sapien
catttgattgtggtgctgggcgaca

SEQ ID NO: 4880575 - DNA, 25 bp, Homo sapien
tgcacacccgggaaatgggataaac

SEQ ID NO: 4880576 - DNA, 25 bp, Homo sapien
caaacgagagtgaatatagagccac

SEQ ID NO: 4880577 - DNA, 25 bp, Homo sapien
tgaatatagagccacggtgggtctc

SEQ ID NO: 4880578 - DNA, 25 bp, Homo sapien
ggtctcccgcagaaccccagtttca

SEQ ID NO: 4880579 - DNA, 25 bp, Homo sapien
ctggcagttttcaaacgagagtgaa

SEQ ID NO: 4880580 - DNA, 25 bp, Homo sapien
tcatcttttccgttctccctttcag

SEQ ID NO: 4880581 - DNA, 25 bp, Homo sapien
agctggaggtcgagtcacagggcgg

SEQ ID NO: 4880582 - DNA, 25 bp, Homo sapien
tccccgctgtttcgggtcctggatg

SEQ ID NO: 4880583 - DNA, 25 bp, Homo sapien
gatatgggtcccctcatcttttccg

SEQ ID NO: 4880584 - DNA, 25 bp, Homo sapien
gatttctggtctactaaacaaccag

SEQ ID NO: 4880585 - DNA, 25 bp, Homo sapien
gcatgaacacccctgaggatttctg

SEQ ID NO: 4880586 - DNA, 25 bp, Homo sapien
gggcatgaacacccctgaggatttc

SEQ ID NO: 4880587 - DNA, 25 bp, Homo sapien
cctgaggatttctggtctactaaac

SEQ ID NO: 4880588 - DNA, 25 bp, Homo sapien
cctgggtatagagagtggcagctgc

SEQ ID NO: 4880589 - DNA, 25 bp, Homo sapien
tttgctttcggattcaaagcaccag

SEQ ID NO: 4880590 - DNA, 25 bp, Homo sapien
agagactcatctgtgtcgtgaccaa

SEQ ID NO: 4880591 - DNA, 25 bp, Homo sapien
cagcagcactaaggtttgctttcgg

SEQ ID NO: 4880592 - DNA, 25 bp, Homo sapien
gatgttaattcccatcagactccga

SEQ ID NO: 4880593 - DNA, 25 bp, Homo sapien
aattcccatcagactccgaacagag

SEQ ID NO: 4880594 - DNA, 25 bp, Homo sapien
gactccgaacagagagtgtggtgct

SEQ ID NO: 4880595 - DNA, 25 bp, Homo sapien
tgcaacctgagatgttaattcccat

SEQ ID NO: 4880596 - DNA, 25 bp, Homo sapien
tggatggcccgtttgcagaaggcac

SEQ ID NO: 4880597 - DNA, 25 bp, Homo sapien
ctggatggcccgtttgcagaaggca

SEQ ID NO: 4880598 - DNA, 25 bp, Homo sapien
gcatgaagtgctcccatgacttccc

SEQ ID NO: 4880599 - DNA, 25 bp, Homo sapien
tgcctgctagaaggccttgaccaca

SEQ ID NO: 4880600 - DNA, 25 bp, Homo sapien
ctgacgcagctgactcaaccctggt

SEQ ID NO: 4880601 - DNA, 25 bp, Homo sapien
cacaagccccgtgtggctcccactg

SEQ ID NO: 4880602 - DNA, 25 bp, Homo sapien
caaggccaggcctcggcattgctga

SEQ ID NO: 4880603 - DNA, 25 bp, Homo sapien
gccaggcctcggcattgctgatggc

SEQ ID NO: 4880604 - DNA, 25 bp, Homo sapien
ggcctcggcattgctgatggcagat

SEQ ID NO: 4880605 - DNA, 25 bp, Homo sapien
aaggccaggcctcggcattgctgat

SEQ ID NO: 4880606 - DNA, 25 bp, Homo sapien
caaaacacgatgttgtacaccgtaa

SEQ ID NO: 4880607 - DNA, 25 bp, Homo sapien
ggaggccactgtaggtcagcctgtc

SEQ ID NO: 4880608 - DNA, 25 bp, Homo sapien
tttgaaagaggctaataaacccagc

SEQ ID NO: 4880609 - DNA, 25 bp, Homo sapien
tctggtcatcacttcacaaggtata

SEQ ID NO: 4880610 - DNA, 25 bp, Homo sapien
aattcttgacctctggaggtattta

SEQ ID NO: 4880611 - DNA, 25 bp, Homo sapien
ttagctaaatcagcacctaaaattt

SEQ ID NO: 4880612 - DNA, 25 bp, Homo sapien
tataaatatgtaaggtagctaaatt

SEQ ID NO: 4880613 - DNA, 25 bp, Homo sapien
ctacaggcacccatcgcgacaatgg

SEQ ID NO: 4880614 - DNA, 25 bp, Homo sapien
attttttcaacactccactgctgct

SEQ ID NO: 4880615 - DNA, 25 bp, Homo sapien
tgctaataagaatgtctcaggtgca

SEQ ID NO: 4880616 - DNA, 25 bp, Homo sapien
caagaccgttctggctaacacggtg

SEQ ID NO: 4880617 - DNA, 25 bp, Homo sapien
tcaagaccgttctggctaacacggt

SEQ ID NO: 4880618 - DNA, 25 bp, Homo sapien
ttgacaaactcttgctcggtcacat

SEQ ID NO: 4880619 - DNA, 25 bp, Homo sapien
ctctgaattgacaaactcttgctcg

SEQ ID NO: 4880620 - DNA, 25 bp, Homo sapien
catctggggtctacctctgaattga

SEQ ID NO: 4880621 - DNA, 25 bp, Homo sapien
tgaattgacaaactcttgctcggtc

SEQ ID NO: 4880622 - DNA, 25 bp, Homo sapien
tatattgggatgctgggtcatggca

SEQ ID NO: 4880623 - DNA, 25 bp, Homo sapien
tgggctgcatagctcacccatgctg

SEQ ID NO: 4880624 - DNA, 25 bp, Homo sapien
cacagccgcgctagttagggtacca

SEQ ID NO: 4880625 - DNA, 25 bp, Homo sapien
cagaatgacttcacccatcctgctt

SEQ ID NO: 4880626 - DNA, 25 bp, Homo sapien
tgtgcacaattacgtaacagcagac

SEQ ID NO: 4880627 - DNA, 25 bp, Homo sapien
tggtcattgtgcttccacggatttc

SEQ ID NO: 4880628 - DNA, 25 bp, Homo sapien
tgggagggtagctctaccaggaaaa

SEQ ID NO: 4880629 - DNA, 25 bp, Homo sapien
tctctggttattgttcaggcagaga

SEQ ID NO: 4880630 - DNA, 25 bp, Homo sapien
cagtggcgatcaaggtggagctctc

SEQ ID NO: 4880631 - DNA, 25 bp, Homo sapien
tgaggtcatctattgcccgtggctg

SEQ ID NO: 4880632 - DNA, 25 bp, Homo sapien
tggtgccagttatcccgacagcagg

SEQ ID NO: 4880633 - DNA, 25 bp, Homo sapien
tgaacgagcgtagtgtggagccaac

SEQ ID NO: 4880634 - DNA, 25 bp, Homo sapien
catttaccccttgccagtggtagcc

SEQ ID NO: 4880635 - DNA, 25 bp, Homo sapien
tcatttaccccttgccagtggtagc

SEQ ID NO: 4880636 - DNA, 25 bp, Homo sapien
taccccttgccagtggtagcccatc

SEQ ID NO: 4880637 - DNA, 25 bp, Homo sapien
tttaccccttgccagtggtagccca

SEQ ID NO: 4880638 - DNA, 25 bp, Homo sapien
acccccactccacaacagttcccag

SEQ ID NO: 4880639 - DNA, 25 bp, Homo sapien
tacccccactccacaacagttccca

SEQ ID NO: 4880640 - DNA, 25 bp, Homo sapien
gccatctggcctctccgcactgcag

SEQ ID NO: 4880641 - DNA, 25 bp, Homo sapien
tctccgcactgcagctgcagtccac

SEQ ID NO: 4880642 - DNA, 25 bp, Homo sapien
aagccatctggcctctccgcactgc

SEQ ID NO: 4880643 - DNA, 25 bp, Homo sapien
ccgcactgcagctgcagtccaccat

SEQ ID NO: 4880644 - DNA, 25 bp, Homo sapien
cacttggctggcttcgttcatcacc

SEQ ID NO: 4880645 - DNA, 25 bp, Homo sapien
agcatgcctcgacctgcacttggct

SEQ ID NO: 4880646 - DNA, 25 bp, Homo sapien
tggcacagcttctagggagggtgga

SEQ ID NO: 4880647 - DNA, 25 bp, Homo sapien
gttcatcaccacaggaagccattcc

SEQ ID NO: 4880648 - DNA, 25 bp, Homo sapien
ttcagctttacccaggtcgcttcct

SEQ ID NO: 4880649 - DNA, 25 bp, Homo sapien
aggcctctgctcagttcagctttac

SEQ ID NO: 4880650 - DNA, 25 bp, Homo sapien
agctttacccaggtcgcttcctctt

SEQ ID NO: 4880651 - DNA, 25 bp, Homo sapien
ctttacccaggtcgcttcctcttct

SEQ ID NO: 4880652 - DNA, 25 bp, Homo sapien
cagcaagagtactgctatacagcca

SEQ ID NO: 4880653 - DNA, 25 bp, Homo sapien
agctggtactccaggtgttcacagc

SEQ ID NO: 4880654 - DNA, 25 bp, Homo sapien
gtgttcacagcaagagtactgctat

SEQ ID NO: 4880655 - DNA, 25 bp, Homo sapien
gtactgctatacagccattggacac

SEQ ID NO: 4880656 - DNA, 25 bp, Homo sapien
ggaagaggacagcatatttgcaagt

SEQ ID NO: 4880657 - DNA, 25 bp, Homo sapien
tgcaagtccactcttgggctctgct

SEQ ID NO: 4880658 - DNA, 25 bp, Homo sapien
atttgcaagtccactcttgggctct

SEQ ID NO: 4880659 - DNA, 25 bp, Homo sapien
agggaagaggacagcatatttgcaa

SEQ ID NO: 4880660 - DNA, 25 bp, Homo sapien
atctgtctgccttttaactgtgtac

SEQ ID NO: 4880661 - DNA, 25 bp, Homo sapien
ctatctgtctgccttttaactgtgt

SEQ ID NO: 4880662 - DNA, 25 bp, Homo sapien
tatctgtctgccttttaactgtgta

SEQ ID NO: 4880663 - DNA, 25 bp, Homo sapien
caagagttgtttcctccctttacag

SEQ ID NO: 4880664 - DNA, 25 bp, Homo sapien
ctgtttgtgtcgctgctttgttgct

SEQ ID NO: 4880665 - DNA, 25 bp, Homo sapien
tgtttgtgtcgctgctttgttgctt

SEQ ID NO: 4880666 - DNA, 25 bp, Homo sapien
cacccactgtgtcgtgggtcacctg

SEQ ID NO: 4880667 - DNA, 25 bp, Homo sapien
ttctgccttctaataaagcagtggg

SEQ ID NO: 4880668 - DNA, 25 bp, Homo sapien
ccaggaccgcagcagacagacggta

SEQ ID NO: 4880669 - DNA, 25 bp, Homo sapien
gtgagtggccgctgactgctgaacc

SEQ ID NO: 4880670 - DNA, 25 bp, Homo sapien
tgtgccggtttgtgtccacagtggc

SEQ ID NO: 4880671 - DNA, 25 bp, Homo sapien
tgtgtcctgcacgtccttttctgtg

SEQ ID NO: 4880672 - DNA, 25 bp, Homo sapien
caggtgcccgtgtttataaatgtgc

SEQ ID NO: 4880673 - DNA, 25 bp, Homo sapien
ggcggtgcgcttaacgacgtcctgt

SEQ ID NO: 4880674 - DNA, 25 bp, Homo sapien
gaggacaagtttccctccggcagga

SEQ ID NO: 4880675 - DNA, 25 bp, Homo sapien
tggaccaccgaatggccaggaagga

SEQ ID NO: 4880676 - DNA, 25 bp, Homo sapien
caagatggacggcaagggataataa

SEQ ID NO: 4880677 - DNA, 25 bp, Homo sapien
caagaatcctgagccacgatgagca

SEQ ID NO: 4880678 - DNA, 25 bp, Homo sapien
ggtatttctaacacttctgggtcat

SEQ ID NO: 4880679 - DNA, 25 bp, Homo sapien
gcagatttggtatttctaacacttc

SEQ ID NO: 4880680 - DNA, 25 bp, Homo sapien
gaccaaaaagaccttgggtctcagc

SEQ ID NO: 4880681 - DNA, 25 bp, Homo sapien
ggtcattgtggccattggccttctt

SEQ ID NO: 4880682 - DNA, 25 bp, Homo sapien
aactggagcctgaatggcctttctg

SEQ ID NO: 4880683 - DNA, 25 bp, Homo sapien
tctggggatacttttcagctggcct

SEQ ID NO: 4880684 - DNA, 25 bp, Homo sapien
cttctaaaggttgcaaactggagcc

SEQ ID NO: 4880685 - DNA, 25 bp, Homo sapien
ccagtgcatgctcacctgcttctaa

SEQ ID NO: 4880686 - DNA, 25 bp, Homo sapien
aacccagtagcatccagtgtgtgtg

SEQ ID NO: 4880687 - DNA, 25 bp, Homo sapien
cagggaaatcggtcatgtctaaact

SEQ ID NO: 4880688 - DNA, 25 bp, Homo sapien
tcgtaaaaaacccagtagcatccag

SEQ ID NO: 4880689 - DNA, 25 bp, Homo sapien
ccgtgaggatgtgcagggaaatcgg

SEQ ID NO: 4880690 - DNA, 25 bp, Homo sapien
taagtttgggaatgctagctcttgc

SEQ ID NO: 4880691 - DNA, 25 bp, Homo sapien
caacaaggccaggatatttcgaagg

SEQ ID NO: 4880692 - DNA, 25 bp, Homo sapien
gaatgcaggttgatccacactatga

SEQ ID NO: 4880693 - DNA, 25 bp, Homo sapien
cactggatcagcacgttggcaggga

SEQ ID NO: 4880694 - DNA, 25 bp, Homo sapien
tcaagtgcacaagcagaaagctctc

SEQ ID NO: 4880695 - DNA, 25 bp, Homo sapien
tcatgcattcttcgccctattggga

SEQ ID NO: 4880696 - DNA, 25 bp, Homo sapien
tcttaaagggacactgcattgatgg

SEQ ID NO: 4880697 - DNA, 25 bp, Homo sapien
gtgagcctcctcaagatactgtttg

SEQ ID NO: 4880698 - DNA, 25 bp, Homo sapien
taatagaggtctcctgtcgatggcc

SEQ ID NO: 4880699 - DNA, 25 bp, Homo sapien
tactcacataggaggataggcattg

SEQ ID NO: 4880700 - DNA, 25 bp, Homo sapien
ttaaatggaagaggcgcttcacaga

SEQ ID NO: 4880701 - DNA, 25 bp, Homo sapien
tctttatagcttagaggcctggata

SEQ ID NO: 4880702 - DNA, 25 bp, Homo sapien
tgttctcgaatcccatttttgagtt

SEQ ID NO: 4880703 - DNA, 25 bp, Homo sapien
ccttcctgtgacagagcataacttc

SEQ ID NO: 4880704 - DNA, 25 bp, Homo sapien
cataacttcccttaacactccacag

SEQ ID NO: 4880705 - DNA, 25 bp, Homo sapien
ttcctgtgacagagcataacttccc

SEQ ID NO: 4880706 - DNA, 25 bp, Homo sapien
tcccttaacactccacagtttccag

SEQ ID NO: 4880707 - DNA, 25 bp, Homo sapien
ccctggtgactgaagttctctgaca

SEQ ID NO: 4880708 - DNA, 25 bp, Homo sapien
tgtttcctatttgcctccctggtga

SEQ ID NO: 4880709 - DNA, 25 bp, Homo sapien
gcacctggcactcggagatagcgag

SEQ ID NO: 4880710 - DNA, 25 bp, Homo sapien
cactggctgccatgaataatgataa

SEQ ID NO: 4880711 - DNA, 25 bp, Homo sapien
ttctcctcacactgagttcactcca

SEQ ID NO: 4880712 - DNA, 25 bp, Homo sapien
gagcttacaagagcactgtcagtga

SEQ ID NO: 4880713 - DNA, 25 bp, Homo sapien
caggcatggcttctgcgggattctg

SEQ ID NO: 4880714 - DNA, 25 bp, Homo sapien
ctgtcagtgagatgaacttcagctc

SEQ ID NO: 4880715 - DNA, 25 bp, Homo sapien
tagctgcccagagatacggtggctc

SEQ ID NO: 4880716 - DNA, 25 bp, Homo sapien
ccagagatacggtggctctccttcc

SEQ ID NO: 4880717 - DNA, 25 bp, Homo sapien
cgaagctaaggccagatggatgagt

SEQ ID NO: 4880718 - DNA, 25 bp, Homo sapien
gtgccaaaggcgaggaaggaaacca

SEQ ID NO: 4880719 - DNA, 25 bp, Homo sapien
acagggctggcatgagctctttgcg

SEQ ID NO: 4880720 - DNA, 25 bp, Homo sapien
gaggtcaaaatggatgggaaccaag

SEQ ID NO: 4880721 - DNA, 25 bp, Homo sapien
gggaaccaagaaagacacccagtca

SEQ ID NO: 4880722 - DNA, 25 bp, Homo sapien
catgcctttcgtttggcaggctgtg

SEQ ID NO: 4880723 - DNA, 25 bp, Homo sapien
gaccaggaggcaacacagggtcaca

SEQ ID NO: 4880724 - DNA, 25 bp, Homo sapien
ggcaacacagggtcacagcccaggc

SEQ ID NO: 4880725 - DNA, 25 bp, Homo sapien
tgatggttccccaggcagggaccag

SEQ ID NO: 4880726 - DNA, 25 bp, Homo sapien
aggaggcaacacagggtcacagccc

SEQ ID NO: 4880727 - DNA, 25 bp, Homo sapien
cccagattccaggcctgcgtcagag

SEQ ID NO: 4880728 - DNA, 25 bp, Homo sapien
agattccaggcctgcgtcagaggct

SEQ ID NO: 4880729 - DNA, 25 bp, Homo sapien
ttgccccagattccaggcctgcgtc

SEQ ID NO: 4880730 - DNA, 25 bp, Homo sapien
cttgccccagattccaggcctgcgt

SEQ ID NO: 4880731 - DNA, 25 bp, Homo sapien
tctgcctgaatggaaagaaccgttg

SEQ ID NO: 4880732 - DNA, 25 bp, Homo sapien
tcagaccctctgatttctgcctgaa

SEQ ID NO: 4880733 - DNA, 25 bp, Homo sapien
ctgcagttgggtcttcgtggagtct

SEQ ID NO: 4880734 - DNA, 25 bp, Homo sapien
cactagcagaggcaccaccattctg

SEQ ID NO: 4880735 - DNA, 25 bp, Homo sapien
catgctacagcccaaaggtgagtga

SEQ ID NO: 4880736 - DNA, 25 bp, Homo sapien
tactgccaaggtcattccggaatcg

SEQ ID NO: 4880737 - DNA, 25 bp, Homo sapien
aggtcattccggaatcgccagggca

SEQ ID NO: 4880738 - DNA, 25 bp, Homo sapien
caaaggtgagtgatcctactgccaa

SEQ ID NO: 4880739 - DNA, 25 bp, Homo sapien
tttcatttgctgctgactgctacgt

SEQ ID NO: 4880740 - DNA, 25 bp, Homo sapien
tggatcaacccattgctctttcagc

SEQ ID NO: 4880741 - DNA, 25 bp, Homo sapien
tccagataaacttgggggtgcttgc

SEQ ID NO: 4880742 - DNA, 25 bp, Homo sapien
tgctacgtgaaaatagccacctgcc

SEQ ID NO: 4880743 - DNA, 25 bp, Homo sapien
tggccctcaggtacaactcctggaa

SEQ ID NO: 4880744 - DNA, 25 bp, Homo sapien
aactccttgaatggtggaagatgca

SEQ ID NO: 4880745 - DNA, 25 bp, Homo sapien
actggctgctaggtccctggcaagg

SEQ ID NO: 4880746 - DNA, 25 bp, Homo sapien
gtcatattttcccaggcggcccact

SEQ ID NO: 4880747 - DNA, 25 bp, Homo sapien
tagaggctgcattacaaattgttgc

SEQ ID NO: 4880748 - DNA, 25 bp, Homo sapien
tagccatagaggctgcattacaaat

SEQ ID NO: 4880749 - DNA, 25 bp, Homo sapien
tgcattacaaattgttgcactagcc

SEQ ID NO: 4880750 - DNA, 25 bp, Homo sapien
cattacaaattgttgcactagccat

SEQ ID NO: 4880751 - DNA, 25 bp, Homo sapien
aggcgagtccagcagaagagagtcc

SEQ ID NO: 4880752 - DNA, 25 bp, Homo sapien
cacaggcgagtccagcagaagagag

SEQ ID NO: 4880753 - DNA, 25 bp, Homo sapien
caggcgagtccagcagaagagagtc

SEQ ID NO: 4880754 - DNA, 25 bp, Homo sapien
gccacaggcgagtccagcagaagag

SEQ ID NO: 4880755 - DNA, 25 bp, Homo sapien
tcttcttccaccacaaaatagcctg

SEQ ID NO: 4880756 - DNA, 25 bp, Homo sapien
agagactcaaatccaaagccagaca

SEQ ID NO: 4880757 - DNA, 25 bp, Homo sapien
caaaataagagggacttggtgccaa

SEQ ID NO: 4880758 - DNA, 25 bp, Homo sapien
cttggtgccaagatgagagactcaa

SEQ ID NO: 4880759 - DNA, 25 bp, Homo sapien
aactacaaccggcttctggcttcca

SEQ ID NO: 4880760 - DNA, 25 bp, Homo sapien
aggaagacagaactacaaccggctt

SEQ ID NO: 4880761 - DNA, 25 bp, Homo sapien
caaccggcttctggcttccaaggga

SEQ ID NO: 4880762 - DNA, 25 bp, Homo sapien
cacaggaacacacaagtgctgatgg

SEQ ID NO: 4880763 - DNA, 25 bp, Homo sapien
gaactgagagcctacaaagggctcc

SEQ ID NO: 4880764 - DNA, 25 bp, Homo sapien
cacagtctagtagggtagtcaggca

SEQ ID NO: 4880765 - DNA, 25 bp, Homo sapien
gaagacgtggcggaatctgctcaca

SEQ ID NO: 4880766 - DNA, 25 bp, Homo sapien
ggcaaataactatagcatgatagga

SEQ ID NO: 4880767 - DNA, 25 bp, Homo sapien
ggccttctcctaccactttgatatt

SEQ ID NO: 4880768 - DNA, 25 bp, Homo sapien
tggccttctcctaccactttgatat

SEQ ID NO: 4880769 - DNA, 25 bp, Homo sapien
ttgatattctggcactggcttcatg

SEQ ID NO: 4880770 - DNA, 25 bp, Homo sapien
tctggcactggcttcatgctttaaa

SEQ ID NO: 4880771 - DNA, 25 bp, Homo sapien
aactatgggcagctgggttacttcc

SEQ ID NO: 4880772 - DNA, 25 bp, Homo sapien
tggcatggctgctaaccctgaaact

SEQ ID NO: 4880773 - DNA, 25 bp, Homo sapien
gcagatgtattaccaagttcaggtc

SEQ ID NO: 4880774 - DNA, 25 bp, Homo sapien
cctttccaggtgacactgcatggca

SEQ ID NO: 4880775 - DNA, 25 bp, Homo sapien
cttgaagccgtcagagttgagtgtc

SEQ ID NO: 4880776 - DNA, 25 bp, Homo sapien
ttctgtacttgaagccgtcagagtt

SEQ ID NO: 4880777 - DNA, 25 bp, Homo sapien
agaaaccacgaacattaagagtgaa

SEQ ID NO: 4880778 - DNA, 25 bp, Homo sapien
acattaagagtgaacgcagaaaatc

SEQ ID NO: 4880779 - DNA, 25 bp, Homo sapien
tcctaagaaatcaggcatattccag

SEQ ID NO: 4880780 - DNA, 25 bp, Homo sapien
tctgtctagactttgcaagggtgct

SEQ ID NO: 4880781 - DNA, 25 bp, Homo sapien
tcttacatggtttatagacagactg

SEQ ID NO: 4880782 - DNA, 25 bp, Homo sapien
tcttatcagttaatcaattcagctc

SEQ ID NO: 4880783 - DNA, 25 bp, Homo sapien
ccagccaaaggcccgtccttcctca

SEQ ID NO: 4880784 - DNA, 25 bp, Homo sapien
tccagccaaaggcccgtccttcctc

SEQ ID NO: 4880785 - DNA, 25 bp, Homo sapien
cagccaaaggcccgtccttcctcac

SEQ ID NO: 4880786 - DNA, 25 bp, Homo sapien
tggctgataaaaagtccggtccacg

SEQ ID NO: 4880787 - DNA, 25 bp, Homo sapien
ctgataaaaagtccggtccacgatg

SEQ ID NO: 4880788 - DNA, 25 bp, Homo sapien
agtccggtccacgatgaaaataaat

SEQ ID NO: 4880789 - DNA, 25 bp, Homo sapien
tccggtccacgatgaaaataaattc

SEQ ID NO: 4880790 - DNA, 25 bp, Homo sapien
gggaaatgccatcagatgctgacat

SEQ ID NO: 4880791 - DNA, 25 bp, Homo sapien
gccacacagaaggggaaatgccatc

SEQ ID NO: 4880792 - DNA, 25 bp, Homo sapien
agaaggggaaatgccatcagatgct

SEQ ID NO: 4880793 - DNA, 25 bp, Homo sapien
ctgtgccacacagaaggggaaatgc

SEQ ID NO: 4880794 - DNA, 25 bp, Homo sapien
tctctagtaaaacccaacaaatagc

SEQ ID NO: 4880795 - DNA, 25 bp, Homo sapien
ggctgttctctagtaaaacccaaca

SEQ ID NO: 4880796 - DNA, 25 bp, Homo sapien
caggctgttctctagtaaaacccaa

SEQ ID NO: 4880797 - DNA, 25 bp, Homo sapien
gctgttctctagtaaaacccaacaa

SEQ ID NO: 4880798 - DNA, 25 bp, Homo sapien
tgggccctgcatcccgctttttaga

SEQ ID NO: 4880799 - DNA, 25 bp, Homo sapien
gagtcaggcattgtgtcccagcagc

SEQ ID NO: 4880800 - DNA, 25 bp, Homo sapien
tagaacatctgaagcttcatgcgga

SEQ ID NO: 4880801 - DNA, 25 bp, Homo sapien
gggagtcaggcattgtgtcccagca

SEQ ID NO: 4880802 - DNA, 25 bp, Homo sapien
ctggcaattgggccccactgaggca

SEQ ID NO: 4880803 - DNA, 25 bp, Homo sapien
cagatgctcaggcttcgaggcgcac

SEQ ID NO: 4880804 - DNA, 25 bp, Homo sapien
ctttcgtacaccccattgtacttga

SEQ ID NO: 4880805 - DNA, 25 bp, Homo sapien
gggatgcttcctcattgatcacatt

SEQ ID NO: 4880806 - DNA, 25 bp, Homo sapien
tttatatagaagacacccgctttcg

SEQ ID NO: 4880807 - DNA, 25 bp, Homo sapien
agaagtgggatgcttcctcattgat

SEQ ID NO: 4880808 - DNA, 25 bp, Homo sapien
tctttaattagatggtaatggcaac

SEQ ID NO: 4880809 - DNA, 25 bp, Homo sapien
cagcaggatcatcaatttctttaat

SEQ ID NO: 4880810 - DNA, 25 bp, Homo sapien
gatggtaatggcaacatcgagcctg

SEQ ID NO: 4880811 - DNA, 25 bp, Homo sapien
ggaggccttgccctgtcaagttcag

SEQ ID NO: 4880812 - DNA, 25 bp, Homo sapien
ttctccatacacctgccagcaggag

SEQ ID NO: 4880813 - DNA, 25 bp, Homo sapien
agccccaaggtgcaccttctccata

SEQ ID NO: 4880814 - DNA, 25 bp, Homo sapien
gagagaacgcatccatgagaggaga

SEQ ID NO: 4880815 - DNA, 25 bp, Homo sapien
caggagagtcctgtggcttaatcag

SEQ ID NO: 4880816 - DNA, 25 bp, Homo sapien
ggagaagccattgtcgcggacgact

SEQ ID NO: 4880817 - DNA, 25 bp, Homo sapien
cagcaactcgcctcctttgagggca

SEQ ID NO: 4880818 - DNA, 25 bp, Homo sapien
tagcagttctcaaagcttcagtgca

SEQ ID NO: 4880819 - DNA, 25 bp, Homo sapien
cactgcccgcgtgcgttttgaggag

SEQ ID NO: 4880820 - DNA, 25 bp, Homo sapien
tctgtggtgccactgtagggaatgt

SEQ ID NO: 4880821 - DNA, 25 bp, Homo sapien
acagatttcatggagagcaccccca

SEQ ID NO: 4880822 - DNA, 25 bp, Homo sapien
agagggcattgcaggatgccttcca

SEQ ID NO: 4880823 - DNA, 25 bp, Homo sapien
aaatctgtggtgccactgtagggaa

SEQ ID NO: 4880824 - DNA, 25 bp, Homo sapien
ttgtattggtgcaattttgcttgaa

SEQ ID NO: 4880825 - DNA, 25 bp, Homo sapien
caccagtttcaggcctgccaggtgg

SEQ ID NO: 4880826 - DNA, 25 bp, Homo sapien
ggtggcctaagttcatcccttcctc

SEQ ID NO: 4880827 - DNA, 25 bp, Homo sapien
ttttgcttgaaaatgcccccaggac

SEQ ID NO: 4880828 - DNA, 25 bp, Homo sapien
gaggctcagtgtccacattcaataa

SEQ ID NO: 4880829 - DNA, 25 bp, Homo sapien
ccatggctacagagctaattaatcc

SEQ ID NO: 4880830 - DNA, 25 bp, Homo sapien
tatgctatgaataatgaactccaca

SEQ ID NO: 4880831 - DNA, 25 bp, Homo sapien
aattatcacagccatcctctaagga

SEQ ID NO: 4880832 - DNA, 25 bp, Homo sapien
atgcaatggcgccattttgaattac

SEQ ID NO: 4880833 - DNA, 25 bp, Homo sapien
gccaggcccacaacaggctatcttg

SEQ ID NO: 4880834 - DNA, 25 bp, Homo sapien
cgtgagccattatgggccaggccca

SEQ ID NO: 4880835 - DNA, 25 bp, Homo sapien
cacaacaggctatcttgtttacaga

SEQ ID NO: 4880836 - DNA, 25 bp, Homo sapien
tcccttctggttaagcctgtgagag

SEQ ID NO: 4880837 - DNA, 25 bp, Homo sapien
tggtgagcacttccattgagctgga

SEQ ID NO: 4880838 - DNA, 25 bp, Homo sapien
gctgggaccacttacaagacaatca

SEQ ID NO: 4880839 - DNA, 25 bp, Homo sapien
gagagctgctttatcctagtaaccc

SEQ ID NO: 4880840 - DNA, 25 bp, Homo sapien
tggtacaatccacttcagcatcctt

SEQ ID NO: 4880841 - DNA, 25 bp, Homo sapien
tttcctttggtacaatccacttcag

SEQ ID NO: 4880842 - DNA, 25 bp, Homo sapien
caggagggaaggagtacatctcccc

SEQ ID NO: 4880843 - DNA, 25 bp, Homo sapien
tcctttggtacaatccacttcagca

SEQ ID NO: 4880844 - DNA, 25 bp, Homo sapien
tccccgctctccatgcgaggaagag

SEQ ID NO: 4880845 - DNA, 25 bp, Homo sapien
gttgggtgtcctgactccccgctct

SEQ ID NO: 4880846 - DNA, 25 bp, Homo sapien
cctacttccaatgcctcggttgggt

SEQ ID NO: 4880847 - DNA, 25 bp, Homo sapien
tgcgaggaagaggttccttccactc

SEQ ID NO: 4880848 - DNA, 25 bp, Homo sapien
tcattgttctcgtatatactttcca

SEQ ID NO: 4880849 - DNA, 25 bp, Homo sapien
cattgttctcgtatatactttccac

SEQ ID NO: 4880850 - DNA, 25 bp, Homo sapien
gaaggcggacgaagataaacgaatg

SEQ ID NO: 4880851 - DNA, 25 bp, Homo sapien
ccttaagactactggtggtgttgtt

SEQ ID NO: 4880852 - DNA, 25 bp, Homo sapien
ctccgagggcagatcgctttccaga

SEQ ID NO: 4880853 - DNA, 25 bp, Homo sapien
gtgacaatctttgtcagcctttagt

SEQ ID NO: 4880854 - DNA, 25 bp, Homo sapien
gaccgttcttaaagacaactggcgc

SEQ ID NO: 4880855 - DNA, 25 bp, Homo sapien
ttttttctgtggaagcttgctacta

SEQ ID NO: 4880856 - DNA, 25 bp, Homo sapien
tttttctgtggaagcttgctactac

SEQ ID NO: 4880857 - DNA, 25 bp, Homo sapien
tcctcattaaaatcatcatcatcat

SEQ ID NO: 4880858 - DNA, 25 bp, Homo sapien
cttcctcattaaaatcatcatcatc

SEQ ID NO: 4880859 - DNA, 25 bp, Homo sapien
ttcatcatcatcatcttcttcatca

SEQ ID NO: 4880860 - DNA, 25 bp, Homo sapien
cttcatcatcatcatcttcttcatc

SEQ ID NO: 4880861 - DNA, 25 bp, Homo sapien
tgtatagattgcttcactggcactt

SEQ ID NO: 4880862 - DNA, 25 bp, Homo sapien
tgcttcactggcactttttcttcag

SEQ ID NO: 4880863 - DNA, 25 bp, Homo sapien
attgcttcactggcactttttcttc

SEQ ID NO: 4880864 - DNA, 25 bp, Homo sapien
cttgtatagattgcttcactggcac

SEQ ID NO: 4880865 - DNA, 25 bp, Homo sapien
cttttgtgcatttttggctggagta

SEQ ID NO: 4880866 - DNA, 25 bp, Homo sapien
tccattctgatttgacttttgtgca

SEQ ID NO: 4880867 - DNA, 25 bp, Homo sapien
cttggtgttgatggttttgagtctt

SEQ ID NO: 4880868 - DNA, 25 bp, Homo sapien
gtcttttccattctgatttgacttt

SEQ ID NO: 4880869 - DNA, 25 bp, Homo sapien
agcctcttggtcagtcatccggaag

SEQ ID NO: 4880870 - DNA, 25 bp, Homo sapien
gaatagcctcttggtcagtcatccg

SEQ ID NO: 4880871 - DNA, 25 bp, Homo sapien
atccggaagcaattcttcacgtaat

SEQ ID NO: 4880872 - DNA, 25 bp, Homo sapien
cggaagcaattcttcacgtaattga

SEQ ID NO: 4880873 - DNA, 25 bp, Homo sapien
ctactgtgtcctatcataacattcc

SEQ ID NO: 4880874 - DNA, 25 bp, Homo sapien
ttacagaaatgaaataagacggaaa

SEQ ID NO: 4880875 - DNA, 25 bp, Homo sapien
tgagttttatttcacaggtatattt

SEQ ID NO: 4880876 - DNA, 25 bp, Homo sapien
gtctgaccaccgctactactgtgtc

SEQ ID NO: 4880877 - DNA, 25 bp, Homo sapien
catgcaccgctgcaaatccctggag

SEQ ID NO: 4880878 - DNA, 25 bp, Homo sapien
tcacttgagcccatgcacctctgaa

SEQ ID NO: 4880879 - DNA, 25 bp, Homo sapien
ggagcccgtgcatctctgaacttca

SEQ ID NO: 4880880 - DNA, 25 bp, Homo sapien
gaacttcacttaagcccatgcacag

SEQ ID NO: 4880881 - DNA, 25 bp, Homo sapien
ctgcagacaatgaaactgcatatat

SEQ ID NO: 4880882 - DNA, 25 bp, Homo sapien
aattgtggtacgatgttgagctcta

SEQ ID NO: 4880883 - DNA, 25 bp, Homo sapien
aaattgtggtacgatgttgagctct

SEQ ID NO: 4880884 - DNA, 25 bp, Homo sapien
tgtaaaattgtggtacgatgttgag

SEQ ID NO: 4880885 - DNA, 25 bp, Homo sapien
taaaattgtggtacgatgttgagct

SEQ ID NO: 4880886 - DNA, 25 bp, Homo sapien
tctgaaccctgttcagacactacct

SEQ ID NO: 4880887 - DNA, 25 bp, Homo sapien
cctggtggttcccaagtagagcatg

SEQ ID NO: 4880888 - DNA, 25 bp, Homo sapien
ggagttcctccccagacgctgcagc

SEQ ID NO: 4880889 - DNA, 25 bp, Homo sapien
gtttgatccgcactcttccttctga

SEQ ID NO: 4880890 - DNA, 25 bp, Homo sapien
aatctcttaagcaggtgtttccaag

SEQ ID NO: 4880891 - DNA, 25 bp, Homo sapien
gtttccaagcttcacctgtccccga

SEQ ID NO: 4880892 - DNA, 25 bp, Homo sapien
gtgtttccaagcttcacctgtcccc

SEQ ID NO: 4880893 - DNA, 25 bp, Homo sapien
ttaatctcttaagcaggtgtttcca

SEQ ID NO: 4880894 - DNA, 25 bp, Homo sapien
taaccggtgggcttggtcagatcct

SEQ ID NO: 4880895 - DNA, 25 bp, Homo sapien
accggtgggcttggtcagatcctta

SEQ ID NO: 4880896 - DNA, 25 bp, Homo sapien
ctaaccggtgggcttggtcagatcc

SEQ ID NO: 4880897 - DNA, 25 bp, Homo sapien
ccggtgggcttggtcagatccttaa

SEQ ID NO: 4880898 - DNA, 25 bp, Homo sapien
gatccaagaaatggattgaacaagg

SEQ ID NO: 4880899 - DNA, 25 bp, Homo sapien
tccatttacccaaggtcagcttcct

SEQ ID NO: 4880900 - DNA, 25 bp, Homo sapien
gaaaggatccaagaaatggattgaa

SEQ ID NO: 4880901 - DNA, 25 bp, Homo sapien
ccaggggcggtaggagatgggaatc

SEQ ID NO: 4880902 - DNA, 25 bp, Homo sapien
atctcacgtgagtcagaatgacgat

SEQ ID NO: 4880903 - DNA, 25 bp, Homo sapien
tgatattgtcagacagttgccaagg

SEQ ID NO: 4880904 - DNA, 25 bp, Homo sapien
gaatgatattgtcagacagttgcca

SEQ ID NO: 4880905 - DNA, 25 bp, Homo sapien
tattgtcagacagttgccaaggtaa

SEQ ID NO: 4880906 - DNA, 25 bp, Homo sapien
atagaatgatattgtcagacagttg

SEQ ID NO: 4880907 - DNA, 25 bp, Homo sapien
catcaaggatgtacgcttgtctcct

SEQ ID NO: 4880908 - DNA, 25 bp, Homo sapien
atgcatcaaggatgtacgcttgtct

SEQ ID NO: 4880909 - DNA, 25 bp, Homo sapien
gatgtacgcttgtctccttgggctc

SEQ ID NO: 4880910 - DNA, 25 bp, Homo sapien
tgtgtggcaacccaaagcccatgca

SEQ ID NO: 4880911 - DNA, 25 bp, Homo sapien
aacacgttcatctttaattggcact

SEQ ID NO: 4880912 - DNA, 25 bp, Homo sapien
tctagcaggtaggtttcactccgga

SEQ ID NO: 4880913 - DNA, 25 bp, Homo sapien
ctactggaaattaacatctagcagg

SEQ ID NO: 4880914 - DNA, 25 bp, Homo sapien
catgatgtacgagctgaacacgttc

SEQ ID NO: 4880915 - DNA, 25 bp, Homo sapien
gcagaaaaagcattggctacaattc

SEQ ID NO: 4880916 - DNA, 25 bp, Homo sapien
gactaaatgtttgtatacctccaaa

SEQ ID NO: 4880917 - DNA, 25 bp, Homo sapien
tctgataaaggatattgctatagac

SEQ ID NO: 4880918 - DNA, 25 bp, Homo sapien
cacccaatgtgatggtgacagaaag

SEQ ID NO: 4880919 - DNA, 25 bp, Homo sapien
tattccagtagccacaccataggtc

SEQ ID NO: 4880920 - DNA, 25 bp, Homo sapien
ctctggagtagtaagtagtaaggcc

SEQ ID NO: 4880921 - DNA, 25 bp, Homo sapien
cataggtctttagaggcacagagct

SEQ ID NO: 4880922 - DNA, 25 bp, Homo sapien
tagtaaggccagatcatttacctga

SEQ ID NO: 4880923 - DNA, 25 bp, Homo sapien
gaatgtatttctgcaggtgtcctcg

SEQ ID NO: 4880924 - DNA, 25 bp, Homo sapien
agctgtgaatgagagctcgggctcc

SEQ ID NO: 4880925 - DNA, 25 bp, Homo sapien
ggtgggtgagatcccctattctggc

SEQ ID NO: 4880926 - DNA, 25 bp, Homo sapien
cctattctggcaggttcgggctcag

SEQ ID NO: 4880927 - DNA, 25 bp, Homo sapien
tgtgactatagttaccgcgctggtg

SEQ ID NO: 4880928 - DNA, 25 bp, Homo sapien
ccatttgggcaagggatctatcttc

SEQ ID NO: 4880929 - DNA, 25 bp, Homo sapien
cataccgaagtgctgaaacgccgca

SEQ ID NO: 4880930 - DNA, 25 bp, Homo sapien
gccccaggagattgtattaagcaga

SEQ ID NO: 4880931 - DNA, 25 bp, Homo sapien
cctatttagcctatatttaaatctc

SEQ ID NO: 4880932 - DNA, 25 bp, Homo sapien
aatctcagaggctggttggttacat

SEQ ID NO: 4880933 - DNA, 25 bp, Homo sapien
aaggagtcttttttctgatggatga

SEQ ID NO: 4880934 - DNA, 25 bp, Homo sapien
gagtcttttttctgatggatgaatt

SEQ ID NO: 4880935 - DNA, 25 bp, Homo sapien
tgttttactaccaggctgccccgga

SEQ ID NO: 4880936 - DNA, 25 bp, Homo sapien
cagaagcaaaactgaggccattgct

SEQ ID NO: 4880937 - DNA, 25 bp, Homo sapien
gccctatgtggtggtgttcatccaa

SEQ ID NO: 4880938 - DNA, 25 bp, Homo sapien
gaacagacaaatagagggtcttctt

SEQ ID NO: 4880939 - DNA, 25 bp, Homo sapien
ggtcatcttggccaaatctccgttc

SEQ ID NO: 4880940 - DNA, 25 bp, Homo sapien
agtgtttaacttctgatattttgga

SEQ ID NO: 4880941 - DNA, 25 bp, Homo sapien
gagtccagcctgtaaatgggtcatc

SEQ ID NO: 4880942 - DNA, 25 bp, Homo sapien
gccaaatctccgttccaagtgttta

SEQ ID NO: 4880943 - DNA, 25 bp, Homo sapien
tcaggcctggtgatgatcatgtccc

SEQ ID NO: 4880944 - DNA, 25 bp, Homo sapien
gcatccgcttggtgaaacttcctgg

SEQ ID NO: 4880945 - DNA, 25 bp, Homo sapien
cgtaaaaatccaatgtcaggcctgg

SEQ ID NO: 4880946 - DNA, 25 bp, Homo sapien
tagctggcggtactggaaatactga

SEQ ID NO: 4880947 - DNA, 25 bp, Homo sapien
gcctaaaacttccttggtgaacatg

SEQ ID NO: 4880948 - DNA, 25 bp, Homo sapien
tgaagacagcacacctgtggcctaa

SEQ ID NO: 4880949 - DNA, 25 bp, Homo sapien
gtgaatgacccactttgatgaaaag

SEQ ID NO: 4880950 - DNA, 25 bp, Homo sapien
aaccccaaacatgcagtgataatgc

SEQ ID NO: 4880951 - DNA, 25 bp, Homo sapien
ctcatctgtcttagcagatggaagt

SEQ ID NO: 4880952 - DNA, 25 bp, Homo sapien
ctgtcttagcagatggaagttctag

SEQ ID NO: 4880953 - DNA, 25 bp, Homo sapien
cttagcagatggaagttctagaaca

SEQ ID NO: 4880954 - DNA, 25 bp, Homo sapien
catctgtcttagcagatggaagttc

SEQ ID NO: 4880955 - DNA, 25 bp, Homo sapien
caaagctgtgtcagcctttccaggc

SEQ ID NO: 4880956 - DNA, 25 bp, Homo sapien
gaatgaagtcatttccttgcaaagc

SEQ ID NO: 4880957 - DNA, 25 bp, Homo sapien
tcaggcccctggtgagaatgaagtc

SEQ ID NO: 4880958 - DNA, 25 bp, Homo sapien
gcaaagctgtgtcagcctttccagg

SEQ ID NO: 4880959 - DNA, 25 bp, Homo sapien
ctgaggtccttcctcatacttcttc

SEQ ID NO: 4880960 - DNA, 25 bp, Homo sapien
cttcaatccaacctttcggcccttg

SEQ ID NO: 4880961 - DNA, 25 bp, Homo sapien
aggtccttcctcatacttcttcatc

SEQ ID NO: 4880962 - DNA, 25 bp, Homo sapien
ttcatcttcaatccaacctttcggc

SEQ ID NO: 4880963 - DNA, 25 bp, Homo sapien
tcatctcgacttctggtggacccaa

SEQ ID NO: 4880964 - DNA, 25 bp, Homo sapien
cactgcctgagtcccattcgaatac

SEQ ID NO: 4880965 - DNA, 25 bp, Homo sapien
tcgaggactgaataggccctggatg

SEQ ID NO: 4880966 - DNA, 25 bp, Homo sapien
ggacccaacttctaatgcacacgca

SEQ ID NO: 4880967 - DNA, 25 bp, Homo sapien
ggggaaagcaatgaatagcccagaa

SEQ ID NO: 4880968 - DNA, 25 bp, Homo sapien
aaagcaatgaatagcccagaagagc

SEQ ID NO: 4880969 - DNA, 25 bp, Homo sapien
agcaatgaatagcccagaagagctt

SEQ ID NO: 4880970 - DNA, 25 bp, Homo sapien
gaaagcaatgaatagcccagaagag

SEQ ID NO: 4880971 - DNA, 25 bp, Homo sapien
cactgttctgagtgattatctggga

SEQ ID NO: 4880972 - DNA, 25 bp, Homo sapien
ggcacttaatctttcccagtggctg

SEQ ID NO: 4880973 - DNA, 25 bp, Homo sapien
tacaactggagcgaagcatgggcac

SEQ ID NO: 4880974 - DNA, 25 bp, Homo sapien
tctgggaaccatatcgaaagggcgg

SEQ ID NO: 4880975 - DNA, 25 bp, Homo sapien
tgcaggatgattcctctgaggtccc

SEQ ID NO: 4880976 - DNA, 25 bp, Homo sapien
taaagctagacaagacctgcaggat

SEQ ID NO: 4880977 - DNA, 25 bp, Homo sapien
gactgaatgggaggaactgtatacg

SEQ ID NO: 4880978 - DNA, 25 bp, Homo sapien
ccccgctgggtttgaggcctcttct

SEQ ID NO: 4880979 - DNA, 25 bp, Homo sapien
aggctcattaacagcaagttgaatt

SEQ ID NO: 4880980 - DNA, 25 bp, Homo sapien
tctggcttcctaatctacaggaaat

SEQ ID NO: 4880981 - DNA, 25 bp, Homo sapien
tacaggaaattagaaagagaggagt

SEQ ID NO: 4880982 - DNA, 25 bp, Homo sapien
aattcaacaagctcagttttctggc

SEQ ID NO: 4880983 - DNA, 25 bp, Homo sapien
tatctgtgagtatctgggtactgga

SEQ ID NO: 4880984 - DNA, 25 bp, Homo sapien
ggcaggatcacagtcatgtatatca

SEQ ID NO: 4880985 - DNA, 25 bp, Homo sapien
agtcatgtatatcacgatgaccacc

SEQ ID NO: 4880986 - DNA, 25 bp, Homo sapien
gagggaccaaagcagtataaatatg

SEQ ID NO: 4880987 - DNA, 25 bp, Homo sapien
cttgaccaagctgtagctggcccat

SEQ ID NO: 4880988 - DNA, 25 bp, Homo sapien
atgaggtttcttgcacaagtccgtg

SEQ ID NO: 4880989 - DNA, 25 bp, Homo sapien
gaggtttcttgcacaagtccgtgga

SEQ ID NO: 4880990 - DNA, 25 bp, Homo sapien
catgaggtttcttgcacaagtccgt

SEQ ID NO: 4880991 - DNA, 25 bp, Homo sapien
tgaggtttcttgcacaagtccgtgg

SEQ ID NO: 4880992 - DNA, 25 bp, Homo sapien
tgtgtccccttccaactatttcctg

SEQ ID NO: 4880993 - DNA, 25 bp, Homo sapien
cctggacttgcacgagaaccctcat

SEQ ID NO: 4880994 - DNA, 25 bp, Homo sapien
ctggggtcccacactcttatttgga

SEQ ID NO: 4880995 - DNA, 25 bp, Homo sapien
ggtcccacactcttatttggagttc

SEQ ID NO: 4880996 - DNA, 25 bp, Homo sapien
tgtagtcaacgtggaaatctgggtg

SEQ ID NO: 4880997 - DNA, 25 bp, Homo sapien
gtcagttaccgtagtcaagcattca

SEQ ID NO: 4880998 - DNA, 25 bp, Homo sapien
ctaaaaaaggattggtgtagacaga

SEQ ID NO: 4880999 - DNA, 25 bp, Homo sapien
tctgggtgatgcaattgatcatctt

SEQ ID NO: 4881000 - DNA, 25 bp, Homo sapien
atcagcagacttgcttgggactgcc

SEQ ID NO: 4881001 - DNA, 25 bp, Homo sapien
caagatacgtgaaatatcagcagac

SEQ ID NO: 4881002 - DNA, 25 bp, Homo sapien
ttgtggcacaagatacgtgaaatat

SEQ ID NO: 4881003 - DNA, 25 bp, Homo sapien
ggcacaagatacgtgaaatatcagc

SEQ ID NO: 4881004 - DNA, 25 bp, Homo sapien
gatatgtgttctcactcgaccacca

SEQ ID NO: 4881005 - DNA, 25 bp, Homo sapien
tgcccaccatgcaagggactgggat

SEQ ID NO: 4881006 - DNA, 25 bp, Homo sapien
aaattagtccatgcgttgccactgg

SEQ ID NO: 4881007 - DNA, 25 bp, Homo sapien
tttggtggccaagcctactgacctg

SEQ ID NO: 4881008 - DNA, 25 bp, Homo sapien
ctctcacagctgctaaatgcccata

SEQ ID NO: 4881009 - DNA, 25 bp, Homo sapien
tcacagctgctaaatgcccataggt

SEQ ID NO: 4881010 - DNA, 25 bp, Homo sapien
caagctccacttggttcttaattgc

SEQ ID NO: 4881011 - DNA, 25 bp, Homo sapien
tctgggctgggccacttgcatgcct

SEQ ID NO: 4881012 - DNA, 25 bp, Homo sapien
tgtcagtgccccataagggacatgg

SEQ ID NO: 4881013 - DNA, 25 bp, Homo sapien
tcagtgccccataagggacatgggt

SEQ ID NO: 4881014 - DNA, 25 bp, Homo sapien
ctgtcagtgccccataagggacatg

SEQ ID NO: 4881015 - DNA, 25 bp, Homo sapien
agtaattggttctgtcagtgcccca

SEQ ID NO: 4881016 - DNA, 25 bp, Homo sapien
tgagatataggccaaacatttcaat

SEQ ID NO: 4881017 - DNA, 25 bp, Homo sapien
tgatgagatataggccaaacatttc

SEQ ID NO: 4881018 - DNA, 25 bp, Homo sapien
gctgatgagatataggccaaacatt

SEQ ID NO: 4881019 - DNA, 25 bp, Homo sapien
gcttgctgatgagatataggccaaa

SEQ ID NO: 4881020 - DNA, 25 bp, Homo sapien
tgcctgagggttactctcctgcata

SEQ ID NO: 4881021 - DNA, 25 bp, Homo sapien
cttgcctgagggttactctcctgca

SEQ ID NO: 4881022 - DNA, 25 bp, Homo sapien
gcctgagggttactctcctgcatac

SEQ ID NO: 4881023 - DNA, 25 bp, Homo sapien
gcttgcctgagggttactctcctgc

SEQ ID NO: 4881024 - DNA, 25 bp, Homo sapien
catgtgaaacaggattcattttgtt

SEQ ID NO: 4881025 - DNA, 25 bp, Homo sapien
aacaggattcattttgttgtggtgg

SEQ ID NO: 4881026 - DNA, 25 bp, Homo sapien
caacatgtgaaacaggattcatttt

SEQ ID NO: 4881027 - DNA, 25 bp, Homo sapien
aaacaggattcattttgttgtggtg

SEQ ID NO: 4881028 - DNA, 25 bp, Homo sapien
tggattccgtatgccaatggctgtg

SEQ ID NO: 4881029 - DNA, 25 bp, Homo sapien
gcacaagcacggagagaacagctgc

SEQ ID NO: 4881030 - DNA, 25 bp, Homo sapien
catgtttttcgccaaaggttaactg

SEQ ID NO: 4881031 - DNA, 25 bp, Homo sapien
ccagcacaagcacggagagaacagc

SEQ ID NO: 4881032 - DNA, 25 bp, Homo sapien
tggataagacatactgattgggcag

SEQ ID NO: 4881033 - DNA, 25 bp, Homo sapien
aatcgactaagcctgagcagataga

SEQ ID NO: 4881034 - DNA, 25 bp, Homo sapien
tactgattgggcagttcagagagat

SEQ ID NO: 4881035 - DNA, 25 bp, Homo sapien
tcagagagatagaataaaatcgact

SEQ ID NO: 4881036 - DNA, 25 bp, Homo sapien
cagggccatgccgatagcaggtgct

SEQ ID NO: 4881037 - DNA, 25 bp, Homo sapien
agaggctgggatgtgtgttatccct

SEQ ID NO: 4881038 - DNA, 25 bp, Homo sapien
tgtgtgttatccctgttcagtgcag

SEQ ID NO: 4881039 - DNA, 25 bp, Homo sapien
gtgctaggtaatcccaaagagctcc

SEQ ID NO: 4881040 - DNA, 25 bp, Homo sapien
caaaataatacgtgtgaaggagcct

SEQ ID NO: 4881041 - DNA, 25 bp, Homo sapien
gatgtattttgacctctagactggg

SEQ ID NO: 4881042 - DNA, 25 bp, Homo sapien
taatgatgtctaagccaaggtggag

SEQ ID NO: 4881043 - DNA, 25 bp, Homo sapien
tacacttgtagggttatcgctagca

SEQ ID NO: 4881044 - DNA, 25 bp, Homo sapien
aaaaattagcctgacgtggcgtcgg

SEQ ID NO: 4881045 - DNA, 25 bp, Homo sapien
aaaattagcctgacgtggcgtcggg

SEQ ID NO: 4881046 - DNA, 25 bp, Homo sapien
ttagcctgacgtggcgtcgggcacc

SEQ ID NO: 4881047 - DNA, 25 bp, Homo sapien
aattagcctgacgtggcgtcgggca

SEQ ID NO: 4881048 - DNA, 25 bp, Homo sapien
ttccttgtatgaatttcctcgttgt

SEQ ID NO: 4881049 - DNA, 25 bp, Homo sapien
tggcttccttgtatgaatttcctcg

SEQ ID NO: 4881050 - DNA, 25 bp, Homo sapien
gcttccttgtatgaatttcctcgtt

SEQ ID NO: 4881051 - DNA, 25 bp, Homo sapien
ttggcttccttgtatgaatttcctc

SEQ ID NO: 4881052 - DNA, 25 bp, Homo sapien
taaataataaaaggggagaggatca

SEQ ID NO: 4881053 - DNA, 25 bp, Homo sapien
tgaggttgaaggaggaagaattaaa

SEQ ID NO: 4881054 - DNA, 25 bp, Homo sapien
tgaaggaggaagaattaaataataa

SEQ ID NO: 4881055 - DNA, 25 bp, Homo sapien
agcactgaggttgaaggaggaagaa

SEQ ID NO: 4881056 - DNA, 25 bp, Homo sapien
ccggatcttcgattaggacttccaa

SEQ ID NO: 4881057 - DNA, 25 bp, Homo sapien
gaaaaattactccagtctataatta

SEQ ID NO: 4881058 - DNA, 25 bp, Homo sapien
tttatctgaagctccggatcttcga

SEQ ID NO: 4881059 - DNA, 25 bp, Homo sapien
tgcaacccttcaatggccagtttaa

SEQ ID NO: 4881060 - DNA, 25 bp, Homo sapien
cacatggtcttgtattgcgcattca

SEQ ID NO: 4881061 - DNA, 25 bp, Homo sapien
aactctggctgaggcaaaaacatgg

SEQ ID NO: 4881062 - DNA, 25 bp, Homo sapien
gccacccctgtatatgacatgatca

SEQ ID NO: 4881063 - DNA, 25 bp, Homo sapien
ggattaagccgaacatcttggagct

SEQ ID NO: 4881064 - DNA, 25 bp, Homo sapien
catgcttatcagaggcccactaggt

SEQ ID NO: 4881065 - DNA, 25 bp, Homo sapien
taagcgcaagctcggtagcacgtga

SEQ ID NO: 4881066 - DNA, 25 bp, Homo sapien
taatgtgtcaccagaaagctaagca

SEQ ID NO: 4881067 - DNA, 25 bp, Homo sapien
tggcatccctggaacaatgtggact

SEQ ID NO: 4881068 - DNA, 25 bp, Homo sapien
ccgatctccccattgtcccgatctc

SEQ ID NO: 4881069 - DNA, 25 bp, Homo sapien
ccagttccttagtttctgtcctgat

SEQ ID NO: 4881070 - DNA, 25 bp, Homo sapien
ccccagttccttagtttctgtcctg

SEQ ID NO: 4881071 - DNA, 25 bp, Homo sapien
ctgtcccgatctccccattgtcccg

SEQ ID NO: 4881072 - DNA, 25 bp, Homo sapien
ttcttagcagagttatcttcctttc

SEQ ID NO: 4881073 - DNA, 25 bp, Homo sapien
ctgtggtttgtggacacatttctta

SEQ ID NO: 4881074 - DNA, 25 bp, Homo sapien
ttctctaccccacttcaacccagag

SEQ ID NO: 4881075 - DNA, 25 bp, Homo sapien
aacccagagctctctagatgacacc

SEQ ID NO: 4881076 - DNA, 25 bp, Homo sapien
caatctcccccagctatttgaagac

SEQ ID NO: 4881077 - DNA, 25 bp, Homo sapien
tgaagacccttaatatattcttctc

SEQ ID NO: 4881078 - DNA, 25 bp, Homo sapien
cccaacggaaagtatgatggaatac

SEQ ID NO: 4881079 - DNA, 25 bp, Homo sapien
tctcgtgaaaatcttgcccaacgga

SEQ ID NO: 4881080 - DNA, 25 bp, Homo sapien
tctcctgctccacttaatgaaaggg

SEQ ID NO: 4881081 - DNA, 25 bp, Homo sapien
aagtgatggtttgttgctctcctgc

SEQ ID NO: 4881082 - DNA, 25 bp, Homo sapien
cagactaataggttaccatcactgc

SEQ ID NO: 4881083 - DNA, 25 bp, Homo sapien
gaaagtattttaagtgccagactaa

SEQ ID NO: 4881084 - DNA, 25 bp, Homo sapien
gatttaatactgcttccatgtaaaa

SEQ ID NO: 4881085 - DNA, 25 bp, Homo sapien
aattgtttgatttaatactgcttcc

SEQ ID NO: 4881086 - DNA, 25 bp, Homo sapien
aaaatataagaactcctaaatacag

SEQ ID NO: 4881087 - DNA, 25 bp, Homo sapien
ttcttcacttataaacagtggttta

SEQ ID NO: 4881088 - DNA, 25 bp, Homo sapien
gactgagaggatcagtgagggtttg

SEQ ID NO: 4881089 - DNA, 25 bp, Homo sapien
ctgactgagaggatcagtgagggtt

SEQ ID NO: 4881090 - DNA, 25 bp, Homo sapien
tgagaggatcagtgagggtttgtgc

SEQ ID NO: 4881091 - DNA, 25 bp, Homo sapien
ctgagaggatcagtgagggtttgtg

SEQ ID NO: 4881092 - DNA, 25 bp, Homo sapien
ctctttctgctccattgtcctccat

SEQ ID NO: 4881093 - DNA, 25 bp, Homo sapien
gccgtcatcttcatgtcctgaaaga

SEQ ID NO: 4881094 - DNA, 25 bp, Homo sapien
ttgccgtcatcttcatgtcctgaaa

SEQ ID NO: 4881095 - DNA, 25 bp, Homo sapien
cagcttgccgtcatcttcatgtcct

SEQ ID NO: 4881096 - DNA, 25 bp, Homo sapien
gcttgccgtcatcttcatgtcctga

SEQ ID NO: 4881097 - DNA, 25 bp, Homo sapien
aatgacatccatttcccacatagaa

SEQ ID NO: 4881098 - DNA, 25 bp, Homo sapien
caatgacatccatttcccacataga

SEQ ID NO: 4881099 - DNA, 25 bp, Homo sapien
atgacatccatttcccacatagaag

SEQ ID NO: 4881100 - DNA, 25 bp, Homo sapien
ttcccacatagaagaagacaggtta

SEQ ID NO: 4881101 - DNA, 25 bp, Homo sapien
tcattattggttgcctcttgcctga

SEQ ID NO: 4881102 - DNA, 25 bp, Homo sapien
tcaacacatcattattggttgcctc

SEQ ID NO: 4881103 - DNA, 25 bp, Homo sapien
cctcttgcctgatcacatccgccaa

SEQ ID NO: 4881104 - DNA, 25 bp, Homo sapien
cacatcattattggttgcctcttgc

SEQ ID NO: 4881105 - DNA, 25 bp, Homo sapien
ctgtgtaggaagtagttgcaaaagg

SEQ ID NO: 4881106 - DNA, 25 bp, Homo sapien
tccaccggcttaatcatgacagtaa

SEQ ID NO: 4881107 - DNA, 25 bp, Homo sapien
ggcttaatcatgacagtaactgaac

SEQ ID NO: 4881108 - DNA, 25 bp, Homo sapien
ctggctgtgtaggaagtagttgcaa

SEQ ID NO: 4881109 - DNA, 25 bp, Homo sapien
cagggctggttgacaaagtggactc

SEQ ID NO: 4881110 - DNA, 25 bp, Homo sapien
tctttaagaaatggcttgatgagtg

SEQ ID NO: 4881111 - DNA, 25 bp, Homo sapien
catgaatgtaccagggctggttgac

SEQ ID NO: 4881112 - DNA, 25 bp, Homo sapien
gactcctccaaagcgggcaggaaag

SEQ ID NO: 4881113 - DNA, 25 bp, Homo sapien
caggaatttacatgatgcatttgtt

SEQ ID NO: 4881114 - DNA, 25 bp, Homo sapien
tacatgatgcatttgttttcattac

SEQ ID NO: 4881115 - DNA, 25 bp, Homo sapien
gaatttacatgatgcatttgttttc

SEQ ID NO: 4881116 - DNA, 25 bp, Homo sapien
aatttacatgatgcatttgttttca

SEQ ID NO: 4881117 - DNA, 25 bp, Homo sapien
ggacgtatgcttcacgtgcattgca

SEQ ID NO: 4881118 - DNA, 25 bp, Homo sapien
tcatcgctgtagtcgggaccgagta

SEQ ID NO: 4881119 - DNA, 25 bp, Homo sapien
tctctccagattcgaggacgtatgc

SEQ ID NO: 4881120 - DNA, 25 bp, Homo sapien
catcagcttgggtgagcattctctc

SEQ ID NO: 4881121 - DNA, 25 bp, Homo sapien
ttaattaataattcacaataggtcc

SEQ ID NO: 4881122 - DNA, 25 bp, Homo sapien
ttaataattcacaataggtccaaat

SEQ ID NO: 4881123 - DNA, 25 bp, Homo sapien
taattcacaataggtccaaataaaa

SEQ ID NO: 4881124 - DNA, 25 bp, Homo sapien
tgacctctgactggggggggggctc

SEQ ID NO: 4881125 - DNA, 25 bp, Homo sapien
gggtcagccaaaccttccacatgga

SEQ ID NO: 4881126 - DNA, 25 bp, Homo sapien
gcttctcctgctagctagtcttgaa

SEQ ID NO: 4881127 - DNA, 25 bp, Homo sapien
taatgaaatgcaatactcctccaaa

SEQ ID NO: 4881128 - DNA, 25 bp, Homo sapien
tgaattttggctcccgtatgtaatg

SEQ ID NO: 4881129 - DNA, 25 bp, Homo sapien
gaaatctccggacaagcgttcaagg

SEQ ID NO: 4881130 - DNA, 25 bp, Homo sapien
aggagatatacgccaacagcagggc

SEQ ID NO: 4881131 - DNA, 25 bp, Homo sapien
caaggaagtcatcacaaagggcagc

SEQ ID NO: 4881132 - DNA, 25 bp, Homo sapien
agtgggcaggacatccttgtggcca

SEQ ID NO: 4881133 - DNA, 25 bp, Homo sapien
tctctagacggtgcaagcggaggct

SEQ ID NO: 4881134 - DNA, 25 bp, Homo sapien
gctttttaacaaggccacaccacag

SEQ ID NO: 4881135 - DNA, 25 bp, Homo sapien
ttcagagggcagacctatgtcatct

SEQ ID NO: 4881136 - DNA, 25 bp, Homo sapien
aacacgctgcccagaaaggtgcctg

SEQ ID NO: 4881137 - DNA, 25 bp, Homo sapien
gattacgaaaagtgattgggtccca

SEQ ID NO: 4881138 - DNA, 25 bp, Homo sapien
ggtcggtgcacaaagcccacttgaa

SEQ ID NO: 4881139 - DNA, 25 bp, Homo sapien
ggcttttactctacgtggataccag

SEQ ID NO: 4881140 - DNA, 25 bp, Homo sapien
taccagaaagcatgggtcgagagtg

SEQ ID NO: 4881141 - DNA, 25 bp, Homo sapien
ggagtggctgggtgttctcattctc

SEQ ID NO: 4881142 - DNA, 25 bp, Homo sapien
tcagggtcccagcttctaccacaga

SEQ ID NO: 4881143 - DNA, 25 bp, Homo sapien
tcccagcttctaccacagactgaga

SEQ ID NO: 4881144 - DNA, 25 bp, Homo sapien
agagccaggagtggctgggtgttct

SEQ ID NO: 4881145 - DNA, 25 bp, Homo sapien
agaacacacgtgtctgcatgggtca

SEQ ID NO: 4881146 - DNA, 25 bp, Homo sapien
catgggtcagttgtgcatgtgcttc

SEQ ID NO: 4881147 - DNA, 25 bp, Homo sapien
tggaggaccttgtgtcaagcagaac

SEQ ID NO: 4881148 - DNA, 25 bp, Homo sapien
ttggctgctcagaccgatggctggt

SEQ ID NO: 4881149 - DNA, 25 bp, Homo sapien
tcaaaaactggagagggtccctgtg

SEQ ID NO: 4881150 - DNA, 25 bp, Homo sapien
tttgctgtagtgacccagttgaggc

SEQ ID NO: 4881151 - DNA, 25 bp, Homo sapien
ggtccctgtgtgatacctcagaaaa

SEQ ID NO: 4881152 - DNA, 25 bp, Homo sapien
catgaatggcacatataggtcacca

SEQ ID NO: 4881153 - DNA, 25 bp, Homo sapien
cagggaaaggtctcatcaaggaggt

SEQ ID NO: 4881154 - DNA, 25 bp, Homo sapien
agggcagtctctccctagccagaga

SEQ ID NO: 4881155 - DNA, 25 bp, Homo sapien
tactagcaggagctatccaggcaag

SEQ ID NO: 4881156 - DNA, 25 bp, Homo sapien
gacagcgctttggacaagttgggca

SEQ ID NO: 4881157 - DNA, 25 bp, Homo sapien
cgaaccaggcggagatcctagaagg

SEQ ID NO: 4881158 - DNA, 25 bp, Homo sapien
ggccgaaccaggcggagatcctaga

SEQ ID NO: 4881159 - DNA, 25 bp, Homo sapien
ggcgggccgaaccaggcggagatcc

SEQ ID NO: 4881160 - DNA, 25 bp, Homo sapien
cgggccgaaccaggcggagatccta

SEQ ID NO: 4881161 - DNA, 25 bp, Homo sapien
gatgtgggcaccgggcccactcgtg

SEQ ID NO: 4881162 - DNA, 25 bp, Homo sapien
gctgatgtgggcaccgggcccactc

SEQ ID NO: 4881163 - DNA, 25 bp, Homo sapien
ctcgaggagctgatgtgggcaccgg

SEQ ID NO: 4881164 - DNA, 25 bp, Homo sapien
tgtgggcaccgggcccactcgtgta

SEQ ID NO: 4881165 - DNA, 25 bp, Homo sapien
tggccccactatagccgcctcccag

SEQ ID NO: 4881166 - DNA, 25 bp, Homo sapien
cgctggccccactatagccgcctcc

SEQ ID NO: 4881167 - DNA, 25 bp, Homo sapien
gccgctggccccactatagccgcct

SEQ ID NO: 4881168 - DNA, 25 bp, Homo sapien
gctggccccactatagccgcctccc

SEQ ID NO: 4881169 - DNA, 25 bp, Homo sapien
cctcagcccgtctttggttggcaat

SEQ ID NO: 4881170 - DNA, 25 bp, Homo sapien
gcctcagcccgtctttggttggcaa

SEQ ID NO: 4881171 - DNA, 25 bp, Homo sapien
ctcagtctttgtgcgccacaggtca

SEQ ID NO: 4881172 - DNA, 25 bp, Homo sapien
gtctttgtgcgccacaggtcatccc

SEQ ID NO: 4881173 - DNA, 25 bp, Homo sapien
gatctcagtctttgtgcgccacagg

SEQ ID NO: 4881174 - DNA, 25 bp, Homo sapien
ccgtgcttcccagccagactctgca

SEQ ID NO: 4881175 - DNA, 25 bp, Homo sapien
agcttcccatcacatgtctcgatct

SEQ ID NO: 4881176 - DNA, 25 bp, Homo sapien
agacttcagccggctctctttgccc

SEQ ID NO: 4881177 - DNA, 25 bp, Homo sapien
cctggaggaactggtgcggctgagg

SEQ ID NO: 4881178 - DNA, 25 bp, Homo sapien
ggaggaactggtgcggctgagggag

SEQ ID NO: 4881179 - DNA, 25 bp, Homo sapien
accctgaatagtggcctccttctca

SEQ ID NO: 4881180 - DNA, 25 bp, Homo sapien
ctaccctgaatagtggcctccttct

SEQ ID NO: 4881181 - DNA, 25 bp, Homo sapien
gtgctaccctgaatagtggcctcct

SEQ ID NO: 4881182 - DNA, 25 bp, Homo sapien
tgttcccagtgctaccctgaatagt

SEQ ID NO: 4881183 - DNA, 25 bp, Homo sapien
cacattgtagcagataggtaagggc

SEQ ID NO: 4881184 - DNA, 25 bp, Homo sapien
gcagataggtaagggctgcattgcc

SEQ ID NO: 4881185 - DNA, 25 bp, Homo sapien
tgtagcagataggtaagggctgcat

SEQ ID NO: 4881186 - DNA, 25 bp, Homo sapien
aagaacacattgtagcagataggta

SEQ ID NO: 4881187 - DNA, 25 bp, Homo sapien
tgcaggcactgccagttgtgcacca

SEQ ID NO: 4881188 - DNA, 25 bp, Homo sapien
cactcttgtcacttggggcttctga

SEQ ID NO: 4881189 - DNA, 25 bp, Homo sapien
ccttgccttcgggaggagggctcct

SEQ ID NO: 4881190 - DNA, 25 bp, Homo sapien
tgcaccagcaggactggccctctca

SEQ ID NO: 4881191 - DNA, 25 bp, Homo sapien
aaagcaagtcagtgtctgggatccc

SEQ ID NO: 4881192 - DNA, 25 bp, Homo sapien
tgggatccctgagcaatatctacac

SEQ ID NO: 4881193 - DNA, 25 bp, Homo sapien
gcaagcactctggactctactggct

SEQ ID NO: 4881194 - DNA, 25 bp, Homo sapien
aatttatgtgttatggcaccaaacc

SEQ ID NO: 4881195 - DNA, 25 bp, Homo sapien
tggtccaggatgaaggtagcagggc

SEQ ID NO: 4881196 - DNA, 25 bp, Homo sapien
ctggtccaggatgaaggtagcaggg

SEQ ID NO: 4881197 - DNA, 25 bp, Homo sapien
gtccaggatgaaggtagcagggcat

SEQ ID NO: 4881198 - DNA, 25 bp, Homo sapien
ggtccaggatgaaggtagcagggca

SEQ ID NO: 4881199 - DNA, 25 bp, Homo sapien
ggaatgaagattaggcatctcacag

SEQ ID NO: 4881200 - DNA, 25 bp, Homo sapien
tacggagaaacctagcctcataggg

SEQ ID NO: 4881201 - DNA, 25 bp, Homo sapien
tggaatagcacagaaagccccgtcg

SEQ ID NO: 4881202 - DNA, 25 bp, Homo sapien
gctagccctgccacgtcgttaggag

SEQ ID NO: 4881203 - DNA, 25 bp, Homo sapien
ccagggaagtgtagaggctggaacc

SEQ ID NO: 4881204 - DNA, 25 bp, Homo sapien
gggaagtgtagaggctggaacctct

SEQ ID NO: 4881205 - DNA, 25 bp, Homo sapien
ggaagtgtagaggctggaacctctg

SEQ ID NO: 4881206 - DNA, 25 bp, Homo sapien
cagggaagtgtagaggctggaacct

SEQ ID NO: 4881207 - DNA, 25 bp, Homo sapien
tatcctcggtgcacaggtctgacct

SEQ ID NO: 4881208 - DNA, 25 bp, Homo sapien
tcggtgcacaggtctgacctccagg

SEQ ID NO: 4881209 - DNA, 25 bp, Homo sapien
tgtcgggtatcctcggtgcacaggt

SEQ ID NO: 4881210 - DNA, 25 bp, Homo sapien
ctgcactgtcgggtatcctcggtgc

SEQ ID NO: 4881211 - DNA, 25 bp, Homo sapien
ccattctagtcttagcagcccgtac

SEQ ID NO: 4881212 - DNA, 25 bp, Homo sapien
tcatgctccagacctcccattctag

SEQ ID NO: 4881213 - DNA, 25 bp, Homo sapien
tgcctctcatgctccagacctccca

SEQ ID NO: 4881214 - DNA, 25 bp, Homo sapien
gacctcccattctagtcttagcagc

SEQ ID NO: 4881215 - DNA, 25 bp, Homo sapien
tcttccgatatatttaggacataac

SEQ ID NO: 4881216 - DNA, 25 bp, Homo sapien
tccgatatatttaggacataactat

SEQ ID NO: 4881217 - DNA, 25 bp, Homo sapien
ttcctggatcttccgatatatttag

SEQ ID NO: 4881218 - DNA, 25 bp, Homo sapien
tggatcttccgatatatttaggaca

SEQ ID NO: 4881219 - DNA, 25 bp, Homo sapien
ccttcagccagttaacgtatttcta

SEQ ID NO: 4881220 - DNA, 25 bp, Homo sapien
aagttttgattattccctggacagc

SEQ ID NO: 4881221 - DNA, 25 bp, Homo sapien
ttgtcctgcacctagaagttttgat

SEQ ID NO: 4881222 - DNA, 25 bp, Homo sapien
caagattaaaattaaatagcccctg

SEQ ID NO: 4881223 - DNA, 25 bp, Homo sapien
tgtgccattgtgcaacatcggtgga

SEQ ID NO: 4881224 - DNA, 25 bp, Homo sapien
ggtagctaccacatcattttgaaag

SEQ ID NO: 4881225 - DNA, 25 bp, Homo sapien
gaaaggaccatgagcaactataagc

SEQ ID NO: 4881226 - DNA, 25 bp, Homo sapien
tcctgcatgggtactcgatgtgtaa

SEQ ID NO: 4881227 - DNA, 25 bp, Homo sapien
gaagatttgagttgtatatacctgc

SEQ ID NO: 4881228 - DNA, 25 bp, Homo sapien
gagacagcttttagtcttacctgaa

SEQ ID NO: 4881229 - DNA, 25 bp, Homo sapien
taacactaactgttggactgacttg

SEQ ID NO: 4881230 - DNA, 25 bp, Homo sapien
cagagatcatcattagctgtgaaga

SEQ ID NO: 4881231 - DNA, 25 bp, Homo sapien
ccaggggcttctttcggtagttgat

SEQ ID NO: 4881232 - DNA, 25 bp, Homo sapien
taattctcaagtgctcgaaagaacc

SEQ ID NO: 4881233 - DNA, 25 bp, Homo sapien
tcaagtgctcgaaagaacctgagat

SEQ ID NO: 4881234 - DNA, 25 bp, Homo sapien
ggtagttgattattctgttaccaag

SEQ ID NO: 4881235 - DNA, 25 bp, Homo sapien
tttagtgctttgtgacagtccaggc

SEQ ID NO: 4881236 - DNA, 25 bp, Homo sapien
ggaatcagaattgccttgggatgaa

SEQ ID NO: 4881237 - DNA, 25 bp, Homo sapien
tctgctgagctagaatttgaggagc

SEQ ID NO: 4881238 - DNA, 25 bp, Homo sapien
tctggcaacgcatattttaaacact

SEQ ID NO: 4881239 - DNA, 25 bp, Homo sapien
tgttatcagtgagtccttttgccaa

SEQ ID NO: 4881240 - DNA, 25 bp, Homo sapien
tcagggtctgttcacatgttatcag

SEQ ID NO: 4881241 - DNA, 25 bp, Homo sapien
cacttttccctaatgtgctccctgt

SEQ ID NO: 4881242 - DNA, 25 bp, Homo sapien
tgtaacttacatagccacatccctg

SEQ ID NO: 4881243 - DNA, 25 bp, Homo sapien
tggcaggctataccttctaagtttg

SEQ ID NO: 4881244 - DNA, 25 bp, Homo sapien
catacagtctaggtttgtggcaggc

SEQ ID NO: 4881245 - DNA, 25 bp, Homo sapien
ccagttgaggaatttcgtacagtca

SEQ ID NO: 4881246 - DNA, 25 bp, Homo sapien
ccttggtgccaaatatgtgcccagt

SEQ ID NO: 4881247 - DNA, 25 bp, Homo sapien
gggatatgtgagtgcccacttttaa

SEQ ID NO: 4881248 - DNA, 25 bp, Homo sapien
catcttcaaccctactccttatggg

SEQ ID NO: 4881249 - DNA, 25 bp, Homo sapien
gctgtgattggtgacaccctgggat

SEQ ID NO: 4881250 - DNA, 25 bp, Homo sapien
catctgtctatggaccctcaggaat

SEQ ID NO: 4881251 - DNA, 25 bp, Homo sapien
tgattcttcccaggcgcacacctgt

SEQ ID NO: 4881252 - DNA, 25 bp, Homo sapien
ggagagataattccagttggcctgg

SEQ ID NO: 4881253 - DNA, 25 bp, Homo sapien
cacacctgtgcacaaagctttggaa

SEQ ID NO: 4881254 - DNA, 25 bp, Homo sapien
gattctcaaaccatatccccgtgtt

SEQ ID NO: 4881255 - DNA, 25 bp, Homo sapien
gactgccttctctactgcttgtaaa

SEQ ID NO: 4881256 - DNA, 25 bp, Homo sapien
atagtgccctcatcctaaacctttg

SEQ ID NO: 4881257 - DNA, 25 bp, Homo sapien
ctgtattctgaagaaccttagagga

SEQ ID NO: 4881258 - DNA, 25 bp, Homo sapien
ggaaggctgatgtgagcaccctaga

SEQ ID NO: 4881259 - DNA, 25 bp, Homo sapien
agcttgagctcccttgtagccgtca

SEQ ID NO: 4881260 - DNA, 25 bp, Homo sapien
tggtacaaacgctggtacttccctg

SEQ ID NO: 4881261 - DNA, 25 bp, Homo sapien
tgggaagctgacattttgcctggag

SEQ ID NO: 4881262 - DNA, 25 bp, Homo sapien
ccctgctgccctcttggatttgtgg

SEQ ID NO: 4881263 - DNA, 25 bp, Homo sapien
tgtgcccacacgttgaacccagtga

SEQ ID NO: 4881264 - DNA, 25 bp, Homo sapien
ccgtagatactatgtgtgctccaga

SEQ ID NO: 4881265 - DNA, 25 bp, Homo sapien
cagttatagtcaggtttccaagggc

SEQ ID NO: 4881266 - DNA, 25 bp, Homo sapien
ggcagccactatctctgtacttgga

SEQ ID NO: 4881267 - DNA, 25 bp, Homo sapien
cgacgctcctcctttaggcgcgcgg

SEQ ID NO: 4881268 - DNA, 25 bp, Homo sapien
catcccccgcgacgctcctccttta

SEQ ID NO: 4881269 - DNA, 25 bp, Homo sapien
ccgcgacgctcctcctttaggcgcg

SEQ ID NO: 4881270 - DNA, 25 bp, Homo sapien
ccccgcgacgctcctcctttaggcg

SEQ ID NO: 4881271 - DNA, 25 bp, Homo sapien
caggcagctgcgtagcgcccgaaca

SEQ ID NO: 4881272 - DNA, 25 bp, Homo sapien
ccgaaagaggctcgcgctcacaggc

SEQ ID NO: 4881273 - DNA, 25 bp, Homo sapien
ggaaagccgaaagaggctcgcgctc

SEQ ID NO: 4881274 - DNA, 25 bp, Homo sapien
tcacaggcagctgcgtagcgcccga

SEQ ID NO: 4881275 - DNA, 25 bp, Homo sapien
aacgctcgcgagagccctctcggct

SEQ ID NO: 4881276 - DNA, 25 bp, Homo sapien
tccacgtttgccacgttccaaagga

SEQ ID NO: 4881277 - DNA, 25 bp, Homo sapien
gccacgttccaaaggaccgagacaa

SEQ ID NO: 4881278 - DNA, 25 bp, Homo sapien
tctcggcttccacgtttgccacgtt

SEQ ID NO: 4881279 - DNA, 25 bp, Homo sapien
cgcgccctgtcccatccctatggag

SEQ ID NO: 4881280 - DNA, 25 bp, Homo sapien
cctgtcccatccctatggagcgggg

SEQ ID NO: 4881281 - DNA, 25 bp, Homo sapien
tcccatccctatggagcggggtctg

SEQ ID NO: 4881282 - DNA, 25 bp, Homo sapien
tgtcccatccctatggagcggggtc

SEQ ID NO: 4881283 - DNA, 25 bp, Homo sapien
ggcccacgtgtccacctattccgca

SEQ ID NO: 4881284 - DNA, 25 bp, Homo sapien
gggcggcccacgtgtccacctattc

SEQ ID NO: 4881285 - DNA, 25 bp, Homo sapien
ctagaagcggcgcactccgcccacg

SEQ ID NO: 4881286 - DNA, 25 bp, Homo sapien
ccacgggcggcccacgtgtccacct

SEQ ID NO: 4881287 - DNA, 25 bp, Homo sapien
ttttggcctgatattgcccaagata

SEQ ID NO: 4881288 - DNA, 25 bp, Homo sapien
tacacagcaatgtaccttgtcaggg

SEQ ID NO: 4881289 - DNA, 25 bp, Homo sapien
ttgcccaagatacacagcaatgtac

SEQ ID NO: 4881290 - DNA, 25 bp, Homo sapien
cctgatattgcccaagatacacagc

SEQ ID NO: 4881291 - DNA, 25 bp, Homo sapien
tgtcctacatcacccaaaagagctg

SEQ ID NO: 4881292 - DNA, 25 bp, Homo sapien
gagcagattgactcgccaggactgt

SEQ ID NO: 4881293 - DNA, 25 bp, Homo sapien
tgtcattgggccaccgctcttagca

SEQ ID NO: 4881294 - DNA, 25 bp, Homo sapien
tggcacgggcagatacgagcagatt

SEQ ID NO: 4881295 - DNA, 25 bp, Homo sapien
gacagataggggtgattatctccat

SEQ ID NO: 4881296 - DNA, 25 bp, Homo sapien
caacaggcttcctgagtctttgaca

SEQ ID NO: 4881297 - DNA, 25 bp, Homo sapien
cttcctgagtctttgacagataggg

SEQ ID NO: 4881298 - DNA, 25 bp, Homo sapien
acaggcttcctgagtctttgacaga

SEQ ID NO: 4881299 - DNA, 25 bp, Homo sapien
cttgagtcttactccttgactgcca

SEQ ID NO: 4881300 - DNA, 25 bp, Homo sapien
tgaagagtgatggaggctgtaagtt

SEQ ID NO: 4881301 - DNA, 25 bp, Homo sapien
gagtcttactccttgactgccactc

SEQ ID NO: 4881302 - DNA, 25 bp, Homo sapien
aagagtgatggaggctgtaagtttt

SEQ ID NO: 4881303 - DNA, 25 bp, Homo sapien
gatttgccagtgcaggaggttctcc

SEQ ID NO: 4881304 - DNA, 25 bp, Homo sapien
ttgtgggccagacaagtgacagatg

SEQ ID NO: 4881305 - DNA, 25 bp, Homo sapien
gtagttgtgggccagacaagtgaca

SEQ ID NO: 4881306 - DNA, 25 bp, Homo sapien
tctcaccgccatacccaggaaacag

SEQ ID NO: 4881307 - DNA, 25 bp, Homo sapien
caagaaagatgacgcaacgagcaca

SEQ ID NO: 4881308 - DNA, 25 bp, Homo sapien
acgcaacgagcacaacagccacttt

SEQ ID NO: 4881309 - DNA, 25 bp, Homo sapien
aagatgacgcaacgagcacaacagc

SEQ ID NO: 4881310 - DNA, 25 bp, Homo sapien
gccaagaaagatgacgcaacgagca

SEQ ID NO: 4881311 - DNA, 25 bp, Homo sapien
gagcaagaaacaggtggtctcccct

SEQ ID NO: 4881312 - DNA, 25 bp, Homo sapien
tgggagcaagaaacaggtggtctcc

SEQ ID NO: 4881313 - DNA, 25 bp, Homo sapien
ggctgtgaggacaaataaatgttac

SEQ ID NO: 4881314 - DNA, 25 bp, Homo sapien
ggtctcccctccatgaggctgtgag

SEQ ID NO: 4881315 - DNA, 25 bp, Homo sapien
atcaccgccatcaccaggaccaaca

SEQ ID NO: 4881316 - DNA, 25 bp, Homo sapien
accaacagccttgtcgacatgacca

SEQ ID NO: 4881317 - DNA, 25 bp, Homo sapien
ccactctgggcagcatcaccgccat

SEQ ID NO: 4881318 - DNA, 25 bp, Homo sapien
ggaccaacagccttgtcgacatgac

SEQ ID NO: 4881319 - DNA, 25 bp, Homo sapien
agcatgtgaagataatctttgggtt

SEQ ID NO: 4881320 - DNA, 25 bp, Homo sapien
aagcatgtgaagataatctttgggt

SEQ ID NO: 4881321 - DNA, 25 bp, Homo sapien
caagcatgtgaagataatctttggg

SEQ ID NO: 4881322 - DNA, 25 bp, Homo sapien
tagtcacgctgctgaaccctggaga

SEQ ID NO: 4881323 - DNA, 25 bp, Homo sapien
agtcacgctgctgaaccctggagag

SEQ ID NO: 4881324 - DNA, 25 bp, Homo sapien
atagtcacgctgctgaaccctggag

SEQ ID NO: 4881325 - DNA, 25 bp, Homo sapien
cctggagagtctggtcatttggcat

SEQ ID NO: 4881326 - DNA, 25 bp, Homo sapien
ggccactgaagggctgaacaaggaa

SEQ ID NO: 4881327 - DNA, 25 bp, Homo sapien
tggagcatagaaacaggatgaagtg

SEQ ID NO: 4881328 - DNA, 25 bp, Homo sapien
tggttggagcatagaaacaggatga

SEQ ID NO: 4881329 - DNA, 25 bp, Homo sapien
agcatagaaacaggatgaagtgagg

SEQ ID NO: 4881330 - DNA, 25 bp, Homo sapien
tggccctggtgcagacaagttcaag

SEQ ID NO: 4881331 - DNA, 25 bp, Homo sapien
gagtttgtcagctttaggacttcca

SEQ ID NO: 4881332 - DNA, 25 bp, Homo sapien
tagacagggacccaggtgaacaggt

SEQ ID NO: 4881333 - DNA, 25 bp, Homo sapien
tcaagtccctaggtgtccgaagggc

SEQ ID NO: 4881334 - DNA, 25 bp, Homo sapien
gctcactcaagttaatagagttcat

SEQ ID NO: 4881335 - DNA, 25 bp, Homo sapien
ggtcttctgtaagctgcaatccagg

SEQ ID NO: 4881336 - DNA, 25 bp, Homo sapien
ggatttaaagtccagacatggcctt

SEQ ID NO: 4881337 - DNA, 25 bp, Homo sapien
gccaggattgaattctcacctggag

SEQ ID NO: 4881338 - DNA, 25 bp, Homo sapien
tgttcatgtgcatagcccatcaccc

SEQ ID NO: 4881339 - DNA, 25 bp, Homo sapien
cctgacagcacaactacaatctttg

SEQ ID NO: 4881340 - DNA, 25 bp, Homo sapien
tgacacatacctggagtgcctgttc

SEQ ID NO: 4881341 - DNA, 25 bp, Homo sapien
ctttggactccgtgtcatagttcat

SEQ ID NO: 4881342 - DNA, 25 bp, Homo sapien
tttgcagccctaaggaagcttccgc

SEQ ID NO: 4881343 - DNA, 25 bp, Homo sapien
aagcttccgcacaaggcaggagtcc

SEQ ID NO: 4881344 - DNA, 25 bp, Homo sapien
gccatgagaaaccagtgacggcgca

SEQ ID NO: 4881345 - DNA, 25 bp, Homo sapien
tctcattggtcgagctctcacaggg

SEQ ID NO: 4881346 - DNA, 25 bp, Homo sapien
gaatttggtgaagtaattccctggc

SEQ ID NO: 4881347 - DNA, 25 bp, Homo sapien
gcacttctagcctaagaagctgagc

SEQ ID NO: 4881348 - DNA, 25 bp, Homo sapien
ttccctggcacttctagcctaagaa

SEQ ID NO: 4881349 - DNA, 25 bp, Homo sapien
agcagccccagtagaagggggaatt

SEQ ID NO: 4881350 - DNA, 25 bp, Homo sapien
cagttgcttcgagagaacaatggac

SEQ ID NO: 4881351 - DNA, 25 bp, Homo sapien
ccggtgggtcccaagcctggtcact

SEQ ID NO: 4881352 - DNA, 25 bp, Homo sapien
ggtcccaagcctggtcactcaatgc

SEQ ID NO: 4881353 - DNA, 25 bp, Homo sapien
cacaattctcagttgcttcgagaga

SEQ ID NO: 4881354 - DNA, 25 bp, Homo sapien
ttgagggcttggtcgccagttgggt

SEQ ID NO: 4881355 - DNA, 25 bp, Homo sapien
ctaggcgcaggataccgctgctgga

SEQ ID NO: 4881356 - DNA, 25 bp, Homo sapien
gagtgggagtgtgagctaggcgcag

SEQ ID NO: 4881357 - DNA, 25 bp, Homo sapien
ggagtgtgagctaggcgcaggatac

SEQ ID NO: 4881358 - DNA, 25 bp, Homo sapien
tgagcttgatgctccttcatgggtc

SEQ ID NO: 4881359 - DNA, 25 bp, Homo sapien
ctgagcttgatgctccttcatgggt

SEQ ID NO: 4881360 - DNA, 25 bp, Homo sapien
ttattggaatttatggtcacagtag

SEQ ID NO: 4881361 - DNA, 25 bp, Homo sapien
tatggtcacagtagtagtcaaacac

SEQ ID NO: 4881362 - DNA, 25 bp, Homo sapien
agtagtcaaacactatacccaagag

SEQ ID NO: 4881363 - DNA, 25 bp, Homo sapien
ctatacccaagaggtttgagatgat

SEQ ID NO: 4881364 - DNA, 25 bp, Homo sapien
cacattgactgtagcggcattgcag

SEQ ID NO: 4881365 - DNA, 25 bp, Homo sapien
tctgatatgcccaaaagaagctgtc

SEQ ID NO: 4881366 - DNA, 25 bp, Homo sapien
gctgtagatactccccgtccttggt

SEQ ID NO: 4881367 - DNA, 25 bp, Homo sapien
taataatggccgcacagtgcaagag

SEQ ID NO: 4881368 - DNA, 25 bp, Homo sapien
atcaacagagttaaacatagtggta

SEQ ID NO: 4881369 - DNA, 25 bp, Homo sapien
taaacatagtggtaatttgaatcaa

SEQ ID NO: 4881370 - DNA, 25 bp, Homo sapien
gagttaaacatagtggtaatttgaa

SEQ ID NO: 4881371 - DNA, 25 bp, Homo sapien
caacagagttaaacatagtggtaat

SEQ ID NO: 4881372 - DNA, 25 bp, Homo sapien
tatactctgaacaagcatcccaagc

SEQ ID NO: 4881373 - DNA, 25 bp, Homo sapien
ccaagcagtagagaagtctctctga

SEQ ID NO: 4881374 - DNA, 25 bp, Homo sapien
tcttgctgctatggaaattatactc

SEQ ID NO: 4881375 - DNA, 25 bp, Homo sapien
catcccaagcagtagagaagtctct

SEQ ID NO: 4881376 - DNA, 25 bp, Homo sapien
taatcatgctggcatgtacacaaac

SEQ ID NO: 4881377 - DNA, 25 bp, Homo sapien
taaaggtacacagctgttgatatcc

SEQ ID NO: 4881378 - DNA, 25 bp, Homo sapien
catttatcagtctgaggcagtgaca

SEQ ID NO: 4881379 - DNA, 25 bp, Homo sapien
tctattccaccggatgaatgactgt

SEQ ID NO: 4881380 - DNA, 25 bp, Homo sapien
atattaactagtttgtgggctgtca

SEQ ID NO: 4881381 - DNA, 25 bp, Homo sapien
agaacttcagacgagaactgtctta

SEQ ID NO: 4881382 - DNA, 25 bp, Homo sapien
attaactagtttgtgggctgtcaga

SEQ ID NO: 4881383 - DNA, 25 bp, Homo sapien
ctgtcttacttcctgtcctgtgtta

SEQ ID NO: 4881384 - DNA, 25 bp, Homo sapien
tagttgtaacataatccttgtttcc

SEQ ID NO: 4881385 - DNA, 25 bp, Homo sapien
taaactagttgtaacataatccttg

SEQ ID NO: 4881386 - DNA, 25 bp, Homo sapien
tgtaacataatccttgtttccactg

SEQ ID NO: 4881387 - DNA, 25 bp, Homo sapien
accactcctaaactagttgtaacat

SEQ ID NO: 4881388 - DNA, 25 bp, Homo sapien
caatgttcttagcattcccagactt

SEQ ID NO: 4881389 - DNA, 25 bp, Homo sapien
acaatgttcttagcattcccagact

SEQ ID NO: 4881390 - DNA, 25 bp, Homo sapien
tgttcttagcattcccagacttcat

SEQ ID NO: 4881391 - DNA, 25 bp, Homo sapien
atgttcttagcattcccagacttca

SEQ ID NO: 4881392 - DNA, 25 bp, Homo sapien
agtaagataaagcttctggtggaga

SEQ ID NO: 4881393 - DNA, 25 bp, Homo sapien
cagaggaagatcatggctcgaacac

SEQ ID NO: 4881394 - DNA, 25 bp, Homo sapien
aacacagccttaatgcatctggact

SEQ ID NO: 4881395 - DNA, 25 bp, Homo sapien
tctggactctgtagtaagataaagc

SEQ ID NO: 4881396 - DNA, 25 bp, Homo sapien
gaacgtaaaatttctcaggagagat

SEQ ID NO: 4881397 - DNA, 25 bp, Homo sapien
tcaggagagatcttataggccagga

SEQ ID NO: 4881398 - DNA, 25 bp, Homo sapien
gagaaagtgcgatgacgtatacaaa

SEQ ID NO: 4881399 - DNA, 25 bp, Homo sapien
taattaaactgccaactaagaacac

SEQ ID NO: 4881400 - DNA, 25 bp, Homo sapien
ctgtgtaatggaagtcgggatcttc

SEQ ID NO: 4881401 - DNA, 25 bp, Homo sapien
gaagtcgggatcttcagtgtaaaga

SEQ ID NO: 4881402 - DNA, 25 bp, Homo sapien
gaagtcagcattagcttggctagca

SEQ ID NO: 4881403 - DNA, 25 bp, Homo sapien
ctagcatgtaatccaaaagctctcc

SEQ ID NO: 4881404 - DNA, 25 bp, Homo sapien
ttttgcggtatcttggttgagcctt

SEQ ID NO: 4881405 - DNA, 25 bp, Homo sapien
tatctatagtaaacaatcaagtgca

SEQ ID NO: 4881406 - DNA, 25 bp, Homo sapien
atatctatagtaaacaatcaagtgc

SEQ ID NO: 4881407 - DNA, 25 bp, Homo sapien
tgcttggtatttttgcggtatcttg

SEQ ID NO: 4881408 - DNA, 25 bp, Homo sapien
agaggccagtatctggcaagggctt

SEQ ID NO: 4881409 - DNA, 25 bp, Homo sapien
gggctgaggagtccaagattgagag

SEQ ID NO: 4881410 - DNA, 25 bp, Homo sapien
agtccaagattgagaggccagtatc

SEQ ID NO: 4881411 - DNA, 25 bp, Homo sapien
gctcacagttatggggggctgagga

SEQ ID NO: 4881412 - DNA, 25 bp, Homo sapien
gattcccctcacaatatgtcttgta

SEQ ID NO: 4881413 - DNA, 25 bp, Homo sapien
tcatattcgcagattcaggtgttca

SEQ ID NO: 4881414 - DNA, 25 bp, Homo sapien
gaaaatccgattactcttaagactg

SEQ ID NO: 4881415 - DNA, 25 bp, Homo sapien
gattcatttgagatgcctgacccac

SEQ ID NO: 4881416 - DNA, 25 bp, Homo sapien
gatgacaaccgctggctgttcttca

SEQ ID NO: 4881417 - DNA, 25 bp, Homo sapien
ccctctttcagatccaacgatgaca

SEQ ID NO: 4881418 - DNA, 25 bp, Homo sapien
cgatgacaaccgctggctgttcttc

SEQ ID NO: 4881419 - DNA, 25 bp, Homo sapien
ttcagatccaacgatgacaaccgct

SEQ ID NO: 4881420 - DNA, 25 bp, Homo sapien
tacctcctgcatccgggcactgaag

SEQ ID NO: 4881421 - DNA, 25 bp, Homo sapien
cagggagttacctcctgcatccggg

SEQ ID NO: 4881422 - DNA, 25 bp, Homo sapien
gagttacctcctgcatccgggcact

SEQ ID NO: 4881423 - DNA, 25 bp, Homo sapien
gggagttacctcctgcatccgggca

SEQ ID NO: 4881424 - DNA, 25 bp, Homo sapien
ggccatatacttaggtcttcctcac

SEQ ID NO: 4881425 - DNA, 25 bp, Homo sapien
tccattctccttatgaatctatggc

SEQ ID NO: 4881426 - DNA, 25 bp, Homo sapien
gaatctatggccatatacttaggtc

SEQ ID NO: 4881427 - DNA, 25 bp, Homo sapien
tccttatgaatctatggccatatac

SEQ ID NO: 4881428 - DNA, 25 bp, Homo sapien
ccttcaacagcagccatgtgcttgg

SEQ ID NO: 4881429 - DNA, 25 bp, Homo sapien
acagcagccatgtgcttggaggctt

SEQ ID NO: 4881430 - DNA, 25 bp, Homo sapien
acaccttcaacagcagccatgtgct

SEQ ID NO: 4881431 - DNA, 25 bp, Homo sapien
ccatggacaccttcaacagcagcca

SEQ ID NO: 4881432 - DNA, 25 bp, Homo sapien
cattgacttccagactttactgcct

SEQ ID NO: 4881433 - DNA, 25 bp, Homo sapien
cctgagtgtgggaagatatgggctg

SEQ ID NO: 4881434 - DNA, 25 bp, Homo sapien
catctctggtcaaagaaaaccacac

SEQ ID NO: 4881435 - DNA, 25 bp, Homo sapien
ccatctctggtcaaagaaaaccaca

SEQ ID NO: 4881436 - DNA, 25 bp, Homo sapien
tttccaaggctagggacatgcccat

SEQ ID NO: 4881437 - DNA, 25 bp, Homo sapien
gtgatctttttctatagtggcctga

SEQ ID NO: 4881438 - DNA, 25 bp, Homo sapien
tatctacagacctggaatcgaaatg

SEQ ID NO: 4881439 - DNA, 25 bp, Homo sapien
cacagcctctggaaatcctgagaat

SEQ ID NO: 4881440 - DNA, 25 bp, Homo sapien
catgctgcactttaagatcagcagg

SEQ ID NO: 4881441 - DNA, 25 bp, Homo sapien
tattgctccccgtaggcatactttg

SEQ ID NO: 4881442 - DNA, 25 bp, Homo sapien
gattctcctggtatccctattgctc

SEQ ID NO: 4881443 - DNA, 25 bp, Homo sapien
ccttggaaataacatgacttggaat

SEQ ID NO: 4881444 - DNA, 25 bp, Homo sapien
attactctgatcattttgctttgtt

SEQ ID NO: 4881445 - DNA, 25 bp, Homo sapien
atcattttgctttgttatcatttct

SEQ ID NO: 4881446 - DNA, 25 bp, Homo sapien
ttttgctttgttatcatttctacac

SEQ ID NO: 4881447 - DNA, 25 bp, Homo sapien
tctgatcattttgctttgttatcat

SEQ ID NO: 4881448 - DNA, 25 bp, Homo sapien
gattctgaagtctagttggagatgg

SEQ ID NO: 4881449 - DNA, 25 bp, Homo sapien
cagagatggactgaagtgaatgacc

SEQ ID NO: 4881450 - DNA, 25 bp, Homo sapien
ccgtgtgtaggtgcacaaaactcca

SEQ ID NO: 4881451 - DNA, 25 bp, Homo sapien
tgtactcttctgcatcaccaacagc

SEQ ID NO: 4881452 - DNA, 25 bp, Homo sapien
tttgggtaattttcattgcgtggca

SEQ ID NO: 4881453 - DNA, 25 bp, Homo sapien
ttcgatttgtaaaaagctgctgatg

SEQ ID NO: 4881454 - DNA, 25 bp, Homo sapien
ctgctgatggtgctgctttgggtgc

SEQ ID NO: 4881455 - DNA, 25 bp, Homo sapien
gctttgggtgctgctgatgtttggg

SEQ ID NO: 4881456 - DNA, 25 bp, Homo sapien
aagtcagcatgaaaagctgccaaaa

SEQ ID NO: 4881457 - DNA, 25 bp, Homo sapien
ttaagctagagcagtaagtgcattc

SEQ ID NO: 4881458 - DNA, 25 bp, Homo sapien
tcaagtcagcatgaaaagctgccaa

SEQ ID NO: 4881459 - DNA, 25 bp, Homo sapien
ttcaagtcagcatgaaaagctgcca

SEQ ID NO: 4881460 - DNA, 25 bp, Homo sapien
gctaactgctgccctttaattcttc

SEQ ID NO: 4881461 - DNA, 25 bp, Homo sapien
tctatctgctgatactcttgctaac

SEQ ID NO: 4881462 - DNA, 25 bp, Homo sapien
tttaggtaggcatactctatctgct

SEQ ID NO: 4881463 - DNA, 25 bp, Homo sapien
aattaaataccttgcagcctttcag

SEQ ID NO: 4881464 - DNA, 25 bp, Homo sapien
tccacccaagcaggttatatttaaa

SEQ ID NO: 4881465 - DNA, 25 bp, Homo sapien
cttctccacccaagcaggttatatt

SEQ ID NO: 4881466 - DNA, 25 bp, Homo sapien
tctccacccaagcaggttatattta

SEQ ID NO: 4881467 - DNA, 25 bp, Homo sapien
ccacccaagcaggttatatttaaat

SEQ ID NO: 4881468 - DNA, 25 bp, Homo sapien
gactttctcttcgtggatgtctttc

SEQ ID NO: 4881469 - DNA, 25 bp, Homo sapien
tttttgaggcaactgccaaagcatc

SEQ ID NO: 4881470 - DNA, 25 bp, Homo sapien
aaggactttctcttcgtggatgtct

SEQ ID NO: 4881471 - DNA, 25 bp, Homo sapien
ttctcttcgtggatgtctttctccc

SEQ ID NO: 4881472 - DNA, 25 bp, Homo sapien
ctccattcatcagcaatccttttat

SEQ ID NO: 4881473 - DNA, 25 bp, Homo sapien
tcacctcactgttgtgtagatgtgg

SEQ ID NO: 4881474 - DNA, 25 bp, Homo sapien
tggcttagttgtagcctgggttact

SEQ ID NO: 4881475 - DNA, 25 bp, Homo sapien
taaaaactgtagcaggaatcctcca

SEQ ID NO: 4881476 - DNA, 25 bp, Homo sapien
ctttcatgaagcataatttagcata

SEQ ID NO: 4881477 - DNA, 25 bp, Homo sapien
gaagcataatttagcatatctgcac

SEQ ID NO: 4881478 - DNA, 25 bp, Homo sapien
ttcatgaagcataatttagcatatc

SEQ ID NO: 4881479 - DNA, 25 bp, Homo sapien
catgaagcataatttagcatatctg

SEQ ID NO: 4881480 - DNA, 25 bp, Homo sapien
tcattgaccaaagatgtatttgatg

SEQ ID NO: 4881481 - DNA, 25 bp, Homo sapien
aatgtcagatcctagaaaatgtaac

SEQ ID NO: 4881482 - DNA, 25 bp, Homo sapien
gttcttgaacagtcattgaccaaag

SEQ ID NO: 4881483 - DNA, 25 bp, Homo sapien
tattgtctttggaaacaaaatacat

SEQ ID NO: 4881484 - DNA, 25 bp, Homo sapien
ggcttaaacttcaggttgaggtcat

SEQ ID NO: 4881485 - DNA, 25 bp, Homo sapien
aacttcaggttgaggtcatacactt

SEQ ID NO: 4881486 - DNA, 25 bp, Homo sapien
tctttcagccacacaatagtgtctg

SEQ ID NO: 4881487 - DNA, 25 bp, Homo sapien
tgacacagaaagattagttcattaa

SEQ ID NO: 4881488 - DNA, 25 bp, Homo sapien
ggacatcaacaagtcaacagattca

SEQ ID NO: 4881489 - DNA, 25 bp, Homo sapien
cctcaggacattgctgtatatagaa

SEQ ID NO: 4881490 - DNA, 25 bp, Homo sapien
ttctagcatttcttcaccatcgcag

SEQ ID NO: 4881491 - DNA, 25 bp, Homo sapien
accatcgcaggtatgtattgagcct

SEQ ID NO: 4881492 - DNA, 25 bp, Homo sapien
tgtattgagcctccgacattctcac

SEQ ID NO: 4881493 - DNA, 25 bp, Homo sapien
tagcatttcttcaccatcgcaggta

SEQ ID NO: 4881494 - DNA, 25 bp, Homo sapien
tgtgacacaagccatatcttccatg

SEQ ID NO: 4881495 - DNA, 25 bp, Homo sapien
ggtgtgacacaagccatatcttcca

SEQ ID NO: 4881496 - DNA, 25 bp, Homo sapien
gacacaagccatatcttccatgagg

SEQ ID NO: 4881497 - DNA, 25 bp, Homo sapien
tcaggtgtgacacaagccatatctt

SEQ ID NO: 4881498 - DNA, 25 bp, Homo sapien
cccagaattgtgctcttacttcaaa

SEQ ID NO: 4881499 - DNA, 25 bp, Homo sapien
tctaagaggaatgttgtgaatcatc

SEQ ID NO: 4881500 - DNA, 25 bp, Homo sapien
tgtgaatcatctaagaactccactc

SEQ ID NO: 4881501 - DNA, 25 bp, Homo sapien
gtatgtctcagaagtgtaagcacct

SEQ ID NO: 4881502 - DNA, 25 bp, Homo sapien
ggtgctttgacttctgaaatggtgg

SEQ ID NO: 4881503 - DNA, 25 bp, Homo sapien
aacaacttcatagacttgcacccta

SEQ ID NO: 4881504 - DNA, 25 bp, Homo sapien
tattcaactacgtattacattcaga

SEQ ID NO: 4881505 - DNA, 25 bp, Homo sapien
tacattcagaaggtggtacagtgct

SEQ ID NO: 4881506 - DNA, 25 bp, Homo sapien
tcaagcgcctgttgtgggaacagct

SEQ ID NO: 4881507 - DNA, 25 bp, Homo sapien
gcacggctttgcaggtgactgctgt

SEQ ID NO: 4881508 - DNA, 25 bp, Homo sapien
gtccaagttccagagtcatcccagt

SEQ ID NO: 4881509 - DNA, 25 bp, Homo sapien
tctaggtggtatggaattaacagcc

SEQ ID NO: 4881510 - DNA, 25 bp, Homo sapien
ttgcttcattctgtagccatcctta

SEQ ID NO: 4881511 - DNA, 25 bp, Homo sapien
tgcttcattctgtagccatccttac

SEQ ID NO: 4881512 - DNA, 25 bp, Homo sapien
tcattctataaatagcttcctcctt

SEQ ID NO: 4881513 - DNA, 25 bp, Homo sapien
tctataaatagcttcctcctttgct

SEQ ID NO: 4881514 - DNA, 25 bp, Homo sapien
tctgtggaggactgatccccttctc

SEQ ID NO: 4881515 - DNA, 25 bp, Homo sapien
cctctgggttccatgtaagcacagt

SEQ ID NO: 4881516 - DNA, 25 bp, Homo sapien
ggttccatgtaagcacagtctgtgg

SEQ ID NO: 4881517 - DNA, 25 bp, Homo sapien
accgagcctgaccagattcttgaga

SEQ ID NO: 4881518 - DNA, 25 bp, Homo sapien
gatgaaaaggtatccacgtgtctgg

SEQ ID NO: 4881519 - DNA, 25 bp, Homo sapien
gtagatgaaaaggtatccacgtgtc

SEQ ID NO: 4881520 - DNA, 25 bp, Homo sapien
tagatgaaaaggtatccacgtgtct

SEQ ID NO: 4881521 - DNA, 25 bp, Homo sapien
cgtagatgaaaaggtatccacgtgt

SEQ ID NO: 4881522 - DNA, 25 bp, Homo sapien
gttcttagcccttcacctccaagct

SEQ ID NO: 4881523 - DNA, 25 bp, Homo sapien
tgttcttagcccttcacctccaagc

SEQ ID NO: 4881524 - DNA, 25 bp, Homo sapien
ctgttcttagcccttcacctccaag

SEQ ID NO: 4881525 - DNA, 25 bp, Homo sapien
tctgcagtgtgcccgcgagccccgg

SEQ ID NO: 4881526 - DNA, 25 bp, Homo sapien
cgggggctgggcagacctgcatcat

SEQ ID NO: 4881527 - DNA, 25 bp, Homo sapien
gtctgcagtgtgcccgcgagccccg

SEQ ID NO: 4881528 - DNA, 25 bp, Homo sapien
gagccccgggggctgggcagacctg

SEQ ID NO: 4881529 - DNA, 25 bp, Homo sapien
gggcccacattggttggctcccgca

SEQ ID NO: 4881530 - DNA, 25 bp, Homo sapien
ccacattggttggctcccgcagtgc

SEQ ID NO: 4881531 - DNA, 25 bp, Homo sapien
gcccacattggttggctcccgcagt

SEQ ID NO: 4881532 - DNA, 25 bp, Homo sapien
cccacattggttggctcccgcagtg

SEQ ID NO: 4881533 - DNA, 25 bp, Homo sapien
ggaacttccgcacctaaccacctga

SEQ ID NO: 4881534 - DNA, 25 bp, Homo sapien
aacttccgcacctaaccacctgagt

SEQ ID NO: 4881535 - DNA, 25 bp, Homo sapien
ttccgcacctaaccacctgagtctc

SEQ ID NO: 4881536 - DNA, 25 bp, Homo sapien
cggaacttccgcacctaaccacctg

SEQ ID NO: 4881537 - DNA, 25 bp, Homo sapien
cctcagcaacggcagcatgcagatc

SEQ ID NO: 4881538 - DNA, 25 bp, Homo sapien
tcagcaacggcagcatgcagatcaa

SEQ ID NO: 4881539 - DNA, 25 bp, Homo sapien
gcaacggcagcatgcagatcaactt

SEQ ID NO: 4881540 - DNA, 25 bp, Homo sapien
gcagcgccatcatcctgcacctcag

SEQ ID NO: 4881541 - DNA, 25 bp, Homo sapien
caatgattgtaacagcctgcagtac

SEQ ID NO: 4881542 - DNA, 25 bp, Homo sapien
tacttgagcgagcacttcctgaagg

SEQ ID NO: 4881543 - DNA, 25 bp, Homo sapien
cctgggtatcagctgtgtggtaaca

SEQ ID NO: 4881544 - DNA, 25 bp, Homo sapien
cataaagtgtgatggcaccgagtcc

SEQ ID NO: 4881545 - DNA, 25 bp, Homo sapien
tgaattctgagcatagccaccctgg

SEQ ID NO: 4881546 - DNA, 25 bp, Homo sapien
agaatccacacctgatactgccact

SEQ ID NO: 4881547 - DNA, 25 bp, Homo sapien
tggcagggaccccactgaagaatcc

SEQ ID NO: 4881548 - DNA, 25 bp, Homo sapien
attctgagcatagccaccctggcag

SEQ ID NO: 4881549 - DNA, 25 bp, Homo sapien
ggtcctccgagcaggttaggtcaga

SEQ ID NO: 4881550 - DNA, 25 bp, Homo sapien
cgaggctgtgctactgcgtgcgcac

SEQ ID NO: 4881551 - DNA, 25 bp, Homo sapien
tatagaagctatggcctctttgcaa

SEQ ID NO: 4881552 - DNA, 25 bp, Homo sapien
tcgtgcttaggcgaggctgggtcct

SEQ ID NO: 4881553 - DNA, 25 bp, Homo sapien
gagtcgagagagatgatttccccat

SEQ ID NO: 4881554 - DNA, 25 bp, Homo sapien
catagacaatggagtcgagagagat

SEQ ID NO: 4881555 - DNA, 25 bp, Homo sapien
caggccatcaccagcatagacaatg

SEQ ID NO: 4881556 - DNA, 25 bp, Homo sapien
ggccatcaccagcatagacaatgga

SEQ ID NO: 4881557 - DNA, 25 bp, Homo sapien
ttaatgcaactaccgctggagatgg

SEQ ID NO: 4881558 - DNA, 25 bp, Homo sapien
catcatggggatccctccatactac

SEQ ID NO: 4881559 - DNA, 25 bp, Homo sapien
tattaatgcaactaccgctggagat

SEQ ID NO: 4881560 - DNA, 25 bp, Homo sapien
atggggatccctccatactacagct

SEQ ID NO: 4881561 - DNA, 25 bp, Homo sapien
ctgtacctttcaaccttggaagtgt

SEQ ID NO: 4881562 - DNA, 25 bp, Homo sapien
tgtacctttcaaccttggaagtgtc

SEQ ID NO: 4881563 - DNA, 25 bp, Homo sapien
cctgtacctttcaaccttggaagtg

SEQ ID NO: 4881564 - DNA, 25 bp, Homo sapien
tacccacagggaagctaactgttcc

SEQ ID NO: 4881565 - DNA, 25 bp, Homo sapien
ggacacaaatagcagttacccacag

SEQ ID NO: 4881566 - DNA, 25 bp, Homo sapien
gccagggaatttgactctagagctc

SEQ ID NO: 4881567 - DNA, 25 bp, Homo sapien
taactgttccctcataagcaggtgt

SEQ ID NO: 4881568 - DNA, 25 bp, Homo sapien
gctcgcgcccgcctttgttagtttc

SEQ ID NO: 4881569 - DNA, 25 bp, Homo sapien
tgcggtgcgcacgacccgagcgtct

SEQ ID NO: 4881570 - DNA, 25 bp, Homo sapien
ggccgaggtcagtgcggtgcgcacg

SEQ ID NO: 4881571 - DNA, 25 bp, Homo sapien
ggtcagtgcggtgcgcacgacccga

SEQ ID NO: 4881572 - DNA, 25 bp, Homo sapien
ggcgctgactgccagagatcctcgt

SEQ ID NO: 4881573 - DNA, 25 bp, Homo sapien
gtgccggcggcgtccgagcggcgct

SEQ ID NO: 4881574 - DNA, 25 bp, Homo sapien
gctgactgccagagatcctcgtcct

SEQ ID NO: 4881575 - DNA, 25 bp, Homo sapien
ccgagcggcgctgactgccagagat

SEQ ID NO: 4881576 - DNA, 25 bp, Homo sapien
gcagatgagcgagcagcgtccggtg

SEQ ID NO: 4881577 - DNA, 25 bp, Homo sapien
agcgagcagcgtccggtgcagcagc

SEQ ID NO: 4881578 - DNA, 25 bp, Homo sapien
agaggcagatgagcgagcagcgtcc

SEQ ID NO: 4881579 - DNA, 25 bp, Homo sapien
agatgagcgagcagcgtccggtgca

SEQ ID NO: 4881580 - DNA, 25 bp, Homo sapien
ctggggcaggggccctcggggcact

SEQ ID NO: 4881581 - DNA, 25 bp, Homo sapien
ggggcaggggccctcggggcactca

SEQ ID NO: 4881582 - DNA, 25 bp, Homo sapien
gggcaggggccctcggggcactcac

SEQ ID NO: 4881583 - DNA, 25 bp, Homo sapien
tggggcaggggccctcggggcactc

SEQ ID NO: 4881584 - DNA, 25 bp, Homo sapien
cccgttcgccccttgccgggagctg

SEQ ID NO: 4881585 - DNA, 25 bp, Homo sapien
agagggagtcgcagaggccggtcct

SEQ ID NO: 4881586 - DNA, 25 bp, Homo sapien
ttcgccccttgccgggagctgcgga

SEQ ID NO: 4881587 - DNA, 25 bp, Homo sapien
ccttgccgggagctgcggaaccgca

SEQ ID NO: 4881588 - DNA, 25 bp, Homo sapien
tcccacacagtgtaattaagcaaca

SEQ ID NO: 4881589 - DNA, 25 bp, Homo sapien
tgtaacttcagcacgaacgcggagg

SEQ ID NO: 4881590 - DNA, 25 bp, Homo sapien
gctaaaccaggtatcggatcaaggg

SEQ ID NO: 4881591 - DNA, 25 bp, Homo sapien
ggaaatcatcctaagaagaaagagc

SEQ ID NO: 4881592 - DNA, 25 bp, Homo sapien
tgaccatggaatagaccacagagcc

SEQ ID NO: 4881593 - DNA, 25 bp, Homo sapien
ttttcatgggagactggaacactga

SEQ ID NO: 4881594 - DNA, 25 bp, Homo sapien
gaatctgtctgaagtataacgcaag

SEQ ID NO: 4881595 - DNA, 25 bp, Homo sapien
gaaagcttggcagagcactcagaat

SEQ ID NO: 4881596 - DNA, 25 bp, Homo sapien
tgaacttgccagagtccgacctctg

SEQ ID NO: 4881597 - DNA, 25 bp, Homo sapien
cctgagacgaagatgtgttgaacat

SEQ ID NO: 4881598 - DNA, 25 bp, Homo sapien
tctggtaccacagatatgtctggtg

SEQ ID NO: 4881599 - DNA, 25 bp, Homo sapien
ggtgcaatgaatgtccatgggtaat

SEQ ID NO: 4881600 - DNA, 25 bp, Homo sapien
gaccaccacaaccatctatatttta

SEQ ID NO: 4881601 - DNA, 25 bp, Homo sapien
cagaccaccacaaccatctatattt

SEQ ID NO: 4881602 - DNA, 25 bp, Homo sapien
acagaccaccacaaccatctatatt

SEQ ID NO: 4881603 - DNA, 25 bp, Homo sapien
gcacagaccaccacaaccatctata

SEQ ID NO: 4881604 - DNA, 25 bp, Homo sapien
tctgatgcctgtaggataacagttc

SEQ ID NO: 4881605 - DNA, 25 bp, Homo sapien
gatgcctgtaggataacagttctcc

SEQ ID NO: 4881606 - DNA, 25 bp, Homo sapien
ccatcagcgtaattctgatgcctgt

SEQ ID NO: 4881607 - DNA, 25 bp, Homo sapien
cagctgatggcccatcagcgtaatt

SEQ ID NO: 4881608 - DNA, 25 bp, Homo sapien
cttgtaaattggcatcattgcatgt

SEQ ID NO: 4881609 - DNA, 25 bp, Homo sapien
ttagatcttcgtactcaggactttc

SEQ ID NO: 4881610 - DNA, 25 bp, Homo sapien
tactgtttagatcttcgtactcagg

SEQ ID NO: 4881611 - DNA, 25 bp, Homo sapien
cattgcatgtatcgaagttcatata

SEQ ID NO: 4881612 - DNA, 25 bp, Homo sapien
catttcctatggagtaaggccagga

SEQ ID NO: 4881613 - DNA, 25 bp, Homo sapien
tctgaggagtccaagaggagacttt

SEQ ID NO: 4881614 - DNA, 25 bp, Homo sapien
ttcctatggagtaaggccaggagag

SEQ ID NO: 4881615 - DNA, 25 bp, Homo sapien
ctctgaggagtccaagaggagactt

SEQ ID NO: 4881616 - DNA, 25 bp, Homo sapien
gaatctcagctctgtttatcggcca

SEQ ID NO: 4881617 - DNA, 25 bp, Homo sapien
tggtcaggcattcccagatttgtag

SEQ ID NO: 4881618 - DNA, 25 bp, Homo sapien
aaaagtcccacgtaccagaaatgca

SEQ ID NO: 4881619 - DNA, 25 bp, Homo sapien
tctcaagctagtatccctggtcagg

SEQ ID NO: 4881620 - DNA, 25 bp, Homo sapien
tgagacagaaccacatcaacgcctt

SEQ ID NO: 4881621 - DNA, 25 bp, Homo sapien
ggttcttgctctacactggaaaagc

SEQ ID NO: 4881622 - DNA, 25 bp, Homo sapien
gcctgtctccgtgctgatctccaat

SEQ ID NO: 4881623 - DNA, 25 bp, Homo sapien
aagactgctgtactccggttgggct

SEQ ID NO: 4881624 - DNA, 25 bp, Homo sapien
ctctgataccccttctgggactccc

SEQ ID NO: 4881625 - DNA, 25 bp, Homo sapien
atcacaacctcgtatgagccaaagg

SEQ ID NO: 4881626 - DNA, 25 bp, Homo sapien
gccaaagggctactgtaatctgcat

SEQ ID NO: 4881627 - DNA, 25 bp, Homo sapien
attatcacaacctcgtatgagccaa

SEQ ID NO: 4881628 - DNA, 25 bp, Homo sapien
gtatgagccaaagggctactgtaat

SEQ ID NO: 4881629 - DNA, 25 bp, Homo sapien
tgatcccgaagagaagacaagaaag

SEQ ID NO: 4881630 - DNA, 25 bp, Homo sapien
tcccgaagagaagacaagaaaggtg

SEQ ID NO: 4881631 - DNA, 25 bp, Homo sapien
cactgatcccgaagagaagacaaga

SEQ ID NO: 4881632 - DNA, 25 bp, Homo sapien
cttacactgatcccgaagagaagac

SEQ ID NO: 4881633 - DNA, 25 bp, Homo sapien
tctgacatgggccactcaaccaagc

SEQ ID NO: 4881634 - DNA, 25 bp, Homo sapien
agcacctatcacatcaaatccactg

SEQ ID NO: 4881635 - DNA, 25 bp, Homo sapien
tgtgtgaacagggaataagcatttc

SEQ ID NO: 4881636 - DNA, 25 bp, Homo sapien
tgtggcttccattactgtgaaacag

SEQ ID NO: 4881637 - DNA, 25 bp, Homo sapien
ctcttggtcgccctgggagtccaac

SEQ ID NO: 4881638 - DNA, 25 bp, Homo sapien
ctacattaaaggagattcgaagtct

SEQ ID NO: 4881639 - DNA, 25 bp, Homo sapien
acattaaaggagattcgaagtctgg

SEQ ID NO: 4881640 - DNA, 25 bp, Homo sapien
tacattaaaggagattcgaagtctg

SEQ ID NO: 4881641 - DNA, 25 bp, Homo sapien
tcactctaatttgtacttcgtaatg

SEQ ID NO: 4881642 - DNA, 25 bp, Homo sapien
gcagggaaagagtatagatagcttc

SEQ ID NO: 4881643 - DNA, 25 bp, Homo sapien
agagtatagatagcttccataattt

SEQ ID NO: 4881644 - DNA, 25 bp, Homo sapien
gaaagagtatagatagcttccataa

SEQ ID NO: 4881645 - DNA, 25 bp, Homo sapien
gggaaagagtatagatagcttccat

SEQ ID NO: 4881646 - DNA, 25 bp, Homo sapien
aagagatttacagcatcctggacag

SEQ ID NO: 4881647 - DNA, 25 bp, Homo sapien
gtgtttagacctccaaagagattta

SEQ ID NO: 4881648 - DNA, 25 bp, Homo sapien
aaagagatttacagcatcctggaca

SEQ ID NO: 4881649 - DNA, 25 bp, Homo sapien
tagacctccaaagagatttacagca

SEQ ID NO: 4881650 - DNA, 25 bp, Homo sapien
tccatcatcacactttagtgcttgt

SEQ ID NO: 4881651 - DNA, 25 bp, Homo sapien
catcacactttagtgcttgtggccc

SEQ ID NO: 4881652 - DNA, 25 bp, Homo sapien
catcatcacactttagtgcttgtgg

SEQ ID NO: 4881653 - DNA, 25 bp, Homo sapien
tcatcacactttagtgcttgtggcc

SEQ ID NO: 4881654 - DNA, 25 bp, Homo sapien
ttcaactgaagtttcacttcaagtt

SEQ ID NO: 4881655 - DNA, 25 bp, Homo sapien
tttcaactgaagtttcacttcaagt

SEQ ID NO: 4881656 - DNA, 25 bp, Homo sapien
tcaactgaagtttcacttcaagttt

SEQ ID NO: 4881657 - DNA, 25 bp, Homo sapien
atctgcagaacgatttcctaaagga

SEQ ID NO: 4881658 - DNA, 25 bp, Homo sapien
tctgcagaacgatttcctaaaggaa

SEQ ID NO: 4881659 - DNA, 25 bp, Homo sapien
ccctctcttagactcccaggacctt

SEQ ID NO: 4881660 - DNA, 25 bp, Homo sapien
tgtttcctacgtaccctggcttata

SEQ ID NO: 4881661 - DNA, 25 bp, Homo sapien
tgcctcaaactcaactccctctctt

SEQ ID NO: 4881662 - DNA, 25 bp, Homo sapien
ccactaccctctcttagactcccag

SEQ ID NO: 4881663 - DNA, 25 bp, Homo sapien
ttcaaagtaatctcctctcaaagaa

SEQ ID NO: 4881664 - DNA, 25 bp, Homo sapien
tctcaaagaagacattaggtgactc

SEQ ID NO: 4881665 - DNA, 25 bp, Homo sapien
gatgtcccccagacttcaaagtaat

SEQ ID NO: 4881666 - DNA, 25 bp, Homo sapien
gatcatccgagcatatttctgccca

SEQ ID NO: 4881667 - DNA, 25 bp, Homo sapien
cacttgatggcttatagaccttaca

SEQ ID NO: 4881668 - DNA, 25 bp, Homo sapien
cagctgcttctccatattgtgccaa

SEQ ID NO: 4881669 - DNA, 25 bp, Homo sapien
ttcttgaagtcattctgcgcctctg

SEQ ID NO: 4881670 - DNA, 25 bp, Homo sapien
cccttccaatccacttgatggctta

SEQ ID NO: 4881671 - DNA, 25 bp, Homo sapien
tgtaagctatctgtggccaaaaggt

SEQ ID NO: 4881672 - DNA, 25 bp, Homo sapien
tagtctttccacagagagttacacc

SEQ ID NO: 4881673 - DNA, 25 bp, Homo sapien
gaaggtatgctctgactataatgac

SEQ ID NO: 4881674 - DNA, 25 bp, Homo sapien
caaaaggtgaacaatagtctttcca

SEQ ID NO: 4881675 - DNA, 25 bp, Homo sapien
ccaggcttaaactttcctgaatcaa

SEQ ID NO: 4881676 - DNA, 25 bp, Homo sapien
caattcccgcctctaatttcagcat

SEQ ID NO: 4881677 - DNA, 25 bp, Homo sapien
aactttcctgaatcaattcccgcct

SEQ ID NO: 4881678 - DNA, 25 bp, Homo sapien
tcaacccaggcttaaactttcctga

SEQ ID NO: 4881679 - DNA, 25 bp, Homo sapien
ctccatcctggaacataacttctgt

SEQ ID NO: 4881680 - DNA, 25 bp, Homo sapien
gtctccatcctggaacataacttct

SEQ ID NO: 4881681 - DNA, 25 bp, Homo sapien
tccatcctggaacataacttctgta

SEQ ID NO: 4881682 - DNA, 25 bp, Homo sapien
tctccatcctggaacataacttctg

SEQ ID NO: 4881683 - DNA, 25 bp, Homo sapien
aaggtgtgtcagatgcagaagagag

SEQ ID NO: 4881684 - DNA, 25 bp, Homo sapien
gagttgtcacttctctcaggagctt

SEQ ID NO: 4881685 - DNA, 25 bp, Homo sapien
agcttcagcaaggagatcttgatca

SEQ ID NO: 4881686 - DNA, 25 bp, Homo sapien
ttcagcaaggagatcttgatcagag

SEQ ID NO: 4881687 - DNA, 25 bp, Homo sapien
cattggctccataactcccaaggag

SEQ ID NO: 4881688 - DNA, 25 bp, Homo sapien
tctaatattggaatcagcatgagtg

SEQ ID NO: 4881689 - DNA, 25 bp, Homo sapien
cctctgactggctcatgcattgcag

SEQ ID NO: 4881690 - DNA, 25 bp, Homo sapien
tttccctcaaagaatcctccagagc

SEQ ID NO: 4881691 - DNA, 25 bp, Homo sapien
tcctcaccaagtgtttcttattcat

SEQ ID NO: 4881692 - DNA, 25 bp, Homo sapien
ctgggaaactgtccttacatttggc

SEQ ID NO: 4881693 - DNA, 25 bp, Homo sapien
tgcagttgctgtttcctcaccaagt

SEQ ID NO: 4881694 - DNA, 25 bp, Homo sapien
gtccttacatttggctcactgtgcc

SEQ ID NO: 4881695 - DNA, 25 bp, Homo sapien
ccaatgtctcatgggtttctccacc

SEQ ID NO: 4881696 - DNA, 25 bp, Homo sapien
tttccaatgtctcatgggtttctcc

SEQ ID NO: 4881697 - DNA, 25 bp, Homo sapien
tactgtgcagtttctcttgggttct

SEQ ID NO: 4881698 - DNA, 25 bp, Homo sapien
tggtgtactgtgcagtttctcttgg

SEQ ID NO: 4881699 - DNA, 25 bp, Homo sapien
ttaatctcgggagtcttggccaatc

SEQ ID NO: 4881700 - DNA, 25 bp, Homo sapien
taagtatggactgagaagaactcca

SEQ ID NO: 4881701 - DNA, 25 bp, Homo sapien
cctaatttaggagtgtacgcctgta

SEQ ID NO: 4881702 - DNA, 25 bp, Homo sapien
tcaaataaggcaaacccgagctata

SEQ ID NO: 4881703 - DNA, 25 bp, Homo sapien
tgctgactcattatcaagagaatca

SEQ ID NO: 4881704 - DNA, 25 bp, Homo sapien
taacagcgttaccaagtatgtgtca

SEQ ID NO: 4881705 - DNA, 25 bp, Homo sapien
cctggaagatgtcttaggtatgcac

SEQ ID NO: 4881706 - DNA, 25 bp, Homo sapien
tgcacaaaggcaaacgaagggtaac

SEQ ID NO: 4881707 - DNA, 25 bp, Homo sapien
caaagagggcggtttgtagctataa

SEQ ID NO: 4881708 - DNA, 25 bp, Homo sapien
gacaattgacaatactttagtgagg

SEQ ID NO: 4881709 - DNA, 25 bp, Homo sapien
caaccaagtgttatacctcaaggaa

SEQ ID NO: 4881710 - DNA, 25 bp, Homo sapien
aactcaatccaaagttagtacgagg

SEQ ID NO: 4881711 - DNA, 25 bp, Homo sapien
caagcatccttgaactactaacaga

SEQ ID NO: 4881712 - DNA, 25 bp, Homo sapien
tcgcgtaggactggctgaatcatat

SEQ ID NO: 4881713 - DNA, 25 bp, Homo sapien
caatgctgacagagatactttatac

SEQ ID NO: 4881714 - DNA, 25 bp, Homo sapien
tcagcaatttctagaccttgtgtga

SEQ ID NO: 4881715 - DNA, 25 bp, Homo sapien
tacaccatagtgtttcccatgcgtg

SEQ ID NO: 4881716 - DNA, 25 bp, Homo sapien
acaccatagtgtttcccatgcgtga

SEQ ID NO: 4881717 - DNA, 25 bp, Homo sapien
tgtgactatccgaaaagatgatcct

SEQ ID NO: 4881718 - DNA, 25 bp, Homo sapien
tgtttgagataacaactccatccga

SEQ ID NO: 4881719 - DNA, 25 bp, Homo sapien
tccatccgaaactctaatattccag

SEQ ID NO: 4881720 - DNA, 25 bp, Homo sapien
cattcaattatgtcaactgcctggc

SEQ ID NO: 4881721 - DNA, 25 bp, Homo sapien
tagcgccgactccagggcaatgatg

SEQ ID NO: 4881722 - DNA, 25 bp, Homo sapien
gccacagtagcacaagacagctgat

SEQ ID NO: 4881723 - DNA, 25 bp, Homo sapien
tttctggcagatgccgtagcgccga

SEQ ID NO: 4881724 - DNA, 25 bp, Homo sapien
gatggtggcatagtcttgacatcca

SEQ ID NO: 4881725 - DNA, 25 bp, Homo sapien
aaggatccagtgtgatattacccat

SEQ ID NO: 4881726 - DNA, 25 bp, Homo sapien
tagtgaatactactgagcactgatc

SEQ ID NO: 4881727 - DNA, 25 bp, Homo sapien
gattcacttccttggttcagacata

SEQ ID NO: 4881728 - DNA, 25 bp, Homo sapien
gctggtagggacatagggctttggt

SEQ ID NO: 4881729 - DNA, 25 bp, Homo sapien
ccttggaatgacacagattcacttc

SEQ ID NO: 4881730 - DNA, 25 bp, Homo sapien
agagcaggagagaggtaacacggta

SEQ ID NO: 4881731 - DNA, 25 bp, Homo sapien
gaacctgaggtgattccaggtgaca

SEQ ID NO: 4881732 - DNA, 25 bp, Homo sapien
ggctattcatgacaccggccctact

SEQ ID NO: 4881733 - DNA, 25 bp, Homo sapien
cggccctactgatgtcccttacgag

SEQ ID NO: 4881734 - DNA, 25 bp, Homo sapien
tggaaccttcttagtccctatatga

SEQ ID NO: 4881735 - DNA, 25 bp, Homo sapien
taacagttctagcaagagctgggca

SEQ ID NO: 4881736 - DNA, 25 bp, Homo sapien
gatgaatccagatctggcaagaagc

SEQ ID NO: 4881737 - DNA, 25 bp, Homo sapien
tattttcaagactgaggacaacctg

SEQ ID NO: 4881738 - DNA, 25 bp, Homo sapien
gccgtgatcctcaggatcacagagg

SEQ ID NO: 4881739 - DNA, 25 bp, Homo sapien
cagccgtgatcctcaggatcacaga

SEQ ID NO: 4881740 - DNA, 25 bp, Homo sapien
aacagccgtgatcctcaggatcaca

SEQ ID NO: 4881741 - DNA, 25 bp, Homo sapien
ctaacagccgtgatcctcaggatca

SEQ ID NO: 4881742 - DNA, 25 bp, Homo sapien
tgaggccaaaggctggcactcttcc

SEQ ID NO: 4881743 - DNA, 25 bp, Homo sapien
gctcctgaggccaaaggctggcact

SEQ ID NO: 4881744 - DNA, 25 bp, Homo sapien
aaaggctcctgaggccaaaggctgg

SEQ ID NO: 4881745 - DNA, 25 bp, Homo sapien
gaaaggctcctgaggccaaaggctg

SEQ ID NO: 4881746 - DNA, 25 bp, Homo sapien
cagttgacccatggattctcactgc

SEQ ID NO: 4881747 - DNA, 25 bp, Homo sapien
ccttgggcttttgtcctcattgtga

SEQ ID NO: 4881748 - DNA, 25 bp, Homo sapien
acagtcaccaatctttctcccttgg

SEQ ID NO: 4881749 - DNA, 25 bp, Homo sapien
tcacagttgacccatggattctcac

SEQ ID NO: 4881750 - DNA, 25 bp, Homo sapien
tgaaattacatatacagagaccacg

SEQ ID NO: 4881751 - DNA, 25 bp, Homo sapien
aaagcctctcgagaatggatcttaa

SEQ ID NO: 4881752 - DNA, 25 bp, Homo sapien
tacagagaccacgtagctttctaaa

SEQ ID NO: 4881753 - DNA, 25 bp, Homo sapien
gctttctaaagcctctcgagaatgg

SEQ ID NO: 4881754 - DNA, 25 bp, Homo sapien
tccatctgagttatgtgtagaccaa

SEQ ID NO: 4881755 - DNA, 25 bp, Homo sapien
tctgtatcaacaaggaaactcctca

SEQ ID NO: 4881756 - DNA, 25 bp, Homo sapien
gcagtttacgcctagtcctcttccg

SEQ ID NO: 4881757 - DNA, 25 bp, Homo sapien
ggcacaatctgacaactactatcga

SEQ ID NO: 4881758 - DNA, 25 bp, Homo sapien
tggttttgggaatcattcaacggca

SEQ ID NO: 4881759 - DNA, 25 bp, Homo sapien
gggaatcattcaacggcattccatc

SEQ ID NO: 4881760 - DNA, 25 bp, Homo sapien
taccatgagtactgcgaagttggtt

SEQ ID NO: 4881761 - DNA, 25 bp, Homo sapien
ttttgggaatcattcaacggcattc

SEQ ID NO: 4881762 - DNA, 25 bp, Homo sapien
gaccttattgttcgcataattacat

SEQ ID NO: 4881763 - DNA, 25 bp, Homo sapien
gatttcaaaggacttagcttgtggg

SEQ ID NO: 4881764 - DNA, 25 bp, Homo sapien
gtaattgcccttattgctgtattga

SEQ ID NO: 4881765 - DNA, 25 bp, Homo sapien
ctgtattgaccttattgttcgcata

SEQ ID NO: 4881766 - DNA, 25 bp, Homo sapien
tcaatacctagggctaaacacaagg

SEQ ID NO: 4881767 - DNA, 25 bp, Homo sapien
gcttttcaatacctagggctaaaca

SEQ ID NO: 4881768 - DNA, 25 bp, Homo sapien
tttcaatacctagggctaaacacaa

SEQ ID NO: 4881769 - DNA, 25 bp, Homo sapien
tgcttttcaatacctagggctaaac

SEQ ID NO: 4881770 - DNA, 25 bp, Homo sapien
atatcccctacattatgttcctaat

SEQ ID NO: 4881771 - DNA, 25 bp, Homo sapien
aatatcccctacattatgttcctaa

SEQ ID NO: 4881772 - DNA, 25 bp, Homo sapien
tatcccctacattatgttcctaatg

SEQ ID NO: 4881773 - DNA, 25 bp, Homo sapien
tagcaagtccccagtatgtaaaggc

SEQ ID NO: 4881774 - DNA, 25 bp, Homo sapien
tatgtcaaggaatatgggttgcctc

SEQ ID NO: 4881775 - DNA, 25 bp, Homo sapien
catatggatccctgaaacctgtaaa

SEQ ID NO: 4881776 - DNA, 25 bp, Homo sapien
ccactgagaactatatgggacttct

SEQ ID NO: 4881777 - DNA, 25 bp, Homo sapien
atgcacaaatagcaagtacccatgc

SEQ ID NO: 4881778 - DNA, 25 bp, Homo sapien
gcacatgtcctaagttgcacatgca

SEQ ID NO: 4881779 - DNA, 25 bp, Homo sapien
tgtcctaagttgcacatgcacaaat

SEQ ID NO: 4881780 - DNA, 25 bp, Homo sapien
agcaagtacccatgcattctaagga

SEQ ID NO: 4881781 - DNA, 25 bp, Homo sapien
caaagtctaaccttacaaaagcagt

SEQ ID NO: 4881782 - DNA, 25 bp, Homo sapien
tatcaattctacatcaggtgtcgag

SEQ ID NO: 4881783 - DNA, 25 bp, Homo sapien
gtcacctcagacaccctcttttaat

SEQ ID NO: 4881784 - DNA, 25 bp, Homo sapien
gaagagggatctccaatgttctctg

SEQ ID NO: 4881785 - DNA, 25 bp, Homo sapien
gaaacctgttgaattgcgaggagca

SEQ ID NO: 4881786 - DNA, 25 bp, Homo sapien
ttgcttccgtaaaaaggctgtaggc

SEQ ID NO: 4881787 - DNA, 25 bp, Homo sapien
tatgggtaccctgacttcgtgaaaa

SEQ ID NO: 4881788 - DNA, 25 bp, Homo sapien
taggctacaccttgcagagaaagtg

SEQ ID NO: 4881789 - DNA, 25 bp, Homo sapien
ggtgctttgccataaacggtcttca

SEQ ID NO: 4881790 - DNA, 25 bp, Homo sapien
aactagggctgcatatcttgccgga

SEQ ID NO: 4881791 - DNA, 25 bp, Homo sapien
tcctagtagaagaaccgaagtcaga

SEQ ID NO: 4881792 - DNA, 25 bp, Homo sapien
gacatgcaccattgacagtaaagga

SEQ ID NO: 4881793 - DNA, 25 bp, Homo sapien
agagaaaatgaaaaccatgataaat

SEQ ID NO: 4881794 - DNA, 25 bp, Homo sapien
ctgttcagagaaaatgaaaaccatg

SEQ ID NO: 4881795 - DNA, 25 bp, Homo sapien
gttcagagaaaatgaaaaccatgat

SEQ ID NO: 4881796 - DNA, 25 bp, Homo sapien
tcagagaaaatgaaaaccatgataa

SEQ ID NO: 4881797 - DNA, 25 bp, Homo sapien
gaggacagtcatttgtcacttgttg

SEQ ID NO: 4881798 - DNA, 25 bp, Homo sapien
tctaaatacttgttgggaggacagt

SEQ ID NO: 4881799 - DNA, 25 bp, Homo sapien
taaatacttgttgggaggacagtca

SEQ ID NO: 4881800 - DNA, 25 bp, Homo sapien
tttgtcacttgttggtaatgcacca

SEQ ID NO: 4881801 - DNA, 25 bp, Homo sapien
tcagtccatctagttgcagtcaaag

SEQ ID NO: 4881802 - DNA, 25 bp, Homo sapien
actgggtctattttgctgacggaga

SEQ ID NO: 4881803 - DNA, 25 bp, Homo sapien
tttcctagaaaggtgtgaggcatct

SEQ ID NO: 4881804 - DNA, 25 bp, Homo sapien
tacatgaggctaaacagaactctgc

SEQ ID NO: 4881805 - DNA, 25 bp, Homo sapien
tccatcttctccaggctaatctcaa

SEQ ID NO: 4881806 - DNA, 25 bp, Homo sapien
gacctcttggggtcaaacgatactc

SEQ ID NO: 4881807 - DNA, 25 bp, Homo sapien
tccttggctcaagtatctgtccact

SEQ ID NO: 4881808 - DNA, 25 bp, Homo sapien
tcttggggtcaaacgatactcccac

SEQ ID NO: 4881809 - DNA, 25 bp, Homo sapien
aagaaatccagagatgccccactga

SEQ ID NO: 4881810 - DNA, 25 bp, Homo sapien
catggtcataagaaatccagagatg

SEQ ID NO: 4881811 - DNA, 25 bp, Homo sapien
tacccgcgatacacacttgctatgg

SEQ ID NO: 4881812 - DNA, 25 bp, Homo sapien
cttgctatgggttcattactccctt

SEQ ID NO: 4881813 - DNA, 25 bp, Homo sapien
ccttgctccactgtacacgccaaag

SEQ ID NO: 4881814 - DNA, 25 bp, Homo sapien
acacgccaaaggagagctgacgtac

SEQ ID NO: 4881815 - DNA, 25 bp, Homo sapien
tacacgccaaaggagagctgacgta

SEQ ID NO: 4881816 - DNA, 25 bp, Homo sapien
tgtacacgccaaaggagagctgacg

SEQ ID NO: 4881817 - DNA, 25 bp, Homo sapien
ttcactgccatttggtcgagttact

SEQ ID NO: 4881818 - DNA, 25 bp, Homo sapien
tcactgccatttggtcgagttactc

SEQ ID NO: 4881819 - DNA, 25 bp, Homo sapien
cactgccatttggtcgagttactcc

SEQ ID NO: 4881820 - DNA, 25 bp, Homo sapien
tgattctcctggtccaagcatcctg

SEQ ID NO: 4881821 - DNA, 25 bp, Homo sapien
tctcctggtccaagcatcctgaagc

SEQ ID NO: 4881822 - DNA, 25 bp, Homo sapien
atgtaattcatgttctttagaggat

SEQ ID NO: 4881823 - DNA, 25 bp, Homo sapien
tgtaattcatgttctttagaggatg

SEQ ID NO: 4881824 - DNA, 25 bp, Homo sapien
cgtctgaagtcagccggagacaatc

SEQ ID NO: 4881825 - DNA, 25 bp, Homo sapien
tgttttcacgaagttgccatggtaa

SEQ ID NO: 4881826 - DNA, 25 bp, Homo sapien
cagaaagggacttgcagtgtcctcc

SEQ ID NO: 4881827 - DNA, 25 bp, Homo sapien
ccatggtaatgttgcgtctgaagtc

SEQ ID NO: 4881828 - DNA, 25 bp, Homo sapien
tgggtatgatttcgtggttcggcaa

SEQ ID NO: 4881829 - DNA, 25 bp, Homo sapien
tatgatttcgtggttcggcaatatc

SEQ ID NO: 4881830 - DNA, 25 bp, Homo sapien
gatttcgtggttcggcaatatcagc

SEQ ID NO: 4881831 - DNA, 25 bp, Homo sapien
caaatgacgtgctggtgggtatgat

SEQ ID NO: 4881832 - DNA, 25 bp, Homo sapien
ctcattatgtgctcctgagatcaga

SEQ ID NO: 4881833 - DNA, 25 bp, Homo sapien
agtgtctcattatgtgctcctgaga

SEQ ID NO: 4881834 - DNA, 25 bp, Homo sapien
cctgagatcagaaatacaagagcca

SEQ ID NO: 4881835 - DNA, 25 bp, Homo sapien
tccaccacttcagtgtctcattatg

SEQ ID NO: 4881836 - DNA, 25 bp, Homo sapien
agttgtgaggaatgaaggtattttc

SEQ ID NO: 4881837 - DNA, 25 bp, Homo sapien
ttctgttcacttgtgtgcaggtagg

SEQ ID NO: 4881838 - DNA, 25 bp, Homo sapien
gttgtgaggaatgaaggtattttca

SEQ ID NO: 4881839 - DNA, 25 bp, Homo sapien
gaagttgtgaggaatgaaggtattt

SEQ ID NO: 4881840 - DNA, 25 bp, Homo sapien
gattgcaattgtatggccaacttca

SEQ ID NO: 4881841 - DNA, 25 bp, Homo sapien
gccaacttcatgtaaccctgtgctg

SEQ ID NO: 4881842 - DNA, 25 bp, Homo sapien
cagcatgattgcaattgtatggcca

SEQ ID NO: 4881843 - DNA, 25 bp, Homo sapien
caattgtatggccaacttcatgtaa

SEQ ID NO: 4881844 - DNA, 25 bp, Homo sapien
aatttccaagaataggcgcccactg

SEQ ID NO: 4881845 - DNA, 25 bp, Homo sapien
ccaatatgacaactattatgtgtag

SEQ ID NO: 4881846 - DNA, 25 bp, Homo sapien
tatcgaggtctgtactgaatggtcc

SEQ ID NO: 4881847 - DNA, 25 bp, Homo sapien
caccattatgtatcgaggtctgtac

SEQ ID NO: 4881848 - DNA, 25 bp, Homo sapien
tcttctcactgccattgaaaagctg

SEQ ID NO: 4881849 - DNA, 25 bp, Homo sapien
cagtgaaaagtcagtatggatttct

SEQ ID NO: 4881850 - DNA, 25 bp, Homo sapien
ctcactgccattgaaaagctgctgc

SEQ ID NO: 4881851 - DNA, 25 bp, Homo sapien
gtcagtatggatttctgctccagaa

SEQ ID NO: 4881852 - DNA, 25 bp, Homo sapien
gagagtccacctacttccaaataaa

SEQ ID NO: 4881853 - DNA, 25 bp, Homo sapien
ttgagagtccacctacttccaaata

SEQ ID NO: 4881854 - DNA, 25 bp, Homo sapien
ctttgagagtccacctacttccaaa

SEQ ID NO: 4881855 - DNA, 25 bp, Homo sapien
tgagagtccacctacttccaaataa

SEQ ID NO: 4881856 - DNA, 25 bp, Homo sapien
ctgacaaagtgttttgatgactgct

SEQ ID NO: 4881857 - DNA, 25 bp, Homo sapien
tgacaaagtgttttgatgactgctg

SEQ ID NO: 4881858 - DNA, 25 bp, Homo sapien
aaagtgttttgatgactgctgtcat

SEQ ID NO: 4881859 - DNA, 25 bp, Homo sapien
acaaagtgttttgatgactgctgtc

SEQ ID NO: 4881860 - DNA, 25 bp, Homo sapien
tagccacagcccctggccttctttc

SEQ ID NO: 4881861 - DNA, 25 bp, Homo sapien
ggcgttagccacagcccctggcctt

SEQ ID NO: 4881862 - DNA, 25 bp, Homo sapien
gttagccacagcccctggccttctt

SEQ ID NO: 4881863 - DNA, 25 bp, Homo sapien
gcgttagccacagcccctggccttc

SEQ ID NO: 4881864 - DNA, 25 bp, Homo sapien
gagagcatacccctgtgtcctatca

SEQ ID NO: 4881865 - DNA, 25 bp, Homo sapien
gagttaaatatcagtgaccatggcc

SEQ ID NO: 4881866 - DNA, 25 bp, Homo sapien
gtgtttcattacagggacccagcca

SEQ ID NO: 4881867 - DNA, 25 bp, Homo sapien
cacgcattagtggtttcaggcttga

SEQ ID NO: 4881868 - DNA, 25 bp, Homo sapien
cctttcctgggttattgttcaatat

SEQ ID NO: 4881869 - DNA, 25 bp, Homo sapien
taataagatcattaacatgtttctt

SEQ ID NO: 4881870 - DNA, 25 bp, Homo sapien
atttcaggcgtttataggcttggcc

SEQ ID NO: 4881871 - DNA, 25 bp, Homo sapien
caggcgtttataggcttggcctgaa

SEQ ID NO: 4881872 - DNA, 25 bp, Homo sapien
gaatttcaggcgtttataggcttgg

SEQ ID NO: 4881873 - DNA, 25 bp, Homo sapien
cgtttataggcttggcctgaataac

SEQ ID NO: 4881874 - DNA, 25 bp, Homo sapien
ctagaactctgaaattttcagaagt

SEQ ID NO: 4881875 - DNA, 25 bp, Homo sapien
agaactctgaaattttcagaagtgt

SEQ ID NO: 4881876 - DNA, 25 bp, Homo sapien
tagaactctgaaattttcagaagtg

SEQ ID NO: 4881877 - DNA, 25 bp, Homo sapien
gtccagcatgaaacaccagtttatg

SEQ ID NO: 4881878 - DNA, 25 bp, Homo sapien
gagtccagcatgaaacaccagttta

SEQ ID NO: 4881879 - DNA, 25 bp, Homo sapien
ccagcatgaaacaccagtttatgtc

SEQ ID NO: 4881880 - DNA, 25 bp, Homo sapien
tgagtccagcatgaaacaccagttt

SEQ ID NO: 4881881 - DNA, 25 bp, Homo sapien
cgtaaccagcatttatagatctccc

SEQ ID NO: 4881882 - DNA, 25 bp, Homo sapien
gtgaagcagtgtaataatccaagtc

SEQ ID NO: 4881883 - DNA, 25 bp, Homo sapien
tagtgcttccgatggcaagatacct

SEQ ID NO: 4881884 - DNA, 25 bp, Homo sapien
tcaccatgaatggaacgtaaccagc

SEQ ID NO: 4881885 - DNA, 25 bp, Homo sapien
atgtttcccaaagctgatgtgcaag

SEQ ID NO: 4881886 - DNA, 25 bp, Homo sapien
cccaaagctgatgtgcaagatggct

SEQ ID NO: 4881887 - DNA, 25 bp, Homo sapien
tgatgtgcaagatggctttataggc

SEQ ID NO: 4881888 - DNA, 25 bp, Homo sapien
gatggctttataggcttcatcaagc

SEQ ID NO: 4881889 - DNA, 25 bp, Homo sapien
ttagcatctgactgacataagcttg

SEQ ID NO: 4881890 - DNA, 25 bp, Homo sapien
atgtgggcccgctttcctctccagg

SEQ ID NO: 4881891 - DNA, 25 bp, Homo sapien
actgacataagcttggatgtgggcc

SEQ ID NO: 4881892 - DNA, 25 bp, Homo sapien
taagcttggatgtgggcccgctttc

SEQ ID NO: 4881893 - DNA, 25 bp, Homo sapien
aggtgtctagtatctcattgtccag

SEQ ID NO: 4881894 - DNA, 25 bp, Homo sapien
cactcatgatgggtaaggtgtctag

SEQ ID NO: 4881895 - DNA, 25 bp, Homo sapien
aattccttgatctatgtgggaggcc

SEQ ID NO: 4881896 - DNA, 25 bp, Homo sapien
aatagcaggtggtcgcttaggcact

SEQ ID NO: 4881897 - DNA, 25 bp, Homo sapien
gaattttcaccacaagtccatgcaa

SEQ ID NO: 4881898 - DNA, 25 bp, Homo sapien
caagtccatgcaagcatgactttgc

SEQ ID NO: 4881899 - DNA, 25 bp, Homo sapien
catgcaagcatgactttgctccttt

SEQ ID NO: 4881900 - DNA, 25 bp, Homo sapien
tttggagaattttcaccacaagtcc

SEQ ID NO: 4881901 - DNA, 25 bp, Homo sapien
tagcatgtgtgcttaagggtatata

SEQ ID NO: 4881902 - DNA, 25 bp, Homo sapien
aattctgatgagagctattgatagc

SEQ ID NO: 4881903 - DNA, 25 bp, Homo sapien
gaatattttgtggattgctgcatca

SEQ ID NO: 4881904 - DNA, 25 bp, Homo sapien
tgtgtgtatgtaagtcttcacaggc

SEQ ID NO: 4881905 - DNA, 25 bp, Homo sapien
agtgatatgagggctaagccagacg

SEQ ID NO: 4881906 - DNA, 25 bp, Homo sapien
tagtgatatgagggctaagccagac

SEQ ID NO: 4881907 - DNA, 25 bp, Homo sapien
tttagtgatatgagggctaagccag

SEQ ID NO: 4881908 - DNA, 25 bp, Homo sapien
ctttagtgatatgagggctaagcca

SEQ ID NO: 4881909 - DNA, 25 bp, Homo sapien
tcttcaggtcctagaccagattcga

SEQ ID NO: 4881910 - DNA, 25 bp, Homo sapien
tggagaatttagacccacctctggg

SEQ ID NO: 4881911 - DNA, 25 bp, Homo sapien
agtagaggacatatttgagtagatg

SEQ ID NO: 4881912 - DNA, 25 bp, Homo sapien
ggtgctcagaggaatcccacggata

SEQ ID NO: 4881913 - DNA, 25 bp, Homo sapien
ggttgtcctcccaaccacttatcaa

SEQ ID NO: 4881914 - DNA, 25 bp, Homo sapien
caggctcttaaagaatacagatgtt

SEQ ID NO: 4881915 - DNA, 25 bp, Homo sapien
tgtctagagtcaggctcttaaagaa

SEQ ID NO: 4881916 - DNA, 25 bp, Homo sapien
tttttctgactgctggttgtcctcc

SEQ ID NO: 4881917 - DNA, 25 bp, Homo sapien
acataatttccctctgggtgttcct

SEQ ID NO: 4881918 - DNA, 25 bp, Homo sapien
cagagatgatatagctatggatggc

SEQ ID NO: 4881919 - DNA, 25 bp, Homo sapien
gaaaaaatgcaacagagttcacatt

SEQ ID NO: 4881920 - DNA, 25 bp, Homo sapien
gacctttccaacaagtaatatttgc

SEQ ID NO: 4881921 - DNA, 25 bp, Homo sapien
tcagctcaggtccatcttggtctcc

SEQ ID NO: 4881922 - DNA, 25 bp, Homo sapien
gcacaaaatggcagcaaaatcggct

SEQ ID NO: 4881923 - DNA, 25 bp, Homo sapien
cagctttccatgaaggcgaggccac

SEQ ID NO: 4881924 - DNA, 25 bp, Homo sapien
gctttccatgaaggcgaggccactg

SEQ ID NO: 4881925 - DNA, 25 bp, Homo sapien
caaaatcggctcctgaaaggtactg

SEQ ID NO: 4881926 - DNA, 25 bp, Homo sapien
caagcccagtgacgaagtgattcca

SEQ ID NO: 4881927 - DNA, 25 bp, Homo sapien
aaattgcccttgagttacctctcga

SEQ ID NO: 4881928 - DNA, 25 bp, Homo sapien
ccggaggctctttgtgggatgtcac

SEQ ID NO: 4881929 - DNA, 25 bp, Homo sapien
tgaccttggcatagtcaagcccagt

SEQ ID NO: 4881930 - DNA, 25 bp, Homo sapien
gaagcccaggtctcatgattgttgc

SEQ ID NO: 4881931 - DNA, 25 bp, Homo sapien
tttgccaaggtcactcatcgttagt

SEQ ID NO: 4881932 - DNA, 25 bp, Homo sapien
caccaggtgtaattgggctcttcac

SEQ ID NO: 4881933 - DNA, 25 bp, Homo sapien
taacttgggagtggctctaggtcag

SEQ ID NO: 4881934 - DNA, 25 bp, Homo sapien
gcggttttgtgattggcgcagcaga

SEQ ID NO: 4881935 - DNA, 25 bp, Homo sapien
tgtgattggcgcagcagagcaagac

SEQ ID NO: 4881936 - DNA, 25 bp, Homo sapien
gtggcggttttgtgattggcgcagc

SEQ ID NO: 4881937 - DNA, 25 bp, Homo sapien
ttttgtgattggcgcagcagagcaa

SEQ ID NO: 4881938 - DNA, 25 bp, Homo sapien
gatggtgcatggcatttctgggtga

SEQ ID NO: 4881939 - DNA, 25 bp, Homo sapien
gcgctatgattggtgcacagccctg

SEQ ID NO: 4881940 - DNA, 25 bp, Homo sapien
catggcatttctgggtgaggcgcta

SEQ ID NO: 4881941 - DNA, 25 bp, Homo sapien
cctgctgggaaaaactccgggactg

SEQ ID NO: 4881942 - DNA, 25 bp, Homo sapien
tggccctggcatggtagctgctgag

SEQ ID NO: 4881943 - DNA, 25 bp, Homo sapien
catggcccggttgggagaaacctca

SEQ ID NO: 4881944 - DNA, 25 bp, Homo sapien
ccctgtaattggtgcatggcccggt

SEQ ID NO: 4881945 - DNA, 25 bp, Homo sapien
aaggtgtgtagtcaggactggtcca

SEQ ID NO: 4881946 - DNA, 25 bp, Homo sapien
gtagcgtgtacttccgagaataaag

SEQ ID NO: 4881947 - DNA, 25 bp, Homo sapien
agtagcgtgtacttccgagaataaa

SEQ ID NO: 4881948 - DNA, 25 bp, Homo sapien
ccatgctttccagtgacgaatttgg

SEQ ID NO: 4881949 - DNA, 25 bp, Homo sapien
tggacaaccgtctactcttcagtgc

SEQ ID NO: 4881950 - DNA, 25 bp, Homo sapien
ggcgctaatgctgaatactccatgc

SEQ ID NO: 4881951 - DNA, 25 bp, Homo sapien
gacagaaacttccacggaggcgcta

SEQ ID NO: 4881952 - DNA, 25 bp, Homo sapien
gacacggtggaatgtccccgcatct

SEQ ID NO: 4881953 - DNA, 25 bp, Homo sapien
gcttgttgtctaagccgtacagttg

SEQ ID NO: 4881954 - DNA, 25 bp, Homo sapien
catttcctttaactcaggcaagtcc

SEQ ID NO: 4881955 - DNA, 25 bp, Homo sapien
cgtacagttggaacagcgtcaggat

SEQ ID NO: 4881956 - DNA, 25 bp, Homo sapien
ggaatgaactcttcaagtccgagat

SEQ ID NO: 4881957 - DNA, 25 bp, Homo sapien
gaaatcttcagggagcattaagtca

SEQ ID NO: 4881958 - DNA, 25 bp, Homo sapien
ggattttaactcagcaagatggtgc

SEQ ID NO: 4881959 - DNA, 25 bp, Homo sapien
attacgtaacagatgcagactttcc

SEQ ID NO: 4881960 - DNA, 25 bp, Homo sapien
tattgtctctcttcacgtctccatg

SEQ ID NO: 4881961 - DNA, 25 bp, Homo sapien
cattagagtcatgagtgttccatac

SEQ ID NO: 4881962 - DNA, 25 bp, Homo sapien
gagggatgctattcactttgctatg

SEQ ID NO: 4881963 - DNA, 25 bp, Homo sapien
catggactccttgatttgacggtaa

SEQ ID NO: 4881964 - DNA, 25 bp, Homo sapien
tgtctgcattttcttgttgctgcaa

SEQ ID NO: 4881965 - DNA, 25 bp, Homo sapien
cttttgtctgcattttcttgttgct

SEQ ID NO: 4881966 - DNA, 25 bp, Homo sapien
gtctgcattttcttgttgctgcaac

SEQ ID NO: 4881967 - DNA, 25 bp, Homo sapien
tttgtctgcattttcttgttgctgc

SEQ ID NO: 4881968 - DNA, 25 bp, Homo sapien
ccatgaccgatgtacagagatattg

SEQ ID NO: 4881969 - DNA, 25 bp, Homo sapien
cgatgtacagagatattgaatgtca

SEQ ID NO: 4881970 - DNA, 25 bp, Homo sapien
caccatgaccgatgtacagagatat

SEQ ID NO: 4881971 - DNA, 25 bp, Homo sapien
tgaccgatgtacagagatattgaat

SEQ ID NO: 4881972 - DNA, 25 bp, Homo sapien
agagtagtatttggacagcactgtg

SEQ ID NO: 4881973 - DNA, 25 bp, Homo sapien
agagagtagtatttggacagcactg

SEQ ID NO: 4881974 - DNA, 25 bp, Homo sapien
tagtatttggacagcactgtggatg

SEQ ID NO: 4881975 - DNA, 25 bp, Homo sapien
agtatttggacagcactgtggatga

SEQ ID NO: 4881976 - DNA, 25 bp, Homo sapien
tcccagggccggagtctgcttgtct

SEQ ID NO: 4881977 - DNA, 25 bp, Homo sapien
gattccgcgctgattttcaccttgg

SEQ ID NO: 4881978 - DNA, 25 bp, Homo sapien
gctgacaatttgcaggaactcttct

SEQ ID NO: 4881979 - DNA, 25 bp, Homo sapien
aataccatccacaacctttctatgg

SEQ ID NO: 4881980 - DNA, 25 bp, Homo sapien
gattatttaggaggttactggccag

SEQ ID NO: 4881981 - DNA, 25 bp, Homo sapien
gaagattatttaggaggttactggc

SEQ ID NO: 4881982 - DNA, 25 bp, Homo sapien
ggagcaggaggcatgcatgaagtgt

SEQ ID NO: 4881983 - DNA, 25 bp, Homo sapien
ggaggcatgcatgaagtgtagggca

SEQ ID NO: 4881984 - DNA, 25 bp, Homo sapien
tcggaaggaacgtgactgataagat

SEQ ID NO: 4881985 - DNA, 25 bp, Homo sapien
agaatcactgaagggtgatcggaag

SEQ ID NO: 4881986 - DNA, 25 bp, Homo sapien
ctgataagatttgcgctttgtgatc

SEQ ID NO: 4881987 - DNA, 25 bp, Homo sapien
tgatcggaaggaacgtgactgataa

SEQ ID NO: 4881988 - DNA, 25 bp, Homo sapien
catatgaacagatagctatacagcc

SEQ ID NO: 4881989 - DNA, 25 bp, Homo sapien
tgaatgtgtccgatatgaaaggcag

SEQ ID NO: 4881990 - DNA, 25 bp, Homo sapien
gattctacaggataccttgtggtct

SEQ ID NO: 4881991 - DNA, 25 bp, Homo sapien
tgatgtgaacagagagatacaatgc

SEQ ID NO: 4881992 - DNA, 25 bp, Homo sapien
ccagtacatgtaggacacataaatc

SEQ ID NO: 4881993 - DNA, 25 bp, Homo sapien
tcatgttcacatgtaagcacagaat

SEQ ID NO: 4881994 - DNA, 25 bp, Homo sapien
cacgcctagagaacctgacataatt

SEQ ID NO: 4881995 - DNA, 25 bp, Homo sapien
gacctgtatgacattgtcaagcaga

SEQ ID NO: 4881996 - DNA, 25 bp, Homo sapien
gtgtcattttccagcttaattttaa

SEQ ID NO: 4881997 - DNA, 25 bp, Homo sapien
ttcctgtgtcattttccagcttaat

SEQ ID NO: 4881998 - DNA, 25 bp, Homo sapien
cctgtgtcattttccagcttaattt

SEQ ID NO: 4881999 - DNA, 25 bp, Homo sapien
ttatccatttcctgtgtcattttcc

SEQ ID NO: 4882000 - DNA, 25 bp, Homo sapien
tcagattggctgcctgcaattagat

SEQ ID NO: 4882001 - DNA, 25 bp, Homo sapien
atgtgaggaattcagattggctgcc

SEQ ID NO: 4882002 - DNA, 25 bp, Homo sapien
gattggctgcctgcaattagatgaa

SEQ ID NO: 4882003 - DNA, 25 bp, Homo sapien
cagattggctgcctgcaattagatg

SEQ ID NO: 4882004 - DNA, 25 bp, Homo sapien
cctattaaaagagatatctagtttg

SEQ ID NO: 4882005 - DNA, 25 bp, Homo sapien
aatggaaacatattcagctcaccta

SEQ ID NO: 4882006 - DNA, 25 bp, Homo sapien
acatattcagctcacctattaaaag

SEQ ID NO: 4882007 - DNA, 25 bp, Homo sapien
gagatatctagtttgacttttacat

SEQ ID NO: 4882008 - DNA, 25 bp, Homo sapien
taagacctggttctcaactgaaagc

SEQ ID NO: 4882009 - DNA, 25 bp, Homo sapien
tgacttcacaagatgctctcagagg

SEQ ID NO: 4882010 - DNA, 25 bp, Homo sapien
gaaccaagatgcctgttggctcggt

SEQ ID NO: 4882011 - DNA, 25 bp, Homo sapien
tctgaaaaatcactgtaagacctgg

SEQ ID NO: 4882012 - DNA, 25 bp, Homo sapien
cttttgtggtagtgacgtgtgacat

SEQ ID NO: 4882013 - DNA, 25 bp, Homo sapien
ttgtggtagtgacgtgtgacatcat

SEQ ID NO: 4882014 - DNA, 25 bp, Homo sapien
tttgtggtagtgacgtgtgacatca

SEQ ID NO: 4882015 - DNA, 25 bp, Homo sapien
ttttgtggtagtgacgtgtgacatc

SEQ ID NO: 4882016 - DNA, 25 bp, Homo sapien
tgcttaagttcttgtaagtcctgtt

SEQ ID NO: 4882017 - DNA, 25 bp, Homo sapien
ggtgctcaatctgatcagaggctga

SEQ ID NO: 4882018 - DNA, 25 bp, Homo sapien
tacaactgcatttggcctggcaaca

SEQ ID NO: 4882019 - DNA, 25 bp, Homo sapien
gcttctttaagcaggtactagatca

SEQ ID NO: 4882020 - DNA, 25 bp, Homo sapien
tcgcagacttcggtggtgatacctc

SEQ ID NO: 4882021 - DNA, 25 bp, Homo sapien
cgtcggaatgagctccaggaaagtg

SEQ ID NO: 4882022 - DNA, 25 bp, Homo sapien
cgcttgcgccgcgtcggaatgagct

SEQ ID NO: 4882023 - DNA, 25 bp, Homo sapien
tgcgccgcgtcggaatgagctccag

SEQ ID NO: 4882024 - DNA, 25 bp, Homo sapien
tgtagccccgcttgcgccgcgtcgg

SEQ ID NO: 4882025 - DNA, 25 bp, Homo sapien
ccgcagcccggctggtttccgcgct

SEQ ID NO: 4882026 - DNA, 25 bp, Homo sapien
cccggtcggttgagcaagtgaaagc

SEQ ID NO: 4882027 - DNA, 25 bp, Homo sapien
agtattcgccatccgccagagcctc

SEQ ID NO: 4882028 - DNA, 25 bp, Homo sapien
ctggtttccgcgctcgcgtcgccat

SEQ ID NO: 4882029 - DNA, 25 bp, Homo sapien
atgttttctttctcagggtcttctt

SEQ ID NO: 4882030 - DNA, 25 bp, Homo sapien
atcttctttctcaatgttttctttc

SEQ ID NO: 4882031 - DNA, 25 bp, Homo sapien
atcatcttctttctcaatgttttct

SEQ ID NO: 4882032 - DNA, 25 bp, Homo sapien
tctcaatgttttctttctcagggtc

SEQ ID NO: 4882033 - DNA, 25 bp, Homo sapien
gccattggttttaggtgattctatc

SEQ ID NO: 4882034 - DNA, 25 bp, Homo sapien
ctatgttcgcaagttcctgatctac

SEQ ID NO: 4882035 - DNA, 25 bp, Homo sapien
tatccacgtagggtctatgttcgca

SEQ ID NO: 4882036 - DNA, 25 bp, Homo sapien
taggtgattctatccacgtagggtc

SEQ ID NO: 4882037 - DNA, 25 bp, Homo sapien
tttgggcggtcttcttcattatcct

SEQ ID NO: 4882038 - DNA, 25 bp, Homo sapien
tatttgggcggtcttcttcattatc

SEQ ID NO: 4882039 - DNA, 25 bp, Homo sapien
gggcggtcttcttcattatcctctt

SEQ ID NO: 4882040 - DNA, 25 bp, Homo sapien
agtatttgggcggtcttcttcatta

SEQ ID NO: 4882041 - DNA, 25 bp, Homo sapien
tcctgcttctgtcagtaagtggtga

SEQ ID NO: 4882042 - DNA, 25 bp, Homo sapien
ggattcatcaacaagtcagcctccc

SEQ ID NO: 4882043 - DNA, 25 bp, Homo sapien
cgtcctgcttctgtcagtaagtggt

SEQ ID NO: 4882044 - DNA, 25 bp, Homo sapien
attcatcaacaagtcagcctcccgg

SEQ ID NO: 4882045 - DNA, 25 bp, Homo sapien
atggaacggtattgactcatctgga

SEQ ID NO: 4882046 - DNA, 25 bp, Homo sapien
tatggaacggtattgactcatctgg

SEQ ID NO: 4882047 - DNA, 25 bp, Homo sapien
ctatggaacggtattgactcatctg

SEQ ID NO: 4882048 - DNA, 25 bp, Homo sapien
tggaacggtattgactcatctggat

SEQ ID NO: 4882049 - DNA, 25 bp, Homo sapien
ctccagatgtccgcaggggtgctgt

SEQ ID NO: 4882050 - DNA, 25 bp, Homo sapien
cagcagttcaatgatcaatgctatg

SEQ ID NO: 4882051 - DNA, 25 bp, Homo sapien
cagttcaatgatcaatgctatgtga

SEQ ID NO: 4882052 - DNA, 25 bp, Homo sapien
tccagatgtccgcaggggtgctgta

SEQ ID NO: 4882053 - DNA, 25 bp, Homo sapien
gcttggtgatgtcgcagttctcctt

SEQ ID NO: 4882054 - DNA, 25 bp, Homo sapien
cacaagtacatcaaaagggcaccag

SEQ ID NO: 4882055 - DNA, 25 bp, Homo sapien
tctggtgaaaaactcctcgaaatat

SEQ ID NO: 4882056 - DNA, 25 bp, Homo sapien
atatttccccaacatagcgtatttt

SEQ ID NO: 4882057 - DNA, 25 bp, Homo sapien
cttatattaaccagggcattccaga

SEQ ID NO: 4882058 - DNA, 25 bp, Homo sapien
gagggacagacccaatacaatatat

SEQ ID NO: 4882059 - DNA, 25 bp, Homo sapien
gcctggatgtgttaatagcttgagt

SEQ ID NO: 4882060 - DNA, 25 bp, Homo sapien
cccagtatgatctttgttgtgctaa

SEQ ID NO: 4882061 - DNA, 25 bp, Homo sapien
tatttaacactatgatggaagcaga

SEQ ID NO: 4882062 - DNA, 25 bp, Homo sapien
gaatctattgtatctcctatgtcac

SEQ ID NO: 4882063 - DNA, 25 bp, Homo sapien
taaaatgaattaaggcagccttagg

SEQ ID NO: 4882064 - DNA, 25 bp, Homo sapien
ttctcacatcagttaataagacgac

SEQ ID NO: 4882065 - DNA, 25 bp, Homo sapien
aaagccccagaactatattaacatg

SEQ ID NO: 4882066 - DNA, 25 bp, Homo sapien
tgtatcccttcgtgtacccatagct

SEQ ID NO: 4882067 - DNA, 25 bp, Homo sapien
gctgggtagtattccctggtgcgaa

SEQ ID NO: 4882068 - DNA, 25 bp, Homo sapien
tattgcccaaactaagagttctgag

SEQ ID NO: 4882069 - DNA, 25 bp, Homo sapien
agtgaagcccattgtgtaaccaagg

SEQ ID NO: 4882070 - DNA, 25 bp, Homo sapien
tttgttactgatagacctttgagtg

SEQ ID NO: 4882071 - DNA, 25 bp, Homo sapien
ccattgtgtaaccaaggatctgctc

SEQ ID NO: 4882072 - DNA, 25 bp, Homo sapien
tagacctttgagtgaagcccattgt

SEQ ID NO: 4882073 - DNA, 25 bp, Homo sapien
tggcctctaccaagaaagataagac

SEQ ID NO: 4882074 - DNA, 25 bp, Homo sapien
gaaaaacaaatgattcgctggcctc

SEQ ID NO: 4882075 - DNA, 25 bp, Homo sapien
gatgttaccctgactcacaaagaac

SEQ ID NO: 4882076 - DNA, 25 bp, Homo sapien
tatcatggaggacatcgatgttacc

SEQ ID NO: 4882077 - DNA, 25 bp, Homo sapien
cgtcctcctcagcctcccaaagtgt

SEQ ID NO: 4882078 - DNA, 25 bp, Homo sapien
tcctcctcagcctcccaaagtgttg

SEQ ID NO: 4882079 - DNA, 25 bp, Homo sapien
accaccatgcctggcgaattgtgta

SEQ ID NO: 4882080 - DNA, 25 bp, Homo sapien
tccgtcctcctcagcctcccaaagt

SEQ ID NO: 4882081 - DNA, 25 bp, Homo sapien
gatcacataacaggcatacacaaaa

SEQ ID NO: 4882082 - DNA, 25 bp, Homo sapien
tactgatcacataacaggcatacac

SEQ ID NO: 4882083 - DNA, 25 bp, Homo sapien
ggaaatactgatcacataacaggca

SEQ ID NO: 4882084 - DNA, 25 bp, Homo sapien
aatactgatcacataacaggcatac

SEQ ID NO: 4882085 - DNA, 25 bp, Homo sapien
gattagttttggaagctgtatctca

SEQ ID NO: 4882086 - DNA, 25 bp, Homo sapien
ggaagctgtatctcattcaaaagga

SEQ ID NO: 4882087 - DNA, 25 bp, Homo sapien
cattcaaaaggaacccacagggaga

SEQ ID NO: 4882088 - DNA, 25 bp, Homo sapien
ctgtatctcattcaaaaggaaccca

SEQ ID NO: 4882089 - DNA, 25 bp, Homo sapien
tgagcactggtgtcttttgagagtc

SEQ ID NO: 4882090 - DNA, 25 bp, Homo sapien
actttgtaagagattcagctaggac

SEQ ID NO: 4882091 - DNA, 25 bp, Homo sapien
tcccactgttaggtacaactgagca

SEQ ID NO: 4882092 - DNA, 25 bp, Homo sapien
tttgcttaaaccacaagtctcaagg

SEQ ID NO: 4882093 - DNA, 25 bp, Homo sapien
tttaggtggttttgttgttgctgac

SEQ ID NO: 4882094 - DNA, 25 bp, Homo sapien
gtggttttgttgttgctgacttcct

SEQ ID NO: 4882095 - DNA, 25 bp, Homo sapien
ttttaggtggttttgttgttgctga

SEQ ID NO: 4882096 - DNA, 25 bp, Homo sapien
tttgttgttgctgacttcctttcat

SEQ ID NO: 4882097 - DNA, 25 bp, Homo sapien
ttttcctctacttcagtttgatgac

SEQ ID NO: 4882098 - DNA, 25 bp, Homo sapien
gagtgaactctttggttataatttg

SEQ ID NO: 4882099 - DNA, 25 bp, Homo sapien
tcataaccacatctagcaacttctt

SEQ ID NO: 4882100 - DNA, 25 bp, Homo sapien
ttggttgccactcttctcgctgtac

SEQ ID NO: 4882101 - DNA, 25 bp, Homo sapien
gttgtgtgatatggagtagtcacta

SEQ ID NO: 4882102 - DNA, 25 bp, Homo sapien
tgccaaccacacagtaattgttgtg

SEQ ID NO: 4882103 - DNA, 25 bp, Homo sapien
tgatatggagtagtcactattgctt

SEQ ID NO: 4882104 - DNA, 25 bp, Homo sapien
tgggagagaagtgccaaccacacag

SEQ ID NO: 4882105 - DNA, 25 bp, Homo sapien
taatcgggcatcatcatcagagttc

SEQ ID NO: 4882106 - DNA, 25 bp, Homo sapien
cttttcagattagggcatggtaatc

SEQ ID NO: 4882107 - DNA, 25 bp, Homo sapien
tgctgtctgactgtagcaataagaa

SEQ ID NO: 4882108 - DNA, 25 bp, Homo sapien
ctggtgctgtctgactgtagcaata

SEQ ID NO: 4882109 - DNA, 25 bp, Homo sapien
tcagcagccgcatttctggttcaat

SEQ ID NO: 4882110 - DNA, 25 bp, Homo sapien
gttcagcagccgcatttctggttca

SEQ ID NO: 4882111 - DNA, 25 bp, Homo sapien
ctaagtcaagttcagcagccgcatt

SEQ ID NO: 4882112 - DNA, 25 bp, Homo sapien
agtcaagttcagcagccgcatttct

SEQ ID NO: 4882113 - DNA, 25 bp, Homo sapien
ggtatattttgttagagccagcctc

SEQ ID NO: 4882114 - DNA, 25 bp, Homo sapien
tgctagggcaaagtgtcgagtatct

SEQ ID NO: 4882115 - DNA, 25 bp, Homo sapien
cattaagtgagacagatgacagcct

SEQ ID NO: 4882116 - DNA, 25 bp, Homo sapien
aaaagtaagctcgaaagcatcccag

SEQ ID NO: 4882117 - DNA, 25 bp, Homo sapien
tacctggaaagaacgtatcttgggc

SEQ ID NO: 4882118 - DNA, 25 bp, Homo sapien
tagttacatactaaagtgactcaga

SEQ ID NO: 4882119 - DNA, 25 bp, Homo sapien
gaaataaaaccgcaggcattcaagt

SEQ ID NO: 4882120 - DNA, 25 bp, Homo sapien
cctttctaaattgttcactgtgcag

SEQ ID NO: 4882121 - DNA, 25 bp, Homo sapien
aagcgtattcgaataggaagagaga

SEQ ID NO: 4882122 - DNA, 25 bp, Homo sapien
aactggcgcaagacaagggtggctt

SEQ ID NO: 4882123 - DNA, 25 bp, Homo sapien
cagatgatatggttgtacatttaga

SEQ ID NO: 4882124 - DNA, 25 bp, Homo sapien
gggtggcttgtctcaccactcctat

SEQ ID NO: 4882125 - DNA, 25 bp, Homo sapien
caaaatacttagatggctagccagg

SEQ ID NO: 4882126 - DNA, 25 bp, Homo sapien
tatagacctaagtgctcacaggaga

SEQ ID NO: 4882127 - DNA, 25 bp, Homo sapien
caagagcagactatttcaaaagcta

SEQ ID NO: 4882128 - DNA, 25 bp, Homo sapien
tgaaagagatacgaaaaacccttca

SEQ ID NO: 4882129 - DNA, 25 bp, Homo sapien
tctaatgctgtctcacctagggagc

SEQ ID NO: 4882130 - DNA, 25 bp, Homo sapien
tagtgtggcacgaaggaggtcatct

SEQ ID NO: 4882131 - DNA, 25 bp, Homo sapien
gacttgttacagctgatggccacca

SEQ ID NO: 4882132 - DNA, 25 bp, Homo sapien
ttagcagggtccaaacaaacgcagg

SEQ ID NO: 4882133 - DNA, 25 bp, Homo sapien
ttattcaataatttgcagcatctgg

SEQ ID NO: 4882134 - DNA, 25 bp, Homo sapien
tttctggccaccctattgaaggtag

SEQ ID NO: 4882135 - DNA, 25 bp, Homo sapien
gtctgtttggtgtaaggcgagctcc

SEQ ID NO: 4882136 - DNA, 25 bp, Homo sapien
taattacgacacttcgaatggatcg

SEQ ID NO: 4882137 - DNA, 25 bp, Homo sapien
gtaaattctcaaagagcactgctgg

SEQ ID NO: 4882138 - DNA, 25 bp, Homo sapien
caagtgtcatctccagtgttagagg

SEQ ID NO: 4882139 - DNA, 25 bp, Homo sapien
gcttaaaagagcatgacgtctctct

SEQ ID NO: 4882140 - DNA, 25 bp, Homo sapien
tgctatgtgatgtgcctcctcccgc

SEQ ID NO: 4882141 - DNA, 25 bp, Homo sapien
caggtgccggcaccatgttgcttgt

SEQ ID NO: 4882142 - DNA, 25 bp, Homo sapien
agtagaaacgctgggcttcagaggc

SEQ ID NO: 4882143 - DNA, 25 bp, Homo sapien
gaatatcccaaatggagtagaaacg

SEQ ID NO: 4882144 - DNA, 25 bp, Homo sapien
tcttcctgtgtggaatatcccaaat

SEQ ID NO: 4882145 - DNA, 25 bp, Homo sapien
caaatggagtagaaacgctgggctt

SEQ ID NO: 4882146 - DNA, 25 bp, Homo sapien
ctattattgctcacggtgccagggt

SEQ ID NO: 4882147 - DNA, 25 bp, Homo sapien
gagcagtgctgttcagaagcctggc

SEQ ID NO: 4882148 - DNA, 25 bp, Homo sapien
gaaagaaccttactagaaatgtggc

SEQ ID NO: 4882149 - DNA, 25 bp, Homo sapien
gactggcttccaaagattcttactg

SEQ ID NO: 4882150 - DNA, 25 bp, Homo sapien
catgcgcgactgtgccataaatcgg

SEQ ID NO: 4882151 - DNA, 25 bp, Homo sapien
tctgtgtggttacgaggctgagctt

SEQ ID NO: 4882152 - DNA, 25 bp, Homo sapien
tctataggaagagcagtcgcatttc

SEQ ID NO: 4882153 - DNA, 25 bp, Homo sapien
gctgagctttttgagtgttaggacc

SEQ ID NO: 4882154 - DNA, 25 bp, Homo sapien
gcagaactgtgtgtagcaggtcctt

SEQ ID NO: 4882155 - DNA, 25 bp, Homo sapien
ggctacctctctgtaggcattggca

SEQ ID NO: 4882156 - DNA, 25 bp, Homo sapien
tcgatgacgttaagtgaagactagc

SEQ ID NO: 4882157 - DNA, 25 bp, Homo sapien
tactacaagaacctatcgatgacgt

SEQ ID NO: 4882158 - DNA, 25 bp, Homo sapien
ggagttggcccagttctgaccctag

SEQ ID NO: 4882159 - DNA, 25 bp, Homo sapien
tgaccctagtgatgcgcctgtgcgt

SEQ ID NO: 4882160 - DNA, 25 bp, Homo sapien
gaacgttgtcaccattcccggagat

SEQ ID NO: 4882161 - DNA, 25 bp, Homo sapien
gcttcaaagtagacgcccggagttg

SEQ ID NO: 4882162 - DNA, 25 bp, Homo sapien
gctttcgtatttacatatgcacttc

SEQ ID NO: 4882163 - DNA, 25 bp, Homo sapien
tatgcacttcacctcgagtttattt

SEQ ID NO: 4882164 - DNA, 25 bp, Homo sapien
gtatttacatatgcacttcacctcg

SEQ ID NO: 4882165 - DNA, 25 bp, Homo sapien
tattttgctttcgtatttacatatg

SEQ ID NO: 4882166 - DNA, 25 bp, Homo sapien
cctctagggtaaagacaagtgcaac

SEQ ID NO: 4882167 - DNA, 25 bp, Homo sapien
ggtcaaacatcagtccccaggatag

SEQ ID NO: 4882168 - DNA, 25 bp, Homo sapien
gaaacctgcttccaaagatggagga

SEQ ID NO: 4882169 - DNA, 25 bp, Homo sapien
aacacctcggtatgctgtgggtcaa

SEQ ID NO: 4882170 - DNA, 25 bp, Homo sapien
tctgaggcttattatctttcatcca

SEQ ID NO: 4882171 - DNA, 25 bp, Homo sapien
ctgaggcttattatctttcatccaa

SEQ ID NO: 4882172 - DNA, 25 bp, Homo sapien
gaggaacattttgccctagaaagtg

SEQ ID NO: 4882173 - DNA, 25 bp, Homo sapien
tctcttaacttcagggcattctatg

SEQ ID NO: 4882174 - DNA, 25 bp, Homo sapien
tggttcaagtttctacggctttctc

SEQ ID NO: 4882175 - DNA, 25 bp, Homo sapien
tgaaaagttaaggttctcaactatc

SEQ ID NO: 4882176 - DNA, 25 bp, Homo sapien
gcatcccatatcaactggtatacat

SEQ ID NO: 4882177 - DNA, 25 bp, Homo sapien
ctaggagcatcccatatcaactggt

SEQ ID NO: 4882178 - DNA, 25 bp, Homo sapien
ggagcatcccatatcaactggtata

SEQ ID NO: 4882179 - DNA, 25 bp, Homo sapien
cccatatcaactggtatacatccat

SEQ ID NO: 4882180 - DNA, 25 bp, Homo sapien
tgcgcgcccgggatttcgatctgga

SEQ ID NO: 4882181 - DNA, 25 bp, Homo sapien
gcgcccgggatttcgatctggacct

SEQ ID NO: 4882182 - DNA, 25 bp, Homo sapien
cccgggatttcgatctggacctggc

SEQ ID NO: 4882183 - DNA, 25 bp, Homo sapien
ctgcgcgcccgggatttcgatctgg

SEQ ID NO: 4882184 - DNA, 25 bp, Homo sapien
taaacaggtggctagcacccgtggg

SEQ ID NO: 4882185 - DNA, 25 bp, Homo sapien
tcgtttcctcggtgtttgaacatca

SEQ ID NO: 4882186 - DNA, 25 bp, Homo sapien
gacactgtgcggtttcctttaagag

SEQ ID NO: 4882187 - DNA, 25 bp, Homo sapien
gcttccctcgctgggaaaaagctgg

SEQ ID NO: 4882188 - DNA, 25 bp, Homo sapien
tgttttagaatgcatgctgtaatcc

SEQ ID NO: 4882189 - DNA, 25 bp, Homo sapien
gaatgcgtgttttagaatgcatgct

SEQ ID NO: 4882190 - DNA, 25 bp, Homo sapien
catgctgtaatccagtgcgaggcga

SEQ ID NO: 4882191 - DNA, 25 bp, Homo sapien
tagaatgcatgctgtaatccagtgc

SEQ ID NO: 4882192 - DNA, 25 bp, Homo sapien
gcagccagctatggaaaagtgtctt

SEQ ID NO: 4882193 - DNA, 25 bp, Homo sapien
tgtctcattatccaatgggcacagc

SEQ ID NO: 4882194 - DNA, 25 bp, Homo sapien
ctcgtggtcccagaacctgctaggg

SEQ ID NO: 4882195 - DNA, 25 bp, Homo sapien
cattcccggtgctgacttcctcagt

SEQ ID NO: 4882196 - DNA, 25 bp, Homo sapien
gttattatttgtgctctatacattc

SEQ ID NO: 4882197 - DNA, 25 bp, Homo sapien
gaaacttctctggtaacaaacgata

SEQ ID NO: 4882198 - DNA, 25 bp, Homo sapien
cttctctggtaacaaacgatagaaa

SEQ ID NO: 4882199 - DNA, 25 bp, Homo sapien
aacttctctggtaacaaacgataga

SEQ ID NO: 4882200 - DNA, 25 bp, Homo sapien
ttctcctccttgtaacttttccaga

SEQ ID NO: 4882201 - DNA, 25 bp, Homo sapien
aaccaccatgcagagcctatttcac

SEQ ID NO: 4882202 - DNA, 25 bp, Homo sapien
cagaatgattccaatcttttaattt

SEQ ID NO: 4882203 - DNA, 25 bp, Homo sapien
tatgaaaagaaatctaatcagaatg

SEQ ID NO: 4882204 - DNA, 25 bp, Homo sapien
gaggacgaagggacggtgctgctgt

SEQ ID NO: 4882205 - DNA, 25 bp, Homo sapien
gtgctgctgtccactgttacagccc

SEQ ID NO: 4882206 - DNA, 25 bp, Homo sapien
cttcagaggacgaagggacggtgct

SEQ ID NO: 4882207 - DNA, 25 bp, Homo sapien
tgctgtccactgttacagcccaggg

SEQ ID NO: 4882208 - DNA, 25 bp, Homo sapien
tctggacggagttgctgggtcccca

SEQ ID NO: 4882209 - DNA, 25 bp, Homo sapien
ctagcaggagccttcggcggctgcc

SEQ ID NO: 4882210 - DNA, 25 bp, Homo sapien
gattttgttgcactccgggcaggaa

SEQ ID NO: 4882211 - DNA, 25 bp, Homo sapien
aggcagggaacttcccggtgagcca

SEQ ID NO: 4882212 - DNA, 25 bp, Homo sapien
ttggccgagtgattgttccagccgc

SEQ ID NO: 4882213 - DNA, 25 bp, Homo sapien
tcgggtccacaatggcggacagact

SEQ ID NO: 4882214 - DNA, 25 bp, Homo sapien
aagaggcccgtcttttccgcttgca

SEQ ID NO: 4882215 - DNA, 25 bp, Homo sapien
gaacccaaaatgagggcctcgcgct

SEQ ID NO: 4882216 - DNA, 25 bp, Homo sapien
tcttcaccgcaacccgagagccgcc

SEQ ID NO: 4882217 - DNA, 25 bp, Homo sapien
gtagctacaccgcagcaacttgcgc

SEQ ID NO: 4882218 - DNA, 25 bp, Homo sapien
cccggcccgggtagctacaccgcag

SEQ ID NO: 4882219 - DNA, 25 bp, Homo sapien
gcccgcaagctacggggccagggcg

SEQ ID NO: 4882220 - DNA, 25 bp, Homo sapien
cgggtagctacaccgcagcaacttg

SEQ ID NO: 4882221 - DNA, 25 bp, Homo sapien
gtaacattaaggcaacattgagcaa

SEQ ID NO: 4882222 - DNA, 25 bp, Homo sapien
aacattaaggcaacattgagcaata

SEQ ID NO: 4882223 - DNA, 25 bp, Homo sapien
agtaacattaaggcaacattgagca

SEQ ID NO: 4882224 - DNA, 25 bp, Homo sapien
taacattaaggcaacattgagcaat

SEQ ID NO: 4882225 - DNA, 25 bp, Homo sapien
tcaaatagctttgcaaagtgccacc

SEQ ID NO: 4882226 - DNA, 25 bp, Homo sapien
cctccccacagatctaggataaaat

SEQ ID NO: 4882227 - DNA, 25 bp, Homo sapien
caccagtgcctacctaagtgaaatg

SEQ ID NO: 4882228 - DNA, 25 bp, Homo sapien
cttacagtgctgtagaggctctatt

SEQ ID NO: 4882229 - DNA, 25 bp, Homo sapien
ttcctctgctctatgaaacagagtc

SEQ ID NO: 4882230 - DNA, 25 bp, Homo sapien
agaacatgggccttaggagccaggt

SEQ ID NO: 4882231 - DNA, 25 bp, Homo sapien
tctttgctctggtcctgactacatc

SEQ ID NO: 4882232 - DNA, 25 bp, Homo sapien
tacatcaagttaggaaagtcaacag

SEQ ID NO: 4882233 - DNA, 25 bp, Homo sapien
tacagtctacggtcatttttaaatg

SEQ ID NO: 4882234 - DNA, 25 bp, Homo sapien
gtacttcacatataccgagaagcaa

SEQ ID NO: 4882235 - DNA, 25 bp, Homo sapien
tatagtacaaaaagtcaatctactt

SEQ ID NO: 4882236 - DNA, 25 bp, Homo sapien
cttaatgacaagctaatgtcttgga

SEQ ID NO: 4882237 - DNA, 25 bp, Homo sapien
tcctctgacactggctttactgctc

SEQ ID NO: 4882238 - DNA, 25 bp, Homo sapien
tgatttgtctggctacttaagtatg

SEQ ID NO: 4882239 - DNA, 25 bp, Homo sapien
gcatctttttgatgaatcgaaccgt

SEQ ID NO: 4882240 - DNA, 25 bp, Homo sapien
ttttgatgaatcgaaccgttttgta

SEQ ID NO: 4882241 - DNA, 25 bp, Homo sapien
gctacttaagtatggctcaaaatca

SEQ ID NO: 4882242 - DNA, 25 bp, Homo sapien
aatctgaaactgtcagaagacttac

SEQ ID NO: 4882243 - DNA, 25 bp, Homo sapien
aaatctgaaactgtcagaagactta

SEQ ID NO: 4882244 - DNA, 25 bp, Homo sapien
tcctaaaatctgaaactgtcagaag

SEQ ID NO: 4882245 - DNA, 25 bp, Homo sapien
taatttcctaaaatctgaaactgtc

SEQ ID NO: 4882246 - DNA, 25 bp, Homo sapien
gaacagataaaacgcaaaccacagt

SEQ ID NO: 4882247 - DNA, 25 bp, Homo sapien
ccctaggaagacactaaggtgcctc

SEQ ID NO: 4882248 - DNA, 25 bp, Homo sapien
ggaataccagaaatcctcctgacaa

SEQ ID NO: 4882249 - DNA, 25 bp, Homo sapien
gaaacccttctatgtccttgtgaca

SEQ ID NO: 4882250 - DNA, 25 bp, Homo sapien
tttggaagctacgaagacaaacaca

SEQ ID NO: 4882251 - DNA, 25 bp, Homo sapien
catagtgcttcatactgacaaaaag

SEQ ID NO: 4882252 - DNA, 25 bp, Homo sapien
gactgagggaagttcaaatacacca

SEQ ID NO: 4882253 - DNA, 25 bp, Homo sapien
aaatcaatactggaagtactgactg

SEQ ID NO: 4882254 - DNA, 25 bp, Homo sapien
tcaatctcccacagataccttgaga

SEQ ID NO: 4882255 - DNA, 25 bp, Homo sapien
gatccacaactgactgaatccgtga

SEQ ID NO: 4882256 - DNA, 25 bp, Homo sapien
tacagtccttgacagactatgttgg

SEQ ID NO: 4882257 - DNA, 25 bp, Homo sapien
caatcagtccttcatatcagtgggt

SEQ ID NO: 4882258 - DNA, 25 bp, Homo sapien
gatggaatccagttcaaccattaga

SEQ ID NO: 4882259 - DNA, 25 bp, Homo sapien
gacaactctgccgaataatagagga

SEQ ID NO: 4882260 - DNA, 25 bp, Homo sapien
tattggtggaataacagacatgact

SEQ ID NO: 4882261 - DNA, 25 bp, Homo sapien
caagattacgtttatagcatgatgc

SEQ ID NO: 4882262 - DNA, 25 bp, Homo sapien
tggattgacattggtggatagctgt

SEQ ID NO: 4882263 - DNA, 25 bp, Homo sapien
ttgacattggtggatagctgttact

SEQ ID NO: 4882264 - DNA, 25 bp, Homo sapien
gtatggattgacattggtggatagc

SEQ ID NO: 4882265 - DNA, 25 bp, Homo sapien
gattgacattggtggatagctgtta

SEQ ID NO: 4882266 - DNA, 25 bp, Homo sapien
tagcttttccagcacgggatgcact

SEQ ID NO: 4882267 - DNA, 25 bp, Homo sapien
tacgaggagctacccagcgattctg

SEQ ID NO: 4882268 - DNA, 25 bp, Homo sapien
cagatatggcataggctggtctcca

SEQ ID NO: 4882269 - DNA, 25 bp, Homo sapien
tcagggaacggtaagctgcatccaa

SEQ ID NO: 4882270 - DNA, 25 bp, Homo sapien
aaagtcatcaaagattgaggtggta

SEQ ID NO: 4882271 - DNA, 25 bp, Homo sapien
aagcacttgcttagctttttctagg

SEQ ID NO: 4882272 - DNA, 25 bp, Homo sapien
tctaggggtacctcttgagtgtccc

SEQ ID NO: 4882273 - DNA, 25 bp, Homo sapien
ggtggtatgcttgaaagtagcaatt

SEQ ID NO: 4882274 - DNA, 25 bp, Homo sapien
ggcttcctcctcttcttgacgcttt

SEQ ID NO: 4882275 - DNA, 25 bp, Homo sapien
cctacgcatggcttcctcctcttct

SEQ ID NO: 4882276 - DNA, 25 bp, Homo sapien
cttcctcctcttcttgacgcttttc

SEQ ID NO: 4882277 - DNA, 25 bp, Homo sapien
atggcttcctcctcttcttgacgct

SEQ ID NO: 4882278 - DNA, 25 bp, Homo sapien
tgattcacgaatcacagagccagcc

SEQ ID NO: 4882279 - DNA, 25 bp, Homo sapien
gggtggcagcaacgtgacaaaagaa

SEQ ID NO: 4882280 - DNA, 25 bp, Homo sapien
gagtaggctctgacattcaagcaca

SEQ ID NO: 4882281 - DNA, 25 bp, Homo sapien
taggctggcctcagaattttccata

SEQ ID NO: 4882282 - DNA, 25 bp, Homo sapien
cacacgtaaatacatggtctcacta

SEQ ID NO: 4882283 - DNA, 25 bp, Homo sapien
gggctcatgtattcctcccattcca

SEQ ID NO: 4882284 - DNA, 25 bp, Homo sapien
gatcaagcagtactccaaactcagc

SEQ ID NO: 4882285 - DNA, 25 bp, Homo sapien
cacacacgtaaatacagggtctatg

SEQ ID NO: 4882286 - DNA, 25 bp, Homo sapien
tcaggctcgcaaacacccagaaata

SEQ ID NO: 4882287 - DNA, 25 bp, Homo sapien
tacttcatgatagcaatcaggctcg

SEQ ID NO: 4882288 - DNA, 25 bp, Homo sapien
tcagtcttctgtgccttagctagga

SEQ ID NO: 4882289 - DNA, 25 bp, Homo sapien
tgaagagtataagggcagatgcgct

SEQ ID NO: 4882290 - DNA, 25 bp, Homo sapien
tccccacagttaagagacattcagt

SEQ ID NO: 4882291 - DNA, 25 bp, Homo sapien
tgtgtctcctcttgtagaccccagg

SEQ ID NO: 4882292 - DNA, 25 bp, Homo sapien
tataactacactgggactaccgaag

SEQ ID NO: 4882293 - DNA, 25 bp, Homo sapien
gaacattgctgtggtgactataccc

SEQ ID NO: 4882294 - DNA, 25 bp, Homo sapien
gaacacagctttcgaattagaaaga

SEQ ID NO: 4882295 - DNA, 25 bp, Homo sapien
tgcacggtattcaaaaagaacacag

SEQ ID NO: 4882296 - DNA, 25 bp, Homo sapien
taggaaaacgctggatttcttttga

SEQ ID NO: 4882297 - DNA, 25 bp, Homo sapien
ggaatcttcaagtaccaatacgtat

SEQ ID NO: 4882298 - DNA, 25 bp, Homo sapien
ggaatgaacaaacccaaacacgaca

SEQ ID NO: 4882299 - DNA, 25 bp, Homo sapien
tacgaaaaagggaatttacatggca

SEQ ID NO: 4882300 - DNA, 25 bp, Homo sapien
caaattctcatgtaattgctacaag

SEQ ID NO: 4882301 - DNA, 25 bp, Homo sapien
gaaaatctcacctaactgtaccatc

SEQ ID NO: 4882302 - DNA, 25 bp, Homo sapien
attgaaaccctcaaagattaaagag

SEQ ID NO: 4882303 - DNA, 25 bp, Homo sapien
aaagaggaccaaatggtgagtttgg

SEQ ID NO: 4882304 - DNA, 25 bp, Homo sapien
aaagattaaagaggaccaaatggtg

SEQ ID NO: 4882305 - DNA, 25 bp, Homo sapien
tgaaaccctcaaagattaaagagga

SEQ ID NO: 4882306 - DNA, 25 bp, Homo sapien
aatactaaaatcttcccccagacag

SEQ ID NO: 4882307 - DNA, 25 bp, Homo sapien
tgttggaaataactacgtctggtct

SEQ ID NO: 4882308 - DNA, 25 bp, Homo sapien
ttctggtaatagatgggtctcttag

SEQ ID NO: 4882309 - DNA, 25 bp, Homo sapien
aatagatgggtctcttagaaatatc

SEQ ID NO: 4882310 - DNA, 25 bp, Homo sapien
aaaagaaatgatttgatcagtgttg

SEQ ID NO: 4882311 - DNA, 25 bp, Homo sapien
atgatttgatcagtgttgagcctac

SEQ ID NO: 4882312 - DNA, 25 bp, Homo sapien
aatgatttgatcagtgttgagccta

SEQ ID NO: 4882313 - DNA, 25 bp, Homo sapien
aagaaatgatttgatcagtgttgag

SEQ ID NO: 4882314 - DNA, 25 bp, Homo sapien
acaattcctccaatatccgactgcc

SEQ ID NO: 4882315 - DNA, 25 bp, Homo sapien
ttacaattcctccaatatccgactg

SEQ ID NO: 4882316 - DNA, 25 bp, Homo sapien
tacaattcctccaatatccgactgc

SEQ ID NO: 4882317 - DNA, 25 bp, Homo sapien
tttccagcggacaccaagtcactta

SEQ ID NO: 4882318 - DNA, 25 bp, Homo sapien
tttacttggaaaaggcatggctgtc

SEQ ID NO: 4882319 - DNA, 25 bp, Homo sapien
tctaggaaggcatacaaacacgagc

SEQ ID NO: 4882320 - DNA, 25 bp, Homo sapien
taccaattgtactctcagcactggc

SEQ ID NO: 4882321 - DNA, 25 bp, Homo sapien
taccaggtatttccaaagcagtcaa

SEQ ID NO: 4882322 - DNA, 25 bp, Homo sapien
aatcagacaactcacccttaccagg

SEQ ID NO: 4882323 - DNA, 25 bp, Homo sapien
gcacacttgtgatgtatcctctaag

SEQ ID NO: 4882324 - DNA, 25 bp, Homo sapien
gatggtcaacttgtttaacgcagag

SEQ ID NO: 4882325 - DNA, 25 bp, Homo sapien
ggcaaaagctgcgacttctttgtgg

SEQ ID NO: 4882326 - DNA, 25 bp, Homo sapien
aaagctgcgacttctttgtggagca

SEQ ID NO: 4882327 - DNA, 25 bp, Homo sapien
aaatggcaaaagctgcgacttcttt

SEQ ID NO: 4882328 - DNA, 25 bp, Homo sapien
ttcttcaccaaactataagaatgaa

SEQ ID NO: 4882329 - DNA, 25 bp, Homo sapien
tttgaaaaggatttagaggatctac

SEQ ID NO: 4882330 - DNA, 25 bp, Homo sapien
tacagttgaacgcagaaaaagcact

SEQ ID NO: 4882331 - DNA, 25 bp, Homo sapien
gaaaaagcactagcaaatttaggga

SEQ ID NO: 4882332 - DNA, 25 bp, Homo sapien
tctagacaatcttggacatgtgaaa

SEQ ID NO: 4882333 - DNA, 25 bp, Homo sapien
tatcacactgttgcagtaccagatg

SEQ ID NO: 4882334 - DNA, 25 bp, Homo sapien
ctggatgcatcaccttatcacactg

SEQ ID NO: 4882335 - DNA, 25 bp, Homo sapien
ttgcagtaccagatgccagaagcat

SEQ ID NO: 4882336 - DNA, 25 bp, Homo sapien
tctagacatatgaactctgccagca

SEQ ID NO: 4882337 - DNA, 25 bp, Homo sapien
ttggaggttgatcattttggaggaa

SEQ ID NO: 4882338 - DNA, 25 bp, Homo sapien
agtgccaaccacatcagtttcttcc

SEQ ID NO: 4882339 - DNA, 25 bp, Homo sapien
tcttgacccaattactccaagtgcc

SEQ ID NO: 4882340 - DNA, 25 bp, Homo sapien
tggaggaatctgattctaaagaagc

SEQ ID NO: 4882341 - DNA, 25 bp, Homo sapien
gcacaatgcgaggattcaagtctcc

SEQ ID NO: 4882342 - DNA, 25 bp, Homo sapien
cattgcagtaggttagggcagctcc

SEQ ID NO: 4882343 - DNA, 25 bp, Homo sapien
tgatcctggcctctgtccaaaggtt

SEQ ID NO: 4882344 - DNA, 25 bp, Homo sapien
tgaggcctgcacagtcaaactctgt

SEQ ID NO: 4882345 - DNA, 25 bp, Homo sapien
ctctgagagggtgtctcttactttg

SEQ ID NO: 4882346 - DNA, 25 bp, Homo sapien
gctgctgtggcaaacctgaagaatt

SEQ ID NO: 4882347 - DNA, 25 bp, Homo sapien
tctgcatagagtcggttcaccacct

SEQ ID NO: 4882348 - DNA, 25 bp, Homo sapien
ttactttgtgtaccctggtctgcat

SEQ ID NO: 4882349 - DNA, 25 bp, Homo sapien
gtccctatggcagctctcaaaactc

SEQ ID NO: 4882350 - DNA, 25 bp, Homo sapien
ttacaggaggacaatatacaaagac

SEQ ID NO: 4882351 - DNA, 25 bp, Homo sapien
ttttacaagtccaaaagtctgagaa

SEQ ID NO: 4882352 - DNA, 25 bp, Homo sapien
ttgctaaataaaacatttgcgtccc

SEQ ID NO: 4882353 - DNA, 25 bp, Homo sapien
tgcccccgtgcacaggacacaatgt

SEQ ID NO: 4882354 - DNA, 25 bp, Homo sapien
caatgtcctggccttttactgccca

SEQ ID NO: 4882355 - DNA, 25 bp, Homo sapien
tggccttttactgcccatgacatga

SEQ ID NO: 4882356 - DNA, 25 bp, Homo sapien
tgagctcctttcttgtggaacaagg

SEQ ID NO: 4882357 - DNA, 25 bp, Homo sapien
caccctctcgtactgcttcaggggg

SEQ ID NO: 4882358 - DNA, 25 bp, Homo sapien
cctctcgtactgcttcagggggtgg

SEQ ID NO: 4882359 - DNA, 25 bp, Homo sapien
cacaccctctcgtactgcttcaggg

SEQ ID NO: 4882360 - DNA, 25 bp, Homo sapien
accccacaccctctcgtactgcttc

SEQ ID NO: 4882361 - DNA, 25 bp, Homo sapien
agcaaatgaggacaacgccaacaca

SEQ ID NO: 4882362 - DNA, 25 bp, Homo sapien
atgaggacaacgccaacacagagta

SEQ ID NO: 4882363 - DNA, 25 bp, Homo sapien
aggacaacgccaacacagagtaata

SEQ ID NO: 4882364 - DNA, 25 bp, Homo sapien
aaatgaggacaacgccaacacagag

SEQ ID NO: 4882365 - DNA, 25 bp, Homo sapien
tcatcaagaacaggagagctgccca

SEQ ID NO: 4882366 - DNA, 25 bp, Homo sapien
ccacagcccggatgctagagcagtt

SEQ ID NO: 4882367 - DNA, 25 bp, Homo sapien
cggcgaccctctatagaacctgata

SEQ ID NO: 4882368 - DNA, 25 bp, Homo sapien
ctgaggccgaaggagcatgccaaca

SEQ ID NO: 4882369 - DNA, 25 bp, Homo sapien
cagaaggtgtcttggacattatcca

SEQ ID NO: 4882370 - DNA, 25 bp, Homo sapien
gccacatcttgaaccccgaaggaga

SEQ ID NO: 4882371 - DNA, 25 bp, Homo sapien
cacctgctcttcactatcagagtgg

SEQ ID NO: 4882372 - DNA, 25 bp, Homo sapien
tccactctagggattgcagaaggtg

SEQ ID NO: 4882373 - DNA, 25 bp, Homo sapien
caaaacctctataccccaagagtgc

SEQ ID NO: 4882374 - DNA, 25 bp, Homo sapien
gccatgaaagtatcagacagctgct

SEQ ID NO: 4882375 - DNA, 25 bp, Homo sapien
ctctataccccaagagtgccatgaa

SEQ ID NO: 4882376 - DNA, 25 bp, Homo sapien
ccatgaaagtatcagacagctgctg

SEQ ID NO: 4882377 - DNA, 25 bp, Homo sapien
tcaccaggccatcttacagtcaggc

SEQ ID NO: 4882378 - DNA, 25 bp, Homo sapien
tgaagggtaaagcttacctaaagca

SEQ ID NO: 4882379 - DNA, 25 bp, Homo sapien
acaccataacgctcatccatcatga

SEQ ID NO: 4882380 - DNA, 25 bp, Homo sapien
gaatcacaatcaggggaagaggatg

SEQ ID NO: 4882381 - DNA, 25 bp, Homo sapien
gtttctgtgcgtctgaaatctgaga

SEQ ID NO: 4882382 - DNA, 25 bp, Homo sapien
ctgaaatctgagagtcacctagctg

SEQ ID NO: 4882383 - DNA, 25 bp, Homo sapien
tgcgtctgaaatctgagagtcacct

SEQ ID NO: 4882384 - DNA, 25 bp, Homo sapien
tcacagtttctgtgcgtctgaaatc

SEQ ID NO: 4882385 - DNA, 25 bp, Homo sapien
tccaaaattccatgatcctaggagt

SEQ ID NO: 4882386 - DNA, 25 bp, Homo sapien
ttattttgcataaggttcccatgga

SEQ ID NO: 4882387 - DNA, 25 bp, Homo sapien
gatgtaagaacttgggtgcagagca

SEQ ID NO: 4882388 - DNA, 25 bp, Homo sapien
tcccatggatgggtaaaggttgaag

SEQ ID NO: 4882389 - DNA, 25 bp, Homo sapien
tagcaaatgacaacgcctgagggca

SEQ ID NO: 4882390 - DNA, 25 bp, Homo sapien
ctctttacaagggatgtaggagcac

SEQ ID NO: 4882391 - DNA, 25 bp, Homo sapien
gacaagccatgtagatctccatgaa

SEQ ID NO: 4882392 - DNA, 25 bp, Homo sapien
tacgaagggcttcatagtggcctgt

SEQ ID NO: 4882393 - DNA, 25 bp, Homo sapien
acgcctgggtaatgcctgcggttct

SEQ ID NO: 4882394 - DNA, 25 bp, Homo sapien
cctgcggttcttgcaagcctgggca

SEQ ID NO: 4882395 - DNA, 25 bp, Homo sapien
caatgcctgggagtggtgcccctgt

SEQ ID NO: 4882396 - DNA, 25 bp, Homo sapien
gtggtgcccctgtggaagatcctca

SEQ ID NO: 4882397 - DNA, 25 bp, Homo sapien
cttgcatccactggacctggtgaat

SEQ ID NO: 4882398 - DNA, 25 bp, Homo sapien
tgcccttgcatccactggacctggt

SEQ ID NO: 4882399 - DNA, 25 bp, Homo sapien
tctgcccttgcatccactggacctg

SEQ ID NO: 4882400 - DNA, 25 bp, Homo sapien
tttctgcccttgcatccactggacc

SEQ ID NO: 4882401 - DNA, 25 bp, Homo sapien
aatgtccagacttgtgctctttaac

SEQ ID NO: 4882402 - DNA, 25 bp, Homo sapien
tccagtttgagcatggacattacat

SEQ ID NO: 4882403 - DNA, 25 bp, Homo sapien
tatctttgggtcgaagttgatgagc

SEQ ID NO: 4882404 - DNA, 25 bp, Homo sapien
taacgaggactaggtggctccatag

SEQ ID NO: 4882405 - DNA, 25 bp, Homo sapien
tatattttatccctgagagcctcat

SEQ ID NO: 4882406 - DNA, 25 bp, Homo sapien
gaatgttgctgtaagcttctcacac

SEQ ID NO: 4882407 - DNA, 25 bp, Homo sapien
gaggactgctataagcctgaatttc

SEQ ID NO: 4882408 - DNA, 25 bp, Homo sapien
ccagcagcatattctaggagagcct

SEQ ID NO: 4882409 - DNA, 25 bp, Homo sapien
gagagcgaaggagcatcatcccaaa

SEQ ID NO: 4882410 - DNA, 25 bp, Homo sapien
taacaatagtacactggttcaccaa

SEQ ID NO: 4882411 - DNA, 25 bp, Homo sapien
tcaaaataatcatgcggtctgagta

SEQ ID NO: 4882412 - DNA, 25 bp, Homo sapien
tatctactggtccataagcagaggc

SEQ ID NO: 4882413 - DNA, 25 bp, Homo sapien
gttctgtaagtgttaagaagtctgg

SEQ ID NO: 4882414 - DNA, 25 bp, Homo sapien
tgtaagtgttaagaagtctggaggg

SEQ ID NO: 4882415 - DNA, 25 bp, Homo sapien
aagtgttctgtaagtgttaagaagt

SEQ ID NO: 4882416 - DNA, 25 bp, Homo sapien
tgttctgtaagtgttaagaagtctg

SEQ ID NO: 4882417 - DNA, 25 bp, Homo sapien
taggcctgaaacattcacccacagc

SEQ ID NO: 4882418 - DNA, 25 bp, Homo sapien
gaacattaggcctgaaacattcacc

SEQ ID NO: 4882419 - DNA, 25 bp, Homo sapien
cattaggcctgaaacattcacccac

SEQ ID NO: 4882420 - DNA, 25 bp, Homo sapien
aaaggaacattaggcctgaaacatt

SEQ ID NO: 4882421 - DNA, 25 bp, Homo sapien
gaaggatccaaacgagctgaatgaa

SEQ ID NO: 4882422 - DNA, 25 bp, Homo sapien
tcttcacccaacatggagaattggc

SEQ ID NO: 4882423 - DNA, 25 bp, Homo sapien
ggtaagctacgaggcattttccctg

SEQ ID NO: 4882424 - DNA, 25 bp, Homo sapien
cagattactgccaaagaaggatcca

SEQ ID NO: 4882425 - DNA, 25 bp, Homo sapien
tctgctgatcttatgctgtgctcca

SEQ ID NO: 4882426 - DNA, 25 bp, Homo sapien
catagcagagttctgactgaagcag

SEQ ID NO: 4882427 - DNA, 25 bp, Homo sapien
ggtcatgtggacagaacttgtgcct

SEQ ID NO: 4882428 - DNA, 25 bp, Homo sapien
gactgcctctagcatcctcggatgg

SEQ ID NO: 4882429 - DNA, 25 bp, Homo sapien
tggtcaagtcaccaaccttcttcct

SEQ ID NO: 4882430 - DNA, 25 bp, Homo sapien
gcctgggccctggtcaagtcaccaa

SEQ ID NO: 4882431 - DNA, 25 bp, Homo sapien
gcatctcataattgcgggggtggcc

SEQ ID NO: 4882432 - DNA, 25 bp, Homo sapien
gacttcatagagtacacaaatgctg

SEQ ID NO: 4882433 - DNA, 25 bp, Homo sapien
ggtcatgacaatgtccacgatcagg

SEQ ID NO: 4882434 - DNA, 25 bp, Homo sapien
aatggtcatgacaatgtccacgatc

SEQ ID NO: 4882435 - DNA, 25 bp, Homo sapien
gtcatgacaatgtccacgatcaggg

SEQ ID NO: 4882436 - DNA, 25 bp, Homo sapien
tggtcatgacaatgtccacgatcag

SEQ ID NO: 4882437 - DNA, 25 bp, Homo sapien
cgtgtgggtgaaactttaaagcaga

SEQ ID NO: 4882438 - DNA, 25 bp, Homo sapien
cagatcactggcatactaaacttca

SEQ ID NO: 4882439 - DNA, 25 bp, Homo sapien
agttcactttgactcttgctataga

SEQ ID NO: 4882440 - DNA, 25 bp, Homo sapien
agaactgcgtgtgggtgaaacttta

SEQ ID NO: 4882441 - DNA, 25 bp, Homo sapien
gttccaggagtggtccgtggagcac

SEQ ID NO: 4882442 - DNA, 25 bp, Homo sapien
gagtggtccgtggagcacgccccaa

SEQ ID NO: 4882443 - DNA, 25 bp, Homo sapien
gtggagcacgccccaatccggtcat

SEQ ID NO: 4882444 - DNA, 25 bp, Homo sapien
gtggtccgtggagcacgccccaatc

SEQ ID NO: 4882445 - DNA, 25 bp, Homo sapien
ttggcatgccttaaccagattcaca

SEQ ID NO: 4882446 - DNA, 25 bp, Homo sapien
aacaaagcttgccaattggcatgcc

SEQ ID NO: 4882447 - DNA, 25 bp, Homo sapien
tgcctgccatctgtgcttgccaagc

SEQ ID NO: 4882448 - DNA, 25 bp, Homo sapien
ggagcagacccccattgaggaaaaa

SEQ ID NO: 4882449 - DNA, 25 bp, Homo sapien
tttgtgattcccctctatacttcaa

SEQ ID NO: 4882450 - DNA, 25 bp, Homo sapien
gtgattcccctctatacttcaaatt

SEQ ID NO: 4882451 - DNA, 25 bp, Homo sapien
ttagaatttttgtgattcccctcta

SEQ ID NO: 4882452 - DNA, 25 bp, Homo sapien
gaatttttgtgattcccctctatac

SEQ ID NO: 4882453 - DNA, 25 bp, Homo sapien
taagagctcatacaagggcacaccc

SEQ ID NO: 4882454 - DNA, 25 bp, Homo sapien
taacgggagtaagttgagagaccac

SEQ ID NO: 4882455 - DNA, 25 bp, Homo sapien
gatgtaaatatcctccaccgtggta

SEQ ID NO: 4882456 - DNA, 25 bp, Homo sapien
tgtgagtacaaaatcccaagtggaa

SEQ ID NO: 4882457 - DNA, 25 bp, Homo sapien
agaggatgtgggtagatccacttcc

SEQ ID NO: 4882458 - DNA, 25 bp, Homo sapien
cctcttcagatgtgcaagttgtaca

SEQ ID NO: 4882459 - DNA, 25 bp, Homo sapien
tgcaagttgtacagtcaggttcttc

SEQ ID NO: 4882460 - DNA, 25 bp, Homo sapien
ctattttcttggctacctcttcaga

SEQ ID NO: 4882461 - DNA, 25 bp, Homo sapien
ttgaactggcagagcactcatttat

SEQ ID NO: 4882462 - DNA, 25 bp, Homo sapien
tcattggctttgtctccgagatccc

SEQ ID NO: 4882463 - DNA, 25 bp, Homo sapien
cttcacattgactttgaactggcag

SEQ ID NO: 4882464 - DNA, 25 bp, Homo sapien
cgcttccccatccaatcttcacatt

SEQ ID NO: 4882465 - DNA, 25 bp, Homo sapien
taacagcagtgttcatatcctaaca

SEQ ID NO: 4882466 - DNA, 25 bp, Homo sapien
ctcttgcagttaaaagtgctctact

SEQ ID NO: 4882467 - DNA, 25 bp, Homo sapien
agaagaagaatgaagggatacagga

SEQ ID NO: 4882468 - DNA, 25 bp, Homo sapien
catctttgttggtctattgttgcct

SEQ ID NO: 4882469 - DNA, 25 bp, Homo sapien
tactttctttagtctgccttcttcc

SEQ ID NO: 4882470 - DNA, 25 bp, Homo sapien
ctactttctttagtctgccttcttc

SEQ ID NO: 4882471 - DNA, 25 bp, Homo sapien
cttcttggaattattgccttggtca

SEQ ID NO: 4882472 - DNA, 25 bp, Homo sapien
ttcttggaattattgccttggtcag

SEQ ID NO: 4882473 - DNA, 25 bp, Homo sapien
ggacgcccaacgtcacagagcatgg

SEQ ID NO: 4882474 - DNA, 25 bp, Homo sapien
catggagccagcactttcgttcagg

SEQ ID NO: 4882475 - DNA, 25 bp, Homo sapien
tgtcaccaagaccatgcttccgagg

SEQ ID NO: 4882476 - DNA, 25 bp, Homo sapien
tctaacacttcatgcacctgaccag

SEQ ID NO: 4882477 - DNA, 25 bp, Homo sapien
tggttctagaggttggaagcccaag

SEQ ID NO: 4882478 - DNA, 25 bp, Homo sapien
ggttctagaggttggaagcccaaga

SEQ ID NO: 4882479 - DNA, 25 bp, Homo sapien
agaaatgtatttcacatggttctag

SEQ ID NO: 4882480 - DNA, 25 bp, Homo sapien
aaaaatgccaagtaccatatggtac

SEQ ID NO: 4882481 - DNA, 25 bp, Homo sapien
cagctcatcctcataagccaaatgt

SEQ ID NO: 4882482 - DNA, 25 bp, Homo sapien
caggctcccagaagagtacaagaga

SEQ ID NO: 4882483 - DNA, 25 bp, Homo sapien
tatggtacccaacaaggatgtcagc

SEQ ID NO: 4882484 - DNA, 25 bp, Homo sapien
tgagcgagagcctctccaaacacag

SEQ ID NO: 4882485 - DNA, 25 bp, Homo sapien
caggatatcagtgtgatggatctga

SEQ ID NO: 4882486 - DNA, 25 bp, Homo sapien
gggaaaatgcttctcgcacacacgt

SEQ ID NO: 4882487 - DNA, 25 bp, Homo sapien
gcacacacgtgttcaggatatcagt

SEQ ID NO: 4882488 - DNA, 25 bp, Homo sapien
ttcggctgctactccacctacagtg

SEQ ID NO: 4882489 - DNA, 25 bp, Homo sapien
tttcatacctcttcggctgctactc

SEQ ID NO: 4882490 - DNA, 25 bp, Homo sapien
ctttcatacctcttcggctgctact

SEQ ID NO: 4882491 - DNA, 25 bp, Homo sapien
acctcttcggctgctactccaccta

SEQ ID NO: 4882492 - DNA, 25 bp, Homo sapien
caccttagatctacacaattttcct

SEQ ID NO: 4882493 - DNA, 25 bp, Homo sapien
atagcattgtacaccttagatctac

SEQ ID NO: 4882494 - DNA, 25 bp, Homo sapien
tgtacaccttagatctacacaattt

SEQ ID NO: 4882495 - DNA, 25 bp, Homo sapien
ttttcctttttcaatcatacgtcaa

SEQ ID NO: 4882496 - DNA, 25 bp, Homo sapien
gcagaaatgctttgattacccacag

SEQ ID NO: 4882497 - DNA, 25 bp, Homo sapien
tgtctcgtcgcaggcatgccttgca

SEQ ID NO: 4882498 - DNA, 25 bp, Homo sapien
tctttcaccagatgagatcagtgtc

SEQ ID NO: 4882499 - DNA, 25 bp, Homo sapien
aagttccatttacaacagtgtcaga

SEQ ID NO: 4882500 - DNA, 25 bp, Homo sapien
gcttctaaagaaggttgttgccagg

SEQ ID NO: 4882501 - DNA, 25 bp, Homo sapien
tgttgccaggtatatgcacctagtg

SEQ ID NO: 4882502 - DNA, 25 bp, Homo sapien
caaatgtgaacacttggaccagcta

SEQ ID NO: 4882503 - DNA, 25 bp, Homo sapien
tctttgcaccaaacgacaaatgtga

SEQ ID NO: 4882504 - DNA, 25 bp, Homo sapien
acatgctcctccaaaggggacgtct

SEQ ID NO: 4882505 - DNA, 25 bp, Homo sapien
catgctcctccaaaggggacgtctt

SEQ ID NO: 4882506 - DNA, 25 bp, Homo sapien
tgctcctccaaaggggacgtcttca

SEQ ID NO: 4882507 - DNA, 25 bp, Homo sapien
cacatgctcctccaaaggggacgtc

SEQ ID NO: 4882508 - DNA, 25 bp, Homo sapien
cagccatctctgaggcttgctgatc

SEQ ID NO: 4882509 - DNA, 25 bp, Homo sapien
tgatgacatcgcctttggaggagca

SEQ ID NO: 4882510 - DNA, 25 bp, Homo sapien
tctgaggcttgctgatcttgatagc

SEQ ID NO: 4882511 - DNA, 25 bp, Homo sapien
gcagtaacccgttgtttgtgctgta

SEQ ID NO: 4882512 - DNA, 25 bp, Homo sapien
taataagatgtactgaactcatcct

SEQ ID NO: 4882513 - DNA, 25 bp, Homo sapien
aataagatgtactgaactcatcctt

SEQ ID NO: 4882514 - DNA, 25 bp, Homo sapien
ataagatgtactgaactcatccttc

SEQ ID NO: 4882515 - DNA, 25 bp, Homo sapien
ttaataagatgtactgaactcatcc

SEQ ID NO: 4882516 - DNA, 25 bp, Homo sapien
tggacttcgattttccgaagaacac

SEQ ID NO: 4882517 - DNA, 25 bp, Homo sapien
ccactgtgataaagcagttccagga

SEQ ID NO: 4882518 - DNA, 25 bp, Homo sapien
cccactgtgataaagcagttccagg

SEQ ID NO: 4882519 - DNA, 25 bp, Homo sapien
caatgcaaagttggacttcgatttt

SEQ ID NO: 4882520 - DNA, 25 bp, Homo sapien
gtcaatatcgatggctaaaatgtac

SEQ ID NO: 4882521 - DNA, 25 bp, Homo sapien
tgtttgtcaatatcgatggctaaaa

SEQ ID NO: 4882522 - DNA, 25 bp, Homo sapien
ttgtcaatatcgatggctaaaatgt

SEQ ID NO: 4882523 - DNA, 25 bp, Homo sapien
ctagtgtttgtcaatatcgatggct

SEQ ID NO: 4882524 - DNA, 25 bp, Homo sapien
gagatttagctttagatggacccaa

SEQ ID NO: 4882525 - DNA, 25 bp, Homo sapien
taaaatcgccttgccatttcaccca

SEQ ID NO: 4882526 - DNA, 25 bp, Homo sapien
tttcacccagatatggagatttagc

SEQ ID NO: 4882527 - DNA, 25 bp, Homo sapien
gacccaaaattcttaacaatgccag

SEQ ID NO: 4882528 - DNA, 25 bp, Homo sapien
caggcatcatatgatattccatcac

SEQ ID NO: 4882529 - DNA, 25 bp, Homo sapien
gggagaggctattcttagcagcaac

SEQ ID NO: 4882530 - DNA, 25 bp, Homo sapien
tggccaatgaatcacaggcatcata

SEQ ID NO: 4882531 - DNA, 25 bp, Homo sapien
agagaagagcgccataagtggccaa

SEQ ID NO: 4882532 - DNA, 25 bp, Homo sapien
ttccatgcccttctagatgctgcag

SEQ ID NO: 4882533 - DNA, 25 bp, Homo sapien
tacagtatttggtatttagcaggca

SEQ ID NO: 4882534 - DNA, 25 bp, Homo sapien
tagtattgagagttgatctggccac

SEQ ID NO: 4882535 - DNA, 25 bp, Homo sapien
gcccatgactacatcgaacccaatg

SEQ ID NO: 4882536 - DNA, 25 bp, Homo sapien
ttgccaaaatctgcaacctggcatg

SEQ ID NO: 4882537 - DNA, 25 bp, Homo sapien
tatcacactgacaagtcaagcacat

SEQ ID NO: 4882538 - DNA, 25 bp, Homo sapien
gcatgcaggctccaatcttcaaatt

SEQ ID NO: 4882539 - DNA, 25 bp, Homo sapien
cacactgacaagtcaagcacatcat

SEQ ID NO: 4882540 - DNA, 25 bp, Homo sapien
gccaataaaggcagctgacagcatg

SEQ ID NO: 4882541 - DNA, 25 bp, Homo sapien
taaggaaaatctggacgtgattacc

SEQ ID NO: 4882542 - DNA, 25 bp, Homo sapien
tggagggccattgtctttaaggaaa

SEQ ID NO: 4882543 - DNA, 25 bp, Homo sapien
gccagttgcatggagggccattgtc

SEQ ID NO: 4882544 - DNA, 25 bp, Homo sapien
tctccaagctgtccattatctattt

SEQ ID NO: 4882545 - DNA, 25 bp, Homo sapien
tttgagagtataatttgtttcccgc

SEQ ID NO: 4882546 - DNA, 25 bp, Homo sapien
tttcccgcatagaatatgtgttagc

SEQ ID NO: 4882547 - DNA, 25 bp, Homo sapien
cagcatgatgcgttttacatttgta

SEQ ID NO: 4882548 - DNA, 25 bp, Homo sapien
tcacaaactgtctgcttgtcaattc

SEQ ID NO: 4882549 - DNA, 25 bp, Homo sapien
ttgtcaattccaagtcacccccctg

SEQ ID NO: 4882550 - DNA, 25 bp, Homo sapien
tatgaacagcaactgattttccatg

SEQ ID NO: 4882551 - DNA, 25 bp, Homo sapien
aaccacagagctgttatgaacagca

SEQ ID NO: 4882552 - DNA, 25 bp, Homo sapien
gggcaggtctccattgatcaagtga

SEQ ID NO: 4882553 - DNA, 25 bp, Homo sapien
gacatcacgatagtcagaagcagga

SEQ ID NO: 4882554 - DNA, 25 bp, Homo sapien
tagtaaacaccagaatcagtcatcc

SEQ ID NO: 4882555 - DNA, 25 bp, Homo sapien
aaagcagctctactatgacatcacg

SEQ ID NO: 4882556 - DNA, 25 bp, Homo sapien
tccgtgtacctcaaagagctaccac

SEQ ID NO: 4882557 - DNA, 25 bp, Homo sapien
gtccctttggcttggtaccactctc

SEQ ID NO: 4882558 - DNA, 25 bp, Homo sapien
tcaaaggcagctacctccgtgtacc

SEQ ID NO: 4882559 - DNA, 25 bp, Homo sapien
cctttggcttggtaccactctctct

SEQ ID NO: 4882560 - DNA, 25 bp, Homo sapien
gagaactctcgctgatttttctcct

SEQ ID NO: 4882561 - DNA, 25 bp, Homo sapien
tgtgagaactctcgctgatttttct

SEQ ID NO: 4882562 - DNA, 25 bp, Homo sapien
gaggcagtgtgagaactctcgctga

SEQ ID NO: 4882563 - DNA, 25 bp, Homo sapien
cagtgtgagaactctcgctgatttt

SEQ ID NO: 4882564 - DNA, 25 bp, Homo sapien
tgttggtgctgagaaaaggccagca

SEQ ID NO: 4882565 - DNA, 25 bp, Homo sapien
tagtataggcctgaaaaaagctccc

SEQ ID NO: 4882566 - DNA, 25 bp, Homo sapien
catgggtaacctacaaaaattgatc

SEQ ID NO: 4882567 - DNA, 25 bp, Homo sapien
tagaatctgcgtgtccagagtgtgg

SEQ ID NO: 4882568 - DNA, 25 bp, Homo sapien
ctatacattgatcaaccaggaatct

SEQ ID NO: 4882569 - DNA, 25 bp, Homo sapien
cacaccaggaagctttgatttctgc

SEQ ID NO: 4882570 - DNA, 25 bp, Homo sapien
aaccaggaatcttctaccacaacct

SEQ ID NO: 4882571 - DNA, 25 bp, Homo sapien
caccaggaagctttgatttctgccc

SEQ ID NO: 4882572 - DNA, 25 bp, Homo sapien
gttagaccagatggctgttgacctt

SEQ ID NO: 4882573 - DNA, 25 bp, Homo sapien
gggagagattcccaactgttctcat

SEQ ID NO: 4882574 - DNA, 25 bp, Homo sapien
gaaagccagcatgggttagaccaga

SEQ ID NO: 4882575 - DNA, 25 bp, Homo sapien
agagaatgggagagattcccaactg

SEQ ID NO: 4882576 - DNA, 25 bp, Homo sapien
ttcacactcctggatgccattaggc

SEQ ID NO: 4882577 - DNA, 25 bp, Homo sapien
tcacactcctggatgccattaggct

SEQ ID NO: 4882578 - DNA, 25 bp, Homo sapien
cacactcctggatgccattaggctc

SEQ ID NO: 4882579 - DNA, 25 bp, Homo sapien
acactcctggatgccattaggctcc

SEQ ID NO: 4882580 - DNA, 25 bp, Homo sapien
tgtggtgataacaaccattacaaac

SEQ ID NO: 4882581 - DNA, 25 bp, Homo sapien
aatatttcacaaaccacgatataaa

SEQ ID NO: 4882582 - DNA, 25 bp, Homo sapien
gataacaaccattacaaactcccaa

SEQ ID NO: 4882583 - DNA, 25 bp, Homo sapien
cacaaaccacgatataaattgactt

SEQ ID NO: 4882584 - DNA, 25 bp, Homo sapien
tgtgctgcctgacttctacgtggac

SEQ ID NO: 4882585 - DNA, 25 bp, Homo sapien
tcctcttgtgacagggaagttactt

SEQ ID NO: 4882586 - DNA, 25 bp, Homo sapien
cagtgggacgttcagctgttatatc

SEQ ID NO: 4882587 - DNA, 25 bp, Homo sapien
tggctttcgctttcagacaaatgct

SEQ ID NO: 4882588 - DNA, 25 bp, Homo sapien
tccagcttaggtgatgaacagttgt

SEQ ID NO: 4882589 - DNA, 25 bp, Homo sapien
gccctcatcctaacaggtttcctgg

SEQ ID NO: 4882590 - DNA, 25 bp, Homo sapien
ggtttcctggtctgaatctctaggg

SEQ ID NO: 4882591 - DNA, 25 bp, Homo sapien
ttaaggacactacaatgtaatgaaa

SEQ ID NO: 4882592 - DNA, 25 bp, Homo sapien
cattgccccaagtcctgaaaggaga

SEQ ID NO: 4882593 - DNA, 25 bp, Homo sapien
gaacttattgctgatgcaccaggcc

SEQ ID NO: 4882594 - DNA, 25 bp, Homo sapien
ttatagtgatagagcacctgggcag

SEQ ID NO: 4882595 - DNA, 25 bp, Homo sapien
tgagagctcactggtaaacaaggca

SEQ ID NO: 4882596 - DNA, 25 bp, Homo sapien
ttctctgcacacgtcccaaaatatg

SEQ ID NO: 4882597 - DNA, 25 bp, Homo sapien
cacgtcccaaaatatgtaggtctta

SEQ ID NO: 4882598 - DNA, 25 bp, Homo sapien
aaaatatgtaggtcttattcccaga

SEQ ID NO: 4882599 - DNA, 25 bp, Homo sapien
ctgcacacgtcccaaaatatgtagg

SEQ ID NO: 4882600 - DNA, 25 bp, Homo sapien
gcccaagttatagtaggtcccagta

SEQ ID NO: 4882601 - DNA, 25 bp, Homo sapien
caaaaagtggtctggactcctgcca

SEQ ID NO: 4882602 - DNA, 25 bp, Homo sapien
caggctgattttcaacgggtgcccc

SEQ ID NO: 4882603 - DNA, 25 bp, Homo sapien
cattgtcaggcagggatcactcttg

SEQ ID NO: 4882604 - DNA, 25 bp, Homo sapien
ccagaggtggtttgttcatgtttat

SEQ ID NO: 4882605 - DNA, 25 bp, Homo sapien
gaactggcttccaccacttttatga

SEQ ID NO: 4882606 - DNA, 25 bp, Homo sapien
gccctcctgagactttagttgcaca

SEQ ID NO: 4882607 - DNA, 25 bp, Homo sapien
tcacagtaccaatatgtctcatgct

SEQ ID NO: 4882608 - DNA, 25 bp, Homo sapien
ggcaccatctctgttccataccttt

SEQ ID NO: 4882609 - DNA, 25 bp, Homo sapien
tgctgaattagtccactttgcaggt

SEQ ID NO: 4882610 - DNA, 25 bp, Homo sapien
cactttgcaggtgatcattccatcc

SEQ ID NO: 4882611 - DNA, 25 bp, Homo sapien
tcaggtcacccgtgtctctaaagga

SEQ ID NO: 4882612 - DNA, 25 bp, Homo sapien
gattttcttctcgtatcacaaatga

SEQ ID NO: 4882613 - DNA, 25 bp, Homo sapien
ggtgcctcgagtaaccacttcttga

SEQ ID NO: 4882614 - DNA, 25 bp, Homo sapien
cataacatgtgaaggattcagtcct

SEQ ID NO: 4882615 - DNA, 25 bp, Homo sapien
tctagttcctatgataacatgagct

SEQ ID NO: 4882616 - DNA, 25 bp, Homo sapien
ttttgcaggttgtgctgagaactgc

SEQ ID NO: 4882617 - DNA, 25 bp, Homo sapien
cttttgcaggttgtgctgagaactg

SEQ ID NO: 4882618 - DNA, 25 bp, Homo sapien
ttgcaggttgtgctgagaactgcat

SEQ ID NO: 4882619 - DNA, 25 bp, Homo sapien
tttgcaggttgtgctgagaactgca

SEQ ID NO: 4882620 - DNA, 25 bp, Homo sapien
gatggacacgattccctaagcttga

SEQ ID NO: 4882621 - DNA, 25 bp, Homo sapien
ctgtgacttctgatggacacgattc

SEQ ID NO: 4882622 - DNA, 25 bp, Homo sapien
cctaagcttgaaatatttgccaatg

SEQ ID NO: 4882623 - DNA, 25 bp, Homo sapien
tcaactatagaaaaactatctgtga

SEQ ID NO: 4882624 - DNA, 25 bp, Homo sapien
gtgtttgtcgcctaacaaaatggaa

SEQ ID NO: 4882625 - DNA, 25 bp, Homo sapien
cctgtgcctgtgtgaacaggtgttt

SEQ ID NO: 4882626 - DNA, 25 bp, Homo sapien
tgaacaggtgtttgtcgcctaacaa

SEQ ID NO: 4882627 - DNA, 25 bp, Homo sapien
cctgtgtgaacaggtgtttgtcgcc

SEQ ID NO: 4882628 - DNA, 25 bp, Homo sapien
cttatatttcatgacgaaggaggat

SEQ ID NO: 4882629 - DNA, 25 bp, Homo sapien
tatatttcatgacgaaggaggatgc

SEQ ID NO: 4882630 - DNA, 25 bp, Homo sapien
atttcatgacgaaggaggatgcatc

SEQ ID NO: 4882631 - DNA, 25 bp, Homo sapien
tatttcatgacgaaggaggatgcat

SEQ ID NO: 4882632 - DNA, 25 bp, Homo sapien
ttatcatcagtaactcctgtaaaaa

SEQ ID NO: 4882633 - DNA, 25 bp, Homo sapien
catcagtaactcctgtaaaaattta

SEQ ID NO: 4882634 - DNA, 25 bp, Homo sapien
tgacctgtagatgtagataactttg

SEQ ID NO: 4882635 - DNA, 25 bp, Homo sapien
gataactttgactcatctgactcct

SEQ ID NO: 4882636 - DNA, 25 bp, Homo sapien
accagttgtaaagaactccattggg

SEQ ID NO: 4882637 - DNA, 25 bp, Homo sapien
cgacaccagttgtaaagaactccat

SEQ ID NO: 4882638 - DNA, 25 bp, Homo sapien
gcctgtgctctcacgacaccagttg

SEQ ID NO: 4882639 - DNA, 25 bp, Homo sapien
gctctcacgacaccagttgtaaaga

SEQ ID NO: 4882640 - DNA, 25 bp, Homo sapien
tttccctacgggtacattggtcagc

SEQ ID NO: 4882641 - DNA, 25 bp, Homo sapien
cctacgggtacattggtcagctttg

SEQ ID NO: 4882642 - DNA, 25 bp, Homo sapien
tacgggtacattggtcagctttgtc

SEQ ID NO: 4882643 - DNA, 25 bp, Homo sapien
tccctacgggtacattggtcagctt

SEQ ID NO: 4882644 - DNA, 25 bp, Homo sapien
tcttggacataaattctttaggacg

SEQ ID NO: 4882645 - DNA, 25 bp, Homo sapien
tccatatatccttgcaaacacttgc

SEQ ID NO: 4882646 - DNA, 25 bp, Homo sapien
gaatggaactgctagataataggct

SEQ ID NO: 4882647 - DNA, 25 bp, Homo sapien
tgataatggccaacttaatgtgtaa

SEQ ID NO: 4882648 - DNA, 25 bp, Homo sapien
catggaaacagatccaataagtcat

SEQ ID NO: 4882649 - DNA, 25 bp, Homo sapien
gggtcaaaagcatgattagaaacca

SEQ ID NO: 4882650 - DNA, 25 bp, Homo sapien
catgattagaaaccaaattagccac

SEQ ID NO: 4882651 - DNA, 25 bp, Homo sapien
ttctcccgttaccacaaacagtctg

SEQ ID NO: 4882652 - DNA, 25 bp, Homo sapien
ccctcctggcttgtgccatgtgatg

SEQ ID NO: 4882653 - DNA, 25 bp, Homo sapien
ggccctcctggcttgtgccatgtga

SEQ ID NO: 4882654 - DNA, 25 bp, Homo sapien
gccctcctggcttgtgccatgtgat

SEQ ID NO: 4882655 - DNA, 25 bp, Homo sapien
aggccctcctggcttgtgccatgtg

SEQ ID NO: 4882656 - DNA, 25 bp, Homo sapien
ggcaaaggcaaggatatatcttaac

SEQ ID NO: 4882657 - DNA, 25 bp, Homo sapien
aagatctgatgcaaggcacacagcc

SEQ ID NO: 4882658 - DNA, 25 bp, Homo sapien
tatcttaacctatcccaaattctca

SEQ ID NO: 4882659 - DNA, 25 bp, Homo sapien
cagagagaacttcaaggatttggca

SEQ ID NO: 4882660 - DNA, 25 bp, Homo sapien
ggaggaatagctgatgaccgcatag

SEQ ID NO: 4882661 - DNA, 25 bp, Homo sapien
aatgtgggctgagatgtctgacatt

SEQ ID NO: 4882662 - DNA, 25 bp, Homo sapien
tgcggttgaagggaagcggcttctc

SEQ ID NO: 4882663 - DNA, 25 bp, Homo sapien
tccattcatagcaatctgagctctg

SEQ ID NO: 4882664 - DNA, 25 bp, Homo sapien
aaagcaaatttctgtgatccacaag

SEQ ID NO: 4882665 - DNA, 25 bp, Homo sapien
ggcactgaggaaagctgttctccga

SEQ ID NO: 4882666 - DNA, 25 bp, Homo sapien
gatcctgggcggctttctggagcac

SEQ ID NO: 4882667 - DNA, 25 bp, Homo sapien
tgttctccgaaccaaagcaaatttc

SEQ ID NO: 4882668 - DNA, 25 bp, Homo sapien
cttattggcattttgtcttcgttgg

SEQ ID NO: 4882669 - DNA, 25 bp, Homo sapien
attgtaacgtgatgccatgacggtt

SEQ ID NO: 4882670 - DNA, 25 bp, Homo sapien
ttttgtcttcgttggagagaactgt

SEQ ID NO: 4882671 - DNA, 25 bp, Homo sapien
ttggcattttgtcttcgttggagag

SEQ ID NO: 4882672 - DNA, 25 bp, Homo sapien
ttccgaacactcacctgaagtacct

SEQ ID NO: 4882673 - DNA, 25 bp, Homo sapien
taacttttccgcatggctgttccga

SEQ ID NO: 4882674 - DNA, 25 bp, Homo sapien
tggatttattaacttttccgcatgg

SEQ ID NO: 4882675 - DNA, 25 bp, Homo sapien
ggctgttccgaacactcacctgaag

SEQ ID NO: 4882676 - DNA, 25 bp, Homo sapien
tagccaatccataagatgacaatgc

SEQ ID NO: 4882677 - DNA, 25 bp, Homo sapien
tcagctcatgtttgtgtaccggtag

SEQ ID NO: 4882678 - DNA, 25 bp, Homo sapien
agatgacaatgcaaattgtgtgaaa

SEQ ID NO: 4882679 - DNA, 25 bp, Homo sapien
tgtgtaccggtagccaatccataag

SEQ ID NO: 4882680 - DNA, 25 bp, Homo sapien
caaagtgaatatataacagtccagc

SEQ ID NO: 4882681 - DNA, 25 bp, Homo sapien
aatccgtggttagctctggcgggcc

SEQ ID NO: 4882682 - DNA, 25 bp, Homo sapien
tgaatggaagcacaatggaagcaaa

SEQ ID NO: 4882683 - DNA, 25 bp, Homo sapien
gactggacaaatcaaggtgacaatc

SEQ ID NO: 4882684 - DNA, 25 bp, Homo sapien
tattttgaccgactccttcactgtg

SEQ ID NO: 4882685 - DNA, 25 bp, Homo sapien
tgctgtctataactacgtgtatcat

SEQ ID NO: 4882686 - DNA, 25 bp, Homo sapien
gccctttgatcaagtaacatttgca

SEQ ID NO: 4882687 - DNA, 25 bp, Homo sapien
tttattttgaccgactccttcactg

SEQ ID NO: 4882688 - DNA, 25 bp, Homo sapien
gtcaggtgaatggtcacagagctct

SEQ ID NO: 4882689 - DNA, 25 bp, Homo sapien
gaattccaaggaaagacgcatctgt

SEQ ID NO: 4882690 - DNA, 25 bp, Homo sapien
cacagagctcttatggttggctgca

SEQ ID NO: 4882691 - DNA, 25 bp, Homo sapien
tgtaaccatcaagccctgattctgc

SEQ ID NO: 4882692 - DNA, 25 bp, Homo sapien
attaacaccatcacaacaccaactg

SEQ ID NO: 4882693 - DNA, 25 bp, Homo sapien
ggatccccatatgtctaacaatgta

SEQ ID NO: 4882694 - DNA, 25 bp, Homo sapien
gaacactatatcttatgtacgtaga

SEQ ID NO: 4882695 - DNA, 25 bp, Homo sapien
gaatgcatgtctagaagtttccttt

SEQ ID NO: 4882696 - DNA, 25 bp, Homo sapien
tcgtctttgctgacagcacgtagct

SEQ ID NO: 4882697 - DNA, 25 bp, Homo sapien
catgcactgaaatctcgtctttgct

SEQ ID NO: 4882698 - DNA, 25 bp, Homo sapien
gacagcacgtagctgacaagtactg

SEQ ID NO: 4882699 - DNA, 25 bp, Homo sapien
cgtagctgacaagtactgatgttct

SEQ ID NO: 4882700 - DNA, 25 bp, Homo sapien
ggaacgctccatgggacaatataat

SEQ ID NO: 4882701 - DNA, 25 bp, Homo sapien
cgctccatgggacaatataatgaag

SEQ ID NO: 4882702 - DNA, 25 bp, Homo sapien
ttggaacgctccatgggacaatata

SEQ ID NO: 4882703 - DNA, 25 bp, Homo sapien
tttttggaacgctccatgggacaat

SEQ ID NO: 4882704 - DNA, 25 bp, Homo sapien
cttcctgattgtgacccattctagg

SEQ ID NO: 4882705 - DNA, 25 bp, Homo sapien
tcctgattgtgacccattctaggct

SEQ ID NO: 4882706 - DNA, 25 bp, Homo sapien
attctaggctccagctagttgtaat

SEQ ID NO: 4882707 - DNA, 25 bp, Homo sapien
ggctccagctagttgtaattctgga

SEQ ID NO: 4882708 - DNA, 25 bp, Homo sapien
aaggcatctgggtaggctgtctcat

SEQ ID NO: 4882709 - DNA, 25 bp, Homo sapien
gaaaaggcatctgggtaggctgtct

SEQ ID NO: 4882710 - DNA, 25 bp, Homo sapien
aaaaggcatctgggtaggctgtctc

SEQ ID NO: 4882711 - DNA, 25 bp, Homo sapien
aaaggcatctgggtaggctgtctca

SEQ ID NO: 4882712 - DNA, 25 bp, Homo sapien
ctttactggatggtgtgatggttcc

SEQ ID NO: 4882713 - DNA, 25 bp, Homo sapien
gctgatggatgactaaaccaagagt

SEQ ID NO: 4882714 - DNA, 25 bp, Homo sapien
aaccaagagtgtaatcgagagaaag

SEQ ID NO: 4882715 - DNA, 25 bp, Homo sapien
gagcaagcaagcctgtagctgatgg

SEQ ID NO: 4882716 - DNA, 25 bp, Homo sapien
tacgcctgctcttaatctgcaattc

SEQ ID NO: 4882717 - DNA, 25 bp, Homo sapien
tctgcaattctagaaattcactcat

SEQ ID NO: 4882718 - DNA, 25 bp, Homo sapien
gcagaggcctttttacgcctgctct

SEQ ID NO: 4882719 - DNA, 25 bp, Homo sapien
taatctgcaattctagaaattcact

SEQ ID NO: 4882720 - DNA, 25 bp, Homo sapien
gcttgccaacgatgtgcagcagtgg

SEQ ID NO: 4882721 - DNA, 25 bp, Homo sapien
taacaatcagctctggccgcttcag

SEQ ID NO: 4882722 - DNA, 25 bp, Homo sapien
cagcactggtggagataactagccc

SEQ ID NO: 4882723 - DNA, 25 bp, Homo sapien
cggtggcatggatcggcaaaaagtt

SEQ ID NO: 4882724 - DNA, 25 bp, Homo sapien
gaagtaacaaagctctgaagcctca

SEQ ID NO: 4882725 - DNA, 25 bp, Homo sapien
tcaatactacttagttggttacctg

SEQ ID NO: 4882726 - DNA, 25 bp, Homo sapien
cttgaagtaacaaagctctgaagcc

SEQ ID NO: 4882727 - DNA, 25 bp, Homo sapien
cctgtgtagtcagttgaacatccaa

SEQ ID NO: 4882728 - DNA, 25 bp, Homo sapien
ctgtgtgccttcaacaaggctagca

SEQ ID NO: 4882729 - DNA, 25 bp, Homo sapien
cattgtcataggcaacgtctttcct

SEQ ID NO: 4882730 - DNA, 25 bp, Homo sapien
aaggctagcacgacaaccagacagg

SEQ ID NO: 4882731 - DNA, 25 bp, Homo sapien
gaatatagcgttctgtagcaatgct

SEQ ID NO: 4882732 - DNA, 25 bp, Homo sapien
catccccaggatagtactggctagt

SEQ ID NO: 4882733 - DNA, 25 bp, Homo sapien
ctccatccccaggatagtactggct

SEQ ID NO: 4882734 - DNA, 25 bp, Homo sapien
tccccaggatagtactggctagttc

SEQ ID NO: 4882735 - DNA, 25 bp, Homo sapien
cccaggatagtactggctagttccc

SEQ ID NO: 4882736 - DNA, 25 bp, Homo sapien
cactgatgataggttccaacacaga

SEQ ID NO: 4882737 - DNA, 25 bp, Homo sapien
cagtttgtgctcctcatgtctttcg

SEQ ID NO: 4882738 - DNA, 25 bp, Homo sapien
tgatattccagaaggctattgcctt

SEQ ID NO: 4882739 - DNA, 25 bp, Homo sapien
ttcccaatcatgagagataagtgga

SEQ ID NO: 4882740 - DNA, 25 bp, Homo sapien
cgttgagagaggtaaacgttagcag

SEQ ID NO: 4882741 - DNA, 25 bp, Homo sapien
cttgcaataggcatgcctcgtgatg

SEQ ID NO: 4882742 - DNA, 25 bp, Homo sapien
cagatgtttctgtgatgcctgttgc

SEQ ID NO: 4882743 - DNA, 25 bp, Homo sapien
gcttgacatatcgaacgccactgga

SEQ ID NO: 4882744 - DNA, 25 bp, Homo sapien
tgaatgggctacagccatagtagcc

SEQ ID NO: 4882745 - DNA, 25 bp, Homo sapien
cacctactggtgcattaagatttca

SEQ ID NO: 4882746 - DNA, 25 bp, Homo sapien
taaagccgatcaaaactcaaacagt

SEQ ID NO: 4882747 - DNA, 25 bp, Homo sapien
ggattaacactgctttatcaggaca

SEQ ID NO: 4882748 - DNA, 25 bp, Homo sapien
tcattttgaccatcttcaccctcgg

SEQ ID NO: 4882749 - DNA, 25 bp, Homo sapien
cggtttggcttctagccctcatttc

SEQ ID NO: 4882750 - DNA, 25 bp, Homo sapien
tcttcaccctcggtttggcttctag

SEQ ID NO: 4882751 - DNA, 25 bp, Homo sapien
tgaccatcttcaccctcggtttggc

SEQ ID NO: 4882752 - DNA, 25 bp, Homo sapien
gtactaggtttgcttttgaggttga

SEQ ID NO: 4882753 - DNA, 25 bp, Homo sapien
tggttctgtggtactaggtttgctt

SEQ ID NO: 4882754 - DNA, 25 bp, Homo sapien
tctgtggtactaggtttgcttttga

SEQ ID NO: 4882755 - DNA, 25 bp, Homo sapien
ctaggtttgcttttgaggttgactc

SEQ ID NO: 4882756 - DNA, 25 bp, Homo sapien
tggattgataccagagtgagggttt

SEQ ID NO: 4882757 - DNA, 25 bp, Homo sapien
taagactgtctttggtccccattcc

SEQ ID NO: 4882758 - DNA, 25 bp, Homo sapien
aaaatgacatttggtaatgaagata

SEQ ID NO: 4882759 - DNA, 25 bp, Homo sapien
ccttgaaggtagacgtttggattga

SEQ ID NO: 4882760 - DNA, 25 bp, Homo sapien
gaagcgctaagcatgttttgctcag

SEQ ID NO: 4882761 - DNA, 25 bp, Homo sapien
tgatgatgggcaggtctaggcctca

SEQ ID NO: 4882762 - DNA, 25 bp, Homo sapien
aaagagtcagagtgtgcaacgtggc

SEQ ID NO: 4882763 - DNA, 25 bp, Homo sapien
cggagagaccatgtgtagggcttat

SEQ ID NO: 4882764 - DNA, 25 bp, Homo sapien
gtaaacaccataaagcaagccaggt

SEQ ID NO: 4882765 - DNA, 25 bp, Homo sapien
cagaagactcccatgatagcctact

SEQ ID NO: 4882766 - DNA, 25 bp, Homo sapien
tcaatggtgtaagagcccttttgct

SEQ ID NO: 4882767 - DNA, 25 bp, Homo sapien
ggtgatccattagcaagcagcagtg

SEQ ID NO: 4882768 - DNA, 25 bp, Homo sapien
gcttttaatgagagattgctttgtt

SEQ ID NO: 4882769 - DNA, 25 bp, Homo sapien
gattgctttgttacaaagtcctcaa

SEQ ID NO: 4882770 - DNA, 25 bp, Homo sapien
ctcaacatcaagtgggctggtgagc

SEQ ID NO: 4882771 - DNA, 25 bp, Homo sapien
tcaacatcaagtgggctggtgagct

SEQ ID NO: 4882772 - DNA, 25 bp, Homo sapien
tgtttgcctaccagtgctgcttaga

SEQ ID NO: 4882773 - DNA, 25 bp, Homo sapien
caggcggatgactggatgcctgcca

SEQ ID NO: 4882774 - DNA, 25 bp, Homo sapien
tcctccaaaggagtcgtgtgccatg

SEQ ID NO: 4882775 - DNA, 25 bp, Homo sapien
tgcagtttgaagagggcaggcggat

SEQ ID NO: 4882776 - DNA, 25 bp, Homo sapien
tgataacactctggggtcatttcat

SEQ ID NO: 4882777 - DNA, 25 bp, Homo sapien
agctgataacactctggggtcattt

SEQ ID NO: 4882778 - DNA, 25 bp, Homo sapien
actctggggtcatttcattgaagaa

SEQ ID NO: 4882779 - DNA, 25 bp, Homo sapien
gctagctagctgataacactctggg

SEQ ID NO: 4882780 - DNA, 25 bp, Homo sapien
cccggagttaatgctgattgcagca

SEQ ID NO: 4882781 - DNA, 25 bp, Homo sapien
cagctgcttacacatggagtctcca

SEQ ID NO: 4882782 - DNA, 25 bp, Homo sapien
caactgtgaaggttgccatgcaacc

SEQ ID NO: 4882783 - DNA, 25 bp, Homo sapien
catgcaaccatattcttttagggac

SEQ ID NO: 4882784 - DNA, 25 bp, Homo sapien
tattttgccctagaatgacattctc

SEQ ID NO: 4882785 - DNA, 25 bp, Homo sapien
aatatgcagggatacattcggttga

SEQ ID NO: 4882786 - DNA, 25 bp, Homo sapien
attttgtgccagatggccagttgca

SEQ ID NO: 4882787 - DNA, 25 bp, Homo sapien
ttgcagaggctgaactaagctgaac

SEQ ID NO: 4882788 - DNA, 25 bp, Homo sapien
ttcttctagttctgaaatggattcc

SEQ ID NO: 4882789 - DNA, 25 bp, Homo sapien
gcaactctcagggatataatgaatg

SEQ ID NO: 4882790 - DNA, 25 bp, Homo sapien
caactctcagggatataatgaatgt

SEQ ID NO: 4882791 - DNA, 25 bp, Homo sapien
gctgcaactctcagggatataatga

SEQ ID NO: 4882792 - DNA, 25 bp, Homo sapien
gagctgcaactctcagggatataat

SEQ ID NO: 4882793 - DNA, 25 bp, Homo sapien
gagtttgtcatgtaccaactcagca

SEQ ID NO: 4882794 - DNA, 25 bp, Homo sapien
ctgagtttgtcatgtaccaactcag

SEQ ID NO: 4882795 - DNA, 25 bp, Homo sapien
gtttgtcatgtaccaactcagcagc

SEQ ID NO: 4882796 - DNA, 25 bp, Homo sapien
tttgtcatgtaccaactcagcagca

SEQ ID NO: 4882797 - DNA, 25 bp, Homo sapien
gaacatctgtggcaataatcctgtc

SEQ ID NO: 4882798 - DNA, 25 bp, Homo sapien
cacccattatcctcttcactgctat

SEQ ID NO: 4882799 - DNA, 25 bp, Homo sapien
atctcttgtacttccacccattatc

SEQ ID NO: 4882800 - DNA, 25 bp, Homo sapien
cagataagctttcctgatttactga

SEQ ID NO: 4882801 - DNA, 25 bp, Homo sapien
tagagtagttaaatctttgctctgg

SEQ ID NO: 4882802 - DNA, 25 bp, Homo sapien
ttatagagtagttaaatctttgctc

SEQ ID NO: 4882803 - DNA, 25 bp, Homo sapien
atagagtagttaaatctttgctctg

SEQ ID NO: 4882804 - DNA, 25 bp, Homo sapien
tatagagtagttaaatctttgctct

SEQ ID NO: 4882805 - DNA, 25 bp, Homo sapien
gcaaggtttagtccttactgggtca

SEQ ID NO: 4882806 - DNA, 25 bp, Homo sapien
tgccacaataaaccagcgcaaggtt

SEQ ID NO: 4882807 - DNA, 25 bp, Homo sapien
ggctgtgcgaatgaataggcgatcc

SEQ ID NO: 4882808 - DNA, 25 bp, Homo sapien
cgaaatctccattgttgctcagcaa

SEQ ID NO: 4882809 - DNA, 25 bp, Homo sapien
ggaggtcggtgtttccctaaatgca

SEQ ID NO: 4882810 - DNA, 25 bp, Homo sapien
tggaggtcggtgtttccctaaatgc

SEQ ID NO: 4882811 - DNA, 25 bp, Homo sapien
caaaacatcagagaggaatctgaaa

SEQ ID NO: 4882812 - DNA, 25 bp, Homo sapien
gaggtcggtgtttccctaaatgcaa

SEQ ID NO: 4882813 - DNA, 25 bp, Homo sapien
aggtggaggcgcgtagggacgccta

SEQ ID NO: 4882814 - DNA, 25 bp, Homo sapien
cgcgcccaggcgtgcacctggagaa

SEQ ID NO: 4882815 - DNA, 25 bp, Homo sapien
cgcctagccaaagcgcagcgggtct

SEQ ID NO: 4882816 - DNA, 25 bp, Homo sapien
gggaggccacaagggcgtggacgag

SEQ ID NO: 4882817 - DNA, 25 bp, Homo sapien
taatccgcgtcgcagtccgtgcggt

SEQ ID NO: 4882818 - DNA, 25 bp, Homo sapien
gattttacacatcttccaccggtga

SEQ ID NO: 4882819 - DNA, 25 bp, Homo sapien
gattttcattgtctacgctcggcac

SEQ ID NO: 4882820 - DNA, 25 bp, Homo sapien
gaaattcagaagctttcaacgcagt

SEQ ID NO: 4882821 - DNA, 25 bp, Homo sapien
cagtcagacagatgttggctcccaa

SEQ ID NO: 4882822 - DNA, 25 bp, Homo sapien
tgtgtccttgaaaccaaagagccgc

SEQ ID NO: 4882823 - DNA, 25 bp, Homo sapien
attacacgggctgctgacgtcacca

SEQ ID NO: 4882824 - DNA, 25 bp, Homo sapien
ttcagcacaagaggattacacgggc

SEQ ID NO: 4882825 - DNA, 25 bp, Homo sapien
gccttccgtggtataaggtgcttta

SEQ ID NO: 4882826 - DNA, 25 bp, Homo sapien
caaaacgttttcaatcgctgctcag

SEQ ID NO: 4882827 - DNA, 25 bp, Homo sapien
cagcgcgttcgcagaggaaagaaga

SEQ ID NO: 4882828 - DNA, 25 bp, Homo sapien
gagagccttccgtggtataaggtgc

SEQ ID NO: 4882829 - DNA, 25 bp, Homo sapien
gagagacctgctagccctgttcaaa

SEQ ID NO: 4882830 - DNA, 25 bp, Homo sapien
tagccctagaaatccggagagagac

SEQ ID NO: 4882831 - DNA, 25 bp, Homo sapien
gagagagacctgctagccctgttca

SEQ ID NO: 4882832 - DNA, 25 bp, Homo sapien
ccggagagagacctgctagccctgt

SEQ ID NO: 4882833 - DNA, 25 bp, Homo sapien
caagaccggcaagagaatcgaaacg

SEQ ID NO: 4882834 - DNA, 25 bp, Homo sapien
aatcaaagcgcagtgttagggaggc

SEQ ID NO: 4882835 - DNA, 25 bp, Homo sapien
catgcgagggatacaaggtgacaag

SEQ ID NO: 4882836 - DNA, 25 bp, Homo sapien
tactgccgcgtccagagaaacgatt

SEQ ID NO: 4882837 - DNA, 25 bp, Homo sapien
gaagttgacctctacgggcggagcc

SEQ ID NO: 4882838 - DNA, 25 bp, Homo sapien
tgagagctggtcttgcgcagagacc

SEQ ID NO: 4882839 - DNA, 25 bp, Homo sapien
tctggtctggctacaagtttgctgc

SEQ ID NO: 4882840 - DNA, 25 bp, Homo sapien
gtttgctgcggagagaaaagcctgc

SEQ ID NO: 4882841 - DNA, 25 bp, Homo sapien
gataaacacacagatatgcctgggc

SEQ ID NO: 4882842 - DNA, 25 bp, Homo sapien
aaagagaaaaccatgcgtgtgtgcc

SEQ ID NO: 4882843 - DNA, 25 bp, Homo sapien
tctaaggcacttgtaaggaatggca

SEQ ID NO: 4882844 - DNA, 25 bp, Homo sapien
ggtttttaaggaccacgctattgca

SEQ ID NO: 4882845 - DNA, 25 bp, Homo sapien
ttcaagtgcagccgtaggctccgct

SEQ ID NO: 4882846 - DNA, 25 bp, Homo sapien
aagtgcagccgtaggctccgctctt

SEQ ID NO: 4882847 - DNA, 25 bp, Homo sapien
tcaagtgcagccgtaggctccgctc

SEQ ID NO: 4882848 - DNA, 25 bp, Homo sapien
gtgcagccgtaggctccgctcttgg

SEQ ID NO: 4882849 - DNA, 25 bp, Homo sapien
gcaaggccgccatgataacgtgtaa

SEQ ID NO: 4882850 - DNA, 25 bp, Homo sapien
caaagtcgtggtgcggaactgctac

SEQ ID NO: 4882851 - DNA, 25 bp, Homo sapien
tgtcaggcaagggtagcaaccagct

SEQ ID NO: 4882852 - DNA, 25 bp, Homo sapien
taagcactaaaatccgcggctgagg

SEQ ID NO: 4882853 - DNA, 25 bp, Homo sapien
tgagtatctcaacgggtcaagctgt

SEQ ID NO: 4882854 - DNA, 25 bp, Homo sapien
gattgtcaaaggactctcacggcac

SEQ ID NO: 4882855 - DNA, 25 bp, Homo sapien
aagttctcccattgcgaagcccggg

SEQ ID NO: 4882856 - DNA, 25 bp, Homo sapien
cgcgctagcatcttgttcccaggaa

SEQ ID NO: 4882857 - DNA, 25 bp, Homo sapien
ctaacacaacaacatgtgctcggta

SEQ ID NO: 4882858 - DNA, 25 bp, Homo sapien
aacacaacaacatgtgctcggtatc

SEQ ID NO: 4882859 - DNA, 25 bp, Homo sapien
cgttttaaactaacacaacaacatg

SEQ ID NO: 4882860 - DNA, 25 bp, Homo sapien
ttaaactaacacaacaacatgtgct

SEQ ID NO: 4882861 - DNA, 25 bp, Homo sapien
tggtcaaaatttgggttaatcactg

SEQ ID NO: 4882862 - DNA, 25 bp, Homo sapien
tacatcagcactaatatatgcaaca

SEQ ID NO: 4882863 - DNA, 25 bp, Homo sapien
cattacttctactcagagtgggtta

SEQ ID NO: 4882864 - DNA, 25 bp, Homo sapien
aacagacttcatggcaaaggtgtgc

SEQ ID NO: 4882865 - DNA, 25 bp, Homo sapien
tgatggaaatcgcagtggcagctga

SEQ ID NO: 4882866 - DNA, 25 bp, Homo sapien
agtatgcgttttacttcgggcagca

SEQ ID NO: 4882867 - DNA, 25 bp, Homo sapien
tatacggaacttgacacaattggtc

SEQ ID NO: 4882868 - DNA, 25 bp, Homo sapien
tctgcggtccacgattagggctttt

SEQ ID NO: 4882869 - DNA, 25 bp, Homo sapien
taagtagcacttatgcaccgtggct

SEQ ID NO: 4882870 - DNA, 25 bp, Homo sapien
ggatgcattccatgagccctagtgg

SEQ ID NO: 4882871 - DNA, 25 bp, Homo sapien
ttaacacgagtatagggaattcctg

SEQ ID NO: 4882872 - DNA, 25 bp, Homo sapien
gaattcctgagaagcattgtgactg

SEQ ID NO: 4882873 - DNA, 25 bp, Homo sapien
ctaaataatcacttaccttactggg

SEQ ID NO: 4882874 - DNA, 25 bp, Homo sapien
ggagaatagtctgaatgaactagcc

SEQ ID NO: 4882875 - DNA, 25 bp, Homo sapien
gcaaaagaggtaagtccaagccata

SEQ ID NO: 4882876 - DNA, 25 bp, Homo sapien
taataggaagataactgcaaaagag

SEQ ID NO: 4882877 - DNA, 25 bp, Homo sapien
taaaccacaattgagacaggagcta

SEQ ID NO: 4882878 - DNA, 25 bp, Homo sapien
ctctcattagtgacatggaagcact

SEQ ID NO: 4882879 - DNA, 25 bp, Homo sapien
tgtttccaaatagataaggatgtgc

SEQ ID NO: 4882880 - DNA, 25 bp, Homo sapien
ggagctaatactttacagtcaacat

SEQ ID NO: 4882881 - DNA, 25 bp, Homo sapien
tatgcgagctttctctaacctttcc

SEQ ID NO: 4882882 - DNA, 25 bp, Homo sapien
cactggcagtgctcctatgcgagct

SEQ ID NO: 4882883 - DNA, 25 bp, Homo sapien
ccagcagtaggctttttgcaaagca

SEQ ID NO: 4882884 - DNA, 25 bp, Homo sapien
tgcttttacgaaacctggaccaggc

SEQ ID NO: 4882885 - DNA, 25 bp, Homo sapien
ctagaaatctatatagggccaaacc

SEQ ID NO: 4882886 - DNA, 25 bp, Homo sapien
tatggcaggctatgtcgatgtgtac

SEQ ID NO: 4882887 - DNA, 25 bp, Homo sapien
aactaatgcaagagccttaggctgg

SEQ ID NO: 4882888 - DNA, 25 bp, Homo sapien
tagacggaagtgcaatgtgtataca

SEQ ID NO: 4882889 - DNA, 25 bp, Homo sapien
acacttttggttgtccaggttagca

SEQ ID NO: 4882890 - DNA, 25 bp, Homo sapien
gacctccttgcgttaacttgtgccc

SEQ ID NO: 4882891 - DNA, 25 bp, Homo sapien
ggaatactaatagtgtccaccttga

SEQ ID NO: 4882892 - DNA, 25 bp, Homo sapien
tagaacagtgcctgaaattaacact

SEQ ID NO: 4882893 - DNA, 25 bp, Homo sapien
tctcttgcaagtcgttttctctttt

SEQ ID NO: 4882894 - DNA, 25 bp, Homo sapien
cttgcaagtcgttttctctttttga

SEQ ID NO: 4882895 - DNA, 25 bp, Homo sapien
tatctcttgcaagtcgttttctctt

SEQ ID NO: 4882896 - DNA, 25 bp, Homo sapien
cgtatctcttgcaagtcgttttctc

SEQ ID NO: 4882897 - DNA, 25 bp, Homo sapien
gcaactgcataagatttgactaagg

SEQ ID NO: 4882898 - DNA, 25 bp, Homo sapien
tctgcagaaggatgtagtacacttt

SEQ ID NO: 4882899 - DNA, 25 bp, Homo sapien
tctttttgatgataccctgacttct

SEQ ID NO: 4882900 - DNA, 25 bp, Homo sapien
tcttcctggcaagcctttgttaacc

SEQ ID NO: 4882901 - DNA, 25 bp, Homo sapien
gaatcctcatccctgaataaattag

SEQ ID NO: 4882902 - DNA, 25 bp, Homo sapien
catttctcattgttgcaaaaggtag

SEQ ID NO: 4882903 - DNA, 25 bp, Homo sapien
gaaataatttgctctggaatcctca

SEQ ID NO: 4882904 - DNA, 25 bp, Homo sapien
gatatagacagtgctttgccttggg

SEQ ID NO: 4882905 - DNA, 25 bp, Homo sapien
tcctataagaggtagttgtaggtgg

SEQ ID NO: 4882906 - DNA, 25 bp, Homo sapien
ctcctataagaggtagttgtaggtg

SEQ ID NO: 4882907 - DNA, 25 bp, Homo sapien
tataagaggtagttgtaggtggaaa

SEQ ID NO: 4882908 - DNA, 25 bp, Homo sapien
cctataagaggtagttgtaggtgga

SEQ ID NO: 4882909 - DNA, 25 bp, Homo sapien
cagtcaaaccatataattaggcttt

SEQ ID NO: 4882910 - DNA, 25 bp, Homo sapien
tgagaaaggccttcccccataattc

SEQ ID NO: 4882911 - DNA, 25 bp, Homo sapien
catgcttggttaatgaaaagtcaac

SEQ ID NO: 4882912 - DNA, 25 bp, Homo sapien
gatagcctgtgcagggtaactcccc

SEQ ID NO: 4882913 - DNA, 25 bp, Homo sapien
atgcctaaggcttgccaagttgaca

SEQ ID NO: 4882914 - DNA, 25 bp, Homo sapien
tgcctaaggcttgccaagttgacag

SEQ ID NO: 4882915 - DNA, 25 bp, Homo sapien
tctaatccgtagtcctctacaatag

SEQ ID NO: 4882916 - DNA, 25 bp, Homo sapien
tgacagcttctaatccgtagtcctc

SEQ ID NO: 4882917 - DNA, 25 bp, Homo sapien
gaaatggttagtgggttcttgagca

SEQ ID NO: 4882918 - DNA, 25 bp, Homo sapien
tcagaaatggttagtgggttcttga

SEQ ID NO: 4882919 - DNA, 25 bp, Homo sapien
aaatggttagtgggttcttgagcag

SEQ ID NO: 4882920 - DNA, 25 bp, Homo sapien
cagaaatggttagtgggttcttgag

SEQ ID NO: 4882921 - DNA, 25 bp, Homo sapien
tttactcctatgaggagtgcccaag

SEQ ID NO: 4882922 - DNA, 25 bp, Homo sapien
ttcccattgagtatccttgtgcaga

SEQ ID NO: 4882923 - DNA, 25 bp, Homo sapien
tgcccaagtggcactcagcattgct

SEQ ID NO: 4882924 - DNA, 25 bp, Homo sapien
tgtatagatacagattcccattgag

SEQ ID NO: 4882925 - DNA, 25 bp, Homo sapien
atgagggtaccctggttcccttcag

SEQ ID NO: 4882926 - DNA, 25 bp, Homo sapien
gcaggactgtcgtagatgatatcat

SEQ ID NO: 4882927 - DNA, 25 bp, Homo sapien
tcctaagaggcctcgatgagactgg

SEQ ID NO: 4882928 - DNA, 25 bp, Homo sapien
aagatctttctatcataactgtgag

SEQ ID NO: 4882929 - DNA, 25 bp, Homo sapien
aacctgaacatgcttttactaacac

SEQ ID NO: 4882930 - DNA, 25 bp, Homo sapien
cttctttggagactgctgttagcca

SEQ ID NO: 4882931 - DNA, 25 bp, Homo sapien
ggagactgctgttagccaacctgaa

SEQ ID NO: 4882932 - DNA, 25 bp, Homo sapien
tgttagccaacctgaacatgctttt

SEQ ID NO: 4882933 - DNA, 25 bp, Homo sapien
ttgtgaacactactagtacctgcat

SEQ ID NO: 4882934 - DNA, 25 bp, Homo sapien
tctggtgagatttcccttgtgaaca

SEQ ID NO: 4882935 - DNA, 25 bp, Homo sapien
ggtgagatttcccttgtgaacacta

SEQ ID NO: 4882936 - DNA, 25 bp, Homo sapien
gatttcccttgtgaacactactagt

SEQ ID NO: 4882937 - DNA, 25 bp, Homo sapien
ccagtacaactttcagaagggccac

SEQ ID NO: 4882938 - DNA, 25 bp, Homo sapien
ttcggacaacggctttcctccacag

SEQ ID NO: 4882939 - DNA, 25 bp, Homo sapien
gcctcagttgcccagtacaactttc

SEQ ID NO: 4882940 - DNA, 25 bp, Homo sapien
ttgcccagtacaactttcagaaggg

SEQ ID NO: 4882941 - DNA, 25 bp, Homo sapien
gatttgatatgctttactccaagga

SEQ ID NO: 4882942 - DNA, 25 bp, Homo sapien
cttgtcccccgcgtctctgagaatt

SEQ ID NO: 4882943 - DNA, 25 bp, Homo sapien
cagctctcaagaatggttatagtat

SEQ ID NO: 4882944 - DNA, 25 bp, Homo sapien
tatagtcctgtacgatttgatatgc

SEQ ID NO: 4882945 - DNA, 25 bp, Homo sapien
tgccggcccgaagtggacatttgaa

SEQ ID NO: 4882946 - DNA, 25 bp, Homo sapien
catttgaagggcgaaggatcgatca

SEQ ID NO: 4882947 - DNA, 25 bp, Homo sapien
cgcccttaggcaacaaacacttgag

SEQ ID NO: 4882948 - DNA, 25 bp, Homo sapien
agctcagctagacccaggatcttcg

SEQ ID NO: 4882949 - DNA, 25 bp, Homo sapien
tagagccgaggatgttctttgctcc

SEQ ID NO: 4882950 - DNA, 25 bp, Homo sapien
ttcagcaaattgtagatcggcggcg

SEQ ID NO: 4882951 - DNA, 25 bp, Homo sapien
ttagagccgaggatgttctttgctc

SEQ ID NO: 4882952 - DNA, 25 bp, Homo sapien
caaattgtagatcggcggcgaagcc

SEQ ID NO: 4882953 - DNA, 25 bp, Homo sapien
tcttcttcgtctccagccgatggtg

SEQ ID NO: 4882954 - DNA, 25 bp, Homo sapien
agagatttccggacccatcaaacag

SEQ ID NO: 4882955 - DNA, 25 bp, Homo sapien
gaagactcgcctgttgggacagcgc

SEQ ID NO: 4882956 - DNA, 25 bp, Homo sapien
gcttggattcaccttcaagagattt

SEQ ID NO: 4882957 - DNA, 25 bp, Homo sapien
tcaggcggccccacagacgcgcgcg

SEQ ID NO: 4882958 - DNA, 25 bp, Homo sapien
gtgcgcgcgtcggtcctggtgctgc

SEQ ID NO: 4882959 - DNA, 25 bp, Homo sapien
ctggtgctgccgggagccctctccc

SEQ ID NO: 4882960 - DNA, 25 bp, Homo sapien
acagacgcgcgcgagctgggctccg

SEQ ID NO: 4882961 - DNA, 25 bp, Homo sapien
gcagcccgggccgccgcgcccgctg

SEQ ID NO: 4882962 - DNA, 25 bp, Homo sapien
agcccgggccgccgcgcccgctgcc

SEQ ID NO: 4882963 - DNA, 25 bp, Homo sapien
gtcccgcgccggcgcgcagcccggg

SEQ ID NO: 4882964 - DNA, 25 bp, Homo sapien
cgccgccgccgcctcggccccggag

SEQ ID NO: 4882965 - DNA, 25 bp, Homo sapien
aaagccgcttccaagcgcttggagg

SEQ ID NO: 4882966 - DNA, 25 bp, Homo sapien
gcgtggagcggaaagccgcttccaa

SEQ ID NO: 4882967 - DNA, 25 bp, Homo sapien
ctgcaccgaggtgcatcccgcgctc

SEQ ID NO: 4882968 - DNA, 25 bp, Homo sapien
ttggaggtggaggcgctcaggctct

SEQ ID NO: 4882969 - DNA, 25 bp, Homo sapien
cggggtcagccggctcgaagcagcc

SEQ ID NO: 4882970 - DNA, 25 bp, Homo sapien
cctcggggtcagccggctcgaagca

SEQ ID NO: 4882971 - DNA, 25 bp, Homo sapien
gtcagccggctcgaagcagcccagg

SEQ ID NO: 4882972 - DNA, 25 bp, Homo sapien
gggtcagccggctcgaagcagccca

SEQ ID NO: 4882973 - DNA, 25 bp, Homo sapien
tttcgccgtacttgaggcaaagggc

SEQ ID NO: 4882974 - DNA, 25 bp, Homo sapien
gggtcggctactccggcccgcagca

SEQ ID NO: 4882975 - DNA, 25 bp, Homo sapien
gagctcgcagcgaccgtcgctgtcg

SEQ ID NO: 4882976 - DNA, 25 bp, Homo sapien
ggctcgcgctttcgccgtacttgag

SEQ ID NO: 4882977 - DNA, 25 bp, Homo sapien
gccctcggctgccttcgcgccacca

SEQ ID NO: 4882978 - DNA, 25 bp, Homo sapien
cagccctcggctgccttcgcgccac

SEQ ID NO: 4882979 - DNA, 25 bp, Homo sapien
ccctcggctgccttcgcgccaccac

SEQ ID NO: 4882980 - DNA, 25 bp, Homo sapien
agcagccctcggctgccttcgcgcc

SEQ ID NO: 4882981 - DNA, 25 bp, Homo sapien
ctgccgctaccgctaccgccaccgc

SEQ ID NO: 4882982 - DNA, 25 bp, Homo sapien
gctgccgctaccgctaccgccaccg

SEQ ID NO: 4882983 - DNA, 25 bp, Homo sapien
ggcagtccggcgctgaacgggtagc

SEQ ID NO: 4882984 - DNA, 25 bp, Homo sapien
ggctgcctgctcgtaggcgccgagc

SEQ ID NO: 4882985 - DNA, 25 bp, Homo sapien
ggcgctctcgggcattgatgttaag

SEQ ID NO: 4882986 - DNA, 25 bp, Homo sapien
aggtaggcgactaggcgccgcatct

SEQ ID NO: 4882987 - DNA, 25 bp, Homo sapien
ggcttctccgtgcactgtttgcaga

SEQ ID NO: 4882988 - DNA, 25 bp, Homo sapien
taaggcttctccgtgcactgtttgc

SEQ ID NO: 4882989 - DNA, 25 bp, Homo sapien
ggagacgctgttaaacagggcgcac

SEQ ID NO: 4882990 - DNA, 25 bp, Homo sapien
ctggaggagacgctgttaaacaggg

SEQ ID NO: 4882991 - DNA, 25 bp, Homo sapien
aagattccacttcctcgcggtctag

SEQ ID NO: 4882992 - DNA, 25 bp, Homo sapien
cagagtagaaagtaacaaggtgcac

SEQ ID NO: 4882993 - DNA, 25 bp, Homo sapien
gtctaggctgccaccaaagttgcca

SEQ ID NO: 4882994 - DNA, 25 bp, Homo sapien
tgtttcacaactacgagaggaccaa

SEQ ID NO: 4882995 - DNA, 25 bp, Homo sapien
aatttaaatacagggatgatgcaac

SEQ ID NO: 4882996 - DNA, 25 bp, Homo sapien
gatgatgcaactgaaaatatccagg

SEQ ID NO: 4882997 - DNA, 25 bp, Homo sapien
gtaatttttggactgaagcaattta

SEQ ID NO: 4882998 - DNA, 25 bp, Homo sapien
tccaggtgacctttcataaacctaa

SEQ ID NO: 4882999 - DNA, 25 bp, Homo sapien
cgtatagcaactattgctgtgatgt

SEQ ID NO: 4883000 - DNA, 25 bp, Homo sapien
ttagcatgttcttacgtatagcaac

SEQ ID NO: 4883001 - DNA, 25 bp, Homo sapien
caaaaaagagatcaattcattcatc

SEQ ID NO: 4883002 - DNA, 25 bp, Homo sapien
ggatttcacaccataggcaaatcaa

SEQ ID NO: 4883003 - DNA, 25 bp, Homo sapien
tcatagggcggaaaggcagtcaaac

SEQ ID NO: 4883004 - DNA, 25 bp, Homo sapien
tacaaatggtcgtacatagctgtca

SEQ ID NO: 4883005 - DNA, 25 bp, Homo sapien
tgaaagctcactttgggtaaatagc

SEQ ID NO: 4883006 - DNA, 25 bp, Homo sapien
catccaacctgacaaactgaatttg

SEQ ID NO: 4883007 - DNA, 25 bp, Homo sapien
tttgcaagaccacactgattcccct

SEQ ID NO: 4883008 - DNA, 25 bp, Homo sapien
ccaaggagacttttgcaagaccaca

SEQ ID NO: 4883009 - DNA, 25 bp, Homo sapien
cccatttccgacctgtgcgctccat

SEQ ID NO: 4883010 - DNA, 25 bp, Homo sapien
ggagacttttgcaagaccacactga

SEQ ID NO: 4883011 - DNA, 25 bp, Homo sapien
cattggaaaagtcaatgccactcat

SEQ ID NO: 4883012 - DNA, 25 bp, Homo sapien
caatttaacacatgattatatcttt

SEQ ID NO: 4883013 - DNA, 25 bp, Homo sapien
gattatatctttcataagtcattac

SEQ ID NO: 4883014 - DNA, 25 bp, Homo sapien
taagtcattacattggaaaagtcaa

SEQ ID NO: 4883015 - DNA, 25 bp, Homo sapien
gtttccactcgtttcctcgctcctc

SEQ ID NO: 4883016 - DNA, 25 bp, Homo sapien
cattacctcctgcattccatgagca

SEQ ID NO: 4883017 - DNA, 25 bp, Homo sapien
tgagcacactttcgggtttccactc

SEQ ID NO: 4883018 - DNA, 25 bp, Homo sapien
tgaccaggattcattacctcctgca

SEQ ID NO: 4883019 - DNA, 25 bp, Homo sapien
ctgcgcaagcaaaaacagcgcggtg

SEQ ID NO: 4883020 - DNA, 25 bp, Homo sapien
cgcaagcaaaaacagcgcggtgggc

SEQ ID NO: 4883021 - DNA, 25 bp, Homo sapien
ggcgcgagtgctgcgtggacgtcat

SEQ ID NO: 4883022 - DNA, 25 bp, Homo sapien
cgcggtgggcgcgagtgctgcgtgg

SEQ ID NO: 4883023 - DNA, 25 bp, Homo sapien
tgcgtgtgaacccacatgcctgctg

SEQ ID NO: 4883024 - DNA, 25 bp, Homo sapien
gatcccgaatccctccggatgcgga

SEQ ID NO: 4883025 - DNA, 25 bp, Homo sapien
gagccaccctcgaaggacagtttga

SEQ ID NO: 4883026 - DNA, 25 bp, Homo sapien
ttgaaggacaattgcgcccgcaggg

SEQ ID NO: 4883027 - DNA, 25 bp, Homo sapien
gcttcgggtttggtgcggctgcggg

SEQ ID NO: 4883028 - DNA, 25 bp, Homo sapien
agtttccctgctgcgtgaggaagcg

SEQ ID NO: 4883029 - DNA, 25 bp, Homo sapien
aaaccggggcgctttcgcggatgct

SEQ ID NO: 4883030 - DNA, 25 bp, Homo sapien
ctcagggaaagcgagcagagtttcc

SEQ ID NO: 4883031 - DNA, 25 bp, Homo sapien
gagctctcaaatctgtacttctgta

SEQ ID NO: 4883032 - DNA, 25 bp, Homo sapien
ttcagagctctcaaatctgtacttc

SEQ ID NO: 4883033 - DNA, 25 bp, Homo sapien
tctcaaatctgtacttctgtactgc

SEQ ID NO: 4883034 - DNA, 25 bp, Homo sapien
ctctttcagagctctcaaatctgta

SEQ ID NO: 4883035 - DNA, 25 bp, Homo sapien
caagggcaactgtggtctttgggaa

SEQ ID NO: 4883036 - DNA, 25 bp, Homo sapien
acaagggcaactgtggtctttggga

SEQ ID NO: 4883037 - DNA, 25 bp, Homo sapien
agggcaactgtggtctttgggaaag

SEQ ID NO: 4883038 - DNA, 25 bp, Homo sapien
atcaactactccacgggacaacatg

SEQ ID NO: 4883039 - DNA, 25 bp, Homo sapien
acatcaactactccacgggacaaca

SEQ ID NO: 4883040 - DNA, 25 bp, Homo sapien
gatctttgaggataatcgtccacat

SEQ ID NO: 4883041 - DNA, 25 bp, Homo sapien
ggataatcgtccacatcaactactc

SEQ ID NO: 4883042 - DNA, 25 bp, Homo sapien
ggcaaaggagcttccatactgaaaa

SEQ ID NO: 4883043 - DNA, 25 bp, Homo sapien
gttttgggtcacaagtctaaggcaa

SEQ ID NO: 4883044 - DNA, 25 bp, Homo sapien
gaattacatgcccttagaatgtgca

SEQ ID NO: 4883045 - DNA, 25 bp, Homo sapien
tgaccaacgtaatgaaacactcagc

SEQ ID NO: 4883046 - DNA, 25 bp, Homo sapien
cagctgaaatccatcgtgtcaggtg

SEQ ID NO: 4883047 - DNA, 25 bp, Homo sapien
catcgtgtcaggtgcctcgtggcta

SEQ ID NO: 4883048 - DNA, 25 bp, Homo sapien
cgtggctatctgcagtagagcccat

SEQ ID NO: 4883049 - DNA, 25 bp, Homo sapien
cacagaaatgttggtccttggtgtt

SEQ ID NO: 4883050 - DNA, 25 bp, Homo sapien
tattcggactgttatatgcctgccc

SEQ ID NO: 4883051 - DNA, 25 bp, Homo sapien
tcagatttgaccatgttattcggac

SEQ ID NO: 4883052 - DNA, 25 bp, Homo sapien
catttgtgatactgtggtgggcgca

SEQ ID NO: 4883053 - DNA, 25 bp, Homo sapien
acccctactggacttgttgagtgaa

SEQ ID NO: 4883054 - DNA, 25 bp, Homo sapien
taccgtgcaggataatttactgtac

SEQ ID NO: 4883055 - DNA, 25 bp, Homo sapien
caacgtatagctctgcctgcattcg

SEQ ID NO: 4883056 - DNA, 25 bp, Homo sapien
ccagctggtctgtcagtggcactgg

SEQ ID NO: 4883057 - DNA, 25 bp, Homo sapien
caactatgacaactacaagtagagg

SEQ ID NO: 4883058 - DNA, 25 bp, Homo sapien
ggtaaaacaagatacttaatggtga

SEQ ID NO: 4883059 - DNA, 25 bp, Homo sapien
gggtctgtgtcctaacatcttttaa

SEQ ID NO: 4883060 - DNA, 25 bp, Homo sapien
tgagaaagagtataactaagctgca

SEQ ID NO: 4883061 - DNA, 25 bp, Homo sapien
gacttcagaagcctattggttctca

SEQ ID NO: 4883062 - DNA, 25 bp, Homo sapien
tgcagtctcactattcctctgtcct

SEQ ID NO: 4883063 - DNA, 25 bp, Homo sapien
catgatgcagtctcactattcctct

SEQ ID NO: 4883064 - DNA, 25 bp, Homo sapien
tgttcacttcttctatagaacaatc

SEQ ID NO: 4883065 - DNA, 25 bp, Homo sapien
gtcccaacccccacattcttgttca

SEQ ID NO: 4883066 - DNA, 25 bp, Homo sapien
atgcaaatcaaaaccacaatgagat

SEQ ID NO: 4883067 - DNA, 25 bp, Homo sapien
accatctcacaccagttagaatggc

SEQ ID NO: 4883068 - DNA, 25 bp, Homo sapien
caatcattaaaaagtcaggaaacaa

SEQ ID NO: 4883069 - DNA, 25 bp, Homo sapien
ttgtagttctccttggccatcagag

SEQ ID NO: 4883070 - DNA, 25 bp, Homo sapien
tctgagggacagcagtgagaaacag

SEQ ID NO: 4883071 - DNA, 25 bp, Homo sapien
gctctgagggacagcagtgagaaac

SEQ ID NO: 4883072 - DNA, 25 bp, Homo sapien
ctgcatggatcctgaacctgcccag

SEQ ID NO: 4883073 - DNA, 25 bp, Homo sapien
cctgcatggatcctgaacctgccca

SEQ ID NO: 4883074 - DNA, 25 bp, Homo sapien
ggattggtggagctcatcacctgga

SEQ ID NO: 4883075 - DNA, 25 bp, Homo sapien
gtccttcaggcacagacctggtttg

SEQ ID NO: 4883076 - DNA, 25 bp, Homo sapien
tagaaatttgggactgctgtccttc

SEQ ID NO: 4883077 - DNA, 25 bp, Homo sapien
taaagtaagcatgtgcaacactggg

SEQ ID NO: 4883078 - DNA, 25 bp, Homo sapien
gggtctgcttcaacagcttggagtc

SEQ ID NO: 4883079 - DNA, 25 bp, Homo sapien
caccctctcataaactgatgtacac

SEQ ID NO: 4883080 - DNA, 25 bp, Homo sapien
aagggaagcactctcagaccgggct

SEQ ID NO: 4883081 - DNA, 25 bp, Homo sapien
tgtcagtgaatacagattaaccacc

SEQ ID NO: 4883082 - DNA, 25 bp, Homo sapien
tgttgctcttagatagatagctgac

SEQ ID NO: 4883083 - DNA, 25 bp, Homo sapien
tctgttgctcttagatagatagctg

SEQ ID NO: 4883084 - DNA, 25 bp, Homo sapien
ctgttgctcttagatagatagctga

SEQ ID NO: 4883085 - DNA, 25 bp, Homo sapien
cagtgattgcaaatgagaccacaag

SEQ ID NO: 4883086 - DNA, 25 bp, Homo sapien
gattgcaaatgagaccacaaggtca

SEQ ID NO: 4883087 - DNA, 25 bp, Homo sapien
gcaaatgagaccacaaggtcattgc

SEQ ID NO: 4883088 - DNA, 25 bp, Homo sapien
ggagaacagtgattgcaaatgagac

SEQ ID NO: 4883089 - DNA, 25 bp, Homo sapien
ctgcaagtgaagataatgggacttc

SEQ ID NO: 4883090 - DNA, 25 bp, Homo sapien
agtactctgtcatgcagatcatgtc

SEQ ID NO: 4883091 - DNA, 25 bp, Homo sapien
ggccagacctgcacaatttctgcat

SEQ ID NO: 4883092 - DNA, 25 bp, Homo sapien
tctgaacgacatactctggctaggc

SEQ ID NO: 4883093 - DNA, 25 bp, Homo sapien
tcagttgtctcccaatagccatggc

SEQ ID NO: 4883094 - DNA, 25 bp, Homo sapien
tgaacatagagtggaggtaaacaga

SEQ ID NO: 4883095 - DNA, 25 bp, Homo sapien
ctgaacatagagtggaggtaaacag

SEQ ID NO: 4883096 - DNA, 25 bp, Homo sapien
tgcagagctccaactttagcagaat

SEQ ID NO: 4883097 - DNA, 25 bp, Homo sapien
actttagcagaattcccctgttctt

SEQ ID NO: 4883098 - DNA, 25 bp, Homo sapien
tgttcttccttatctagagcaaggc

SEQ ID NO: 4883099 - DNA, 25 bp, Homo sapien
tcagactcatgcagagctccaactt

SEQ ID NO: 4883100 - DNA, 25 bp, Homo sapien
tgttgcccacagttagataagttaa

SEQ ID NO: 4883101 - DNA, 25 bp, Homo sapien
gcggcccctttctcaagattagtcc

SEQ ID NO: 4883102 - DNA, 25 bp, Homo sapien
acagctcagtgcctgtcagatcact

SEQ ID NO: 4883103 - DNA, 25 bp, Homo sapien
tggagtaacacagctcagtgcctgt

SEQ ID NO: 4883104 - DNA, 25 bp, Homo sapien
tgttgtcgtgtccagacctgtccat

SEQ ID NO: 4883105 - DNA, 25 bp, Homo sapien
aatgggatgttgtcgtgtccagacc

SEQ ID NO: 4883106 - DNA, 25 bp, Homo sapien
cagaaatgggatgttgtcgtgtcca

SEQ ID NO: 4883107 - DNA, 25 bp, Homo sapien
gggatgttgtcgtgtccagacctgt

SEQ ID NO: 4883108 - DNA, 25 bp, Homo sapien
caaaggcagcgtgtagctctgtcac

SEQ ID NO: 4883109 - DNA, 25 bp, Homo sapien
ataacagaagtaaatggtcaaagcc

SEQ ID NO: 4883110 - DNA, 25 bp, Homo sapien
gacagattgtccaagcttgcggcta

SEQ ID NO: 4883111 - DNA, 25 bp, Homo sapien
tgaaggacttgtgaacccaaaggca

SEQ ID NO: 4883112 - DNA, 25 bp, Homo sapien
cccactgtcagcaaggaagccacct

SEQ ID NO: 4883113 - DNA, 25 bp, Homo sapien
ttctgtgatctgacaggcccaagcc

SEQ ID NO: 4883114 - DNA, 25 bp, Homo sapien
ggcccaagccttgcagttatgtgtg

SEQ ID NO: 4883115 - DNA, 25 bp, Homo sapien
ccttttagtagctacttcagcctga

SEQ ID NO: 4883116 - DNA, 25 bp, Homo sapien
tgcattggcatcaaaagccgctgtg

SEQ ID NO: 4883117 - DNA, 25 bp, Homo sapien
cattggcatcaaaagccgctgtgta

SEQ ID NO: 4883118 - DNA, 25 bp, Homo sapien
ctgcattggcatcaaaagccgctgt

SEQ ID NO: 4883119 - DNA, 25 bp, Homo sapien
ttggcatcaaaagccgctgtgtatc

SEQ ID NO: 4883120 - DNA, 25 bp, Homo sapien
ggccaatatgtacctcagtaggaaa

SEQ ID NO: 4883121 - DNA, 25 bp, Homo sapien
caggcttggaagctagagggctctc

SEQ ID NO: 4883122 - DNA, 25 bp, Homo sapien
tgttctgagcagctgtatgctggcc

SEQ ID NO: 4883123 - DNA, 25 bp, Homo sapien
gattgtggtgggatgaccccattgt

SEQ ID NO: 4883124 - DNA, 25 bp, Homo sapien
tctgtttttctggacgttgtcaggg

SEQ ID NO: 4883125 - DNA, 25 bp, Homo sapien
ggcagctgtttgcaaagggacgctt

SEQ ID NO: 4883126 - DNA, 25 bp, Homo sapien
taaactggccatgaatgctgaaacc

SEQ ID NO: 4883127 - DNA, 25 bp, Homo sapien
tagatgatgaaccagcccattgttt

SEQ ID NO: 4883128 - DNA, 25 bp, Homo sapien
agatgactgaatagtggatgaactg

SEQ ID NO: 4883129 - DNA, 25 bp, Homo sapien
gaatagtggatgaactgatctttct

SEQ ID NO: 4883130 - DNA, 25 bp, Homo sapien
agaatacaaatctgatgatgtctct

SEQ ID NO: 4883131 - DNA, 25 bp, Homo sapien
gggcaaagatgactgaatagtggat

SEQ ID NO: 4883132 - DNA, 25 bp, Homo sapien
tacagcgggacaggtagcatcagtg

SEQ ID NO: 4883133 - DNA, 25 bp, Homo sapien
aagatccagcagttggcgtgaggat

SEQ ID NO: 4883134 - DNA, 25 bp, Homo sapien
taaagggaaggtcaagaagcgtaca

SEQ ID NO: 4883135 - DNA, 25 bp, Homo sapien
taccaagccgtggtgcctggaaagt

SEQ ID NO: 4883136 - DNA, 25 bp, Homo sapien
tggacatggttgtgtacgagcacca

SEQ ID NO: 4883137 - DNA, 25 bp, Homo sapien
ggttgtgtacgagcaccaaccacac

SEQ ID NO: 4883138 - DNA, 25 bp, Homo sapien
gacatggttgtgtacgagcaccaac

SEQ ID NO: 4883139 - DNA, 25 bp, Homo sapien
cccctctgtgtacaggcaccaatca

SEQ ID NO: 4883140 - DNA, 25 bp, Homo sapien
gaaggatcttgtcaacatattctct

SEQ ID NO: 4883141 - DNA, 25 bp, Homo sapien
gatcttgtcaacatattctctttct

SEQ ID NO: 4883142 - DNA, 25 bp, Homo sapien
tgtgaaggatcttgtcaacatattc

SEQ ID NO: 4883143 - DNA, 25 bp, Homo sapien
cttaatgtgaaggatcttgtcaaca

SEQ ID NO: 4883144 - DNA, 25 bp, Homo sapien
ctgaatgtcccagatgggaagcagt

SEQ ID NO: 4883145 - DNA, 25 bp, Homo sapien
catggtgtttggtgaacttcttggt

SEQ ID NO: 4883146 - DNA, 25 bp, Homo sapien
acttcttggtcatcaacacaatcac

SEQ ID NO: 4883147 - DNA, 25 bp, Homo sapien
tgaacttcttggtcatcaacacaat

SEQ ID NO: 4883148 - DNA, 25 bp, Homo sapien
atggtgtttggtgaacttcttggtc

SEQ ID NO: 4883149 - DNA, 25 bp, Homo sapien
ccccgtattgttctgtgaagacttg

SEQ ID NO: 4883150 - DNA, 25 bp, Homo sapien
tgaagacttgaaggtggtggtactt

SEQ ID NO: 4883151 - DNA, 25 bp, Homo sapien
gttgtccccgtattgttctgtgaag

SEQ ID NO: 4883152 - DNA, 25 bp, Homo sapien
accgttgtccccgtattgttctgtg

SEQ ID NO: 4883153 - DNA, 25 bp, Homo sapien
cctattgctaagctcatggctgaga

SEQ ID NO: 4883154 - DNA, 25 bp, Homo sapien
taagtttgatatgacacaggaccct

SEQ ID NO: 4883155 - DNA, 25 bp, Homo sapien
tatgacctcctttagaggaagggca

SEQ ID NO: 4883156 - DNA, 25 bp, Homo sapien
ggaagggcagctaggtcttacgacc

SEQ ID NO: 4883157 - DNA, 25 bp, Homo sapien
taggcaggcattgtgaccttatgga

SEQ ID NO: 4883158 - DNA, 25 bp, Homo sapien
tgtctcatatcctagaggctagaag

SEQ ID NO: 4883159 - DNA, 25 bp, Homo sapien
tgtggaagcttaaccctgaactctg

SEQ ID NO: 4883160 - DNA, 25 bp, Homo sapien
aagatcaaggtgtttactgggttgc

SEQ ID NO: 4883161 - DNA, 25 bp, Homo sapien
tacgcgtacatattaaagctttggg

SEQ ID NO: 4883162 - DNA, 25 bp, Homo sapien
tccagcgtaagttgtaataagccct

SEQ ID NO: 4883163 - DNA, 25 bp, Homo sapien
tccatgatttccagtgcagacagtc

SEQ ID NO: 4883164 - DNA, 25 bp, Homo sapien
taagccctaggttggcggtatgcat

SEQ ID NO: 4883165 - DNA, 25 bp, Homo sapien
caaaacttgtgagcaaataggatgt

SEQ ID NO: 4883166 - DNA, 25 bp, Homo sapien
cgaaacgggttcgaggtcgcgcact

SEQ ID NO: 4883167 - DNA, 25 bp, Homo sapien
ttgtattccgtgtctctggcacgcg

SEQ ID NO: 4883168 - DNA, 25 bp, Homo sapien
tgtgtgcctcatcgggacttctaaa

SEQ ID NO: 4883169 - DNA, 25 bp, Homo sapien
gatggaaaacttgagaccagcgtca

SEQ ID NO: 4883170 - DNA, 25 bp, Homo sapien
cagagcctcaattgtctccacaggg

SEQ ID NO: 4883171 - DNA, 25 bp, Homo sapien
caagtttggtgcctgcatctacgat

SEQ ID NO: 4883172 - DNA, 25 bp, Homo sapien
tcaataagctaacacctcagctggg

SEQ ID NO: 4883173 - DNA, 25 bp, Homo sapien
agctgttgaagggccaaaacagatc

SEQ ID NO: 4883174 - DNA, 25 bp, Homo sapien
cttgcagaaacaagtgaaggtacag

SEQ ID NO: 4883175 - DNA, 25 bp, Homo sapien
gaaatctgccacaaagatgttggtg

SEQ ID NO: 4883176 - DNA, 25 bp, Homo sapien
cagagtgctgccttttggttatcag

SEQ ID NO: 4883177 - DNA, 25 bp, Homo sapien
gccaaacttggagaggtcactttga

SEQ ID NO: 4883178 - DNA, 25 bp, Homo sapien
tcaaaagggccctagtatacttgta

SEQ ID NO: 4883179 - DNA, 25 bp, Homo sapien
aagacaaggaaactggctccagcat

SEQ ID NO: 4883180 - DNA, 25 bp, Homo sapien
cactttgaaagcaggcatgaggaaa

SEQ ID NO: 4883181 - DNA, 25 bp, Homo sapien
atggggagagatagaaagcctgcat

SEQ ID NO: 4883182 - DNA, 25 bp, Homo sapien
agcctgttatttagtacaaaagtca

SEQ ID NO: 4883183 - DNA, 25 bp, Homo sapien
catggctttagttgatggggagaga

SEQ ID NO: 4883184 - DNA, 25 bp, Homo sapien
tccagcctgttatttagtacaaaag

SEQ ID NO: 4883185 - DNA, 25 bp, Homo sapien
aattaagctgtttaagaccaagtat

SEQ ID NO: 4883186 - DNA, 25 bp, Homo sapien
gcaggtaaatgatgtgttgtctaaa

SEQ ID NO: 4883187 - DNA, 25 bp, Homo sapien
ggatcctgaactctgacccttgcag

SEQ ID NO: 4883188 - DNA, 25 bp, Homo sapien
gaccaagtataaagtggatttgaac

SEQ ID NO: 4883189 - DNA, 25 bp, Homo sapien
gacccccataagcccttggttctgc

SEQ ID NO: 4883190 - DNA, 25 bp, Homo sapien
tagcttgtcccacggacccccataa

SEQ ID NO: 4883191 - DNA, 25 bp, Homo sapien
tttaaccaacagttccttctgtagc

SEQ ID NO: 4883192 - DNA, 25 bp, Homo sapien
tctagctttaaccaacagttccttc

SEQ ID NO: 4883193 - DNA, 25 bp, Homo sapien
cagtccatagggtgtatgttgtgcc

SEQ ID NO: 4883194 - DNA, 25 bp, Homo sapien
catagggtgtatgttgtgcctctct

SEQ ID NO: 4883195 - DNA, 25 bp, Homo sapien
acacccccaaacagtccatagggtg

SEQ ID NO: 4883196 - DNA, 25 bp, Homo sapien
ccccaaacagtccatagggtgtatg

SEQ ID NO: 4883197 - DNA, 25 bp, Homo sapien
ctaacctatgaacttggtgagctcc

SEQ ID NO: 4883198 - DNA, 25 bp, Homo sapien
cccctcttccttacttgagcaggta

SEQ ID NO: 4883199 - DNA, 25 bp, Homo sapien
catgcaaagttgtaagaaggtttca

SEQ ID NO: 4883200 - DNA, 25 bp, Homo sapien
cttacttgagcaggtaccatgcacc

SEQ ID NO: 4883201 - DNA, 25 bp, Homo sapien
tcatccccggttcccatgcaaagtt

SEQ ID NO: 4883202 - DNA, 25 bp, Homo sapien
tccatggcaagtgtcctgtagccag

SEQ ID NO: 4883203 - DNA, 25 bp, Homo sapien
gcaagtgtcctgtagccagagcact

SEQ ID NO: 4883204 - DNA, 25 bp, Homo sapien
gtagccagagcactgacggatggca

SEQ ID NO: 4883205 - DNA, 25 bp, Homo sapien
tagccagagcactgacggatggcac

SEQ ID NO: 4883206 - DNA, 25 bp, Homo sapien
aatcacaagagataccactatgcac

SEQ ID NO: 4883207 - DNA, 25 bp, Homo sapien
gatatacttatcacgtgatcaggca

SEQ ID NO: 4883208 - DNA, 25 bp, Homo sapien
gaccaacaagaacactcaaactttg

SEQ ID NO: 4883209 - DNA, 25 bp, Homo sapien
actcagtgctggtaacaatatggac

SEQ ID NO: 4883210 - DNA, 25 bp, Homo sapien
gaatttagccaacctccatggtgtc

SEQ ID NO: 4883211 - DNA, 25 bp, Homo sapien
tgatttgcaccaaattagattccca

SEQ ID NO: 4883212 - DNA, 25 bp, Homo sapien
attctattgttgagggttggccaga

SEQ ID NO: 4883213 - DNA, 25 bp, Homo sapien
cttgctctttactagaattctattg

SEQ ID NO: 4883214 - DNA, 25 bp, Homo sapien
tcgttttcgcttcgtcttctatacg

SEQ ID NO: 4883215 - DNA, 25 bp, Homo sapien
gcttcgtcttctatacgtcccggta

SEQ ID NO: 4883216 - DNA, 25 bp, Homo sapien
tatctaacaaattctcgttttcgct

SEQ ID NO: 4883217 - DNA, 25 bp, Homo sapien
ttatctaacaaattctcgttttcgc

SEQ ID NO: 4883218 - DNA, 25 bp, Homo sapien
tctccatgtgcttgcagcattactg

SEQ ID NO: 4883219 - DNA, 25 bp, Homo sapien
agcattactgggtactcgctgtgat

SEQ ID NO: 4883220 - DNA, 25 bp, Homo sapien
tactcgctgtgataggccacttaaa

SEQ ID NO: 4883221 - DNA, 25 bp, Homo sapien
ggccacttaaagctgcacatgtgta

SEQ ID NO: 4883222 - DNA, 25 bp, Homo sapien
tcaaaaatagttagcaatgaaagca

SEQ ID NO: 4883223 - DNA, 25 bp, Homo sapien
gcctggagctttattgacatttaca

SEQ ID NO: 4883224 - DNA, 25 bp, Homo sapien
aaagatggacattcttggccaaaaa

SEQ ID NO: 4883225 - DNA, 25 bp, Homo sapien
ctgcatagggaaagatggacattct

SEQ ID NO: 4883226 - DNA, 25 bp, Homo sapien
ttgtcccaatcactgctctcaatca

SEQ ID NO: 4883227 - DNA, 25 bp, Homo sapien
aaattcagcagcctattgtcccaat

SEQ ID NO: 4883228 - DNA, 25 bp, Homo sapien
gagacaatcattattataggacatg

SEQ ID NO: 4883229 - DNA, 25 bp, Homo sapien
tctaaacggtctccagagacaatca

SEQ ID NO: 4883230 - DNA, 25 bp, Homo sapien
ctagctcctttcattacttccttca

SEQ ID NO: 4883231 - DNA, 25 bp, Homo sapien
tagctcctttcattacttccttcat

SEQ ID NO: 4883232 - DNA, 25 bp, Homo sapien
ctagggaccaaaagatggcaggcca

SEQ ID NO: 4883233 - DNA, 25 bp, Homo sapien
tagggaccaaaagatggcaggccat

SEQ ID NO: 4883234 - DNA, 25 bp, Homo sapien
ctgagacttgtcacataaaattaac

SEQ ID NO: 4883235 - DNA, 25 bp, Homo sapien
cacactcttcatcaattgctgcttc

SEQ ID NO: 4883236 - DNA, 25 bp, Homo sapien
gttcaacacactcttcatcaattgc

SEQ ID NO: 4883237 - DNA, 25 bp, Homo sapien
acagcttgctgccgtaaagtccacc

SEQ ID NO: 4883238 - DNA, 25 bp, Homo sapien
cagcttgctgccgtaaagtccacca

SEQ ID NO: 4883239 - DNA, 25 bp, Homo sapien
cacagcttgctgccgtaaagtccac

SEQ ID NO: 4883240 - DNA, 25 bp, Homo sapien
cagatgtagctcatcatcggttgga

SEQ ID NO: 4883241 - DNA, 25 bp, Homo sapien
cttggactcaatcaaaggttttgct

SEQ ID NO: 4883242 - DNA, 25 bp, Homo sapien
gcagatgatgtagatccacttaact

SEQ ID NO: 4883243 - DNA, 25 bp, Homo sapien
tcaattccagaagaggtgttagagt

SEQ ID NO: 4883244 - DNA, 25 bp, Homo sapien
cagtgcccccttgtgcaacttgata

SEQ ID NO: 4883245 - DNA, 25 bp, Homo sapien
gtgcccccttgtgcaacttgataag

SEQ ID NO: 4883246 - DNA, 25 bp, Homo sapien
gaactttcacagctacagtgccccc

SEQ ID NO: 4883247 - DNA, 25 bp, Homo sapien
gcccccttgtgcaacttgataaggg

SEQ ID NO: 4883248 - DNA, 25 bp, Homo sapien
tcctgcagcttcacatatggcgatc

SEQ ID NO: 4883249 - DNA, 25 bp, Homo sapien
gagtgctacggtctcctgggaccag

SEQ ID NO: 4883250 - DNA, 25 bp, Homo sapien
caggtagtccgtgtgacggtgcccc

SEQ ID NO: 4883251 - DNA, 25 bp, Homo sapien
tgggaccagattacactggtctgct

SEQ ID NO: 4883252 - DNA, 25 bp, Homo sapien
cagtttttggatcctctttcggaga

SEQ ID NO: 4883253 - DNA, 25 bp, Homo sapien
tactctagcctctaatattcttcca

SEQ ID NO: 4883254 - DNA, 25 bp, Homo sapien
tagcttaaatcccattaagccattg

SEQ ID NO: 4883255 - DNA, 25 bp, Homo sapien
gattgagtttcaagctcataggaga

SEQ ID NO: 4883256 - DNA, 25 bp, Homo sapien
ctacggtgtaacttggaccctgtat

SEQ ID NO: 4883257 - DNA, 25 bp, Homo sapien
gccagaaacacctccaacacgtggt

SEQ ID NO: 4883258 - DNA, 25 bp, Homo sapien
tggaccctgtatgccagaaacacct

SEQ ID NO: 4883259 - DNA, 25 bp, Homo sapien
gttcccattgtaatgatcctgggtg

SEQ ID NO: 4883260 - DNA, 25 bp, Homo sapien
ttttgaaaccctgtgatatggttag

SEQ ID NO: 4883261 - DNA, 25 bp, Homo sapien
tgttttccaggtggactgcaaacct

SEQ ID NO: 4883262 - DNA, 25 bp, Homo sapien
tcaatcttcagtttttgaaaccctg

SEQ ID NO: 4883263 - DNA, 25 bp, Homo sapien
catcattctccaaagtaatatggtg

SEQ ID NO: 4883264 - DNA, 25 bp, Homo sapien
aagtgggactgtaaactttcatctc

SEQ ID NO: 4883265 - DNA, 25 bp, Homo sapien
tgctgaccaccgtgttctgctctga

SEQ ID NO: 4883266 - DNA, 25 bp, Homo sapien
cttcatgtatcagtaagtgctgacc

SEQ ID NO: 4883267 - DNA, 25 bp, Homo sapien
catggtaactaaggtgggctcgaaa

SEQ ID NO: 4883268 - DNA, 25 bp, Homo sapien
caggaataatgtggatctaagaagc

SEQ ID NO: 4883269 - DNA, 25 bp, Homo sapien
gatgaaagcaaccaagcgataaaag

SEQ ID NO: 4883270 - DNA, 25 bp, Homo sapien
ggttactagattgatgaaagcaacc

SEQ ID NO: 4883271 - DNA, 25 bp, Homo sapien
taaaagctatcactccagagcccaa

SEQ ID NO: 4883272 - DNA, 25 bp, Homo sapien
cagcggttaccaactgtcctggata

SEQ ID NO: 4883273 - DNA, 25 bp, Homo sapien
taccaactgtcctggataagaacac

SEQ ID NO: 4883274 - DNA, 25 bp, Homo sapien
agggagccagcggttaccaactgtc

SEQ ID NO: 4883275 - DNA, 25 bp, Homo sapien
cctggataagaacactctaaccaag

SEQ ID NO: 4883276 - DNA, 25 bp, Homo sapien
ggagtgtgcagaggacggggggcat

SEQ ID NO: 4883277 - DNA, 25 bp, Homo sapien
aggagtgtgcagaggacggggggca

SEQ ID NO: 4883278 - DNA, 25 bp, Homo sapien
agtaaggaggaagatatatgggtgc

SEQ ID NO: 4883279 - DNA, 25 bp, Homo sapien
gggaagtaaggaggaagatatatgg

SEQ ID NO: 4883280 - DNA, 25 bp, Homo sapien
taaggaggaagatatatgggtgctg

SEQ ID NO: 4883281 - DNA, 25 bp, Homo sapien
aggaggaagatatatgggtgctgac

SEQ ID NO: 4883282 - DNA, 25 bp, Homo sapien
gttttgcaagtgtgccacagcttga

SEQ ID NO: 4883283 - DNA, 25 bp, Homo sapien
tgcgaggaaacctgagaagagcctt

SEQ ID NO: 4883284 - DNA, 25 bp, Homo sapien
aagttgcccaatgtgatgctctcag

SEQ ID NO: 4883285 - DNA, 25 bp, Homo sapien
tggttcccttgtaagttgcccaatg

SEQ ID NO: 4883286 - DNA, 25 bp, Homo sapien
cagatgtgaatttgtatgccaacca

SEQ ID NO: 4883287 - DNA, 25 bp, Homo sapien
gagatgaactcaatgcctttgtcaa

SEQ ID NO: 4883288 - DNA, 25 bp, Homo sapien
gattttgaacgttagccaatcagag

SEQ ID NO: 4883289 - DNA, 25 bp, Homo sapien
cagccaatcagtgtcagcaccttga

SEQ ID NO: 4883290 - DNA, 25 bp, Homo sapien
cctgaagtcctgtagttatggatcc

SEQ ID NO: 4883291 - DNA, 25 bp, Homo sapien
ttctcaatccaatccaggtaggtcc

SEQ ID NO: 4883292 - DNA, 25 bp, Homo sapien
aaagtggccaagctttgtaggcacc

SEQ ID NO: 4883293 - DNA, 25 bp, Homo sapien
gtaggcaccctctaaatctgtcatg

SEQ ID NO: 4883294 - DNA, 25 bp, Homo sapien
agtccagggcatttctgttacccct

SEQ ID NO: 4883295 - DNA, 25 bp, Homo sapien
ccttaaaagtccagggcatttctgt

SEQ ID NO: 4883296 - DNA, 25 bp, Homo sapien
taaaagtccagggcatttctgttac

SEQ ID NO: 4883297 - DNA, 25 bp, Homo sapien
cttaaaagtccagggcatttctgtt

SEQ ID NO: 4883298 - DNA, 25 bp, Homo sapien
atttggaggccactacattttttct

SEQ ID NO: 4883299 - DNA, 25 bp, Homo sapien
taagcatacaccagttttaaattgg

SEQ ID NO: 4883300 - DNA, 25 bp, Homo sapien
gtgccatataagcatacaccagttt

SEQ ID NO: 4883301 - DNA, 25 bp, Homo sapien
tatttggaggccactacattttttc

SEQ ID NO: 4883302 - DNA, 25 bp, Homo sapien
caggctcagtaatagacatgttcat

SEQ ID NO: 4883303 - DNA, 25 bp, Homo sapien
tctctggaatgacaggctcagtaat

SEQ ID NO: 4883304 - DNA, 25 bp, Homo sapien
atgttcatcaatgccgccaccagga

SEQ ID NO: 4883305 - DNA, 25 bp, Homo sapien
gcagttcttgcccttcaactcccgt

SEQ ID NO: 4883306 - DNA, 25 bp, Homo sapien
tccctcatcaaactgaaaaaatttc

SEQ ID NO: 4883307 - DNA, 25 bp, Homo sapien
ttgtcagggatcagcaagtttagac

SEQ ID NO: 4883308 - DNA, 25 bp, Homo sapien
gtagaattgtcagggatcagcaagt

SEQ ID NO: 4883309 - DNA, 25 bp, Homo sapien
cagggatcagcaagtttagacaaat

SEQ ID NO: 4883310 - DNA, 25 bp, Homo sapien
tgtcagtcaaactgcgacagcaagc

SEQ ID NO: 4883311 - DNA, 25 bp, Homo sapien
tctgactgggcctgaactatgatct

SEQ ID NO: 4883312 - DNA, 25 bp, Homo sapien
tctgtttagctgaagcaggccagca

SEQ ID NO: 4883313 - DNA, 25 bp, Homo sapien
gagaatccacgatgcaatcaaggtg

SEQ ID NO: 4883314 - DNA, 25 bp, Homo sapien
tttgatggcggaacggcccttctca

SEQ ID NO: 4883315 - DNA, 25 bp, Homo sapien
ctctttgatggcggaacggcccttc

SEQ ID NO: 4883316 - DNA, 25 bp, Homo sapien
gatggcggaacggcccttctcacca

SEQ ID NO: 4883317 - DNA, 25 bp, Homo sapien
tctttgatggcggaacggcccttct

SEQ ID NO: 4883318 - DNA, 25 bp, Homo sapien
tggacaacccaacgtggatatggta

SEQ ID NO: 4883319 - DNA, 25 bp, Homo sapien
caacccaacgtggatatggtatggg

SEQ ID NO: 4883320 - DNA, 25 bp, Homo sapien
gacaacccaacgtggatatggtatg

SEQ ID NO: 4883321 - DNA, 25 bp, Homo sapien
ttctggacaacccaacgtggatatg

SEQ ID NO: 4883322 - DNA, 25 bp, Homo sapien
tcacattgactttctgtacattttg

SEQ ID NO: 4883323 - DNA, 25 bp, Homo sapien
gaaagtggtaacagttatgtaggta

SEQ ID NO: 4883324 - DNA, 25 bp, Homo sapien
tgaaagtggtaacagttatgtaggt

SEQ ID NO: 4883325 - DNA, 25 bp, Homo sapien
tgactttctgtacattttgaaagtg

SEQ ID NO: 4883326 - DNA, 25 bp, Homo sapien
ctcgcgagttggatgtagaaagctg

SEQ ID NO: 4883327 - DNA, 25 bp, Homo sapien
tgtagaaagctggtctttacccttg

SEQ ID NO: 4883328 - DNA, 25 bp, Homo sapien
ttcagcactcgcgagttggatgtag

SEQ ID NO: 4883329 - DNA, 25 bp, Homo sapien
gaaagctggtctttacccttgtaca

SEQ ID NO: 4883330 - DNA, 25 bp, Homo sapien
agaggtctcctgcttgcagatagca

SEQ ID NO: 4883331 - DNA, 25 bp, Homo sapien
caaaccattgcctcgggccatggaa

SEQ ID NO: 4883332 - DNA, 25 bp, Homo sapien
gcagatagcaggctgttgtcctaaa

SEQ ID NO: 4883333 - DNA, 25 bp, Homo sapien
taatgaagcctgacgagaggtctcc

SEQ ID NO: 4883334 - DNA, 25 bp, Homo sapien
cataagcgtagttgtgggccgcaga

SEQ ID NO: 4883335 - DNA, 25 bp, Homo sapien
gaccaggatttcagatctgactgac

SEQ ID NO: 4883336 - DNA, 25 bp, Homo sapien
gcagattcttgtatacgcccatgaa

SEQ ID NO: 4883337 - DNA, 25 bp, Homo sapien
tagtcaatattatctttcaggtccc

SEQ ID NO: 4883338 - DNA, 25 bp, Homo sapien
tctgactgacactaactaggtgggt

SEQ ID NO: 4883339 - DNA, 25 bp, Homo sapien
gcactgagaggttggtttagctttt

SEQ ID NO: 4883340 - DNA, 25 bp, Homo sapien
cagaatgcatcttttcacttgccaa

SEQ ID NO: 4883341 - DNA, 25 bp, Homo sapien
gcagaatgcatcttttcacttgcca

SEQ ID NO: 4883342 - DNA, 25 bp, Homo sapien
gccgtatgcagtttgtgacaaccat

SEQ ID NO: 4883343 - DNA, 25 bp, Homo sapien
actaattctcaattgccgtatgcag

SEQ ID NO: 4883344 - DNA, 25 bp, Homo sapien
tgcttcgacctccctttgagttctt

SEQ ID NO: 4883345 - DNA, 25 bp, Homo sapien
caggttgcatatgcttgtacactaa

SEQ ID NO: 4883346 - DNA, 25 bp, Homo sapien
tcatatgctggaatgcttcatactg

SEQ ID NO: 4883347 - DNA, 25 bp, Homo sapien
atatgctggaatgcttcatactgta

SEQ ID NO: 4883348 - DNA, 25 bp, Homo sapien
catatgctggaatgcttcatactgt

SEQ ID NO: 4883349 - DNA, 25 bp, Homo sapien
tatgctggaatgcttcatactgtac

SEQ ID NO: 4883350 - DNA, 25 bp, Homo sapien
caatatcgtaagtgtttccagaaaa

SEQ ID NO: 4883351 - DNA, 25 bp, Homo sapien
tccccagtatgggtcattatcaata

SEQ ID NO: 4883352 - DNA, 25 bp, Homo sapien
cccagtatgggtcattatcaatatc

SEQ ID NO: 4883353 - DNA, 25 bp, Homo sapien
cattatcaatatcgtaagtgtttcc

SEQ ID NO: 4883354 - DNA, 25 bp, Homo sapien
gcaacccctcatgcttgaacgtagt

SEQ ID NO: 4883355 - DNA, 25 bp, Homo sapien
catcggagcgccgtctggtattgct

SEQ ID NO: 4883356 - DNA, 25 bp, Homo sapien
acgtagttggcacctacaggatgag

SEQ ID NO: 4883357 - DNA, 25 bp, Homo sapien
tggcctccctgcgaaggtgctgtat

SEQ ID NO: 4883358 - DNA, 25 bp, Homo sapien
aaatcccccttgatatgaagacagc

SEQ ID NO: 4883359 - DNA, 25 bp, Homo sapien
cattacgttcttctgacccatggaa

SEQ ID NO: 4883360 - DNA, 25 bp, Homo sapien
tgacccatggaatgctccaaatccc

SEQ ID NO: 4883361 - DNA, 25 bp, Homo sapien
tcttctgacccatggaatgctccaa

SEQ ID NO: 4883362 - DNA, 25 bp, Homo sapien
ttttggctggttcaatcttatacac

SEQ ID NO: 4883363 - DNA, 25 bp, Homo sapien
ttttttggctggttcaatcttatac

SEQ ID NO: 4883364 - DNA, 25 bp, Homo sapien
cttttttggctggttcaatcttata

SEQ ID NO: 4883365 - DNA, 25 bp, Homo sapien
tttttggctggttcaatcttataca

SEQ ID NO: 4883366 - DNA, 25 bp, Homo sapien
ttccatggccaagtcataattacat

SEQ ID NO: 4883367 - DNA, 25 bp, Homo sapien
gaagattggagggtcaatgatgacc

SEQ ID NO: 4883368 - DNA, 25 bp, Homo sapien
catggccaagtcataattacataca

SEQ ID NO: 4883369 - DNA, 25 bp, Homo sapien
gagggtcaatgatgaccttgaaatg

SEQ ID NO: 4883370 - DNA, 25 bp, Homo sapien
tctgggatgttcagttaagagtgac

SEQ ID NO: 4883371 - DNA, 25 bp, Homo sapien
aagagtgggtagcataaatatcctg

SEQ ID NO: 4883372 - DNA, 25 bp, Homo sapien
tttccaggaggactagcaaagagtg

SEQ ID NO: 4883373 - DNA, 25 bp, Homo sapien
tttgggtctcagatcctagagctct

SEQ ID NO: 4883374 - DNA, 25 bp, Homo sapien
acaaactgccatggtaccacttgga

SEQ ID NO: 4883375 - DNA, 25 bp, Homo sapien
ggacaaactgccatggtaccacttg

SEQ ID NO: 4883376 - DNA, 25 bp, Homo sapien
gccaaggacaaactgccatggtacc

SEQ ID NO: 4883377 - DNA, 25 bp, Homo sapien
tggtaccacttggacgacttggtgc

SEQ ID NO: 4883378 - DNA, 25 bp, Homo sapien
gtcctgattcgtattctctttactg

SEQ ID NO: 4883379 - DNA, 25 bp, Homo sapien
cctgattcgtattctctttactgaa

SEQ ID NO: 4883380 - DNA, 25 bp, Homo sapien
tgattcgtattctctttactgaaca

SEQ ID NO: 4883381 - DNA, 25 bp, Homo sapien
tcctgattcgtattctctttactga

SEQ ID NO: 4883382 - DNA, 25 bp, Homo sapien
tagttcctctttattgcaaggctcc

SEQ ID NO: 4883383 - DNA, 25 bp, Homo sapien
gttcctctttattgcaaggctccat

SEQ ID NO: 4883384 - DNA, 25 bp, Homo sapien
cattagttcctctttattgcaaggc

SEQ ID NO: 4883385 - DNA, 25 bp, Homo sapien
ccattagttcctctttattgcaagg

SEQ ID NO: 4883386 - DNA, 25 bp, Homo sapien
tgaataacaattgggagcaatggct

SEQ ID NO: 4883387 - DNA, 25 bp, Homo sapien
tttctcactgacaggtgttctctcc

SEQ ID NO: 4883388 - DNA, 25 bp, Homo sapien
gaggctctccattgttgtgaataac

SEQ ID NO: 4883389 - DNA, 25 bp, Homo sapien
tatggccaatggagaggtgcagttt

SEQ ID NO: 4883390 - DNA, 25 bp, Homo sapien
ctgggttagtgcaagttgacagtag

SEQ ID NO: 4883391 - DNA, 25 bp, Homo sapien
agttgacagtagtgggatctcccag

SEQ ID NO: 4883392 - DNA, 25 bp, Homo sapien
tagtgcaagttgacagtagtgggat

SEQ ID NO: 4883393 - DNA, 25 bp, Homo sapien
gatctcccagcccaggttgaacact

SEQ ID NO: 4883394 - DNA, 25 bp, Homo sapien
cctttccggaaagcactggtgacct

SEQ ID NO: 4883395 - DNA, 25 bp, Homo sapien
tctggatagtgacgaactggacctc

SEQ ID NO: 4883396 - DNA, 25 bp, Homo sapien
tcctcagggagatgtactttcagct

SEQ ID NO: 4883397 - DNA, 25 bp, Homo sapien
gtagacacgaggcaagtcctgctgg

SEQ ID NO: 4883398 - DNA, 25 bp, Homo sapien
acagggcatcaagattttcataatc

SEQ ID NO: 4883399 - DNA, 25 bp, Homo sapien
cattgaataacccttggacacatcc

SEQ ID NO: 4883400 - DNA, 25 bp, Homo sapien
catccaacagggcatcaagattttc

SEQ ID NO: 4883401 - DNA, 25 bp, Homo sapien
gaataacccttggacacatccaaca

SEQ ID NO: 4883402 - DNA, 25 bp, Homo sapien
ttgccgtcccacaaattttcacagt

SEQ ID NO: 4883403 - DNA, 25 bp, Homo sapien
tttgccgtcccacaaattttcacag

SEQ ID NO: 4883404 - DNA, 25 bp, Homo sapien
ttttgccgtcccacaaattttcaca

SEQ ID NO: 4883405 - DNA, 25 bp, Homo sapien
tgccgtcccacaaattttcacagtt

SEQ ID NO: 4883406 - DNA, 25 bp, Homo sapien
agcccttcattggaaagtaatggtt

SEQ ID NO: 4883407 - DNA, 25 bp, Homo sapien
tgcagccgaggccatgccaaaatgc

SEQ ID NO: 4883408 - DNA, 25 bp, Homo sapien
aaatgcaatttggagggtgtccagc

SEQ ID NO: 4883409 - DNA, 25 bp, Homo sapien
aatggttttcactgaactgagttat

SEQ ID NO: 4883410 - DNA, 25 bp, Homo sapien
cacagaattggctttgtcacacaaa

SEQ ID NO: 4883411 - DNA, 25 bp, Homo sapien
tcacacaaaaggtttttcttactca

SEQ ID NO: 4883412 - DNA, 25 bp, Homo sapien
aatttcacagaattggctttgtcac

SEQ ID NO: 4883413 - DNA, 25 bp, Homo sapien
aagtcatcatcagacaatttcacag

SEQ ID NO: 4883414 - DNA, 25 bp, Homo sapien
cagacgagggatgctatggtgccaa

SEQ ID NO: 4883415 - DNA, 25 bp, Homo sapien
tgtcatctgggctgccatatgttgt

SEQ ID NO: 4883416 - DNA, 25 bp, Homo sapien
atatgttgttctggccggagcacag

SEQ ID NO: 4883417 - DNA, 25 bp, Homo sapien
cagggttctggtaaatagcacatcc

SEQ ID NO: 4883418 - DNA, 25 bp, Homo sapien
gcagcatgctgaagtcacagtataa

SEQ ID NO: 4883419 - DNA, 25 bp, Homo sapien
ttaccttctaagactttcccagcca

SEQ ID NO: 4883420 - DNA, 25 bp, Homo sapien
gatacttgtcgtgtaggttcttgtc

SEQ ID NO: 4883421 - DNA, 25 bp, Homo sapien
gctgttgggagactgcagtttgatc

SEQ ID NO: 4883422 - DNA, 25 bp, Homo sapien
catcggtgcagatgaagcatgtggt

SEQ ID NO: 4883423 - DNA, 25 bp, Homo sapien
gctggctgtctccataagacatcgg

SEQ ID NO: 4883424 - DNA, 25 bp, Homo sapien
cataagacatcggtgcagatgaagc

SEQ ID NO: 4883425 - DNA, 25 bp, Homo sapien
atgtggtagcggctgagttctccac

SEQ ID NO: 4883426 - DNA, 25 bp, Homo sapien
acatatattggcgatatttctcccc

SEQ ID NO: 4883427 - DNA, 25 bp, Homo sapien
taaacatatattggcgatatttctc

SEQ ID NO: 4883428 - DNA, 25 bp, Homo sapien
tatattggcgatatttctcccctct

SEQ ID NO: 4883429 - DNA, 25 bp, Homo sapien
ttggcgatatttctcccctctggct

SEQ ID NO: 4883430 - DNA, 25 bp, Homo sapien
aatgttggcaaaatagactgcctcc

SEQ ID NO: 4883431 - DNA, 25 bp, Homo sapien
tctggtgcgtgaagaactcaaaaca

SEQ ID NO: 4883432 - DNA, 25 bp, Homo sapien
gaggatgcagctcattaagtaacgc

SEQ ID NO: 4883433 - DNA, 25 bp, Homo sapien
gaaatataccgtgctgtgcttttga

SEQ ID NO: 4883434 - DNA, 25 bp, Homo sapien
ccttgaggtctctactgacctctgg

SEQ ID NO: 4883435 - DNA, 25 bp, Homo sapien
tgagtacacaggtgccggtgcaagt

SEQ ID NO: 4883436 - DNA, 25 bp, Homo sapien
tgcaagtcaagccatagtgtccaac

SEQ ID NO: 4883437 - DNA, 25 bp, Homo sapien
tctggagatccagagttacctatcc

SEQ ID NO: 4883438 - DNA, 25 bp, Homo sapien
tgtgtcccgctttgtacctcctgac

SEQ ID NO: 4883439 - DNA, 25 bp, Homo sapien
gacactgtaggtgacctcctctcct

SEQ ID NO: 4883440 - DNA, 25 bp, Homo sapien
tcctgtgtcccgctttgtacctcct

SEQ ID NO: 4883441 - DNA, 25 bp, Homo sapien
aggacactgtaggtgacctcctctc

SEQ ID NO: 4883442 - DNA, 25 bp, Homo sapien
ttgagatcctacttagagttctctg

SEQ ID NO: 4883443 - DNA, 25 bp, Homo sapien
ttcattgagatcctacttagagttc

SEQ ID NO: 4883444 - DNA, 25 bp, Homo sapien
gcttcattgagatcctacttagagt

SEQ ID NO: 4883445 - DNA, 25 bp, Homo sapien
ctgcttcattgagatcctacttaga

SEQ ID NO: 4883446 - DNA, 25 bp, Homo sapien
tgggtcggctcctgtgcttgccgtt

SEQ ID NO: 4883447 - DNA, 25 bp, Homo sapien
ggctcctgtgcttgccgttctgtgg

SEQ ID NO: 4883448 - DNA, 25 bp, Homo sapien
gcttgccgttctgtggccttggctc

SEQ ID NO: 4883449 - DNA, 25 bp, Homo sapien
cctgtgcttgccgttctgtggcctt

SEQ ID NO: 4883450 - DNA, 25 bp, Homo sapien
tggactctcatctgcagtccagccg

SEQ ID NO: 4883451 - DNA, 25 bp, Homo sapien
gctgagcagtttggtcgctggactc

SEQ ID NO: 4883452 - DNA, 25 bp, Homo sapien
gtttggtcgctggactctcatctgc

SEQ ID NO: 4883453 - DNA, 25 bp, Homo sapien
cagtccagccgggtctggtgtccag

SEQ ID NO: 4883454 - DNA, 25 bp, Homo sapien
tactgcttgggctgtgcaaatgcct

SEQ ID NO: 4883455 - DNA, 25 bp, Homo sapien
tctatcatggtgcttcttaaccata

SEQ ID NO: 4883456 - DNA, 25 bp, Homo sapien
ctgtctgtgggatgatagaaatgac

SEQ ID NO: 4883457 - DNA, 25 bp, Homo sapien
cagaaaggagagatactgcttgggc

SEQ ID NO: 4883458 - DNA, 25 bp, Homo sapien
tgaagattgcaaagtgtcgtctcat

SEQ ID NO: 4883459 - DNA, 25 bp, Homo sapien
gaagtgaagattgcaaagtgtcgtc

SEQ ID NO: 4883460 - DNA, 25 bp, Homo sapien
acagaagtgaagattgcaaagtgtc

SEQ ID NO: 4883461 - DNA, 25 bp, Homo sapien
agtgaagattgcaaagtgtcgtctc

SEQ ID NO: 4883462 - DNA, 25 bp, Homo sapien
ccccttcagtccctggcctgctcat

SEQ ID NO: 4883463 - DNA, 25 bp, Homo sapien
tcttctcctgaggtttgccttccct

SEQ ID NO: 4883464 - DNA, 25 bp, Homo sapien
cactcgctcttctcctgaggtttgc

SEQ ID NO: 4883465 - DNA, 25 bp, Homo sapien
tcgctcttctcctgaggtttgcctt

SEQ ID NO: 4883466 - DNA, 25 bp, Homo sapien
gataatctgtctgctactttaaaaa

SEQ ID NO: 4883467 - DNA, 25 bp, Homo sapien
tctctgtgaacacaaggcatacagc

SEQ ID NO: 4883468 - DNA, 25 bp, Homo sapien
tgactacttgaataaggtttcggac

SEQ ID NO: 4883469 - DNA, 25 bp, Homo sapien
tgaacacaaggcatacagcagataa

SEQ ID NO: 4883470 - DNA, 25 bp, Homo sapien
gttgctccaaatgtcccaagaccac

SEQ ID NO: 4883471 - DNA, 25 bp, Homo sapien
tgttgctccaaatgtcccaagacca

SEQ ID NO: 4883472 - DNA, 25 bp, Homo sapien
gctccaaatgtcccaagaccacaat

SEQ ID NO: 4883473 - DNA, 25 bp, Homo sapien
ggttgttgctccaaatgtcccaaga

SEQ ID NO: 4883474 - DNA, 25 bp, Homo sapien
tagcctgcgtcacttgagaagatgg

SEQ ID NO: 4883475 - DNA, 25 bp, Homo sapien
ttccaccaggtgtacaagtgtcaca

SEQ ID NO: 4883476 - DNA, 25 bp, Homo sapien
tctcagggaacctccgatgaactcg

SEQ ID NO: 4883477 - DNA, 25 bp, Homo sapien
aactcgatgaattatgaaatggtac

SEQ ID NO: 4883478 - DNA, 25 bp, Homo sapien
tatgataccaccagggtcctccagt

SEQ ID NO: 4883479 - DNA, 25 bp, Homo sapien
gtgccttcctcagggtactgaagag

SEQ ID NO: 4883480 - DNA, 25 bp, Homo sapien
cagctgttcagtatgataccaccag

SEQ ID NO: 4883481 - DNA, 25 bp, Homo sapien
tgttcagtatgataccaccagggtc

SEQ ID NO: 4883482 - DNA, 25 bp, Homo sapien
cacactgttctgcactgctctactt

SEQ ID NO: 4883483 - DNA, 25 bp, Homo sapien
acacactgttctgcactgctctact

SEQ ID NO: 4883484 - DNA, 25 bp, Homo sapien
tgctctactttctgttcatcccact

SEQ ID NO: 4883485 - DNA, 25 bp, Homo sapien
cacacactgttctgcactgctctac

SEQ ID NO: 4883486 - DNA, 25 bp, Homo sapien
aaattccactcatctctggttgccg

SEQ ID NO: 4883487 - DNA, 25 bp, Homo sapien
gctcaagctcttccattactccaat

SEQ ID NO: 4883488 - DNA, 25 bp, Homo sapien
tcccgagcagctgtaaaattccact

SEQ ID NO: 4883489 - DNA, 25 bp, Homo sapien
tctctaaagaagcttcacttgttcc

SEQ ID NO: 4883490 - DNA, 25 bp, Homo sapien
tgcaaagccgagagtgacattttca

SEQ ID NO: 4883491 - DNA, 25 bp, Homo sapien
gcaaagccgagagtgacattttcaa

SEQ ID NO: 4883492 - DNA, 25 bp, Homo sapien
gctgcaaagccgagagtgacatttt

SEQ ID NO: 4883493 - DNA, 25 bp, Homo sapien
aaagccgagagtgacattttcaatc

SEQ ID NO: 4883494 - DNA, 25 bp, Homo sapien
cattgacggcaatgtggaagaacat

SEQ ID NO: 4883495 - DNA, 25 bp, Homo sapien
attgacggcaatgtggaagaacatg

SEQ ID NO: 4883496 - DNA, 25 bp, Homo sapien
tgtcatcatcaaatttttccctgta

SEQ ID NO: 4883497 - DNA, 25 bp, Homo sapien
tttttccctgtagacggacttgcca

SEQ ID NO: 4883498 - DNA, 25 bp, Homo sapien
atcatcaaatttttccctgtagacg

SEQ ID NO: 4883499 - DNA, 25 bp, Homo sapien
tttccctgtagacggacttgccatc

SEQ ID NO: 4883500 - DNA, 25 bp, Homo sapien
atgaaaaactgggaatggtttgtgt

SEQ ID NO: 4883501 - DNA, 25 bp, Homo sapien
agatgaaaaactgggaatggtttgt

SEQ ID NO: 4883502 - DNA, 25 bp, Homo sapien
ctgggaatggtttgtgttgggtcca

SEQ ID NO: 4883503 - DNA, 25 bp, Homo sapien
gcagatgaaaaactgggaatggttt

SEQ ID NO: 4883504 - DNA, 25 bp, Homo sapien
gctccatggcctctacaatgctcat

SEQ ID NO: 4883505 - DNA, 25 bp, Homo sapien
tccatggcctctacaatgctcatgc

SEQ ID NO: 4883506 - DNA, 25 bp, Homo sapien
atggcctctacaatgctcatgcttt

SEQ ID NO: 4883507 - DNA, 25 bp, Homo sapien
tgctccatggcctctacaatgctca

SEQ ID NO: 4883508 - DNA, 25 bp, Homo sapien
gcatgtggcttgcaagcacagacca

SEQ ID NO: 4883509 - DNA, 25 bp, Homo sapien
tgtggcttgcaagcacagaccaaac

SEQ ID NO: 4883510 - DNA, 25 bp, Homo sapien
gcaagcacagaccaaacccttcaag

SEQ ID NO: 4883511 - DNA, 25 bp, Homo sapien
gcttgcaagcacagaccaaaccctt

SEQ ID NO: 4883512 - DNA, 25 bp, Homo sapien
ctgaaatcaaaaggggctgcccctt

SEQ ID NO: 4883513 - DNA, 25 bp, Homo sapien
agctgagagtcctggatgtaactct

SEQ ID NO: 4883514 - DNA, 25 bp, Homo sapien
tgcccctttctgtaggagagaggaa

SEQ ID NO: 4883515 - DNA, 25 bp, Homo sapien
gatgtaactctccttgttgctgggc

SEQ ID NO: 4883516 - DNA, 25 bp, Homo sapien
aacaccaggtggaagttgctgatca

SEQ ID NO: 4883517 - DNA, 25 bp, Homo sapien
ccaggtggaagttgctgatcaggat

SEQ ID NO: 4883518 - DNA, 25 bp, Homo sapien
aagaacaccaggtggaagttgctga

SEQ ID NO: 4883519 - DNA, 25 bp, Homo sapien
gaagttgctgatcaggatgagtctg

SEQ ID NO: 4883520 - DNA, 25 bp, Homo sapien
gactgccacaaattatctatcctac

SEQ ID NO: 4883521 - DNA, 25 bp, Homo sapien
catcgactgccacaaattatctatc

SEQ ID NO: 4883522 - DNA, 25 bp, Homo sapien
ctcagtggggacatcgactgccaca

SEQ ID NO: 4883523 - DNA, 25 bp, Homo sapien
gggacatcgactgccacaaattatc

SEQ ID NO: 4883524 - DNA, 25 bp, Homo sapien
ctgggtgaatggtcagaaatatcat

SEQ ID NO: 4883525 - DNA, 25 bp, Homo sapien
ggatcacaaaatcaaacagtaatat

SEQ ID NO: 4883526 - DNA, 25 bp, Homo sapien
ttgggatcacaaaatcaaacagtaa

SEQ ID NO: 4883527 - DNA, 25 bp, Homo sapien
atcacaaaatcaaacagtaatatcc

SEQ ID NO: 4883528 - DNA, 25 bp, Homo sapien
ctttgggatcacaaaatcaaacagt

SEQ ID NO: 4883529 - DNA, 25 bp, Homo sapien
ccagtgcgatgcctgatgattttcc

SEQ ID NO: 4883530 - DNA, 25 bp, Homo sapien
cccagtgcgatgcctgatgattttc

SEQ ID NO: 4883531 - DNA, 25 bp, Homo sapien
ttcccagtgcgatgcctgatgattt

SEQ ID NO: 4883532 - DNA, 25 bp, Homo sapien
tcccagtgcgatgcctgatgatttt

SEQ ID NO: 4883533 - DNA, 25 bp, Homo sapien
ctcctcacttctctgcccctttcca

SEQ ID NO: 4883534 - DNA, 25 bp, Homo sapien
cctctcgtctcctcctcacttctct

SEQ ID NO: 4883535 - DNA, 25 bp, Homo sapien
tcctcctcacttctctgcccctttc

SEQ ID NO: 4883536 - DNA, 25 bp, Homo sapien
tcgtctcctcctcacttctctgccc

SEQ ID NO: 4883537 - DNA, 25 bp, Homo sapien
ttcatatcccgaacatttggacagc

SEQ ID NO: 4883538 - DNA, 25 bp, Homo sapien
catttcaaggtcatgcaccagtagg

SEQ ID NO: 4883539 - DNA, 25 bp, Homo sapien
tggatcaggtgaagtttgcgtcccc

SEQ ID NO: 4883540 - DNA, 25 bp, Homo sapien
tgttgtgtttagatccccctgcaag

SEQ ID NO: 4883541 - DNA, 25 bp, Homo sapien
tttcataaattcgacagatggcctc

SEQ ID NO: 4883542 - DNA, 25 bp, Homo sapien
agatggcctcttgatgaatccttga

SEQ ID NO: 4883543 - DNA, 25 bp, Homo sapien
gagcatcactaatttttcggcgcag

SEQ ID NO: 4883544 - DNA, 25 bp, Homo sapien
attttcacacggaggcacatgctgc

SEQ ID NO: 4883545 - DNA, 25 bp, Homo sapien
aatgtgaactgatagtgacattgta

SEQ ID NO: 4883546 - DNA, 25 bp, Homo sapien
tgtgaactgatagtgacattgtaat

SEQ ID NO: 4883547 - DNA, 25 bp, Homo sapien
ctgtaatgtgaactgatagtgacat

SEQ ID NO: 4883548 - DNA, 25 bp, Homo sapien
gtaatgtgaactgatagtgacattg

SEQ ID NO: 4883549 - DNA, 25 bp, Homo sapien
tattaggagaggagaactggctcct

SEQ ID NO: 4883550 - DNA, 25 bp, Homo sapien
ctattaggagaggagaactggctcc

SEQ ID NO: 4883551 - DNA, 25 bp, Homo sapien
ttaggagaggagaactggctcctca

SEQ ID NO: 4883552 - DNA, 25 bp, Homo sapien
taggagaggagaactggctcctcat

SEQ ID NO: 4883553 - DNA, 25 bp, Homo sapien
tcatcgggctgccgactagcattac

SEQ ID NO: 4883554 - DNA, 25 bp, Homo sapien
tgtattctgacattcaaatccccgg

SEQ ID NO: 4883555 - DNA, 25 bp, Homo sapien
tgccgactagcattactgcggaagg

SEQ ID NO: 4883556 - DNA, 25 bp, Homo sapien
gagtgttcttcatgatttgtccaaa

SEQ ID NO: 4883557 - DNA, 25 bp, Homo sapien
gggtcaaagcggaatgaaaggctct

SEQ ID NO: 4883558 - DNA, 25 bp, Homo sapien
tcaaagcggaatgaaaggctctccc

SEQ ID NO: 4883559 - DNA, 25 bp, Homo sapien
gatcaaggggtcaaagcggaatgaa

SEQ ID NO: 4883560 - DNA, 25 bp, Homo sapien
agcggaatgaaaggctctccccggt

SEQ ID NO: 4883561 - DNA, 25 bp, Homo sapien
ctgatgaaacggctgatatctggat

SEQ ID NO: 4883562 - DNA, 25 bp, Homo sapien
cggctgatatctggattagcaagat

SEQ ID NO: 4883563 - DNA, 25 bp, Homo sapien
atgatatgcatatcttccattctga

SEQ ID NO: 4883564 - DNA, 25 bp, Homo sapien
ccattctgatgaaacggctgatatc

SEQ ID NO: 4883565 - DNA, 25 bp, Homo sapien
aatattcggaattgttcgccgtgcc

SEQ ID NO: 4883566 - DNA, 25 bp, Homo sapien
gctgaaaatatggtacttggccttt

SEQ ID NO: 4883567 - DNA, 25 bp, Homo sapien
tggtacggttgatcttggagcttgc

SEQ ID NO: 4883568 - DNA, 25 bp, Homo sapien
cgccgtgccagtggaatagtgaata

SEQ ID NO: 4883569 - DNA, 25 bp, Homo sapien
tggtctgtgactgaggtttaagagc

SEQ ID NO: 4883570 - DNA, 25 bp, Homo sapien
cctggtctgtgactgaggtttaaga

SEQ ID NO: 4883571 - DNA, 25 bp, Homo sapien
gcaggtgttctgtatgtttgcagat

SEQ ID NO: 4883572 - DNA, 25 bp, Homo sapien
ggttgcaggtgttctgtatgtttgc

SEQ ID NO: 4883573 - DNA, 25 bp, Homo sapien
gagagtggctgtcaaactctttgca

SEQ ID NO: 4883574 - DNA, 25 bp, Homo sapien
ggtcaggttgtgattcccttcggca

SEQ ID NO: 4883575 - DNA, 25 bp, Homo sapien
gttgtgattcccttcggcagtccat

SEQ ID NO: 4883576 - DNA, 25 bp, Homo sapien
agagggtcaggttgtgattcccttc

SEQ ID NO: 4883577 - DNA, 25 bp, Homo sapien
agtctgaccaccctgagacctggag

SEQ ID NO: 4883578 - DNA, 25 bp, Homo sapien
tcaggaactgtgtcccgggtgtgct

SEQ ID NO: 4883579 - DNA, 25 bp, Homo sapien
gacctggagggacaaattgaagtca

SEQ ID NO: 4883580 - DNA, 25 bp, Homo sapien
cattgaatagtctgaccaccctgag

SEQ ID NO: 4883581 - DNA, 25 bp, Homo sapien
ctatagctcagtcattccttgaatg

SEQ ID NO: 4883582 - DNA, 25 bp, Homo sapien
tatagctcagtcattccttgaatgt

SEQ ID NO: 4883583 - DNA, 25 bp, Homo sapien
gctcagtcattccttgaatgttgcc

SEQ ID NO: 4883584 - DNA, 25 bp, Homo sapien
tagctcagtcattccttgaatgttg

SEQ ID NO: 4883585 - DNA, 25 bp, Homo sapien
gagaaatttggtgcctacacacctt

SEQ ID NO: 4883586 - DNA, 25 bp, Homo sapien
caggaatctgattggctggcaccaa

SEQ ID NO: 4883587 - DNA, 25 bp, Homo sapien
aatgccacttcccataattacccag

SEQ ID NO: 4883588 - DNA, 25 bp, Homo sapien
taagtccacttctaatatcctcttt

SEQ ID NO: 4883589 - DNA, 25 bp, Homo sapien
caaagctgatgtgcagccagtatac

SEQ ID NO: 4883590 - DNA, 25 bp, Homo sapien
gattgatcggtaagtggtccctttc

SEQ ID NO: 4883591 - DNA, 25 bp, Homo sapien
ccatatagataggtgcaaagctgat

SEQ ID NO: 4883592 - DNA, 25 bp, Homo sapien
caggtatgcccaaactagtggttaa

SEQ ID NO: 4883593 - DNA, 25 bp, Homo sapien
tctttttctgttgcgagtgggctga

SEQ ID NO: 4883594 - DNA, 25 bp, Homo sapien
tcttggcaatattggtcctggagag

SEQ ID NO: 4883595 - DNA, 25 bp, Homo sapien
tgataccattccaaggagctctgcc

SEQ ID NO: 4883596 - DNA, 25 bp, Homo sapien
cttggatggatgctgcactgcagga

SEQ ID NO: 4883597 - DNA, 25 bp, Homo sapien
gcatctgtgaagtcgagataatgcc

SEQ ID NO: 4883598 - DNA, 25 bp, Homo sapien
gggtgtgacagccacttattaaaca

SEQ ID NO: 4883599 - DNA, 25 bp, Homo sapien
ccaggaacggtttggaaagtgctgc

SEQ ID NO: 4883600 - DNA, 25 bp, Homo sapien
agcctttgcagaggagagcatctgt

SEQ ID NO: 4883601 - DNA, 25 bp, Homo sapien
agctgccagcgatcacccagggtca

SEQ ID NO: 4883602 - DNA, 25 bp, Homo sapien
tgtgtacacgctggggacaaactgg

SEQ ID NO: 4883603 - DNA, 25 bp, Homo sapien
gggtcacatctgtgccactgctcct

SEQ ID NO: 4883604 - DNA, 25 bp, Homo sapien
tgcacagacgcgaccctgtgtgtac

SEQ ID NO: 4883605 - DNA, 25 bp, Homo sapien
tggcagtccagtccacttagcagga

SEQ ID NO: 4883606 - DNA, 25 bp, Homo sapien
gtgagactagctacagaattttctg

SEQ ID NO: 4883607 - DNA, 25 bp, Homo sapien
ttctgtgtcaaaggacatgtagtcc

SEQ ID NO: 4883608 - DNA, 25 bp, Homo sapien
aacatgtcggggctctccgggccca

SEQ ID NO: 4883609 - DNA, 25 bp, Homo sapien
tggttgtgaggtgtaaacatcactg

SEQ ID NO: 4883610 - DNA, 25 bp, Homo sapien
aagtctagataagtgaagcagtggg

SEQ ID NO: 4883611 - DNA, 25 bp, Homo sapien
taactggttgtgaggtgtaaacatc

SEQ ID NO: 4883612 - DNA, 25 bp, Homo sapien
tgtaactggttgtgaggtgtaaaca

SEQ ID NO: 4883613 - DNA, 25 bp, Homo sapien
tgcagacaactgaaccagagtttct

SEQ ID NO: 4883614 - DNA, 25 bp, Homo sapien
agggcttgggtattttgtaaccatg

SEQ ID NO: 4883615 - DNA, 25 bp, Homo sapien
aataaatagcagtctgtgttcccac

SEQ ID NO: 4883616 - DNA, 25 bp, Homo sapien
taaccatgttgtggttatgcttata

SEQ ID NO: 4883617 - DNA, 25 bp, Homo sapien
ggtttctgattcaagtgacacgcac

SEQ ID NO: 4883618 - DNA, 25 bp, Homo sapien
gcaacaataactttcagggcaccta

SEQ ID NO: 4883619 - DNA, 25 bp, Homo sapien
taatgccagtttggtatagagtcca

SEQ ID NO: 4883620 - DNA, 25 bp, Homo sapien
tgattatacgttatctccggctaga

SEQ ID NO: 4883621 - DNA, 25 bp, Homo sapien
gagactgtttgaatgtgaccaaatg

SEQ ID NO: 4883622 - DNA, 25 bp, Homo sapien
tcaagcctcaggacctacctgaaga

SEQ ID NO: 4883623 - DNA, 25 bp, Homo sapien
catttgaacacagtagtcccctaga

SEQ ID NO: 4883624 - DNA, 25 bp, Homo sapien
atatttaaaaaccatgggtccactg

SEQ ID NO: 4883625 - DNA, 25 bp, Homo sapien
cagatggagttgctttgtttatgaa

SEQ ID NO: 4883626 - DNA, 25 bp, Homo sapien
tggtgacatagcctggtactagtga

SEQ ID NO: 4883627 - DNA, 25 bp, Homo sapien
cagcacagagagatgtatatcttct

SEQ ID NO: 4883628 - DNA, 25 bp, Homo sapien
tctagtactgtactatcatgttaac

SEQ ID NO: 4883629 - DNA, 25 bp, Homo sapien
catgattaccaagtccaaaatgaaa

SEQ ID NO: 4883630 - DNA, 25 bp, Homo sapien
ttgcccctgtctagtcgttcccagt

SEQ ID NO: 4883631 - DNA, 25 bp, Homo sapien
tcacccggagagtgagcgtagtacc

SEQ ID NO: 4883632 - DNA, 25 bp, Homo sapien
gcccctgtctagtcgttcccagtgt

SEQ ID NO: 4883633 - DNA, 25 bp, Homo sapien
gggccatgaattatcctgtcacccg

SEQ ID NO: 4883634 - DNA, 25 bp, Homo sapien
ttagcagtcaaaaaagacattggtg

SEQ ID NO: 4883635 - DNA, 25 bp, Homo sapien
ttcacaagtttgtacagaaggcata

SEQ ID NO: 4883636 - DNA, 25 bp, Homo sapien
cctttacagaatgaagtttagcagt

SEQ ID NO: 4883637 - DNA, 25 bp, Homo sapien
tacttaaggactcgtgatgattccc

SEQ ID NO: 4883638 - DNA, 25 bp, Homo sapien
gcaagtagtattctggtttggtaat

SEQ ID NO: 4883639 - DNA, 25 bp, Homo sapien
gtattctggtttggtaattgctggt

SEQ ID NO: 4883640 - DNA, 25 bp, Homo sapien
cacatgagcaagtagtattctggtt

SEQ ID NO: 4883641 - DNA, 25 bp, Homo sapien
tgtccccacatgagcaagtagtatt

SEQ ID NO: 4883642 - DNA, 25 bp, Homo sapien
tgtaccgaggcagcgaatccgcctg

SEQ ID NO: 4883643 - DNA, 25 bp, Homo sapien
cccgtgaatctgttagctttgctca

SEQ ID NO: 4883644 - DNA, 25 bp, Homo sapien
tgaggcgctttagcacgctctaccc

SEQ ID NO: 4883645 - DNA, 25 bp, Homo sapien
tagtgggtcccagtgaggcgcttta

SEQ ID NO: 4883646 - DNA, 25 bp, Homo sapien
cagcgccttcgctctttggctccct

SEQ ID NO: 4883647 - DNA, 25 bp, Homo sapien
ttggctccctgagttagtccggttg

SEQ ID NO: 4883648 - DNA, 25 bp, Homo sapien
agtccggttgcttgcgatcgccgcg

SEQ ID NO: 4883649 - DNA, 25 bp, Homo sapien
ggctgcgaaccgaagggctcgctcc

SEQ ID NO: 4883650 - DNA, 25 bp, Homo sapien
tgtcactggatctctgatgttcttg

SEQ ID NO: 4883651 - DNA, 25 bp, Homo sapien
aggtcgctgggctgtcactggatct

SEQ ID NO: 4883652 - DNA, 25 bp, Homo sapien
tgggctgtcactggatctctgatgt

SEQ ID NO: 4883653 - DNA, 25 bp, Homo sapien
tgcaattgatcccggaggtcgctgg

SEQ ID NO: 4883654 - DNA, 25 bp, Homo sapien
aagaggctgttgctgattggctgtc

SEQ ID NO: 4883655 - DNA, 25 bp, Homo sapien
ccagcgtctgttcagtccgattcat

SEQ ID NO: 4883656 - DNA, 25 bp, Homo sapien
ggttccagcgtctgttcagtccgat

SEQ ID NO: 4883657 - DNA, 25 bp, Homo sapien
tgttcggttccagcgtctgttcagt

SEQ ID NO: 4883658 - DNA, 25 bp, Homo sapien
catgttcggttccagcgtctgttca

SEQ ID NO: 4883659 - DNA, 25 bp, Homo sapien
tagccgcagatgtgtattaccttga

SEQ ID NO: 4883660 - DNA, 25 bp, Homo sapien
ccttgaaaaaggctgcgagtcgtaa

SEQ ID NO: 4883661 - DNA, 25 bp, Homo sapien
ttcaccgtcctgtcctgggaagtgc

SEQ ID NO: 4883662 - DNA, 25 bp, Homo sapien
tgagagtcacagtcggtgtgcgcac

SEQ ID NO: 4883663 - DNA, 25 bp, Homo sapien
ctcggccgcgcggcagccagcaccc

SEQ ID NO: 4883664 - DNA, 25 bp, Homo sapien
ggcagccagcaccctctccggctcc

SEQ ID NO: 4883665 - DNA, 25 bp, Homo sapien
tcggccgcgcggcagccagcaccct

SEQ ID NO: 4883666 - DNA, 25 bp, Homo sapien
cgcggcagccagcaccctctccggc

SEQ ID NO: 4883667 - DNA, 25 bp, Homo sapien
gggagcaagactgcccacgtattga

SEQ ID NO: 4883668 - DNA, 25 bp, Homo sapien
tcatggtcagaagatacactgggaa

SEQ ID NO: 4883669 - DNA, 25 bp, Homo sapien
ttctaggaggcgaaaagcgacacag

SEQ ID NO: 4883670 - DNA, 25 bp, Homo sapien
tgctgttgttaatgcccaaaggccg

SEQ ID NO: 4883671 - DNA, 25 bp, Homo sapien
catcacaggatgactatagccaaca

SEQ ID NO: 4883672 - DNA, 25 bp, Homo sapien
agcatcacaggatgactatagccaa

SEQ ID NO: 4883673 - DNA, 25 bp, Homo sapien
accccatttaccatttaccctgatg

SEQ ID NO: 4883674 - DNA, 25 bp, Homo sapien
gcatcacaggatgactatagccaac

SEQ ID NO: 4883675 - DNA, 25 bp, Homo sapien
gggtattttgagatcttattttgtg

SEQ ID NO: 4883676 - DNA, 25 bp, Homo sapien
agtacttcttcaggcatacatagca

SEQ ID NO: 4883677 - DNA, 25 bp, Homo sapien
tagcagcacatggtccataaaacac

SEQ ID NO: 4883678 - DNA, 25 bp, Homo sapien
tcttcaggcatacatagcagcacat

SEQ ID NO: 4883679 - DNA, 25 bp, Homo sapien
catagcagcacatggtccataaaac

SEQ ID NO: 4883680 - DNA, 25 bp, Homo sapien
tgaaaaaccatcctaattaggcgct

SEQ ID NO: 4883681 - DNA, 25 bp, Homo sapien
taattaggcgcttaatccagccaag

SEQ ID NO: 4883682 - DNA, 25 bp, Homo sapien
ccatcctaattaggcgcttaatcca

SEQ ID NO: 4883683 - DNA, 25 bp, Homo sapien
tgttgaaaaaccatcctaattaggc

SEQ ID NO: 4883684 - DNA, 25 bp, Homo sapien
taaatccatagggcaaaagtaagta

SEQ ID NO: 4883685 - DNA, 25 bp, Homo sapien
ttaatagatcctgttcttttacaaa

SEQ ID NO: 4883686 - DNA, 25 bp, Homo sapien
ataaatccatagggcaaaagtaagt

SEQ ID NO: 4883687 - DNA, 25 bp, Homo sapien
tttaatagatcctgttcttttacaa

SEQ ID NO: 4883688 - DNA, 25 bp, Homo sapien
tactattatgtatttatttttgaga

SEQ ID NO: 4883689 - DNA, 25 bp, Homo sapien
ctctgccccctccaggttcaagtga

SEQ ID NO: 4883690 - DNA, 25 bp, Homo sapien
tggagtttcactctttcgcccaggc

SEQ ID NO: 4883691 - DNA, 25 bp, Homo sapien
gtgaagtggagcaatctcggctccc

SEQ ID NO: 4883692 - DNA, 25 bp, Homo sapien
ttttattttcatcaggttttcatac

SEQ ID NO: 4883693 - DNA, 25 bp, Homo sapien
aattttattttcatcaggttttcat

SEQ ID NO: 4883694 - DNA, 25 bp, Homo sapien
ttattttcatcaggttttcatacta

SEQ ID NO: 4883695 - DNA, 25 bp, Homo sapien
attttcatcaggttttcatactatt

SEQ ID NO: 4883696 - DNA, 25 bp, Homo sapien
gaaccatatggcttcctagaccaaa

SEQ ID NO: 4883697 - DNA, 25 bp, Homo sapien
tcgagacgaaccatatggcttccta

SEQ ID NO: 4883698 - DNA, 25 bp, Homo sapien
gatacttcgagacgaaccatatggc

SEQ ID NO: 4883699 - DNA, 25 bp, Homo sapien
gacgaaccatatggcttcctagacc

SEQ ID NO: 4883700 - DNA, 25 bp, Homo sapien
gacactgaatcagagacaaattagt

SEQ ID NO: 4883701 - DNA, 25 bp, Homo sapien
ttggacactgaatcagagacaaatt

SEQ ID NO: 4883702 - DNA, 25 bp, Homo sapien
ggacactgaatcagagacaaattag

SEQ ID NO: 4883703 - DNA, 25 bp, Homo sapien
tggacactgaatcagagacaaatta

SEQ ID NO: 4883704 - DNA, 25 bp, Homo sapien
gttcccagcaaggtcctgtcctact

SEQ ID NO: 4883705 - DNA, 25 bp, Homo sapien
ccagcaaggtcctgtcctactacag

SEQ ID NO: 4883706 - DNA, 25 bp, Homo sapien
ttcccagcaaggtcctgtcctacta

SEQ ID NO: 4883707 - DNA, 25 bp, Homo sapien
tgaaggttcccagcaaggtcctgtc

SEQ ID NO: 4883708 - DNA, 25 bp, Homo sapien
tccaacatcagcaaaagacgccact

SEQ ID NO: 4883709 - DNA, 25 bp, Homo sapien
gggactccattctgttgcatggctg

SEQ ID NO: 4883710 - DNA, 25 bp, Homo sapien
cttagtcttgctgaacactctcctt

SEQ ID NO: 4883711 - DNA, 25 bp, Homo sapien
tcttctttggctacccatccaacat

SEQ ID NO: 4883712 - DNA, 25 bp, Homo sapien
gctttgaacctcttctgccagtttc

SEQ ID NO: 4883713 - DNA, 25 bp, Homo sapien
ttggctttgaacctcttctgccagt

SEQ ID NO: 4883714 - DNA, 25 bp, Homo sapien
tcttggtctggctcttttctattct

SEQ ID NO: 4883715 - DNA, 25 bp, Homo sapien
gatcatctcctagttggtctatttc

SEQ ID NO: 4883716 - DNA, 25 bp, Homo sapien
gataccaatttctgctagtgagatt

SEQ ID NO: 4883717 - DNA, 25 bp, Homo sapien
cgtttaacagttaactgatgtttct

SEQ ID NO: 4883718 - DNA, 25 bp, Homo sapien
caatttctgctagtgagatttctac

SEQ ID NO: 4883719 - DNA, 25 bp, Homo sapien
taccaatttctgctagtgagatttc

SEQ ID NO: 4883720 - DNA, 25 bp, Homo sapien
ccaaaataaggatagactcttgcaa

SEQ ID NO: 4883721 - DNA, 25 bp, Homo sapien
aagaacagagggctattaagaacta

SEQ ID NO: 4883722 - DNA, 25 bp, Homo sapien
caggctggtataactccgtggctca

SEQ ID NO: 4883723 - DNA, 25 bp, Homo sapien
gaacactattgtgccagggtaagag

SEQ ID NO: 4883724 - DNA, 25 bp, Homo sapien
tggtaaggaaatctgtctgcttggg

SEQ ID NO: 4883725 - DNA, 25 bp, Homo sapien
tgcttcctcatttgccagcgctggg

SEQ ID NO: 4883726 - DNA, 25 bp, Homo sapien
ttttcgagagcgcaaatcttctgca

SEQ ID NO: 4883727 - DNA, 25 bp, Homo sapien
cacaattttggcaatctgagctctg

SEQ ID NO: 4883728 - DNA, 25 bp, Homo sapien
ttaaccaaagtctttccagcattgg

SEQ ID NO: 4883729 - DNA, 25 bp, Homo sapien
taaggatctctagcatatttggcat

SEQ ID NO: 4883730 - DNA, 25 bp, Homo sapien
cagcagatgtactttggtggagccc

SEQ ID NO: 4883731 - DNA, 25 bp, Homo sapien
ccaaatgtggtagaatctaagtcac

SEQ ID NO: 4883732 - DNA, 25 bp, Homo sapien
tggctatcacttcgataccgataag

SEQ ID NO: 4883733 - DNA, 25 bp, Homo sapien
gtagcatccactggcttgggcttca

SEQ ID NO: 4883734 - DNA, 25 bp, Homo sapien
cttcgataccgataagcaaatttct

SEQ ID NO: 4883735 - DNA, 25 bp, Homo sapien
tgctatgagggcagcagggtcagta

SEQ ID NO: 4883736 - DNA, 25 bp, Homo sapien
tttggaacttacagatgacacaggt

SEQ ID NO: 4883737 - DNA, 25 bp, Homo sapien
gatctacttgtaaggcagggaccaa

SEQ ID NO: 4883738 - DNA, 25 bp, Homo sapien
gggatggatttctacataacaggaa

SEQ ID NO: 4883739 - DNA, 25 bp, Homo sapien
ttttcccaaccagccgtgatctact

SEQ ID NO: 4883740 - DNA, 25 bp, Homo sapien
ataaagatattggttcaagtaacag

SEQ ID NO: 4883741 - DNA, 25 bp, Homo sapien
aaagatattggttcaagtaacagta

SEQ ID NO: 4883742 - DNA, 25 bp, Homo sapien
taaagatattggttcaagtaacagt

SEQ ID NO: 4883743 - DNA, 25 bp, Homo sapien
tataaataaagatattggttcaagt

SEQ ID NO: 4883744 - DNA, 25 bp, Homo sapien
cctgttggcttcaacatgtgtggcc

SEQ ID NO: 4883745 - DNA, 25 bp, Homo sapien
ttcctgttggcttcaacatgtgtgg

SEQ ID NO: 4883746 - DNA, 25 bp, Homo sapien
tcctgttggcttcaacatgtgtggc

SEQ ID NO: 4883747 - DNA, 25 bp, Homo sapien
tgttggcttcaacatgtgtggccca

SEQ ID NO: 4883748 - DNA, 25 bp, Homo sapien
tggttctcaacttcccttcaatggg

SEQ ID NO: 4883749 - DNA, 25 bp, Homo sapien
tggatggcaatgacgtgaaagcagc

SEQ ID NO: 4883750 - DNA, 25 bp, Homo sapien
actggaaatctgaacgccctggcca

SEQ ID NO: 4883751 - DNA, 25 bp, Homo sapien
gaagataacagtgccctcgttgcca

SEQ ID NO: 4883752 - DNA, 25 bp, Homo sapien
tattactcctggtaggatactctgg

SEQ ID NO: 4883753 - DNA, 25 bp, Homo sapien
ttaggtcaaaatacgtttcaggtga

SEQ ID NO: 4883754 - DNA, 25 bp, Homo sapien
tctcctaatactcccagccaggaag

SEQ ID NO: 4883755 - DNA, 25 bp, Homo sapien
tatagcaagtccttaaaagccccag

SEQ ID NO: 4883756 - DNA, 25 bp, Homo sapien
ttaaaattgaagcacagtgatgtaa

SEQ ID NO: 4883757 - DNA, 25 bp, Homo sapien
ctttgccaagacattccatcttgta

SEQ ID NO: 4883758 - DNA, 25 bp, Homo sapien
tgatgtaattggtttactgaagctt

SEQ ID NO: 4883759 - DNA, 25 bp, Homo sapien
cactggtcccatcaataagtctttg

SEQ ID NO: 4883760 - DNA, 25 bp, Homo sapien
cagaagatggcactagatatataat

SEQ ID NO: 4883761 - DNA, 25 bp, Homo sapien
tgaaactcttccgtctatactggag

SEQ ID NO: 4883762 - DNA, 25 bp, Homo sapien
cattgggccattaataaacgtttgt

SEQ ID NO: 4883763 - DNA, 25 bp, Homo sapien
gagtcatgtggtaagcagtatccaa

SEQ ID NO: 4883764 - DNA, 25 bp, Homo sapien
tcaggcccactgtttcagtacatag

SEQ ID NO: 4883765 - DNA, 25 bp, Homo sapien
cactctcgtgagatggccatacctt

SEQ ID NO: 4883766 - DNA, 25 bp, Homo sapien
gaatatggtcagctggtcactctcg

SEQ ID NO: 4883767 - DNA, 25 bp, Homo sapien
gactagtcatatctcaggcacccaa

SEQ ID NO: 4883768 - DNA, 25 bp, Homo sapien
aatcagctcagggtatttgccaatc

SEQ ID NO: 4883769 - DNA, 25 bp, Homo sapien
tatcgtagagtaccgccaagctttc

SEQ ID NO: 4883770 - DNA, 25 bp, Homo sapien
ctaaagtccctttcgctgcagtgag

SEQ ID NO: 4883771 - DNA, 25 bp, Homo sapien
gtacacttgacctgcacatgcgaga

SEQ ID NO: 4883772 - DNA, 25 bp, Homo sapien
aatacaaggctatcccagacaatgc

SEQ ID NO: 4883773 - DNA, 25 bp, Homo sapien
acacgtggggctgaataaagccagc

SEQ ID NO: 4883774 - DNA, 25 bp, Homo sapien
gttttccaatacaaggctatcccag

SEQ ID NO: 4883775 - DNA, 25 bp, Homo sapien
tcccagacaatgcttggacacgtgg

SEQ ID NO: 4883776 - DNA, 25 bp, Homo sapien
agtaggatgtaggaaggttaatgtt

SEQ ID NO: 4883777 - DNA, 25 bp, Homo sapien
cttcaaagtggatatgtacattaca

SEQ ID NO: 4883778 - DNA, 25 bp, Homo sapien
aatcttttgaagaataagatctggg

SEQ ID NO: 4883779 - DNA, 25 bp, Homo sapien
tgtatagatgatgttttaaagatag

SEQ ID NO: 4883780 - DNA, 25 bp, Homo sapien
cagatctagaatgggttgtcaggga

SEQ ID NO: 4883781 - DNA, 25 bp, Homo sapien
gtgattactactccccaacataggg

SEQ ID NO: 4883782 - DNA, 25 bp, Homo sapien
gagtaaggcatttgacaaggcgtcc

SEQ ID NO: 4883783 - DNA, 25 bp, Homo sapien
ggtctttcggacatcaaatcccagc

SEQ ID NO: 4883784 - DNA, 25 bp, Homo sapien
aagagcgtgtagaactgtggccaga

SEQ ID NO: 4883785 - DNA, 25 bp, Homo sapien
tgacttcagagtgacaggtagagaa

SEQ ID NO: 4883786 - DNA, 25 bp, Homo sapien
gggtagtggccgatttgacttcaga

SEQ ID NO: 4883787 - DNA, 25 bp, Homo sapien
tgagggatgctgaatctcccagaga

SEQ ID NO: 4883788 - DNA, 25 bp, Homo sapien
gttaaatcttgagggcaagctaaag

SEQ ID NO: 4883789 - DNA, 25 bp, Homo sapien
ttctaggataaattatgtgactgtc

SEQ ID NO: 4883790 - DNA, 25 bp, Homo sapien
ctagtgtagtttttcagaatggtta

SEQ ID NO: 4883791 - DNA, 25 bp, Homo sapien
ctaggataaattatgtgactgtcaa

SEQ ID NO: 4883792 - DNA, 25 bp, Homo sapien
gtcccatttggatagaggtgattta

SEQ ID NO: 4883793 - DNA, 25 bp, Homo sapien
ccatttggatagaggtgatttatgc

SEQ ID NO: 4883794 - DNA, 25 bp, Homo sapien
taggtcccatttggatagaggtgat

SEQ ID NO: 4883795 - DNA, 25 bp, Homo sapien
ttaggtcccatttggatagaggtga

SEQ ID NO: 4883796 - DNA, 25 bp, Homo sapien
tcagtcgccagaatgagtatctgtc

SEQ ID NO: 4883797 - DNA, 25 bp, Homo sapien
ttctctatttccaggcaacaaatgg

SEQ ID NO: 4883798 - DNA, 25 bp, Homo sapien
cacagataggtgctctgatactagc

SEQ ID NO: 4883799 - DNA, 25 bp, Homo sapien
gatactagccacagacatcagtcgc

SEQ ID NO: 4883800 - DNA, 25 bp, Homo sapien
accaaagttgtttaccctcagcatg

SEQ ID NO: 4883801 - DNA, 25 bp, Homo sapien
aaataaaggctctccttttggaatg

SEQ ID NO: 4883802 - DNA, 25 bp, Homo sapien
tagttggatattttagggttctata

SEQ ID NO: 4883803 - DNA, 25 bp, Homo sapien
gttgtttaccctcagcatgagaatt

SEQ ID NO: 4883804 - DNA, 25 bp, Homo sapien
gagtcagctgttgaatgggccatta

SEQ ID NO: 4883805 - DNA, 25 bp, Homo sapien
tgattaaccctgttgagttctcaga

SEQ ID NO: 4883806 - DNA, 25 bp, Homo sapien
agtcagaatgtctgtaggagtcagc

SEQ ID NO: 4883807 - DNA, 25 bp, Homo sapien
cagagatagtatttgctatggccca

SEQ ID NO: 4883808 - DNA, 25 bp, Homo sapien
tagagctatcctactatatagtcgg

SEQ ID NO: 4883809 - DNA, 25 bp, Homo sapien
tgtcctcaatagcataatcctggag

SEQ ID NO: 4883810 - DNA, 25 bp, Homo sapien
caaatacacaattgctcagccatag

SEQ ID NO: 4883811 - DNA, 25 bp, Homo sapien
ggagtcacacttctagagctatagg

SEQ ID NO: 4883812 - DNA, 25 bp, Homo sapien
tgggcagggccactgttgtatcatg

SEQ ID NO: 4883813 - DNA, 25 bp, Homo sapien
taactccttgggatatcttgctgag

SEQ ID NO: 4883814 - DNA, 25 bp, Homo sapien
tggctgctaattcaaaactactgtg

SEQ ID NO: 4883815 - DNA, 25 bp, Homo sapien
ccagtgtggtgatgagatcaggacc

SEQ ID NO: 4883816 - DNA, 25 bp, Homo sapien
aagatggtaataagttctctgcagc

SEQ ID NO: 4883817 - DNA, 25 bp, Homo sapien
tcaactttattgtggtagaacttac

SEQ ID NO: 4883818 - DNA, 25 bp, Homo sapien
cacaaaagggttaacctggtcagcg

SEQ ID NO: 4883819 - DNA, 25 bp, Homo sapien
aagactgcatcctctgtttgagaat

SEQ ID NO: 4883820 - DNA, 25 bp, Homo sapien
tggttaggcagttttagataacaag

SEQ ID NO: 4883821 - DNA, 25 bp, Homo sapien
aaatagtctcttttggcctgccaca

SEQ ID NO: 4883822 - DNA, 25 bp, Homo sapien
tcttttgttggcagttggttaggca

SEQ ID NO: 4883823 - DNA, 25 bp, Homo sapien
ccacatgaaggtgatacgtcaggta

SEQ ID NO: 4883824 - DNA, 25 bp, Homo sapien
caatctgaaattgaagtgtctgtct

SEQ ID NO: 4883825 - DNA, 25 bp, Homo sapien
ttcagctcaatctgaaattgaagtg

SEQ ID NO: 4883826 - DNA, 25 bp, Homo sapien
tatttcagctcaatctgaaattgaa

SEQ ID NO: 4883827 - DNA, 25 bp, Homo sapien
tcaatctgaaattgaagtgtctgtc

SEQ ID NO: 4883828 - DNA, 25 bp, Homo sapien
gacatggctactatttaacacctgc

SEQ ID NO: 4883829 - DNA, 25 bp, Homo sapien
tgcaagacagattttaccccagatc

SEQ ID NO: 4883830 - DNA, 25 bp, Homo sapien
tcacctggtgattctaaattaagag

SEQ ID NO: 4883831 - DNA, 25 bp, Homo sapien
tcatctggtgcccaatccagggaac

SEQ ID NO: 4883832 - DNA, 25 bp, Homo sapien
tgagtcaagtctacaaagagccaga

SEQ ID NO: 4883833 - DNA, 25 bp, Homo sapien
ggtaaaaaagatagttcatgcctgt

SEQ ID NO: 4883834 - DNA, 25 bp, Homo sapien
cagacttggagcgtgaagccttctc

SEQ ID NO: 4883835 - DNA, 25 bp, Homo sapien
cagtgtactgaatgtgcttcccagg

SEQ ID NO: 4883836 - DNA, 25 bp, Homo sapien
tagaattgaaaagtagaataactga

SEQ ID NO: 4883837 - DNA, 25 bp, Homo sapien
aaatctgctgttgaaacctttgagc

SEQ ID NO: 4883838 - DNA, 25 bp, Homo sapien
aatctgctgttgaaacctttgagca

SEQ ID NO: 4883839 - DNA, 25 bp, Homo sapien
ttctagaattgaaaagtagaataac

SEQ ID NO: 4883840 - DNA, 25 bp, Homo sapien
tgttaaggtggcagatacagtggct

SEQ ID NO: 4883841 - DNA, 25 bp, Homo sapien
taaaggcctcttttgtgacatcggt

SEQ ID NO: 4883842 - DNA, 25 bp, Homo sapien
taaagcaagtagtggtcgggtctca

SEQ ID NO: 4883843 - DNA, 25 bp, Homo sapien
gacatcggttgtgggaaaacatgcg

SEQ ID NO: 4883844 - DNA, 25 bp, Homo sapien
gaaattgaccgatacgtattggacc

SEQ ID NO: 4883845 - DNA, 25 bp, Homo sapien
cacagagcattctgccccatgtatg

SEQ ID NO: 4883846 - DNA, 25 bp, Homo sapien
gaatttaatgactgaggagctatgc

SEQ ID NO: 4883847 - DNA, 25 bp, Homo sapien
tatgttcagcgtctgagtttcagca

SEQ ID NO: 4883848 - DNA, 25 bp, Homo sapien
gtttggtctgcgaaagcagctatcc

SEQ ID NO: 4883849 - DNA, 25 bp, Homo sapien
taaccaagttcaggctggttgctgc

SEQ ID NO: 4883850 - DNA, 25 bp, Homo sapien
tcagactcgagtttgccagcctgtg

SEQ ID NO: 4883851 - DNA, 25 bp, Homo sapien
tctagtaactcccatacaagggtag

SEQ ID NO: 4883852 - DNA, 25 bp, Homo sapien
caatgctaaacctcacatctaaaca

SEQ ID NO: 4883853 - DNA, 25 bp, Homo sapien
aatttagaaacttaggcaatcagct

SEQ ID NO: 4883854 - DNA, 25 bp, Homo sapien
gaaacaatgctaaacctcacatcta

SEQ ID NO: 4883855 - DNA, 25 bp, Homo sapien
ttaggcaatcagctaaggagctggt

SEQ ID NO: 4883856 - DNA, 25 bp, Homo sapien
cagcaggttctgactttaacgagtc

SEQ ID NO: 4883857 - DNA, 25 bp, Homo sapien
gtaggatttgccataggccttcttg

SEQ ID NO: 4883858 - DNA, 25 bp, Homo sapien
tatttcctaccatgaattattgtgg

SEQ ID NO: 4883859 - DNA, 25 bp, Homo sapien
gtcatagtccttattctcttaaggc

SEQ ID NO: 4883860 - DNA, 25 bp, Homo sapien
gaagatacattctcctgtgagccag

SEQ ID NO: 4883861 - DNA, 25 bp, Homo sapien
cagctgatatctaagatacctgacc

SEQ ID NO: 4883862 - DNA, 25 bp, Homo sapien
cagtttattataagcaacgtttggg

SEQ ID NO: 4883863 - DNA, 25 bp, Homo sapien
cttatttctggagtgtgattttctc

SEQ ID NO: 4883864 - DNA, 25 bp, Homo sapien
catcagtaagaatgtgtagggacac

SEQ ID NO: 4883865 - DNA, 25 bp, Homo sapien
gagccctgggacatgtcctaggcag

SEQ ID NO: 4883866 - DNA, 25 bp, Homo sapien
tcctaggcagagagtagtcagggct

SEQ ID NO: 4883867 - DNA, 25 bp, Homo sapien
cagggctttgtattcttgagacatc

SEQ ID NO: 4883868 - DNA, 25 bp, Homo sapien
gagttccactttcagtaatgttagc

SEQ ID NO: 4883869 - DNA, 25 bp, Homo sapien
ctttgtggatttggcctatagtgga

SEQ ID NO: 4883870 - DNA, 25 bp, Homo sapien
tattccaaatggttagtcttcacta

SEQ ID NO: 4883871 - DNA, 25 bp, Homo sapien
gatgcttggtagaatgcctatttca

SEQ ID NO: 4883872 - DNA, 25 bp, Homo sapien
ggatccacttgtcatggttgtacaa

SEQ ID NO: 4883873 - DNA, 25 bp, Homo sapien
ttttattttgctgtcatgtagtagg

SEQ ID NO: 4883874 - DNA, 25 bp, Homo sapien
gctgtcatgtagtaggttggagata

SEQ ID NO: 4883875 - DNA, 25 bp, Homo sapien
tccatgaagtaatacagggatccac

SEQ ID NO: 4883876 - DNA, 25 bp, Homo sapien
gtaaaataagtaccaatagctagga

SEQ ID NO: 4883877 - DNA, 25 bp, Homo sapien
tagctaggaacagtaggaaataagg

SEQ ID NO: 4883878 - DNA, 25 bp, Homo sapien
taccaatagctaggaacagtaggaa

SEQ ID NO: 4883879 - DNA, 25 bp, Homo sapien
gaaataaggagatctggtgtttaac

SEQ ID NO: 4883880 - DNA, 25 bp, Homo sapien
tgaacaataggcctagatgccccgt

SEQ ID NO: 4883881 - DNA, 25 bp, Homo sapien
cccgactccttcgtttctgtggctg

SEQ ID NO: 4883882 - DNA, 25 bp, Homo sapien
tacacacaactgtacggggttcgcg

SEQ ID NO: 4883883 - DNA, 25 bp, Homo sapien
gttgctgtagtctccccgactcctt

SEQ ID NO: 4883884 - DNA, 25 bp, Homo sapien
ccccagcacgtcctcagccgccgag

SEQ ID NO: 4883885 - DNA, 25 bp, Homo sapien
cgctctcttcggctgccccaatccc

SEQ ID NO: 4883886 - DNA, 25 bp, Homo sapien
gctccagctccgctctcttcggctg

SEQ ID NO: 4883887 - DNA, 25 bp, Homo sapien
tctctcaggtaatcgccgccgccgg

SEQ ID NO: 4883888 - DNA, 25 bp, Homo sapien
ccggtcctggtaattggcgccgcgg

SEQ ID NO: 4883889 - DNA, 25 bp, Homo sapien
gtcctggtaattggcgccgcggccg

SEQ ID NO: 4883890 - DNA, 25 bp, Homo sapien
aggcgcgcgccggtcctggtaattg

SEQ ID NO: 4883891 - DNA, 25 bp, Homo sapien
gcgcgcgccggtcctggtaattggc

SEQ ID NO: 4883892 - DNA, 25 bp, Homo sapien
ctttccgactttgcctgtgctggcc

SEQ ID NO: 4883893 - DNA, 25 bp, Homo sapien
tccctttccgactttgcctgtgctg

SEQ ID NO: 4883894 - DNA, 25 bp, Homo sapien
gttccctttccgactttgcctgtgc

SEQ ID NO: 4883895 - DNA, 25 bp, Homo sapien
tcctctcggccgaggagccccaggg

SEQ ID NO: 4883896 - DNA, 25 bp, Homo sapien
aaggtccgcggctgcaaagtgtgaa

SEQ ID NO: 4883897 - DNA, 25 bp, Homo sapien
aagtgtgaattacgccgggctcgcg

SEQ ID NO: 4883898 - DNA, 25 bp, Homo sapien
gctgcaaagtgtgaattacgccggg

SEQ ID NO: 4883899 - DNA, 25 bp, Homo sapien
ttggcgcaaggtccgcggctgcaaa

SEQ ID NO: 4883900 - DNA, 25 bp, Homo sapien
tagcgctcggggggatgccccgaaa

SEQ ID NO: 4883901 - DNA, 25 bp, Homo sapien
ctggaacgcacgaatttagcgctcg

SEQ ID NO: 4883902 - DNA, 25 bp, Homo sapien
ggaacgcacgaatttagcgctcggg

SEQ ID NO: 4883903 - DNA, 25 bp, Homo sapien
gtggggcctcgtgcgcacgcgcctt

SEQ ID NO: 4883904 - DNA, 25 bp, Homo sapien
ctggccccaccgagggactggcagt

SEQ ID NO: 4883905 - DNA, 25 bp, Homo sapien
aacgccgcctctagcgcgggacgag

SEQ ID NO: 4883906 - DNA, 25 bp, Homo sapien
gtctctagcgaaacccatgaatggg

SEQ ID NO: 4883907 - DNA, 25 bp, Homo sapien
gggacgagcacaccccatagcctag

SEQ ID NO: 4883908 - DNA, 25 bp, Homo sapien
tagtcatcacaaatcagtagaaggg

SEQ ID NO: 4883909 - DNA, 25 bp, Homo sapien
tgaaagctttgaccgtttagtgaga

SEQ ID NO: 4883910 - DNA, 25 bp, Homo sapien
gcttacaaaacaggtcaagagctct

SEQ ID NO: 4883911 - DNA, 25 bp, Homo sapien
caccttgtcagtggctagtcatcac

SEQ ID NO: 4883912 - DNA, 25 bp, Homo sapien
gaagttagccttgcagtcagccagc

SEQ ID NO: 4883913 - DNA, 25 bp, Homo sapien
caggaaaggctggaagttagccttg

SEQ ID NO: 4883914 - DNA, 25 bp, Homo sapien
agttagccttgcagtcagccagctt

SEQ ID NO: 4883915 - DNA, 25 bp, Homo sapien
ggaagttagccttgcagtcagccag

SEQ ID NO: 4883916 - DNA, 25 bp, Homo sapien
acattgtgacccgcctctctcctgg

SEQ ID NO: 4883917 - DNA, 25 bp, Homo sapien
cctcacattgtgacccgcctctctc

SEQ ID NO: 4883918 - DNA, 25 bp, Homo sapien
ctcacattgtgacccgcctctctcc

SEQ ID NO: 4883919 - DNA, 25 bp, Homo sapien
tcacattgtgacccgcctctctcct

SEQ ID NO: 4883920 - DNA, 25 bp, Homo sapien
caccagctgatgttctgcagagtct

SEQ ID NO: 4883921 - DNA, 25 bp, Homo sapien
taaacaagagactgatcacaaatgc

SEQ ID NO: 4883922 - DNA, 25 bp, Homo sapien
tcagcatcaactaatgaatcatagc

SEQ ID NO: 4883923 - DNA, 25 bp, Homo sapien
aatgctttaaaggtagcagcaccag

SEQ ID NO: 4883924 - DNA, 25 bp, Homo sapien
aaaacagtacttaacaatcctaatg

SEQ ID NO: 4883925 - DNA, 25 bp, Homo sapien
acagtacttaacaatcctaatgcta

SEQ ID NO: 4883926 - DNA, 25 bp, Homo sapien
agtacttaacaatcctaatgctatc

SEQ ID NO: 4883927 - DNA, 25 bp, Homo sapien
tacttaacaatcctaatgctatcta

SEQ ID NO: 4883928 - DNA, 25 bp, Homo sapien
actgctggtgaggtgttgtgatctt

SEQ ID NO: 4883929 - DNA, 25 bp, Homo sapien
tctagtcccctagtggagctactgg

SEQ ID NO: 4883930 - DNA, 25 bp, Homo sapien
tacgtatgctatcgatttcactgat

SEQ ID NO: 4883931 - DNA, 25 bp, Homo sapien
gctggtattagggagtgtctgcaac

SEQ ID NO: 4883932 - DNA, 25 bp, Homo sapien
gagaggcagtcaaatctcagagctc

SEQ ID NO: 4883933 - DNA, 25 bp, Homo sapien
caggccccacgcaaatcagaaatcc

SEQ ID NO: 4883934 - DNA, 25 bp, Homo sapien
ccagagaggcagtcaaatctcagag

SEQ ID NO: 4883935 - DNA, 25 bp, Homo sapien
aggccccacgcaaatcagaaatcca

SEQ ID NO: 4883936 - DNA, 25 bp, Homo sapien
catctcctggccccatcgttctcat

SEQ ID NO: 4883937 - DNA, 25 bp, Homo sapien
atctcctggccccatcgttctcatc

SEQ ID NO: 4883938 - DNA, 25 bp, Homo sapien
tctcctggccccatcgttctcatcc

SEQ ID NO: 4883939 - DNA, 25 bp, Homo sapien
gatcgcctggttcctgactcattac

SEQ ID NO: 4883940 - DNA, 25 bp, Homo sapien
tgctcgttgagttggatcgcctggt

SEQ ID NO: 4883941 - DNA, 25 bp, Homo sapien
tcattacctgaattggaccccatct

SEQ ID NO: 4883942 - DNA, 25 bp, Homo sapien
gtgatgcctgctcgttgagttggat

SEQ ID NO: 4883943 - DNA, 25 bp, Homo sapien
ccaaggaatgtagagtgttgaagaa

SEQ ID NO: 4883944 - DNA, 25 bp, Homo sapien
tttcatgatccagtgcagatttagg

SEQ ID NO: 4883945 - DNA, 25 bp, Homo sapien
gacacgtgtggcaaacattacagac

SEQ ID NO: 4883946 - DNA, 25 bp, Homo sapien
gattgagaattcagtcagaaagaga

SEQ ID NO: 4883947 - DNA, 25 bp, Homo sapien
tcccaccttggctatatcagtaact

SEQ ID NO: 4883948 - DNA, 25 bp, Homo sapien
tctagctccctccagtagtgtccca

SEQ ID NO: 4883949 - DNA, 25 bp, Homo sapien
tgagcttagcaatgccaagtacctg

SEQ ID NO: 4883950 - DNA, 25 bp, Homo sapien
aatgccaagtacctgaactggaggc

SEQ ID NO: 4883951 - DNA, 25 bp, Homo sapien
tcatgagcaacctgaacactccaga

SEQ ID NO: 4883952 - DNA, 25 bp, Homo sapien
tgagcaacctgaacactccagacaa

SEQ ID NO: 4883953 - DNA, 25 bp, Homo sapien
acaacactgcttcttcgctctgagc

SEQ ID NO: 4883954 - DNA, 25 bp, Homo sapien
gaagttcacagtgcgcacatttttc

SEQ ID NO: 4883955 - DNA, 25 bp, Homo sapien
tcatgctctgtgggtcatctcaaag

SEQ ID NO: 4883956 - DNA, 25 bp, Homo sapien
ccacatgttcaggtgtgcctgccct

SEQ ID NO: 4883957 - DNA, 25 bp, Homo sapien
gccctgagtgttggccagcggccaa

SEQ ID NO: 4883958 - DNA, 25 bp, Homo sapien
cagctgcactcaggtcccacatgtt

SEQ ID NO: 4883959 - DNA, 25 bp, Homo sapien
gcagggttaagcaggtcaatagagt

SEQ ID NO: 4883960 - DNA, 25 bp, Homo sapien
tgttccaccgtttcaaagcaaacag

SEQ ID NO: 4883961 - DNA, 25 bp, Homo sapien
ggtcaatagagtcaggttacttttc

SEQ ID NO: 4883962 - DNA, 25 bp, Homo sapien
gttaagcaggtcaatagagtcaggt

SEQ ID NO: 4883963 - DNA, 25 bp, Homo sapien
tctgtgtccgcaaacaggaacaact

SEQ ID NO: 4883964 - DNA, 25 bp, Homo sapien
ctgtgtccgcaaacaggaacaactt

SEQ ID NO: 4883965 - DNA, 25 bp, Homo sapien
ttgctgttttcaactggtctggaaa

SEQ ID NO: 4883966 - DNA, 25 bp, Homo sapien
ctgttttcaactggtctggaaatag

SEQ ID NO: 4883967 - DNA, 25 bp, Homo sapien
gggtgcctgaatcctgtccagtatc

SEQ ID NO: 4883968 - DNA, 25 bp, Homo sapien
gagcaaagcagcctaacgttagcat

SEQ ID NO: 4883969 - DNA, 25 bp, Homo sapien
agactccgaggtttctggagttgag

SEQ ID NO: 4883970 - DNA, 25 bp, Homo sapien
tagcattcatgcttttcacaaagga

SEQ ID NO: 4883971 - DNA, 25 bp, Homo sapien
ttggcgttgggcagcacttttactg

SEQ ID NO: 4883972 - DNA, 25 bp, Homo sapien
catgttaggtttggcgttgggcagc

SEQ ID NO: 4883973 - DNA, 25 bp, Homo sapien
taggtttggcgttgggcagcacttt

SEQ ID NO: 4883974 - DNA, 25 bp, Homo sapien
gggcatgttaggtttggcgttgggc

SEQ ID NO: 4883975 - DNA, 25 bp, Homo sapien
tgcagggagcccagtttgtaagcca

SEQ ID NO: 4883976 - DNA, 25 bp, Homo sapien
ggtctctgggtcaaaacctcctgag

SEQ ID NO: 4883977 - DNA, 25 bp, Homo sapien
gccctgagcgtttctagtcttgtta

SEQ ID NO: 4883978 - DNA, 25 bp, Homo sapien
tggctcagggctacaggaaccacat

SEQ ID NO: 4883979 - DNA, 25 bp, Homo sapien
tatcaacccttccttgggttgagcc

SEQ ID NO: 4883980 - DNA, 25 bp, Homo sapien
cttccttgggttgagccaataaaat

SEQ ID NO: 4883981 - DNA, 25 bp, Homo sapien
caacccttccttgggttgagccaat

SEQ ID NO: 4883982 - DNA, 25 bp, Homo sapien
ttgggttgagccaataaaattcctc

SEQ ID NO: 4883983 - DNA, 25 bp, Homo sapien
tctcctgttgttgacagagtccgct

SEQ ID NO: 4883984 - DNA, 25 bp, Homo sapien
gaatttcgtatagagcttctcctgt

SEQ ID NO: 4883985 - DNA, 25 bp, Homo sapien
tctttggttaggtatgttacatgcc

SEQ ID NO: 4883986 - DNA, 25 bp, Homo sapien
tgatgctcccttatgcagaccaaga

SEQ ID NO: 4883987 - DNA, 25 bp, Homo sapien
cactccttgttggtagtagctgagg

SEQ ID NO: 4883988 - DNA, 25 bp, Homo sapien
tttggtttgtctcccgcttctgagg

SEQ ID NO: 4883989 - DNA, 25 bp, Homo sapien
cgcacccggcctatgatggttactt

SEQ ID NO: 4883990 - DNA, 25 bp, Homo sapien
ttatcctgtcggagttctctcagcc

SEQ ID NO: 4883991 - DNA, 25 bp, Homo sapien
caaagtacaggctaggagcgagaac

SEQ ID NO: 4883992 - DNA, 25 bp, Homo sapien
caccactcacgaggaaaaggatagt

SEQ ID NO: 4883993 - DNA, 25 bp, Homo sapien
gaacacaccaccatcgagggtggga

SEQ ID NO: 4883994 - DNA, 25 bp, Homo sapien
agatatactgttaagggaatacaaa

SEQ ID NO: 4883995 - DNA, 25 bp, Homo sapien
gaaaaaggtgctttatgcacaggaa

SEQ ID NO: 4883996 - DNA, 25 bp, Homo sapien
ccagctgtcatttgaggtagctggg

SEQ ID NO: 4883997 - DNA, 25 bp, Homo sapien
ggactccattttatcagctgactaa

SEQ ID NO: 4883998 - DNA, 25 bp, Homo sapien
gactaatgaagtatggttgaatttc

SEQ ID NO: 4883999 - DNA, 25 bp, Homo sapien
gtctctgagtcacctgaggcctgat

SEQ ID NO: 4884000 - DNA, 25 bp, Homo sapien
ctaccactctctaccagtctctgag

SEQ ID NO: 4884001 - DNA, 25 bp, Homo sapien
taccactctctaccagtctctgagt

SEQ ID NO: 4884002 - DNA, 25 bp, Homo sapien
tcacctgaggcctgattctaaccat

SEQ ID NO: 4884003 - DNA, 25 bp, Homo sapien
tccacaaccgtcaaggaggtggtcg

SEQ ID NO: 4884004 - DNA, 25 bp, Homo sapien
tcaaggaggtggtcgtgcaatgcct

SEQ ID NO: 4884005 - DNA, 25 bp, Homo sapien
aatgcctcaccctcttgcatgttgt

SEQ ID NO: 4884006 - DNA, 25 bp, Homo sapien
tggtcgtgcaatgcctcaccctctt

SEQ ID NO: 4884007 - DNA, 25 bp, Homo sapien
cacttgtaacacatccaattcctgg

SEQ ID NO: 4884008 - DNA, 25 bp, Homo sapien
gcaaattcggagagctggaacacct

SEQ ID NO: 4884009 - DNA, 25 bp, Homo sapien
tcacactcctaacaatggagttggc

SEQ ID NO: 4884010 - DNA, 25 bp, Homo sapien
tcctcttggcagatactcttggctc

SEQ ID NO: 4884011 - DNA, 25 bp, Homo sapien
cagtatctgcatgactgttgagtct

SEQ ID NO: 4884012 - DNA, 25 bp, Homo sapien
ccaaaggaattctcagtatctgcat

SEQ ID NO: 4884013 - DNA, 25 bp, Homo sapien
gactgttgagtctgagagacatttg

SEQ ID NO: 4884014 - DNA, 25 bp, Homo sapien
ctgagagacatttgttgttggcaaa

SEQ ID NO: 4884015 - DNA, 25 bp, Homo sapien
gctcgacagcatgaagtaggtgtta

SEQ ID NO: 4884016 - DNA, 25 bp, Homo sapien
aaatgtcggtaagtattgcgtgggc

SEQ ID NO: 4884017 - DNA, 25 bp, Homo sapien
cgttttcgtctccaaactgctcggc

SEQ ID NO: 4884018 - DNA, 25 bp, Homo sapien
taaacttctcagtagcagctggatc

SEQ ID NO: 4884019 - DNA, 25 bp, Homo sapien
aggagattgtgaagaaaggaaattc

SEQ ID NO: 4884020 - DNA, 25 bp, Homo sapien
tcattcttcccagtattgtgtttgc

SEQ ID NO: 4884021 - DNA, 25 bp, Homo sapien
attcttcccagtattgtgtttgctg

SEQ ID NO: 4884022 - DNA, 25 bp, Homo sapien
ctcattcttcccagtattgtgtttg

SEQ ID NO: 4884023 - DNA, 25 bp, Homo sapien
cattcttcccagtattgtgtttgct

SEQ ID NO: 4884024 - DNA, 25 bp, Homo sapien
caaatctgctcaacaggaacttgtc

SEQ ID NO: 4884025 - DNA, 25 bp, Homo sapien
ttccaaattccaaatctgctcaaca

SEQ ID NO: 4884026 - DNA, 25 bp, Homo sapien
caggaacttgtctctcccctaagtc

SEQ ID NO: 4884027 - DNA, 25 bp, Homo sapien
cccctaagtcttcaacaacagagaa

SEQ ID NO: 4884028 - DNA, 25 bp, Homo sapien
agtcacatcctcaaacatataatct

SEQ ID NO: 4884029 - DNA, 25 bp, Homo sapien
cttggagtaggggagcttcagtcac

SEQ ID NO: 4884030 - DNA, 25 bp, Homo sapien
cacatcctcaaacatataatctctt

SEQ ID NO: 4884031 - DNA, 25 bp, Homo sapien
catcctcaaacatataatctctttg

SEQ ID NO: 4884032 - DNA, 25 bp, Homo sapien
caggtttgaggtggagcctctggtg

SEQ ID NO: 4884033 - DNA, 25 bp, Homo sapien
tgattctggccccaggtttgaggtg

SEQ ID NO: 4884034 - DNA, 25 bp, Homo sapien
gaaatctttaatgttgacagccctc

SEQ ID NO: 4884035 - DNA, 25 bp, Homo sapien
gacaaagaggacttgtgtgcctgtg

SEQ ID NO: 4884036 - DNA, 25 bp, Homo sapien
ttatctaattaagggagcaagaggg

SEQ ID NO: 4884037 - DNA, 25 bp, Homo sapien
gaggacttgtgtgcctgtgtatttc

SEQ ID NO: 4884038 - DNA, 25 bp, Homo sapien
caagaggccaacgatgacaaacagg

SEQ ID NO: 4884039 - DNA, 25 bp, Homo sapien
tcaagaggccaacgatgacaaacag

SEQ ID NO: 4884040 - DNA, 25 bp, Homo sapien
aggcagcagcaaaagtagcagcccg

SEQ ID NO: 4884041 - DNA, 25 bp, Homo sapien
gcaaaagtagcagcccgtcaagagg

SEQ ID NO: 4884042 - DNA, 25 bp, Homo sapien
gggacacatagaagtcctcttctgg

SEQ ID NO: 4884043 - DNA, 25 bp, Homo sapien
ttccatgtcagacttgatctgctcc

SEQ ID NO: 4884044 - DNA, 25 bp, Homo sapien
cctctggggacacatagaagtcctc

SEQ ID NO: 4884045 - DNA, 25 bp, Homo sapien
tctggggacacatagaagtcctctt

SEQ ID NO: 4884046 - DNA, 25 bp, Homo sapien
tgggccactgtctgaattatcaagt

SEQ ID NO: 4884047 - DNA, 25 bp, Homo sapien
taactagtctccagtgcttgacaac

SEQ ID NO: 4884048 - DNA, 25 bp, Homo sapien
gcagttctgacaaaaatgggccact

SEQ ID NO: 4884049 - DNA, 25 bp, Homo sapien
gaatcagagtacaatacagtccaga

SEQ ID NO: 4884050 - DNA, 25 bp, Homo sapien
aacaggatcgtggtttacttcatcc

SEQ ID NO: 4884051 - DNA, 25 bp, Homo sapien
aaacaggatcgtggtttacttcatc

SEQ ID NO: 4884052 - DNA, 25 bp, Homo sapien
tcaaacaggatcgtggtttacttca

SEQ ID NO: 4884053 - DNA, 25 bp, Homo sapien
caaacaggatcgtggtttacttcat

SEQ ID NO: 4884054 - DNA, 25 bp, Homo sapien
gagggcacttgctgaacctggtgaa

SEQ ID NO: 4884055 - DNA, 25 bp, Homo sapien
tgaacttgaactttagttttcacca

SEQ ID NO: 4884056 - DNA, 25 bp, Homo sapien
ctggagggcacttgctgaacctggt

SEQ ID NO: 4884057 - DNA, 25 bp, Homo sapien
tggtgaacttgaactttagttttca

SEQ ID NO: 4884058 - DNA, 25 bp, Homo sapien
tcaagagtctgtgcaataacttcga

SEQ ID NO: 4884059 - DNA, 25 bp, Homo sapien
tcgagatccttctttgattagctgt

SEQ ID NO: 4884060 - DNA, 25 bp, Homo sapien
agtctgtgcaataacttcgagatcc

SEQ ID NO: 4884061 - DNA, 25 bp, Homo sapien
acttcgagatccttctttgattagc

SEQ ID NO: 4884062 - DNA, 25 bp, Homo sapien
tcccctacgaccatctggagacaag

SEQ ID NO: 4884063 - DNA, 25 bp, Homo sapien
agttcacagcactttatgccccaca

SEQ ID NO: 4884064 - DNA, 25 bp, Homo sapien
ttcaggcctttattcacccaaattg

SEQ ID NO: 4884065 - DNA, 25 bp, Homo sapien
ctgtggactctctgagggctcaata

SEQ ID NO: 4884066 - DNA, 25 bp, Homo sapien
aatcagatctgccacacataaaggg

SEQ ID NO: 4884067 - DNA, 25 bp, Homo sapien
ctgtcctacatcaggcaaggagggt

SEQ ID NO: 4884068 - DNA, 25 bp, Homo sapien
tgaatattgacacggaagaggctcc

SEQ ID NO: 4884069 - DNA, 25 bp, Homo sapien
gggcaggttcataaaggctgtacaa

SEQ ID NO: 4884070 - DNA, 25 bp, Homo sapien
tttatcctattgtttcctccaaatg

SEQ ID NO: 4884071 - DNA, 25 bp, Homo sapien
tacagcgttccaagcacttgctggt

SEQ ID NO: 4884072 - DNA, 25 bp, Homo sapien
tatccacagattgcgctatttatcc

SEQ ID NO: 4884073 - DNA, 25 bp, Homo sapien
tactggagctgttaatactgggtgt

SEQ ID NO: 4884074 - DNA, 25 bp, Homo sapien
ctctgatgaagagtggattcttgta

SEQ ID NO: 4884075 - DNA, 25 bp, Homo sapien
ttgtgggttcagaatgactgccagt

SEQ ID NO: 4884076 - DNA, 25 bp, Homo sapien
gaagagtggattcttgtatctctgt

SEQ ID NO: 4884077 - DNA, 25 bp, Homo sapien
ccccacaatatacttcagcagctcc

SEQ ID NO: 4884078 - DNA, 25 bp, Homo sapien
atttctcttcttgccttgaagcttc

SEQ ID NO: 4884079 - DNA, 25 bp, Homo sapien
ttctcttcttgccttgaagcttccc

SEQ ID NO: 4884080 - DNA, 25 bp, Homo sapien
gcatttctcttcttgccttgaagct

SEQ ID NO: 4884081 - DNA, 25 bp, Homo sapien
ctcttcttgccttgaagcttccctg

SEQ ID NO: 4884082 - DNA, 25 bp, Homo sapien
tcagagcgagttctttcttgagttg

SEQ ID NO: 4884083 - DNA, 25 bp, Homo sapien
ctgatagtccgcaggacacagccat

SEQ ID NO: 4884084 - DNA, 25 bp, Homo sapien
ccataaatgcaaagcctgatagtcc

SEQ ID NO: 4884085 - DNA, 25 bp, Homo sapien
gttctccactcatgcaccataaatg

SEQ ID NO: 4884086 - DNA, 25 bp, Homo sapien
ctcaacacacagtaatccaacggcg

SEQ ID NO: 4884087 - DNA, 25 bp, Homo sapien
tcaacacacagtaatccaacggcga

SEQ ID NO: 4884088 - DNA, 25 bp, Homo sapien
ctttaaagtggttgccgagtgtgtt

SEQ ID NO: 4884089 - DNA, 25 bp, Homo sapien
agcgctagtccaggcaaccgaagat

SEQ ID NO: 4884090 - DNA, 25 bp, Homo sapien
tacgcgtgcgcagaaagacagaacg

SEQ ID NO: 4884091 - DNA, 25 bp, Homo sapien
tcagcacagaaaaaccggagcgcta

SEQ ID NO: 4884092 - DNA, 25 bp, Homo sapien
tgagcatgcgtaatccgaggagcgc

SEQ ID NO: 4884093 - DNA, 25 bp, Homo sapien
agcgacctaaggatgtctcctgctg

SEQ ID NO: 4884094 - DNA, 25 bp, Homo sapien
cctgctgaggaagtagctacagtcc

SEQ ID NO: 4884095 - DNA, 25 bp, Homo sapien
gacctaaggatgtctcctgctgagg

SEQ ID NO: 4884096 - DNA, 25 bp, Homo sapien
gctgaggaagtagctacagtcctcc

SEQ ID NO: 4884097 - DNA, 25 bp, Homo sapien
gggagaaagcgctagactttcaaac

SEQ ID NO: 4884098 - DNA, 25 bp, Homo sapien
tgctcgttggaatgcaatgtgtcac

SEQ ID NO: 4884099 - DNA, 25 bp, Homo sapien
cacccaaggaaagtgccataagtca

SEQ ID NO: 4884100 - DNA, 25 bp, Homo sapien
ataagtcatcgggagctggagaaaa

SEQ ID NO: 4884101 - DNA, 25 bp, Homo sapien
tctgaggagaaggtccccgcctggc

SEQ ID NO: 4884102 - DNA, 25 bp, Homo sapien
cgggcaatgccaaagacgggttaag

SEQ ID NO: 4884103 - DNA, 25 bp, Homo sapien
gtgacccggcagtcgctcggccaag

SEQ ID NO: 4884104 - DNA, 25 bp, Homo sapien
agaagacgcagaagtcgtgacccgg

SEQ ID NO: 4884105 - DNA, 25 bp, Homo sapien
cctaaggatggccacgggcgcgcgc

SEQ ID NO: 4884106 - DNA, 25 bp, Homo sapien
agcgacctaaggatggccacgggcg

SEQ ID NO: 4884107 - DNA, 25 bp, Homo sapien
taaggatggccacgggcgcgcgcct

SEQ ID NO: 4884108 - DNA, 25 bp, Homo sapien
cgacctaaggatggccacgggcgcg

SEQ ID NO: 4884109 - DNA, 25 bp, Homo sapien
ctctaccatttgagctaatccccca

SEQ ID NO: 4884110 - DNA, 25 bp, Homo sapien
aggatgcgggcatcgatcccgctac

SEQ ID NO: 4884111 - DNA, 25 bp, Homo sapien
ggaggatgcgggcatcgatcccgct

SEQ ID NO: 4884112 - DNA, 25 bp, Homo sapien
gatgcgggcatcgatcccgctacct

SEQ ID NO: 4884113 - DNA, 25 bp, Homo sapien
tatgggcagcttagcctcagatgag

SEQ ID NO: 4884114 - DNA, 25 bp, Homo sapien
ctatgggcagcttagcctcagatga

SEQ ID NO: 4884115 - DNA, 25 bp, Homo sapien
atgggcagcttagcctcagatgagt

SEQ ID NO: 4884116 - DNA, 25 bp, Homo sapien
gggcagcttagcctcagatgagtcc

SEQ ID NO: 4884117 - DNA, 25 bp, Homo sapien
ggcagtccgccctgcggacttgaga

SEQ ID NO: 4884118 - DNA, 25 bp, Homo sapien
agttcctgcttcctcggttgagcaa

SEQ ID NO: 4884119 - DNA, 25 bp, Homo sapien
gagcaaacgttcaaagtaatcagcg

SEQ ID NO: 4884120 - DNA, 25 bp, Homo sapien
tcagcgtccgtttccaagttctctg

SEQ ID NO: 4884121 - DNA, 25 bp, Homo sapien
cagcgctggtctctagttaattctc

SEQ ID NO: 4884122 - DNA, 25 bp, Homo sapien
tgtcttgtaagaactgcgcggtggc

SEQ ID NO: 4884123 - DNA, 25 bp, Homo sapien
caaaattacgctcaaggactgtcct

SEQ ID NO: 4884124 - DNA, 25 bp, Homo sapien
gcctaggaccctaaagaaacatcat

SEQ ID NO: 4884125 - DNA, 25 bp, Homo sapien
ggtcacttaaagtttcactgccagt

SEQ ID NO: 4884126 - DNA, 25 bp, Homo sapien
cacttaaagtttcactgccagttcc

SEQ ID NO: 4884127 - DNA, 25 bp, Homo sapien
ctttcggtcacttaaagtttcactg

SEQ ID NO: 4884128 - DNA, 25 bp, Homo sapien
ttcttgctctttcggtcacttaaag

SEQ ID NO: 4884129 - DNA, 25 bp, Homo sapien
cttttgtctctttggtgcaggtaat

SEQ ID NO: 4884130 - DNA, 25 bp, Homo sapien
gcaggtaattgcaagtccaggtact

SEQ ID NO: 4884131 - DNA, 25 bp, Homo sapien
acttatggttagatggagagtacag

SEQ ID NO: 4884132 - DNA, 25 bp, Homo sapien
taatccaggcttagtttaaggagcc

SEQ ID NO: 4884133 - DNA, 25 bp, Homo sapien
gagaaggaggtcgaagctgacagtt

SEQ ID NO: 4884134 - DNA, 25 bp, Homo sapien
cattcttgccccagggagtgaagag

SEQ ID NO: 4884135 - DNA, 25 bp, Homo sapien
gtgacggagagcaggagtcaacatt

SEQ ID NO: 4884136 - DNA, 25 bp, Homo sapien
gcaggagtcaacattcttgccccag

SEQ ID NO: 4884137 - DNA, 25 bp, Homo sapien
ttttagcagcctgcggtcacgtgac

SEQ ID NO: 4884138 - DNA, 25 bp, Homo sapien
gacggtgggctgacgtgtccatata

SEQ ID NO: 4884139 - DNA, 25 bp, Homo sapien
tgctggagctgtttttagcagcctg

SEQ ID NO: 4884140 - DNA, 25 bp, Homo sapien
ggaggacattgtttcaggccctggt

SEQ ID NO: 4884141 - DNA, 25 bp, Homo sapien
gattgtgtgatcaagtgtcctttac

SEQ ID NO: 4884142 - DNA, 25 bp, Homo sapien
ttccagggattgtgtgatcaagtgt

SEQ ID NO: 4884143 - DNA, 25 bp, Homo sapien
cagggattgtgtgatcaagtgtcct

SEQ ID NO: 4884144 - DNA, 25 bp, Homo sapien
tattccagggattgtgtgatcaagt

SEQ ID NO: 4884145 - DNA, 25 bp, Homo sapien
tgcgagtggctccagcaagtgtttc

SEQ ID NO: 4884146 - DNA, 25 bp, Homo sapien
ctgcgagtggctccagcaagtgttt

SEQ ID NO: 4884147 - DNA, 25 bp, Homo sapien
ccagggaagggtgctgcgagtggct

SEQ ID NO: 4884148 - DNA, 25 bp, Homo sapien
tggaaaaagatttgtaattcagaga

SEQ ID NO: 4884149 - DNA, 25 bp, Homo sapien
gtctgctgctctttggaaaaagatt

SEQ ID NO: 4884150 - DNA, 25 bp, Homo sapien
tgctgctctttggaaaaagatttgt

SEQ ID NO: 4884151 - DNA, 25 bp, Homo sapien
gatttgtaattcagagatgcgctca

SEQ ID NO: 4884152 - DNA, 25 bp, Homo sapien
gaatcaccacaggtttcgtgaacat

SEQ ID NO: 4884153 - DNA, 25 bp, Homo sapien
aacatctctaagcagatgggacaga

SEQ ID NO: 4884154 - DNA, 25 bp, Homo sapien
cacaggttgtgctgacaagggagaa

SEQ ID NO: 4884155 - DNA, 25 bp, Homo sapien
tgacaagggagaatcaccacaggtt

SEQ ID NO: 4884156 - DNA, 25 bp, Homo sapien
gtccgcctcctgggttcaagcaatt

SEQ ID NO: 4884157 - DNA, 25 bp, Homo sapien
gcacgatctccgctcgctgcaatgt

SEQ ID NO: 4884158 - DNA, 25 bp, Homo sapien
ttctttttttgagacagagtcttgc

SEQ ID NO: 4884159 - DNA, 25 bp, Homo sapien
tctgttgcccaggccggagggcaat

SEQ ID NO: 4884160 - DNA, 25 bp, Homo sapien
tataccattgtccacgtaaggtgct

SEQ ID NO: 4884161 - DNA, 25 bp, Homo sapien
gcttgccataagatcatccctcagg

SEQ ID NO: 4884162 - DNA, 25 bp, Homo sapien
gggtaatgccacaagcagcttctct

SEQ ID NO: 4884163 - DNA, 25 bp, Homo sapien
tcctgaaacacagggtcagacctta

SEQ ID NO: 4884164 - DNA, 25 bp, Homo sapien
gttcctctgaagtccatatacccca

SEQ ID NO: 4884165 - DNA, 25 bp, Homo sapien
cctcttgtgggcaaatacgggttag

SEQ ID NO: 4884166 - DNA, 25 bp, Homo sapien
gactcctgcttgtagatgtcaatga

SEQ ID NO: 4884167 - DNA, 25 bp, Homo sapien
tccaaaaccacttcatgtctacagg

SEQ ID NO: 4884168 - DNA, 25 bp, Homo sapien
tgtaataccaggctttaaggtggag

SEQ ID NO: 4884169 - DNA, 25 bp, Homo sapien
tctctcctgctgtgagcaactctca

SEQ ID NO: 4884170 - DNA, 25 bp, Homo sapien
gcattcagcgtagcaacccattaaa

SEQ ID NO: 4884171 - DNA, 25 bp, Homo sapien
gtttcagatgggcttgacacatgga

SEQ ID NO: 4884172 - DNA, 25 bp, Homo sapien
cacatgggctggtcggatttctttt

SEQ ID NO: 4884173 - DNA, 25 bp, Homo sapien
ggcagtctttgtgtgcaccaaacac

SEQ ID NO: 4884174 - DNA, 25 bp, Homo sapien
agagcaggtgggtacttcgcagttc

SEQ ID NO: 4884175 - DNA, 25 bp, Homo sapien
cttcgcagttcagacagtagatgtt

SEQ ID NO: 4884176 - DNA, 25 bp, Homo sapien
ctccagtgtcccatggccctgcgtg

SEQ ID NO: 4884177 - DNA, 25 bp, Homo sapien
ccagtgtcccatggccctgcgtggc

SEQ ID NO: 4884178 - DNA, 25 bp, Homo sapien
tccagtgtcccatggccctgcgtgg

SEQ ID NO: 4884179 - DNA, 25 bp, Homo sapien
ctgtctgctcagaattagggggcca

SEQ ID NO: 4884180 - DNA, 25 bp, Homo sapien
ctgctcagaattagggggccatggc

SEQ ID NO: 4884181 - DNA, 25 bp, Homo sapien
gtctgctcagaattagggggccatg

SEQ ID NO: 4884182 - DNA, 25 bp, Homo sapien
tgctcagaattagggggccatggct

SEQ ID NO: 4884183 - DNA, 25 bp, Homo sapien
ctggactcgatcgttgctgcccacg

SEQ ID NO: 4884184 - DNA, 25 bp, Homo sapien
cgaggatggcgatgccatcactgag

SEQ ID NO: 4884185 - DNA, 25 bp, Homo sapien
ctcgatcgttgctgcccacgaggat

SEQ ID NO: 4884186 - DNA, 25 bp, Homo sapien
ctgcccacgaggatggcgatgccat

SEQ ID NO: 4884187 - DNA, 25 bp, Homo sapien
ctgtgcaggaggtgaatatttcaga

SEQ ID NO: 4884188 - DNA, 25 bp, Homo sapien
acagcaacagccctagtaattgtgg

SEQ ID NO: 4884189 - DNA, 25 bp, Homo sapien
tcagtgactcatgtgataatgtctc

SEQ ID NO: 4884190 - DNA, 25 bp, Homo sapien
cctagtaattgtggtaacatctgcc

SEQ ID NO: 4884191 - DNA, 25 bp, Homo sapien
gacagtttggatttccaccaggaaa

SEQ ID NO: 4884192 - DNA, 25 bp, Homo sapien
caggaaagtttgctgtaatagcaac

SEQ ID NO: 4884193 - DNA, 25 bp, Homo sapien
tcctaagacagtttggatttccacc

SEQ ID NO: 4884194 - DNA, 25 bp, Homo sapien
tgtaatagcaacaacactgatttcc

SEQ ID NO: 4884195 - DNA, 25 bp, Homo sapien
gagccattctctaactacagctagg

SEQ ID NO: 4884196 - DNA, 25 bp, Homo sapien
ccaggcagagggcaagtggagatga

SEQ ID NO: 4884197 - DNA, 25 bp, Homo sapien
tccttatggccacttcgcagcactg

SEQ ID NO: 4884198 - DNA, 25 bp, Homo sapien
ggagatgaatgagctcaaactcttg

SEQ ID NO: 4884199 - DNA, 25 bp, Homo sapien
tctgccacatagctaactctcttta

SEQ ID NO: 4884200 - DNA, 25 bp, Homo sapien
agcagcacggatgtaactagtcagt

SEQ ID NO: 4884201 - DNA, 25 bp, Homo sapien
gatgtaactagtcagtgaattttca

SEQ ID NO: 4884202 - DNA, 25 bp, Homo sapien
ctttaaaggcctccggtaatgacat

SEQ ID NO: 4884203 - DNA, 25 bp, Homo sapien
ggtgcctggcctacagtcaaggtct

SEQ ID NO: 4884204 - DNA, 25 bp, Homo sapien
aaggccatccgaccatttattattg

SEQ ID NO: 4884205 - DNA, 25 bp, Homo sapien
ggcatatattggtactggatcagtg

SEQ ID NO: 4884206 - DNA, 25 bp, Homo sapien
tattagaagtaacctgctccaaatc

SEQ ID NO: 4884207 - DNA, 25 bp, Homo sapien
catctctgaccattctatacccttt

SEQ ID NO: 4884208 - DNA, 25 bp, Homo sapien
tctctgaccattctataccctttat

SEQ ID NO: 4884209 - DNA, 25 bp, Homo sapien
ctgaccattctataccctttattac

SEQ ID NO: 4884210 - DNA, 25 bp, Homo sapien
acatctctgaccattctataccctt

SEQ ID NO: 4884211 - DNA, 25 bp, Homo sapien
catacaggtaatcaaacttctcaca

SEQ ID NO: 4884212 - DNA, 25 bp, Homo sapien
caaaatgccatacaggtaatcaaac

SEQ ID NO: 4884213 - DNA, 25 bp, Homo sapien
ctccaaaatgccatacaggtaatca

SEQ ID NO: 4884214 - DNA, 25 bp, Homo sapien
aatgccatacaggtaatcaaacttc

SEQ ID NO: 4884215 - DNA, 25 bp, Homo sapien
ctttgagacgttctccaaatgatca

SEQ ID NO: 4884216 - DNA, 25 bp, Homo sapien
tgagacgttctccaaatgatcagaa

SEQ ID NO: 4884217 - DNA, 25 bp, Homo sapien
caactttgagacgttctccaaatga

SEQ ID NO: 4884218 - DNA, 25 bp, Homo sapien
caaccaactttgagacgttctccaa

SEQ ID NO: 4884219 - DNA, 25 bp, Homo sapien
gaaatgcctttgatgcttccgagat

SEQ ID NO: 4884220 - DNA, 25 bp, Homo sapien
gtgaagtggttcatgttctcatagc

SEQ ID NO: 4884221 - DNA, 25 bp, Homo sapien
agtcaatttcacgtattatcttttc

SEQ ID NO: 4884222 - DNA, 25 bp, Homo sapien
aaaagtcaatttcacgtattatctt

SEQ ID NO: 4884223 - DNA, 25 bp, Homo sapien
acctcttccacttctactgcttctc

SEQ ID NO: 4884224 - DNA, 25 bp, Homo sapien
ctgtttgaacattttctacctcttc

SEQ ID NO: 4884225 - DNA, 25 bp, Homo sapien
ttttctacctcttccacttctactg

SEQ ID NO: 4884226 - DNA, 25 bp, Homo sapien
gaacattttctacctcttccacttc

SEQ ID NO: 4884227 - DNA, 25 bp, Homo sapien
tgtcacaggggcatccgcagcaggt

SEQ ID NO: 4884228 - DNA, 25 bp, Homo sapien
ctgtgtcacaggggcatccgcagca

SEQ ID NO: 4884229 - DNA, 25 bp, Homo sapien
gtcacaggggcatccgcagcaggtg

SEQ ID NO: 4884230 - DNA, 25 bp, Homo sapien
tgtgtcacaggggcatccgcagcag

SEQ ID NO: 4884231 - DNA, 25 bp, Homo sapien
cacttctgccttccgtacattcgaa

SEQ ID NO: 4884232 - DNA, 25 bp, Homo sapien
tagtttccttaccactcacagctgc

SEQ ID NO: 4884233 - DNA, 25 bp, Homo sapien
cattcgaatcctcagaacctggagg

SEQ ID NO: 4884234 - DNA, 25 bp, Homo sapien
tgagaagtagctgcaggtgcactag

SEQ ID NO: 4884235 - DNA, 25 bp, Homo sapien
ggcgcgggaaagcatagacacaagt

SEQ ID NO: 4884236 - DNA, 25 bp, Homo sapien
gcatagacacaagtgcatcatcact

SEQ ID NO: 4884237 - DNA, 25 bp, Homo sapien
tagggggcgcgggaaagcatagaca

SEQ ID NO: 4884238 - DNA, 25 bp, Homo sapien
gggggcgcgggaaagcatagacaca

SEQ ID NO: 4884239 - DNA, 25 bp, Homo sapien
caaaacaagccaacattgggggatg

SEQ ID NO: 4884240 - DNA, 25 bp, Homo sapien
aaacaagccaacattgggggatgaa

SEQ ID NO: 4884241 - DNA, 25 bp, Homo sapien
acaagccaacattgggggatgaatt

SEQ ID NO: 4884242 - DNA, 25 bp, Homo sapien
caagccaacattgggggatgaattg

SEQ ID NO: 4884243 - DNA, 25 bp, Homo sapien
cactgaatctgactccagatgtagt

SEQ ID NO: 4884244 - DNA, 25 bp, Homo sapien
aaagcgctaggcagattactaactc

SEQ ID NO: 4884245 - DNA, 25 bp, Homo sapien
gaatctgactccagatgtagtgaag

SEQ ID NO: 4884246 - DNA, 25 bp, Homo sapien
agaaaagccaaaagcgctaggcaga

SEQ ID NO: 4884247 - DNA, 25 bp, Homo sapien
aaccgtcccagtctttgttgtgctt

SEQ ID NO: 4884248 - DNA, 25 bp, Homo sapien
accgtcccagtctttgttgtgcttg

SEQ ID NO: 4884249 - DNA, 25 bp, Homo sapien
ctttgttgtgcttggccgtgcttgt

SEQ ID NO: 4884250 - DNA, 25 bp, Homo sapien
ttgttgtgcttggccgtgcttgtgg

SEQ ID NO: 4884251 - DNA, 25 bp, Homo sapien
gaaggacctggcacagatacttgcc

SEQ ID NO: 4884252 - DNA, 25 bp, Homo sapien
cttacatgatgtatctagatggtca

SEQ ID NO: 4884253 - DNA, 25 bp, Homo sapien
gatgtatctagatggtcaaattcat

SEQ ID NO: 4884254 - DNA, 25 bp, Homo sapien
catacatgtcaagaatcaatggaat

SEQ ID NO: 4884255 - DNA, 25 bp, Homo sapien
tacagaacgtacttagacacgaacc

SEQ ID NO: 4884256 - DNA, 25 bp, Homo sapien
cagagacagatgtctacaaggctct

SEQ ID NO: 4884257 - DNA, 25 bp, Homo sapien
cacgaacctcagtttgggttaggca

SEQ ID NO: 4884258 - DNA, 25 bp, Homo sapien
cactgtccgtaacgtggaactgtcc

SEQ ID NO: 4884259 - DNA, 25 bp, Homo sapien
gcccctgggactgcttttggaatat

SEQ ID NO: 4884260 - DNA, 25 bp, Homo sapien
gaaactgctggtagcgaacaagccc

SEQ ID NO: 4884261 - DNA, 25 bp, Homo sapien
tctgacatagttgaagggtgacaca

SEQ ID NO: 4884262 - DNA, 25 bp, Homo sapien
gaattccgcctggatgaacagacca

SEQ ID NO: 4884263 - DNA, 25 bp, Homo sapien
ggaagaaaatgggaatcagagaaaa

SEQ ID NO: 4884264 - DNA, 25 bp, Homo sapien
atggaagaaaatgggaatcagagaa

SEQ ID NO: 4884265 - DNA, 25 bp, Homo sapien
agaaaatgggaatcagagaaaaaag

SEQ ID NO: 4884266 - DNA, 25 bp, Homo sapien
tgcaatggaagaaaatgggaatcag

SEQ ID NO: 4884267 - DNA, 25 bp, Homo sapien
aaaggagaagatatggcgagctggc

SEQ ID NO: 4884268 - DNA, 25 bp, Homo sapien
agaagatatggcgagctggctcaga

SEQ ID NO: 4884269 - DNA, 25 bp, Homo sapien
tcatttagggagttcaaccaggaaa

SEQ ID NO: 4884270 - DNA, 25 bp, Homo sapien
atatggcgagctggctcagaatcag

SEQ ID NO: 4884271 - DNA, 25 bp, Homo sapien
caagatgttagataagtcatatgga

SEQ ID NO: 4884272 - DNA, 25 bp, Homo sapien
cagaaatcctgttcagaggtccctt

SEQ ID NO: 4884273 - DNA, 25 bp, Homo sapien
taagtcatatggaattgcagtttgg

SEQ ID NO: 4884274 - DNA, 25 bp, Homo sapien
tgcccacatgcatctcagccaggca

SEQ ID NO: 4884275 - DNA, 25 bp, Homo sapien
ccacctgcactgttaaagagtaaag

SEQ ID NO: 4884276 - DNA, 25 bp, Homo sapien
tgctggaagattcaactaaagtgcc

SEQ ID NO: 4884277 - DNA, 25 bp, Homo sapien
aatgtcacaagagatgcccaggcct

SEQ ID NO: 4884278 - DNA, 25 bp, Homo sapien
caaaaagtcagtgcctatgagagac

SEQ ID NO: 4884279 - DNA, 25 bp, Homo sapien
agtattctgtaccatagcgctgctc

SEQ ID NO: 4884280 - DNA, 25 bp, Homo sapien
gcgtttggccaaaaagaatctgcat

SEQ ID NO: 4884281 - DNA, 25 bp, Homo sapien
ggagagagcctataccccttactta

SEQ ID NO: 4884282 - DNA, 25 bp, Homo sapien
actttttccgcgtgttgctgcagca

SEQ ID NO: 4884283 - DNA, 25 bp, Homo sapien
ctccagagaaagcccccggagacgt

SEQ ID NO: 4884284 - DNA, 25 bp, Homo sapien
ctccaggctctggagtggagaaact

SEQ ID NO: 4884285 - DNA, 25 bp, Homo sapien
aaagagagtgggaacagtaaagaga

SEQ ID NO: 4884286 - DNA, 25 bp, Homo sapien
agagaccaagtccattgagagactg

SEQ ID NO: 4884287 - DNA, 25 bp, Homo sapien
ggtcagcccatatgtgggagaatga

SEQ ID NO: 4884288 - DNA, 25 bp, Homo sapien
tatgtgggagaatgagtgcctcacc

SEQ ID NO: 4884289 - DNA, 25 bp, Homo sapien
caccagggggtcagcccatatgtgg

SEQ ID NO: 4884290 - DNA, 25 bp, Homo sapien
gagaatgagtgcctcaccagtacaa

SEQ ID NO: 4884291 - DNA, 25 bp, Homo sapien
taaaaccccagcagatacaaatgtg

SEQ ID NO: 4884292 - DNA, 25 bp, Homo sapien
cacaagggccctacattgagctatc

SEQ ID NO: 4884293 - DNA, 25 bp, Homo sapien
tgaaacttgcatggacacaagggcc

SEQ ID NO: 4884294 - DNA, 25 bp, Homo sapien
aggttagcctctcccagtgcactga

SEQ ID NO: 4884295 - DNA, 25 bp, Homo sapien
cttcagtctgtggccgaagatctaa

SEQ ID NO: 4884296 - DNA, 25 bp, Homo sapien
gtctgtggccgaagatctaagagcc

SEQ ID NO: 4884297 - DNA, 25 bp, Homo sapien
tctgtggccgaagatctaagagccc

SEQ ID NO: 4884298 - DNA, 25 bp, Homo sapien
cagtctgtggccgaagatctaagag

SEQ ID NO: 4884299 - DNA, 25 bp, Homo sapien
gcttcttcttctatggaatgtggat

SEQ ID NO: 4884300 - DNA, 25 bp, Homo sapien
atggaatgtggataatcacttctac

SEQ ID NO: 4884301 - DNA, 25 bp, Homo sapien
tggaatgtggataatcacttctact

SEQ ID NO: 4884302 - DNA, 25 bp, Homo sapien
tccgcttcttcttctatggaatgtg

SEQ ID NO: 4884303 - DNA, 25 bp, Homo sapien
ccagcccttaccttagttcagataa

SEQ ID NO: 4884304 - DNA, 25 bp, Homo sapien
cctacaaagtgcttgcttttgggaa

SEQ ID NO: 4884305 - DNA, 25 bp, Homo sapien
gagtgaaggcctaaagatttcctag

SEQ ID NO: 4884306 - DNA, 25 bp, Homo sapien
ctgttgggatcactttttatcagac

SEQ ID NO: 4884307 - DNA, 25 bp, Homo sapien
tctgaggaggctttcgggcgacacc

SEQ ID NO: 4884308 - DNA, 25 bp, Homo sapien
ttaaactcttaggatgaggacaagc

SEQ ID NO: 4884309 - DNA, 25 bp, Homo sapien
tccaccgcagttggactgacaggca

SEQ ID NO: 4884310 - DNA, 25 bp, Homo sapien
tgactgggctgctaaaggcactgga

SEQ ID NO: 4884311 - DNA, 25 bp, Homo sapien
agtctctccaagattcagtaaggtg

SEQ ID NO: 4884312 - DNA, 25 bp, Homo sapien
catccacagtgggttcttatggtta

SEQ ID NO: 4884313 - DNA, 25 bp, Homo sapien
gaatcaatctgtggcttgctccgat

SEQ ID NO: 4884314 - DNA, 25 bp, Homo sapien
cctggaaatgtattgatgtcctgca

SEQ ID NO: 4884315 - DNA, 25 bp, Homo sapien
gacatgagtcagatcagataagggc

SEQ ID NO: 4884316 - DNA, 25 bp, Homo sapien
tcagcccataacagtgaggtagatg

SEQ ID NO: 4884317 - DNA, 25 bp, Homo sapien
tgtgcatgtgcatcgctggtgtctc

SEQ ID NO: 4884318 - DNA, 25 bp, Homo sapien
tcctccatggtttgcggatggctgc

SEQ ID NO: 4884319 - DNA, 25 bp, Homo sapien
tggaccatcatcagtactcagagca

SEQ ID NO: 4884320 - DNA, 25 bp, Homo sapien
gtaaaggatgcctgttgccacccca

SEQ ID NO: 4884321 - DNA, 25 bp, Homo sapien
gctcacacatatagttcaggccaag

SEQ ID NO: 4884322 - DNA, 25 bp, Homo sapien
tcaggccaaggttcagtgatggacc

SEQ ID NO: 4884323 - DNA, 25 bp, Homo sapien
gctgtgcttcattgttgatgaccaa

SEQ ID NO: 4884324 - DNA, 25 bp, Homo sapien
tgatgctgcaccatgaatactggct

SEQ ID NO: 4884325 - DNA, 25 bp, Homo sapien
gtaattactacattcctagacagtg

SEQ ID NO: 4884326 - DNA, 25 bp, Homo sapien
tcataatgtccaggcactatctctg

SEQ ID NO: 4884327 - DNA, 25 bp, Homo sapien
cattgggctgtaatccttgattcca

SEQ ID NO: 4884328 - DNA, 25 bp, Homo sapien
gaaagatgagtccatccaacttttc

SEQ ID NO: 4884329 - DNA, 25 bp, Homo sapien
gattagtttcctgttttgtacagca

SEQ ID NO: 4884330 - DNA, 25 bp, Homo sapien
agcacaattgtgtctcatgccttgt

SEQ ID NO: 4884331 - DNA, 25 bp, Homo sapien
cttgatgaggtgagcagcacattta

SEQ ID NO: 4884332 - DNA, 25 bp, Homo sapien
caaacctctactccattcctcagct

SEQ ID NO: 4884333 - DNA, 25 bp, Homo sapien
tcttgatgaggtgagcagcacattt

SEQ ID NO: 4884334 - DNA, 25 bp, Homo sapien
ctgtcttgatgaggtgagcagcaca

SEQ ID NO: 4884335 - DNA, 25 bp, Homo sapien
ttgaagaaatggtgaacgcagtcgt

SEQ ID NO: 4884336 - DNA, 25 bp, Homo sapien
tccacttgaagaaatggtgaacgca

SEQ ID NO: 4884337 - DNA, 25 bp, Homo sapien
cacttgaagaaatggtgaacgcagt

SEQ ID NO: 4884338 - DNA, 25 bp, Homo sapien
cttgaagaaatggtgaacgcagtcg

SEQ ID NO: 4884339 - DNA, 25 bp, Homo sapien
cattatgcaatttgacagctaggca

SEQ ID NO: 4884340 - DNA, 25 bp, Homo sapien
ggcaaatccgctcaaccttatccat

SEQ ID NO: 4884341 - DNA, 25 bp, Homo sapien
cgctcaaccttatccattgcttgat

SEQ ID NO: 4884342 - DNA, 25 bp, Homo sapien
gacagctaggcaaatccgctcaacc

SEQ ID NO: 4884343 - DNA, 25 bp, Homo sapien
ccagcctcacggggcccacacacat

SEQ ID NO: 4884344 - DNA, 25 bp, Homo sapien
tccagcctcacggggcccacacaca

SEQ ID NO: 4884345 - DNA, 25 bp, Homo sapien
ttccagcctcacggggcccacacac

SEQ ID NO: 4884346 - DNA, 25 bp, Homo sapien
gtctttctgactcgatggagactac

SEQ ID NO: 4884347 - DNA, 25 bp, Homo sapien
ggagactacatcaacagttcttcgc

SEQ ID NO: 4884348 - DNA, 25 bp, Homo sapien
tcgatggagactacatcaacagttc

SEQ ID NO: 4884349 - DNA, 25 bp, Homo sapien
tcaacagttcttcgcttagcgctgt

SEQ ID NO: 4884350 - DNA, 25 bp, Homo sapien
ctgacagcgttggtgcctggggcat

SEQ ID NO: 4884351 - DNA, 25 bp, Homo sapien
tcccctgacagcgttggtgcctggg

SEQ ID NO: 4884352 - DNA, 25 bp, Homo sapien
tgacagcgttggtgcctggggcata

SEQ ID NO: 4884353 - DNA, 25 bp, Homo sapien
ggttcccctgacagcgttggtgcct

SEQ ID NO: 4884354 - DNA, 25 bp, Homo sapien
ctgaattctcaggtatgccagcttc

SEQ ID NO: 4884355 - DNA, 25 bp, Homo sapien
ccagcttcagcagggatcttttctg

SEQ ID NO: 4884356 - DNA, 25 bp, Homo sapien
gcaaatgatgctagtgtcctctgta

SEQ ID NO: 4884357 - DNA, 25 bp, Homo sapien
tttgttcctagcagtctcctgaatt

SEQ ID NO: 4884358 - DNA, 25 bp, Homo sapien
gagtgtgaactagctcaccatggtg

SEQ ID NO: 4884359 - DNA, 25 bp, Homo sapien
gtgtgaactagctcaccatggtgat

SEQ ID NO: 4884360 - DNA, 25 bp, Homo sapien
ccagagtttgagtgtatgcagtaag

SEQ ID NO: 4884361 - DNA, 25 bp, Homo sapien
gagtttgagtgtatgcagtaagagc

SEQ ID NO: 4884362 - DNA, 25 bp, Homo sapien
ctttgaaacgactggtctggaccag

SEQ ID NO: 4884363 - DNA, 25 bp, Homo sapien
agaaaatccactttgaaacgactgg

SEQ ID NO: 4884364 - DNA, 25 bp, Homo sapien
cactttgaaacgactggtctggacc

SEQ ID NO: 4884365 - DNA, 25 bp, Homo sapien
aatccactttgaaacgactggtctg

SEQ ID NO: 4884366 - DNA, 25 bp, Homo sapien
ctcaggatgctgggcaaggttcttg

SEQ ID NO: 4884367 - DNA, 25 bp, Homo sapien
cgctgagggattcatggagggcaca

SEQ ID NO: 4884368 - DNA, 25 bp, Homo sapien
tcaggatgctgggcaaggttcttgt

SEQ ID NO: 4884369 - DNA, 25 bp, Homo sapien
gctctcacagagctcatattctgga

SEQ ID NO: 4884370 - DNA, 25 bp, Homo sapien
ttgaagaggcgaaggggcaaggccc

SEQ ID NO: 4884371 - DNA, 25 bp, Homo sapien
ggcaaggccccgctctcacagagct

SEQ ID NO: 4884372 - DNA, 25 bp, Homo sapien
gacagagtagtttcggatgctgaca

SEQ ID NO: 4884373 - DNA, 25 bp, Homo sapien
aggctcctcagctgaatcagggaag

SEQ ID NO: 4884374 - DNA, 25 bp, Homo sapien
cctctgtgggcaccttgccaaggct

SEQ ID NO: 4884375 - DNA, 25 bp, Homo sapien
cctcagctgaatcagggaaggccgg

SEQ ID NO: 4884376 - DNA, 25 bp, Homo sapien
tctgtgggcaccttgccaaggctcc

SEQ ID NO: 4884377 - DNA, 25 bp, Homo sapien
gcctatgacatattttcgtctctgc

SEQ ID NO: 4884378 - DNA, 25 bp, Homo sapien
tcgtctctgctcgcctggtaggagc

SEQ ID NO: 4884379 - DNA, 25 bp, Homo sapien
cacaagaatgacttctatagaagcc

SEQ ID NO: 4884380 - DNA, 25 bp, Homo sapien
ggaaccagtgtcatttgtgcacagt

SEQ ID NO: 4884381 - DNA, 25 bp, Homo sapien
agttgctctaacagaacaagatgac

SEQ ID NO: 4884382 - DNA, 25 bp, Homo sapien
gtgcacagggaaggcacatcgagtt

SEQ ID NO: 4884383 - DNA, 25 bp, Homo sapien
gctggggtgcacagggaaggcacat

SEQ ID NO: 4884384 - DNA, 25 bp, Homo sapien
gaaggcacatcgagttgctctaaca

SEQ ID NO: 4884385 - DNA, 25 bp, Homo sapien
aaagatgctgccctgcccattaaag

SEQ ID NO: 4884386 - DNA, 25 bp, Homo sapien
gagtgaccctcattgccccatgttg

SEQ ID NO: 4884387 - DNA, 25 bp, Homo sapien
gactttggtctaaatcaggcctgta

SEQ ID NO: 4884388 - DNA, 25 bp, Homo sapien
acatgacgtttctttggcagcccca

SEQ ID NO: 4884389 - DNA, 25 bp, Homo sapien
tgatgggtgtgagtaaaaacagcga

SEQ ID NO: 4884390 - DNA, 25 bp, Homo sapien
aaaacagcgatattttgttccagcc

SEQ ID NO: 4884391 - DNA, 25 bp, Homo sapien
tcttcggtagtcattaaagagctct

SEQ ID NO: 4884392 - DNA, 25 bp, Homo sapien
cccagttagtttcctgggtgaagat

SEQ ID NO: 4884393 - DNA, 25 bp, Homo sapien
ctacttaggagtctttgcccctgtt

SEQ ID NO: 4884394 - DNA, 25 bp, Homo sapien
tacttaggagtctttgcccctgtta

SEQ ID NO: 4884395 - DNA, 25 bp, Homo sapien
ggtctatgtctggattaatatttcc

SEQ ID NO: 4884396 - DNA, 25 bp, Homo sapien
ttcaagtcctaggtctatgtctgga

SEQ ID NO: 4884397 - DNA, 25 bp, Homo sapien
cttcaagtcctaggtctatgtctgg

SEQ ID NO: 4884398 - DNA, 25 bp, Homo sapien
acattcactgcccatcatcaccctc

SEQ ID NO: 4884399 - DNA, 25 bp, Homo sapien
ctatttgatcagattccagcagagg

SEQ ID NO: 4884400 - DNA, 25 bp, Homo sapien
caaatgatatgaaggtcagtttgta

SEQ ID NO: 4884401 - DNA, 25 bp, Homo sapien
cctcctcgatgcttccctatttgat

SEQ ID NO: 4884402 - DNA, 25 bp, Homo sapien
tcatgaaggaagcacctccctatgc

SEQ ID NO: 4884403 - DNA, 25 bp, Homo sapien
catacctgtacagattagggctgga

SEQ ID NO: 4884404 - DNA, 25 bp, Homo sapien
tctggtcatgctgaacatgctaggc

SEQ ID NO: 4884405 - DNA, 25 bp, Homo sapien
gaaggaacagatgtgaggtttaccc

SEQ ID NO: 4884406 - DNA, 25 bp, Homo sapien
gagcaacctgccagttacttgggcc

SEQ ID NO: 4884407 - DNA, 25 bp, Homo sapien
tcacaccaatggcatgagcaacctg

SEQ ID NO: 4884408 - DNA, 25 bp, Homo sapien
tacttgggccatcaactttggaggc

SEQ ID NO: 4884409 - DNA, 25 bp, Homo sapien
tattgccttgacatgaccatttgaa

SEQ ID NO: 4884410 - DNA, 25 bp, Homo sapien
tcattgatgtgtccctagtgcttag

SEQ ID NO: 4884411 - DNA, 25 bp, Homo sapien
tatagccatggactagactgtccct

SEQ ID NO: 4884412 - DNA, 25 bp, Homo sapien
tagtggccctaagcaagagacagag

SEQ ID NO: 4884413 - DNA, 25 bp, Homo sapien
acagcagccagggatacaagagagc

SEQ ID NO: 4884414 - DNA, 25 bp, Homo sapien
tttaacattcagcatcaaggcttta

SEQ ID NO: 4884415 - DNA, 25 bp, Homo sapien
cattcagcatcaaggctttaacatc

SEQ ID NO: 4884416 - DNA, 25 bp, Homo sapien
tcagcatcaaggctttaacatcagt

SEQ ID NO: 4884417 - DNA, 25 bp, Homo sapien
gcatcaaggctttaacatcagtcat

SEQ ID NO: 4884418 - DNA, 25 bp, Homo sapien
gggactacgattcccaggatgcagg

SEQ ID NO: 4884419 - DNA, 25 bp, Homo sapien
cgagcaggccgcactgctagttcca

SEQ ID NO: 4884420 - DNA, 25 bp, Homo sapien
gagcaggattgggactacgattccc

SEQ ID NO: 4884421 - DNA, 25 bp, Homo sapien
cactgctagttccagagcaggattg

SEQ ID NO: 4884422 - DNA, 25 bp, Homo sapien
gatgggattagaagcgggaccttta

SEQ ID NO: 4884423 - DNA, 25 bp, Homo sapien
gccgggatgcccaatccggaaaaga

SEQ ID NO: 4884424 - DNA, 25 bp, Homo sapien
caatccgggcgaccagaggaaaggc

SEQ ID NO: 4884425 - DNA, 25 bp, Homo sapien
aaactccggcagcataaccacgtgc

SEQ ID NO: 4884426 - DNA, 25 bp, Homo sapien
gctcggctcactcgctttggggctg

SEQ ID NO: 4884427 - DNA, 25 bp, Homo sapien
tcttggcctgaatccgcttggcgaa

SEQ ID NO: 4884428 - DNA, 25 bp, Homo sapien
tgagcagttgcgtgttgtcccgcgc

SEQ ID NO: 4884429 - DNA, 25 bp, Homo sapien
attctttggtgtcgtcccgggcgcg

SEQ ID NO: 4884430 - DNA, 25 bp, Homo sapien
ttactctggtgtccggtagggtgca

SEQ ID NO: 4884431 - DNA, 25 bp, Homo sapien
tttttctcggctgcaaagtccccga

SEQ ID NO: 4884432 - DNA, 25 bp, Homo sapien
cctcatctgcttattggtggcccta

SEQ ID NO: 4884433 - DNA, 25 bp, Homo sapien
cctagtcacatccagctgaggcttc

SEQ ID NO: 4884434 - DNA, 25 bp, Homo sapien
gaggcttcttgctgttcatgacacg

SEQ ID NO: 4884435 - DNA, 25 bp, Homo sapien
gagtccccgtataattgcctagaac

SEQ ID NO: 4884436 - DNA, 25 bp, Homo sapien
taatctccaaagtctcggttgtggg

SEQ ID NO: 4884437 - DNA, 25 bp, Homo sapien
cagacgggtccgacagttagaaact

SEQ ID NO: 4884438 - DNA, 25 bp, Homo sapien
tacatactttcttgacggaagggca

SEQ ID NO: 4884439 - DNA, 25 bp, Homo sapien
cgcgttgcagttgcctcagcaagta

SEQ ID NO: 4884440 - DNA, 25 bp, Homo sapien
gctgcgcgttgcagttgcctcagca

SEQ ID NO: 4884441 - DNA, 25 bp, Homo sapien
ttgcctcagcaagtacgcgacccgg

SEQ ID NO: 4884442 - DNA, 25 bp, Homo sapien
ttgcagttgcctcagcaagtacgcg

SEQ ID NO: 4884443 - DNA, 25 bp, Homo sapien
cagcaagtatttatcaggtgaccag

SEQ ID NO: 4884444 - DNA, 25 bp, Homo sapien
caataccgtgtgtcatagggtcagt

SEQ ID NO: 4884445 - DNA, 25 bp, Homo sapien
actgccgggctcatcgtattagcta

SEQ ID NO: 4884446 - DNA, 25 bp, Homo sapien
tgggactgcatctccatcgctggtg

SEQ ID NO: 4884447 - DNA, 25 bp, Homo sapien
ttgctttctcgggacctctacctgt

SEQ ID NO: 4884448 - DNA, 25 bp, Homo sapien
tctagcagcatgaaacgcgtggcca

SEQ ID NO: 4884449 - DNA, 25 bp, Homo sapien
gacctacatttgctggcttcgtttc

SEQ ID NO: 4884450 - DNA, 25 bp, Homo sapien
tcggacacattctttggcccctgaa

SEQ ID NO: 4884451 - DNA, 25 bp, Homo sapien
cacttctcggtcgacttctctacag

SEQ ID NO: 4884452 - DNA, 25 bp, Homo sapien
cgctctctgatcgaggctgggaaga

SEQ ID NO: 4884453 - DNA, 25 bp, Homo sapien
tttatgtttcgttgggttgcccaga

SEQ ID NO: 4884454 - DNA, 25 bp, Homo sapien
ccagtggttgggtctcggtagatac

SEQ ID NO: 4884455 - DNA, 25 bp, Homo sapien
gtatgagaatgagttgggcactggc

SEQ ID NO: 4884456 - DNA, 25 bp, Homo sapien
cttgccttaatgtttagatctgacc

SEQ ID NO: 4884457 - DNA, 25 bp, Homo sapien
tctgtgggtttctgcttaggatcct

SEQ ID NO: 4884458 - DNA, 25 bp, Homo sapien
tgacattcttaggacatgctgaaac

SEQ ID NO: 4884459 - DNA, 25 bp, Homo sapien
gagaaagcccttggcgagttactct

SEQ ID NO: 4884460 - DNA, 25 bp, Homo sapien
catagatgacagttaatgatggaca

SEQ ID NO: 4884461 - DNA, 25 bp, Homo sapien
gaattcgagaaaatcagctgaagac

SEQ ID NO: 4884462 - DNA, 25 bp, Homo sapien
tgttgaaaccaactaagaattcgag

SEQ ID NO: 4884463 - DNA, 25 bp, Homo sapien
aattctgtatatgttcagaagggcc

SEQ ID NO: 4884464 - DNA, 25 bp, Homo sapien
gtggacaacaatctaccttcagctc

SEQ ID NO: 4884465 - DNA, 25 bp, Homo sapien
cagtgagctacgactgtaccgctgt

SEQ ID NO: 4884466 - DNA, 25 bp, Homo sapien
tcaaacttattggattcctctaggc

SEQ ID NO: 4884467 - DNA, 25 bp, Homo sapien
gctccctgagtgcaaaggcatcctt

SEQ ID NO: 4884468 - DNA, 25 bp, Homo sapien
tggaacaatgaaagggacctaatta

SEQ ID NO: 4884469 - DNA, 25 bp, Homo sapien
tcatattggaacaatgaaagggacc

SEQ ID NO: 4884470 - DNA, 25 bp, Homo sapien
acatttttataaggtgctatttcct

SEQ ID NO: 4884471 - DNA, 25 bp, Homo sapien
taaggtgctatttccttgcaaagga

SEQ ID NO: 4884472 - DNA, 25 bp, Homo sapien
aggcataatctgttgttttcccaga

SEQ ID NO: 4884473 - DNA, 25 bp, Homo sapien
caaaggcataatctgttgttttccc

SEQ ID NO: 4884474 - DNA, 25 bp, Homo sapien
ctcaaaggcataatctgttgttttc

SEQ ID NO: 4884475 - DNA, 25 bp, Homo sapien
aaggcataatctgttgttttcccag

SEQ ID NO: 4884476 - DNA, 25 bp, Homo sapien
tatattccattataccaaccaggta

SEQ ID NO: 4884477 - DNA, 25 bp, Homo sapien
ttttagtgactctacaaagacagca

SEQ ID NO: 4884478 - DNA, 25 bp, Homo sapien
catgatctcagaaggtttatattcc

SEQ ID NO: 4884479 - DNA, 25 bp, Homo sapien
gacagcactctagacattagccatg

SEQ ID NO: 4884480 - DNA, 25 bp, Homo sapien
gggtgacagagtgaggctgtctcca

SEQ ID NO: 4884481 - DNA, 25 bp, Homo sapien
gtctgggtgacagagtgaggctgtc

SEQ ID NO: 4884482 - DNA, 25 bp, Homo sapien
gacagagtgaggctgtctccaaaaa

SEQ ID NO: 4884483 - DNA, 25 bp, Homo sapien
ctgggtgacagagtgaggctgtctc

SEQ ID NO: 4884484 - DNA, 25 bp, Homo sapien
ggaatgcattcccatatggcagtga

SEQ ID NO: 4884485 - DNA, 25 bp, Homo sapien
tcttataaggttgagtggagtcaca

SEQ ID NO: 4884486 - DNA, 25 bp, Homo sapien
ctcttgaataatccagcaaactggg

SEQ ID NO: 4884487 - DNA, 25 bp, Homo sapien
catctcttggttaactgtcaggccc

SEQ ID NO: 4884488 - DNA, 25 bp, Homo sapien
cctttgtaactgctgctccatatct

SEQ ID NO: 4884489 - DNA, 25 bp, Homo sapien
gctgctccatatctaatatttgaaa

SEQ ID NO: 4884490 - DNA, 25 bp, Homo sapien
ccatatctaatatttgaaacagcca

SEQ ID NO: 4884491 - DNA, 25 bp, Homo sapien
gtaactgctgctccatatctaatat

SEQ ID NO: 4884492 - DNA, 25 bp, Homo sapien
ctccactagaactgcaatagactct

SEQ ID NO: 4884493 - DNA, 25 bp, Homo sapien
gcatggtcttgtgagatatgtaaca

SEQ ID NO: 4884494 - DNA, 25 bp, Homo sapien
gactcttctggcaaactcacgttgt

SEQ ID NO: 4884495 - DNA, 25 bp, Homo sapien
acatttacagtaggagaccgtagac

SEQ ID NO: 4884496 - DNA, 25 bp, Homo sapien
tcacattatcataaaccgtaaaggg

SEQ ID NO: 4884497 - DNA, 25 bp, Homo sapien
tagctacttgcacaggagggagctt

SEQ ID NO: 4884498 - DNA, 25 bp, Homo sapien
ttgaatccgttggttccactctcac

SEQ ID NO: 4884499 - DNA, 25 bp, Homo sapien
ggatgccattcttcactagggaatc

SEQ ID NO: 4884500 - DNA, 25 bp, Homo sapien
gaaacaataacaacaatacaagaat

SEQ ID NO: 4884501 - DNA, 25 bp, Homo sapien
aaagaaacaataacaacaatacaag

SEQ ID NO: 4884502 - DNA, 25 bp, Homo sapien
aacaataacaacaatacaagaatac

SEQ ID NO: 4884503 - DNA, 25 bp, Homo sapien
aagaaacaataacaacaatacaaga

SEQ ID NO: 4884504 - DNA, 25 bp, Homo sapien
gccttacaggtgtccatggtagagc

SEQ ID NO: 4884505 - DNA, 25 bp, Homo sapien
caatcagaggcttaagaggcacaga

SEQ ID NO: 4884506 - DNA, 25 bp, Homo sapien
gcatacagattagcagccttacagg

SEQ ID NO: 4884507 - DNA, 25 bp, Homo sapien
gcaacataggcatcaaaagctccct

SEQ ID NO: 4884508 - DNA, 25 bp, Homo sapien
aaatggcaaccccagtagtttcact

SEQ ID NO: 4884509 - DNA, 25 bp, Homo sapien
ctcccggttcctgaggtagttggca

SEQ ID NO: 4884510 - DNA, 25 bp, Homo sapien
ccagtagtttcactcccggttcctg

SEQ ID NO: 4884511 - DNA, 25 bp, Homo sapien
tcactcccggttcctgaggtagttg

SEQ ID NO: 4884512 - DNA, 25 bp, Homo sapien
ctaaaacataaggattttcagtaga

SEQ ID NO: 4884513 - DNA, 25 bp, Homo sapien
taaaacataaggattttcagtagag

SEQ ID NO: 4884514 - DNA, 25 bp, Homo sapien
aaaacataaggattttcagtagagg

SEQ ID NO: 4884515 - DNA, 25 bp, Homo sapien
ttggcgaccactcgggcaggcatgt

SEQ ID NO: 4884516 - DNA, 25 bp, Homo sapien
tgtgcagaggatcaatcagtcccag

SEQ ID NO: 4884517 - DNA, 25 bp, Homo sapien
tcccagtgtgggtttgatggctctc

SEQ ID NO: 4884518 - DNA, 25 bp, Homo sapien
aagcacatcaaagccactgttggcg

SEQ ID NO: 4884519 - DNA, 25 bp, Homo sapien
cagcgcgtggatagcccaaatgtca

SEQ ID NO: 4884520 - DNA, 25 bp, Homo sapien
tcttcagatacttagccacgatccg

SEQ ID NO: 4884521 - DNA, 25 bp, Homo sapien
ggcagggtggtgtatgactccaggg

SEQ ID NO: 4884522 - DNA, 25 bp, Homo sapien
tacgcaggccgtgtgatgggatttg

SEQ ID NO: 4884523 - DNA, 25 bp, Homo sapien
cagaatgtgggcctcctgttctatt

SEQ ID NO: 4884524 - DNA, 25 bp, Homo sapien
tcctgttctatttctatccccttcg

SEQ ID NO: 4884525 - DNA, 25 bp, Homo sapien
ctgttctatttctatccccttcggg

SEQ ID NO: 4884526 - DNA, 25 bp, Homo sapien
gtgggcctcctgttctatttctatc

SEQ ID NO: 4884527 - DNA, 25 bp, Homo sapien
gcaattttgccttgcgtaagagttc

SEQ ID NO: 4884528 - DNA, 25 bp, Homo sapien
ttgcaattttgccttgcgtaagagt

SEQ ID NO: 4884529 - DNA, 25 bp, Homo sapien
ttttcatgtgggcttttttgcaatt

SEQ ID NO: 4884530 - DNA, 25 bp, Homo sapien
tgcaattttgccttgcgtaagagtt

SEQ ID NO: 4884531 - DNA, 25 bp, Homo sapien
tcatttgtcagtgctgttgacggcc

SEQ ID NO: 4884532 - DNA, 25 bp, Homo sapien
tacgctgtcagctgctcatgtgatg

SEQ ID NO: 4884533 - DNA, 25 bp, Homo sapien
tctcatcaactgtttcagcaaaggc

SEQ ID NO: 4884534 - DNA, 25 bp, Homo sapien
caaaggcataataaatacgctgtca

SEQ ID NO: 4884535 - DNA, 25 bp, Homo sapien
ggcaagttattcaaacgacgccttg

SEQ ID NO: 4884536 - DNA, 25 bp, Homo sapien
gaatgatataaatacctaacaataa

SEQ ID NO: 4884537 - DNA, 25 bp, Homo sapien
ctgtgaatgatataaatacctaaca

SEQ ID NO: 4884538 - DNA, 25 bp, Homo sapien
tataaatacctaacaataacacatc

SEQ ID NO: 4884539 - DNA, 25 bp, Homo sapien
aataacacatcaacattggcaattc

SEQ ID NO: 4884540 - DNA, 25 bp, Homo sapien
tgcttcaagatcatcgggatttctg

SEQ ID NO: 4884541 - DNA, 25 bp, Homo sapien
aagatcatcgggatttctgacagcc

SEQ ID NO: 4884542 - DNA, 25 bp, Homo sapien
cacttgccaagtgcatatgagacct

SEQ ID NO: 4884543 - DNA, 25 bp, Homo sapien
cagcatttccaaagccgatgccagc

SEQ ID NO: 4884544 - DNA, 25 bp, Homo sapien
agcaatagcttgagtaaagaaatga

SEQ ID NO: 4884545 - DNA, 25 bp, Homo sapien
caaaagaatacatttaggaaccaca

SEQ ID NO: 4884546 - DNA, 25 bp, Homo sapien
tacatttaggaaccacattcaattt

SEQ ID NO: 4884547 - DNA, 25 bp, Homo sapien
tctactttatagctgatggtggaaa

SEQ ID NO: 4884548 - DNA, 25 bp, Homo sapien
ggctcaagtgaggaaggatccagcc

SEQ ID NO: 4884549 - DNA, 25 bp, Homo sapien
tcaagtgaggaaggatccagccacc

SEQ ID NO: 4884550 - DNA, 25 bp, Homo sapien
tatatcctcttgaactattgatgaa

SEQ ID NO: 4884551 - DNA, 25 bp, Homo sapien
ggatccagccaccacgcttagtgaa

SEQ ID NO: 4884552 - DNA, 25 bp, Homo sapien
tacatactcacagagtccagtcaga

SEQ ID NO: 4884553 - DNA, 25 bp, Homo sapien
gaaatgattattctagcctgacagg

SEQ ID NO: 4884554 - DNA, 25 bp, Homo sapien
aaatgattattctagcctgacaggc

SEQ ID NO: 4884555 - DNA, 25 bp, Homo sapien
gtaactgacagatcccttcaaatgt

SEQ ID NO: 4884556 - DNA, 25 bp, Homo sapien
gacgtgcaagcttgacccatcagtg

SEQ ID NO: 4884557 - DNA, 25 bp, Homo sapien
caaagactcggtaattcacttcgaa

SEQ ID NO: 4884558 - DNA, 25 bp, Homo sapien
gcagtgtgctcccagatgatgtcgg

SEQ ID NO: 4884559 - DNA, 25 bp, Homo sapien
tctgtaataagctctgggcatgtgt

SEQ ID NO: 4884560 - DNA, 25 bp, Homo sapien
gggatgcctgtcacggcctctagac

SEQ ID NO: 4884561 - DNA, 25 bp, Homo sapien
aagtattgatccagaagtagctccc

SEQ ID NO: 4884562 - DNA, 25 bp, Homo sapien
cattacctgaaaaagtgatatgttc

SEQ ID NO: 4884563 - DNA, 25 bp, Homo sapien
tgtctaggacatgtagtgcattcat

SEQ ID NO: 4884564 - DNA, 25 bp, Homo sapien
gatccacattgtaatcctttgcttt

SEQ ID NO: 4884565 - DNA, 25 bp, Homo sapien
tcttcactaaacctgaaattgggta

SEQ ID NO: 4884566 - DNA, 25 bp, Homo sapien
gtgggtgatccacattgtaatcctt

SEQ ID NO: 4884567 - DNA, 25 bp, Homo sapien
gctttatacatcttcactaaacctg

SEQ ID NO: 4884568 - DNA, 25 bp, Homo sapien
tctaagcaggcgagaattggcaaat

SEQ ID NO: 4884569 - DNA, 25 bp, Homo sapien
gagaaacgaaatgcggtgaccggca

SEQ ID NO: 4884570 - DNA, 25 bp, Homo sapien
tattctagatgttaagttactttac

SEQ ID NO: 4884571 - DNA, 25 bp, Homo sapien
tactttaccccatactctaagcagg

SEQ ID NO: 4884572 - DNA, 25 bp, Homo sapien
ccaggtgtcgctctggaaacatctg

SEQ ID NO: 4884573 - DNA, 25 bp, Homo sapien
gccgtgaaagtgaacaccgctgggg

SEQ ID NO: 4884574 - DNA, 25 bp, Homo sapien
catctccaggtgtcgctctggaaac

SEQ ID NO: 4884575 - DNA, 25 bp, Homo sapien
ccgtgaaagtgaacaccgctgggga

SEQ ID NO: 4884576 - DNA, 25 bp, Homo sapien
cgtgcctggccggtcacagaatttt

SEQ ID NO: 4884577 - DNA, 25 bp, Homo sapien
tcacagaattttgagtaatggttca

SEQ ID NO: 4884578 - DNA, 25 bp, Homo sapien
gtgcctggccggtcacagaattttg

SEQ ID NO: 4884579 - DNA, 25 bp, Homo sapien
tgcctggccggtcacagaattttga

SEQ ID NO: 4884580 - DNA, 25 bp, Homo sapien
attagtaattaagaggccgggcctg

SEQ ID NO: 4884581 - DNA, 25 bp, Homo sapien
atgattagtaattaagaggccgggc

SEQ ID NO: 4884582 - DNA, 25 bp, Homo sapien
taattaagaggccgggcctggtggc

SEQ ID NO: 4884583 - DNA, 25 bp, Homo sapien
attaagaggccgggcctggtggctc

SEQ ID NO: 4884584 - DNA, 25 bp, Homo sapien
ggctgccaagtcctacatacttgcc

SEQ ID NO: 4884585 - DNA, 25 bp, Homo sapien
ggtggagttcagtcacaagatcagt

SEQ ID NO: 4884586 - DNA, 25 bp, Homo sapien
catacttgccccttgtgtggtagga

SEQ ID NO: 4884587 - DNA, 25 bp, Homo sapien
tcagtgaatacaccatgcacaccca

SEQ ID NO: 4884588 - DNA, 25 bp, Homo sapien
gagtaaccaacagctgctaggccat

SEQ ID NO: 4884589 - DNA, 25 bp, Homo sapien
gatcctggcagtgcgggtgtcggct

SEQ ID NO: 4884590 - DNA, 25 bp, Homo sapien
aatttccggagcgtgtctgccaaca

SEQ ID NO: 4884591 - DNA, 25 bp, Homo sapien
gcagcgttcctttcactagtgcggg

SEQ ID NO: 4884592 - DNA, 25 bp, Homo sapien
ggcgctaggctccttcgcagggagt

SEQ ID NO: 4884593 - DNA, 25 bp, Homo sapien
ccgccatcaatgcagcatgtctttc

SEQ ID NO: 4884594 - DNA, 25 bp, Homo sapien
tgtctttctggaggcgctaggctcc

SEQ ID NO: 4884595 - DNA, 25 bp, Homo sapien
taggctccttcgcagggagtgagga

SEQ ID NO: 4884596 - DNA, 25 bp, Homo sapien
ttgcaccaggaaaggacagaactgc

SEQ ID NO: 4884597 - DNA, 25 bp, Homo sapien
caggaaaggacagaactgctgtctg

SEQ ID NO: 4884598 - DNA, 25 bp, Homo sapien
ccaggaaaggacagaactgctgtct

SEQ ID NO: 4884599 - DNA, 25 bp, Homo sapien
ctgttgcaccaggaaaggacagaac

SEQ ID NO: 4884600 - DNA, 25 bp, Homo sapien
ggatgaacagaaaggcgagggcctg

SEQ ID NO: 4884601 - DNA, 25 bp, Homo sapien
gatgaacagaaaggcgagggcctgg

SEQ ID NO: 4884602 - DNA, 25 bp, Homo sapien
tggttgagtcctagtcagtctaagg

SEQ ID NO: 4884603 - DNA, 25 bp, Homo sapien
gacttacaggctggtaggcttggat

SEQ ID NO: 4884604 - DNA, 25 bp, Homo sapien
gccattaaagcttacctagacagag

SEQ ID NO: 4884605 - DNA, 25 bp, Homo sapien
tatgaccactcagtctacggtgtcc

SEQ ID NO: 4884606 - DNA, 25 bp, Homo sapien
aaaatgggcataggacttgattagt

SEQ ID NO: 4884607 - DNA, 25 bp, Homo sapien
aacctcaaacagctcaattcaaaaa

SEQ ID NO: 4884608 - DNA, 25 bp, Homo sapien
cctcaaacagctcaattcaaaaatg

SEQ ID NO: 4884609 - DNA, 25 bp, Homo sapien
aaacctcaaacagctcaattcaaaa

SEQ ID NO: 4884610 - DNA, 25 bp, Homo sapien
tacacacagagctctgagagagaac

SEQ ID NO: 4884611 - DNA, 25 bp, Homo sapien
gccttctgccgaaaccaatcttggg

SEQ ID NO: 4884612 - DNA, 25 bp, Homo sapien
gagttgatccccatctcagaggttt

SEQ ID NO: 4884613 - DNA, 25 bp, Homo sapien
aaactaggtcagtcaaccacctctg

SEQ ID NO: 4884614 - DNA, 25 bp, Homo sapien
aatacagtttcattgaagcttcaaa

SEQ ID NO: 4884615 - DNA, 25 bp, Homo sapien
agggtgcaagcttggtgaccctttc

SEQ ID NO: 4884616 - DNA, 25 bp, Homo sapien
gggacagggtgcaagcttggtgacc

SEQ ID NO: 4884617 - DNA, 25 bp, Homo sapien
cagtttcattgaagcttcaaacaga

SEQ ID NO: 4884618 - DNA, 25 bp, Homo sapien
ggccagcggtaattctttcagttaa

SEQ ID NO: 4884619 - DNA, 25 bp, Homo sapien
tcatttgctacatgaaacagaggca

SEQ ID NO: 4884620 - DNA, 25 bp, Homo sapien
tctcagcactacaatggccagcggt

SEQ ID NO: 4884621 - DNA, 25 bp, Homo sapien
tttgggacaggaacactgacccctg

SEQ ID NO: 4884622 - DNA, 25 bp, Homo sapien
actgtctagtatactataagtgatc

SEQ ID NO: 4884623 - DNA, 25 bp, Homo sapien
catctttattaacagtaccatagta

SEQ ID NO: 4884624 - DNA, 25 bp, Homo sapien
gtctagtatactataagtgatctat

SEQ ID NO: 4884625 - DNA, 25 bp, Homo sapien
ttaacagtaccatagtattccactg

SEQ ID NO: 4884626 - DNA, 25 bp, Homo sapien
caacttcccagtatattatggactc

SEQ ID NO: 4884627 - DNA, 25 bp, Homo sapien
gtaaaaatcagatcatactaatata

SEQ ID NO: 4884628 - DNA, 25 bp, Homo sapien
tgccaacttcccagtatattatgga

SEQ ID NO: 4884629 - DNA, 25 bp, Homo sapien
aaagtaaaaatcagatcatactaat

SEQ ID NO: 4884630 - DNA, 25 bp, Homo sapien
atcatcaatatgaataccaaacact

SEQ ID NO: 4884631 - DNA, 25 bp, Homo sapien
aatatgaataccaaacactcctctt

SEQ ID NO: 4884632 - DNA, 25 bp, Homo sapien
tcaatatgaataccaaacactcctc

SEQ ID NO: 4884633 - DNA, 25 bp, Homo sapien
catcaatatgaataccaaacactcc

SEQ ID NO: 4884634 - DNA, 25 bp, Homo sapien
aattgtaagggccagaatgatgggt

SEQ ID NO: 4884635 - DNA, 25 bp, Homo sapien
gaatgatgggtatccagataaaaac

SEQ ID NO: 4884636 - DNA, 25 bp, Homo sapien
cataatctctaattgtaagggccag

SEQ ID NO: 4884637 - DNA, 25 bp, Homo sapien
tgtttcttcatgcttgacctttaaa

SEQ ID NO: 4884638 - DNA, 25 bp, Homo sapien
tgggtcttttttctcggccagcaaa

SEQ ID NO: 4884639 - DNA, 25 bp, Homo sapien
aataatatgttactcccttgggtct

SEQ ID NO: 4884640 - DNA, 25 bp, Homo sapien
aaactgaaaaacacagacctacagg

SEQ ID NO: 4884641 - DNA, 25 bp, Homo sapien
aaaacacagacctacaggcttaggg

SEQ ID NO: 4884642 - DNA, 25 bp, Homo sapien
cactcgggagaaaaccttagagatt

SEQ ID NO: 4884643 - DNA, 25 bp, Homo sapien
gatactagagatagcctaggtgtgc

SEQ ID NO: 4884644 - DNA, 25 bp, Homo sapien
tgacttgacatcaaatgcatgatga

SEQ ID NO: 4884645 - DNA, 25 bp, Homo sapien
tatgggtaggcagagttctttgact

SEQ ID NO: 4884646 - DNA, 25 bp, Homo sapien
tcctgaacgcactcaacagatggga

SEQ ID NO: 4884647 - DNA, 25 bp, Homo sapien
ccaataaaaagatcagcctgctgcc

SEQ ID NO: 4884648 - DNA, 25 bp, Homo sapien
tggcgggctcattcatctgtctctg

SEQ ID NO: 4884649 - DNA, 25 bp, Homo sapien
tccttaacatcaggcgtggcgggct

SEQ ID NO: 4884650 - DNA, 25 bp, Homo sapien
tgacgacgaagtgaaatcgcctact

SEQ ID NO: 4884651 - DNA, 25 bp, Homo sapien
tagtcgcgaggcatcctaatccagt

SEQ ID NO: 4884652 - DNA, 25 bp, Homo sapien
aacctttgattgagcctggaggctt

SEQ ID NO: 4884653 - DNA, 25 bp, Homo sapien
gctcagggatcattgtgcgggtcca

SEQ ID NO: 4884654 - DNA, 25 bp, Homo sapien
aggaatcacggtggtgaaaacttct

SEQ ID NO: 4884655 - DNA, 25 bp, Homo sapien
tgaaaacttctatgttctcgtcact

SEQ ID NO: 4884656 - DNA, 25 bp, Homo sapien
cactgcagctgtaaatctgatgcat

SEQ ID NO: 4884657 - DNA, 25 bp, Homo sapien
tcactgcagctgtaaatctgatgca

SEQ ID NO: 4884658 - DNA, 25 bp, Homo sapien
catagctacagtaacaacactgaga

SEQ ID NO: 4884659 - DNA, 25 bp, Homo sapien
gaaatggttttagacaacatcagcg

SEQ ID NO: 4884660 - DNA, 25 bp, Homo sapien
cagtaacaacactgagaaggtttga

SEQ ID NO: 4884661 - DNA, 25 bp, Homo sapien
tcagcgaggctgacatagctacagt

SEQ ID NO: 4884662 - DNA, 25 bp, Homo sapien
ttttggctcttcttctggctggact

SEQ ID NO: 4884663 - DNA, 25 bp, Homo sapien
gctcttcttctggctggactggata

SEQ ID NO: 4884664 - DNA, 25 bp, Homo sapien
tcaagaggtgctgagagcttttggc

SEQ ID NO: 4884665 - DNA, 25 bp, Homo sapien
caagaggtgctgagagcttttggct

SEQ ID NO: 4884666 - DNA, 25 bp, Homo sapien
tttgctgatagtatacagtagtccc

SEQ ID NO: 4884667 - DNA, 25 bp, Homo sapien
tgcagcttctcaggatttgctgata

SEQ ID NO: 4884668 - DNA, 25 bp, Homo sapien
cctttcatctatggtttcagttacc

SEQ ID NO: 4884669 - DNA, 25 bp, Homo sapien
tcagttacccttggtcaagtagagt

SEQ ID NO: 4884670 - DNA, 25 bp, Homo sapien
ggctgaccgcctgcttattctgaag

SEQ ID NO: 4884671 - DNA, 25 bp, Homo sapien
tatccatcttttctgatggctgacc

SEQ ID NO: 4884672 - DNA, 25 bp, Homo sapien
gggccacgaatcttcattgtcgtgg

SEQ ID NO: 4884673 - DNA, 25 bp, Homo sapien
ggctccatgccagaaggcttaactg

SEQ ID NO: 4884674 - DNA, 25 bp, Homo sapien
gccactgtgcacggcgctctgtgca

SEQ ID NO: 4884675 - DNA, 25 bp, Homo sapien
gagaaccccacatatattcctcctt

SEQ ID NO: 4884676 - DNA, 25 bp, Homo sapien
aaaaaatcaggagaaccccacatat

SEQ ID NO: 4884677 - DNA, 25 bp, Homo sapien
tgtgcacggcgctctgtgcatttca

SEQ ID NO: 4884678 - DNA, 25 bp, Homo sapien
tccttgctggtcatagagaggtcaa

SEQ ID NO: 4884679 - DNA, 25 bp, Homo sapien
ggattcacagaaatgttctagccca

SEQ ID NO: 4884680 - DNA, 25 bp, Homo sapien
cagcaaactgccagctgaagttggg

SEQ ID NO: 4884681 - DNA, 25 bp, Homo sapien
gaaaagcagaagacacgggctaaca

SEQ ID NO: 4884682 - DNA, 25 bp, Homo sapien
ccaccaaaggatgccagtagcagga

SEQ ID NO: 4884683 - DNA, 25 bp, Homo sapien
gaggccagttatttcccaggtcgcg

SEQ ID NO: 4884684 - DNA, 25 bp, Homo sapien
gatggtcttagaacacactggtctg

SEQ ID NO: 4884685 - DNA, 25 bp, Homo sapien
tttccacaataatggaggctctgag

SEQ ID NO: 4884686 - DNA, 25 bp, Homo sapien
ggaatcttggtagtttgggcttcga

SEQ ID NO: 4884687 - DNA, 25 bp, Homo sapien
cgtgaaggggaatcttggtagtttg

SEQ ID NO: 4884688 - DNA, 25 bp, Homo sapien
aatcttggtagtttgggcttcgatc

SEQ ID NO: 4884689 - DNA, 25 bp, Homo sapien
tcttggtagtttgggcttcgatcct

SEQ ID NO: 4884690 - DNA, 25 bp, Homo sapien
tgtacaggtccgactcgatcaccac

SEQ ID NO: 4884691 - DNA, 25 bp, Homo sapien
gctggtgcgtgtacaggtccgactc

SEQ ID NO: 4884692 - DNA, 25 bp, Homo sapien
agggtccctgcggtctccgcggtgg

SEQ ID NO: 4884693 - DNA, 25 bp, Homo sapien
ggtctggagccgcccaaacctgcgg

SEQ ID NO: 4884694 - DNA, 25 bp, Homo sapien
gattttccatatgctcgattcccac

SEQ ID NO: 4884695 - DNA, 25 bp, Homo sapien
ttttccatatgctcgattcccacac

SEQ ID NO: 4884696 - DNA, 25 bp, Homo sapien
tttccatatgctcgattcccacaca

SEQ ID NO: 4884697 - DNA, 25 bp, Homo sapien
attttccatatgctcgattcccaca

SEQ ID NO: 4884698 - DNA, 25 bp, Homo sapien
tctgggtgaaaggacttgttcccac

SEQ ID NO: 4884699 - DNA, 25 bp, Homo sapien
catgggccggtgaacacttgcaccc

SEQ ID NO: 4884700 - DNA, 25 bp, Homo sapien
actttgcacggacttggatttagct

SEQ ID NO: 4884701 - DNA, 25 bp, Homo sapien
gctgtgtgggccctggattgctctc

SEQ ID NO: 4884702 - DNA, 25 bp, Homo sapien
caccttgcagggcagattgactctg

SEQ ID NO: 4884703 - DNA, 25 bp, Homo sapien
ttcaagggacagtgacctcggacct

SEQ ID NO: 4884704 - DNA, 25 bp, Homo sapien
gactgtagaagcataaggcactcca

SEQ ID NO: 4884705 - DNA, 25 bp, Homo sapien
cattggtcccgtgtgtcagtagctc

SEQ ID NO: 4884706 - DNA, 25 bp, Homo sapien
agtgtgaggatgcatctgccttccc

SEQ ID NO: 4884707 - DNA, 25 bp, Homo sapien
ccactctggccctgactgaggctgt

SEQ ID NO: 4884708 - DNA, 25 bp, Homo sapien
ggagtgtgaggatgcatctgccttc

SEQ ID NO: 4884709 - DNA, 25 bp, Homo sapien
ctgtcatgaggaagcgggagggagt

SEQ ID NO: 4884710 - DNA, 25 bp, Homo sapien
tttcactgagatccggggcactggc

SEQ ID NO: 4884711 - DNA, 25 bp, Homo sapien
tgtgcccatggctgtcgcctccaat

SEQ ID NO: 4884712 - DNA, 25 bp, Homo sapien
aagttttcactgagatccggggcac

SEQ ID NO: 4884713 - DNA, 25 bp, Homo sapien
cgcctccaatgaggcagaggctgaa

SEQ ID NO: 4884714 - DNA, 25 bp, Homo sapien
cacactggttcatgggatctcaagt

SEQ ID NO: 4884715 - DNA, 25 bp, Homo sapien
ttcatgggatctcaagttctgctac

SEQ ID NO: 4884716 - DNA, 25 bp, Homo sapien
ctggttcatgggatctcaagttctg

SEQ ID NO: 4884717 - DNA, 25 bp, Homo sapien
ctgaacacactggttcatgggatct

SEQ ID NO: 4884718 - DNA, 25 bp, Homo sapien
tgctcctcctcagtgaccgggatcc

SEQ ID NO: 4884719 - DNA, 25 bp, Homo sapien
taaggtcactgttgggaccctcaca

SEQ ID NO: 4884720 - DNA, 25 bp, Homo sapien
tgttgggaccctcacaggaacgtct

SEQ ID NO: 4884721 - DNA, 25 bp, Homo sapien
gatccacgtagctgtaaggtcactg

SEQ ID NO: 4884722 - DNA, 25 bp, Homo sapien
agtgggtggggagggtggtctgctc

SEQ ID NO: 4884723 - DNA, 25 bp, Homo sapien
tgggtggggagggtggtctgctcac

SEQ ID NO: 4884724 - DNA, 25 bp, Homo sapien
ggagtgggtggggagggtggtctgc

SEQ ID NO: 4884725 - DNA, 25 bp, Homo sapien
ctaaagaaaagccaggagtgggtgg

SEQ ID NO: 4884726 - DNA, 25 bp, Homo sapien
ggaagggctggatactcttcagtca

SEQ ID NO: 4884727 - DNA, 25 bp, Homo sapien
ctgtcagtggtagagaggcttctgc

SEQ ID NO: 4884728 - DNA, 25 bp, Homo sapien
tggatactcttcagtcatcttcttg

SEQ ID NO: 4884729 - DNA, 25 bp, Homo sapien
cagtggtagagaggcttctgctcct

SEQ ID NO: 4884730 - DNA, 25 bp, Homo sapien
ccttgtccacattttccggaggatg

SEQ ID NO: 4884731 - DNA, 25 bp, Homo sapien
aaaggcgctgttggtggctcccaca

SEQ ID NO: 4884732 - DNA, 25 bp, Homo sapien
caaaggcgctgttggtggctcccac

SEQ ID NO: 4884733 - DNA, 25 bp, Homo sapien
tccggaggatgccggggacgccgca

SEQ ID NO: 4884734 - DNA, 25 bp, Homo sapien
tcaatcctgaaggtttttcctcttg

SEQ ID NO: 4884735 - DNA, 25 bp, Homo sapien
tgtccggggaaccttggccaacaca

SEQ ID NO: 4884736 - DNA, 25 bp, Homo sapien
acagggcacttgaagagggtcacct

SEQ ID NO: 4884737 - DNA, 25 bp, Homo sapien
gggaaccttggccaacacagggcac

SEQ ID NO: 4884738 - DNA, 25 bp, Homo sapien
tgtgtttacaagtgcctcaaagtcc

SEQ ID NO: 4884739 - DNA, 25 bp, Homo sapien
gataatgggtttggaccagctacta

SEQ ID NO: 4884740 - DNA, 25 bp, Homo sapien
tatcccagggtaatcaatgagtgag

SEQ ID NO: 4884741 - DNA, 25 bp, Homo sapien
cagttttatattgccttcgagggac

SEQ ID NO: 4884742 - DNA, 25 bp, Homo sapien
catctattaagtggatagggccacc

SEQ ID NO: 4884743 - DNA, 25 bp, Homo sapien
tttacacagtacttcgggcagcctc

SEQ ID NO: 4884744 - DNA, 25 bp, Homo sapien
ggagtagctctaacacaggcattga

SEQ ID NO: 4884745 - DNA, 25 bp, Homo sapien
gagtaggcaaagcagggagtccact

SEQ ID NO: 4884746 - DNA, 25 bp, Homo sapien
taaaagagcacttgatgcccaggtc

SEQ ID NO: 4884747 - DNA, 25 bp, Homo sapien
gatcctctgttacgaccagcatagg

SEQ ID NO: 4884748 - DNA, 25 bp, Homo sapien
tttgaacagtcctctgggatagccc

SEQ ID NO: 4884749 - DNA, 25 bp, Homo sapien
gagcggcagtcacacatagcagttg

SEQ ID NO: 4884750 - DNA, 25 bp, Homo sapien
taaatggttgtaaggagctaggtgt

SEQ ID NO: 4884751 - DNA, 25 bp, Homo sapien
gccacatacaaatgaaagataccag

SEQ ID NO: 4884752 - DNA, 25 bp, Homo sapien
taaaataaatggttgtaaggagcta

SEQ ID NO: 4884753 - DNA, 25 bp, Homo sapien
tatttgaattggccaagtaaaatgt

SEQ ID NO: 4884754 - DNA, 25 bp, Homo sapien
ggagatggcgcttggctctccaaaa

SEQ ID NO: 4884755 - DNA, 25 bp, Homo sapien
tccccgacgaggacatagggacgtg

SEQ ID NO: 4884756 - DNA, 25 bp, Homo sapien
tagggacgtggctggtgcagctcag

SEQ ID NO: 4884757 - DNA, 25 bp, Homo sapien
tcagctacccaacggatgacctgct

SEQ ID NO: 4884758 - DNA, 25 bp, Homo sapien
tccagggagtattgcaccttgaatc

SEQ ID NO: 4884759 - DNA, 25 bp, Homo sapien
gcttccagggagtattgcaccttga

SEQ ID NO: 4884760 - DNA, 25 bp, Homo sapien
gggagtattgcaccttgaatccaag

SEQ ID NO: 4884761 - DNA, 25 bp, Homo sapien
tctgcttccagggagtattgcacct

SEQ ID NO: 4884762 - DNA, 25 bp, Homo sapien
gctggcgagtgggactctgcagcac

SEQ ID NO: 4884763 - DNA, 25 bp, Homo sapien
tccgtggtgtccgtggctggcgagt

SEQ ID NO: 4884764 - DNA, 25 bp, Homo sapien
tccgtggctggcgagtgggactctg

SEQ ID NO: 4884765 - DNA, 25 bp, Homo sapien
ctgggtgtccgtggtgtccgtggct

SEQ ID NO: 4884766 - DNA, 25 bp, Homo sapien
tcttgcttgtgagcagaggtcgctg

SEQ ID NO: 4884767 - DNA, 25 bp, Homo sapien
cagctgctggcgagcccggtcccag

SEQ ID NO: 4884768 - DNA, 25 bp, Homo sapien
ggtcgctggactgcactgaccaggt

SEQ ID NO: 4884769 - DNA, 25 bp, Homo sapien
gtcccaggaacctggcacgggagct

SEQ ID NO: 4884770 - DNA, 25 bp, Homo sapien
taaattcagccataaacacacaacc

SEQ ID NO: 4884771 - DNA, 25 bp, Homo sapien
caacccagaaataatcactattatc

SEQ ID NO: 4884772 - DNA, 25 bp, Homo sapien
aaataggaagataaattcagccata

SEQ ID NO: 4884773 - DNA, 25 bp, Homo sapien
aaataatcactattatcatcttggt

SEQ ID NO: 4884774 - DNA, 25 bp, Homo sapien
tacttgcatggaaactgactacaca

SEQ ID NO: 4884775 - DNA, 25 bp, Homo sapien
aacatgtcaggcatcttaagtcacc

SEQ ID NO: 4884776 - DNA, 25 bp, Homo sapien
tatacatagtctgcaatcaccaaag

SEQ ID NO: 4884777 - DNA, 25 bp, Homo sapien
cagtatgttatacaaatgccagaca

SEQ ID NO: 4884778 - DNA, 25 bp, Homo sapien
agtcatataatggtgtgctgtcaac

SEQ ID NO: 4884779 - DNA, 25 bp, Homo sapien
tttatacgtatacagggtgcctaga

SEQ ID NO: 4884780 - DNA, 25 bp, Homo sapien
tctacctaaatgttgcactatgccc

SEQ ID NO: 4884781 - DNA, 25 bp, Homo sapien
cactcctgaagtatgctgctataga

SEQ ID NO: 4884782 - DNA, 25 bp, Homo sapien
ggaggcaaacgctgtgttatcctct

SEQ ID NO: 4884783 - DNA, 25 bp, Homo sapien
gctgtgttatcctctttgcagacca

SEQ ID NO: 4884784 - DNA, 25 bp, Homo sapien
agaccatcccagaatttgcagagac

SEQ ID NO: 4884785 - DNA, 25 bp, Homo sapien
ttcctggccgtggaggcaaacgctg

SEQ ID NO: 4884786 - DNA, 25 bp, Homo sapien
accttccaggctaaggtgatgcttt

SEQ ID NO: 4884787 - DNA, 25 bp, Homo sapien
ttccaggctaaggtgatgctttcac

SEQ ID NO: 4884788 - DNA, 25 bp, Homo sapien
ggctctctgtaacctcgaccttcca

SEQ ID NO: 4884789 - DNA, 25 bp, Homo sapien
cgaccttccaggctaaggtgatgct

SEQ ID NO: 4884790 - DNA, 25 bp, Homo sapien
cttggtcaagtcttggtaattagca

SEQ ID NO: 4884791 - DNA, 25 bp, Homo sapien
ggaacttactcctcctctctagttg

SEQ ID NO: 4884792 - DNA, 25 bp, Homo sapien
gatacatgtatgcaatgtgtcttgg

SEQ ID NO: 4884793 - DNA, 25 bp, Homo sapien
gtgttgggaacatttaaatcctgct

SEQ ID NO: 4884794 - DNA, 25 bp, Homo sapien
aaattactaagaagataacctgaga

SEQ ID NO: 4884795 - DNA, 25 bp, Homo sapien
ttgggactgaatgagaggacagaat

SEQ ID NO: 4884796 - DNA, 25 bp, Homo sapien
gatgtctttatactacttaagagga

SEQ ID NO: 4884797 - DNA, 25 bp, Homo sapien
taataggcaagatatataccataag

SEQ ID NO: 4884798 - DNA, 25 bp, Homo sapien
cgacttttaatcatagattctagga

SEQ ID NO: 4884799 - DNA, 25 bp, Homo sapien
aactggctgataaatctaggctaag

SEQ ID NO: 4884800 - DNA, 25 bp, Homo sapien
agttttttatattgatactgtgtca

SEQ ID NO: 4884801 - DNA, 25 bp, Homo sapien
gattctaggagtggagctgtagtta

SEQ ID NO: 4884802 - DNA, 25 bp, Homo sapien
caagcgaccataccccctcagcctc

SEQ ID NO: 4884803 - DNA, 25 bp, Homo sapien
gctcaagcgaccataccccctcagc

SEQ ID NO: 4884804 - DNA, 25 bp, Homo sapien
ggctcaagcgaccataccccctcag

SEQ ID NO: 4884805 - DNA, 25 bp, Homo sapien
ctcaagcgaccataccccctcagcc

SEQ ID NO: 4884806 - DNA, 25 bp, Homo sapien
gggtcattcattgcagagttctgct

SEQ ID NO: 4884807 - DNA, 25 bp, Homo sapien
gcctttgcactattgacatcttgga

SEQ ID NO: 4884808 - DNA, 25 bp, Homo sapien
tacccagtagagatagtaacactcc

SEQ ID NO: 4884809 - DNA, 25 bp, Homo sapien
cagacccctctaaaactgttttcag

SEQ ID NO: 4884810 - DNA, 25 bp, Homo sapien
aaaactgactgtgtcctgccgggag

SEQ ID NO: 4884811 - DNA, 25 bp, Homo sapien
ttagggagtccgctacgcagagaaa

SEQ ID NO: 4884812 - DNA, 25 bp, Homo sapien
tttcttgccaggtaagtcgagcgct

SEQ ID NO: 4884813 - DNA, 25 bp, Homo sapien
cttgaaaatggtgttcgggcgactc

SEQ ID NO: 4884814 - DNA, 25 bp, Homo sapien
tagagcgggcacgaaattaagcacc

SEQ ID NO: 4884815 - DNA, 25 bp, Homo sapien
tgaagaccgcgcatcctaactagtg

SEQ ID NO: 4884816 - DNA, 25 bp, Homo sapien
tgaagaccagcggtagacacagatt

SEQ ID NO: 4884817 - DNA, 25 bp, Homo sapien
cacagattatctccggttccaagca

SEQ ID NO: 4884818 - DNA, 25 bp, Homo sapien
aatgatctggaagaaacgcttggcc

SEQ ID NO: 4884819 - DNA, 25 bp, Homo sapien
tcaagtagctgcaaccgctagaaac

SEQ ID NO: 4884820 - DNA, 25 bp, Homo sapien
caagaggatcgctgttcgaggctac

SEQ ID NO: 4884821 - DNA, 25 bp, Homo sapien
aacatgtggctcagtgctctatgca

SEQ ID NO: 4884822 - DNA, 25 bp, Homo sapien
ttgacttcactacctaatcagttgt

SEQ ID NO: 4884823 - DNA, 25 bp, Homo sapien
cagagtgccttgacttcactaccta

SEQ ID NO: 4884824 - DNA, 25 bp, Homo sapien
ctcaaatatcttcagagtgccttga

SEQ ID NO: 4884825 - DNA, 25 bp, Homo sapien
tatcttcagagtgccttgacttcac

SEQ ID NO: 4884826 - DNA, 25 bp, Homo sapien
tccaagttagggaagagggtattca

SEQ ID NO: 4884827 - DNA, 25 bp, Homo sapien
cctgcacgaggaagaagtatcctgc

SEQ ID NO: 4884828 - DNA, 25 bp, Homo sapien
aatgtgtgagacagccctgcacgag

SEQ ID NO: 4884829 - DNA, 25 bp, Homo sapien
ggcatgtccaggcattactaatggg

SEQ ID NO: 4884830 - DNA, 25 bp, Homo sapien
gcttcctgagaggtgatgtaccatc

SEQ ID NO: 4884831 - DNA, 25 bp, Homo sapien
ggaactaacctgacctgctaaatgg

SEQ ID NO: 4884832 - DNA, 25 bp, Homo sapien
tgtgggattatgctgcaagaggaac

SEQ ID NO: 4884833 - DNA, 25 bp, Homo sapien
gctaaatggttagggaatgcttcct

SEQ ID NO: 4884834 - DNA, 25 bp, Homo sapien
taatgatacttaaatcgtgggaatt

SEQ ID NO: 4884835 - DNA, 25 bp, Homo sapien
gaattattggagaaaatgccattac

SEQ ID NO: 4884836 - DNA, 25 bp, Homo sapien
tatttaatgatacttaaatcgtggg

SEQ ID NO: 4884837 - DNA, 25 bp, Homo sapien
attatgaattattggagaaaatgcc

SEQ ID NO: 4884838 - DNA, 25 bp, Homo sapien
ggagatgaacactgacttttgcata

SEQ ID NO: 4884839 - DNA, 25 bp, Homo sapien
ggtagaggcctgagaaagttagcaa

SEQ ID NO: 4884840 - DNA, 25 bp, Homo sapien
gcatatggtctcttacctcagggaa

SEQ ID NO: 4884841 - DNA, 25 bp, Homo sapien
tggtttttacagtcaagcctactgc

SEQ ID NO: 4884842 - DNA, 25 bp, Homo sapien
cctgagattggtattgcactatttt

SEQ ID NO: 4884843 - DNA, 25 bp, Homo sapien
cagaagagtgtttatcctgagattg

SEQ ID NO: 4884844 - DNA, 25 bp, Homo sapien
gcaaatctgtatcctgaagtgtaca

SEQ ID NO: 4884845 - DNA, 25 bp, Homo sapien
tgagaagcagctttcatgcttattc

SEQ ID NO: 4884846 - DNA, 25 bp, Homo sapien
tcatgagcttttgggtagtttctgg

SEQ ID NO: 4884847 - DNA, 25 bp, Homo sapien
tatacatgtcattagcatatataag

SEQ ID NO: 4884848 - DNA, 25 bp, Homo sapien
ctgacttgtttagtttagcaacact

SEQ ID NO: 4884849 - DNA, 25 bp, Homo sapien
tagcaacactttttcagatacatct

SEQ ID NO: 4884850 - DNA, 25 bp, Homo sapien
tgtgcccggccatgtgtatgattct

SEQ ID NO: 4884851 - DNA, 25 bp, Homo sapien
cccggccatgtgtatgattcttttt

SEQ ID NO: 4884852 - DNA, 25 bp, Homo sapien
ctgtgcccggccatgtgtatgattc

SEQ ID NO: 4884853 - DNA, 25 bp, Homo sapien
tgcccggccatgtgtatgattcttt

SEQ ID NO: 4884854 - DNA, 25 bp, Homo sapien
aaggggagaaatggtagaataagca

SEQ ID NO: 4884855 - DNA, 25 bp, Homo sapien
taagcagttccaactgtaactgaac

SEQ ID NO: 4884856 - DNA, 25 bp, Homo sapien
agcagttccaactgtaactgaacag

SEQ ID NO: 4884857 - DNA, 25 bp, Homo sapien
gaaatggtagaataagcagttccaa

SEQ ID NO: 4884858 - DNA, 25 bp, Homo sapien
ggaacttggactttgccatacggca

SEQ ID NO: 4884859 - DNA, 25 bp, Homo sapien
aggcaaggtccaactcttagagtgc

SEQ ID NO: 4884860 - DNA, 25 bp, Homo sapien
tattggcctttagggaacaggaaca

SEQ ID NO: 4884861 - DNA, 25 bp, Homo sapien
tagagtgccttgtatgccatggaaa

SEQ ID NO: 4884862 - DNA, 25 bp, Homo sapien
ccccttctagtagtcgtgaacttca

SEQ ID NO: 4884863 - DNA, 25 bp, Homo sapien
tagtcgtgaacttcagaccctcgct

SEQ ID NO: 4884864 - DNA, 25 bp, Homo sapien
cgcttcgactcccactgccataact

SEQ ID NO: 4884865 - DNA, 25 bp, Homo sapien
cgtgaacttcagaccctcgcttcga

SEQ ID NO: 4884866 - DNA, 25 bp, Homo sapien
gaaggcagagcttccgagaatcaac

SEQ ID NO: 4884867 - DNA, 25 bp, Homo sapien
caggaaacgagaaatcaaatggcgc

SEQ ID NO: 4884868 - DNA, 25 bp, Homo sapien
caaatggcgcctcagtgattcgcac

SEQ ID NO: 4884869 - DNA, 25 bp, Homo sapien
tatcagctgcgtgaactttagcaag

SEQ ID NO: 4884870 - DNA, 25 bp, Homo sapien
agcagcagcgtaaaaatcactctca

SEQ ID NO: 4884871 - DNA, 25 bp, Homo sapien
ttgggatccagcataactggtgact

SEQ ID NO: 4884872 - DNA, 25 bp, Homo sapien
aggtttgagattgggatccagcata

SEQ ID NO: 4884873 - DNA, 25 bp, Homo sapien
agcagcgtaaaaatcactctcaagg

SEQ ID NO: 4884874 - DNA, 25 bp, Homo sapien
cacatattaaacttgacatggttaa

SEQ ID NO: 4884875 - DNA, 25 bp, Homo sapien
tttctgaactttgagtgcatctaca

SEQ ID NO: 4884876 - DNA, 25 bp, Homo sapien
atttcattgcccctttatgttagct

SEQ ID NO: 4884877 - DNA, 25 bp, Homo sapien
ttattaaatgatctagacaagccag

SEQ ID NO: 4884878 - DNA, 25 bp, Homo sapien
aattaatagtaactcggctgggcgc

SEQ ID NO: 4884879 - DNA, 25 bp, Homo sapien
tctgctccaacaatattggttgttt

SEQ ID NO: 4884880 - DNA, 25 bp, Homo sapien
caaaggtaatagaattgcagtgata

SEQ ID NO: 4884881 - DNA, 25 bp, Homo sapien
tcagagagagggatcaggcccttct

SEQ ID NO: 4884882 - DNA, 25 bp, Homo sapien
ctacagatgtagaaagtatgtcagg

SEQ ID NO: 4884883 - DNA, 25 bp, Homo sapien
tgtcttccgcaactacagatgtaga

SEQ ID NO: 4884884 - DNA, 25 bp, Homo sapien
cagatgtagaaagtatgtcaggtac

SEQ ID NO: 4884885 - DNA, 25 bp, Homo sapien
tattaaaatgtcttccgcaactaca

SEQ ID NO: 4884886 - DNA, 25 bp, Homo sapien
tgtgccccaagcagactcctgacat

SEQ ID NO: 4884887 - DNA, 25 bp, Homo sapien
tagacattctagagccatcactgtt

SEQ ID NO: 4884888 - DNA, 25 bp, Homo sapien
acatcttctagtgttgtgtgcccca

SEQ ID NO: 4884889 - DNA, 25 bp, Homo sapien
ctctctggagagtcacaatgtcctt

SEQ ID NO: 4884890 - DNA, 25 bp, Homo sapien
tgctacatatcaataattgcgcaga

SEQ ID NO: 4884891 - DNA, 25 bp, Homo sapien
aaatgctacatatcaataattgcgc

SEQ ID NO: 4884892 - DNA, 25 bp, Homo sapien
aatgctacatatcaataattgcgca

SEQ ID NO: 4884893 - DNA, 25 bp, Homo sapien
gctacatatcaataattgcgcagag

SEQ ID NO: 4884894 - DNA, 25 bp, Homo sapien
tctgttctacatactgaatttattg

SEQ ID NO: 4884895 - DNA, 25 bp, Homo sapien
ttcaactacgttaatctgttctaca

SEQ ID NO: 4884896 - DNA, 25 bp, Homo sapien
ctgaatttattggtaagctttgatc

SEQ ID NO: 4884897 - DNA, 25 bp, Homo sapien
tttattggtaagctttgatctgaag

SEQ ID NO: 4884898 - DNA, 25 bp, Homo sapien
aagtgctcccgacagcctcccatga

SEQ ID NO: 4884899 - DNA, 25 bp, Homo sapien
gtgctggctggttgagataactctc

SEQ ID NO: 4884900 - DNA, 25 bp, Homo sapien
ggctggttgagataactctcattct

SEQ ID NO: 4884901 - DNA, 25 bp, Homo sapien
tttccagtggttttcgaagtgctcc

SEQ ID NO: 4884902 - DNA, 25 bp, Homo sapien
cgtagtgtattacggaggtggcatt

SEQ ID NO: 4884903 - DNA, 25 bp, Homo sapien
taacgtagtgtattacggaggtggc

SEQ ID NO: 4884904 - DNA, 25 bp, Homo sapien
tgtattacggaggtggcatttcaag

SEQ ID NO: 4884905 - DNA, 25 bp, Homo sapien
tagtgtattacggaggtggcatttc

SEQ ID NO: 4884906 - DNA, 25 bp, Homo sapien
ccttctctatattaaaggtatttat

SEQ ID NO: 4884907 - DNA, 25 bp, Homo sapien
gaaaccctataagtgagatgctgga

SEQ ID NO: 4884908 - DNA, 25 bp, Homo sapien
cagctcttaccaatactgtatatta

SEQ ID NO: 4884909 - DNA, 25 bp, Homo sapien
cacaaacaactcatattgttatgta

SEQ ID NO: 4884910 - DNA, 25 bp, Homo sapien
tgggactccatctagccagattggc

SEQ ID NO: 4884911 - DNA, 25 bp, Homo sapien
tatggtgccaggttcatcacaagca

SEQ ID NO: 4884912 - DNA, 25 bp, Homo sapien
taccacagcaagaacagaattgagg

SEQ ID NO: 4884913 - DNA, 25 bp, Homo sapien
tcatgacagtggctaagaataaggg

SEQ ID NO: 4884914 - DNA, 25 bp, Homo sapien
tgtgatggctatgcaggtctgtttc

SEQ ID NO: 4884915 - DNA, 25 bp, Homo sapien
aagcacagctttctgatactcaccc

SEQ ID NO: 4884916 - DNA, 25 bp, Homo sapien
agctttctgatactcacccagtcct

SEQ ID NO: 4884917 - DNA, 25 bp, Homo sapien
cactaccccttggttctagagggtg

SEQ ID NO: 4884918 - DNA, 25 bp, Homo sapien
ctgggatttcaaactcggtacatct

SEQ ID NO: 4884919 - DNA, 25 bp, Homo sapien
tcggtacatctggtctcttggagac

SEQ ID NO: 4884920 - DNA, 25 bp, Homo sapien
acatctggtctcttggagacacatc

SEQ ID NO: 4884921 - DNA, 25 bp, Homo sapien
gactgataattcagaaataattcta

SEQ ID NO: 4884922 - DNA, 25 bp, Homo sapien
gggatgagtcatgctggacagatga

SEQ ID NO: 4884923 - DNA, 25 bp, Homo sapien
gacagatgaataagtgaaaggctat

SEQ ID NO: 4884924 - DNA, 25 bp, Homo sapien
gatgaataagtgaaaggctatcctc

SEQ ID NO: 4884925 - DNA, 25 bp, Homo sapien
aaggctatcctctgagaaatattgt

SEQ ID NO: 4884926 - DNA, 25 bp, Homo sapien
gaccagagatgttagcttgcccaaa

SEQ ID NO: 4884927 - DNA, 25 bp, Homo sapien
tgttgccccaaatccatacctgatg

SEQ ID NO: 4884928 - DNA, 25 bp, Homo sapien
taaacaagacctggccaaatgttgc

SEQ ID NO: 4884929 - DNA, 25 bp, Homo sapien
gctaagagtatcatgtccgaggtaa

SEQ ID NO: 4884930 - DNA, 25 bp, Homo sapien
agcatttgtaagacattcgttgtaa

SEQ ID NO: 4884931 - DNA, 25 bp, Homo sapien
caggtatgctagtgttcagtcagca

SEQ ID NO: 4884932 - DNA, 25 bp, Homo sapien
tgcaggtatgctagtgttcagtcag

SEQ ID NO: 4884933 - DNA, 25 bp, Homo sapien
taagacattcgttgtaaacaaagca

SEQ ID NO: 4884934 - DNA, 25 bp, Homo sapien
tattacattattaggacaactggtg

SEQ ID NO: 4884935 - DNA, 25 bp, Homo sapien
tcaggaaactgaaaccgggtgccag

SEQ ID NO: 4884936 - DNA, 25 bp, Homo sapien
tcgtcagcaagtagaaggctccctt

SEQ ID NO: 4884937 - DNA, 25 bp, Homo sapien
actggaacctagtgaccccatgcag

SEQ ID NO: 4884938 - DNA, 25 bp, Homo sapien
agatgggtgaagaggtgaagtttta

SEQ ID NO: 4884939 - DNA, 25 bp, Homo sapien
caaaaatcagtatctatagatctta

SEQ ID NO: 4884940 - DNA, 25 bp, Homo sapien
taccaaaaatcagtatctatagatc

SEQ ID NO: 4884941 - DNA, 25 bp, Homo sapien
atgggtgaagaggtgaagttttagc

SEQ ID NO: 4884942 - DNA, 25 bp, Homo sapien
ctgcacctggcctcactcttttcct

SEQ ID NO: 4884943 - DNA, 25 bp, Homo sapien
gcactaccatgcttggctagttttg

SEQ ID NO: 4884944 - DNA, 25 bp, Homo sapien
taaaacctttcaatggattcccatc

SEQ ID NO: 4884945 - DNA, 25 bp, Homo sapien
gcacctggcctcactcttttcctaa

SEQ ID NO: 4884946 - DNA, 25 bp, Homo sapien
ttaaacaacgtgcaatatgtgtgcc

SEQ ID NO: 4884947 - DNA, 25 bp, Homo sapien
aattcagtttctatgagtcaatgag

SEQ ID NO: 4884948 - DNA, 25 bp, Homo sapien
ccaaagtgataatctgacttgctga

SEQ ID NO: 4884949 - DNA, 25 bp, Homo sapien
gtttttatggttcactggactggac

SEQ ID NO: 4884950 - DNA, 25 bp, Homo sapien
aagactgaggttagcaaactgaagc

SEQ ID NO: 4884951 - DNA, 25 bp, Homo sapien
tcctcaaagtgcaaacaaacttggt

SEQ ID NO: 4884952 - DNA, 25 bp, Homo sapien
taacagttgacaaatcacagtaagc

SEQ ID NO: 4884953 - DNA, 25 bp, Homo sapien
tgtgttatttggtcatggctccttc

SEQ ID NO: 4884954 - DNA, 25 bp, Homo sapien
ttacagccaatcaaagtcgtccttc

SEQ ID NO: 4884955 - DNA, 25 bp, Homo sapien
cattagcaacagtggccaattacag

SEQ ID NO: 4884956 - DNA, 25 bp, Homo sapien
gcaagactctctctactccattagc

SEQ ID NO: 4884957 - DNA, 25 bp, Homo sapien
tagttcccgcatgtagcaagactct

SEQ ID NO: 4884958 - DNA, 25 bp, Homo sapien
caatcttggagctggcttttgaaga

SEQ ID NO: 4884959 - DNA, 25 bp, Homo sapien
cttttgaagaatttagcttgcttga

SEQ ID NO: 4884960 - DNA, 25 bp, Homo sapien
tgaagaatttagcttgcttgaggac

SEQ ID NO: 4884961 - DNA, 25 bp, Homo sapien
aagaatttagcttgcttgaggacat

SEQ ID NO: 4884962 - DNA, 25 bp, Homo sapien
gggaacccactgctattataacaag

SEQ ID NO: 4884963 - DNA, 25 bp, Homo sapien
tggctgaaagcctgtaaggtggccc

SEQ ID NO: 4884964 - DNA, 25 bp, Homo sapien
tgcagctgacgaacaacaataatct

SEQ ID NO: 4884965 - DNA, 25 bp, Homo sapien
cacaggagcgacatgcatgggccta

SEQ ID NO: 4884966 - DNA, 25 bp, Homo sapien
aggtcaaaaagctagccgttcctgg

SEQ ID NO: 4884967 - DNA, 25 bp, Homo sapien
ctagccgttcctggtttgtgaatgc

SEQ ID NO: 4884968 - DNA, 25 bp, Homo sapien
ttcctggtttgtgaatgctggagga

SEQ ID NO: 4884969 - DNA, 25 bp, Homo sapien
aaaagctagccgttcctggtttgtg

SEQ ID NO: 4884970 - DNA, 25 bp, Homo sapien
taaacgtagctcttacttcataggg

SEQ ID NO: 4884971 - DNA, 25 bp, Homo sapien
ttcaagccactctcgtgcctcccgc

SEQ ID NO: 4884972 - DNA, 25 bp, Homo sapien
cctcatttcctaacgttcttagcct

SEQ ID NO: 4884973 - DNA, 25 bp, Homo sapien
tctcatttgtaaacgtagctcttac

SEQ ID NO: 4884974 - DNA, 25 bp, Homo sapien
ctttggaattggacagacccaggtt

SEQ ID NO: 4884975 - DNA, 25 bp, Homo sapien
gagctttttatcagactatgggtcc

SEQ ID NO: 4884976 - DNA, 25 bp, Homo sapien
tgagcaccggtttcatcagtaacct

SEQ ID NO: 4884977 - DNA, 25 bp, Homo sapien
tgaatttagtagaatgcctggaaca

SEQ ID NO: 4884978 - DNA, 25 bp, Homo sapien
attgatagagatataggttatatcc

SEQ ID NO: 4884979 - DNA, 25 bp, Homo sapien
actttgattaattgtgttcacctat

SEQ ID NO: 4884980 - DNA, 25 bp, Homo sapien
ccgcacctggctaaggctgatcact

SEQ ID NO: 4884981 - DNA, 25 bp, Homo sapien
cctggctaaggctgatcactttgat

SEQ ID NO: 4884982 - DNA, 25 bp, Homo sapien
ggagccgaacgcactgcgcttcctc

SEQ ID NO: 4884983 - DNA, 25 bp, Homo sapien
ggcgggcgcggagccgaacgcactg

SEQ ID NO: 4884984 - DNA, 25 bp, Homo sapien
gggcgcggagccgaacgcactgcgc

SEQ ID NO: 4884985 - DNA, 25 bp, Homo sapien
gcgcggagccgaacgcactgcgctt

SEQ ID NO: 4884986 - DNA, 25 bp, Homo sapien
gcactttaacatttccatgcctcag

SEQ ID NO: 4884987 - DNA, 25 bp, Homo sapien
cactttaacatttccatgcctcagt

SEQ ID NO: 4884988 - DNA, 25 bp, Homo sapien
ctgctgtgcaatccaggctaaagca

SEQ ID NO: 4884989 - DNA, 25 bp, Homo sapien
ttacatattatcagtccctcatcct

SEQ ID NO: 4884990 - DNA, 25 bp, Homo sapien
cgtcttacatattatcagtccctca

SEQ ID NO: 4884991 - DNA, 25 bp, Homo sapien
acatctccattttccgtcttacata

SEQ ID NO: 4884992 - DNA, 25 bp, Homo sapien
cattttccgtcttacatattatcag

SEQ ID NO: 4884993 - DNA, 25 bp, Homo sapien
cttccagagtccctttacatgtagt

SEQ ID NO: 4884994 - DNA, 25 bp, Homo sapien
taatcctaacatgtccagtgaaagc

SEQ ID NO: 4884995 - DNA, 25 bp, Homo sapien
gactttagtttacacttcagtggac

SEQ ID NO: 4884996 - DNA, 25 bp, Homo sapien
ccctttacatgtagtcaagcaaaac

SEQ ID NO: 4884997 - DNA, 25 bp, Homo sapien
tacccatcccacagcgttattatga

SEQ ID NO: 4884998 - DNA, 25 bp, Homo sapien
gggaacctcatggtaaagccagaga

SEQ ID NO: 4884999 - DNA, 25 bp, Homo sapien
catcagcagatggtactatgggtta

SEQ ID NO: 4885000 - DNA, 25 bp, Homo sapien
cagctctgcctcgtgttgccacaaa

SEQ ID NO: 4885001 - DNA, 25 bp, Homo sapien
tcactgggtgaactcctagacccaa

SEQ ID NO: 4885002 - DNA, 25 bp, Homo sapien
gttcactgggtgaactcctagaccc

SEQ ID NO: 4885003 - DNA, 25 bp, Homo sapien
cactgggtgaactcctagacccaag

SEQ ID NO: 4885004 - DNA, 25 bp, Homo sapien
ttcactgggtgaactcctagaccca

SEQ ID NO: 4885005 - DNA, 25 bp, Homo sapien
taaaataacacgtttccatttgagc

SEQ ID NO: 4885006 - DNA, 25 bp, Homo sapien
tatttaggagaataactagacagaa

SEQ ID NO: 4885007 - DNA, 25 bp, Homo sapien
ttatcttggtaacgaattttcatat

SEQ ID NO: 4885008 - DNA, 25 bp, Homo sapien
taatttggtttgaatagcccactaa

SEQ ID NO: 4885009 - DNA, 25 bp, Homo sapien
gaagccttgtacattggtggtgaaa

SEQ ID NO: 4885010 - DNA, 25 bp, Homo sapien
cttgtttgactcaacagaaaagaca

SEQ ID NO: 4885011 - DNA, 25 bp, Homo sapien
cacatgaagagttgctcaacaacat

SEQ ID NO: 4885012 - DNA, 25 bp, Homo sapien
cataagagtctagcatccagaatac

SEQ ID NO: 4885013 - DNA, 25 bp, Homo sapien
gccaaaaagatgactgagaagactg

SEQ ID NO: 4885014 - DNA, 25 bp, Homo sapien
gaagtgcctctcatgatacttgatg

SEQ ID NO: 4885015 - DNA, 25 bp, Homo sapien
cctctaggcttcgagagttttgacc

SEQ ID NO: 4885016 - DNA, 25 bp, Homo sapien
tgcctcagatgatggctatccagaa

SEQ ID NO: 4885017 - DNA, 25 bp, Homo sapien
gccgccactgctgcgccacactcgg

SEQ ID NO: 4885018 - DNA, 25 bp, Homo sapien
actgctgcgccacactcggccggga

SEQ ID NO: 4885019 - DNA, 25 bp, Homo sapien
atggcgaatgggaagcgccgccact

SEQ ID NO: 4885020 - DNA, 25 bp, Homo sapien
acccccggcgcatggcgaatgggaa

SEQ ID NO: 4885021 - DNA, 25 bp, Homo sapien
tgttgaagctcaatatttaacgatt

SEQ ID NO: 4885022 - DNA, 25 bp, Homo sapien
agctcaatatttaacgatttaaagg

SEQ ID NO: 4885023 - DNA, 25 bp, Homo sapien
caatatttaacgatttaaaggtctg

SEQ ID NO: 4885024 - DNA, 25 bp, Homo sapien
tgaagctcaatatttaacgatttaa

SEQ ID NO: 4885025 - DNA, 25 bp, Homo sapien
tatgtaaaaacaacagcccatcgtg

SEQ ID NO: 4885026 - DNA, 25 bp, Homo sapien
tactgggtaacctatgagcctgcca

SEQ ID NO: 4885027 - DNA, 25 bp, Homo sapien
gcttaagcaggtctggacggcacaa

SEQ ID NO: 4885028 - DNA, 25 bp, Homo sapien
gaagagatgcaatgaccgcctatgg

SEQ ID NO: 4885029 - DNA, 25 bp, Homo sapien
atccaaaatacaaaacctcttgaag

SEQ ID NO: 4885030 - DNA, 25 bp, Homo sapien
taatccctcaagagcacaccaaaaa

SEQ ID NO: 4885031 - DNA, 25 bp, Homo sapien
aaaaatgcatccgaagaaacagtca

SEQ ID NO: 4885032 - DNA, 25 bp, Homo sapien
catccgaagaaacagtcagcagagg

SEQ ID NO: 4885033 - DNA, 25 bp, Homo sapien
tgttcatcggagctgggaatgctta

SEQ ID NO: 4885034 - DNA, 25 bp, Homo sapien
gctgggaatgcttacacttgggcag

SEQ ID NO: 4885035 - DNA, 25 bp, Homo sapien
aatgcttacacttgggcagctttcc

SEQ ID NO: 4885036 - DNA, 25 bp, Homo sapien
gtgttcatcggagctgggaatgctt

SEQ ID NO: 4885037 - DNA, 25 bp, Homo sapien
acttcttcccactgaaaccagaact

SEQ ID NO: 4885038 - DNA, 25 bp, Homo sapien
cacttcttcccactgaaaccagaac

SEQ ID NO: 4885039 - DNA, 25 bp, Homo sapien
ttagaaatcttgtagacgattactt

SEQ ID NO: 4885040 - DNA, 25 bp, Homo sapien
tagaaatcttgtagacgattactta

SEQ ID NO: 4885041 - DNA, 25 bp, Homo sapien
agaaatcttgtagacgattacttac

SEQ ID NO: 4885042 - DNA, 25 bp, Homo sapien
atcaccaaatattctcttggcagga

SEQ ID NO: 4885043 - DNA, 25 bp, Homo sapien
aattatcaccaaatattctcttggc

SEQ ID NO: 4885044 - DNA, 25 bp, Homo sapien
aaaattatcaccaaatattctcttg

SEQ ID NO: 4885045 - DNA, 25 bp, Homo sapien
ttatcaccaaatattctcttggcag

SEQ ID NO: 4885046 - DNA, 25 bp, Homo sapien
tttgtttgtatcactttcctcttct

SEQ ID NO: 4885047 - DNA, 25 bp, Homo sapien
agtcctgctcgtctttgtttaataa

SEQ ID NO: 4885048 - DNA, 25 bp, Homo sapien
ggttctgaatgaattcgtttagtcc

SEQ ID NO: 4885049 - DNA, 25 bp, Homo sapien
tataaagttctggatacctaactag

SEQ ID NO: 4885050 - DNA, 25 bp, Homo sapien
tctggatacctaactaggttctgaa

SEQ ID NO: 4885051 - DNA, 25 bp, Homo sapien
ttttggactgtccatttgaaggaat

SEQ ID NO: 4885052 - DNA, 25 bp, Homo sapien
ccatttgaaggaatgctctgacatc

SEQ ID NO: 4885053 - DNA, 25 bp, Homo sapien
ggactgtccatttgaaggaatgctc

SEQ ID NO: 4885054 - DNA, 25 bp, Homo sapien
ctgtccatttgaaggaatgctctga

SEQ ID NO: 4885055 - DNA, 25 bp, Homo sapien
tctattaagaaaggcaattcctctt

SEQ ID NO: 4885056 - DNA, 25 bp, Homo sapien
tttctattaagaaaggcaattcctc

SEQ ID NO: 4885057 - DNA, 25 bp, Homo sapien
tattaagaaaggcaattcctcttac

SEQ ID NO: 4885058 - DNA, 25 bp, Homo sapien
tggaatagtattttttctattaaga

SEQ ID NO: 4885059 - DNA, 25 bp, Homo sapien
taagtgtcctaaagccactaatttc

SEQ ID NO: 4885060 - DNA, 25 bp, Homo sapien
agtgtcctaaagccactaatttcac

SEQ ID NO: 4885061 - DNA, 25 bp, Homo sapien
aagtgtcctaaagccactaatttca

SEQ ID NO: 4885062 - DNA, 25 bp, Homo sapien
agtaagtgtcctaaagccactaatt

SEQ ID NO: 4885063 - DNA, 25 bp, Homo sapien
ccagcatgggcaacagagagattcc

SEQ ID NO: 4885064 - DNA, 25 bp, Homo sapien
ttccagcatgggcaacagagagatt

SEQ ID NO: 4885065 - DNA, 25 bp, Homo sapien
attccagcatgggcaacagagagat

SEQ ID NO: 4885066 - DNA, 25 bp, Homo sapien
tgcattccagcatgggcaacagaga

SEQ ID NO: 4885067 - DNA, 25 bp, Homo sapien
tgaggatttccagacggtcccaggt

SEQ ID NO: 4885068 - DNA, 25 bp, Homo sapien
acggtcccaggttgatgttctgtga

SEQ ID NO: 4885069 - DNA, 25 bp, Homo sapien
aggatttccagacggtcccaggttg

SEQ ID NO: 4885070 - DNA, 25 bp, Homo sapien
tccagacggtcccaggttgatgttc

SEQ ID NO: 4885071 - DNA, 25 bp, Homo sapien
agaaatcaaagtcagttggtttggc

SEQ ID NO: 4885072 - DNA, 25 bp, Homo sapien
aagaaatcaaagtcagttggtttgg

SEQ ID NO: 4885073 - DNA, 25 bp, Homo sapien
gaaatcaaagtcagttggtttggca

SEQ ID NO: 4885074 - DNA, 25 bp, Homo sapien
gatttctatagtgggctgggtccca

SEQ ID NO: 4885075 - DNA, 25 bp, Homo sapien
aatctagagtatcttgcagtggtgc

SEQ ID NO: 4885076 - DNA, 25 bp, Homo sapien
tcagaagaaaaagtgccatggattt

SEQ ID NO: 4885077 - DNA, 25 bp, Homo sapien
catgcagacgctttaaagaatctga

SEQ ID NO: 4885078 - DNA, 25 bp, Homo sapien
ttttccatccagtttccgttttgca

SEQ ID NO: 4885079 - DNA, 25 bp, Homo sapien
ttccatccagtttccgttttgcaag

SEQ ID NO: 4885080 - DNA, 25 bp, Homo sapien
tctgtaacactttgacagcataaaa

SEQ ID NO: 4885081 - DNA, 25 bp, Homo sapien
ttctgtaacactttgacagcataaa

SEQ ID NO: 4885082 - DNA, 25 bp, Homo sapien
ggaaggaataatgcaatccaaccaa

SEQ ID NO: 4885083 - DNA, 25 bp, Homo sapien
tcaagagcacattacgttcagccat

SEQ ID NO: 4885084 - DNA, 25 bp, Homo sapien
aagagcacattacgttcagccataa

SEQ ID NO: 4885085 - DNA, 25 bp, Homo sapien
tcagttgtttggaaggaataatgca

SEQ ID NO: 4885086 - DNA, 25 bp, Homo sapien
ggatcattcacacatagcattaaac

SEQ ID NO: 4885087 - DNA, 25 bp, Homo sapien
atatattcggtaaatacaaaggtag

SEQ ID NO: 4885088 - DNA, 25 bp, Homo sapien
atacaaaggtaggaattgttctttg

SEQ ID NO: 4885089 - DNA, 25 bp, Homo sapien
ttgaatgtgagctaaaaatgttaac

SEQ ID NO: 4885090 - DNA, 25 bp, Homo sapien
gctcaggaaaggaccgttctctttg

SEQ ID NO: 4885091 - DNA, 25 bp, Homo sapien
actattttgatggaatgtaagtaac

SEQ ID NO: 4885092 - DNA, 25 bp, Homo sapien
tgtaagtaacccaatgcactagcaa

SEQ ID NO: 4885093 - DNA, 25 bp, Homo sapien
gcagcgtaaaacctagctctgtgct

SEQ ID NO: 4885094 - DNA, 25 bp, Homo sapien
ctgaatacaaaccgaaataaaatat

SEQ ID NO: 4885095 - DNA, 25 bp, Homo sapien
aagaatattttctggtttcaagtct

SEQ ID NO: 4885096 - DNA, 25 bp, Homo sapien
actgaatccaaaagaatattttctg

SEQ ID NO: 4885097 - DNA, 25 bp, Homo sapien
ctgaatccaaaagaatattttctgg

SEQ ID NO: 4885098 - DNA, 25 bp, Homo sapien
tactgaatccaaaagaatattttct

SEQ ID NO: 4885099 - DNA, 25 bp, Homo sapien
gcccaggcgtgccacctcaagtgat

SEQ ID NO: 4885100 - DNA, 25 bp, Homo sapien
taaaataacgcagtacagaatctct

SEQ ID NO: 4885101 - DNA, 25 bp, Homo sapien
tgtgtgtgtagctctacgcaataca

SEQ ID NO: 4885102 - DNA, 25 bp, Homo sapien
tctgttctccatccctaccgttttg

SEQ ID NO: 4885103 - DNA, 25 bp, Homo sapien
ctgacaaatacaggggcagtaagat

SEQ ID NO: 4885104 - DNA, 25 bp, Homo sapien
caaatacaggggcagtaagataaaa

SEQ ID NO: 4885105 - DNA, 25 bp, Homo sapien
gacaaatacaggggcagtaagataa

SEQ ID NO: 4885106 - DNA, 25 bp, Homo sapien
tgacaaatacaggggcagtaagata

SEQ ID NO: 4885107 - DNA, 25 bp, Homo sapien
gtggtagtggtgtcagaaatagcaa

SEQ ID NO: 4885108 - DNA, 25 bp, Homo sapien
caaaatgtggtagtggtgtcagaaa

SEQ ID NO: 4885109 - DNA, 25 bp, Homo sapien
atgtggtagtggtgtcagaaatagc

SEQ ID NO: 4885110 - DNA, 25 bp, Homo sapien
cccacaaaatgtggtagtggtgtca

SEQ ID NO: 4885111 - DNA, 25 bp, Homo sapien
attatcaggtatttccagctggctg

SEQ ID NO: 4885112 - DNA, 25 bp, Homo sapien
caactatcaaggcatgattatcagg

SEQ ID NO: 4885113 - DNA, 25 bp, Homo sapien
aatacccaactatcaaggcatgatt

SEQ ID NO: 4885114 - DNA, 25 bp, Homo sapien
gtcttgcagtatctaacaatcacag

SEQ ID NO: 4885115 - DNA, 25 bp, Homo sapien
attagagcaagtcagtaaacaaatc

SEQ ID NO: 4885116 - DNA, 25 bp, Homo sapien
atttcatacagaacagccccaaggc

SEQ ID NO: 4885117 - DNA, 25 bp, Homo sapien
tgtcatagggctgttttctaattac

SEQ ID NO: 4885118 - DNA, 25 bp, Homo sapien
ttctaattacttcaggtgcaagata

SEQ ID NO: 4885119 - DNA, 25 bp, Homo sapien
ccaaggcaccaccaatctacagtat

SEQ ID NO: 4885120 - DNA, 25 bp, Homo sapien
gacactcagctcaggtcttggctga

SEQ ID NO: 4885121 - DNA, 25 bp, Homo sapien
gacagtggcatttaacatcagcggt

SEQ ID NO: 4885122 - DNA, 25 bp, Homo sapien
gcagcagcctcagggattcgcacat

SEQ ID NO: 4885123 - DNA, 25 bp, Homo sapien
taaaacaaacgctctgaaatgtact

SEQ ID NO: 4885124 - DNA, 25 bp, Homo sapien
tggcctcaaacttaggggtttgtga

SEQ ID NO: 4885125 - DNA, 25 bp, Homo sapien
caacatctcggcaataaaaaggagg

SEQ ID NO: 4885126 - DNA, 25 bp, Homo sapien
gggtttgtgaaggatattgtcatac

SEQ ID NO: 4885127 - DNA, 25 bp, Homo sapien
tacatttcagcaacatctcggcaat

SEQ ID NO: 4885128 - DNA, 25 bp, Homo sapien
tccttggcaccaagtcgattttgcc

SEQ ID NO: 4885129 - DNA, 25 bp, Homo sapien
tctaggagttcttccagaatggacc

SEQ ID NO: 4885130 - DNA, 25 bp, Homo sapien
tttctaggagttcttccagaatgga

SEQ ID NO: 4885131 - DNA, 25 bp, Homo sapien
caccaagtcgattttgcctgtcttt

SEQ ID NO: 4885132 - DNA, 25 bp, Homo sapien
gaaaagcctgagatgagacgcacgt

SEQ ID NO: 4885133 - DNA, 25 bp, Homo sapien
tactctcaggaactccaagtggtga

SEQ ID NO: 4885134 - DNA, 25 bp, Homo sapien
caatagcggcatctgaggtactctc

SEQ ID NO: 4885135 - DNA, 25 bp, Homo sapien
tatagataactaaagccatgggacc

SEQ ID NO: 4885136 - DNA, 25 bp, Homo sapien
cagcccagctgagtgattcaaaaaa

SEQ ID NO: 4885137 - DNA, 25 bp, Homo sapien
atggtggtggaatcttcttttgtac

SEQ ID NO: 4885138 - DNA, 25 bp, Homo sapien
cacattaggattaaatggtggtgga

SEQ ID NO: 4885139 - DNA, 25 bp, Homo sapien
aaggtcagcccagctgagtgattca

SEQ ID NO: 4885140 - DNA, 25 bp, Homo sapien
cagatgtggcttctgaatgacccac

SEQ ID NO: 4885141 - DNA, 25 bp, Homo sapien
tggcttctgaatgacccacttggag

SEQ ID NO: 4885142 - DNA, 25 bp, Homo sapien
gcttctgaatgacccacttggagca

SEQ ID NO: 4885143 - DNA, 25 bp, Homo sapien
gatgtggcttctgaatgacccactt

SEQ ID NO: 4885144 - DNA, 25 bp, Homo sapien
gaatactatcacctacctcctgagg

SEQ ID NO: 4885145 - DNA, 25 bp, Homo sapien
tatacaatccttgaagcatgggctc

SEQ ID NO: 4885146 - DNA, 25 bp, Homo sapien
gaatgctagatcctcccatatgaga

SEQ ID NO: 4885147 - DNA, 25 bp, Homo sapien
tggtacatctacaaactgagcagag

SEQ ID NO: 4885148 - DNA, 25 bp, Homo sapien
gggcttccgagtcctgatatgaaaa

SEQ ID NO: 4885149 - DNA, 25 bp, Homo sapien
tatttgagcttccataaaacgcctg

SEQ ID NO: 4885150 - DNA, 25 bp, Homo sapien
tcaattatgggtgggtaaagccttc

SEQ ID NO: 4885151 - DNA, 25 bp, Homo sapien
caatgaagcatttgactagggcacc

SEQ ID NO: 4885152 - DNA, 25 bp, Homo sapien
cacagaatatggaactgtttcttct

SEQ ID NO: 4885153 - DNA, 25 bp, Homo sapien
caaagtttctgatatcatctggtcc

SEQ ID NO: 4885154 - DNA, 25 bp, Homo sapien
tagaatagtcagaagatacacacac

SEQ ID NO: 4885155 - DNA, 25 bp, Homo sapien
gcatcatctgcctccaatacactgg

SEQ ID NO: 4885156 - DNA, 25 bp, Homo sapien
tgttagctgaactgaaattgactgt

SEQ ID NO: 4885157 - DNA, 25 bp, Homo sapien
tctaagccaagaatccaaggtaagc

SEQ ID NO: 4885158 - DNA, 25 bp, Homo sapien
tggatactgaatacacatctgcctg

SEQ ID NO: 4885159 - DNA, 25 bp, Homo sapien
ttttctcttaactagggtctcgctg

SEQ ID NO: 4885160 - DNA, 25 bp, Homo sapien
gtcccggccgttggctgcgtcgcgg

SEQ ID NO: 4885161 - DNA, 25 bp, Homo sapien
cgcacgtcccggccgttggctgcgt

SEQ ID NO: 4885162 - DNA, 25 bp, Homo sapien
cgcgcacgtcccggccgttggctgc

SEQ ID NO: 4885163 - DNA, 25 bp, Homo sapien
acgtcccggccgttggctgcgtcgc

SEQ ID NO: 4885164 - DNA, 25 bp, Homo sapien
ctgcagcgtaggcggagcggagtcc

SEQ ID NO: 4885165 - DNA, 25 bp, Homo sapien
agcgtaggcggagcggagtcctagc

SEQ ID NO: 4885166 - DNA, 25 bp, Homo sapien
ggcggagcggagtcctagcgcgcat

SEQ ID NO: 4885167 - DNA, 25 bp, Homo sapien
gtaggcggagcggagtcctagcgcg

SEQ ID NO: 4885168 - DNA, 25 bp, Homo sapien
accaagcttggcggttgctctccgc

SEQ ID NO: 4885169 - DNA, 25 bp, Homo sapien
caccaagcttggcggttgctctccg

SEQ ID NO: 4885170 - DNA, 25 bp, Homo sapien
gaaaacacttcacaaccaaagcgga

SEQ ID NO: 4885171 - DNA, 25 bp, Homo sapien
ggaccccagcgctgtagtgctttgc

SEQ ID NO: 4885172 - DNA, 25 bp, Homo sapien
gtgacctcgagttagtgggacccca

SEQ ID NO: 4885173 - DNA, 25 bp, Homo sapien
ccaaagcggatgaaagcgagtccag

SEQ ID NO: 4885174 - DNA, 25 bp, Homo sapien
tcagcaccggggatgaactggtgag

SEQ ID NO: 4885175 - DNA, 25 bp, Homo sapien
ttagtctaacgaacgccgagtgttg

SEQ ID NO: 4885176 - DNA, 25 bp, Homo sapien
ccgagtgttgctgcacgtggaacag

SEQ ID NO: 4885177 - DNA, 25 bp, Homo sapien
ctgcacgtggaacaggcgcggattc

SEQ ID NO: 4885178 - DNA, 25 bp, Homo sapien
gaacaggcgcggattctgtcttctc

SEQ ID NO: 4885179 - DNA, 25 bp, Homo sapien
ctaattgattaaaccacaattgttg

SEQ ID NO: 4885180 - DNA, 25 bp, Homo sapien
gattaaaccacaattgttgataaaa

SEQ ID NO: 4885181 - DNA, 25 bp, Homo sapien
taaaagctatagatggcgaaactca

SEQ ID NO: 4885182 - DNA, 25 bp, Homo sapien
gatggcgaaactcatagaaaggatg

SEQ ID NO: 4885183 - DNA, 25 bp, Homo sapien
tctgtcaagatagatgagggccgcc

SEQ ID NO: 4885184 - DNA, 25 bp, Homo sapien
acttttggaggcctccacttctgtc

SEQ ID NO: 4885185 - DNA, 25 bp, Homo sapien
tccacttctgtcaagatagatgagg

SEQ ID NO: 4885186 - DNA, 25 bp, Homo sapien
ggaggcctccacttctgtcaagata

SEQ ID NO: 4885187 - DNA, 25 bp, Homo sapien
ttaaaattttgaatcgatagacagc

SEQ ID NO: 4885188 - DNA, 25 bp, Homo sapien
ccaagctcagcatctaattcaacaa

SEQ ID NO: 4885189 - DNA, 25 bp, Homo sapien
taaaatgtgatttccaagctcagca

SEQ ID NO: 4885190 - DNA, 25 bp, Homo sapien
gatagacagcatagctttgttttga

SEQ ID NO: 4885191 - DNA, 25 bp, Homo sapien
aaattccatgtggcataaaattatt

SEQ ID NO: 4885192 - DNA, 25 bp, Homo sapien
aaaattccatgtggcataaaattat

SEQ ID NO: 4885193 - DNA, 25 bp, Homo sapien
cgtttcagtctgcaattgtccaatt

SEQ ID NO: 4885194 - DNA, 25 bp, Homo sapien
tgagagagtcttaacagcaataaaa

SEQ ID NO: 4885195 - DNA, 25 bp, Homo sapien
caattgtccaattaatgagagagtc

SEQ ID NO: 4885196 - DNA, 25 bp, Homo sapien
ttgcgtttcagtctgcaattgtcca

SEQ ID NO: 4885197 - DNA, 25 bp, Homo sapien
tgtcattgcaatcacaattccttgc

SEQ ID NO: 4885198 - DNA, 25 bp, Homo sapien
ctctgagatgtataatcaagtggaa

SEQ ID NO: 4885199 - DNA, 25 bp, Homo sapien
tttgaaagagggcatgcttcatctg

SEQ ID NO: 4885200 - DNA, 25 bp, Homo sapien
tacttggttatagttgtcattgcaa

SEQ ID NO: 4885201 - DNA, 25 bp, Homo sapien
aaaagtcatttcttatcgttgcaga

SEQ ID NO: 4885202 - DNA, 25 bp, Homo sapien
gaagatgcacatagattacacaaaa

SEQ ID NO: 4885203 - DNA, 25 bp, Homo sapien
cagattctgtagcaccaggcacatg

SEQ ID NO: 4885204 - DNA, 25 bp, Homo sapien
ggcacatgcactcttatatactgaa

SEQ ID NO: 4885205 - DNA, 25 bp, Homo sapien
tgtaagtgattgaaacctaaatggc

SEQ ID NO: 4885206 - DNA, 25 bp, Homo sapien
tgattgaaacctaaatggctggttg

SEQ ID NO: 4885207 - DNA, 25 bp, Homo sapien
cacgaagtgcctttgtggcaattat

SEQ ID NO: 4885208 - DNA, 25 bp, Homo sapien
ttgttagaatatccttgaaaagcac

SEQ ID NO: 4885209 - DNA, 25 bp, Homo sapien
atttgcttctatacagacagcagtt

SEQ ID NO: 4885210 - DNA, 25 bp, Homo sapien
cagacagcagtttgtgaggttttta

SEQ ID NO: 4885211 - DNA, 25 bp, Homo sapien
gcttctatacagacagcagtttgtg

SEQ ID NO: 4885212 - DNA, 25 bp, Homo sapien
tgtgaggtttttacacaggttggaa

SEQ ID NO: 4885213 - DNA, 25 bp, Homo sapien
aaatatccaggcaatcttccagttc

SEQ ID NO: 4885214 - DNA, 25 bp, Homo sapien
gagcaaattgtaagtcccaggaggg

SEQ ID NO: 4885215 - DNA, 25 bp, Homo sapien
ctggaagttaaggagaggagacacc

SEQ ID NO: 4885216 - DNA, 25 bp, Homo sapien
gactcatcaacaaacagagcttgag

SEQ ID NO: 4885217 - DNA, 25 bp, Homo sapien
ttgtaaaaattcatgtcacatatat

SEQ ID NO: 4885218 - DNA, 25 bp, Homo sapien
aatgctaaatagaggcttactccaa

SEQ ID NO: 4885219 - DNA, 25 bp, Homo sapien
caagatactaaatagggagcttatt

SEQ ID NO: 4885220 - DNA, 25 bp, Homo sapien
ccccagatagtaattatggcacttc

SEQ ID NO: 4885221 - DNA, 25 bp, Homo sapien
gatttaaatacttatactggctcag

SEQ ID NO: 4885222 - DNA, 25 bp, Homo sapien
gactagacccaaaagaggatgcact

SEQ ID NO: 4885223 - DNA, 25 bp, Homo sapien
gaactactgatgtacacaattggat

SEQ ID NO: 4885224 - DNA, 25 bp, Homo sapien
tcaccagtgaagataggaactgatt

SEQ ID NO: 4885225 - DNA, 25 bp, Homo sapien
ttgttgagtaagagagactagaccc

SEQ ID NO: 4885226 - DNA, 25 bp, Homo sapien
aattacagcttcctagtgcaatcac

SEQ ID NO: 4885227 - DNA, 25 bp, Homo sapien
gaaattacagcttcctagtgcaatc

SEQ ID NO: 4885228 - DNA, 25 bp, Homo sapien
aaattacagcttcctagtgcaatca

SEQ ID NO: 4885229 - DNA, 25 bp, Homo sapien
gacaaggtttatgctaaaattcaga

SEQ ID NO: 4885230 - DNA, 25 bp, Homo sapien
aaatttcagtagagactagatgacg

SEQ ID NO: 4885231 - DNA, 25 bp, Homo sapien
gagactagatgacgtataccacggg

SEQ ID NO: 4885232 - DNA, 25 bp, Homo sapien
gggacaaggtttatgctaaaattca

SEQ ID NO: 4885233 - DNA, 25 bp, Homo sapien
gcagataccacctttagctagcaaa

SEQ ID NO: 4885234 - DNA, 25 bp, Homo sapien
tgtgaagccaagtctcctataaagc

SEQ ID NO: 4885235 - DNA, 25 bp, Homo sapien
tgtttgaagctgttcaagtttatct

SEQ ID NO: 4885236 - DNA, 25 bp, Homo sapien
gcctgaatgctaactgctccagttc

SEQ ID NO: 4885237 - DNA, 25 bp, Homo sapien
aagtcagaagacattatccatttgt

SEQ ID NO: 4885238 - DNA, 25 bp, Homo sapien
ctaagtcagaagacattatccattt

SEQ ID NO: 4885239 - DNA, 25 bp, Homo sapien
ttatccatttgttatttaagttcat

SEQ ID NO: 4885240 - DNA, 25 bp, Homo sapien
cattatccatttgttatttaagttc

SEQ ID NO: 4885241 - DNA, 25 bp, Homo sapien
tctttcctgggatgtacactgtgat

SEQ ID NO: 4885242 - DNA, 25 bp, Homo sapien
aagaccaaaaactgcactgaactgg

SEQ ID NO: 4885243 - DNA, 25 bp, Homo sapien
catctgaccaattagagtgttgatt

SEQ ID NO: 4885244 - DNA, 25 bp, Homo sapien
caaaaactgcactgaactggaaaag

SEQ ID NO: 4885245 - DNA, 25 bp, Homo sapien
caaatagtaatttccagtgagcaga

SEQ ID NO: 4885246 - DNA, 25 bp, Homo sapien
ttaaacaactgggtcatcatgtagt

SEQ ID NO: 4885247 - DNA, 25 bp, Homo sapien
cagatatctgatctacatggttaaa

SEQ ID NO: 4885248 - DNA, 25 bp, Homo sapien
aagactctctagttacctattcaaa

SEQ ID NO: 4885249 - DNA, 25 bp, Homo sapien
cagggagatgactcgttgcagttaa

SEQ ID NO: 4885250 - DNA, 25 bp, Homo sapien
tgtgaactgtctagaagccgcataa

SEQ ID NO: 4885251 - DNA, 25 bp, Homo sapien
ggttagctggaatcaaactgcaatc

SEQ ID NO: 4885252 - DNA, 25 bp, Homo sapien
caaatgcctccacaaggttagctgg

SEQ ID NO: 4885253 - DNA, 25 bp, Homo sapien
gcgacttgctagataatagccatgg

SEQ ID NO: 4885254 - DNA, 25 bp, Homo sapien
gattctgcgacttgctagataatag

SEQ ID NO: 4885255 - DNA, 25 bp, Homo sapien
tagataatagccatgggtcattctt

SEQ ID NO: 4885256 - DNA, 25 bp, Homo sapien
gagcctgttctgattctgcgacttg

SEQ ID NO: 4885257 - DNA, 25 bp, Homo sapien
caaccaactagcaatcaagcagaga

SEQ ID NO: 4885258 - DNA, 25 bp, Homo sapien
ttgtgaagcctttagtccttttgga

SEQ ID NO: 4885259 - DNA, 25 bp, Homo sapien
acatatctcatatggcatccaataa

SEQ ID NO: 4885260 - DNA, 25 bp, Homo sapien
tgaaatcagtgcacttttcccagac

SEQ ID NO: 4885261 - DNA, 25 bp, Homo sapien
tgtttcaaatagtaaggctgcaatc

SEQ ID NO: 4885262 - DNA, 25 bp, Homo sapien
caaatagtaaggctgcaatcagcac

SEQ ID NO: 4885263 - DNA, 25 bp, Homo sapien
tgagggatgtttcaaatagtaaggc

SEQ ID NO: 4885264 - DNA, 25 bp, Homo sapien
tagtaaggctgcaatcagcacatct

SEQ ID NO: 4885265 - DNA, 25 bp, Homo sapien
aataaagcaagccacgtcaattatt

SEQ ID NO: 4885266 - DNA, 25 bp, Homo sapien
taagatgcaaacataccttaattta

SEQ ID NO: 4885267 - DNA, 25 bp, Homo sapien
agcaagccacgtcaattatttgttt

SEQ ID NO: 4885268 - DNA, 25 bp, Homo sapien
tgaggcatattatgagaacatataa

SEQ ID NO: 4885269 - DNA, 25 bp, Homo sapien
cagaaagcaggttcagtaagtgcac

SEQ ID NO: 4885270 - DNA, 25 bp, Homo sapien
taacggctaagtggacgatcaaaga

SEQ ID NO: 4885271 - DNA, 25 bp, Homo sapien
taagtgcacacgcattggtaccagg

SEQ ID NO: 4885272 - DNA, 25 bp, Homo sapien
gacagattcactttggatttggcca

SEQ ID NO: 4885273 - DNA, 25 bp, Homo sapien
tggaaatactgcattcggagcaaca

SEQ ID NO: 4885274 - DNA, 25 bp, Homo sapien
tgagtcagatagagatccctttgct

SEQ ID NO: 4885275 - DNA, 25 bp, Homo sapien
cccaggtccatatgtggcaataaat

SEQ ID NO: 4885276 - DNA, 25 bp, Homo sapien
gagaaaatagttgtcccaggtccat

SEQ ID NO: 4885277 - DNA, 25 bp, Homo sapien
tatcccagggtggtagcatgtccct

SEQ ID NO: 4885278 - DNA, 25 bp, Homo sapien
tgcatcagtacactacagcttgggt

SEQ ID NO: 4885279 - DNA, 25 bp, Homo sapien
ggtgcccctatcttttcagagcaga

SEQ ID NO: 4885280 - DNA, 25 bp, Homo sapien
taagcatctctgttaagggaccagt

SEQ ID NO: 4885281 - DNA, 25 bp, Homo sapien
ctgggctggatttatagtaacaatt

SEQ ID NO: 4885282 - DNA, 25 bp, Homo sapien
catggaactgggctgccaaggtagc

SEQ ID NO: 4885283 - DNA, 25 bp, Homo sapien
ggctggatttatagtaacaatttct

SEQ ID NO: 4885284 - DNA, 25 bp, Homo sapien
taaatccattccatggaactgggct

SEQ ID NO: 4885285 - DNA, 25 bp, Homo sapien
cctggtgtaatgaagactgggccca

SEQ ID NO: 4885286 - DNA, 25 bp, Homo sapien
cacactcggtctgagagatccagag

SEQ ID NO: 4885287 - DNA, 25 bp, Homo sapien
gagccacactcggtctgagagatcc

SEQ ID NO: 4885288 - DNA, 25 bp, Homo sapien
gtctgagagatccagagagcagcca

SEQ ID NO: 4885289 - DNA, 25 bp, Homo sapien
tgggggcggctcgcgttccgggagc

SEQ ID NO: 4885290 - DNA, 25 bp, Homo sapien
gcagctttagctttagacctccaag

SEQ ID NO: 4885291 - DNA, 25 bp, Homo sapien
aagtgctttactgctgagccgcagc

SEQ ID NO: 4885292 - DNA, 25 bp, Homo sapien
tcacactcacatatttccgggcaaa

SEQ ID NO: 4885293 - DNA, 25 bp, Homo sapien
caactgaataagcttgatgagcggc

SEQ ID NO: 4885294 - DNA, 25 bp, Homo sapien
tgtacaacagacagccttacctttt

SEQ ID NO: 4885295 - DNA, 25 bp, Homo sapien
gacagccttaccttttagtctttca

SEQ ID NO: 4885296 - DNA, 25 bp, Homo sapien
tcatttaaggtacctatacccacac

SEQ ID NO: 4885297 - DNA, 25 bp, Homo sapien
caaacttatctcatttaaggtacct

SEQ ID NO: 4885298 - DNA, 25 bp, Homo sapien
ctctagtttcccaggagagtggaac

SEQ ID NO: 4885299 - DNA, 25 bp, Homo sapien
agtgctctagaggatcgtcgcggac

SEQ ID NO: 4885300 - DNA, 25 bp, Homo sapien
cgtcgcggaccgaagaggttacagc

SEQ ID NO: 4885301 - DNA, 25 bp, Homo sapien
gctaccactagaaaagagacctcta

SEQ ID NO: 4885302 - DNA, 25 bp, Homo sapien
ccatccgcggctggctgactcttac

SEQ ID NO: 4885303 - DNA, 25 bp, Homo sapien
cacgctccccatccgcggctggctg

SEQ ID NO: 4885304 - DNA, 25 bp, Homo sapien
tcgccactcacgctccccatccgcg

SEQ ID NO: 4885305 - DNA, 25 bp, Homo sapien
cccatccgcggctggctgactctta

SEQ ID NO: 4885306 - DNA, 25 bp, Homo sapien
ttttaaggtgtcacaaagagaaggc

SEQ ID NO: 4885307 - DNA, 25 bp, Homo sapien
tacctgccccttgttagtgatgtta

SEQ ID NO: 4885308 - DNA, 25 bp, Homo sapien
ccttgccagggcgtgatattttcag

SEQ ID NO: 4885309 - DNA, 25 bp, Homo sapien
aatagaacatccctcatctagggtg

SEQ ID NO: 4885310 - DNA, 25 bp, Homo sapien
actctgctttgtcttcggccaatct

SEQ ID NO: 4885311 - DNA, 25 bp, Homo sapien
tgtcttcggccaatctggctttttg

SEQ ID NO: 4885312 - DNA, 25 bp, Homo sapien
gtcttcggccaatctggctttttgc

SEQ ID NO: 4885313 - DNA, 25 bp, Homo sapien
ctgctttgtcttcggccaatctggc

SEQ ID NO: 4885314 - DNA, 25 bp, Homo sapien
gttttccttagccatagagatcagt

SEQ ID NO: 4885315 - DNA, 25 bp, Homo sapien
aggaacccctggtctgttgactatt

SEQ ID NO: 4885316 - DNA, 25 bp, Homo sapien
gttttcagaaagcttcgctgacaac

SEQ ID NO: 4885317 - DNA, 25 bp, Homo sapien
gccatagagatcagtatcttactgt

SEQ ID NO: 4885318 - DNA, 25 bp, Homo sapien
ctgagtaagataacgtctgtaatct

SEQ ID NO: 4885319 - DNA, 25 bp, Homo sapien
taatcttgccgcaattcttctttta

SEQ ID NO: 4885320 - DNA, 25 bp, Homo sapien
tgtttcttccgttcatagtcttctc

SEQ ID NO: 4885321 - DNA, 25 bp, Homo sapien
tctccaagtggtaaacttaatccat

SEQ ID NO: 4885322 - DNA, 25 bp, Homo sapien
tctgtttcactcgtagatagaaaat

SEQ ID NO: 4885323 - DNA, 25 bp, Homo sapien
agatggatctgtttcactcgtagat

SEQ ID NO: 4885324 - DNA, 25 bp, Homo sapien
agataacctctcaccaataggaaga

SEQ ID NO: 4885325 - DNA, 25 bp, Homo sapien
aactcccaaagtagatggatctgtt

SEQ ID NO: 4885326 - DNA, 25 bp, Homo sapien
tattctttgttacgttcaagtttca

SEQ ID NO: 4885327 - DNA, 25 bp, Homo sapien
ggtatctgtcctcctctagtcgtct

SEQ ID NO: 4885328 - DNA, 25 bp, Homo sapien
catcatctagttgtcggtatctgtc

SEQ ID NO: 4885329 - DNA, 25 bp, Homo sapien
ctagtcgtctttggttcagaagttc

SEQ ID NO: 4885330 - DNA, 25 bp, Homo sapien
cagaagttcttcatatgcctctgaa

SEQ ID NO: 4885331 - DNA, 25 bp, Homo sapien
tggaaatgcccacttcttcatttgc

SEQ ID NO: 4885332 - DNA, 25 bp, Homo sapien
ttaggttggaaatgcccacttcttc

SEQ ID NO: 4885333 - DNA, 25 bp, Homo sapien
cttgcaaacctttgatgttttaggt

SEQ ID NO: 4885334 - DNA, 25 bp, Homo sapien
gatgttttaggttggaaatgcccac

SEQ ID NO: 4885335 - DNA, 25 bp, Homo sapien
tatgataccgtctatcaaaaacacg

SEQ ID NO: 4885336 - DNA, 25 bp, Homo sapien
aggatcttggtctggtctatgatac

SEQ ID NO: 4885337 - DNA, 25 bp, Homo sapien
ggtctggtctatgataccgtctatc

SEQ ID NO: 4885338 - DNA, 25 bp, Homo sapien
gtctatcaaaaacacgatcctcatt

SEQ ID NO: 4885339 - DNA, 25 bp, Homo sapien
tgtatacactctcgaaagtcttcta

SEQ ID NO: 4885340 - DNA, 25 bp, Homo sapien
tacactctcgaaagtcttctatcaa

SEQ ID NO: 4885341 - DNA, 25 bp, Homo sapien
atttgtatacactctcgaaagtctt

SEQ ID NO: 4885342 - DNA, 25 bp, Homo sapien
aaatcactttcatatctaaacctct

SEQ ID NO: 4885343 - DNA, 25 bp, Homo sapien
tattaagcaaataaaataaaaatga

SEQ ID NO: 4885344 - DNA, 25 bp, Homo sapien
agcaaataaaataaaaatgaagttg

SEQ ID NO: 4885345 - DNA, 25 bp, Homo sapien
aaggtttctttggacgctactggca

SEQ ID NO: 4885346 - DNA, 25 bp, Homo sapien
gaagtcagaacagccaatgacctgg

SEQ ID NO: 4885347 - DNA, 25 bp, Homo sapien
gctactggcagtatgaattcggact

SEQ ID NO: 4885348 - DNA, 25 bp, Homo sapien
tctctactcactgccaaggttggga

SEQ ID NO: 4885349 - DNA, 25 bp, Homo sapien
tgaaaaccatctgaaaatctgactg

SEQ ID NO: 4885350 - DNA, 25 bp, Homo sapien
tattgaatgtacagcactaccccga

SEQ ID NO: 4885351 - DNA, 25 bp, Homo sapien
tattgtgtgaggacataacagctac

SEQ ID NO: 4885352 - DNA, 25 bp, Homo sapien
caaaggagacattatcaccaagagt

SEQ ID NO: 4885353 - DNA, 25 bp, Homo sapien
taacaagaattattctcactcaacc

SEQ ID NO: 4885354 - DNA, 25 bp, Homo sapien
tttgggatacataagaagatatgag

SEQ ID NO: 4885355 - DNA, 25 bp, Homo sapien
caacctcatgtttaatctattctta

SEQ ID NO: 4885356 - DNA, 25 bp, Homo sapien
gaaaagtttatattgaaggagttca

SEQ ID NO: 4885357 - DNA, 25 bp, Homo sapien
aatgcaaatcagatatgattgaggg

SEQ ID NO: 4885358 - DNA, 25 bp, Homo sapien
acttaccacaccttaacatgttggg

SEQ ID NO: 4885359 - DNA, 25 bp, Homo sapien
tcacaaagggacagaactcataact

SEQ ID NO: 4885360 - DNA, 25 bp, Homo sapien
aaataactgcaaaatggtttcacca

SEQ ID NO: 4885361 - DNA, 25 bp, Homo sapien
caggtccaagcctacttagtttcca

SEQ ID NO: 4885362 - DNA, 25 bp, Homo sapien
ttatgtttcactgtgagagtaccag

SEQ ID NO: 4885363 - DNA, 25 bp, Homo sapien
tgagagtaccagattaagactatcc

SEQ ID NO: 4885364 - DNA, 25 bp, Homo sapien
gtgacccaaaagtaatctatctaaa

SEQ ID NO: 4885365 - DNA, 25 bp, Homo sapien
gactatccttgtgacccaaaagtaa

SEQ ID NO: 4885366 - DNA, 25 bp, Homo sapien
catgttccataggaggcatattccc

SEQ ID NO: 4885367 - DNA, 25 bp, Homo sapien
aggcatattccctcgtttgttcctg

SEQ ID NO: 4885368 - DNA, 25 bp, Homo sapien
taacatccccatcatgttccatagg

SEQ ID NO: 4885369 - DNA, 25 bp, Homo sapien
ttatgtttgactgttctataacatc

SEQ ID NO: 4885370 - DNA, 25 bp, Homo sapien
cttgattagcagatttggatgtttc

SEQ ID NO: 4885371 - DNA, 25 bp, Homo sapien
gactacaggtatcttgattagcaga

SEQ ID NO: 4885372 - DNA, 25 bp, Homo sapien
caaagagcatccctgcaaaaggact

SEQ ID NO: 4885373 - DNA, 25 bp, Homo sapien
gcaaaaggactacaggtatcttgat

SEQ ID NO: 4885374 - DNA, 25 bp, Homo sapien
tccaacagttctagtctgtatttct

SEQ ID NO: 4885375 - DNA, 25 bp, Homo sapien
ctctgaataagttctcgatcttcac

SEQ ID NO: 4885376 - DNA, 25 bp, Homo sapien
tctgaataagttctcgatcttcacc

SEQ ID NO: 4885377 - DNA, 25 bp, Homo sapien
gttccaacagttctagtctgtattt

SEQ ID NO: 4885378 - DNA, 25 bp, Homo sapien
ttgtgctccagacgctgcaaccctg

SEQ ID NO: 4885379 - DNA, 25 bp, Homo sapien
gctgcaaccctgagttctaaatctt

SEQ ID NO: 4885380 - DNA, 25 bp, Homo sapien
gggtcttgtgctccagacgctgcaa

SEQ ID NO: 4885381 - DNA, 25 bp, Homo sapien
cgctgcaaccctgagttctaaatct

SEQ ID NO: 4885382 - DNA, 25 bp, Homo sapien
gatgtgagtaattcattccacttaa

SEQ ID NO: 4885383 - DNA, 25 bp, Homo sapien
gagaatttacactttatgagaactg

SEQ ID NO: 4885384 - DNA, 25 bp, Homo sapien
ctttcccatggaatagtacatgtga

SEQ ID NO: 4885385 - DNA, 25 bp, Homo sapien
gccaccacatttgaggatcatttga

SEQ ID NO: 4885386 - DNA, 25 bp, Homo sapien
tttatgtactaggacaccgtgctac

SEQ ID NO: 4885387 - DNA, 25 bp, Homo sapien
gatttatcaggttaacccagaagca

SEQ ID NO: 4885388 - DNA, 25 bp, Homo sapien
taacccacaggatatattctcagca

SEQ ID NO: 4885389 - DNA, 25 bp, Homo sapien
cagactcagctatggtgctaaagca

SEQ ID NO: 4885390 - DNA, 25 bp, Homo sapien
cactaaactgctttagtctatcagg

SEQ ID NO: 4885391 - DNA, 25 bp, Homo sapien
ggtgccacactaaactgctttagtc

SEQ ID NO: 4885392 - DNA, 25 bp, Homo sapien
ttggtgccacactaaactgctttag

SEQ ID NO: 4885393 - DNA, 25 bp, Homo sapien
gtgtcttggtgccacactaaactgc

SEQ ID NO: 4885394 - DNA, 25 bp, Homo sapien
gtgtctggaaagctattctgggtct

SEQ ID NO: 4885395 - DNA, 25 bp, Homo sapien
catttcaccaagggcgctgctgagt

SEQ ID NO: 4885396 - DNA, 25 bp, Homo sapien
actgcgcaaatcttcattttgagaa

SEQ ID NO: 4885397 - DNA, 25 bp, Homo sapien
gatggggcagataaaggagggagag

SEQ ID NO: 4885398 - DNA, 25 bp, Homo sapien
aaatagtatgcatcatcataaggag

SEQ ID NO: 4885399 - DNA, 25 bp, Homo sapien
cgatagttagtagccaaaggtggta

SEQ ID NO: 4885400 - DNA, 25 bp, Homo sapien
gatcgaaagtattcctggacccata

SEQ ID NO: 4885401 - DNA, 25 bp, Homo sapien
aataagcaagactgggatcgaaagt

SEQ ID NO: 4885402 - DNA, 25 bp, Homo sapien
tgggtgacaggagcactaacataag

SEQ ID NO: 4885403 - DNA, 25 bp, Homo sapien
acaacaggttgtgctagttggtggg

SEQ ID NO: 4885404 - DNA, 25 bp, Homo sapien
gggtgacaggagcactaacataagc

SEQ ID NO: 4885405 - DNA, 25 bp, Homo sapien
acaggttgtgctagttggtgggtga

SEQ ID NO: 4885406 - DNA, 25 bp, Homo sapien
gttcaagatcacactgggcaacaca

SEQ ID NO: 4885407 - DNA, 25 bp, Homo sapien
tcaagatcacactgggcaacacagg

SEQ ID NO: 4885408 - DNA, 25 bp, Homo sapien
caagatcacactgggcaacacaggg

SEQ ID NO: 4885409 - DNA, 25 bp, Homo sapien
gagttcaagatcacactgggcaaca

SEQ ID NO: 4885410 - DNA, 25 bp, Homo sapien
caaagacagttgctgtgaaaaccag

SEQ ID NO: 4885411 - DNA, 25 bp, Homo sapien
ttaaaatccaaacgctgcccaaaga

SEQ ID NO: 4885412 - DNA, 25 bp, Homo sapien
gagcctatattttaccagactcaga

SEQ ID NO: 4885413 - DNA, 25 bp, Homo sapien
tatccactggacaggtagaataggt

SEQ ID NO: 4885414 - DNA, 25 bp, Homo sapien
tgatcacttgtaatcttcagttcat

SEQ ID NO: 4885415 - DNA, 25 bp, Homo sapien
ttgatcacttgtaatcttcagttca

SEQ ID NO: 4885416 - DNA, 25 bp, Homo sapien
aaagcctcttggtaagactgaagtg

SEQ ID NO: 4885417 - DNA, 25 bp, Homo sapien
aagactgaagtgactgtttggaagg

SEQ ID NO: 4885418 - DNA, 25 bp, Homo sapien
cctcttggtaagactgaagtgactg

SEQ ID NO: 4885419 - DNA, 25 bp, Homo sapien
ggtaagactgaagtgactgtttgga

SEQ ID NO: 4885420 - DNA, 25 bp, Homo sapien
ttttccccagggattatatgttctc

SEQ ID NO: 4885421 - DNA, 25 bp, Homo sapien
gcatccctgagaggagcaccacctc

SEQ ID NO: 4885422 - DNA, 25 bp, Homo sapien
cttttccccagggattatatgttct

SEQ ID NO: 4885423 - DNA, 25 bp, Homo sapien
gtaatgccgcacatctacaactatc

SEQ ID NO: 4885424 - DNA, 25 bp, Homo sapien
tgatctttgacaaacctgacaaaaa

SEQ ID NO: 4885425 - DNA, 25 bp, Homo sapien
gacttaaatgttagatctaaaacca

SEQ ID NO: 4885426 - DNA, 25 bp, Homo sapien
caaacctgacaaaaataagaaatgg

SEQ ID NO: 4885427 - DNA, 25 bp, Homo sapien
catctgggttatggtaggcatctat

SEQ ID NO: 4885428 - DNA, 25 bp, Homo sapien
tttgtctgtgcatcctattcaaatc

SEQ ID NO: 4885429 - DNA, 25 bp, Homo sapien
taaatttgggtctagagatacaaca

SEQ ID NO: 4885430 - DNA, 25 bp, Homo sapien
tcttcatatgttcttgcatctgggt

SEQ ID NO: 4885431 - DNA, 25 bp, Homo sapien
gccagaactacaaacaataccaggt

SEQ ID NO: 4885432 - DNA, 25 bp, Homo sapien
cagtggtacagaaaggctataggca

SEQ ID NO: 4885433 - DNA, 25 bp, Homo sapien
tagcgaaagttctaggctgagccag

SEQ ID NO: 4885434 - DNA, 25 bp, Homo sapien
cttggtgtgcaaagctagatggcta

SEQ ID NO: 4885435 - DNA, 25 bp, Homo sapien
atacatttccccgagcaaaaggaga

SEQ ID NO: 4885436 - DNA, 25 bp, Homo sapien
aagttcagttggaggctcaccaaat

SEQ ID NO: 4885437 - DNA, 25 bp, Homo sapien
catttccccgagcaaaaggagagct

SEQ ID NO: 4885438 - DNA, 25 bp, Homo sapien
taattcttgctgtttaatctgaagt

SEQ ID NO: 4885439 - DNA, 25 bp, Homo sapien
aaagacttcctagtgaatcctataa

SEQ ID NO: 4885440 - DNA, 25 bp, Homo sapien
atcatcatctgaaagcaatccattc

SEQ ID NO: 4885441 - DNA, 25 bp, Homo sapien
cagataaattgagggttgacagggt

SEQ ID NO: 4885442 - DNA, 25 bp, Homo sapien
catactttttctagaggtaaagact

SEQ ID NO: 4885443 - DNA, 25 bp, Homo sapien
catcttgaatgctacctggagtctg

SEQ ID NO: 4885444 - DNA, 25 bp, Homo sapien
tagatagtccacacgcccgatgaat

SEQ ID NO: 4885445 - DNA, 25 bp, Homo sapien
gaccgtgtgaccttaagaaacttgc

SEQ ID NO: 4885446 - DNA, 25 bp, Homo sapien
cagcagcatgggaaccaggtattca

SEQ ID NO: 4885447 - DNA, 25 bp, Homo sapien
tcatactcctgctgaattcgtgccc

SEQ ID NO: 4885448 - DNA, 25 bp, Homo sapien
tgctgaattcgtgccctctgttctg

SEQ ID NO: 4885449 - DNA, 25 bp, Homo sapien
tgccctctgttctgcaagccgtctt

SEQ ID NO: 4885450 - DNA, 25 bp, Homo sapien
tctgttctgcaagccgtctttcttc

SEQ ID NO: 4885451 - DNA, 25 bp, Homo sapien
ttcttcagctaaccgaatatgctct

SEQ ID NO: 4885452 - DNA, 25 bp, Homo sapien
tcagctaaccgaatatgctcttcat

SEQ ID NO: 4885453 - DNA, 25 bp, Homo sapien
ttgtctttcttcagctaaccgaata

SEQ ID NO: 4885454 - DNA, 25 bp, Homo sapien
gctaaccgaatatgctcttcatttt

SEQ ID NO: 4885455 - DNA, 25 bp, Homo sapien
tcttccccaatcaaattgtctcttt

SEQ ID NO: 4885456 - DNA, 25 bp, Homo sapien
ttccccaatcaaattgtctctttca

SEQ ID NO: 4885457 - DNA, 25 bp, Homo sapien
cttccccaatcaaattgtctctttc

SEQ ID NO: 4885458 - DNA, 25 bp, Homo sapien
gtttcttccccaatcaaattgtctc

SEQ ID NO: 4885459 - DNA, 25 bp, Homo sapien
tgcttgcaattttgttctgaagagc

SEQ ID NO: 4885460 - DNA, 25 bp, Homo sapien
gaacgtatgatgctgtcaactgaag

SEQ ID NO: 4885461 - DNA, 25 bp, Homo sapien
ttctgaagagcaggaactataggag

SEQ ID NO: 4885462 - DNA, 25 bp, Homo sapien
ctgaaggaggtctttggagtttgct

SEQ ID NO: 4885463 - DNA, 25 bp, Homo sapien
attcttcaagcatcaccttgaggat

SEQ ID NO: 4885464 - DNA, 25 bp, Homo sapien
tcttcaagcatcaccttgaggatca

SEQ ID NO: 4885465 - DNA, 25 bp, Homo sapien
ttcttcaagcatcaccttgaggatc

SEQ ID NO: 4885466 - DNA, 25 bp, Homo sapien
tcctcttcaaggcaaattcctgcat

SEQ ID NO: 4885467 - DNA, 25 bp, Homo sapien
ctcctcttcaaggcaaattcctgca

SEQ ID NO: 4885468 - DNA, 25 bp, Homo sapien
cctcctcttcaaggcaaattcctgc

SEQ ID NO: 4885469 - DNA, 25 bp, Homo sapien
gctctccacgactttccacaagctg

SEQ ID NO: 4885470 - DNA, 25 bp, Homo sapien
tctccacgactttccacaagctgat

SEQ ID NO: 4885471 - DNA, 25 bp, Homo sapien
ttgctctccacgactttccacaagc

SEQ ID NO: 4885472 - DNA, 25 bp, Homo sapien
tccacgactttccacaagctgataa

SEQ ID NO: 4885473 - DNA, 25 bp, Homo sapien
actgtgccctggacatggaactttc

SEQ ID NO: 4885474 - DNA, 25 bp, Homo sapien
cctctcttcactacgaagctgtttt

SEQ ID NO: 4885475 - DNA, 25 bp, Homo sapien
gcctctcttcactacgaagctgttt

SEQ ID NO: 4885476 - DNA, 25 bp, Homo sapien
ctctcttcactacgaagctgttttc

SEQ ID NO: 4885477 - DNA, 25 bp, Homo sapien
catgtgtagcaatcgctcttgtaga

SEQ ID NO: 4885478 - DNA, 25 bp, Homo sapien
atcatcactgtccatgtgtagcaat

SEQ ID NO: 4885479 - DNA, 25 bp, Homo sapien
atgtgtagcaatcgctcttgtagac

SEQ ID NO: 4885480 - DNA, 25 bp, Homo sapien
ccatgtgtagcaatcgctcttgtag

SEQ ID NO: 4885481 - DNA, 25 bp, Homo sapien
tcaccttgtttaccttgtttcaata

SEQ ID NO: 4885482 - DNA, 25 bp, Homo sapien
caccttgtttaccttgtttcaatat

SEQ ID NO: 4885483 - DNA, 25 bp, Homo sapien
ctcaccttgtttaccttgtttcaat

SEQ ID NO: 4885484 - DNA, 25 bp, Homo sapien
tcctcaccttgtttaccttgtttca

SEQ ID NO: 4885485 - DNA, 25 bp, Homo sapien
tagccatatcaaatatatccatggg

SEQ ID NO: 4885486 - DNA, 25 bp, Homo sapien
caggagcttgcaaccgatgtctagc

SEQ ID NO: 4885487 - DNA, 25 bp, Homo sapien
tgaaaagtggcagcgtctaagccct

SEQ ID NO: 4885488 - DNA, 25 bp, Homo sapien
gactgtcttctgacaggagcttgca

SEQ ID NO: 4885489 - DNA, 25 bp, Homo sapien
gtactagtctatgcgatctcatcca

SEQ ID NO: 4885490 - DNA, 25 bp, Homo sapien
caggtttcaggatcctacattctcc

SEQ ID NO: 4885491 - DNA, 25 bp, Homo sapien
tacatgatcctgtctccttgatact

SEQ ID NO: 4885492 - DNA, 25 bp, Homo sapien
gccaagttccattcttcgtactagt

SEQ ID NO: 4885493 - DNA, 25 bp, Homo sapien
cagttttctggcctacgtcatacga

SEQ ID NO: 4885494 - DNA, 25 bp, Homo sapien
tccaaagttaatcggcaatcattcc

SEQ ID NO: 4885495 - DNA, 25 bp, Homo sapien
cattccacttaaaaagctctagctg

SEQ ID NO: 4885496 - DNA, 25 bp, Homo sapien
gctctgctgaatatgcctaaaggaa

SEQ ID NO: 4885497 - DNA, 25 bp, Homo sapien
taaggtgtgatgatctcttggagga

SEQ ID NO: 4885498 - DNA, 25 bp, Homo sapien
tgctctcttagcagggcttgctgct

SEQ ID NO: 4885499 - DNA, 25 bp, Homo sapien
ggaggatccaggtacataaatttca

SEQ ID NO: 4885500 - DNA, 25 bp, Homo sapien
ataaatttcagatcaactcgtgttt

SEQ ID NO: 4885501 - DNA, 25 bp, Homo sapien
tgtgggagatagataccttcagtgc

SEQ ID NO: 4885502 - DNA, 25 bp, Homo sapien
ttcatagtgtctactggaagttggg

SEQ ID NO: 4885503 - DNA, 25 bp, Homo sapien
taaaatgtacctgtatccacatggg

SEQ ID NO: 4885504 - DNA, 25 bp, Homo sapien
cacgcctggccagtgaggtcatatt

SEQ ID NO: 4885505 - DNA, 25 bp, Homo sapien
tgctctcgtactttagcacttggga

SEQ ID NO: 4885506 - DNA, 25 bp, Homo sapien
tttagcacttgggatggcatctaag

SEQ ID NO: 4885507 - DNA, 25 bp, Homo sapien
cattctttgctctcgtactttagca

SEQ ID NO: 4885508 - DNA, 25 bp, Homo sapien
tcgtactttagcacttgggatggca

SEQ ID NO: 4885509 - DNA, 25 bp, Homo sapien
tagaggtaggactgactacattcca

SEQ ID NO: 4885510 - DNA, 25 bp, Homo sapien
gaagacggtgatagcaacagaagac

SEQ ID NO: 4885511 - DNA, 25 bp, Homo sapien
caggctacagattctacaagctaac

SEQ ID NO: 4885512 - DNA, 25 bp, Homo sapien
acaagctaacacatttactccctag

SEQ ID NO: 4885513 - DNA, 25 bp, Homo sapien
cactatcagattccaataatgagtt

SEQ ID NO: 4885514 - DNA, 25 bp, Homo sapien
gcactatcagattccaataatgagt

SEQ ID NO: 4885515 - DNA, 25 bp, Homo sapien
agcactatcagattccaataatgag

SEQ ID NO: 4885516 - DNA, 25 bp, Homo sapien
taatatttaaacaatatagccttaa

SEQ ID NO: 4885517 - DNA, 25 bp, Homo sapien
tacagtactggtttttaagtgtgga

SEQ ID NO: 4885518 - DNA, 25 bp, Homo sapien
tgtacaacaaggaatacagtactgg

SEQ ID NO: 4885519 - DNA, 25 bp, Homo sapien
caacaaggaatacagtactggtttt

SEQ ID NO: 4885520 - DNA, 25 bp, Homo sapien
agtgcaaaggacctacagaactagg

SEQ ID NO: 4885521 - DNA, 25 bp, Homo sapien
tgctttaagtgcaaaggacctacag

SEQ ID NO: 4885522 - DNA, 25 bp, Homo sapien
tttaagtgcaaaggacctacagaac

SEQ ID NO: 4885523 - DNA, 25 bp, Homo sapien
taagtgcaaaggacctacagaacta

SEQ ID NO: 4885524 - DNA, 25 bp, Homo sapien
tgtctagtcctttccatttgttcct

SEQ ID NO: 4885525 - DNA, 25 bp, Homo sapien
acgtcatcttcaatggcaggatatg

SEQ ID NO: 4885526 - DNA, 25 bp, Homo sapien
gctcccgtgcagagggcaactgtga

SEQ ID NO: 4885527 - DNA, 25 bp, Homo sapien
gcaggatatgtctcaccgtaagccc

SEQ ID NO: 4885528 - DNA, 25 bp, Homo sapien
acagaacttcagaaagtcattaaca

SEQ ID NO: 4885529 - DNA, 25 bp, Homo sapien
cttcagaaagtcattaacacaaaat

SEQ ID NO: 4885530 - DNA, 25 bp, Homo sapien
agtcattaacacaaaatatgttcac

SEQ ID NO: 4885531 - DNA, 25 bp, Homo sapien
ctgtagttagaaaacagaacttcag

SEQ ID NO: 4885532 - DNA, 25 bp, Homo sapien
tcagtcttcgcattcgttcctcatt

SEQ ID NO: 4885533 - DNA, 25 bp, Homo sapien
tacactggatatagattttagagag

SEQ ID NO: 4885534 - DNA, 25 bp, Homo sapien
tctggtgctacattaggacgactgc

SEQ ID NO: 4885535 - DNA, 25 bp, Homo sapien
tcatttctcactctaagctcatcaa

SEQ ID NO: 4885536 - DNA, 25 bp, Homo sapien
ttccatctatccctcagacgttagt

SEQ ID NO: 4885537 - DNA, 25 bp, Homo sapien
taggccattacacttggtcatttac

SEQ ID NO: 4885538 - DNA, 25 bp, Homo sapien
tagtgaaagccttgagtaagaaagt

SEQ ID NO: 4885539 - DNA, 25 bp, Homo sapien
ctactataggccattacacttggtc

SEQ ID NO: 4885540 - DNA, 25 bp, Homo sapien
gaggagacgactagctttatttgac

SEQ ID NO: 4885541 - DNA, 25 bp, Homo sapien
tgaaagtgtcccattatcccggtga

SEQ ID NO: 4885542 - DNA, 25 bp, Homo sapien
tgccttatagctggaaagacatcct

SEQ ID NO: 4885543 - DNA, 25 bp, Homo sapien
caaggccgtgtccagtcaatgaaga

SEQ ID NO: 4885544 - DNA, 25 bp, Homo sapien
cagttgctacagagtttgatccgtc

SEQ ID NO: 4885545 - DNA, 25 bp, Homo sapien
ttaaccatgtgcagtcgacaggccc

SEQ ID NO: 4885546 - DNA, 25 bp, Homo sapien
tgtcatcagggtcaaccagtgaact

SEQ ID NO: 4885547 - DNA, 25 bp, Homo sapien
gccctgccaagtgaaagtgcctggt

SEQ ID NO: 4885548 - DNA, 25 bp, Homo sapien
cattcctttcaccttaaaaggcact

SEQ ID NO: 4885549 - DNA, 25 bp, Homo sapien
aaagtaggacatattaaaggtacag

SEQ ID NO: 4885550 - DNA, 25 bp, Homo sapien
tattaaaggtacagatttaccattc

SEQ ID NO: 4885551 - DNA, 25 bp, Homo sapien
cactactgggtccagtacaggttta

SEQ ID NO: 4885552 - DNA, 25 bp, Homo sapien
tgattgcatcacacagaaactggaa

SEQ ID NO: 4885553 - DNA, 25 bp, Homo sapien
tgcacatatagtagttcaatccagt

SEQ ID NO: 4885554 - DNA, 25 bp, Homo sapien
gaattcttttgcatcgaggtaacaa

SEQ ID NO: 4885555 - DNA, 25 bp, Homo sapien
catttctgctgtatcagtagctaca

SEQ ID NO: 4885556 - DNA, 25 bp, Homo sapien
gaaagctccatagtagttaaaaaga

SEQ ID NO: 4885557 - DNA, 25 bp, Homo sapien
gtggaagaagaagactccagtctct

SEQ ID NO: 4885558 - DNA, 25 bp, Homo sapien
gactcacttatccaaggttccatgg

SEQ ID NO: 4885559 - DNA, 25 bp, Homo sapien
taccaaccgttaattacatcagagg

SEQ ID NO: 4885560 - DNA, 25 bp, Homo sapien
aaatagaatgatcctttatggacca

SEQ ID NO: 4885561 - DNA, 25 bp, Homo sapien
ctgcaaaatgaatccagattgctgt

SEQ ID NO: 4885562 - DNA, 25 bp, Homo sapien
ctcttaggacttttaaagatgagcc

SEQ ID NO: 4885563 - DNA, 25 bp, Homo sapien
ccaaaacttgaatcactgcaaaatg

SEQ ID NO: 4885564 - DNA, 25 bp, Homo sapien
aaaggaggctgcagactagagttca

SEQ ID NO: 4885565 - DNA, 25 bp, Homo sapien
caattgaactgtacatgtgaaacgt

SEQ ID NO: 4885566 - DNA, 25 bp, Homo sapien
gaaacgtatgtagctttgcctgaag

SEQ ID NO: 4885567 - DNA, 25 bp, Homo sapien
ctagtttgtactcacttgcctgctg

SEQ ID NO: 4885568 - DNA, 25 bp, Homo sapien
aggcttgtgccacgacgtctgtcca

SEQ ID NO: 4885569 - DNA, 25 bp, Homo sapien
ttgtgccacgacgtctgtccaggag

SEQ ID NO: 4885570 - DNA, 25 bp, Homo sapien
gtgccacgacgtctgtccaggagca

SEQ ID NO: 4885571 - DNA, 25 bp, Homo sapien
acaggcttgtgccacgacgtctgtc

SEQ ID NO: 4885572 - DNA, 25 bp, Homo sapien
tagatagtgatcagaagcatgccat

SEQ ID NO: 4885573 - DNA, 25 bp, Homo sapien
gcattttggtgtgttccgcatttga

SEQ ID NO: 4885574 - DNA, 25 bp, Homo sapien
gcatgccatagtatattgattggga

SEQ ID NO: 4885575 - DNA, 25 bp, Homo sapien
ccttggtctgttgggcttaagagat

SEQ ID NO: 4885576 - DNA, 25 bp, Homo sapien
gaatagtgttaatgatggcaaggat

SEQ ID NO: 4885577 - DNA, 25 bp, Homo sapien
cctttacagcatttataccttattt

SEQ ID NO: 4885578 - DNA, 25 bp, Homo sapien
ttacattggctagaagctccagaaa

SEQ ID NO: 4885579 - DNA, 25 bp, Homo sapien
gaaaatgttgaatagtgttaatgat

SEQ ID NO: 4885580 - DNA, 25 bp, Homo sapien
cacaatcatgggtcattgcctgcct

SEQ ID NO: 4885581 - DNA, 25 bp, Homo sapien
tcaaggagttgaaactgcagcacca

SEQ ID NO: 4885582 - DNA, 25 bp, Homo sapien
tgtagaacggtagctcaagacagca

SEQ ID NO: 4885583 - DNA, 25 bp, Homo sapien
gacagcattttgaatcccagggcat

SEQ ID NO: 4885584 - DNA, 25 bp, Homo sapien
gtagtggagtctagtggttatagct

SEQ ID NO: 4885585 - DNA, 25 bp, Homo sapien
gctggattgtagtggagtctagtgg

SEQ ID NO: 4885586 - DNA, 25 bp, Homo sapien
gattgtagtggagtctagtggttat

SEQ ID NO: 4885587 - DNA, 25 bp, Homo sapien
ttgtagtggagtctagtggttatag

SEQ ID NO: 4885588 - DNA, 25 bp, Homo sapien
aaccagattcttaattatacaacag

SEQ ID NO: 4885589 - DNA, 25 bp, Homo sapien
agggacaaagaccaaccagattctt

SEQ ID NO: 4885590 - DNA, 25 bp, Homo sapien
tcttaattatacaacagttcaggct

SEQ ID NO: 4885591 - DNA, 25 bp, Homo sapien
ttatacaacagttcaggctgaggat

SEQ ID NO: 4885592 - DNA, 25 bp, Homo sapien
taatcatctatagttctgtgggtct

SEQ ID NO: 4885593 - DNA, 25 bp, Homo sapien
cattgcctttcctaacaaatgttag

SEQ ID NO: 4885594 - DNA, 25 bp, Homo sapien
aaatcctgctagaattttgattggc

SEQ ID NO: 4885595 - DNA, 25 bp, Homo sapien
gggtctgtgtctggactctattcca

SEQ ID NO: 4885596 - DNA, 25 bp, Homo sapien
cacaggtttggggaaagtagtagat

SEQ ID NO: 4885597 - DNA, 25 bp, Homo sapien
cagaggactgtttgctgactagctt

SEQ ID NO: 4885598 - DNA, 25 bp, Homo sapien
tagtagatgtgttaatagtgtggga

SEQ ID NO: 4885599 - DNA, 25 bp, Homo sapien
gcagtagaaatatcgagatcagagg

SEQ ID NO: 4885600 - DNA, 25 bp, Homo sapien
cagatggaagagatctagtgtaatg

SEQ ID NO: 4885601 - DNA, 25 bp, Homo sapien
cagctgctctcaagcttgaattgtg

SEQ ID NO: 4885602 - DNA, 25 bp, Homo sapien
gaattgtgatttatagttcagatgg

SEQ ID NO: 4885603 - DNA, 25 bp, Homo sapien
tctagtgtaatgaagcccgcagcag

SEQ ID NO: 4885604 - DNA, 25 bp, Homo sapien
tcgacttgagagtgagaggattttg

SEQ ID NO: 4885605 - DNA, 25 bp, Homo sapien
gaaaggttccgtatcataattaaca

SEQ ID NO: 4885606 - DNA, 25 bp, Homo sapien
tgaggtgcggactggataccaccct

SEQ ID NO: 4885607 - DNA, 25 bp, Homo sapien
ggtttgcaagaggtgcagcccgttc

SEQ ID NO: 4885608 - DNA, 25 bp, Homo sapien
gcggccctcgaggtacggcttcttg

SEQ ID NO: 4885609 - DNA, 25 bp, Homo sapien
gaagaacatgttcctgacccgggct

SEQ ID NO: 4885610 - DNA, 25 bp, Homo sapien
gatattggccgacaaggaagtgaag

SEQ ID NO: 4885611 - DNA, 25 bp, Homo sapien
ccttctctgcgtccatgtatgaggg

SEQ ID NO: 4885612 - DNA, 25 bp, Homo sapien
cgatgcgggtgttgctgtgacccct

SEQ ID NO: 4885613 - DNA, 25 bp, Homo sapien
caggagtcctgttcactcggcagga

SEQ ID NO: 4885614 - DNA, 25 bp, Homo sapien
aattttagagtcgagtgatgcaggc

SEQ ID NO: 4885615 - DNA, 25 bp, Homo sapien
tgtgacccctggaatgcaaaggact

SEQ ID NO: 4885616 - DNA, 25 bp, Homo sapien
ctgaggtagtcggagagcagagtcc

SEQ ID NO: 4885617 - DNA, 25 bp, Homo sapien
tccctgaggtagtcggagagcagag

SEQ ID NO: 4885618 - DNA, 25 bp, Homo sapien
ccctgaggtagtcggagagcagagt

SEQ ID NO: 4885619 - DNA, 25 bp, Homo sapien
tgaggtagtcggagagcagagtcct

SEQ ID NO: 4885620 - DNA, 25 bp, Homo sapien
gaagggacctgaaatctagagttga

SEQ ID NO: 4885621 - DNA, 25 bp, Homo sapien
gacctgaaatctagagttgaccgat

SEQ ID NO: 4885622 - DNA, 25 bp, Homo sapien
ccgatttatccgacagagagagaaa

SEQ ID NO: 4885623 - DNA, 25 bp, Homo sapien
ctagagttgaccgatttatccgaca

SEQ ID NO: 4885624 - DNA, 25 bp, Homo sapien
tggatggttacgttaggacaagcct

SEQ ID NO: 4885625 - DNA, 25 bp, Homo sapien
cgtggagccacagaagcttagaact

SEQ ID NO: 4885626 - DNA, 25 bp, Homo sapien
aactggtttacatgtcctggactaa

SEQ ID NO: 4885627 - DNA, 25 bp, Homo sapien
taaacattagggaacctgtgtgcgt

SEQ ID NO: 4885628 - DNA, 25 bp, Homo sapien
ctggcctcatacaataagctgaaaa

SEQ ID NO: 4885629 - DNA, 25 bp, Homo sapien
tgttcaggaaggatatgaatctgta

SEQ ID NO: 4885630 - DNA, 25 bp, Homo sapien
tatgaatctgtagttctgtcctgtt

SEQ ID NO: 4885631 - DNA, 25 bp, Homo sapien
tagctgtttactgtgttactataca

SEQ ID NO: 4885632 - DNA, 25 bp, Homo sapien
ttgtcttagcctctgtgagatgcat

SEQ ID NO: 4885633 - DNA, 25 bp, Homo sapien
cttgtcttagcctctgtgagatgca

SEQ ID NO: 4885634 - DNA, 25 bp, Homo sapien
gggattggtggaagaggtggtggtg

SEQ ID NO: 4885635 - DNA, 25 bp, Homo sapien
tgtggggattggtggaagaggtggt

SEQ ID NO: 4885636 - DNA, 25 bp, Homo sapien
ctgtggggattggtggaagaggtgg

SEQ ID NO: 4885637 - DNA, 25 bp, Homo sapien
tggggattggtggaagaggtggtgg

SEQ ID NO: 4885638 - DNA, 25 bp, Homo sapien
ctgctggtccagattgaagaggcgg

SEQ ID NO: 4885639 - DNA, 25 bp, Homo sapien
gtgcaagcttgctctgccatgctgg

SEQ ID NO: 4885640 - DNA, 25 bp, Homo sapien
tgaggggggtgatgtcggacagagt

SEQ ID NO: 4885641 - DNA, 25 bp, Homo sapien
gctgctggtccagattgaagaggcg

SEQ ID NO: 4885642 - DNA, 25 bp, Homo sapien
aaacatcaatgagtttttgcctctg

SEQ ID NO: 4885643 - DNA, 25 bp, Homo sapien
tggccttaactgctgcccatccttt

SEQ ID NO: 4885644 - DNA, 25 bp, Homo sapien
tatatttgggagcaaatgacacatt

SEQ ID NO: 4885645 - DNA, 25 bp, Homo sapien
atcctttcgccagtttaaaatgttg

SEQ ID NO: 4885646 - DNA, 25 bp, Homo sapien
accacagtgccttctactttaaagt

SEQ ID NO: 4885647 - DNA, 25 bp, Homo sapien
gccttctactttaaagttccatgtg

SEQ ID NO: 4885648 - DNA, 25 bp, Homo sapien
taaagttccatgtgccagctatttc

SEQ ID NO: 4885649 - DNA, 25 bp, Homo sapien
tactttaaagttccatgtgccagct

SEQ ID NO: 4885650 - DNA, 25 bp, Homo sapien
ggaccctggctaaatggaggaggct

SEQ ID NO: 4885651 - DNA, 25 bp, Homo sapien
aaatggaccctggctaaatggagga

SEQ ID NO: 4885652 - DNA, 25 bp, Homo sapien
ttatgggagggactgagttactgct

SEQ ID NO: 4885653 - DNA, 25 bp, Homo sapien
gaggaggctgatccagcctctccat

SEQ ID NO: 4885654 - DNA, 25 bp, Homo sapien
gcggtgacttctagctaacttctaa

SEQ ID NO: 4885655 - DNA, 25 bp, Homo sapien
agtgttgttatatccctcagcagag

SEQ ID NO: 4885656 - DNA, 25 bp, Homo sapien
taattgcctatggataaaagtgttg

SEQ ID NO: 4885657 - DNA, 25 bp, Homo sapien
cagagctacatgctgatggtgggtc

SEQ ID NO: 4885658 - DNA, 25 bp, Homo sapien
aactccacaattgtaaaatcagaat

SEQ ID NO: 4885659 - DNA, 25 bp, Homo sapien
ggctttccgtataggcatacccttc

SEQ ID NO: 4885660 - DNA, 25 bp, Homo sapien
aaatcagaatggtacacagtttctg

SEQ ID NO: 4885661 - DNA, 25 bp, Homo sapien
tctgtcacatacttggtggctttcc

SEQ ID NO: 4885662 - DNA, 25 bp, Homo sapien
attcaagactctttttgggccacca

SEQ ID NO: 4885663 - DNA, 25 bp, Homo sapien
cagcaaaaattcaagactctttttg

SEQ ID NO: 4885664 - DNA, 25 bp, Homo sapien
ttcaagactctttttgggccaccaa

SEQ ID NO: 4885665 - DNA, 25 bp, Homo sapien
gtgcagcaaaaattcaagactcttt

SEQ ID NO: 4885666 - DNA, 25 bp, Homo sapien
ctctgtaagtccgatggcacatctt

SEQ ID NO: 4885667 - DNA, 25 bp, Homo sapien
agagaatctacatcggataaaacct

SEQ ID NO: 4885668 - DNA, 25 bp, Homo sapien
catcggataaaaccttaagttcagc

SEQ ID NO: 4885669 - DNA, 25 bp, Homo sapien
tgtaagtccgatggcacatcttagg

SEQ ID NO: 4885670 - DNA, 25 bp, Homo sapien
ttcctattctggcagtgtgccacac

SEQ ID NO: 4885671 - DNA, 25 bp, Homo sapien
tttcctattctggcagtgtgccaca

SEQ ID NO: 4885672 - DNA, 25 bp, Homo sapien
tcctattctggcagtgtgccacaca

SEQ ID NO: 4885673 - DNA, 25 bp, Homo sapien
cctattctggcagtgtgccacacag

SEQ ID NO: 4885674 - DNA, 25 bp, Homo sapien
ctataaataggaaaggggatgtcat

SEQ ID NO: 4885675 - DNA, 25 bp, Homo sapien
gatgtgcaaggtacatctcatcctt

SEQ ID NO: 4885676 - DNA, 25 bp, Homo sapien
ctcatccttgtttgcagtcgttttg

SEQ ID NO: 4885677 - DNA, 25 bp, Homo sapien
cactgaaggccaggcatgtgatcat

SEQ ID NO: 4885678 - DNA, 25 bp, Homo sapien
tcagagacatgcagtctacctgtcc

SEQ ID NO: 4885679 - DNA, 25 bp, Homo sapien
aactaacccttctagcatgctgtca

SEQ ID NO: 4885680 - DNA, 25 bp, Homo sapien
gcctgccattccaggtaggtctcaa

SEQ ID NO: 4885681 - DNA, 25 bp, Homo sapien
ctcaaactctggatttgtttccact

SEQ ID NO: 4885682 - DNA, 25 bp, Homo sapien
tggatttgtttccactcttccttct

SEQ ID NO: 4885683 - DNA, 25 bp, Homo sapien
ccaagttgctgctgcggaaatggca

SEQ ID NO: 4885684 - DNA, 25 bp, Homo sapien
accagcagtgtccctcagtgcttgt

SEQ ID NO: 4885685 - DNA, 25 bp, Homo sapien
ttgctgctgcggaaatggcagtgtt

SEQ ID NO: 4885686 - DNA, 25 bp, Homo sapien
tgatggcaaaaatggcggccaagtt

SEQ ID NO: 4885687 - DNA, 25 bp, Homo sapien
tctagttttgctggccttaatctgt

SEQ ID NO: 4885688 - DNA, 25 bp, Homo sapien
gcttctgtcttactagaccagttct

SEQ ID NO: 4885689 - DNA, 25 bp, Homo sapien
ttagtgtaccagtgtctctcccttt

SEQ ID NO: 4885690 - DNA, 25 bp, Homo sapien
catcccttcccttaaagagaattct

SEQ ID NO: 4885691 - DNA, 25 bp, Homo sapien
cttgtgacaacaaaacagtagtcaa

SEQ ID NO: 4885692 - DNA, 25 bp, Homo sapien
tgtctttccatcaaatgtcatcact

SEQ ID NO: 4885693 - DNA, 25 bp, Homo sapien
ggagcgtgctgccatagtctctgct

SEQ ID NO: 4885694 - DNA, 25 bp, Homo sapien
gcaggtatccactaatgtctttcca

SEQ ID NO: 4885695 - DNA, 25 bp, Homo sapien
tttcccctctggttgggagcgtgct

SEQ ID NO: 4885696 - DNA, 25 bp, Homo sapien
ctgctcccgacaggctgaggaaggg

SEQ ID NO: 4885697 - DNA, 25 bp, Homo sapien
gaggactggaggtccgcctgctgct

SEQ ID NO: 4885698 - DNA, 25 bp, Homo sapien
acttgtgttgttgccaagcgaggga

SEQ ID NO: 4885699 - DNA, 25 bp, Homo sapien
gctgctgcggccatgagacttgtgt

SEQ ID NO: 4885700 - DNA, 25 bp, Homo sapien
ctcctaggtgggcttgcagactgtc

SEQ ID NO: 4885701 - DNA, 25 bp, Homo sapien
taggtgggcttgcagactgtccttc

SEQ ID NO: 4885702 - DNA, 25 bp, Homo sapien
cacaaagcggacagtacagaaaggg

SEQ ID NO: 4885703 - DNA, 25 bp, Homo sapien
tctgagcctcacaaagcggacagta

SEQ ID NO: 4885704 - DNA, 25 bp, Homo sapien
tacaagctcagcttgtgcccctgcg

SEQ ID NO: 4885705 - DNA, 25 bp, Homo sapien
cataaaagatttccccgcagggaca

SEQ ID NO: 4885706 - DNA, 25 bp, Homo sapien
ttagtcagcttagtggctcccctgg

SEQ ID NO: 4885707 - DNA, 25 bp, Homo sapien
ccccagagagggaccaaagttggtg

SEQ ID NO: 4885708 - DNA, 25 bp, Homo sapien
cgccttgcctctcgcctctctcctg

SEQ ID NO: 4885709 - DNA, 25 bp, Homo sapien
aagagactgacaaggccggagcctg

SEQ ID NO: 4885710 - DNA, 25 bp, Homo sapien
tgaaggtgagaattgcccactctac

SEQ ID NO: 4885711 - DNA, 25 bp, Homo sapien
tctcctgactgtccactcagcctct

SEQ ID NO: 4885712 - DNA, 25 bp, Homo sapien
atttgatccccaatgcataacatag

SEQ ID NO: 4885713 - DNA, 25 bp, Homo sapien
tttgatccccaatgcataacatagc

SEQ ID NO: 4885714 - DNA, 25 bp, Homo sapien
ctttatgttcctcaactcagggtct

SEQ ID NO: 4885715 - DNA, 25 bp, Homo sapien
ttatgttcctcaactcagggtctgt

SEQ ID NO: 4885716 - DNA, 25 bp, Homo sapien
tattagcctacaaacaagagacaca

SEQ ID NO: 4885717 - DNA, 25 bp, Homo sapien
cttgtagaccaagcttcccaaaaca

SEQ ID NO: 4885718 - DNA, 25 bp, Homo sapien
gaagtcccatctactattcaaggcc

SEQ ID NO: 4885719 - DNA, 25 bp, Homo sapien
tcctctaagcacatataacatctgg

SEQ ID NO: 4885720 - DNA, 25 bp, Homo sapien
gaaggagttccacaaaatatcattg

SEQ ID NO: 4885721 - DNA, 25 bp, Homo sapien
taattcccaacaataggcaggcagg

SEQ ID NO: 4885722 - DNA, 25 bp, Homo sapien
taaaagcactcagatgtaaggatac

SEQ ID NO: 4885723 - DNA, 25 bp, Homo sapien
tcaggtcagtagtcatgtccccact

SEQ ID NO: 4885724 - DNA, 25 bp, Homo sapien
atttggcagctagtaggaggtcaga

SEQ ID NO: 4885725 - DNA, 25 bp, Homo sapien
cagctagtaggaggtcagaatccgg

SEQ ID NO: 4885726 - DNA, 25 bp, Homo sapien
ggaggtcagaatccggtgaaaaaca

SEQ ID NO: 4885727 - DNA, 25 bp, Homo sapien
aacatgagtccagttgtgagcagtg

SEQ ID NO: 4885728 - DNA, 25 bp, Homo sapien
ggaagaaagatggaagttgcttttc

SEQ ID NO: 4885729 - DNA, 25 bp, Homo sapien
catggaagaaagatggaagttgctt

SEQ ID NO: 4885730 - DNA, 25 bp, Homo sapien
ctcggcttttaaagcatggaagaaa

SEQ ID NO: 4885731 - DNA, 25 bp, Homo sapien
tcggcttttaaagcatggaagaaag

SEQ ID NO: 4885732 - DNA, 25 bp, Homo sapien
gattctccggaacttaccaatgcca

SEQ ID NO: 4885733 - DNA, 25 bp, Homo sapien
gaacttaccaatgccagacaactta

SEQ ID NO: 4885734 - DNA, 25 bp, Homo sapien
ctgcacttgattctccggaacttac

SEQ ID NO: 4885735 - DNA, 25 bp, Homo sapien
tccggaacttaccaatgccagacaa

SEQ ID NO: 4885736 - DNA, 25 bp, Homo sapien
tctggcttcaaggtaagctcaggga

SEQ ID NO: 4885737 - DNA, 25 bp, Homo sapien
tagacaagctctgatccaggtaact

SEQ ID NO: 4885738 - DNA, 25 bp, Homo sapien
tgtgtccagctatccggagctctcg

SEQ ID NO: 4885739 - DNA, 25 bp, Homo sapien
tttacagaggcttgatcatgtgggc

SEQ ID NO: 4885740 - DNA, 25 bp, Homo sapien
ccttagctgtaacaggcttcgttct

SEQ ID NO: 4885741 - DNA, 25 bp, Homo sapien
tgtggttatttttaggtcctctgca

SEQ ID NO: 4885742 - DNA, 25 bp, Homo sapien
tgatattcctgtcccgtccagttga

SEQ ID NO: 4885743 - DNA, 25 bp, Homo sapien
ttcgttctgccagtgtgtcctgcat

SEQ ID NO: 4885744 - DNA, 25 bp, Homo sapien
acccattttggtgccgcagtgttta

SEQ ID NO: 4885745 - DNA, 25 bp, Homo sapien
tgcacccattttggtgccgcagtgt

SEQ ID NO: 4885746 - DNA, 25 bp, Homo sapien
gatgcacccattttggtgccgcagt

SEQ ID NO: 4885747 - DNA, 25 bp, Homo sapien
ctttgtgttgagatgcacccatttt

SEQ ID NO: 4885748 - DNA, 25 bp, Homo sapien
tagtagtatattcttcctggtgaca

SEQ ID NO: 4885749 - DNA, 25 bp, Homo sapien
tataagagccatgcaaagtgaagac

SEQ ID NO: 4885750 - DNA, 25 bp, Homo sapien
gaatcactgttgttaggctatctct

SEQ ID NO: 4885751 - DNA, 25 bp, Homo sapien
ggctatctctgtgtgaaatgtgaaa

SEQ ID NO: 4885752 - DNA, 25 bp, Homo sapien
tcagttgtcctttaggccaacagct

SEQ ID NO: 4885753 - DNA, 25 bp, Homo sapien
tttccgagcacatttctgagcacac

SEQ ID NO: 4885754 - DNA, 25 bp, Homo sapien
cttgctgtagggtccatttcatgga

SEQ ID NO: 4885755 - DNA, 25 bp, Homo sapien
tagggtccatttcatggaactttcc

SEQ ID NO: 4885756 - DNA, 25 bp, Homo sapien
atgtgaccagatgggacgaagagcc

SEQ ID NO: 4885757 - DNA, 25 bp, Homo sapien
tggaatgtgaccagatgggacgaag

SEQ ID NO: 4885758 - DNA, 25 bp, Homo sapien
gaatgtgaccagatgggacgaagag

SEQ ID NO: 4885759 - DNA, 25 bp, Homo sapien
gtgaccagatgggacgaagagccat

SEQ ID NO: 4885760 - DNA, 25 bp, Homo sapien
tgtatatcaggttaacaatgccctg

SEQ ID NO: 4885761 - DNA, 25 bp, Homo sapien
tatatcaggttaacaatgccctgtg

SEQ ID NO: 4885762 - DNA, 25 bp, Homo sapien
gtgtatatcaggttaacaatgccct

SEQ ID NO: 4885763 - DNA, 25 bp, Homo sapien
atcaggttaacaatgccctgtgtca

SEQ ID NO: 4885764 - DNA, 25 bp, Homo sapien
tcttccttgctcctatgtgtactaa

SEQ ID NO: 4885765 - DNA, 25 bp, Homo sapien
gctcctatgtgtactaaaggatagg

SEQ ID NO: 4885766 - DNA, 25 bp, Homo sapien
ataggaagtttgagaaggtgtagct

SEQ ID NO: 4885767 - DNA, 25 bp, Homo sapien
gtttgagaaggtgtagctttgtccc

SEQ ID NO: 4885768 - DNA, 25 bp, Homo sapien
cttgttgtgtggtcgttgcctgtgt

SEQ ID NO: 4885769 - DNA, 25 bp, Homo sapien
gaattttgttcctcaagctctggta

SEQ ID NO: 4885770 - DNA, 25 bp, Homo sapien
tggaattttgttcctcaagctctgg

SEQ ID NO: 4885771 - DNA, 25 bp, Homo sapien
tgtgtggtcgttgcctgtgtggaat

SEQ ID NO: 4885772 - DNA, 25 bp, Homo sapien
ctgcttaaaacacagtttggatata

SEQ ID NO: 4885773 - DNA, 25 bp, Homo sapien
tgcttaaaacacagtttggatataa

SEQ ID NO: 4885774 - DNA, 25 bp, Homo sapien
gcttaaaacacagtttggatataac

SEQ ID NO: 4885775 - DNA, 25 bp, Homo sapien
tcttagatttccaaataatgtctct

SEQ ID NO: 4885776 - DNA, 25 bp, Homo sapien
ttgtgatgacagagtattcttagat

SEQ ID NO: 4885777 - DNA, 25 bp, Homo sapien
gatttccaaataatgtctctagtaa

SEQ ID NO: 4885778 - DNA, 25 bp, Homo sapien
caaataatgtctctagtaacccctg

SEQ ID NO: 4885779 - DNA, 25 bp, Homo sapien
aaaccatgtcggtatttgaagctgg

SEQ ID NO: 4885780 - DNA, 25 bp, Homo sapien
taaaaaccatgtcggtatttgaagc

SEQ ID NO: 4885781 - DNA, 25 bp, Homo sapien
aaccatgtcggtatttgaagctggg

SEQ ID NO: 4885782 - DNA, 25 bp, Homo sapien
aaaaccatgtcggtatttgaagctg

SEQ ID NO: 4885783 - DNA, 25 bp, Homo sapien
ttttcacacgtttcatcaagttcct

SEQ ID NO: 4885784 - DNA, 25 bp, Homo sapien
tcaagttcctcacctgtttcatcaa

SEQ ID NO: 4885785 - DNA, 25 bp, Homo sapien
gatacatttgcttgcaacatgacca

SEQ ID NO: 4885786 - DNA, 25 bp, Homo sapien
tcttgtacagttggaagaggctaca

SEQ ID NO: 4885787 - DNA, 25 bp, Homo sapien
tacagctacgaaaagtgacattgag

SEQ ID NO: 4885788 - DNA, 25 bp, Homo sapien
ttttctacagctacgaaaagtgaca

SEQ ID NO: 4885789 - DNA, 25 bp, Homo sapien
tctacagctacgaaaagtgacattg

SEQ ID NO: 4885790 - DNA, 25 bp, Homo sapien
ttctacagctacgaaaagtgacatt

SEQ ID NO: 4885791 - DNA, 25 bp, Homo sapien
cagacagggtggctagtccatcttg

SEQ ID NO: 4885792 - DNA, 25 bp, Homo sapien
gctgccagggatctcgtgccaaatt

SEQ ID NO: 4885793 - DNA, 25 bp, Homo sapien
caggaagaggacaccagatgcagac

SEQ ID NO: 4885794 - DNA, 25 bp, Homo sapien
taacagggacccataaggagcacag

SEQ ID NO: 4885795 - DNA, 25 bp, Homo sapien
aaaatatcctgcttcaccgttaaca

SEQ ID NO: 4885796 - DNA, 25 bp, Homo sapien
aaatatcctgcttcaccgttaacac

SEQ ID NO: 4885797 - DNA, 25 bp, Homo sapien
catgactgacatgaaaaatcttcat

SEQ ID NO: 4885798 - DNA, 25 bp, Homo sapien
gccaacaacctctttcagctcttta

SEQ ID NO: 4885799 - DNA, 25 bp, Homo sapien
caatatgatacataaactcagaccc

SEQ ID NO: 4885800 - DNA, 25 bp, Homo sapien
ctttatcgaatgagaaggcatagga

SEQ ID NO: 4885801 - DNA, 25 bp, Homo sapien
taaactcagaccctaacatgaatga

SEQ ID NO: 4885802 - DNA, 25 bp, Homo sapien
caaaggacgttgtgcaatgtgagtc

SEQ ID NO: 4885803 - DNA, 25 bp, Homo sapien
tttagactacaagcctcacagaagg

SEQ ID NO: 4885804 - DNA, 25 bp, Homo sapien
tagagtgacacatgtacaagctggc

SEQ ID NO: 4885805 - DNA, 25 bp, Homo sapien
gagaattgccttggccccttcatgg

SEQ ID NO: 4885806 - DNA, 25 bp, Homo sapien
aacattaaatgtgagtttgtaatct

SEQ ID NO: 4885807 - DNA, 25 bp, Homo sapien
ctgtccctcgttgccactctttttg

SEQ ID NO: 4885808 - DNA, 25 bp, Homo sapien
tgtccctcgttgccactctttttgt

SEQ ID NO: 4885809 - DNA, 25 bp, Homo sapien
tagtcttgagcttatatacagttac

SEQ ID NO: 4885810 - DNA, 25 bp, Homo sapien
gggcaataagaacctacaacaaaca

SEQ ID NO: 4885811 - DNA, 25 bp, Homo sapien
ctgtccagaagatgtagtagtcttg

SEQ ID NO: 4885812 - DNA, 25 bp, Homo sapien
ggcccagaaaattgattaatccaag

SEQ ID NO: 4885813 - DNA, 25 bp, Homo sapien
gactcagaatagtaatagaacttct

SEQ ID NO: 4885814 - DNA, 25 bp, Homo sapien
ggactttccagtgtatagtttcctc

SEQ ID NO: 4885815 - DNA, 25 bp, Homo sapien
tctggaaccttatttgaagccacat

SEQ ID NO: 4885816 - DNA, 25 bp, Homo sapien
gatggaactagactcagaatagtaa

SEQ ID NO: 4885817 - DNA, 25 bp, Homo sapien
ctgagccatccctcctgcacaggtc

SEQ ID NO: 4885818 - DNA, 25 bp, Homo sapien
taaggttgtagctccagtggtcccg

SEQ ID NO: 4885819 - DNA, 25 bp, Homo sapien
ccctgagggtgcaaacatatatcca

SEQ ID NO: 4885820 - DNA, 25 bp, Homo sapien
cagtacggctagcagttccctgagg

SEQ ID NO: 4885821 - DNA, 25 bp, Homo sapien
tctggtggttctcctgacagtgcca

SEQ ID NO: 4885822 - DNA, 25 bp, Homo sapien
ttagtccctgataaaattctctgtt

SEQ ID NO: 4885823 - DNA, 25 bp, Homo sapien
tagtccctgataaaattctctgtta

SEQ ID NO: 4885824 - DNA, 25 bp, Homo sapien
agtccctgataaaattctctgttac

SEQ ID NO: 4885825 - DNA, 25 bp, Homo sapien
ctgaaattggtgaagtggtgctcag

SEQ ID NO: 4885826 - DNA, 25 bp, Homo sapien
aatataagcttttggcttcaagaag

SEQ ID NO: 4885827 - DNA, 25 bp, Homo sapien
gcttcaagaagcattgagctgctgt

SEQ ID NO: 4885828 - DNA, 25 bp, Homo sapien
tgtacagagctttctgaatataagc

SEQ ID NO: 4885829 - DNA, 25 bp, Homo sapien
aaatgtgtccttccgttgtagggca

SEQ ID NO: 4885830 - DNA, 25 bp, Homo sapien
taaatgtgtccttccgttgtagggc

SEQ ID NO: 4885831 - DNA, 25 bp, Homo sapien
aagtaaatgtgtccttccgttgtag

SEQ ID NO: 4885832 - DNA, 25 bp, Homo sapien
tgtgtccttccgttgtagggcacac

SEQ ID NO: 4885833 - DNA, 25 bp, Homo sapien
gccactctgtcgtttataacactaa

SEQ ID NO: 4885834 - DNA, 25 bp, Homo sapien
tataacactaaccacgtgcggctcg

SEQ ID NO: 4885835 - DNA, 25 bp, Homo sapien
gcggctcggtattacagttgtatgt

SEQ ID NO: 4885836 - DNA, 25 bp, Homo sapien
gttgagagtaagatgctgtatcttc

SEQ ID NO: 4885837 - DNA, 25 bp, Homo sapien
ctcctccagcgcgagttcccaggtc

SEQ ID NO: 4885838 - DNA, 25 bp, Homo sapien
gttcccaggtcccaccaatcagccg

SEQ ID NO: 4885839 - DNA, 25 bp, Homo sapien
aatcagccgtgaccgcgccctcctc

SEQ ID NO: 4885840 - DNA, 25 bp, Homo sapien
aggtcccaccaatcagccgtgaccg

SEQ ID NO: 4885841 - DNA, 25 bp, Homo sapien
ggtaagttatgctattcgtgggaaa

SEQ ID NO: 4885842 - DNA, 25 bp, Homo sapien
ccaggagagtagcaattatcacatc

SEQ ID NO: 4885843 - DNA, 25 bp, Homo sapien
cttactgacccaataccaggagagt

SEQ ID NO: 4885844 - DNA, 25 bp, Homo sapien
cgtgggaaagtctctcatgtagaca

SEQ ID NO: 4885845 - DNA, 25 bp, Homo sapien
tggtatggatgatgagtccataaag

SEQ ID NO: 4885846 - DNA, 25 bp, Homo sapien
aaggaaccataaacccagctccaca

SEQ ID NO: 4885847 - DNA, 25 bp, Homo sapien
cagcatcactgaggggccagctgat

SEQ ID NO: 4885848 - DNA, 25 bp, Homo sapien
gatgatgagtccataaaggaaccat

SEQ ID NO: 4885849 - DNA, 25 bp, Homo sapien
tgcaagtttagccttccggtgaaca

SEQ ID NO: 4885850 - DNA, 25 bp, Homo sapien
caagtttagccttccggtgaacaag

SEQ ID NO: 4885851 - DNA, 25 bp, Homo sapien
ctttctgcaagtttagccttccggt

SEQ ID NO: 4885852 - DNA, 25 bp, Homo sapien
gcaagtttagccttccggtgaacaa

SEQ ID NO: 4885853 - DNA, 25 bp, Homo sapien
ataggtacccccgtgcacgttctca

SEQ ID NO: 4885854 - DNA, 25 bp, Homo sapien
cccgtgcacgttctcatcatgattg

SEQ ID NO: 4885855 - DNA, 25 bp, Homo sapien
tcggatctgggtgctataggtaccc

SEQ ID NO: 4885856 - DNA, 25 bp, Homo sapien
aactgaagccagctgttcggatctg

SEQ ID NO: 4885857 - DNA, 25 bp, Homo sapien
acagacatcgttgatcactccttca

SEQ ID NO: 4885858 - DNA, 25 bp, Homo sapien
cattgtattccctcgaggaggtata

SEQ ID NO: 4885859 - DNA, 25 bp, Homo sapien
tcttccctggttcatcgttcatcca

SEQ ID NO: 4885860 - DNA, 25 bp, Homo sapien
ctcgaggaggtataaggaagtgcac

SEQ ID NO: 4885861 - DNA, 25 bp, Homo sapien
taaacacaatcaaatgttatacgtt

SEQ ID NO: 4885862 - DNA, 25 bp, Homo sapien
gaatcttggtatcttctagcttctc

SEQ ID NO: 4885863 - DNA, 25 bp, Homo sapien
ctgagaatcttggtatcttctagct

SEQ ID NO: 4885864 - DNA, 25 bp, Homo sapien
tgttatacgttctatttcattctta

SEQ ID NO: 4885865 - DNA, 25 bp, Homo sapien
gaaggccacagaacatctctaggtc

SEQ ID NO: 4885866 - DNA, 25 bp, Homo sapien
gaacatctctaggtccgtagaaaga

SEQ ID NO: 4885867 - DNA, 25 bp, Homo sapien
gccacagaacatctctaggtccgta

SEQ ID NO: 4885868 - DNA, 25 bp, Homo sapien
ctaggtccgtagaaagagtgtaata

SEQ ID NO: 4885869 - DNA, 25 bp, Homo sapien
gcctaacacgtattactgcacagtt

SEQ ID NO: 4885870 - DNA, 25 bp, Homo sapien
ctgtgggcttgtgcctaacacgtat

SEQ ID NO: 4885871 - DNA, 25 bp, Homo sapien
ctgctagtgcattgagaggcctggg

SEQ ID NO: 4885872 - DNA, 25 bp, Homo sapien
gaaccagggcattcaggatttcgga

SEQ ID NO: 4885873 - DNA, 25 bp, Homo sapien
cagggaccccaaagtgagttaagct

SEQ ID NO: 4885874 - DNA, 25 bp, Homo sapien
agaaataaggtttttcagagccctg

SEQ ID NO: 4885875 - DNA, 25 bp, Homo sapien
aaataaggtttttcagagccctgtg

SEQ ID NO: 4885876 - DNA, 25 bp, Homo sapien
ttctccttagttgatgtcttctttt

SEQ ID NO: 4885877 - DNA, 25 bp, Homo sapien
cattctccttagttgatgtcttctt

SEQ ID NO: 4885878 - DNA, 25 bp, Homo sapien
attctccttagttgatgtcttcttt

SEQ ID NO: 4885879 - DNA, 25 bp, Homo sapien
tcatgcattaacttggattcacatt

SEQ ID NO: 4885880 - DNA, 25 bp, Homo sapien
tcaatgggcacatcaaaaccaggag

SEQ ID NO: 4885881 - DNA, 25 bp, Homo sapien
tgggcacatcaaaaccaggaggcag

SEQ ID NO: 4885882 - DNA, 25 bp, Homo sapien
agtcaacatcaatgggcacatcaaa

SEQ ID NO: 4885883 - DNA, 25 bp, Homo sapien
aaggacagctaagtcaacatcaatg

SEQ ID NO: 4885884 - DNA, 25 bp, Homo sapien
gtggaacccacttcccagaccacaa

SEQ ID NO: 4885885 - DNA, 25 bp, Homo sapien
ggtggaacccacttcccagaccaca

SEQ ID NO: 4885886 - DNA, 25 bp, Homo sapien
tggaacccacttcccagaccacaag

SEQ ID NO: 4885887 - DNA, 25 bp, Homo sapien
gagtcctcccctagctcagtgtgcc

SEQ ID NO: 4885888 - DNA, 25 bp, Homo sapien
ggcaatgagatgtgttggttcaggg

SEQ ID NO: 4885889 - DNA, 25 bp, Homo sapien
aatgagatgtgttggttcagggcct

SEQ ID NO: 4885890 - DNA, 25 bp, Homo sapien
agtcctcccctagctcagtgtgcca

SEQ ID NO: 4885891 - DNA, 25 bp, Homo sapien
tggatacccagagcatccctgcttc

SEQ ID NO: 4885892 - DNA, 25 bp, Homo sapien
tgaaataatagatgagtcgctgcta

SEQ ID NO: 4885893 - DNA, 25 bp, Homo sapien
ccggcctggctcttcagcaaagctt

SEQ ID NO: 4885894 - DNA, 25 bp, Homo sapien
tgtttagtaagtcatgccagatcct

SEQ ID NO: 4885895 - DNA, 25 bp, Homo sapien
tctgctgagcagatcttttagagcc

SEQ ID NO: 4885896 - DNA, 25 bp, Homo sapien
tctctgctgagcagatcttttagag

SEQ ID NO: 4885897 - DNA, 25 bp, Homo sapien
attctctgctgagcagatcttttag

SEQ ID NO: 4885898 - DNA, 25 bp, Homo sapien
cttctacattctctgctgagcagat

SEQ ID NO: 4885899 - DNA, 25 bp, Homo sapien
ttcacccatggatctatgttaaggc

SEQ ID NO: 4885900 - DNA, 25 bp, Homo sapien
agcttatcccgcaacttcttgatgg

SEQ ID NO: 4885901 - DNA, 25 bp, Homo sapien
tgatggctctcacaagtcccattgt

SEQ ID NO: 4885902 - DNA, 25 bp, Homo sapien
ttttcccaaaaacgtggcactgagc

SEQ ID NO: 4885903 - DNA, 25 bp, Homo sapien
ttatattctcattccataggagtac

SEQ ID NO: 4885904 - DNA, 25 bp, Homo sapien
aaacctttgtgcgtgtggtcaccat

SEQ ID NO: 4885905 - DNA, 25 bp, Homo sapien
caccattatattctcattccatagg

SEQ ID NO: 4885906 - DNA, 25 bp, Homo sapien
caggttgcaaacctttgtgcgtgtg

SEQ ID NO: 4885907 - DNA, 25 bp, Homo sapien
ttcaccagaaccctccttgtcccac

SEQ ID NO: 4885908 - DNA, 25 bp, Homo sapien
accagaaccctccttgtcccactca

SEQ ID NO: 4885909 - DNA, 25 bp, Homo sapien
cagagccgtactatgaagttttcac

SEQ ID NO: 4885910 - DNA, 25 bp, Homo sapien
tcagagccgtactatgaagttttca

SEQ ID NO: 4885911 - DNA, 25 bp, Homo sapien
tcaccaatttttcagcattttccag

SEQ ID NO: 4885912 - DNA, 25 bp, Homo sapien
tcattcccttcaccaatttttcagc

SEQ ID NO: 4885913 - DNA, 25 bp, Homo sapien
cccttcaccaatttttcagcatttt

SEQ ID NO: 4885914 - DNA, 25 bp, Homo sapien
aatttttcagcattttccaggctca

SEQ ID NO: 4885915 - DNA, 25 bp, Homo sapien
atccctgcttctactgtggccaacg

SEQ ID NO: 4885916 - DNA, 25 bp, Homo sapien
ccctgagcattattcatccctgctt

SEQ ID NO: 4885917 - DNA, 25 bp, Homo sapien
tgcttctactgtggccaacgctgtc

SEQ ID NO: 4885918 - DNA, 25 bp, Homo sapien
ctttccctgagcattattcatccct

SEQ ID NO: 4885919 - DNA, 25 bp, Homo sapien
cttgcagatatttgtagacatttct

SEQ ID NO: 4885920 - DNA, 25 bp, Homo sapien
atcttgcagatatttgtagacattt

SEQ ID NO: 4885921 - DNA, 25 bp, Homo sapien
tcttgcagatatttgtagacatttc

SEQ ID NO: 4885922 - DNA, 25 bp, Homo sapien
tgcagatatttgtagacatttcttt

SEQ ID NO: 4885923 - DNA, 25 bp, Homo sapien
cgagaatggaaagttgccgcctccg

SEQ ID NO: 4885924 - DNA, 25 bp, Homo sapien
gggatcgggctgaaatcccggcgcg

SEQ ID NO: 4885925 - DNA, 25 bp, Homo sapien
tctgcagaggaaactcctgggagtg

SEQ ID NO: 4885926 - DNA, 25 bp, Homo sapien
gagacagaagactttacatgctggg

SEQ ID NO: 4885927 - DNA, 25 bp, Homo sapien
catagtcccgctcggtcttctggag

SEQ ID NO: 4885928 - DNA, 25 bp, Homo sapien
tccttggcgctctcggcgcggctgt

SEQ ID NO: 4885929 - DNA, 25 bp, Homo sapien
ttctggagctcgctgagcacgcaca

SEQ ID NO: 4885930 - DNA, 25 bp, Homo sapien
acgcacacgcgcaggcgaagctgct

SEQ ID NO: 4885931 - DNA, 25 bp, Homo sapien
cagtgagtcaagcagaaacgtggaa

SEQ ID NO: 4885932 - DNA, 25 bp, Homo sapien
tacctggatgtagccgactggacct

SEQ ID NO: 4885933 - DNA, 25 bp, Homo sapien
gaagatagggcagccgggattccct

SEQ ID NO: 4885934 - DNA, 25 bp, Homo sapien
gcgaacgcagagtccacacgtggat

SEQ ID NO: 4885935 - DNA, 25 bp, Homo sapien
gattaactgtctctgcaaattagca

SEQ ID NO: 4885936 - DNA, 25 bp, Homo sapien
gatggcattcagactaattagtgca

SEQ ID NO: 4885937 - DNA, 25 bp, Homo sapien
gagaagtcaaccataacgcagcctg

SEQ ID NO: 4885938 - DNA, 25 bp, Homo sapien
aacactaagcaggaagtttggcacc

SEQ ID NO: 4885939 - DNA, 25 bp, Homo sapien
ataaaatctagctctccagcagccc

SEQ ID NO: 4885940 - DNA, 25 bp, Homo sapien
tgagaaaggttgagccatgcacaga

SEQ ID NO: 4885941 - DNA, 25 bp, Homo sapien
agcccttgcaagggcctctggagct

SEQ ID NO: 4885942 - DNA, 25 bp, Homo sapien
gacaatcctgaagccataaaatcta

SEQ ID NO: 4885943 - DNA, 25 bp, Homo sapien
gtccatccctcagagtcatcacaag

SEQ ID NO: 4885944 - DNA, 25 bp, Homo sapien
ctcctgcatgagaaaagatacaggg

SEQ ID NO: 4885945 - DNA, 25 bp, Homo sapien
actcaaagctacacagtcagtgcca

SEQ ID NO: 4885946 - DNA, 25 bp, Homo sapien
cacaagcctaaaggccacactcaaa

SEQ ID NO: 4885947 - DNA, 25 bp, Homo sapien
gaaaagcattcagcatgatcagctt

SEQ ID NO: 4885948 - DNA, 25 bp, Homo sapien
ctgggaattggctgtttttatgaaa

SEQ ID NO: 4885949 - DNA, 25 bp, Homo sapien
agctgtacttcccatcatgaagtgt

SEQ ID NO: 4885950 - DNA, 25 bp, Homo sapien
cattcgagagtcctcagctgtactt

SEQ ID NO: 4885951 - DNA, 25 bp, Homo sapien
gggtgccagcaactcataatcaagc

SEQ ID NO: 4885952 - DNA, 25 bp, Homo sapien
taaggttctcgaaagaaaggcacca

SEQ ID NO: 4885953 - DNA, 25 bp, Homo sapien
tctgccccaggttgttggcactgtg

SEQ ID NO: 4885954 - DNA, 25 bp, Homo sapien
actgtgttcttcaactccataaggt

SEQ ID NO: 4885955 - DNA, 25 bp, Homo sapien
ggacctgtgcagaaatccagccgat

SEQ ID NO: 4885956 - DNA, 25 bp, Homo sapien
gaaatccagccgattgaagaggaat

SEQ ID NO: 4885957 - DNA, 25 bp, Homo sapien
acagaaagacaacccctggacctgt

SEQ ID NO: 4885958 - DNA, 25 bp, Homo sapien
gccgattgaagaggaataagaatta

SEQ ID NO: 4885959 - DNA, 25 bp, Homo sapien
gttgtaggacctcggtggatgcctg

SEQ ID NO: 4885960 - DNA, 25 bp, Homo sapien
cagttgtaggacctcggtggatgcc

SEQ ID NO: 4885961 - DNA, 25 bp, Homo sapien
tcagttgtaggacctcggtggatgc

SEQ ID NO: 4885962 - DNA, 25 bp, Homo sapien
tgtaggacctcggtggatgcctggc

SEQ ID NO: 4885963 - DNA, 25 bp, Homo sapien
cagaaagtgtcaagcccttcataag

SEQ ID NO: 4885964 - DNA, 25 bp, Homo sapien
tacataagttacaaaatcgctctct

SEQ ID NO: 4885965 - DNA, 25 bp, Homo sapien
tagctgcagtaggagtgtgaattca

SEQ ID NO: 4885966 - DNA, 25 bp, Homo sapien
tgaaaaaggacctatggctcttctc

SEQ ID NO: 4885967 - DNA, 25 bp, Homo sapien
agcgaaaatgtactcccatgatcag

SEQ ID NO: 4885968 - DNA, 25 bp, Homo sapien
gtcaaggtccttttgactcacaact

SEQ ID NO: 4885969 - DNA, 25 bp, Homo sapien
ggagcatgttttacttaactcttag

SEQ ID NO: 4885970 - DNA, 25 bp, Homo sapien
tgttcttgaagtgtttgagcgaaaa

SEQ ID NO: 4885971 - DNA, 25 bp, Homo sapien
atttttgtcaacttttgatgctgca

SEQ ID NO: 4885972 - DNA, 25 bp, Homo sapien
tttttgtcaacttttgatgctgcac

SEQ ID NO: 4885973 - DNA, 25 bp, Homo sapien
caacttgtagtggaactgccgatca

SEQ ID NO: 4885974 - DNA, 25 bp, Homo sapien
gaactgccgatcaactgaagggctg

SEQ ID NO: 4885975 - DNA, 25 bp, Homo sapien
caatacaactgactggaacagcaac

SEQ ID NO: 4885976 - DNA, 25 bp, Homo sapien
gaagggctgtgaagtaccatggcac

SEQ ID NO: 4885977 - DNA, 25 bp, Homo sapien
gagcacaaagctgataacctggatg

SEQ ID NO: 4885978 - DNA, 25 bp, Homo sapien
gccacatgtagaagtaaaagctggg

SEQ ID NO: 4885979 - DNA, 25 bp, Homo sapien
gccagcttgagcacaaagctgataa

SEQ ID NO: 4885980 - DNA, 25 bp, Homo sapien
ctggaaggtgccacatgtagaagta

SEQ ID NO: 4885981 - DNA, 25 bp, Homo sapien
ttctttatgtactgcaaggatgtct

SEQ ID NO: 4885982 - DNA, 25 bp, Homo sapien
ggttcggggtgtaagcattcttcca

SEQ ID NO: 4885983 - DNA, 25 bp, Homo sapien
tcttgttgagcattaggttcggggt

SEQ ID NO: 4885984 - DNA, 25 bp, Homo sapien
taagcattcttccacgacttttaag

SEQ ID NO: 4885985 - DNA, 25 bp, Homo sapien
agaaatgtccggattgttcttattt

SEQ ID NO: 4885986 - DNA, 25 bp, Homo sapien
tcatcatagatacgaaacttgtctt

SEQ ID NO: 4885987 - DNA, 25 bp, Homo sapien
ggttactacaatattcatcatagat

SEQ ID NO: 4885988 - DNA, 25 bp, Homo sapien
caaaagaaatgtccggattgttctt

SEQ ID NO: 4885989 - DNA, 25 bp, Homo sapien
tggtgttactaaatatccttccaag

SEQ ID NO: 4885990 - DNA, 25 bp, Homo sapien
gttcttccgtcctccaagcagcatg

SEQ ID NO: 4885991 - DNA, 25 bp, Homo sapien
tgtattggtgttactaaatatcctt

SEQ ID NO: 4885992 - DNA, 25 bp, Homo sapien
tgtgttcttccgtcctccaagcagc

SEQ ID NO: 4885993 - DNA, 25 bp, Homo sapien
caaccattagtaggatgttttacat

SEQ ID NO: 4885994 - DNA, 25 bp, Homo sapien
ctacaaccattagtaggatgtttta

SEQ ID NO: 4885995 - DNA, 25 bp, Homo sapien
tttacatcttctaaaggcaatgttt

SEQ ID NO: 4885996 - DNA, 25 bp, Homo sapien
ttacatcttctaaaggcaatgtttt

SEQ ID NO: 4885997 - DNA, 25 bp, Homo sapien
aaacaaatcgccctttgatcttcag

SEQ ID NO: 4885998 - DNA, 25 bp, Homo sapien
aaaacaaatcgccctttgatcttca

SEQ ID NO: 4885999 - DNA, 25 bp, Homo sapien
tttccgtggagtccgcttcagcaac

SEQ ID NO: 4886000 - DNA, 25 bp, Homo sapien
tgtctcttggcctcgtttatgttgg

SEQ ID NO: 4886001 - DNA, 25 bp, Homo sapien
gcctcgtttatgttggaacagacag

SEQ ID NO: 4886002 - DNA, 25 bp, Homo sapien
tcactgctgcatagtcactgtgttt

SEQ ID NO: 4886003 - DNA, 25 bp, Homo sapien
gccttcaatgtgagactgccattcc

SEQ ID NO: 4886004 - DNA, 25 bp, Homo sapien
cagccttcaatgtgagactgccatt

SEQ ID NO: 4886005 - DNA, 25 bp, Homo sapien
ccagccttcaatgtgagactgccat

SEQ ID NO: 4886006 - DNA, 25 bp, Homo sapien
cattcctctaaaacttctaacttct

SEQ ID NO: 4886007 - DNA, 25 bp, Homo sapien
cccgttcttgaatatttccagaaga

SEQ ID NO: 4886008 - DNA, 25 bp, Homo sapien
aacacccgttcttgaatatttccag

SEQ ID NO: 4886009 - DNA, 25 bp, Homo sapien
cacccgttcttgaatatttccagaa

SEQ ID NO: 4886010 - DNA, 25 bp, Homo sapien
acacccgttcttgaatatttccaga

SEQ ID NO: 4886011 - DNA, 25 bp, Homo sapien
tgttgatccggccacgaaaaaggta

SEQ ID NO: 4886012 - DNA, 25 bp, Homo sapien
acctccgtgttgatccggccacgaa

SEQ ID NO: 4886013 - DNA, 25 bp, Homo sapien
ccatctgtagatgccttgctgttct

SEQ ID NO: 4886014 - DNA, 25 bp, Homo sapien
aaaaggtaccgatgtccatctgtag

SEQ ID NO: 4886015 - DNA, 25 bp, Homo sapien
tacttgaagctatacagtttgcaaa

SEQ ID NO: 4886016 - DNA, 25 bp, Homo sapien
gaacaagtcactaattacttgaagc

SEQ ID NO: 4886017 - DNA, 25 bp, Homo sapien
taattacttgaagctatacagtttg

SEQ ID NO: 4886018 - DNA, 25 bp, Homo sapien
agtcactaattacttgaagctatac

SEQ ID NO: 4886019 - DNA, 25 bp, Homo sapien
tgctgtgttatgtatcttccatcca

SEQ ID NO: 4886020 - DNA, 25 bp, Homo sapien
ttctcttcaggtgtttttgccatac

SEQ ID NO: 4886021 - DNA, 25 bp, Homo sapien
attaacaacaatgtgtccactgcta

SEQ ID NO: 4886022 - DNA, 25 bp, Homo sapien
caaaatagcttcaaaccattcatgc

SEQ ID NO: 4886023 - DNA, 25 bp, Homo sapien
ttataaagtttctcaccctgttcag

SEQ ID NO: 4886024 - DNA, 25 bp, Homo sapien
tcttgctccattcctaattttaaac

SEQ ID NO: 4886025 - DNA, 25 bp, Homo sapien
tcatgacccaggtatcttgctccat

SEQ ID NO: 4886026 - DNA, 25 bp, Homo sapien
agcatttagggaacgtagtcagttt

SEQ ID NO: 4886027 - DNA, 25 bp, Homo sapien
aggcctgtgaatctctccaatttcc

SEQ ID NO: 4886028 - DNA, 25 bp, Homo sapien
tgtcccaagtgcacgccttcctcag

SEQ ID NO: 4886029 - DNA, 25 bp, Homo sapien
attttctaataatgcttgtcccaag

SEQ ID NO: 4886030 - DNA, 25 bp, Homo sapien
ttccaacagccatgacacaaattcg

SEQ ID NO: 4886031 - DNA, 25 bp, Homo sapien
tagcgaaatctatataacatctgtt

SEQ ID NO: 4886032 - DNA, 25 bp, Homo sapien
tgaaatcacgtcctgcatctcattt

SEQ ID NO: 4886033 - DNA, 25 bp, Homo sapien
tttgaaatcacgtcctgcatctcat

SEQ ID NO: 4886034 - DNA, 25 bp, Homo sapien
catcatcatagcgaaatctatataa

SEQ ID NO: 4886035 - DNA, 25 bp, Homo sapien
tccatggatataacctggtgagtga

SEQ ID NO: 4886036 - DNA, 25 bp, Homo sapien
gcagcagtactactaccatttagaa

SEQ ID NO: 4886037 - DNA, 25 bp, Homo sapien
caacatgcattctactattggagag

SEQ ID NO: 4886038 - DNA, 25 bp, Homo sapien
gaggcttgcttgtatatatagtcga

SEQ ID NO: 4886039 - DNA, 25 bp, Homo sapien
gtaaaaaggctatgaagacgacaat

SEQ ID NO: 4886040 - DNA, 25 bp, Homo sapien
gaagacgacaatataatcttacacc

SEQ ID NO: 4886041 - DNA, 25 bp, Homo sapien
ggagtaaaaaggctatgaagacgac

SEQ ID NO: 4886042 - DNA, 25 bp, Homo sapien
ggctatgaagacgacaatataatct

SEQ ID NO: 4886043 - DNA, 25 bp, Homo sapien
tggccatgaccacagatttgtaggt

SEQ ID NO: 4886044 - DNA, 25 bp, Homo sapien
tgtgcaattaaccagtctatcagtt

SEQ ID NO: 4886045 - DNA, 25 bp, Homo sapien
cagatttgtaggtccttaaatggta

SEQ ID NO: 4886046 - DNA, 25 bp, Homo sapien
cagtctatcagtttgttggccatga

SEQ ID NO: 4886047 - DNA, 25 bp, Homo sapien
ataaatccattgtcacagagtccaa

SEQ ID NO: 4886048 - DNA, 25 bp, Homo sapien
tgtcacagagtccaacgccaaatat

SEQ ID NO: 4886049 - DNA, 25 bp, Homo sapien
gcctcttctctggtgcggcaatctc

SEQ ID NO: 4886050 - DNA, 25 bp, Homo sapien
gagtccaacgccaaatatcattgcc

SEQ ID NO: 4886051 - DNA, 25 bp, Homo sapien
aagtcgatgtttcatatttgatccc

SEQ ID NO: 4886052 - DNA, 25 bp, Homo sapien
taagtcatgtttcataagtcgatgt

SEQ ID NO: 4886053 - DNA, 25 bp, Homo sapien
caataatgacttagctataacattt

SEQ ID NO: 4886054 - DNA, 25 bp, Homo sapien
gatgtttcatatttgatccctccat

SEQ ID NO: 4886055 - DNA, 25 bp, Homo sapien
agcattagatcccttttctaccaac

SEQ ID NO: 4886056 - DNA, 25 bp, Homo sapien
gcattagatcccttttctaccaact

SEQ ID NO: 4886057 - DNA, 25 bp, Homo sapien
cagcattagatcccttttctaccaa

SEQ ID NO: 4886058 - DNA, 25 bp, Homo sapien
cattagatcccttttctaccaactt

SEQ ID NO: 4886059 - DNA, 25 bp, Homo sapien
atctttttcccgacttccatgccag

SEQ ID NO: 4886060 - DNA, 25 bp, Homo sapien
gtctcataaaaactaggtcaccatt

SEQ ID NO: 4886061 - DNA, 25 bp, Homo sapien
gaagcaatccacttcattgaaaggt

SEQ ID NO: 4886062 - DNA, 25 bp, Homo sapien
aaacacgatttcaggaagcaatcca

SEQ ID NO: 4886063 - DNA, 25 bp, Homo sapien
gtccatcagctgaatctggaatttt

SEQ ID NO: 4886064 - DNA, 25 bp, Homo sapien
cagaagggccaaatccccggatctg

SEQ ID NO: 4886065 - DNA, 25 bp, Homo sapien
agccaagtccatcagctgaatctgg

SEQ ID NO: 4886066 - DNA, 25 bp, Homo sapien
tccccggatctggaagccaagtcca

SEQ ID NO: 4886067 - DNA, 25 bp, Homo sapien
tttccctgcaagacgaatttcctac

SEQ ID NO: 4886068 - DNA, 25 bp, Homo sapien
gtttccctgcaagacgaatttccta

SEQ ID NO: 4886069 - DNA, 25 bp, Homo sapien
tgtttccctgcaagacgaatttcct

SEQ ID NO: 4886070 - DNA, 25 bp, Homo sapien
gggcttcctgtctgaaaggctgaat

SEQ ID NO: 4886071 - DNA, 25 bp, Homo sapien
ttgctataaatggaagactccgagg

SEQ ID NO: 4886072 - DNA, 25 bp, Homo sapien
cacttggaagcatccaagctgttct

SEQ ID NO: 4886073 - DNA, 25 bp, Homo sapien
agccaactgtgaagtctttgccttg

SEQ ID NO: 4886074 - DNA, 25 bp, Homo sapien
taaacttggttctgagagcaatgcc

SEQ ID NO: 4886075 - DNA, 25 bp, Homo sapien
cacctccctaagaattagtttgaag

SEQ ID NO: 4886076 - DNA, 25 bp, Homo sapien
taaaatatgatcaaagtctagctag

SEQ ID NO: 4886077 - DNA, 25 bp, Homo sapien
gcaatgcccactcaacacttttctg

SEQ ID NO: 4886078 - DNA, 25 bp, Homo sapien
atgacactggcatgtgtctctttgc

SEQ ID NO: 4886079 - DNA, 25 bp, Homo sapien
tgtccagggtgaagaccagctgctg

SEQ ID NO: 4886080 - DNA, 25 bp, Homo sapien
ggctgtaacgtgtgcaatgacactg

SEQ ID NO: 4886081 - DNA, 25 bp, Homo sapien
cattcaccttgataatgcactgtcc

SEQ ID NO: 4886082 - DNA, 25 bp, Homo sapien
aaatatctctggcactatcccacct

SEQ ID NO: 4886083 - DNA, 25 bp, Homo sapien
tatgcaagtagtcactcagatccag

SEQ ID NO: 4886084 - DNA, 25 bp, Homo sapien
cctcaaccccttaggtctttatgca

SEQ ID NO: 4886085 - DNA, 25 bp, Homo sapien
cagatggcggtactgtaatactaaa

SEQ ID NO: 4886086 - DNA, 25 bp, Homo sapien
ttatcttctaagatatgttccaaag

SEQ ID NO: 4886087 - DNA, 25 bp, Homo sapien
ttttatcttctaagatatgttccaa

SEQ ID NO: 4886088 - DNA, 25 bp, Homo sapien
gttttatcttctaagatatgttcca

SEQ ID NO: 4886089 - DNA, 25 bp, Homo sapien
taaatgcttcaagtatatcgtaagt

SEQ ID NO: 4886090 - DNA, 25 bp, Homo sapien
ttttgaaggtcttcttgagcactct

SEQ ID NO: 4886091 - DNA, 25 bp, Homo sapien
cactctcaatgctattataaaccca

SEQ ID NO: 4886092 - DNA, 25 bp, Homo sapien
tataaacccattgtatggaatcttg

SEQ ID NO: 4886093 - DNA, 25 bp, Homo sapien
ggtcttcttgagcactctcaatgct

SEQ ID NO: 4886094 - DNA, 25 bp, Homo sapien
gctgtgctgtcgtactcatacacga

SEQ ID NO: 4886095 - DNA, 25 bp, Homo sapien
tacacgacaccatattccaggtgga

SEQ ID NO: 4886096 - DNA, 25 bp, Homo sapien
cttggcagttaagctgaagaaacct

SEQ ID NO: 4886097 - DNA, 25 bp, Homo sapien
cccatcaatgatggccatagtgttg

SEQ ID NO: 4886098 - DNA, 25 bp, Homo sapien
tctcatagaatatagagcagtatga

SEQ ID NO: 4886099 - DNA, 25 bp, Homo sapien
gaatatagagcagtatgaaacacta

SEQ ID NO: 4886100 - DNA, 25 bp, Homo sapien
tgaattctcatagaatatagagcag

SEQ ID NO: 4886101 - DNA, 25 bp, Homo sapien
tatagagcagtatgaaacactaaat

SEQ ID NO: 4886102 - DNA, 25 bp, Homo sapien
tgaatttactctgaaggtcagtagg

SEQ ID NO: 4886103 - DNA, 25 bp, Homo sapien
ataactggatattctctgacatagg

SEQ ID NO: 4886104 - DNA, 25 bp, Homo sapien
cagtaggaatcacttcatttagaga

SEQ ID NO: 4886105 - DNA, 25 bp, Homo sapien
catttagagaatttaggctggtaca

SEQ ID NO: 4886106 - DNA, 25 bp, Homo sapien
actgtgaagatcaaaactgtgctcc

SEQ ID NO: 4886107 - DNA, 25 bp, Homo sapien
gaagatcaaaactgtgctcccagac

SEQ ID NO: 4886108 - DNA, 25 bp, Homo sapien
cagcatgccgtgctgtgaaattgta

SEQ ID NO: 4886109 - DNA, 25 bp, Homo sapien
ctcccagacagcatgccgtgctgtg

SEQ ID NO: 4886110 - DNA, 25 bp, Homo sapien
caggtactggaaatgtgctgcttac

SEQ ID NO: 4886111 - DNA, 25 bp, Homo sapien
gcaggaggaactccatagtcacagg

SEQ ID NO: 4886112 - DNA, 25 bp, Homo sapien
ttcttgagaaggaaggtcctcagga

SEQ ID NO: 4886113 - DNA, 25 bp, Homo sapien
gaaggaaggtcctcaggaatgcagt

SEQ ID NO: 4886114 - DNA, 25 bp, Homo sapien
ctaagggtgcctgaactgttccaaa

SEQ ID NO: 4886115 - DNA, 25 bp, Homo sapien
cctgcccacatgctaggaagggctg

SEQ ID NO: 4886116 - DNA, 25 bp, Homo sapien
gcacgtaaaagccagatagttagaa

SEQ ID NO: 4886117 - DNA, 25 bp, Homo sapien
caccaataggtgcatctatctgaac

SEQ ID NO: 4886118 - DNA, 25 bp, Homo sapien
gagattttagatttggcctgtttaa

SEQ ID NO: 4886119 - DNA, 25 bp, Homo sapien
catggcagttggtagggcagaaatc

SEQ ID NO: 4886120 - DNA, 25 bp, Homo sapien
gggataagaaacttccatcacattg

SEQ ID NO: 4886121 - DNA, 25 bp, Homo sapien
tatgcttcctgctatccaactgaac

SEQ ID NO: 4886122 - DNA, 25 bp, Homo sapien
gctgaatgtacaccatagggctcag

SEQ ID NO: 4886123 - DNA, 25 bp, Homo sapien
tgaatgtacaccatagggctcagtt

SEQ ID NO: 4886124 - DNA, 25 bp, Homo sapien
atgtacaccatagggctcagtttcc

SEQ ID NO: 4886125 - DNA, 25 bp, Homo sapien
gaatgtacaccatagggctcagttt

SEQ ID NO: 4886126 - DNA, 25 bp, Homo sapien
tctaagtcttcttcttttagcagat

SEQ ID NO: 4886127 - DNA, 25 bp, Homo sapien
gatacctgagaccatggccatcctg

SEQ ID NO: 4886128 - DNA, 25 bp, Homo sapien
gatagatgtcttgggtttctaagtc

SEQ ID NO: 4886129 - DNA, 25 bp, Homo sapien
tcttcttttagcagatacctgagac

SEQ ID NO: 4886130 - DNA, 25 bp, Homo sapien
agtcaggtcaggtctcacagcgagg

SEQ ID NO: 4886131 - DNA, 25 bp, Homo sapien
aagctgccacttcaaacagtggtgc

SEQ ID NO: 4886132 - DNA, 25 bp, Homo sapien
actttctagtatatcaaatggcagc

SEQ ID NO: 4886133 - DNA, 25 bp, Homo sapien
cacagcgaggtgagatttgaacaat

SEQ ID NO: 4886134 - DNA, 25 bp, Homo sapien
tcactgtctgttggtattatgccct

SEQ ID NO: 4886135 - DNA, 25 bp, Homo sapien
taggagaatatgttattgaagacag

SEQ ID NO: 4886136 - DNA, 25 bp, Homo sapien
cattaaaacatacccgtttgctgtt

SEQ ID NO: 4886137 - DNA, 25 bp, Homo sapien
gatgtcttacgttctaatttaggag

SEQ ID NO: 4886138 - DNA, 25 bp, Homo sapien
atggtgtcatgaccagaatcttcct

SEQ ID NO: 4886139 - DNA, 25 bp, Homo sapien
tgatggtgtcatgaccagaatcttc

SEQ ID NO: 4886140 - DNA, 25 bp, Homo sapien
gatggtgtcatgaccagaatcttcc

SEQ ID NO: 4886141 - DNA, 25 bp, Homo sapien
tgaaggaggcgatggaattcctatt

SEQ ID NO: 4886142 - DNA, 25 bp, Homo sapien
ccatttcatcactgtggaaatacga

SEQ ID NO: 4886143 - DNA, 25 bp, Homo sapien
ggaaatacgagctgcactggctgct

SEQ ID NO: 4886144 - DNA, 25 bp, Homo sapien
ggaattcctattgctgttgcagtca

SEQ ID NO: 4886145 - DNA, 25 bp, Homo sapien
gcgaacacttaagggaagttcatca

SEQ ID NO: 4886146 - DNA, 25 bp, Homo sapien
ggcaactatgtatcttgtcctgttt

SEQ ID NO: 4886147 - DNA, 25 bp, Homo sapien
tgtcctgtttatcatgagatatgcg

SEQ ID NO: 4886148 - DNA, 25 bp, Homo sapien
gatgctcaaggcaactatgtatctt

SEQ ID NO: 4886149 - DNA, 25 bp, Homo sapien
gagatacttggtttggtcaaaggcc

SEQ ID NO: 4886150 - DNA, 25 bp, Homo sapien
ttaggagattggtaattgaatccac

SEQ ID NO: 4886151 - DNA, 25 bp, Homo sapien
gcaatcctcggcctggagtgagata

SEQ ID NO: 4886152 - DNA, 25 bp, Homo sapien
tcacaacagcctgcccttttaggag

SEQ ID NO: 4886153 - DNA, 25 bp, Homo sapien
aaatttcctgatgttctgagcaaga

SEQ ID NO: 4886154 - DNA, 25 bp, Homo sapien
tctgagcaagagtccggacgctgct

SEQ ID NO: 4886155 - DNA, 25 bp, Homo sapien
tcttgcttgatatgaagccgtagcc

SEQ ID NO: 4886156 - DNA, 25 bp, Homo sapien
ctttttggacaactcagctttggtt

SEQ ID NO: 4886157 - DNA, 25 bp, Homo sapien
gctaatatcatgcaatgttctttgc

SEQ ID NO: 4886158 - DNA, 25 bp, Homo sapien
taatatcatgcaatgttctttgctt

SEQ ID NO: 4886159 - DNA, 25 bp, Homo sapien
ctaatatcatgcaatgttctttgct

SEQ ID NO: 4886160 - DNA, 25 bp, Homo sapien
atatcatgcaatgttctttgctttt

SEQ ID NO: 4886161 - DNA, 25 bp, Homo sapien
caaagggcaccacattttacaagtg

SEQ ID NO: 4886162 - DNA, 25 bp, Homo sapien
tcaaagggcaccacattttacaagt

SEQ ID NO: 4886163 - DNA, 25 bp, Homo sapien
agggcaccacattttacaagtgaga

SEQ ID NO: 4886164 - DNA, 25 bp, Homo sapien
aaagggcaccacattttacaagtga

SEQ ID NO: 4886165 - DNA, 25 bp, Homo sapien
agccaggagtagcctacactttacc

SEQ ID NO: 4886166 - DNA, 25 bp, Homo sapien
gagccaggagtagcctacactttac

SEQ ID NO: 4886167 - DNA, 25 bp, Homo sapien
gccaggagtagcctacactttacct

SEQ ID NO: 4886168 - DNA, 25 bp, Homo sapien
tattactcagtcaaaaagcaaggca

SEQ ID NO: 4886169 - DNA, 25 bp, Homo sapien
taccccttaagtctggccttgccag

SEQ ID NO: 4886170 - DNA, 25 bp, Homo sapien
ggcaagctcttcgacattcccactg

SEQ ID NO: 4886171 - DNA, 25 bp, Homo sapien
tgtgaacaagaacaggctagcctca

SEQ ID NO: 4886172 - DNA, 25 bp, Homo sapien
cccagaatcacctccggaattggca

SEQ ID NO: 4886173 - DNA, 25 bp, Homo sapien
ttctagatgctccaacgtcagtgtt

SEQ ID NO: 4886174 - DNA, 25 bp, Homo sapien
ggttattattaatctgccagaatgt

SEQ ID NO: 4886175 - DNA, 25 bp, Homo sapien
taaggcatcaatatgcctaaccttc

SEQ ID NO: 4886176 - DNA, 25 bp, Homo sapien
tataaacatggaccagggcacactg

SEQ ID NO: 4886177 - DNA, 25 bp, Homo sapien
gctttcagctactagcaaaagaaga

SEQ ID NO: 4886178 - DNA, 25 bp, Homo sapien
gcagggcctcactatgatatccagg

SEQ ID NO: 4886179 - DNA, 25 bp, Homo sapien
gagagtacactcaaaagaaatggtt

SEQ ID NO: 4886180 - DNA, 25 bp, Homo sapien
tgtgatcaaagagaacatagagaat

SEQ ID NO: 4886181 - DNA, 25 bp, Homo sapien
ctgtgatcaaagagaacatagagaa

SEQ ID NO: 4886182 - DNA, 25 bp, Homo sapien
gtgatcaaagagaacatagagaatg

SEQ ID NO: 4886183 - DNA, 25 bp, Homo sapien
gtctctacggagctgtgtctcacta

SEQ ID NO: 4886184 - DNA, 25 bp, Homo sapien
tctctacggagctgtgtctcactat

SEQ ID NO: 4886185 - DNA, 25 bp, Homo sapien
aagaacacctgcattcgctatctgg

SEQ ID NO: 4886186 - DNA, 25 bp, Homo sapien
aaggccgccatgagctgctcagaga

SEQ ID NO: 4886187 - DNA, 25 bp, Homo sapien
tgttgtcaaacatctggttcaaggc

SEQ ID NO: 4886188 - DNA, 25 bp, Homo sapien
cagtggccacaagagtctggcagaa

SEQ ID NO: 4886189 - DNA, 25 bp, Homo sapien
tgaaggaggtggtaaagaatttcca

SEQ ID NO: 4886190 - DNA, 25 bp, Homo sapien
ctcgtagccaaatctgggggcagca

SEQ ID NO: 4886191 - DNA, 25 bp, Homo sapien
tcgtagccaaatctgggggcagcat

SEQ ID NO: 4886192 - DNA, 25 bp, Homo sapien
cgtagccaaatctgggggcagcatc

SEQ ID NO: 4886193 - DNA, 25 bp, Homo sapien
caaatcaaatagtgcaaccagtgta

SEQ ID NO: 4886194 - DNA, 25 bp, Homo sapien
caaatagtgcaaccagtgtatcttc

SEQ ID NO: 4886195 - DNA, 25 bp, Homo sapien
tttccaaatcaaatagtgcaaccag

SEQ ID NO: 4886196 - DNA, 25 bp, Homo sapien
gtgcaaccagtgtatcttctaacat

SEQ ID NO: 4886197 - DNA, 25 bp, Homo sapien
tctgcttgatatgtaagaggaacat

SEQ ID NO: 4886198 - DNA, 25 bp, Homo sapien
gaagtaaactttcagagcttgccga

SEQ ID NO: 4886199 - DNA, 25 bp, Homo sapien
ctccatttttcagccgttgaggaag

SEQ ID NO: 4886200 - DNA, 25 bp, Homo sapien
gataactatcaatgtagaagtaaac

SEQ ID NO: 4886201 - DNA, 25 bp, Homo sapien
cctgatctaatagctggtcccatct

SEQ ID NO: 4886202 - DNA, 25 bp, Homo sapien
agttcttgccttcagcaatacacat

SEQ ID NO: 4886203 - DNA, 25 bp, Homo sapien
tcacttttgtctgcctaggttcctg

SEQ ID NO: 4886204 - DNA, 25 bp, Homo sapien
tcagcaatacacattggccgccaac

SEQ ID NO: 4886205 - DNA, 25 bp, Homo sapien
caacactttacaaggaagggatgct

SEQ ID NO: 4886206 - DNA, 25 bp, Homo sapien
cacattcctgagaggtagaataccc

SEQ ID NO: 4886207 - DNA, 25 bp, Homo sapien
gggatgctatacttcaggacacttt

SEQ ID NO: 4886208 - DNA, 25 bp, Homo sapien
gaatactcaagagcatgctggcaga

SEQ ID NO: 4886209 - DNA, 25 bp, Homo sapien
tagaaaatgacaatgtttataacaa

SEQ ID NO: 4886210 - DNA, 25 bp, Homo sapien
gagccttaagaagagtttaggagaa

SEQ ID NO: 4886211 - DNA, 25 bp, Homo sapien
aagagccttaagaagagtttaggag

SEQ ID NO: 4886212 - DNA, 25 bp, Homo sapien
agaaaatgacaatgtttataacaaa

SEQ ID NO: 4886213 - DNA, 25 bp, Homo sapien
gagcttctggttgtactgtttgacc

SEQ ID NO: 4886214 - DNA, 25 bp, Homo sapien
tccagtgaggctgcatttatctgag

SEQ ID NO: 4886215 - DNA, 25 bp, Homo sapien
ccttttccagtgaggctgcatttat

SEQ ID NO: 4886216 - DNA, 25 bp, Homo sapien
cattgtctctgtaataatatccttc

SEQ ID NO: 4886217 - DNA, 25 bp, Homo sapien
ctaaagctactgtggaagtcccggt

SEQ ID NO: 4886218 - DNA, 25 bp, Homo sapien
aatgactttgacagaactacttggg

SEQ ID NO: 4886219 - DNA, 25 bp, Homo sapien
gaagtctagctacgattcaacaagc

SEQ ID NO: 4886220 - DNA, 25 bp, Homo sapien
caggaactcaggttattttgggatc

SEQ ID NO: 4886221 - DNA, 25 bp, Homo sapien
gacactatgaatagcaagttcatgg

SEQ ID NO: 4886222 - DNA, 25 bp, Homo sapien
tatgaatagcaagttcatgggttgg

SEQ ID NO: 4886223 - DNA, 25 bp, Homo sapien
aatgacactatgaatagcaagttca

SEQ ID NO: 4886224 - DNA, 25 bp, Homo sapien
cactatgaatagcaagttcatgggt

SEQ ID NO: 4886225 - DNA, 25 bp, Homo sapien
cataagcatcagcattgacttctct

SEQ ID NO: 4886226 - DNA, 25 bp, Homo sapien
ccatgcccataagcatcagcattga

SEQ ID NO: 4886227 - DNA, 25 bp, Homo sapien
cagcattgacttctctggtatgcat

SEQ ID NO: 4886228 - DNA, 25 bp, Homo sapien
taccttccccatgcccataagcatc

SEQ ID NO: 4886229 - DNA, 25 bp, Homo sapien
ggtgaatttgacttgtccaagtaga

SEQ ID NO: 4886230 - DNA, 25 bp, Homo sapien
atttgacttgtccaagtagaatgcc

SEQ ID NO: 4886231 - DNA, 25 bp, Homo sapien
cagctttggatgtggagtttggtgg

SEQ ID NO: 4886232 - DNA, 25 bp, Homo sapien
gaatttgacttgtccaagtagaatg

SEQ ID NO: 4886233 - DNA, 25 bp, Homo sapien
tgcacagctccgaggaaactgacag

SEQ ID NO: 4886234 - DNA, 25 bp, Homo sapien
tcatccaaagcgttgagaggcctca

SEQ ID NO: 4886235 - DNA, 25 bp, Homo sapien
tctgataaacgaggctaccagtcgg

SEQ ID NO: 4886236 - DNA, 25 bp, Homo sapien
cacatgatgatgtggcaggcgccca

SEQ ID NO: 4886237 - DNA, 25 bp, Homo sapien
taaagtgtgatctaacaaagaggca

SEQ ID NO: 4886238 - DNA, 25 bp, Homo sapien
agtgtgatctaacaaagaggcaagc

SEQ ID NO: 4886239 - DNA, 25 bp, Homo sapien
tgatctaacaaagaggcaagcaagg

SEQ ID NO: 4886240 - DNA, 25 bp, Homo sapien
ataaagtgtgatctaacaaagaggc

SEQ ID NO: 4886241 - DNA, 25 bp, Homo sapien
aatttcaccagtagttagaaagcag

SEQ ID NO: 4886242 - DNA, 25 bp, Homo sapien
tccaagcagcatctagctcacaaca

SEQ ID NO: 4886243 - DNA, 25 bp, Homo sapien
ctagctcacaacacttgggttgtaa

SEQ ID NO: 4886244 - DNA, 25 bp, Homo sapien
ccataatttcaccagtagttagaaa

SEQ ID NO: 4886245 - DNA, 25 bp, Homo sapien
tcccactcgcacttttgagtctaag

SEQ ID NO: 4886246 - DNA, 25 bp, Homo sapien
tatgcctgtcatcttggctgcctca

SEQ ID NO: 4886247 - DNA, 25 bp, Homo sapien
cagacagaccacagttgcctaagat

SEQ ID NO: 4886248 - DNA, 25 bp, Homo sapien
ggacttgactcagggattcccactc

SEQ ID NO: 4886249 - DNA, 25 bp, Homo sapien
acaacttctttacgctttcagtcag

SEQ ID NO: 4886250 - DNA, 25 bp, Homo sapien
acccacaacttctttacgctttcag

SEQ ID NO: 4886251 - DNA, 25 bp, Homo sapien
ccacaacccacaacttctttacgct

SEQ ID NO: 4886252 - DNA, 25 bp, Homo sapien
aacttctttacgctttcagtcagca

SEQ ID NO: 4886253 - DNA, 25 bp, Homo sapien
tataggccttcaatttttcagctcc

SEQ ID NO: 4886254 - DNA, 25 bp, Homo sapien
cacctggaaaatataggccttcaat

SEQ ID NO: 4886255 - DNA, 25 bp, Homo sapien
ttcagctccttctactacaacatca

SEQ ID NO: 4886256 - DNA, 25 bp, Homo sapien
gctccttctactacaacatcactta

SEQ ID NO: 4886257 - DNA, 25 bp, Homo sapien
gtagcctgcatgatgtaacgaggtg

SEQ ID NO: 4886258 - DNA, 25 bp, Homo sapien
gaatgatggcttgctccagcgtcac

SEQ ID NO: 4886259 - DNA, 25 bp, Homo sapien
tgcatgatgtaacgaggtggcagtc

SEQ ID NO: 4886260 - DNA, 25 bp, Homo sapien
tgatggcttgctccagcgtcacgct

SEQ ID NO: 4886261 - DNA, 25 bp, Homo sapien
tccagagttgtctaagattcttgca

SEQ ID NO: 4886262 - DNA, 25 bp, Homo sapien
tttctgcctgcagattactccgtag

SEQ ID NO: 4886263 - DNA, 25 bp, Homo sapien
tccacttaatcaagtccctttctgc

SEQ ID NO: 4886264 - DNA, 25 bp, Homo sapien
gcagattactccgtagacttccctt

SEQ ID NO: 4886265 - DNA, 25 bp, Homo sapien
tcttcagctcctgagccctaaccag

SEQ ID NO: 4886266 - DNA, 25 bp, Homo sapien
ctgtgcctgatcttcgcattgcaga

SEQ ID NO: 4886267 - DNA, 25 bp, Homo sapien
cctgatcttcgcattgcagacacca

SEQ ID NO: 4886268 - DNA, 25 bp, Homo sapien
cagaagtaccaatgtatatgctctc

SEQ ID NO: 4886269 - DNA, 25 bp, Homo sapien
tcagctggttacataaagtgctgcc

SEQ ID NO: 4886270 - DNA, 25 bp, Homo sapien
gttacaatcattagcaaaacatcat

SEQ ID NO: 4886271 - DNA, 25 bp, Homo sapien
gtgctgcccaaggttgttacaatca

SEQ ID NO: 4886272 - DNA, 25 bp, Homo sapien
catcatgaaaacatagtacccttct

SEQ ID NO: 4886273 - DNA, 25 bp, Homo sapien
tgtcttccttttctcgtctggtaat

SEQ ID NO: 4886274 - DNA, 25 bp, Homo sapien
cactcactgattttagcctctgttg

SEQ ID NO: 4886275 - DNA, 25 bp, Homo sapien
gcctctgttggtgtatcttgtctac

SEQ ID NO: 4886276 - DNA, 25 bp, Homo sapien
tatatttagggacatactatgagac

SEQ ID NO: 4886277 - DNA, 25 bp, Homo sapien
aagcaatttttggacaagctatgtc

SEQ ID NO: 4886278 - DNA, 25 bp, Homo sapien
gtccatgtggatctatgaaatctag

SEQ ID NO: 4886279 - DNA, 25 bp, Homo sapien
aaatgagcagactataaatacctgc

SEQ ID NO: 4886280 - DNA, 25 bp, Homo sapien
gaaatcacagttttatcacacctgt

SEQ ID NO: 4886281 - DNA, 25 bp, Homo sapien
ctgaaagtcaggaaaatcactttta

SEQ ID NO: 4886282 - DNA, 25 bp, Homo sapien
gaaagtcaggaaaatcacttttatc

SEQ ID NO: 4886283 - DNA, 25 bp, Homo sapien
tgaaagtcaggaaaatcacttttat

SEQ ID NO: 4886284 - DNA, 25 bp, Homo sapien
cttggtgcagactgtggagtccggt

SEQ ID NO: 4886285 - DNA, 25 bp, Homo sapien
gactcccaaattcttcgctgtgttc

SEQ ID NO: 4886286 - DNA, 25 bp, Homo sapien
tgtggagtccggtctctgactccca

SEQ ID NO: 4886287 - DNA, 25 bp, Homo sapien
tcccaaattcttcgctgtgttctga

SEQ ID NO: 4886288 - DNA, 25 bp, Homo sapien
catcattcccactctggtaactgct

SEQ ID NO: 4886289 - DNA, 25 bp, Homo sapien
gcagccatcattcccactctggtaa

SEQ ID NO: 4886290 - DNA, 25 bp, Homo sapien
ttacttcacaaatgctgcagccatc

SEQ ID NO: 4886291 - DNA, 25 bp, Homo sapien
tcacaaatgctgcagccatcattcc

SEQ ID NO: 4886292 - DNA, 25 bp, Homo sapien
cccattgcagcccaggtctagttgt

SEQ ID NO: 4886293 - DNA, 25 bp, Homo sapien
ggctctccaagtgggtcaaggatcc

SEQ ID NO: 4886294 - DNA, 25 bp, Homo sapien
ggatccacttaaaccatggagatgc

SEQ ID NO: 4886295 - DNA, 25 bp, Homo sapien
gcagcccaggtctagttgttcaaga

SEQ ID NO: 4886296 - DNA, 25 bp, Homo sapien
aggtggctcgcacagcttgtacagc

SEQ ID NO: 4886297 - DNA, 25 bp, Homo sapien
ttgtctagtccagcattcaggagct

SEQ ID NO: 4886298 - DNA, 25 bp, Homo sapien
cagagagacatcagttcgtgaagct

SEQ ID NO: 4886299 - DNA, 25 bp, Homo sapien
tagccagcatgtagtttgtctagtc

SEQ ID NO: 4886300 - DNA, 25 bp, Homo sapien
ttcagtggagaatgtttagccagca

SEQ ID NO: 4886301 - DNA, 25 bp, Homo sapien
ttgctagagctgtccacaagaataa

SEQ ID NO: 4886302 - DNA, 25 bp, Homo sapien
gatccccagggccattatggcacag

SEQ ID NO: 4886303 - DNA, 25 bp, Homo sapien
tagcattgatttgctagagctgtcc

SEQ ID NO: 4886304 - DNA, 25 bp, Homo sapien
ggccattatggcacagcacccagta

SEQ ID NO: 4886305 - DNA, 25 bp, Homo sapien
taatgacccttgcatgcctctaatg

SEQ ID NO: 4886306 - DNA, 25 bp, Homo sapien
aaaggacttgctagctaatcagctg

SEQ ID NO: 4886307 - DNA, 25 bp, Homo sapien
tatagctgataatttgccccatgaa

SEQ ID NO: 4886308 - DNA, 25 bp, Homo sapien
taccaagcatgatagacgacacact

SEQ ID NO: 4886309 - DNA, 25 bp, Homo sapien
gaagaagttagcaggttttagcagt

SEQ ID NO: 4886310 - DNA, 25 bp, Homo sapien
agaacctggaagaagttagcaggtt

SEQ ID NO: 4886311 - DNA, 25 bp, Homo sapien
ggttttagcagtatttgaaggtgca

SEQ ID NO: 4886312 - DNA, 25 bp, Homo sapien
gcggtgggagttgtccatgctcaga

SEQ ID NO: 4886313 - DNA, 25 bp, Homo sapien
tagtacttaagcaggacaaccgaca

SEQ ID NO: 4886314 - DNA, 25 bp, Homo sapien
cagagccaggtcagttgattccaga

SEQ ID NO: 4886315 - DNA, 25 bp, Homo sapien
catttacacatggttggacagctct

SEQ ID NO: 4886316 - DNA, 25 bp, Homo sapien
tctcagcgagaggagcaagctatcc

SEQ ID NO: 4886317 - DNA, 25 bp, Homo sapien
tgaaacttaatcacagtcctttccc

SEQ ID NO: 4886318 - DNA, 25 bp, Homo sapien
tccaataggtgcctggtttatgtca

SEQ ID NO: 4886319 - DNA, 25 bp, Homo sapien
tggtttatgtcaccaacttggatga

SEQ ID NO: 4886320 - DNA, 25 bp, Homo sapien
tgaaatggtcccgagtaaaatgaaa

SEQ ID NO: 4886321 - DNA, 25 bp, Homo sapien
tcatggccagctcgagagttcttac

SEQ ID NO: 4886322 - DNA, 25 bp, Homo sapien
ctttcaaggcccagccaagttcatg

SEQ ID NO: 4886323 - DNA, 25 bp, Homo sapien
ctgtcagcagtgattactccatctg

SEQ ID NO: 4886324 - DNA, 25 bp, Homo sapien
tttgcagaatcatactcatctttca

SEQ ID NO: 4886325 - DNA, 25 bp, Homo sapien
gtgagagcaccaggtatcctaaggg

SEQ ID NO: 4886326 - DNA, 25 bp, Homo sapien
aggttggacacctaatttgcacatc

SEQ ID NO: 4886327 - DNA, 25 bp, Homo sapien
tggacacctaatttgcacatcagga

SEQ ID NO: 4886328 - DNA, 25 bp, Homo sapien
tgtgagagcaccaggtatcctaagg

SEQ ID NO: 4886329 - DNA, 25 bp, Homo sapien
aagccaatggtgaaggtgcttcttt

SEQ ID NO: 4886330 - DNA, 25 bp, Homo sapien
cttaaaaagccaatggtgaaggtgc

SEQ ID NO: 4886331 - DNA, 25 bp, Homo sapien
gtgcttgttggctactccttggcag

SEQ ID NO: 4886332 - DNA, 25 bp, Homo sapien
agcgccgcttaaaaagccaatggtg

SEQ ID NO: 4886333 - DNA, 25 bp, Homo sapien
ggcgggaggcgagctgtgtcgaggg

SEQ ID NO: 4886334 - DNA, 25 bp, Homo sapien
gaaattcgaggcagaggttcctttc

SEQ ID NO: 4886335 - DNA, 25 bp, Homo sapien
gctcgaactcgccaccggtgtgtgt

SEQ ID NO: 4886336 - DNA, 25 bp, Homo sapien
gtgacggaacaaacagcccgggctg

SEQ ID NO: 4886337 - DNA, 25 bp, Homo sapien
aactcagacaactccgaggcgaggg

SEQ ID NO: 4886338 - DNA, 25 bp, Homo sapien
acaggagctccggagcctcggctgc

SEQ ID NO: 4886339 - DNA, 25 bp, Homo sapien
agtgcagggagaacgcgcggctgtg

SEQ ID NO: 4886340 - DNA, 25 bp, Homo sapien
gaacagatgggaccgcgaagagagt

SEQ ID NO: 4886341 - DNA, 25 bp, Homo sapien
tccgggtttgcggatgagacgccat

SEQ ID NO: 4886342 - DNA, 25 bp, Homo sapien
aggtaagcctggatccgggtttgcg

SEQ ID NO: 4886343 - DNA, 25 bp, Homo sapien
taagcctggatccgggtttgcggat

SEQ ID NO: 4886344 - DNA, 25 bp, Homo sapien
cctggatccgggtttgcggatgaga

SEQ ID NO: 4886345 - DNA, 25 bp, Homo sapien
caacccgcgggacgctttgctggtg

SEQ ID NO: 4886346 - DNA, 25 bp, Homo sapien
cattttctcgtgtcctcgcgctctt

SEQ ID NO: 4886347 - DNA, 25 bp, Homo sapien
ctcttgttctcattttctcgtgtcc

SEQ ID NO: 4886348 - DNA, 25 bp, Homo sapien
ggtgccaggcttcaatctcttgttc

SEQ ID NO: 4886349 - DNA, 25 bp, Homo sapien
ggccctgggaagaattaagccacag

SEQ ID NO: 4886350 - DNA, 25 bp, Homo sapien
aagaaagaatggtaactgggccctg

SEQ ID NO: 4886351 - DNA, 25 bp, Homo sapien
gacagaatttttgtttaaggagaga

SEQ ID NO: 4886352 - DNA, 25 bp, Homo sapien
tgggccctgggaagaattaagccac

SEQ ID NO: 4886353 - DNA, 25 bp, Homo sapien
gttttagccaactattgagagaaga

SEQ ID NO: 4886354 - DNA, 25 bp, Homo sapien
aaagtgtcagctagaggcaaagcgc

SEQ ID NO: 4886355 - DNA, 25 bp, Homo sapien
taactccagtaacataatctttccc

SEQ ID NO: 4886356 - DNA, 25 bp, Homo sapien
ggtgaagataatgctcaacttcaga

SEQ ID NO: 4886357 - DNA, 25 bp, Homo sapien
ctcttggctgaagaagtgtccaagt

SEQ ID NO: 4886358 - DNA, 25 bp, Homo sapien
ccaagtgtctaataaattctgagtt

SEQ ID NO: 4886359 - DNA, 25 bp, Homo sapien
tcttggctgaagaagtgtccaagtg

SEQ ID NO: 4886360 - DNA, 25 bp, Homo sapien
tgtccaagtgtctaataaattctga

SEQ ID NO: 4886361 - DNA, 25 bp, Homo sapien
tatgctttgtgatactttttcatgg

SEQ ID NO: 4886362 - DNA, 25 bp, Homo sapien
taatagcaaactctttttgtatgct

SEQ ID NO: 4886363 - DNA, 25 bp, Homo sapien
ttcctctaatagcaaactctttttg

SEQ ID NO: 4886364 - DNA, 25 bp, Homo sapien
tttcttcctctaatagcaaactctt

SEQ ID NO: 4886365 - DNA, 25 bp, Homo sapien
ggcagacttggtggctgtagacagc

SEQ ID NO: 4886366 - DNA, 25 bp, Homo sapien
cttggtggctgtagacagcatttgc

SEQ ID NO: 4886367 - DNA, 25 bp, Homo sapien
cagacttggtggctgtagacagcat

SEQ ID NO: 4886368 - DNA, 25 bp, Homo sapien
gtggctgtagacagcatttgctgaa

SEQ ID NO: 4886369 - DNA, 25 bp, Homo sapien
ttcagagtcactatgcaattttaca

SEQ ID NO: 4886370 - DNA, 25 bp, Homo sapien
gtacctaagagtacaattactgcat

SEQ ID NO: 4886371 - DNA, 25 bp, Homo sapien
tttgtccacgttgttatgcatataa

SEQ ID NO: 4886372 - DNA, 25 bp, Homo sapien
taggtgtaccatagtgtgtttaacc

SEQ ID NO: 4886373 - DNA, 25 bp, Homo sapien
gaagaattgccgcagcttccaggca

SEQ ID NO: 4886374 - DNA, 25 bp, Homo sapien
tgagatagctatgagggttccacaa

SEQ ID NO: 4886375 - DNA, 25 bp, Homo sapien
cagcccctctgacttttggtgatac

SEQ ID NO: 4886376 - DNA, 25 bp, Homo sapien
tgcaggctggtatattcagggtcag

SEQ ID NO: 4886377 - DNA, 25 bp, Homo sapien
gaacagctgtcaagccacgtggata

SEQ ID NO: 4886378 - DNA, 25 bp, Homo sapien
gctatataagaaactgctgtccaga

SEQ ID NO: 4886379 - DNA, 25 bp, Homo sapien
ggtgtgtcatccttcggtctccaat

SEQ ID NO: 4886380 - DNA, 25 bp, Homo sapien
tatcagttttctctgtagggcctag

SEQ ID NO: 4886381 - DNA, 25 bp, Homo sapien
ttttcactttctgcccatagagctg

SEQ ID NO: 4886382 - DNA, 25 bp, Homo sapien
cacggttcccttgtttagactgaag

SEQ ID NO: 4886383 - DNA, 25 bp, Homo sapien
aatgagaaatgggattggctggtca

SEQ ID NO: 4886384 - DNA, 25 bp, Homo sapien
ggctggtcaggtgtctcagttatta

SEQ ID NO: 4886385 - DNA, 25 bp, Homo sapien
agtccggtgatggtggagaaatatt

SEQ ID NO: 4886386 - DNA, 25 bp, Homo sapien
atggtggagaaatattagacacagc

SEQ ID NO: 4886387 - DNA, 25 bp, Homo sapien
atttggagtccggtgatggtggaga

SEQ ID NO: 4886388 - DNA, 25 bp, Homo sapien
gagaaatattagacacagcaaggtc

SEQ ID NO: 4886389 - DNA, 25 bp, Homo sapien
gaatagcatttgaataagagacttc

SEQ ID NO: 4886390 - DNA, 25 bp, Homo sapien
gcatttgaataagagacttccttac

SEQ ID NO: 4886391 - DNA, 25 bp, Homo sapien
tagcatttgaataagagacttcctt

SEQ ID NO: 4886392 - DNA, 25 bp, Homo sapien
aatagcatttgaataagagacttcc

SEQ ID NO: 4886393 - DNA, 25 bp, Homo sapien
taccaaagcagtaggccattgagag

SEQ ID NO: 4886394 - DNA, 25 bp, Homo sapien
tattatactcaaaagggtccaagtg

SEQ ID NO: 4886395 - DNA, 25 bp, Homo sapien
gagaatcccagtagctaccaaagca

SEQ ID NO: 4886396 - DNA, 25 bp, Homo sapien
tttgatcaccaatatcggaggtggg

SEQ ID NO: 4886397 - DNA, 25 bp, Homo sapien
cctaggtttaagagagagaagttca

SEQ ID NO: 4886398 - DNA, 25 bp, Homo sapien
taaaattactaacatgccagtgtgc

SEQ ID NO: 4886399 - DNA, 25 bp, Homo sapien
gcagcagagagtagacacagtaacc

SEQ ID NO: 4886400 - DNA, 25 bp, Homo sapien
tccagaaaacacttcgaggcccatg

SEQ ID NO: 4886401 - DNA, 25 bp, Homo sapien
ctttggatgctctactgaccttggc

SEQ ID NO: 4886402 - DNA, 25 bp, Homo sapien
tttggatgctctactgaccttggca

SEQ ID NO: 4886403 - DNA, 25 bp, Homo sapien
ttcgagagagattctcaagggcttt

SEQ ID NO: 4886404 - DNA, 25 bp, Homo sapien
tcacggctttgtggtttagtcctcc

SEQ ID NO: 4886405 - DNA, 25 bp, Homo sapien
tcgagagagattctcaagggctttc

SEQ ID NO: 4886406 - DNA, 25 bp, Homo sapien
aattcatcaaaatcacggctttgtg

SEQ ID NO: 4886407 - DNA, 25 bp, Homo sapien
ggttaggagtttcaattataatcaa

SEQ ID NO: 4886408 - DNA, 25 bp, Homo sapien
taggagtttcaattataatcaagta

SEQ ID NO: 4886409 - DNA, 25 bp, Homo sapien
ttggttaggagtttcaattataatc

SEQ ID NO: 4886410 - DNA, 25 bp, Homo sapien
gttaggagtttcaattataatcaag

SEQ ID NO: 4886411 - DNA, 25 bp, Homo sapien
gtccacagcttgaactctgacactt

SEQ ID NO: 4886412 - DNA, 25 bp, Homo sapien
tggtccacagcttgaactctgacac

SEQ ID NO: 4886413 - DNA, 25 bp, Homo sapien
ttactccaactattatcttctctcc

SEQ ID NO: 4886414 - DNA, 25 bp, Homo sapien
atttactccaactattatcttctct

SEQ ID NO: 4886415 - DNA, 25 bp, Homo sapien
tactccaactattatcttctctccc

SEQ ID NO: 4886416 - DNA, 25 bp, Homo sapien
ctccaactattatcttctctccctc

SEQ ID NO: 4886417 - DNA, 25 bp, Homo sapien
gaagataacggtgcagggagtcacc

SEQ ID NO: 4886418 - DNA, 25 bp, Homo sapien
catttcacaaaagtaggttcgattc

SEQ ID NO: 4886419 - DNA, 25 bp, Homo sapien
caaccttgatgctatcgtacttcag

SEQ ID NO: 4886420 - DNA, 25 bp, Homo sapien
gctcagccacagagttagaattagg

SEQ ID NO: 4886421 - DNA, 25 bp, Homo sapien
cttatcgagttcatctgaaattgca

SEQ ID NO: 4886422 - DNA, 25 bp, Homo sapien
ttatcgagttcatctgaaattgcaa

SEQ ID NO: 4886423 - DNA, 25 bp, Homo sapien
tcgagttcatctgaaattgcaatac

SEQ ID NO: 4886424 - DNA, 25 bp, Homo sapien
tatcgagttcatctgaaattgcaat

SEQ ID NO: 4886425 - DNA, 25 bp, Homo sapien
ctccaatcacacggggcctcagaag

SEQ ID NO: 4886426 - DNA, 25 bp, Homo sapien
ggctgtagcatttcagcagctaggg

SEQ ID NO: 4886427 - DNA, 25 bp, Homo sapien
agctaggggatcagcatcattttct

SEQ ID NO: 4886428 - DNA, 25 bp, Homo sapien
caggactagagccactatcttcact

SEQ ID NO: 4886429 - DNA, 25 bp, Homo sapien
atagaatctcagcagacagctcatc

SEQ ID NO: 4886430 - DNA, 25 bp, Homo sapien
tcatacaatgtcatatttgggggac

SEQ ID NO: 4886431 - DNA, 25 bp, Homo sapien
gaatcttgagagagcattgcggcca

SEQ ID NO: 4886432 - DNA, 25 bp, Homo sapien
tgcggccaggagtttcttatgttgc

SEQ ID NO: 4886433 - DNA, 25 bp, Homo sapien
tgtggatggactcaaaagaatcttg

SEQ ID NO: 4886434 - DNA, 25 bp, Homo sapien
gggctgtggatggactcaaaagaat

SEQ ID NO: 4886435 - DNA, 25 bp, Homo sapien
cagcaattccattgcatcatcttca

SEQ ID NO: 4886436 - DNA, 25 bp, Homo sapien
cattatcaatatcttcttctgttac

SEQ ID NO: 4886437 - DNA, 25 bp, Homo sapien
ccagcaattccattgcatcatcttc

SEQ ID NO: 4886438 - DNA, 25 bp, Homo sapien
tcttcattatcaatatcttcttctg

SEQ ID NO: 4886439 - DNA, 25 bp, Homo sapien
tatggagcacaatcgcaaaacagcc

SEQ ID NO: 4886440 - DNA, 25 bp, Homo sapien
tccaattagcgcagttagcacaggt

SEQ ID NO: 4886441 - DNA, 25 bp, Homo sapien
cgtagtcagaaggtaaagtgcagca

SEQ ID NO: 4886442 - DNA, 25 bp, Homo sapien
tgttgaatgaagctaccactgccac

SEQ ID NO: 4886443 - DNA, 25 bp, Homo sapien
caaatatattggaaatggctgtgtc

SEQ ID NO: 4886444 - DNA, 25 bp, Homo sapien
caaactattgacgtttattctacta

SEQ ID NO: 4886445 - DNA, 25 bp, Homo sapien
ctcagtgaaaagctataacataaac

SEQ ID NO: 4886446 - DNA, 25 bp, Homo sapien
tatgtgtcaaaaaacgtggaactta

SEQ ID NO: 4886447 - DNA, 25 bp, Homo sapien
ccatcaaattgtgctgcttcaaaca

SEQ ID NO: 4886448 - DNA, 25 bp, Homo sapien
cacagtgaattaatgtgaaaccatc

SEQ ID NO: 4886449 - DNA, 25 bp, Homo sapien
taagcccaacttttgctactagaga

SEQ ID NO: 4886450 - DNA, 25 bp, Homo sapien
tagtgctttgtgttggtatagccaa

SEQ ID NO: 4886451 - DNA, 25 bp, Homo sapien
ttgatgttaaaatgcaaccaagtgc

SEQ ID NO: 4886452 - DNA, 25 bp, Homo sapien
tgcacattttcaaccacgaataaaa

SEQ ID NO: 4886453 - DNA, 25 bp, Homo sapien
taaatggattcctatagttatacat

SEQ ID NO: 4886454 - DNA, 25 bp, Homo sapien
tgcaaccaagtgctgaattaattac

SEQ ID NO: 4886455 - DNA, 25 bp, Homo sapien
ttctgaaccacaggcgtttgagcat

SEQ ID NO: 4886456 - DNA, 25 bp, Homo sapien
cttctgaaccacaggcgtttgagca

SEQ ID NO: 4886457 - DNA, 25 bp, Homo sapien
ctataaacaaaagcaaatccaggta

SEQ ID NO: 4886458 - DNA, 25 bp, Homo sapien
ataaacaaaagcaaatccaggtaat

SEQ ID NO: 4886459 - DNA, 25 bp, Homo sapien
acaaaagcaaatccaggtaatttct

SEQ ID NO: 4886460 - DNA, 25 bp, Homo sapien
aagcaaatccaggtaatttctccat

SEQ ID NO: 4886461 - DNA, 25 bp, Homo sapien
ttttaggctgaggtgtttttcgaca

SEQ ID NO: 4886462 - DNA, 25 bp, Homo sapien
tttaggctgaggtgtttttcgacat

SEQ ID NO: 4886463 - DNA, 25 bp, Homo sapien
ctgagtgttgatggagttcatgtct

SEQ ID NO: 4886464 - DNA, 25 bp, Homo sapien
taactctttcaagcagataatccca

SEQ ID NO: 4886465 - DNA, 25 bp, Homo sapien
taatcccaaacttgaaacatgagcc

SEQ ID NO: 4886466 - DNA, 25 bp, Homo sapien
acatgagggacaaactgagtgttga

SEQ ID NO: 4886467 - DNA, 25 bp, Homo sapien
gaggtatatggcatttttatcatgt

SEQ ID NO: 4886468 - DNA, 25 bp, Homo sapien
ctggaggttttgttcaattgtaaat

SEQ ID NO: 4886469 - DNA, 25 bp, Homo sapien
ttatcatgttagcaaatttagggca

SEQ ID NO: 4886470 - DNA, 25 bp, Homo sapien
ggcataaagatatctccttactgag

SEQ ID NO: 4886471 - DNA, 25 bp, Homo sapien
attatataaggccacccatttcagg

SEQ ID NO: 4886472 - DNA, 25 bp, Homo sapien
caaaaagggtgcaatatccagttct

SEQ ID NO: 4886473 - DNA, 25 bp, Homo sapien
tttatgcaaaaagggtgcaatatcc

SEQ ID NO: 4886474 - DNA, 25 bp, Homo sapien
agaagtttatgcaaaaagggtgcaa

SEQ ID NO: 4886475 - DNA, 25 bp, Homo sapien
tagcatccacgaaattgacatctgg

SEQ ID NO: 4886476 - DNA, 25 bp, Homo sapien
caccccggatctgtgctgtgcttgg

SEQ ID NO: 4886477 - DNA, 25 bp, Homo sapien
tggtgcctgcagatcacaaaccagg

SEQ ID NO: 4886478 - DNA, 25 bp, Homo sapien
caaaaagcagcaacctagtccaggg

SEQ ID NO: 4886479 - DNA, 25 bp, Homo sapien
gaattagcctagtccaagggtgagc

SEQ ID NO: 4886480 - DNA, 25 bp, Homo sapien
cgtttgctgttcatagccttgggaa

SEQ ID NO: 4886481 - DNA, 25 bp, Homo sapien
gaatagctgaatgaacacacggatg

SEQ ID NO: 4886482 - DNA, 25 bp, Homo sapien
tactgtctgtggctactctgaacga

SEQ ID NO: 4886483 - DNA, 25 bp, Homo sapien
gagcatgagaggagattcgtctgac

SEQ ID NO: 4886484 - DNA, 25 bp, Homo sapien
tgcttgttccaagggggtatcctgc

SEQ ID NO: 4886485 - DNA, 25 bp, Homo sapien
aggtgactcttggtgtcatcttcgc

SEQ ID NO: 4886486 - DNA, 25 bp, Homo sapien
tcttggtgtcatcttcgctgcttgt

SEQ ID NO: 4886487 - DNA, 25 bp, Homo sapien
gccacaccaggcataacatataaac

SEQ ID NO: 4886488 - DNA, 25 bp, Homo sapien
tcggtacccgtagcttttgatctcc

SEQ ID NO: 4886489 - DNA, 25 bp, Homo sapien
caaagttagctgtgccacggcctct

SEQ ID NO: 4886490 - DNA, 25 bp, Homo sapien
cccactggtgcgctttgctgtctga

SEQ ID NO: 4886491 - DNA, 25 bp, Homo sapien
cagtcaggatatatgagggaatatc

SEQ ID NO: 4886492 - DNA, 25 bp, Homo sapien
ttggatacattattccaggcactgg

SEQ ID NO: 4886493 - DNA, 25 bp, Homo sapien
taaagtaagacacaattcctgcacc

SEQ ID NO: 4886494 - DNA, 25 bp, Homo sapien
tcctgcacccagttagtaaggctat

SEQ ID NO: 4886495 - DNA, 25 bp, Homo sapien
acttccaaagtcgctctataattca

SEQ ID NO: 4886496 - DNA, 25 bp, Homo sapien
gacttccaaagtcgctctataattc

SEQ ID NO: 4886497 - DNA, 25 bp, Homo sapien
agacttccaaagtcgctctataatt

SEQ ID NO: 4886498 - DNA, 25 bp, Homo sapien
cttccaaagtcgctctataattcat

SEQ ID NO: 4886499 - DNA, 25 bp, Homo sapien
tcattaccaagggtttcaactatca

SEQ ID NO: 4886500 - DNA, 25 bp, Homo sapien
tatcacgtgcatactagtaacccct

SEQ ID NO: 4886501 - DNA, 25 bp, Homo sapien
taacccctagatacacctccaggga

SEQ ID NO: 4886502 - DNA, 25 bp, Homo sapien
gagcttagccccatacagtcactgg

SEQ ID NO: 4886503 - DNA, 25 bp, Homo sapien
ccccatcacaaatgatatatacgaa

SEQ ID NO: 4886504 - DNA, 25 bp, Homo sapien
ataacaccagtccagtatttcatca

SEQ ID NO: 4886505 - DNA, 25 bp, Homo sapien
catcacaaatgatatatacgaacat

SEQ ID NO: 4886506 - DNA, 25 bp, Homo sapien
tatttcatcagataccccatcacaa

SEQ ID NO: 4886507 - DNA, 25 bp, Homo sapien
tacacttcaagccacaaagcatcgc

SEQ ID NO: 4886508 - DNA, 25 bp, Homo sapien
aaagcatcgccaccccaagtggaat

SEQ ID NO: 4886509 - DNA, 25 bp, Homo sapien
gccacatgccacaggatgttgcctc

SEQ ID NO: 4886510 - DNA, 25 bp, Homo sapien
tttcccaccgctgagatgcaagcca

SEQ ID NO: 4886511 - DNA, 25 bp, Homo sapien
gaaactgcttcaacaactgctatgg

SEQ ID NO: 4886512 - DNA, 25 bp, Homo sapien
aattggctcctgcagtcttagaaga

SEQ ID NO: 4886513 - DNA, 25 bp, Homo sapien
ctatcacagtgtgggagaacagaga

SEQ ID NO: 4886514 - DNA, 25 bp, Homo sapien
gaattcatttgctggttcactggag

SEQ ID NO: 4886515 - DNA, 25 bp, Homo sapien
tggttaaatttgctcccagaaggta

SEQ ID NO: 4886516 - DNA, 25 bp, Homo sapien
ctcagcagggtaagtaggacggcct

SEQ ID NO: 4886517 - DNA, 25 bp, Homo sapien
cggccttggttaaatttgctcccag

SEQ ID NO: 4886518 - DNA, 25 bp, Homo sapien
acagatgttcagtgtgaccttggcc

SEQ ID NO: 4886519 - DNA, 25 bp, Homo sapien
ggctttgaatgttcagagctgttaa

SEQ ID NO: 4886520 - DNA, 25 bp, Homo sapien
tttaaaagtggctttgaatgttcag

SEQ ID NO: 4886521 - DNA, 25 bp, Homo sapien
caggtgctttaaaagtggctttgaa

SEQ ID NO: 4886522 - DNA, 25 bp, Homo sapien
aaagtggctttgaatgttcagagct

SEQ ID NO: 4886523 - DNA, 25 bp, Homo sapien
tatcacagatattctcgaacgtcca

SEQ ID NO: 4886524 - DNA, 25 bp, Homo sapien
aggatgcttattctctgggtggcct

SEQ ID NO: 4886525 - DNA, 25 bp, Homo sapien
gttttcattccctaattgtaggatg

SEQ ID NO: 4886526 - DNA, 25 bp, Homo sapien
cagatattctcgaacgtccaaaaat

SEQ ID NO: 4886527 - DNA, 25 bp, Homo sapien
tggatttagcaatgttgaggccctg

SEQ ID NO: 4886528 - DNA, 25 bp, Homo sapien
tgttgaggccctgaattagatacaa

SEQ ID NO: 4886529 - DNA, 25 bp, Homo sapien
gaatcaatacatatgttgttaccct

SEQ ID NO: 4886530 - DNA, 25 bp, Homo sapien
tacaaatgaatcaatacatatgttg

SEQ ID NO: 4886531 - DNA, 25 bp, Homo sapien
aataattatattttaccgctagaat

SEQ ID NO: 4886532 - DNA, 25 bp, Homo sapien
ataattatattttaccgctagaatt

SEQ ID NO: 4886533 - DNA, 25 bp, Homo sapien
ctgatttctggtaggcacataacct

SEQ ID NO: 4886534 - DNA, 25 bp, Homo sapien
tcaccaagcacagggaccttcaaca

SEQ ID NO: 4886535 - DNA, 25 bp, Homo sapien
taggcacataacctggaagaggaga

SEQ ID NO: 4886536 - DNA, 25 bp, Homo sapien
tggtaggcacataacctggaagagg

SEQ ID NO: 4886537 - DNA, 25 bp, Homo sapien
ggaaaggtgtcaccaaggcagctgt

SEQ ID NO: 4886538 - DNA, 25 bp, Homo sapien
gaggaaaggtgtcaccaaggcagct

SEQ ID NO: 4886539 - DNA, 25 bp, Homo sapien
aaaggtgtcaccaaggcagctgtgg

SEQ ID NO: 4886540 - DNA, 25 bp, Homo sapien
gaggaggaaaggtgtcaccaaggca

SEQ ID NO: 4886541 - DNA, 25 bp, Homo sapien
gaaatcccagagtgtcctgggtgaa

SEQ ID NO: 4886542 - DNA, 25 bp, Homo sapien
ggaaatcccagagtgtcctgggtga

SEQ ID NO: 4886543 - DNA, 25 bp, Homo sapien
tggaaatcccagagtgtcctgggtg

SEQ ID NO: 4886544 - DNA, 25 bp, Homo sapien
aatcccagagtgtcctgggtgaaat

SEQ ID NO: 4886545 - DNA, 25 bp, Homo sapien
cctacttgggattctataaccttct

SEQ ID NO: 4886546 - DNA, 25 bp, Homo sapien
ttgtaatctttacggtctgggcttg

SEQ ID NO: 4886547 - DNA, 25 bp, Homo sapien
ccaagattgctcattggtgacttat

SEQ ID NO: 4886548 - DNA, 25 bp, Homo sapien
gatagggttctaaattccctctgtg

SEQ ID NO: 4886549 - DNA, 25 bp, Homo sapien
gaactgaccccattattatataatc

SEQ ID NO: 4886550 - DNA, 25 bp, Homo sapien
gccatgccaggtgcgtgcatattta

SEQ ID NO: 4886551 - DNA, 25 bp, Homo sapien
gagctcaagcaagcagctagcctca

SEQ ID NO: 4886552 - DNA, 25 bp, Homo sapien
aaagttccgggattatatgcatgct

SEQ ID NO: 4886553 - DNA, 25 bp, Homo sapien
tcttagtaccactttcactttatcc

SEQ ID NO: 4886554 - DNA, 25 bp, Homo sapien
ctcttagtaccactttcactttatc

SEQ ID NO: 4886555 - DNA, 25 bp, Homo sapien
cctcttagtaccactttcactttat

SEQ ID NO: 4886556 - DNA, 25 bp, Homo sapien
cagacatcaaatttgtcattttcat

SEQ ID NO: 4886557 - DNA, 25 bp, Homo sapien
tttccagacatcaaatttgtcattt

SEQ ID NO: 4886558 - DNA, 25 bp, Homo sapien
aatttgtcattttcatttctaccca

SEQ ID NO: 4886559 - DNA, 25 bp, Homo sapien
tccagacatcaaatttgtcattttc

SEQ ID NO: 4886560 - DNA, 25 bp, Homo sapien
cttttctgaactggggatcctgtgc

SEQ ID NO: 4886561 - DNA, 25 bp, Homo sapien
tcctgtgcttcatgtttgtcttgaa

SEQ ID NO: 4886562 - DNA, 25 bp, Homo sapien
tagaatgtatttaggtcctgtctcg

SEQ ID NO: 4886563 - DNA, 25 bp, Homo sapien
gtcttgaagcagacatcccaggccc

SEQ ID NO: 4886564 - DNA, 25 bp, Homo sapien
cagatgagattgggtatgttaaaag

SEQ ID NO: 4886565 - DNA, 25 bp, Homo sapien
tatactccataaactccaaaccgct

SEQ ID NO: 4886566 - DNA, 25 bp, Homo sapien
ggatcctccaccatggattttatac

SEQ ID NO: 4886567 - DNA, 25 bp, Homo sapien
tcaggtgttttgttattaagcctct

SEQ ID NO: 4886568 - DNA, 25 bp, Homo sapien
gcaaattcatcctcttggatcctcc

SEQ ID NO: 4886569 - DNA, 25 bp, Homo sapien
taagagctgagtttactgtgacttg

SEQ ID NO: 4886570 - DNA, 25 bp, Homo sapien
tcctcgagtactctgccaatgtttc

SEQ ID NO: 4886571 - DNA, 25 bp, Homo sapien
ttactgtgacttggcaccaattcca

SEQ ID NO: 4886572 - DNA, 25 bp, Homo sapien
tgtttcccaagctgtaacccacaca

SEQ ID NO: 4886573 - DNA, 25 bp, Homo sapien
gtattggtagtgactcttctgtcct

SEQ ID NO: 4886574 - DNA, 25 bp, Homo sapien
gaatgaatctgggattttttcatct

SEQ ID NO: 4886575 - DNA, 25 bp, Homo sapien
aatggagtattggtagtgactcttc

SEQ ID NO: 4886576 - DNA, 25 bp, Homo sapien
gagaatggagtattggtagtgactc

SEQ ID NO: 4886577 - DNA, 25 bp, Homo sapien
gaatcctaaccgctagcccgtgtgg

SEQ ID NO: 4886578 - DNA, 25 bp, Homo sapien
accaggaatcctaaccgctagcccg

SEQ ID NO: 4886579 - DNA, 25 bp, Homo sapien
caggaatcctaaccgctagcccgtg

SEQ ID NO: 4886580 - DNA, 25 bp, Homo sapien
tcctaaccgctagcccgtgtgggag

SEQ ID NO: 4886581 - DNA, 25 bp, Homo sapien
gcttcttcagtcccaggcaaggaat

SEQ ID NO: 4886582 - DNA, 25 bp, Homo sapien
agtgcttcttcagtcccaggcaagg

SEQ ID NO: 4886583 - DNA, 25 bp, Homo sapien
tagtgcttcttcagtcccaggcaag

SEQ ID NO: 4886584 - DNA, 25 bp, Homo sapien
tgcttcttcagtcccaggcaaggaa

SEQ ID NO: 4886585 - DNA, 25 bp, Homo sapien
aggtcctgttagtttagatgctttc

SEQ ID NO: 4886586 - DNA, 25 bp, Homo sapien
tgctttctcaaattcgtcaccctcc

SEQ ID NO: 4886587 - DNA, 25 bp, Homo sapien
gctttctcaaattcgtcaccctcct

SEQ ID NO: 4886588 - DNA, 25 bp, Homo sapien
tttctcaaattcgtcaccctcctcc

SEQ ID NO: 4886589 - DNA, 25 bp, Homo sapien
tattaagtcctttagcctttgcagt

SEQ ID NO: 4886590 - DNA, 25 bp, Homo sapien
aagtcctttagcctttgcagtcttt

SEQ ID NO: 4886591 - DNA, 25 bp, Homo sapien
ttaagtcctttagcctttgcagtct

SEQ ID NO: 4886592 - DNA, 25 bp, Homo sapien
caagtattaagtcctttagcctttg

SEQ ID NO: 4886593 - DNA, 25 bp, Homo sapien
ttctttggcctcaagcttccaacct

SEQ ID NO: 4886594 - DNA, 25 bp, Homo sapien
aatgtcttctttggcctcaagcttc

SEQ ID NO: 4886595 - DNA, 25 bp, Homo sapien
cttctttggcctcaagcttccaacc

SEQ ID NO: 4886596 - DNA, 25 bp, Homo sapien
tgtcttctttggcctcaagcttcca

SEQ ID NO: 4886597 - DNA, 25 bp, Homo sapien
tcagaggtagagacttttagagtgg

SEQ ID NO: 4886598 - DNA, 25 bp, Homo sapien
agtagaatttcagaggtagagactt

SEQ ID NO: 4886599 - DNA, 25 bp, Homo sapien
gaggtagagacttttagagtggtca

SEQ ID NO: 4886600 - DNA, 25 bp, Homo sapien
aaagtagaatttcagaggtagagac

SEQ ID NO: 4886601 - DNA, 25 bp, Homo sapien
taatccggaatacaactttccctca

SEQ ID NO: 4886602 - DNA, 25 bp, Homo sapien
aatccggaatacaactttccctcat

SEQ ID NO: 4886603 - DNA, 25 bp, Homo sapien
tcacagctaagaaatcttttgagag

SEQ ID NO: 4886604 - DNA, 25 bp, Homo sapien
aaatataagtcccacaccaggagaa

SEQ ID NO: 4886605 - DNA, 25 bp, Homo sapien
tcagtagaccccgacaaggtacttc

SEQ ID NO: 4886606 - DNA, 25 bp, Homo sapien
tgagagttcactgttgagaaagctc

SEQ ID NO: 4886607 - DNA, 25 bp, Homo sapien
gaacccagttcaaagcaaacatctt

SEQ ID NO: 4886608 - DNA, 25 bp, Homo sapien
tgaacactgaggtttattacaatgt

SEQ ID NO: 4886609 - DNA, 25 bp, Homo sapien
ttgaggtcttactgaacatgactga

SEQ ID NO: 4886610 - DNA, 25 bp, Homo sapien
ggtatgcccatctttagaacccagt

SEQ ID NO: 4886611 - DNA, 25 bp, Homo sapien
tccatgtagtttttcagtgagtgtc

SEQ ID NO: 4886612 - DNA, 25 bp, Homo sapien
cagtgagtgtcctactccactggag

SEQ ID NO: 4886613 - DNA, 25 bp, Homo sapien
ttcagtgagtgtcctactccactgg

SEQ ID NO: 4886614 - DNA, 25 bp, Homo sapien
tgagtgtcctactccactggaggct

SEQ ID NO: 4886615 - DNA, 25 bp, Homo sapien
tatcctgtttttgtggacatgacca

SEQ ID NO: 4886616 - DNA, 25 bp, Homo sapien
gagtgcttcatcctgtatcataaac

SEQ ID NO: 4886617 - DNA, 25 bp, Homo sapien
ccctacaagtagatggagaaagcct

SEQ ID NO: 4886618 - DNA, 25 bp, Homo sapien
gaacacatacagactagaaacccta

SEQ ID NO: 4886619 - DNA, 25 bp, Homo sapien
cctgcaattgctttaaggattcatc

SEQ ID NO: 4886620 - DNA, 25 bp, Homo sapien
ggttgatgaactacctgcaattgct

SEQ ID NO: 4886621 - DNA, 25 bp, Homo sapien
caagatccatggttgatgaactacc

SEQ ID NO: 4886622 - DNA, 25 bp, Homo sapien
ttctgtgtcacttggcaagatccat

SEQ ID NO: 4886623 - DNA, 25 bp, Homo sapien
aaaatgcagaattcagagtcccagc

SEQ ID NO: 4886624 - DNA, 25 bp, Homo sapien
atgcagaattcagagtcccagccac

SEQ ID NO: 4886625 - DNA, 25 bp, Homo sapien
aaatgcagaattcagagtcccagcc

SEQ ID NO: 4886626 - DNA, 25 bp, Homo sapien
tacagacattaagacctcaggaaga

SEQ ID NO: 4886627 - DNA, 25 bp, Homo sapien
gagggtactggctaaattgattcta

SEQ ID NO: 4886628 - DNA, 25 bp, Homo sapien
tgtaagcattgaacccacagtctgg

SEQ ID NO: 4886629 - DNA, 25 bp, Homo sapien
gaggacctgtctgatattatttggc

SEQ ID NO: 4886630 - DNA, 25 bp, Homo sapien
ggagttctaaatgccccagttctta

SEQ ID NO: 4886631 - DNA, 25 bp, Homo sapien
catggcttgttccacagttagagag

SEQ ID NO: 4886632 - DNA, 25 bp, Homo sapien
tctccctgccttaaggagacccagg

SEQ ID NO: 4886633 - DNA, 25 bp, Homo sapien
ttgcaggtgacaggctctataccgt

SEQ ID NO: 4886634 - DNA, 25 bp, Homo sapien
tcttttattttgtagttgtaggcca

SEQ ID NO: 4886635 - DNA, 25 bp, Homo sapien
gtccatcaaggttaaagaatgaagt

SEQ ID NO: 4886636 - DNA, 25 bp, Homo sapien
caaggttaaagaatgaagtagattt

SEQ ID NO: 4886637 - DNA, 25 bp, Homo sapien
tttattttgtagttgtaggccacac

SEQ ID NO: 4886638 - DNA, 25 bp, Homo sapien
acgcaaagaagaagatcagcggaac

SEQ ID NO: 4886639 - DNA, 25 bp, Homo sapien
cagagtagaccagcgtaggacaaga

SEQ ID NO: 4886640 - DNA, 25 bp, Homo sapien
gaccagcgtaggacaagaagagcat

SEQ ID NO: 4886641 - DNA, 25 bp, Homo sapien
caagaagagcatggaacgcaaagaa

SEQ ID NO: 4886642 - DNA, 25 bp, Homo sapien
catcgatattaagtgccctgagcaa

SEQ ID NO: 4886643 - DNA, 25 bp, Homo sapien
tcgatattaagtgccctgagcaaac

SEQ ID NO: 4886644 - DNA, 25 bp, Homo sapien
tattaagtgccctgagcaaacatac

SEQ ID NO: 4886645 - DNA, 25 bp, Homo sapien
ccgacatcgatattaagtgccctga

SEQ ID NO: 4886646 - DNA, 25 bp, Homo sapien
cattttctatgttttgggccatgca

SEQ ID NO: 4886647 - DNA, 25 bp, Homo sapien
taacacattccaaaagcgagcatat

SEQ ID NO: 4886648 - DNA, 25 bp, Homo sapien
tgcacacaacatgtatggcaggtga

SEQ ID NO: 4886649 - DNA, 25 bp, Homo sapien
tctaaacccaggactctaaccatgt

SEQ ID NO: 4886650 - DNA, 25 bp, Homo sapien
gtggtggttaaaggtttgcactgat

SEQ ID NO: 4886651 - DNA, 25 bp, Homo sapien
tggtggttaaaggtttgcactgatc

SEQ ID NO: 4886652 - DNA, 25 bp, Homo sapien
gtggttaaaggtttgcactgatctc

SEQ ID NO: 4886653 - DNA, 25 bp, Homo sapien
ggtggttaaaggtttgcactgatct

SEQ ID NO: 4886654 - DNA, 25 bp, Homo sapien
gacgtgaaacctttttgacagccag

SEQ ID NO: 4886655 - DNA, 25 bp, Homo sapien
cagccaatgcatatgagtcccggga

SEQ ID NO: 4886656 - DNA, 25 bp, Homo sapien
tgattagcatgctcgacaccaccat

SEQ ID NO: 4886657 - DNA, 25 bp, Homo sapien
gggcctggacctgttcacacatgaa

SEQ ID NO: 4886658 - DNA, 25 bp, Homo sapien
tggatgtggcttacatcttgcatga

SEQ ID NO: 4886659 - DNA, 25 bp, Homo sapien
gctcgggtatcatagtgtctatttc

SEQ ID NO: 4886660 - DNA, 25 bp, Homo sapien
ccacaaaggattttatgctcgggta

SEQ ID NO: 4886661 - DNA, 25 bp, Homo sapien
tcatatccatgcctatggatgtggc

SEQ ID NO: 4886662 - DNA, 25 bp, Homo sapien
cagctcttaagagcgtgcccatgac

SEQ ID NO: 4886663 - DNA, 25 bp, Homo sapien
gggcagtaagtgtgcctctcagcca

SEQ ID NO: 4886664 - DNA, 25 bp, Homo sapien
catgacatgagtgcagaggtgaatc

SEQ ID NO: 4886665 - DNA, 25 bp, Homo sapien
gttgtggggcgccagcagctcttaa

SEQ ID NO: 4886666 - DNA, 25 bp, Homo sapien
caatgtctgatactaagctgagggc

SEQ ID NO: 4886667 - DNA, 25 bp, Homo sapien
ttcgtttagtagtatgaccagacac

SEQ ID NO: 4886668 - DNA, 25 bp, Homo sapien
caactgagataggtaacaattgagt

SEQ ID NO: 4886669 - DNA, 25 bp, Homo sapien
gacacaagtgttggcagagtgctga

SEQ ID NO: 4886670 - DNA, 25 bp, Homo sapien
ccacgatggcaagactgatggtcat

SEQ ID NO: 4886671 - DNA, 25 bp, Homo sapien
gccacgatggcaagactgatggtca

SEQ ID NO: 4886672 - DNA, 25 bp, Homo sapien
ggccacgatggcaagactgatggtc

SEQ ID NO: 4886673 - DNA, 25 bp, Homo sapien
tttcttggcaaagtcacacccggag

SEQ ID NO: 4886674 - DNA, 25 bp, Homo sapien
cacccggagatttggctccatgtga

SEQ ID NO: 4886675 - DNA, 25 bp, Homo sapien
ggcaaagtcacacccggagatttgg

SEQ ID NO: 4886676 - DNA, 25 bp, Homo sapien
aagtcacacccggagatttggctcc

SEQ ID NO: 4886677 - DNA, 25 bp, Homo sapien
tgtagttgtctattcttcagctttg

SEQ ID NO: 4886678 - DNA, 25 bp, Homo sapien
aggtcgtgtagttgtctattcttca

SEQ ID NO: 4886679 - DNA, 25 bp, Homo sapien
ataggtcgtgtagttgtctattctt

SEQ ID NO: 4886680 - DNA, 25 bp, Homo sapien
taggtcgtgtagttgtctattcttc

SEQ ID NO: 4886681 - DNA, 25 bp, Homo sapien
gtttgaaagtatctctaagccagtg

SEQ ID NO: 4886682 - DNA, 25 bp, Homo sapien
acacacgtgcacatagggagaccac

SEQ ID NO: 4886683 - DNA, 25 bp, Homo sapien
tgcgaaagattgctagaaaaccacc

SEQ ID NO: 4886684 - DNA, 25 bp, Homo sapien
tatgctgaggctctaacccagttag

SEQ ID NO: 4886685 - DNA, 25 bp, Homo sapien
ggaaacatttatcttcacgtgcttc

SEQ ID NO: 4886686 - DNA, 25 bp, Homo sapien
taaatctctcttatatgattcatac

SEQ ID NO: 4886687 - DNA, 25 bp, Homo sapien
atgggaaacatttatcttcacgtgc

SEQ ID NO: 4886688 - DNA, 25 bp, Homo sapien
tcttcacgtgcttctaaatctctct

SEQ ID NO: 4886689 - DNA, 25 bp, Homo sapien
ttcttcaatgtcagttccttgtttg

SEQ ID NO: 4886690 - DNA, 25 bp, Homo sapien
gtttcttcaatgtcagttccttgtt

SEQ ID NO: 4886691 - DNA, 25 bp, Homo sapien
caatatagcaaatgtatccaatatc

SEQ ID NO: 4886692 - DNA, 25 bp, Homo sapien
atatagcaaatgtatccaatatcat

SEQ ID NO: 4886693 - DNA, 25 bp, Homo sapien
agcaatttcacagaggtctctagca

SEQ ID NO: 4886694 - DNA, 25 bp, Homo sapien
gtctctagcaaagcaattaagcatg

SEQ ID NO: 4886695 - DNA, 25 bp, Homo sapien
gcaattaagcatggggtagttgtca

SEQ ID NO: 4886696 - DNA, 25 bp, Homo sapien
aatttcacagaggtctctagcaaag

SEQ ID NO: 4886697 - DNA, 25 bp, Homo sapien
gggtctccaccagcgatgtatatca

SEQ ID NO: 4886698 - DNA, 25 bp, Homo sapien
tgatccccagtgcacaagattacca

SEQ ID NO: 4886699 - DNA, 25 bp, Homo sapien
gattaccacgtgaatggcaatgaaa

SEQ ID NO: 4886700 - DNA, 25 bp, Homo sapien
caatgaaatttgtggcgctgatact

SEQ ID NO: 4886701 - DNA, 25 bp, Homo sapien
tcagacaccacgaagaagaaaagcc

SEQ ID NO: 4886702 - DNA, 25 bp, Homo sapien
cttaaacacagggacataaatcctg

SEQ ID NO: 4886703 - DNA, 25 bp, Homo sapien
cataaatcctgagaacaatatttgg

SEQ ID NO: 4886704 - DNA, 25 bp, Homo sapien
tgaaaatgatgaagttttgtggact

SEQ ID NO: 4886705 - DNA, 25 bp, Homo sapien
ggccttgagaaagaagggcttgaat

SEQ ID NO: 4886706 - DNA, 25 bp, Homo sapien
tgcacccagggccttataaggcctt

SEQ ID NO: 4886707 - DNA, 25 bp, Homo sapien
gggcttgaataggtccaagtaacag

SEQ ID NO: 4886708 - DNA, 25 bp, Homo sapien
cagggccttataaggccttgagaaa

SEQ ID NO: 4886709 - DNA, 25 bp, Homo sapien
aaaactagggcaaatcgacgagcaa

SEQ ID NO: 4886710 - DNA, 25 bp, Homo sapien
gatgaagatgaaggctcagcttccc

SEQ ID NO: 4886711 - DNA, 25 bp, Homo sapien
aagatgaaggctcagcttcccacca

SEQ ID NO: 4886712 - DNA, 25 bp, Homo sapien
tcccaccatcccctgctgacaccat

SEQ ID NO: 4886713 - DNA, 25 bp, Homo sapien
ctgatgaagatgaaggctcagcttc

SEQ ID NO: 4886714 - DNA, 25 bp, Homo sapien
cacaaagcccatactacttctcccc

SEQ ID NO: 4886715 - DNA, 25 bp, Homo sapien
agtcacattattccccatatccaat

SEQ ID NO: 4886716 - DNA, 25 bp, Homo sapien
ttcagtcacattattccccatatcc

SEQ ID NO: 4886717 - DNA, 25 bp, Homo sapien
acacaaagcccatactacttctccc

SEQ ID NO: 4886718 - DNA, 25 bp, Homo sapien
ctgtctttggatctccttctgtgag

SEQ ID NO: 4886719 - DNA, 25 bp, Homo sapien
tctgtcatctgtctttggatctcct

SEQ ID NO: 4886720 - DNA, 25 bp, Homo sapien
tgaggctccacagtaggaccacatt

SEQ ID NO: 4886721 - DNA, 25 bp, Homo sapien
tgctgaggctccacagtaggaccac

SEQ ID NO: 4886722 - DNA, 25 bp, Homo sapien
gggcagcggcggacctcgtctgggc

SEQ ID NO: 4886723 - DNA, 25 bp, Homo sapien
tctgccgagagctgcacggccgcac

SEQ ID NO: 4886724 - DNA, 25 bp, Homo sapien
cggacctcgtctgggctcggctctg

SEQ ID NO: 4886725 - DNA, 25 bp, Homo sapien
gcggaggcacggaggcgcagaggca

SEQ ID NO: 4886726 - DNA, 25 bp, Homo sapien
ttcaccgcctccagggagttgaggt

SEQ ID NO: 4886727 - DNA, 25 bp, Homo sapien
agggagttgaggtggcgcggaggcg

SEQ ID NO: 4886728 - DNA, 25 bp, Homo sapien
tcaccgcctccagggagttgaggtg

SEQ ID NO: 4886729 - DNA, 25 bp, Homo sapien
gagttgaggtggcgcggaggcgcgg

SEQ ID NO: 4886730 - DNA, 25 bp, Homo sapien
gcctgctactgcaggggcctggatc

SEQ ID NO: 4886731 - DNA, 25 bp, Homo sapien
aggccctgcgcggtcttccgcctcg

SEQ ID NO: 4886732 - DNA, 25 bp, Homo sapien
gtccgcctgctactgcaggggcctg

SEQ ID NO: 4886733 - DNA, 25 bp, Homo sapien
ctgcgcggtcttccgcctcgtccgc

SEQ ID NO: 4886734 - DNA, 25 bp, Homo sapien
tcaacgagctggatgcgtcggttga

SEQ ID NO: 4886735 - DNA, 25 bp, Homo sapien
ctcaacgagctggatgcgtcggttg

SEQ ID NO: 4886736 - DNA, 25 bp, Homo sapien
cgcacgcatctctgcacgctcctct

SEQ ID NO: 4886737 - DNA, 25 bp, Homo sapien
ccgcacgcatctctgcacgctcctc

SEQ ID NO: 4886738 - DNA, 25 bp, Homo sapien
ctccgcacgcatctctgcacgctcc

SEQ ID NO: 4886739 - DNA, 25 bp, Homo sapien
tccgcacgcatctctgcacgctcct

SEQ ID NO: 4886740 - DNA, 25 bp, Homo sapien
gcgatttcagattgttagtaacatt

SEQ ID NO: 4886741 - DNA, 25 bp, Homo sapien
cagcgatttcagattgttagtaaca

SEQ ID NO: 4886742 - DNA, 25 bp, Homo sapien
tccagcgatttcagattgttagtaa

SEQ ID NO: 4886743 - DNA, 25 bp, Homo sapien
cttccagcgatttcagattgttagt

SEQ ID NO: 4886744 - DNA, 25 bp, Homo sapien
tcttcatatttgtcctccttttcag

SEQ ID NO: 4886745 - DNA, 25 bp, Homo sapien
cttcttcatatttgtcctccttttc

SEQ ID NO: 4886746 - DNA, 25 bp, Homo sapien
ttttcagaatacttttcagatgcag

SEQ ID NO: 4886747 - DNA, 25 bp, Homo sapien
tccttttcagaatacttttcagatg

SEQ ID NO: 4886748 - DNA, 25 bp, Homo sapien
tccagttttgcaaccgttctctctg

SEQ ID NO: 4886749 - DNA, 25 bp, Homo sapien
gtaagcccacgttctcttctttggc

SEQ ID NO: 4886750 - DNA, 25 bp, Homo sapien
tccagtgtctgatgtaagcccacgt

SEQ ID NO: 4886751 - DNA, 25 bp, Homo sapien
tgtctgatgtaagcccacgttctct

SEQ ID NO: 4886752 - DNA, 25 bp, Homo sapien
tatgcttaactaggaaatatcctgc

SEQ ID NO: 4886753 - DNA, 25 bp, Homo sapien
atgcttaactaggaaatatcctgcc

SEQ ID NO: 4886754 - DNA, 25 bp, Homo sapien
aagtatgcttaactaggaaatatcc

SEQ ID NO: 4886755 - DNA, 25 bp, Homo sapien
gtatgcttaactaggaaatatcctg

SEQ ID NO: 4886756 - DNA, 25 bp, Homo sapien
gctgatcagataaagagtgggtacc

SEQ ID NO: 4886757 - DNA, 25 bp, Homo sapien
cagctatgggtctctgggccacact

SEQ ID NO: 4886758 - DNA, 25 bp, Homo sapien
tatgcatcacaattgggatctcggg

SEQ ID NO: 4886759 - DNA, 25 bp, Homo sapien
gatcacatggttaaccaagctggcc

SEQ ID NO: 4886760 - DNA, 25 bp, Homo sapien
gtgagagaggtgaatcctagccact

SEQ ID NO: 4886761 - DNA, 25 bp, Homo sapien
gagaggtgaatcctagccactaaac

SEQ ID NO: 4886762 - DNA, 25 bp, Homo sapien
gaggtgaatcctagccactaaacca

SEQ ID NO: 4886763 - DNA, 25 bp, Homo sapien
gagagaggtgaatcctagccactaa

SEQ ID NO: 4886764 - DNA, 25 bp, Homo sapien
gaccctatagaatcatttggtgacg

SEQ ID NO: 4886765 - DNA, 25 bp, Homo sapien
atcaaactggttagactgtgtctcc

SEQ ID NO: 4886766 - DNA, 25 bp, Homo sapien
cactgtaggtggcagagtaaaaact

SEQ ID NO: 4886767 - DNA, 25 bp, Homo sapien
caaagtgattgtgttagaccctata

SEQ ID NO: 4886768 - DNA, 25 bp, Homo sapien
gcccatgctagaccacactttcaga

SEQ ID NO: 4886769 - DNA, 25 bp, Homo sapien
gacagctgcaaggtgtacagactgc

SEQ ID NO: 4886770 - DNA, 25 bp, Homo sapien
acagtttgtcagaagtggcatatag

SEQ ID NO: 4886771 - DNA, 25 bp, Homo sapien
tcctctgaactacgacacagtttgt

SEQ ID NO: 4886772 - DNA, 25 bp, Homo sapien
ctggcattcttgtttcccctcccgt

SEQ ID NO: 4886773 - DNA, 25 bp, Homo sapien
tttctcaacatgatcaaccgcaaac

SEQ ID NO: 4886774 - DNA, 25 bp, Homo sapien
caacatgatcaaccgcaaactccag

SEQ ID NO: 4886775 - DNA, 25 bp, Homo sapien
ctggaatgtcctttctcaacatgat

SEQ ID NO: 4886776 - DNA, 25 bp, Homo sapien
gaacacagggtctaggcccttttca

SEQ ID NO: 4886777 - DNA, 25 bp, Homo sapien
ctggaacacagggtctaggcccttt

SEQ ID NO: 4886778 - DNA, 25 bp, Homo sapien
tcaaggtctagctcaaacatttcct

SEQ ID NO: 4886779 - DNA, 25 bp, Homo sapien
tatcttgagcttctgtccccaaaca

SEQ ID NO: 4886780 - DNA, 25 bp, Homo sapien
cttgagcttctgtccccaaacaagt

SEQ ID NO: 4886781 - DNA, 25 bp, Homo sapien
tccaaattctagatgtccttcaagg

SEQ ID NO: 4886782 - DNA, 25 bp, Homo sapien
atatcctggtggaagcatcatggcc

SEQ ID NO: 4886783 - DNA, 25 bp, Homo sapien
aaatgcatctcagaggaagagggac

SEQ ID NO: 4886784 - DNA, 25 bp, Homo sapien
tccatttgaagggtctgacgtagaa

SEQ ID NO: 4886785 - DNA, 25 bp, Homo sapien
cataggcttgggatatgacgggaaa

SEQ ID NO: 4886786 - DNA, 25 bp, Homo sapien
acatgcacatcagcaagttcatcag

SEQ ID NO: 4886787 - DNA, 25 bp, Homo sapien
tgcacatcagcaagttcatcagtca

SEQ ID NO: 4886788 - DNA, 25 bp, Homo sapien
caccctccccgacatgcacatcagc

SEQ ID NO: 4886789 - DNA, 25 bp, Homo sapien
gcacatcagcaagttcatcagtcat

SEQ ID NO: 4886790 - DNA, 25 bp, Homo sapien
gacaaagacgaatgggttcatgagc

SEQ ID NO: 4886791 - DNA, 25 bp, Homo sapien
aagacgaatgggttcatgagcagga

SEQ ID NO: 4886792 - DNA, 25 bp, Homo sapien
tcactggacaaagacgaatgggttc

SEQ ID NO: 4886793 - DNA, 25 bp, Homo sapien
ccttctctcaggagccagacttcat

SEQ ID NO: 4886794 - DNA, 25 bp, Homo sapien
gtataccaaggatggtctctaatga

SEQ ID NO: 4886795 - DNA, 25 bp, Homo sapien
ttaaataactcaagaaacgacatca

SEQ ID NO: 4886796 - DNA, 25 bp, Homo sapien
gatggtctctaatgactttgcctta

SEQ ID NO: 4886797 - DNA, 25 bp, Homo sapien
tgtgtagagtataccaaggatggtc

SEQ ID NO: 4886798 - DNA, 25 bp, Homo sapien
cattccttgccaaaacttggttgcc

SEQ ID NO: 4886799 - DNA, 25 bp, Homo sapien
ccagtgacattaatgggtccattcc

SEQ ID NO: 4886800 - DNA, 25 bp, Homo sapien
cgtgtttctacaccagaggaccact

SEQ ID NO: 4886801 - DNA, 25 bp, Homo sapien
catggtcctgctgtaagatacttcc

SEQ ID NO: 4886802 - DNA, 25 bp, Homo sapien
ggcatctgggatactctcgccaaag

SEQ ID NO: 4886803 - DNA, 25 bp, Homo sapien
agaacgtaatgtgaaaatagctgca

SEQ ID NO: 4886804 - DNA, 25 bp, Homo sapien
actctgaactcttgtggattggcat

SEQ ID NO: 4886805 - DNA, 25 bp, Homo sapien
cagctattactatgtcatgggactc

SEQ ID NO: 4886806 - DNA, 25 bp, Homo sapien
gactgcctaatatcagaaaaccctg

SEQ ID NO: 4886807 - DNA, 25 bp, Homo sapien
ccctgttgactgatggatgtggaca

SEQ ID NO: 4886808 - DNA, 25 bp, Homo sapien
ttctatggagatgggaattagtgag

SEQ ID NO: 4886809 - DNA, 25 bp, Homo sapien
gggagctgagcggtttctatggaga

SEQ ID NO: 4886810 - DNA, 25 bp, Homo sapien
caactgaacgtcttttcccatgtgg

SEQ ID NO: 4886811 - DNA, 25 bp, Homo sapien
ctttgtcctgttggcaactgaacgt

SEQ ID NO: 4886812 - DNA, 25 bp, Homo sapien
catatagataaggtgcacgcaaagt

SEQ ID NO: 4886813 - DNA, 25 bp, Homo sapien
cccatgtggcacattgctagtttct

SEQ ID NO: 4886814 - DNA, 25 bp, Homo sapien
cagtgttgagcgtatttattccttc

SEQ ID NO: 4886815 - DNA, 25 bp, Homo sapien
cctgagacgcacatggcagtgttga

SEQ ID NO: 4886816 - DNA, 25 bp, Homo sapien
ccttctttccgtgagtaaggacaat

SEQ ID NO: 4886817 - DNA, 25 bp, Homo sapien
cacagcaaggaatgagggcctgaga

SEQ ID NO: 4886818 - DNA, 25 bp, Homo sapien
gatacatgctgctgggacgtttgag

SEQ ID NO: 4886819 - DNA, 25 bp, Homo sapien
gttgaaaagttccactgaggccagg

SEQ ID NO: 4886820 - DNA, 25 bp, Homo sapien
gacgtttgaggtcttgctgccccag

SEQ ID NO: 4886821 - DNA, 25 bp, Homo sapien
tagtagatagatgagccctgccagc

SEQ ID NO: 4886822 - DNA, 25 bp, Homo sapien
gccttggcctagacattaactgaga

SEQ ID NO: 4886823 - DNA, 25 bp, Homo sapien
caaatggcagctaggaagccttggc

SEQ ID NO: 4886824 - DNA, 25 bp, Homo sapien
tgaagaatcccagcatcactgaagg

SEQ ID NO: 4886825 - DNA, 25 bp, Homo sapien
ttgtaactatctcccaagagtggcc

SEQ ID NO: 4886826 - DNA, 25 bp, Homo sapien
ggccataatggccagcttcccggcc

SEQ ID NO: 4886827 - DNA, 25 bp, Homo sapien
gccataatggccagcttcccggccc

SEQ ID NO: 4886828 - DNA, 25 bp, Homo sapien
aggccataatggccagcttcccggc

SEQ ID NO: 4886829 - DNA, 25 bp, Homo sapien
agcctcctcttgagcaaggcttctg

SEQ ID NO: 4886830 - DNA, 25 bp, Homo sapien
ctccagcctcctcttgagcaaggct

SEQ ID NO: 4886831 - DNA, 25 bp, Homo sapien
ctcctcttgagcaaggcttctgcac

SEQ ID NO: 4886832 - DNA, 25 bp, Homo sapien
tccagcctcctcttgagcaaggctt

SEQ ID NO: 4886833 - DNA, 25 bp, Homo sapien
agttcgtaatcgccgtgaccattac

SEQ ID NO: 4886834 - DNA, 25 bp, Homo sapien
tcagttcgtaatcgccgtgaccatt

SEQ ID NO: 4886835 - DNA, 25 bp, Homo sapien
cagttcgtaatcgccgtgaccatta

SEQ ID NO: 4886836 - DNA, 25 bp, Homo sapien
tcttgggcccaccagttggagttgg

SEQ ID NO: 4886837 - DNA, 25 bp, Homo sapien
cagggaacgtgctctttaaaaatca

SEQ ID NO: 4886838 - DNA, 25 bp, Homo sapien
caactggaactagggacatggatgc

SEQ ID NO: 4886839 - DNA, 25 bp, Homo sapien
tagatgtatacgatcatggccactc

SEQ ID NO: 4886840 - DNA, 25 bp, Homo sapien
agagagccaagagagcaagtagtca

SEQ ID NO: 4886841 - DNA, 25 bp, Homo sapien
ggtgagttgtccagcaagcctcttg

SEQ ID NO: 4886842 - DNA, 25 bp, Homo sapien
gagcaagtagtcagcactatcttct

SEQ ID NO: 4886843 - DNA, 25 bp, Homo sapien
tctttggtgagttgtccagcaagcc

SEQ ID NO: 4886844 - DNA, 25 bp, Homo sapien
atcttcatcatctgtacctctatgg

SEQ ID NO: 4886845 - DNA, 25 bp, Homo sapien
tcagggtctatctgctgctacaggt

SEQ ID NO: 4886846 - DNA, 25 bp, Homo sapien
tcttcatcatctgtacctctatgga

SEQ ID NO: 4886847 - DNA, 25 bp, Homo sapien
agtttacatccaagacttgggagga

SEQ ID NO: 4886848 - DNA, 25 bp, Homo sapien
cgctctttaagaatatgaatctcct

SEQ ID NO: 4886849 - DNA, 25 bp, Homo sapien
tattcccactcaataggtactggac

SEQ ID NO: 4886850 - DNA, 25 bp, Homo sapien
taatcaccatccacaggaaccttgc

SEQ ID NO: 4886851 - DNA, 25 bp, Homo sapien
tcattcagacccatttaagccatag

SEQ ID NO: 4886852 - DNA, 25 bp, Homo sapien
tgtgggacttattgcacaagggtcg

SEQ ID NO: 4886853 - DNA, 25 bp, Homo sapien
caagggtcggatatcacaactgagg

SEQ ID NO: 4886854 - DNA, 25 bp, Homo sapien
ggatgtaacctgtagctcacaatga

SEQ ID NO: 4886855 - DNA, 25 bp, Homo sapien
gagatccctacattggggccttggt

SEQ ID NO: 4886856 - DNA, 25 bp, Homo sapien
tgagatccctacattggggccttgg

SEQ ID NO: 4886857 - DNA, 25 bp, Homo sapien
ttgagatccctacattggggccttg

SEQ ID NO: 4886858 - DNA, 25 bp, Homo sapien
gtgcgatgcagcaagcattaggctt

SEQ ID NO: 4886859 - DNA, 25 bp, Homo sapien
cgatgcagcaagcattaggcttgct

SEQ ID NO: 4886860 - DNA, 25 bp, Homo sapien
gcgatgcagcaagcattaggcttgc

SEQ ID NO: 4886861 - DNA, 25 bp, Homo sapien
tgcgatgcagcaagcattaggcttg

SEQ ID NO: 4886862 - DNA, 25 bp, Homo sapien
gcaatactgctggattcccccgaag

SEQ ID NO: 4886863 - DNA, 25 bp, Homo sapien
catcttcgtggtcgcaggctgctct

SEQ ID NO: 4886864 - DNA, 25 bp, Homo sapien
cactgtgccactgggggccggcaat

SEQ ID NO: 4886865 - DNA, 25 bp, Homo sapien
ggatctgccggcatcttcgtggtcg

SEQ ID NO: 4886866 - DNA, 25 bp, Homo sapien
ccttcttcctccacagatggcagtt

SEQ ID NO: 4886867 - DNA, 25 bp, Homo sapien
cttcttcctccacagatggcagttt

SEQ ID NO: 4886868 - DNA, 25 bp, Homo sapien
agtttagctgagtctatatctatat

SEQ ID NO: 4886869 - DNA, 25 bp, Homo sapien
tttagctgagtctatatctatatct

SEQ ID NO: 4886870 - DNA, 25 bp, Homo sapien
tgtctcttacggattggaggctgag

SEQ ID NO: 4886871 - DNA, 25 bp, Homo sapien
gacgggctgcccaatccaattgctg

SEQ ID NO: 4886872 - DNA, 25 bp, Homo sapien
taatccccactcgaatgtgatgaca

SEQ ID NO: 4886873 - DNA, 25 bp, Homo sapien
tgcctgcgactctcacttggagaag

SEQ ID NO: 4886874 - DNA, 25 bp, Homo sapien
gaggataatgctggatttctctgcc

SEQ ID NO: 4886875 - DNA, 25 bp, Homo sapien
tgaggataatgctggatttctctgc

SEQ ID NO: 4886876 - DNA, 25 bp, Homo sapien
gctctgcataccacaggtatatgaa

SEQ ID NO: 4886877 - DNA, 25 bp, Homo sapien
agaagctctgcataccacaggtata

SEQ ID NO: 4886878 - DNA, 25 bp, Homo sapien
aaccaaatgtcaaactgaggtatgt

SEQ ID NO: 4886879 - DNA, 25 bp, Homo sapien
cgccataaatatgtctctgcatgtt

SEQ ID NO: 4886880 - DNA, 25 bp, Homo sapien
tgtagaggtcgccataaatatgtct

SEQ ID NO: 4886881 - DNA, 25 bp, Homo sapien
caaactgaggtatgtagaggtcgcc

SEQ ID NO: 4886882 - DNA, 25 bp, Homo sapien
tatcccgtgtgctcaaacactttca

SEQ ID NO: 4886883 - DNA, 25 bp, Homo sapien
tttcacagctggtagaatgctgatg

SEQ ID NO: 4886884 - DNA, 25 bp, Homo sapien
cactttcacagctggtagaatgctg

SEQ ID NO: 4886885 - DNA, 25 bp, Homo sapien
ctggaagggatatcccgtgtgctca

SEQ ID NO: 4886886 - DNA, 25 bp, Homo sapien
gaaggaaccgtgcacatgatgacaa

SEQ ID NO: 4886887 - DNA, 25 bp, Homo sapien
tctcaaaggcggtggaacttaagct

SEQ ID NO: 4886888 - DNA, 25 bp, Homo sapien
tgtgctgcccactttagctggaagg

SEQ ID NO: 4886889 - DNA, 25 bp, Homo sapien
tcattaaagtggaccaggccagtcc

SEQ ID NO: 4886890 - DNA, 25 bp, Homo sapien
ctcttttccttgtcgggtcccaatg

SEQ ID NO: 4886891 - DNA, 25 bp, Homo sapien
ctcagcaagaaagtccatggtcgaa

SEQ ID NO: 4886892 - DNA, 25 bp, Homo sapien
aagggagctggactcatctcttttc

SEQ ID NO: 4886893 - DNA, 25 bp, Homo sapien
tcgggtcccaatgtaaagtggacac

SEQ ID NO: 4886894 - DNA, 25 bp, Homo sapien
gtcctgcctagaggcaaagggacaa

SEQ ID NO: 4886895 - DNA, 25 bp, Homo sapien
tcagtcaaaggtagcaggaagaatt

SEQ ID NO: 4886896 - DNA, 25 bp, Homo sapien
tcctgagatggcttaactgtagtcc

SEQ ID NO: 4886897 - DNA, 25 bp, Homo sapien
tttttctcatctccacaggcaagag

SEQ ID NO: 4886898 - DNA, 25 bp, Homo sapien
ggcaaacaaactgcgctgcagccgg

SEQ ID NO: 4886899 - DNA, 25 bp, Homo sapien
ttccaggcatgtggttccggctccc

SEQ ID NO: 4886900 - DNA, 25 bp, Homo sapien
cctgagcacccgacacagtagctgc

SEQ ID NO: 4886901 - DNA, 25 bp, Homo sapien
ggccggcttggacggcggcgggcag

SEQ ID NO: 4886902 - DNA, 25 bp, Homo sapien
agggcaactgaatatgtgcatgcaa

SEQ ID NO: 4886903 - DNA, 25 bp, Homo sapien
caagattcattagcgacggtctgcg

SEQ ID NO: 4886904 - DNA, 25 bp, Homo sapien
gaagtgctcgcaagatgaagacggt

SEQ ID NO: 4886905 - DNA, 25 bp, Homo sapien
tacactaagggtgaatttcgggaca

SEQ ID NO: 4886906 - DNA, 25 bp, Homo sapien
ggtttcctagttgccgatcaagccg

SEQ ID NO: 4886907 - DNA, 25 bp, Homo sapien
aaagccgccttcaaaatcttctcta

SEQ ID NO: 4886908 - DNA, 25 bp, Homo sapien
ttcctcctccgaagggggagagtca

SEQ ID NO: 4886909 - DNA, 25 bp, Homo sapien
gagcagagataaggtggcagcggga

SEQ ID NO: 4886910 - DNA, 25 bp, Homo sapien
gataaggtggcagcgggacttcctt

SEQ ID NO: 4886911 - DNA, 25 bp, Homo sapien
gaagaaggatgaacttattgtagac

SEQ ID NO: 4886912 - DNA, 25 bp, Homo sapien
tgggaagaatttactggtcacactg

SEQ ID NO: 4886913 - DNA, 25 bp, Homo sapien
gttccttgttcaagagaagtgaaga

SEQ ID NO: 4886914 - DNA, 25 bp, Homo sapien
ttatgctctcttcaagagtatggga

SEQ ID NO: 4886915 - DNA, 25 bp, Homo sapien
gcacgcatgtgggactattacttca

SEQ ID NO: 4886916 - DNA, 25 bp, Homo sapien
tgtgctcattagaaaactcatgctg

SEQ ID NO: 4886917 - DNA, 25 bp, Homo sapien
gaacttcacagctgcgaactatcca

SEQ ID NO: 4886918 - DNA, 25 bp, Homo sapien
cacacaaatcttgccatcgtggatg

SEQ ID NO: 4886919 - DNA, 25 bp, Homo sapien
tgttccaagtttaaaggttgagtgc

SEQ ID NO: 4886920 - DNA, 25 bp, Homo sapien
tctttgactggatttcatagaacca

SEQ ID NO: 4886921 - DNA, 25 bp, Homo sapien
ttgcagcaagctattatttgatgac

SEQ ID NO: 4886922 - DNA, 25 bp, Homo sapien
gaaaacgcgctgaatcatggaatct

SEQ ID NO: 4886923 - DNA, 25 bp, Homo sapien
tcttacaatcactcgcaagagtctt

SEQ ID NO: 4886924 - DNA, 25 bp, Homo sapien
ttttcttacaatcactcgcaagagt

SEQ ID NO: 4886925 - DNA, 25 bp, Homo sapien
tgggtgattcggtccttttgtagaa

SEQ ID NO: 4886926 - DNA, 25 bp, Homo sapien
attgtgggtgattcggtccttttgt

SEQ ID NO: 4886927 - DNA, 25 bp, Homo sapien
cctctcatctttcagatgttgccct

SEQ ID NO: 4886928 - DNA, 25 bp, Homo sapien
attcctctcatctttcagatgttgc

SEQ ID NO: 4886929 - DNA, 25 bp, Homo sapien
gcaattcctctcatctttcagatgt

SEQ ID NO: 4886930 - DNA, 25 bp, Homo sapien
cagcaattcctctcatctttcagat

SEQ ID NO: 4886931 - DNA, 25 bp, Homo sapien
tcttctttagatgatggtgggtggc

SEQ ID NO: 4886932 - DNA, 25 bp, Homo sapien
tctttagatgatggtgggtggccgt

SEQ ID NO: 4886933 - DNA, 25 bp, Homo sapien
aagaacctgcatgtcatttgccaag

SEQ ID NO: 4886934 - DNA, 25 bp, Homo sapien
tgaagaacctgcatgtcatttgcca

SEQ ID NO: 4886935 - DNA, 25 bp, Homo sapien
ctagagataaaaatttgatgaatac

SEQ ID NO: 4886936 - DNA, 25 bp, Homo sapien
tcagctcgtttatgacaagcatctg

SEQ ID NO: 4886937 - DNA, 25 bp, Homo sapien
caagcatctgatacagtgctgtaat

SEQ ID NO: 4886938 - DNA, 25 bp, Homo sapien
gagctttgaagtaaggagacctaac

SEQ ID NO: 4886939 - DNA, 25 bp, Homo sapien
gagacctaactttcaacttatcttc

SEQ ID NO: 4886940 - DNA, 25 bp, Homo sapien
ccatgaagggtatgtctgaggaagc

SEQ ID NO: 4886941 - DNA, 25 bp, Homo sapien
tcagttgcaaggctctgcccatgaa

SEQ ID NO: 4886942 - DNA, 25 bp, Homo sapien
tataaagtccataagaggtcaaagg

SEQ ID NO: 4886943 - DNA, 25 bp, Homo sapien
tagcttttcataagtgtggcacaag

SEQ ID NO: 4886944 - DNA, 25 bp, Homo sapien
agaaataaatctagggtcagcttga

SEQ ID NO: 4886945 - DNA, 25 bp, Homo sapien
gcaattctcatccaagaggtatgat

SEQ ID NO: 4886946 - DNA, 25 bp, Homo sapien
cctattatggaagcagaaaatggac

SEQ ID NO: 4886947 - DNA, 25 bp, Homo sapien
taacattgcctgtttgtaacaaagg

SEQ ID NO: 4886948 - DNA, 25 bp, Homo sapien
ctcttccatcaatgctattaatgtt

SEQ ID NO: 4886949 - DNA, 25 bp, Homo sapien
cttccatcaatgctattaatgttca

SEQ ID NO: 4886950 - DNA, 25 bp, Homo sapien
ttccatcaatgctattaatgttcat

SEQ ID NO: 4886951 - DNA, 25 bp, Homo sapien
tcttccatcaatgctattaatgttc

SEQ ID NO: 4886952 - DNA, 25 bp, Homo sapien
agtccccaggacctgataacctcaa

SEQ ID NO: 4886953 - DNA, 25 bp, Homo sapien
aggacctgataacctcaactcttac

SEQ ID NO: 4886954 - DNA, 25 bp, Homo sapien
ccatagttactgtttgaagtcccca

SEQ ID NO: 4886955 - DNA, 25 bp, Homo sapien
gaagtccccaggacctgataacctc

SEQ ID NO: 4886956 - DNA, 25 bp, Homo sapien
gaggatttatcagtttcccaccttc

SEQ ID NO: 4886957 - DNA, 25 bp, Homo sapien
tcacttggaggatttatcagtttcc

SEQ ID NO: 4886958 - DNA, 25 bp, Homo sapien
gccaatcacttggaggatttatcag

SEQ ID NO: 4886959 - DNA, 25 bp, Homo sapien
cttggaggatttatcagtttcccac

SEQ ID NO: 4886960 - DNA, 25 bp, Homo sapien
gctcgagcatattaacgaaaaggtg

SEQ ID NO: 4886961 - DNA, 25 bp, Homo sapien
cagaaaatgtgatgcctaaccagga

SEQ ID NO: 4886962 - DNA, 25 bp, Homo sapien
tggctattacaaatatgctcgagca

SEQ ID NO: 4886963 - DNA, 25 bp, Homo sapien
taacttgagtactagaagatggcgg

SEQ ID NO: 4886964 - DNA, 25 bp, Homo sapien
gcagtaatgtatcccatgcctagaa

SEQ ID NO: 4886965 - DNA, 25 bp, Homo sapien
tgttagcctattgtgacttgcctga

SEQ ID NO: 4886966 - DNA, 25 bp, Homo sapien
caagatctggttgctacttcctcac

SEQ ID NO: 4886967 - DNA, 25 bp, Homo sapien
tacccacaacatgatagatagagcc

SEQ ID NO: 4886968 - DNA, 25 bp, Homo sapien
tggcacctttctaaggattttcttg

SEQ ID NO: 4886969 - DNA, 25 bp, Homo sapien
ctttgcctaggttaagactagttgg

SEQ ID NO: 4886970 - DNA, 25 bp, Homo sapien
ttggggtgtcctccggtctcacaag

SEQ ID NO: 4886971 - DNA, 25 bp, Homo sapien
agttggggtgtcctccggtctcaca

SEQ ID NO: 4886972 - DNA, 25 bp, Homo sapien
ctagttggggtgtcctccggtctca

SEQ ID NO: 4886973 - DNA, 25 bp, Homo sapien
gccatcatacttctcaggggaagtg

SEQ ID NO: 4886974 - DNA, 25 bp, Homo sapien
ctgccatcatacttctcaggggaag

SEQ ID NO: 4886975 - DNA, 25 bp, Homo sapien
tgccatcatacttctcaggggaagt

SEQ ID NO: 4886976 - DNA, 25 bp, Homo sapien
gagtgatgctaggatgctacagtct

SEQ ID NO: 4886977 - DNA, 25 bp, Homo sapien
caattgggctataaggattcctaaa

SEQ ID NO: 4886978 - DNA, 25 bp, Homo sapien
ttgtggcccactgccaacacagagt

SEQ ID NO: 4886979 - DNA, 25 bp, Homo sapien
tacagtctagagaatcaattgggct

SEQ ID NO: 4886980 - DNA, 25 bp, Homo sapien
tctataataatacatgagggagaca

SEQ ID NO: 4886981 - DNA, 25 bp, Homo sapien
acaccaggaggtggcttgttagacc

SEQ ID NO: 4886982 - DNA, 25 bp, Homo sapien
gcttgttagacctcattagatccat

SEQ ID NO: 4886983 - DNA, 25 bp, Homo sapien
tataataatacatgagggagacacc

SEQ ID NO: 4886984 - DNA, 25 bp, Homo sapien
agctccatgaattcgagggtctcct

SEQ ID NO: 4886985 - DNA, 25 bp, Homo sapien
ctccatgaattcgagggtctcctct

SEQ ID NO: 4886986 - DNA, 25 bp, Homo sapien
ccatgaattcgagggtctcctctat

SEQ ID NO: 4886987 - DNA, 25 bp, Homo sapien
gctccatgaattcgagggtctcctc

SEQ ID NO: 4886988 - DNA, 25 bp, Homo sapien
tgtgggcctttcatcacctatagcc

SEQ ID NO: 4886989 - DNA, 25 bp, Homo sapien
gtatctgccaatcgccccctgtggg

SEQ ID NO: 4886990 - DNA, 25 bp, Homo sapien
gttcagccgtatctgccaatcgccc

SEQ ID NO: 4886991 - DNA, 25 bp, Homo sapien
cagtttaccaattctgttcagccgt

SEQ ID NO: 4886992 - DNA, 25 bp, Homo sapien
atgctggagtttgttatgttcatta

SEQ ID NO: 4886993 - DNA, 25 bp, Homo sapien
gctggagtttgttatgttcattaaa

SEQ ID NO: 4886994 - DNA, 25 bp, Homo sapien
ctggagtttgttatgttcattaaac

SEQ ID NO: 4886995 - DNA, 25 bp, Homo sapien
tgctggagtttgttatgttcattaa

SEQ ID NO: 4886996 - DNA, 25 bp, Homo sapien
ttcaacaagtatccagaagtgttct

SEQ ID NO: 4886997 - DNA, 25 bp, Homo sapien
tcttgacatatgtgaagtaacggac

SEQ ID NO: 4886998 - DNA, 25 bp, Homo sapien
gaagtgttcttttgagtggctttca

SEQ ID NO: 4886999 - DNA, 25 bp, Homo sapien
catgggagagccttcacctccttca

SEQ ID NO: 4887000 - DNA, 25 bp, Homo sapien
tgaagtacacacgaaaggataaatg

SEQ ID NO: 4887001 - DNA, 25 bp, Homo sapien
aaatcatcaaaaatgatgctctggc

SEQ ID NO: 4887002 - DNA, 25 bp, Homo sapien
gatctcttgcatacagcatatcctt

SEQ ID NO: 4887003 - DNA, 25 bp, Homo sapien
tggatttgacatgcgtctggccctc

SEQ ID NO: 4887004 - DNA, 25 bp, Homo sapien
tcaatctctattctcagaggtattc

SEQ ID NO: 4887005 - DNA, 25 bp, Homo sapien
tcctggttgaataatcaatctctat

SEQ ID NO: 4887006 - DNA, 25 bp, Homo sapien
cagaggtattcagaacatctgcaga

SEQ ID NO: 4887007 - DNA, 25 bp, Homo sapien
cttgaattaggtatcctggttgaat

SEQ ID NO: 4887008 - DNA, 25 bp, Homo sapien
ttggtccaatgttgcaaaactgaca

SEQ ID NO: 4887009 - DNA, 25 bp, Homo sapien
tggtccaatgttgcaaaactgacaa

SEQ ID NO: 4887010 - DNA, 25 bp, Homo sapien
tttggtccaatgttgcaaaactgac

SEQ ID NO: 4887011 - DNA, 25 bp, Homo sapien
catcttgatcatcggtaagcacaag

SEQ ID NO: 4887012 - DNA, 25 bp, Homo sapien
cggatgttttttcgttcctgctgta

SEQ ID NO: 4887013 - DNA, 25 bp, Homo sapien
ctgtatccgtcctctgaacctcggg

SEQ ID NO: 4887014 - DNA, 25 bp, Homo sapien
tctgacagtcgaacagaggcttccc

SEQ ID NO: 4887015 - DNA, 25 bp, Homo sapien
tataggcacaacgtgaacaacttct

SEQ ID NO: 4887016 - DNA, 25 bp, Homo sapien
gggtataggcacaacgtgaacaact

SEQ ID NO: 4887017 - DNA, 25 bp, Homo sapien
ggcacaacgtgaacaacttcttaag

SEQ ID NO: 4887018 - DNA, 25 bp, Homo sapien
cgtgaacaacttcttaagttgtggg

SEQ ID NO: 4887019 - DNA, 25 bp, Homo sapien
aagttaacatgcctacagggctaca

SEQ ID NO: 4887020 - DNA, 25 bp, Homo sapien
tggcccctccaaaagagcacaaggc

SEQ ID NO: 4887021 - DNA, 25 bp, Homo sapien
ggcagccaggtataagaaaagtcag

SEQ ID NO: 4887022 - DNA, 25 bp, Homo sapien
tggaatgtttccagatcactaagac

SEQ ID NO: 4887023 - DNA, 25 bp, Homo sapien
tcaggaatccatcaagatccaccat

SEQ ID NO: 4887024 - DNA, 25 bp, Homo sapien
ttcaggaatccatcaagatccacca

SEQ ID NO: 4887025 - DNA, 25 bp, Homo sapien
cttcaggaatccatcaagatccacc

SEQ ID NO: 4887026 - DNA, 25 bp, Homo sapien
ccttcaggaatccatcaagatccac

SEQ ID NO: 4887027 - DNA, 25 bp, Homo sapien
cattgctcctgcaggcggatgctgt

SEQ ID NO: 4887028 - DNA, 25 bp, Homo sapien
ctcctgcaggcggatgctgtgacag

SEQ ID NO: 4887029 - DNA, 25 bp, Homo sapien
caggcggatgctgtgacagccatcg

SEQ ID NO: 4887030 - DNA, 25 bp, Homo sapien
ttccattgctcctgcaggcggatgc

SEQ ID NO: 4887031 - DNA, 25 bp, Homo sapien
gcaaaagtccgaggctcatgcatgg

SEQ ID NO: 4887032 - DNA, 25 bp, Homo sapien
tacttcccggtgagcatggaggacc

SEQ ID NO: 4887033 - DNA, 25 bp, Homo sapien
ctgttctgtagccagtgttgttaag

SEQ ID NO: 4887034 - DNA, 25 bp, Homo sapien
tggtgtagacattgtgattgtgcac

SEQ ID NO: 4887035 - DNA, 25 bp, Homo sapien
tagcccttctacgaacaacgttgtg

SEQ ID NO: 4887036 - DNA, 25 bp, Homo sapien
tgctacaaaaaacccaaggacatca

SEQ ID NO: 4887037 - DNA, 25 bp, Homo sapien
taaaaacaagcaacaacccatgtct

SEQ ID NO: 4887038 - DNA, 25 bp, Homo sapien
caacgttgtgcccttttatgaagaa

SEQ ID NO: 4887039 - DNA, 25 bp, Homo sapien
ttcactctggatatgtgagagtccc

SEQ ID NO: 4887040 - DNA, 25 bp, Homo sapien
tgtgagagtcccaatcgttccagtt

SEQ ID NO: 4887041 - DNA, 25 bp, Homo sapien
gtcccaatcgttccagttccatgtt

SEQ ID NO: 4887042 - DNA, 25 bp, Homo sapien
ccagttccatgtttgctactaggga

SEQ ID NO: 4887043 - DNA, 25 bp, Homo sapien
tgtattattacctaagtgtctaaac

SEQ ID NO: 4887044 - DNA, 25 bp, Homo sapien
tattttggaggttgactcactataa

SEQ ID NO: 4887045 - DNA, 25 bp, Homo sapien
ggaggttgactcactataaattgta

SEQ ID NO: 4887046 - DNA, 25 bp, Homo sapien
agtttccaggagcaaatctactctc

SEQ ID NO: 4887047 - DNA, 25 bp, Homo sapien
tcaacacgatgtttcctggcggcgc

SEQ ID NO: 4887048 - DNA, 25 bp, Homo sapien
tcagtattccagatgtgcgctcacc

SEQ ID NO: 4887049 - DNA, 25 bp, Homo sapien
tgagactcgtttgtaatcaccccgg

SEQ ID NO: 4887050 - DNA, 25 bp, Homo sapien
tgactaacccaaagatctgatgccg

SEQ ID NO: 4887051 - DNA, 25 bp, Homo sapien
tgaaccatgcttggccctccagagc

SEQ ID NO: 4887052 - DNA, 25 bp, Homo sapien
ttggaaatagtgctcaaatccctcc

SEQ ID NO: 4887053 - DNA, 25 bp, Homo sapien
tgccttggaaatagtgctcaaatcc

SEQ ID NO: 4887054 - DNA, 25 bp, Homo sapien
tcctctgaatggcataatcaccctc

SEQ ID NO: 4887055 - DNA, 25 bp, Homo sapien
tctcgccacccaggggggatgtagc

SEQ ID NO: 4887056 - DNA, 25 bp, Homo sapien
gatgccattgcgacaaacagtgtaa

SEQ ID NO: 4887057 - DNA, 25 bp, Homo sapien
tgattaatccaagccattctcgcca

SEQ ID NO: 4887058 - DNA, 25 bp, Homo sapien
acagtgtaattatagaagcgagaat

SEQ ID NO: 4887059 - DNA, 25 bp, Homo sapien
cgttagtgattaagtctgtgaagta

SEQ ID NO: 4887060 - DNA, 25 bp, Homo sapien
gaagtaattaatgctctcgttagtg

SEQ ID NO: 4887061 - DNA, 25 bp, Homo sapien
ggaagcattggggtacagtttagaa

SEQ ID NO: 4887062 - DNA, 25 bp, Homo sapien
gatcaccatcataacgggcctatgg

SEQ ID NO: 4887063 - DNA, 25 bp, Homo sapien
ctttctgcctggaatcttggctaat

SEQ ID NO: 4887064 - DNA, 25 bp, Homo sapien
ccaattttggaggtttcacaatata

SEQ ID NO: 4887065 - DNA, 25 bp, Homo sapien
cttggctaataaccagtgtggatga

SEQ ID NO: 4887066 - DNA, 25 bp, Homo sapien
tgtggaagactggatattgatggca

SEQ ID NO: 4887067 - DNA, 25 bp, Homo sapien
taacacagtccagattggtccttac

SEQ ID NO: 4887068 - DNA, 25 bp, Homo sapien
aaaagataacacagtccagattggt

SEQ ID NO: 4887069 - DNA, 25 bp, Homo sapien
cagattggtccttaccctgtctgtt

SEQ ID NO: 4887070 - DNA, 25 bp, Homo sapien
agtccagattggtccttaccctgtc

SEQ ID NO: 4887071 - DNA, 25 bp, Homo sapien
tgttgggaacggcaaacaccttgga

SEQ ID NO: 4887072 - DNA, 25 bp, Homo sapien
catccgtttgtaaagctaacaggcc

SEQ ID NO: 4887073 - DNA, 25 bp, Homo sapien
cccgatgccagatgaaagtgatcca

SEQ ID NO: 4887074 - DNA, 25 bp, Homo sapien
gatgatacattcaccccagtctgag

SEQ ID NO: 4887075 - DNA, 25 bp, Homo sapien
atcaccagggacgtaaatggcatct

SEQ ID NO: 4887076 - DNA, 25 bp, Homo sapien
ggcttttgtccacaggtgtatatga

SEQ ID NO: 4887077 - DNA, 25 bp, Homo sapien
tccctgtcacggcttttgtccacag

SEQ ID NO: 4887078 - DNA, 25 bp, Homo sapien
ttagtttcctatagaatcaccaggg

SEQ ID NO: 4887079 - DNA, 25 bp, Homo sapien
tggtgcatagttataactaggagtt

SEQ ID NO: 4887080 - DNA, 25 bp, Homo sapien
atttggtgcatagttataactagga

SEQ ID NO: 4887081 - DNA, 25 bp, Homo sapien
ttggtgcatagttataactaggagt

SEQ ID NO: 4887082 - DNA, 25 bp, Homo sapien
tttggtgcatagttataactaggag

SEQ ID NO: 4887083 - DNA, 25 bp, Homo sapien
gaatcatccactgacatcaaagtct

SEQ ID NO: 4887084 - DNA, 25 bp, Homo sapien
tcaaagtctggagccttttgcgctg

SEQ ID NO: 4887085 - DNA, 25 bp, Homo sapien
catgtggatgggcagcattggtcct

SEQ ID NO: 4887086 - DNA, 25 bp, Homo sapien
ccttttgcgctgtagaatgtttgta

SEQ ID NO: 4887087 - DNA, 25 bp, Homo sapien
catggtcggcggtgtaaatgatgta

SEQ ID NO: 4887088 - DNA, 25 bp, Homo sapien
tgcccaatatggtaaccatggtcgg

SEQ ID NO: 4887089 - DNA, 25 bp, Homo sapien
ccgtctccacgagcatgttatacag

SEQ ID NO: 4887090 - DNA, 25 bp, Homo sapien
tggcatggatttccccttgaccagt

SEQ ID NO: 4887091 - DNA, 25 bp, Homo sapien
ttcatcttcgaaattaaccagccta

SEQ ID NO: 4887092 - DNA, 25 bp, Homo sapien
agacatagattccagtcaatttgag

SEQ ID NO: 4887093 - DNA, 25 bp, Homo sapien
cagcgtatctctgattcaaagaagg

SEQ ID NO: 4887094 - DNA, 25 bp, Homo sapien
gaagatcacatcctgtctgtgcaca

SEQ ID NO: 4887095 - DNA, 25 bp, Homo sapien
cagacttgccgtccacatcaggagg

SEQ ID NO: 4887096 - DNA, 25 bp, Homo sapien
tgtgtcgagcccagcaatatccagg

SEQ ID NO: 4887097 - DNA, 25 bp, Homo sapien
caatgttgagaacgatctgtgggac

SEQ ID NO: 4887098 - DNA, 25 bp, Homo sapien
tatccaggatcgtgggggccaagtc

SEQ ID NO: 4887099 - DNA, 25 bp, Homo sapien
cagcttggggtgatccttgtgggca

SEQ ID NO: 4887100 - DNA, 25 bp, Homo sapien
ttcacaagcagctgagaaatgctca

SEQ ID NO: 4887101 - DNA, 25 bp, Homo sapien
gctggagctcagtgtatttggggct

SEQ ID NO: 4887102 - DNA, 25 bp, Homo sapien
tgtgggcaaggcatattctgcctcc

SEQ ID NO: 4887103 - DNA, 25 bp, Homo sapien
catctggacgtttttccaaatggat

SEQ ID NO: 4887104 - DNA, 25 bp, Homo sapien
gcatctggacgtttttccaaatgga

SEQ ID NO: 4887105 - DNA, 25 bp, Homo sapien
ggcatctggacgtttttccaaatgg

SEQ ID NO: 4887106 - DNA, 25 bp, Homo sapien
atctggacgtttttccaaatggatc

SEQ ID NO: 4887107 - DNA, 25 bp, Homo sapien
tatcacgccaaattttggccttctt

SEQ ID NO: 4887108 - DNA, 25 bp, Homo sapien
aatgtatcacgccaaattttggcct

SEQ ID NO: 4887109 - DNA, 25 bp, Homo sapien
cactaggaatgtatcacgccaaatt

SEQ ID NO: 4887110 - DNA, 25 bp, Homo sapien
aggaatgtatcacgccaaattttgg

SEQ ID NO: 4887111 - DNA, 25 bp, Homo sapien
tctacacccatgataaaggctttgg

SEQ ID NO: 4887112 - DNA, 25 bp, Homo sapien
gactaggtttacgaaatctgcatgc

SEQ ID NO: 4887113 - DNA, 25 bp, Homo sapien
tgcccactaggactggttcccagaa

SEQ ID NO: 4887114 - DNA, 25 bp, Homo sapien
ggtctgattagaaaccagcactgag

SEQ ID NO: 4887115 - DNA, 25 bp, Homo sapien
ctggattcttccttcttacgtagaa

SEQ ID NO: 4887116 - DNA, 25 bp, Homo sapien
tggattcttccttcttacgtagaaa

SEQ ID NO: 4887117 - DNA, 25 bp, Homo sapien
ctgttggatattcttgctggattct

SEQ ID NO: 4887118 - DNA, 25 bp, Homo sapien
gctggattcttccttcttacgtaga

SEQ ID NO: 4887119 - DNA, 25 bp, Homo sapien
ctgccccggttgttcacaggctgtc

SEQ ID NO: 4887120 - DNA, 25 bp, Homo sapien
tggcatagttctttgacccgttcat

SEQ ID NO: 4887121 - DNA, 25 bp, Homo sapien
tgccccggttgttcacaggctgtct

SEQ ID NO: 4887122 - DNA, 25 bp, Homo sapien
ctggcctgctggcatagttctttga

SEQ ID NO: 4887123 - DNA, 25 bp, Homo sapien
gatgacattctgactttagcctagg

SEQ ID NO: 4887124 - DNA, 25 bp, Homo sapien
taactggtattctgggtagctctgg

SEQ ID NO: 4887125 - DNA, 25 bp, Homo sapien
tcttcagtgactagttaacagggac

SEQ ID NO: 4887126 - DNA, 25 bp, Homo sapien
cagttacgtaattctgtccgcggag

SEQ ID NO: 4887127 - DNA, 25 bp, Homo sapien
tttgttccccatggagtgtcaaaac

SEQ ID NO: 4887128 - DNA, 25 bp, Homo sapien
ggagtgtcaaaacctgactgtgttg

SEQ ID NO: 4887129 - DNA, 25 bp, Homo sapien
caaaacctgactgtgttgccttgga

SEQ ID NO: 4887130 - DNA, 25 bp, Homo sapien
tgtcaaaacctgactgtgttgcctt

SEQ ID NO: 4887131 - DNA, 25 bp, Homo sapien
tttcactatgactatgtcggccagg

SEQ ID NO: 4887132 - DNA, 25 bp, Homo sapien
gggtttcactatgactatgtcggcc

SEQ ID NO: 4887133 - DNA, 25 bp, Homo sapien
ggaatgaaaacagcaggtaagatgg

SEQ ID NO: 4887134 - DNA, 25 bp, Homo sapien
taagatggcttggaataataataac

SEQ ID NO: 4887135 - DNA, 25 bp, Homo sapien
catgagaatagattgtttgagtgtt

SEQ ID NO: 4887136 - DNA, 25 bp, Homo sapien
tactatatgaacctagagcagtact

SEQ ID NO: 4887137 - DNA, 25 bp, Homo sapien
tccacatccgataaaataatacttg

SEQ ID NO: 4887138 - DNA, 25 bp, Homo sapien
ggcttcatggatagtcatgagaata

SEQ ID NO: 4887139 - DNA, 25 bp, Homo sapien
tgaatctcaacctggctgaaataat

SEQ ID NO: 4887140 - DNA, 25 bp, Homo sapien
tctcaacctggctgaaataatagct

SEQ ID NO: 4887141 - DNA, 25 bp, Homo sapien
tcaacctggctgaaataatagctct

SEQ ID NO: 4887142 - DNA, 25 bp, Homo sapien
aacctggctgaaataatagctcttc

SEQ ID NO: 4887143 - DNA, 25 bp, Homo sapien
catggggcgagccaactctcatata

SEQ ID NO: 4887144 - DNA, 25 bp, Homo sapien
tataccccagacattagcaaacttg

SEQ ID NO: 4887145 - DNA, 25 bp, Homo sapien
cagagatgaatttaattggagccca

SEQ ID NO: 4887146 - DNA, 25 bp, Homo sapien
cattgtgatatggacagaagacagg

SEQ ID NO: 4887147 - DNA, 25 bp, Homo sapien
gatatatgaatccttagcacgcaga

SEQ ID NO: 4887148 - DNA, 25 bp, Homo sapien
gacacacggtgcagctgtcaggact

SEQ ID NO: 4887149 - DNA, 25 bp, Homo sapien
taaaagccgttagttcaccaagaca

SEQ ID NO: 4887150 - DNA, 25 bp, Homo sapien
gctgctttgttctccgctcctgaat

SEQ ID NO: 4887151 - DNA, 25 bp, Homo sapien
ttcactgtaggcaaatacagatgac

SEQ ID NO: 4887152 - DNA, 25 bp, Homo sapien
taagtgaccctgcactaactcgact

SEQ ID NO: 4887153 - DNA, 25 bp, Homo sapien
ttaaggagagtgaatgaagaaaggc

SEQ ID NO: 4887154 - DNA, 25 bp, Homo sapien
tacagatgacaacgaaatcattgga

SEQ ID NO: 4887155 - DNA, 25 bp, Homo sapien
caaaagccaacgtgaaagcagttta

SEQ ID NO: 4887156 - DNA, 25 bp, Homo sapien
gaaagcagtttaccgattctgctcc

SEQ ID NO: 4887157 - DNA, 25 bp, Homo sapien
agtttaccgattctgctccaggtgt

SEQ ID NO: 4887158 - DNA, 25 bp, Homo sapien
ctgcaaaagccaacgtgaaagcagt

SEQ ID NO: 4887159 - DNA, 25 bp, Homo sapien
gccagatgtatcctcaatgcattgc

SEQ ID NO: 4887160 - DNA, 25 bp, Homo sapien
gcttgccagatgtatcctcaatgca

SEQ ID NO: 4887161 - DNA, 25 bp, Homo sapien
acttgtgaattcgaagcttgccaga

SEQ ID NO: 4887162 - DNA, 25 bp, Homo sapien
aattcgaagcttgccagatgtatcc

SEQ ID NO: 4887163 - DNA, 25 bp, Homo sapien
agaggttccgcgtgctctgccggac

SEQ ID NO: 4887164 - DNA, 25 bp, Homo sapien
tggtttctcaagaattgccgttgac

SEQ ID NO: 4887165 - DNA, 25 bp, Homo sapien
ggtaaccagactccctacaactgca

SEQ ID NO: 4887166 - DNA, 25 bp, Homo sapien
tctttgtcatggaagccgcgagcgt

SEQ ID NO: 4887167 - DNA, 25 bp, Homo sapien
caggcctaggccaccattgagatgg

SEQ ID NO: 4887168 - DNA, 25 bp, Homo sapien
agatggtcacaaaagcgtggcttac

SEQ ID NO: 4887169 - DNA, 25 bp, Homo sapien
gcaaccctttcgtctctctattgtt

SEQ ID NO: 4887170 - DNA, 25 bp, Homo sapien
tgtttattcccacaggcctaggcca

SEQ ID NO: 4887171 - DNA, 25 bp, Homo sapien
tgtgtgagttattagacctggaatt

SEQ ID NO: 4887172 - DNA, 25 bp, Homo sapien
tgtgagttattagacctggaatttt

SEQ ID NO: 4887173 - DNA, 25 bp, Homo sapien
aatcaaagattcttagtattttggc

SEQ ID NO: 4887174 - DNA, 25 bp, Homo sapien
gattcttagtattttggcttacgga

SEQ ID NO: 4887175 - DNA, 25 bp, Homo sapien
tcaaattcgacggacaaggaacgtg

SEQ ID NO: 4887176 - DNA, 25 bp, Homo sapien
aaggaacgtgtctgccgagtatgga

SEQ ID NO: 4887177 - DNA, 25 bp, Homo sapien
tgggcccacggcgttgctgctatct

SEQ ID NO: 4887178 - DNA, 25 bp, Homo sapien
gccttcatcatgacgcttagcaatg

SEQ ID NO: 4887179 - DNA, 25 bp, Homo sapien
tttgtcaatgtatgccttatggtcc

SEQ ID NO: 4887180 - DNA, 25 bp, Homo sapien
tgccttatggtccttccacgctctg

SEQ ID NO: 4887181 - DNA, 25 bp, Homo sapien
gctctggccgattggtacagttctc

SEQ ID NO: 4887182 - DNA, 25 bp, Homo sapien
tctctctcacaatggatagagtcat

SEQ ID NO: 4887183 - DNA, 25 bp, Homo sapien
gcaggccgagtttgagtttggaata

SEQ ID NO: 4887184 - DNA, 25 bp, Homo sapien
tgagtttggaatatatctgacagtc

SEQ ID NO: 4887185 - DNA, 25 bp, Homo sapien
tgacagtcacatagccatggctaac

SEQ ID NO: 4887186 - DNA, 25 bp, Homo sapien
gaatatatctgacagtcacatagcc

SEQ ID NO: 4887187 - DNA, 25 bp, Homo sapien
tccttctcttcagatgtcctctcac

SEQ ID NO: 4887188 - DNA, 25 bp, Homo sapien
ttgtttactgcagctacattcctca

SEQ ID NO: 4887189 - DNA, 25 bp, Homo sapien
taattttatcttgcagagcttcaat

SEQ ID NO: 4887190 - DNA, 25 bp, Homo sapien
gatgtcctctcacttctcttaaatt

SEQ ID NO: 4887191 - DNA, 25 bp, Homo sapien
gaatgggtgaagatggctctttaat

SEQ ID NO: 4887192 - DNA, 25 bp, Homo sapien
ttgaatgggtgaagatggctcttta

SEQ ID NO: 4887193 - DNA, 25 bp, Homo sapien
gaagatggctctttaatttctcttg

SEQ ID NO: 4887194 - DNA, 25 bp, Homo sapien
atgggtgaagatggctctttaattt

SEQ ID NO: 4887195 - DNA, 25 bp, Homo sapien
cggttgttctccttgaaaagttgca

SEQ ID NO: 4887196 - DNA, 25 bp, Homo sapien
gcagtttgctatctacttcctgagc

SEQ ID NO: 4887197 - DNA, 25 bp, Homo sapien
ggctgtctgccagtggttgttgtca

SEQ ID NO: 4887198 - DNA, 25 bp, Homo sapien
tgttgtcatgcgtgaagcaagtgag

SEQ ID NO: 4887199 - DNA, 25 bp, Homo sapien
taagagttcattcggcctcgatgtg

SEQ ID NO: 4887200 - DNA, 25 bp, Homo sapien
tcttgctagatgttgcgtccccagt

SEQ ID NO: 4887201 - DNA, 25 bp, Homo sapien
gctggtaagcttcaatcagaggatg

SEQ ID NO: 4887202 - DNA, 25 bp, Homo sapien
ttgagaaacagtagcccgggtggtc

SEQ ID NO: 4887203 - DNA, 25 bp, Homo sapien
gtctgaagggtgagtagtgttttct

SEQ ID NO: 4887204 - DNA, 25 bp, Homo sapien
gagtagtgttttctgggcacggggc

SEQ ID NO: 4887205 - DNA, 25 bp, Homo sapien
gtagtgttttctgggcacggggctg

SEQ ID NO: 4887206 - DNA, 25 bp, Homo sapien
tgttttctgggcacggggctgtggg

SEQ ID NO: 4887207 - DNA, 25 bp, Homo sapien
tacattgtgtatcagaaggagcatc

SEQ ID NO: 4887208 - DNA, 25 bp, Homo sapien
gaagccactgtcctagaataccaga

SEQ ID NO: 4887209 - DNA, 25 bp, Homo sapien
ccaagggcttaagttgacatagcaa

SEQ ID NO: 4887210 - DNA, 25 bp, Homo sapien
gcacatatgtgtacaggatcctgat

SEQ ID NO: 4887211 - DNA, 25 bp, Homo sapien
catagccctctggttaacttgtaga

SEQ ID NO: 4887212 - DNA, 25 bp, Homo sapien
tgaaaaaccttaggcaggcttgcca

SEQ ID NO: 4887213 - DNA, 25 bp, Homo sapien
gatggccacatgtcaccaatgaagc

SEQ ID NO: 4887214 - DNA, 25 bp, Homo sapien
cctgagctaggctgtgaccacaaac

SEQ ID NO: 4887215 - DNA, 25 bp, Homo sapien
actccaaaaagccagtagcaaactc

SEQ ID NO: 4887216 - DNA, 25 bp, Homo sapien
aattatgcgtctcattaactgtacg

SEQ ID NO: 4887217 - DNA, 25 bp, Homo sapien
ccagtaggtgttattgttagaactc

SEQ ID NO: 4887218 - DNA, 25 bp, Homo sapien
taactgtacgcaaacaccagtaggt

SEQ ID NO: 4887219 - DNA, 25 bp, Homo sapien
tatgtctggttatcctattttcaac

SEQ ID NO: 4887220 - DNA, 25 bp, Homo sapien
tcaacaaccttcataaaatgaacat

SEQ ID NO: 4887221 - DNA, 25 bp, Homo sapien
gacaggacaatctatttaagcttat

SEQ ID NO: 4887222 - DNA, 25 bp, Homo sapien
tgtgaatgcagacaggacaatctat

SEQ ID NO: 4887223 - DNA, 25 bp, Homo sapien
ggttgcactgcttatatccttgaca

SEQ ID NO: 4887224 - DNA, 25 bp, Homo sapien
tgagctccattagttgtacgtgtag

SEQ ID NO: 4887225 - DNA, 25 bp, Homo sapien
tcaaaatgcctcgttctaccgtgtg

SEQ ID NO: 4887226 - DNA, 25 bp, Homo sapien
aagattcttaggtcttgggttgcac

SEQ ID NO: 4887227 - DNA, 25 bp, Homo sapien
tggtgttaaatacagacagtgctga

SEQ ID NO: 4887228 - DNA, 25 bp, Homo sapien
ggaggagagcccacttaaaagcagt

SEQ ID NO: 4887229 - DNA, 25 bp, Homo sapien
ggctaataatcatctcccataggaa

SEQ ID NO: 4887230 - DNA, 25 bp, Homo sapien
tctgttagctttagaacttataaaa

SEQ ID NO: 4887231 - DNA, 25 bp, Homo sapien
taggtcatagcttcctccatcttta

SEQ ID NO: 4887232 - DNA, 25 bp, Homo sapien
ggtcatagcttcctccatctttatt

SEQ ID NO: 4887233 - DNA, 25 bp, Homo sapien
tcatagcttcctccatctttatttc

SEQ ID NO: 4887234 - DNA, 25 bp, Homo sapien
aggtcatagcttcctccatctttat

SEQ ID NO: 4887235 - DNA, 25 bp, Homo sapien
caacttcggccttacagtgctctta

SEQ ID NO: 4887236 - DNA, 25 bp, Homo sapien
gaacatcttgatgggacagtgagct

SEQ ID NO: 4887237 - DNA, 25 bp, Homo sapien
gctttcagaatcttacggctgctgc

SEQ ID NO: 4887238 - DNA, 25 bp, Homo sapien
tgctctgtgcaacacggtaagaaac

SEQ ID NO: 4887239 - DNA, 25 bp, Homo sapien
gggtactggtaacgtctgtgcctca

SEQ ID NO: 4887240 - DNA, 25 bp, Homo sapien
ttgtctcagcagaggcggtaaggac

SEQ ID NO: 4887241 - DNA, 25 bp, Homo sapien
tgaccaagtgacacggccatcagga

SEQ ID NO: 4887242 - DNA, 25 bp, Homo sapien
caagtggatacattaactagggtac

SEQ ID NO: 4887243 - DNA, 25 bp, Homo sapien
ggccgaacagggtaccaggaacagc

SEQ ID NO: 4887244 - DNA, 25 bp, Homo sapien
aaaggaagcatctgagaccatagct

SEQ ID NO: 4887245 - DNA, 25 bp, Homo sapien
catctgagaccatagctctggaggt

SEQ ID NO: 4887246 - DNA, 25 bp, Homo sapien
acagggtaccaggaacagcaacatt

SEQ ID NO: 4887247 - DNA, 25 bp, Homo sapien
ggcttcttggtggactaatgacctt

SEQ ID NO: 4887248 - DNA, 25 bp, Homo sapien
ttcttggtggactaatgaccttctc

SEQ ID NO: 4887249 - DNA, 25 bp, Homo sapien
gcttcttggtggactaatgaccttc

SEQ ID NO: 4887250 - DNA, 25 bp, Homo sapien
cttcttggtggactaatgaccttct

SEQ ID NO: 4887251 - DNA, 25 bp, Homo sapien
tgaaccccattggaagacagtagtt

SEQ ID NO: 4887252 - DNA, 25 bp, Homo sapien
tacatacttgttttgcatctgttct

SEQ ID NO: 4887253 - DNA, 25 bp, Homo sapien
ttaagacactgaaacctcctaagtg

SEQ ID NO: 4887254 - DNA, 25 bp, Homo sapien
aatggagggctttgaactgttgaac

SEQ ID NO: 4887255 - DNA, 25 bp, Homo sapien
gcagcaccagctttcatacgcagtg

SEQ ID NO: 4887256 - DNA, 25 bp, Homo sapien
tttctctattttgcaacacacttag

SEQ ID NO: 4887257 - DNA, 25 bp, Homo sapien
tctgtgtggtctaacagcccagaag

SEQ ID NO: 4887258 - DNA, 25 bp, Homo sapien
ataaacaccccaacaacctgttgat

SEQ ID NO: 4887259 - DNA, 25 bp, Homo sapien
ctttggcacacactgtcactatggg

SEQ ID NO: 4887260 - DNA, 25 bp, Homo sapien
gaactcaaactaatcaggagctcca

SEQ ID NO: 4887261 - DNA, 25 bp, Homo sapien
cgtacagcacgaacacacggctgtg

SEQ ID NO: 4887262 - DNA, 25 bp, Homo sapien
catgaccacagtgccgtacagcacg

SEQ ID NO: 4887263 - DNA, 25 bp, Homo sapien
cacgctttggaattcatatcactga

SEQ ID NO: 4887264 - DNA, 25 bp, Homo sapien
ttaccaatgactccaccacttactg

SEQ ID NO: 4887265 - DNA, 25 bp, Homo sapien
tactctttcatccatataaatgtcc

SEQ ID NO: 4887266 - DNA, 25 bp, Homo sapien
tcctttaccaatgactccaccactt

SEQ ID NO: 4887267 - DNA, 25 bp, Homo sapien
tccaacagtgctagtaagacagctt

SEQ ID NO: 4887268 - DNA, 25 bp, Homo sapien
aacagaaaagtccaacagtgctagt

SEQ ID NO: 4887269 - DNA, 25 bp, Homo sapien
gaaaagtccaacagtgctagtaaga

SEQ ID NO: 4887270 - DNA, 25 bp, Homo sapien
cagtgctagtaagacagctttaaaa

SEQ ID NO: 4887271 - DNA, 25 bp, Homo sapien
accccaaaccctgcccctgctccat

SEQ ID NO: 4887272 - DNA, 25 bp, Homo sapien
cctgctccatctcttgtttgagcat

SEQ ID NO: 4887273 - DNA, 25 bp, Homo sapien
gcccctgctccatctcttgtttgag

SEQ ID NO: 4887274 - DNA, 25 bp, Homo sapien
ctgcccctgctccatctcttgtttg

SEQ ID NO: 4887275 - DNA, 25 bp, Homo sapien
tacatataccctaacgactttcacc

SEQ ID NO: 4887276 - DNA, 25 bp, Homo sapien
ctggctctgacctacatatacccta

SEQ ID NO: 4887277 - DNA, 25 bp, Homo sapien
tgacctacatataccctaacgactt

SEQ ID NO: 4887278 - DNA, 25 bp, Homo sapien
caagtgtcctcaacaccttaggggg

SEQ ID NO: 4887279 - DNA, 25 bp, Homo sapien
cagtagcaaattgaatttcaccggg

SEQ ID NO: 4887280 - DNA, 25 bp, Homo sapien
aattgaatttcaccgggccaggtgt

SEQ ID NO: 4887281 - DNA, 25 bp, Homo sapien
tacctgtgctcagtagcaaattgaa

SEQ ID NO: 4887282 - DNA, 25 bp, Homo sapien
tgggtacctgtgctcagtagcaaat

SEQ ID NO: 4887283 - DNA, 25 bp, Homo sapien
taaccttcccatccatcccataact

SEQ ID NO: 4887284 - DNA, 25 bp, Homo sapien
ccttcccatccatcccataactgtc

SEQ ID NO: 4887285 - DNA, 25 bp, Homo sapien
ttcccatccatcccataactgtcct

SEQ ID NO: 4887286 - DNA, 25 bp, Homo sapien
ttaaccttcccatccatcccataac

SEQ ID NO: 4887287 - DNA, 25 bp, Homo sapien
tcatagtgactcttcagcagtgcaa

SEQ ID NO: 4887288 - DNA, 25 bp, Homo sapien
tgaaggtcagctggcaaggtcaaat

SEQ ID NO: 4887289 - DNA, 25 bp, Homo sapien
tacttcggtgttctgcggtggccat

SEQ ID NO: 4887290 - DNA, 25 bp, Homo sapien
gcgtgctcagcagagacaaccaaga

SEQ ID NO: 4887291 - DNA, 25 bp, Homo sapien
ggtggctgtgattacctttattagt

SEQ ID NO: 4887292 - DNA, 25 bp, Homo sapien
ttggtggctgtgattacctttatta

SEQ ID NO: 4887293 - DNA, 25 bp, Homo sapien
tggtggctgtgattacctttattag

SEQ ID NO: 4887294 - DNA, 25 bp, Homo sapien
tatgtgatccatactgtgtgtcgtc

SEQ ID NO: 4887295 - DNA, 25 bp, Homo sapien
caaaacttcattacgcaggcagtgg

SEQ ID NO: 4887296 - DNA, 25 bp, Homo sapien
ttagcaagtcgaggtaaaacacatg

SEQ ID NO: 4887297 - DNA, 25 bp, Homo sapien
ttctactgcacaaaggtacccaggg

SEQ ID NO: 4887298 - DNA, 25 bp, Homo sapien
caggcaagcagctaatttgaacata

SEQ ID NO: 4887299 - DNA, 25 bp, Homo sapien
gtttgttctgtcatcccaccgatga

SEQ ID NO: 4887300 - DNA, 25 bp, Homo sapien
tgatgaacgctttgaggctaggcac

SEQ ID NO: 4887301 - DNA, 25 bp, Homo sapien
taaaggtatgatgtatgatgaacgc

SEQ ID NO: 4887302 - DNA, 25 bp, Homo sapien
ttaaaaaacagagtatgcttcctaa

SEQ ID NO: 4887303 - DNA, 25 bp, Homo sapien
agccagaattgttctataaaagtat

SEQ ID NO: 4887304 - DNA, 25 bp, Homo sapien
tgaagccagaattgttctataaaag

SEQ ID NO: 4887305 - DNA, 25 bp, Homo sapien
gaattgttctataaaagtatcatgg

SEQ ID NO: 4887306 - DNA, 25 bp, Homo sapien
tgaaacaggcaagtcaggctctgac

SEQ ID NO: 4887307 - DNA, 25 bp, Homo sapien
taagagtagtaccaaataatgggca

SEQ ID NO: 4887308 - DNA, 25 bp, Homo sapien
gactagtaccgattattggcaattg

SEQ ID NO: 4887309 - DNA, 25 bp, Homo sapien
tgtaatactgtgtcaactaaactgg

SEQ ID NO: 4887310 - DNA, 25 bp, Homo sapien
ggctgtatctgtcccaaacttcttg

SEQ ID NO: 4887311 - DNA, 25 bp, Homo sapien
tccataataagagagtgctgcggct

SEQ ID NO: 4887312 - DNA, 25 bp, Homo sapien
cagaccagtaggtagcctttccaca

SEQ ID NO: 4887313 - DNA, 25 bp, Homo sapien
tactcagctctaggaagggtcaaat

SEQ ID NO: 4887314 - DNA, 25 bp, Homo sapien
aagcacaggtaaatggtgggagtaa

SEQ ID NO: 4887315 - DNA, 25 bp, Homo sapien
agcacaggtaaatggtgggagtaac

SEQ ID NO: 4887316 - DNA, 25 bp, Homo sapien
attcaatgaagcacaggtaaatggt

SEQ ID NO: 4887317 - DNA, 25 bp, Homo sapien
caatgaagcacaggtaaatggtggg

SEQ ID NO: 4887318 - DNA, 25 bp, Homo sapien
ccctgacaatcaatgcggtggcagg

SEQ ID NO: 4887319 - DNA, 25 bp, Homo sapien
gcaactttttgcatgcctttgacca

SEQ ID NO: 4887320 - DNA, 25 bp, Homo sapien
gggcacacccgtctattcagccaga

SEQ ID NO: 4887321 - DNA, 25 bp, Homo sapien
aaagaatgatcctcctctgtcagag

SEQ ID NO: 4887322 - DNA, 25 bp, Homo sapien
gagctgctccgcacacacatttctt

SEQ ID NO: 4887323 - DNA, 25 bp, Homo sapien
gggccattgagctgctccgcacaca

SEQ ID NO: 4887324 - DNA, 25 bp, Homo sapien
ctgattgttcctcaggcccttcaca

SEQ ID NO: 4887325 - DNA, 25 bp, Homo sapien
tcacaatcaacaagtctacaatggg

SEQ ID NO: 4887326 - DNA, 25 bp, Homo sapien
tcgcgtaaatgagtggtcagacctt

SEQ ID NO: 4887327 - DNA, 25 bp, Homo sapien
attcgcgtaaatgagtggtcagacc

SEQ ID NO: 4887328 - DNA, 25 bp, Homo sapien
ttcgcgtaaatgagtggtcagacct

SEQ ID NO: 4887329 - DNA, 25 bp, Homo sapien
cgcgtaaatgagtggtcagaccttt

SEQ ID NO: 4887330 - DNA, 25 bp, Homo sapien
cccaaagcaaacttcggatctttct

SEQ ID NO: 4887331 - DNA, 25 bp, Homo sapien
tgctgctcgtcccaagacgcgtata

SEQ ID NO: 4887332 - DNA, 25 bp, Homo sapien
caagacgcgtataattccccaaagc

SEQ ID NO: 4887333 - DNA, 25 bp, Homo sapien
tgatcggagatccaagcaatgtcca

SEQ ID NO: 4887334 - DNA, 25 bp, Homo sapien
gagaggtgaggtgcgcagtggtgag

SEQ ID NO: 4887335 - DNA, 25 bp, Homo sapien
tggtgagaggcgcaacggagcggcg

SEQ ID NO: 4887336 - DNA, 25 bp, Homo sapien
tgcgcagtggtgagaggcgcaacgg

SEQ ID NO: 4887337 - DNA, 25 bp, Homo sapien
aacggagcggcgagctgactctttg

SEQ ID NO: 4887338 - DNA, 25 bp, Homo sapien
ttagagggcgctggagcaggaactc

SEQ ID NO: 4887339 - DNA, 25 bp, Homo sapien
tggagcaggaactcgggggtccctc

SEQ ID NO: 4887340 - DNA, 25 bp, Homo sapien
gcgctggagcaggaactcgggggtc

SEQ ID NO: 4887341 - DNA, 25 bp, Homo sapien
cgctggagcaggaactcgggggtcc

SEQ ID NO: 4887342 - DNA, 25 bp, Homo sapien
ctcctgcgctccccaggtcttggcc

SEQ ID NO: 4887343 - DNA, 25 bp, Homo sapien
tctcctgcgctccccaggtcttggc

SEQ ID NO: 4887344 - DNA, 25 bp, Homo sapien
tcctgcgctccccaggtcttggcca

SEQ ID NO: 4887345 - DNA, 25 bp, Homo sapien
aatatctggggtcgttggtgaacca

SEQ ID NO: 4887346 - DNA, 25 bp, Homo sapien
cctggtgaagacttcctagtataat

SEQ ID NO: 4887347 - DNA, 25 bp, Homo sapien
gaagacttcctagtataatatctgg

SEQ ID NO: 4887348 - DNA, 25 bp, Homo sapien
ctttggtcctggtgaagacttccta

SEQ ID NO: 4887349 - DNA, 25 bp, Homo sapien
tgattaatagcacagtccgtatgtc

SEQ ID NO: 4887350 - DNA, 25 bp, Homo sapien
cacagtccgtatgtctgggatttgt

SEQ ID NO: 4887351 - DNA, 25 bp, Homo sapien
tctgggatttgtttcccaagcacat

SEQ ID NO: 4887352 - DNA, 25 bp, Homo sapien
taatagcacagtccgtatgtctggg

SEQ ID NO: 4887353 - DNA, 25 bp, Homo sapien
tgacaccaatgtctgacgagggcat

SEQ ID NO: 4887354 - DNA, 25 bp, Homo sapien
aatcacttgaggacacttgtgcctg

SEQ ID NO: 4887355 - DNA, 25 bp, Homo sapien
gggagagtttatccctaggtcagaa

SEQ ID NO: 4887356 - DNA, 25 bp, Homo sapien
gtttatccctaggtcagaaatagag

SEQ ID NO: 4887357 - DNA, 25 bp, Homo sapien
tggctggggaaatctaaagactcac

SEQ ID NO: 4887358 - DNA, 25 bp, Homo sapien
accagggccttaagttgcttacaca

SEQ ID NO: 4887359 - DNA, 25 bp, Homo sapien
tattgctcgcttgttcacattgcca

SEQ ID NO: 4887360 - DNA, 25 bp, Homo sapien
cacattgccattgaatgccagctct

SEQ ID NO: 4887361 - DNA, 25 bp, Homo sapien
tccacattcaaatccagtaaacttg

SEQ ID NO: 4887362 - DNA, 25 bp, Homo sapien
acattcaaatccagtaaacttgaat

SEQ ID NO: 4887363 - DNA, 25 bp, Homo sapien
taggctcctacgttctccaattcca

SEQ ID NO: 4887364 - DNA, 25 bp, Homo sapien
ttaggctcctacgttctccaattcc

SEQ ID NO: 4887365 - DNA, 25 bp, Homo sapien
taatttttggtgataagacagcagc

SEQ ID NO: 4887366 - DNA, 25 bp, Homo sapien
tcactctgttgtactgtcaatattt

SEQ ID NO: 4887367 - DNA, 25 bp, Homo sapien
cagtagtgaaggatattaacatatc

SEQ ID NO: 4887368 - DNA, 25 bp, Homo sapien
gttctcatgttgtacgatagatgtc

SEQ ID NO: 4887369 - DNA, 25 bp, Homo sapien
tccatgccctctaaagcaatagcac

SEQ ID NO: 4887370 - DNA, 25 bp, Homo sapien
tctttccatgccctctaaagcaata

SEQ ID NO: 4887371 - DNA, 25 bp, Homo sapien
aaccatgactcccagaaagtgccat

SEQ ID NO: 4887372 - DNA, 25 bp, Homo sapien
cagggaaaccatgactcccagaaag

SEQ ID NO: 4887373 - DNA, 25 bp, Homo sapien
acattgttcaaaggttgagaagatt

SEQ ID NO: 4887374 - DNA, 25 bp, Homo sapien
ggaaacttcttcatccacctcgtgt

SEQ ID NO: 4887375 - DNA, 25 bp, Homo sapien
tctttggaaacttcttcatccacct

SEQ ID NO: 4887376 - DNA, 25 bp, Homo sapien
ctatggaaagcctttctttaatcct

SEQ ID NO: 4887377 - DNA, 25 bp, Homo sapien
cctggaaatgcagatatgggccttt

SEQ ID NO: 4887378 - DNA, 25 bp, Homo sapien
catggatagtctgcctgctgagacg

SEQ ID NO: 4887379 - DNA, 25 bp, Homo sapien
tgctgagacgttggctcatgcactt

SEQ ID NO: 4887380 - DNA, 25 bp, Homo sapien
tctggttgtgtatgggagtaactcc

SEQ ID NO: 4887381 - DNA, 25 bp, Homo sapien
tatgctttctctatccagttctgga

SEQ ID NO: 4887382 - DNA, 25 bp, Homo sapien
atgctttctctatccagttctggac

SEQ ID NO: 4887383 - DNA, 25 bp, Homo sapien
ttatgctttctctatccagttctgg

SEQ ID NO: 4887384 - DNA, 25 bp, Homo sapien
attaggcatccaccccattccccat

SEQ ID NO: 4887385 - DNA, 25 bp, Homo sapien
gctgagcctctccattaggcatcca

SEQ ID NO: 4887386 - DNA, 25 bp, Homo sapien
accccattccccatagcgatgaatg

SEQ ID NO: 4887387 - DNA, 25 bp, Homo sapien
ctgggctgagcctctccattaggca

SEQ ID NO: 4887388 - DNA, 25 bp, Homo sapien
ccctcttcaactaccattggcaatt

SEQ ID NO: 4887389 - DNA, 25 bp, Homo sapien
tccttttgctggagaaaaagagatg

SEQ ID NO: 4887390 - DNA, 25 bp, Homo sapien
ctatgggttcatgtcaatgtgttct

SEQ ID NO: 4887391 - DNA, 25 bp, Homo sapien
caattttacaatactcaggtggtgc

SEQ ID NO: 4887392 - DNA, 25 bp, Homo sapien
attcaagctgggtgcgggatcgcga

SEQ ID NO: 4887393 - DNA, 25 bp, Homo sapien
ttcaagctgggtgcgggatcgcgag

SEQ ID NO: 4887394 - DNA, 25 bp, Homo sapien
tgggtgcgggatcgcgagagaggtt

SEQ ID NO: 4887395 - DNA, 25 bp, Homo sapien
agctgggtgcgggatcgcgagagag

SEQ ID NO: 4887396 - DNA, 25 bp, Homo sapien
taaggatcgctgtagatacgacggt

SEQ ID NO: 4887397 - DNA, 25 bp, Homo sapien
tatttgggttcaggaagtgccacgt

SEQ ID NO: 4887398 - DNA, 25 bp, Homo sapien
tagtagaaccccgtgatatgagtcc

SEQ ID NO: 4887399 - DNA, 25 bp, Homo sapien
cctcggttgataggtcagtcttgca

SEQ ID NO: 4887400 - DNA, 25 bp, Homo sapien
tgcagtcgcgcaatcacagcctact

SEQ ID NO: 4887401 - DNA, 25 bp, Homo sapien
tttagtggaaatgtgttctcaaggg

SEQ ID NO: 4887402 - DNA, 25 bp, Homo sapien
tggaaatgtgttctcaagggatcct

SEQ ID NO: 4887403 - DNA, 25 bp, Homo sapien
gcacctggcctggcttaattatttt

SEQ ID NO: 4887404 - DNA, 25 bp, Homo sapien
gtgtcgctcaagctgggagctgcag

SEQ ID NO: 4887405 - DNA, 25 bp, Homo sapien
ctgtgtcgctcaagctgggagctgc

SEQ ID NO: 4887406 - DNA, 25 bp, Homo sapien
tgtgtcgctcaagctgggagctgca

SEQ ID NO: 4887407 - DNA, 25 bp, Homo sapien
tgtcgctcaagctgggagctgcaga

SEQ ID NO: 4887408 - DNA, 25 bp, Homo sapien
caggagtgcggctcactgtgtagta

SEQ ID NO: 4887409 - DNA, 25 bp, Homo sapien
tgaacttcaagggaagcttgttcca

SEQ ID NO: 4887410 - DNA, 25 bp, Homo sapien
gggtagttactctcagcttcggcag

SEQ ID NO: 4887411 - DNA, 25 bp, Homo sapien
gatggcgaaaaattcatgagttgga

SEQ ID NO: 4887412 - DNA, 25 bp, Homo sapien
caccagagaatgaggctaggttttc

SEQ ID NO: 4887413 - DNA, 25 bp, Homo sapien
ctctcttttgcaagacaggccacca

SEQ ID NO: 4887414 - DNA, 25 bp, Homo sapien
gaactacaagttcatgctaccacat

SEQ ID NO: 4887415 - DNA, 25 bp, Homo sapien
tctctcatcactaacaatcagatat

SEQ ID NO: 4887416 - DNA, 25 bp, Homo sapien
cagtttaagcaagctaaacctagac

SEQ ID NO: 4887417 - DNA, 25 bp, Homo sapien
aaaaatcacaattgtcttctggtgt

SEQ ID NO: 4887418 - DNA, 25 bp, Homo sapien
gactttaaaagctctaattttcaca

SEQ ID NO: 4887419 - DNA, 25 bp, Homo sapien
ttctggtgtgaaatttcacaaataa

SEQ ID NO: 4887420 - DNA, 25 bp, Homo sapien
agatgactggtccacctttcttgca

SEQ ID NO: 4887421 - DNA, 25 bp, Homo sapien
tagggcaattttgtgacagatgcag

SEQ ID NO: 4887422 - DNA, 25 bp, Homo sapien
ctttcttgcatgcttttctgtatca

SEQ ID NO: 4887423 - DNA, 25 bp, Homo sapien
tggctgacaagctggttcttagggc

SEQ ID NO: 4887424 - DNA, 25 bp, Homo sapien
taacagcatcctaaggcagaagaat

SEQ ID NO: 4887425 - DNA, 25 bp, Homo sapien
ttctttttgacagaaccaccatcgt

SEQ ID NO: 4887426 - DNA, 25 bp, Homo sapien
ttaacagcatcctaaggcagaagaa

SEQ ID NO: 4887427 - DNA, 25 bp, Homo sapien
taggataatagtggagagaaggtca

SEQ ID NO: 4887428 - DNA, 25 bp, Homo sapien
tggagaaggtccagtatcttgaaca

SEQ ID NO: 4887429 - DNA, 25 bp, Homo sapien
caagaagtagaataatttgtaggaa

SEQ ID NO: 4887430 - DNA, 25 bp, Homo sapien
ggaactggattcagttgaaactggg

SEQ ID NO: 4887431 - DNA, 25 bp, Homo sapien
caaggaacttttggaactggattca

SEQ ID NO: 4887432 - DNA, 25 bp, Homo sapien
gatcaaagcatgaaccggcacaact

SEQ ID NO: 4887433 - DNA, 25 bp, Homo sapien
gcctcagctgtatggtaatgccacc

SEQ ID NO: 4887434 - DNA, 25 bp, Homo sapien
ttagtacgaatcctctgggacagtg

SEQ ID NO: 4887435 - DNA, 25 bp, Homo sapien
taagtccaatatagtgctgagcctc

SEQ ID NO: 4887436 - DNA, 25 bp, Homo sapien
ctacagccgctactacgggcctggg

SEQ ID NO: 4887437 - DNA, 25 bp, Homo sapien
cccatgtcggccctgaggcgcttgg

SEQ ID NO: 4887438 - DNA, 25 bp, Homo sapien
agtgaccatctgtcctacagccgct

SEQ ID NO: 4887439 - DNA, 25 bp, Homo sapien
gcgcttgggctacggccccagtgac

SEQ ID NO: 4887440 - DNA, 25 bp, Homo sapien
ttttctctcgcctgattgccccgac

SEQ ID NO: 4887441 - DNA, 25 bp, Homo sapien
attccattgatacctagtttattag

SEQ ID NO: 4887442 - DNA, 25 bp, Homo sapien
ttctctcgcctgattgccccgacca

SEQ ID NO: 4887443 - DNA, 25 bp, Homo sapien
ccattgatacctagtttattagagt

SEQ ID NO: 4887444 - DNA, 25 bp, Homo sapien
caacgatctctaagctgtcccctgg

SEQ ID NO: 4887445 - DNA, 25 bp, Homo sapien
acgatctctaagctgtcccctggtt

SEQ ID NO: 4887446 - DNA, 25 bp, Homo sapien
agctgtcccctggttgtcagggcca

SEQ ID NO: 4887447 - DNA, 25 bp, Homo sapien
ctaagctgtcccctggttgtcaggg

SEQ ID NO: 4887448 - DNA, 25 bp, Homo sapien
gcttctagtggttgaaaatcccagg

SEQ ID NO: 4887449 - DNA, 25 bp, Homo sapien
agcttctagtggttgaaaatcccag

SEQ ID NO: 4887450 - DNA, 25 bp, Homo sapien
cagcttctagtggttgaaaatccca

SEQ ID NO: 4887451 - DNA, 25 bp, Homo sapien
cagtcaaggtggtatggacataggc

SEQ ID NO: 4887452 - DNA, 25 bp, Homo sapien
aaagactccagcactcagtagtcct

SEQ ID NO: 4887453 - DNA, 25 bp, Homo sapien
tcagaagagactggctacagtcaag

SEQ ID NO: 4887454 - DNA, 25 bp, Homo sapien
tagtcctaggattctcctatccaag

SEQ ID NO: 4887455 - DNA, 25 bp, Homo sapien
gggcctgtcacgaattgtcatgtca

SEQ ID NO: 4887456 - DNA, 25 bp, Homo sapien
gaaccaccatacagatcataccgga

SEQ ID NO: 4887457 - DNA, 25 bp, Homo sapien
cacggcgccgcctaaaagaattctt

SEQ ID NO: 4887458 - DNA, 25 bp, Homo sapien
caagcccctgtataccagttctgga

SEQ ID NO: 4887459 - DNA, 25 bp, Homo sapien
tggatcactgtggacgttatttttc

SEQ ID NO: 4887460 - DNA, 25 bp, Homo sapien
aggtcctcatgcatatgcttgctgg

SEQ ID NO: 4887461 - DNA, 25 bp, Homo sapien
actggagctacatttccgtggtgcc

SEQ ID NO: 4887462 - DNA, 25 bp, Homo sapien
ggtcctcatgcatatgcttgctggc

SEQ ID NO: 4887463 - DNA, 25 bp, Homo sapien
caaccacggaaacactaggtctctc

SEQ ID NO: 4887464 - DNA, 25 bp, Homo sapien
gcaccagatggataccaaccacgga

SEQ ID NO: 4887465 - DNA, 25 bp, Homo sapien
gttcgctcacttttggaagtcccca

SEQ ID NO: 4887466 - DNA, 25 bp, Homo sapien
tctgccgctccctgatgataggcac

SEQ ID NO: 4887467 - DNA, 25 bp, Homo sapien
gaaagcagctgactctagtcttgaa

SEQ ID NO: 4887468 - DNA, 25 bp, Homo sapien
gaagatgtaacaaccaaagtgctga

SEQ ID NO: 4887469 - DNA, 25 bp, Homo sapien
gtcagaatgttcaacacctttggga

SEQ ID NO: 4887470 - DNA, 25 bp, Homo sapien
tggtctacgggcgtcagaatgttca

SEQ ID NO: 4887471 - DNA, 25 bp, Homo sapien
tgtgccctggacatacatcgctcat

SEQ ID NO: 4887472 - DNA, 25 bp, Homo sapien
taacaaagaaatcaggacaccacgc

SEQ ID NO: 4887473 - DNA, 25 bp, Homo sapien
ttgaagatgctaccggttccccagg

SEQ ID NO: 4887474 - DNA, 25 bp, Homo sapien
ccaggttctggttgtgctcggcttt

SEQ ID NO: 4887475 - DNA, 25 bp, Homo sapien
tctgaaagcggttcgtgagggagca

SEQ ID NO: 4887476 - DNA, 25 bp, Homo sapien
catccttgtcttcgtgttttgctag

SEQ ID NO: 4887477 - DNA, 25 bp, Homo sapien
ttcctcccatccttgtcttcgtgtt

SEQ ID NO: 4887478 - DNA, 25 bp, Homo sapien
caaggcgtcaaagccggagggaggc

SEQ ID NO: 4887479 - DNA, 25 bp, Homo sapien
tctttttgcctgaaggggatccgta

SEQ ID NO: 4887480 - DNA, 25 bp, Homo sapien
cagccgatggaggaaagggtctaac

SEQ ID NO: 4887481 - DNA, 25 bp, Homo sapien
ctgcaactccgggccgcttcttgaa

SEQ ID NO: 4887482 - DNA, 25 bp, Homo sapien
ttccgagctcttggggccagtgacg

SEQ ID NO: 4887483 - DNA, 25 bp, Homo sapien
ggccgcttcttgaacctgacaacct

SEQ ID NO: 4887484 - DNA, 25 bp, Homo sapien
ggcgcgcgcgttccgagctcttggg

SEQ ID NO: 4887485 - DNA, 25 bp, Homo sapien
ccctttgcccgtagcatccaccttc

SEQ ID NO: 4887486 - DNA, 25 bp, Homo sapien
caccttccgcaccccggcagaggcc

SEQ ID NO: 4887487 - DNA, 25 bp, Homo sapien
ccaccttccgcaccccggcagaggc

SEQ ID NO: 4887488 - DNA, 25 bp, Homo sapien
agccccgcccctttgcccgtagcat

SEQ ID NO: 4887489 - DNA, 25 bp, Homo sapien
cctcccgccctctgtgaaagcctca

SEQ ID NO: 4887490 - DNA, 25 bp, Homo sapien
ccgcggcgaagaccctcgagggtct

SEQ ID NO: 4887491 - DNA, 25 bp, Homo sapien
gaaagcctcagggagacttctcggg

SEQ ID NO: 4887492 - DNA, 25 bp, Homo sapien
cggcgaagaccctcgagggtctaga

SEQ ID NO: 4887493 - DNA, 25 bp, Homo sapien
agcatttgaattagagaactcggga

SEQ ID NO: 4887494 - DNA, 25 bp, Homo sapien
gccgaatggtgtgcaaagctgataa

SEQ ID NO: 4887495 - DNA, 25 bp, Homo sapien
ggaatacgataacggctcccaggga

SEQ ID NO: 4887496 - DNA, 25 bp, Homo sapien
tcaagtgggagtcaatctggtctct

SEQ ID NO: 4887497 - DNA, 25 bp, Homo sapien
gggggctctgggagcgcgtctccat

SEQ ID NO: 4887498 - DNA, 25 bp, Homo sapien
tccctggacctgcccgggggctctg

SEQ ID NO: 4887499 - DNA, 25 bp, Homo sapien
ggccagagcaggtcgcggggtccct

SEQ ID NO: 4887500 - DNA, 25 bp, Homo sapien
ctgggccagagcaggtcgcggggtc

SEQ ID NO: 4887501 - DNA, 25 bp, Homo sapien
agggaaaagaggttcaggcggcgca

SEQ ID NO: 4887502 - DNA, 25 bp, Homo sapien
ctgcccgcgagggaaaagaggttca

SEQ ID NO: 4887503 - DNA, 25 bp, Homo sapien
gcgagggaaaagaggttcaggcggc

SEQ ID NO: 4887504 - DNA, 25 bp, Homo sapien
ccgcgagggaaaagaggttcaggcg

SEQ ID NO: 4887505 - DNA, 25 bp, Homo sapien
cccaggccccaatagtcctggtaga

SEQ ID NO: 4887506 - DNA, 25 bp, Homo sapien
atgattggagtttccgaggaacccg

SEQ ID NO: 4887507 - DNA, 25 bp, Homo sapien
cctggtagaatgattggagtttccg

SEQ ID NO: 4887508 - DNA, 25 bp, Homo sapien
gccccaatagtcctggtagaatgat

SEQ ID NO: 4887509 - DNA, 25 bp, Homo sapien
gctcattgatctcaagacccgccgg

SEQ ID NO: 4887510 - DNA, 25 bp, Homo sapien
aggactggcagtcgccgaggctctt

SEQ ID NO: 4887511 - DNA, 25 bp, Homo sapien
tgcctgtctattaaaacgccatcct

SEQ ID NO: 4887512 - DNA, 25 bp, Homo sapien
atttctgagtcatgaccctgcttgg

SEQ ID NO: 4887513 - DNA, 25 bp, Homo sapien
ggctttgaatcccaagttgcagatc

SEQ ID NO: 4887514 - DNA, 25 bp, Homo sapien
ttggatggtcgttctgccctctcgg

SEQ ID NO: 4887515 - DNA, 25 bp, Homo sapien
gtcggaggtaggcacgggacaggac

SEQ ID NO: 4887516 - DNA, 25 bp, Homo sapien
gcagcactcgctggcgcagttcgtt

SEQ ID NO: 4887517 - DNA, 25 bp, Homo sapien
cgcacgcctggagcggcaatactgc

SEQ ID NO: 4887518 - DNA, 25 bp, Homo sapien
gactccgcacgcctggagcggcaat

SEQ ID NO: 4887519 - DNA, 25 bp, Homo sapien
ctgggtagcacacgtgttcggtttt

SEQ ID NO: 4887520 - DNA, 25 bp, Homo sapien
gcctggagcggcaatactgcctgcc

SEQ ID NO: 4887521 - DNA, 25 bp, Homo sapien
gtcagacgccgccttcgggcaggct

SEQ ID NO: 4887522 - DNA, 25 bp, Homo sapien
ttctggactccggttcagggtgtgt

SEQ ID NO: 4887523 - DNA, 25 bp, Homo sapien
caggctgggatcttccgaactggga

SEQ ID NO: 4887524 - DNA, 25 bp, Homo sapien
cgggacgcgagtccggccttctgga

SEQ ID NO: 4887525 - DNA, 25 bp, Homo sapien
ttttcagagcctgcgcgtccaaggt

SEQ ID NO: 4887526 - DNA, 25 bp, Homo sapien
ccaaggtcgctagcctttcccgaag

SEQ ID NO: 4887527 - DNA, 25 bp, Homo sapien
tcaaatgcggtctttgggcgctcgg

SEQ ID NO: 4887528 - DNA, 25 bp, Homo sapien
caatggccggcgaggagaattcaaa

SEQ ID NO: 4887529 - DNA, 25 bp, Homo sapien
tagccgggtagatgttcctcctttc

SEQ ID NO: 4887530 - DNA, 25 bp, Homo sapien
tctcttagccgggtagatgttcctc

SEQ ID NO: 4887531 - DNA, 25 bp, Homo sapien
gcgctctgaagatccgggaccccgg

SEQ ID NO: 4887532 - DNA, 25 bp, Homo sapien
cccggctgcgggcgctctgaagatc

SEQ ID NO: 4887533 - DNA, 25 bp, Homo sapien
tatagcgaatgccagtgggtctagg

SEQ ID NO: 4887534 - DNA, 25 bp, Homo sapien
ccaggaggaagtatagcgaatgcca

SEQ ID NO: 4887535 - DNA, 25 bp, Homo sapien
gaagtatagcgaatgccagtgggtc

SEQ ID NO: 4887536 - DNA, 25 bp, Homo sapien
aagcccaggaggaagtatagcgaat

SEQ ID NO: 4887537 - DNA, 25 bp, Homo sapien
gataaggtttgatattgcttccgct

SEQ ID NO: 4887538 - DNA, 25 bp, Homo sapien
tacgacacttccgtgcacgaaaaaa

SEQ ID NO: 4887539 - DNA, 25 bp, Homo sapien
tgcacgaaaaaacggcctcttgagg

SEQ ID NO: 4887540 - DNA, 25 bp, Homo sapien
tgcttccgctaaaataaagctacga

SEQ ID NO: 4887541 - DNA, 25 bp, Homo sapien
tatagtaaactctggattctttgca

SEQ ID NO: 4887542 - DNA, 25 bp, Homo sapien
atagtaaactctggattctttgcaa

SEQ ID NO: 4887543 - DNA, 25 bp, Homo sapien
aggtaaagcgtagtaccactggtca

SEQ ID NO: 4887544 - DNA, 25 bp, Homo sapien
agtaccactggtcacttgcaacttg

SEQ ID NO: 4887545 - DNA, 25 bp, Homo sapien
cttgcaacttgctatccgtggagat

SEQ ID NO: 4887546 - DNA, 25 bp, Homo sapien
ggtcacttgcaacttgctatccgtg

SEQ ID NO: 4887547 - DNA, 25 bp, Homo sapien
ttccactcccaaatctccagacaca

SEQ ID NO: 4887548 - DNA, 25 bp, Homo sapien
actcccaaatctccagacacattta

SEQ ID NO: 4887549 - DNA, 25 bp, Homo sapien
ctggcttaggaaggtcgtatcatgc

SEQ ID NO: 4887550 - DNA, 25 bp, Homo sapien
tcgtatcatgcattagaatatccat

SEQ ID NO: 4887551 - DNA, 25 bp, Homo sapien
ggagttgactctgaacatcactttg

SEQ ID NO: 4887552 - DNA, 25 bp, Homo sapien
caagttaatattgctttgctgatgc

SEQ ID NO: 4887553 - DNA, 25 bp, Homo sapien
tatttctagtgtgagcagtttatgc

SEQ ID NO: 4887554 - DNA, 25 bp, Homo sapien
tcttcaggagaaagcttacagtgtt

SEQ ID NO: 4887555 - DNA, 25 bp, Homo sapien
tgttttgtaaaggatatcaatgcct

SEQ ID NO: 4887556 - DNA, 25 bp, Homo sapien
tatgcagccgctgtaggaaccaatt

SEQ ID NO: 4887557 - DNA, 25 bp, Homo sapien
gactcaaaaatgaggtacttcagta

SEQ ID NO: 4887558 - DNA, 25 bp, Homo sapien
gctgactaagccgaagttttgtaag

SEQ ID NO: 4887559 - DNA, 25 bp, Homo sapien
ggaagcatgtttattctgttcccca

SEQ ID NO: 4887560 - DNA, 25 bp, Homo sapien
aagcatgtttattctgttccccagc

SEQ ID NO: 4887561 - DNA, 25 bp, Homo sapien
tcacgacagatttaacctctgccat

SEQ ID NO: 4887562 - DNA, 25 bp, Homo sapien
tgatagcagatatcacgacagattt

SEQ ID NO: 4887563 - DNA, 25 bp, Homo sapien
taaagcctgaatttgggatggaagc

SEQ ID NO: 4887564 - DNA, 25 bp, Homo sapien
gacacacccagtgcgtgaagaccaa

SEQ ID NO: 4887565 - DNA, 25 bp, Homo sapien
gacaccgtggacagcgctgtattta

SEQ ID NO: 4887566 - DNA, 25 bp, Homo sapien
tttccctggctaacagtctagtgca

SEQ ID NO: 4887567 - DNA, 25 bp, Homo sapien
cttgacagtctgaagctcgcatcca

SEQ ID NO: 4887568 - DNA, 25 bp, Homo sapien
cagacagtcgctcagtctgttcact

SEQ ID NO: 4887569 - DNA, 25 bp, Homo sapien
gggtggcgtccactcggctgtggca

SEQ ID NO: 4887570 - DNA, 25 bp, Homo sapien
tcaccttagtgcaacttagatctct

SEQ ID NO: 4887571 - DNA, 25 bp, Homo sapien
tactcatccagatgcggcctctgtg

SEQ ID NO: 4887572 - DNA, 25 bp, Homo sapien
cagacgatggcctgcgagaaatagc

SEQ ID NO: 4887573 - DNA, 25 bp, Homo sapien
gcggtcattaaggagagattcatca

SEQ ID NO: 4887574 - DNA, 25 bp, Homo sapien
aaatagcatgtaggattcgctgggc

SEQ ID NO: 4887575 - DNA, 25 bp, Homo sapien
cagtcgtggcttatgtgcagaagtt

SEQ ID NO: 4887576 - DNA, 25 bp, Homo sapien
tgaaatcaggaatgcacttcccaga

SEQ ID NO: 4887577 - DNA, 25 bp, Homo sapien
agtgccagggagctcaacctctgag

SEQ ID NO: 4887578 - DNA, 25 bp, Homo sapien
taagaatcacagtcccgagtggcag

SEQ ID NO: 4887579 - DNA, 25 bp, Homo sapien
gaaagcatgctggttatggcacaaa

SEQ ID NO: 4887580 - DNA, 25 bp, Homo sapien
gaaggcagctagtatttcatgagta

SEQ ID NO: 4887581 - DNA, 25 bp, Homo sapien
tcatgttcctctagactccgcaaaa

SEQ ID NO: 4887582 - DNA, 25 bp, Homo sapien
cgcaaaatacgtacatgggagagct

SEQ ID NO: 4887583 - DNA, 25 bp, Homo sapien
gaggacctcagccttagagcatgag

SEQ ID NO: 4887584 - DNA, 25 bp, Homo sapien
tgatatgtcagatagggtggcagca

SEQ ID NO: 4887585 - DNA, 25 bp, Homo sapien
gaggcaacctgatatgtcagatagg

SEQ ID NO: 4887586 - DNA, 25 bp, Homo sapien
gagcatgagtacctatggagagaga

SEQ ID NO: 4887587 - DNA, 25 bp, Homo sapien
cattgttatctctaatgcatttcaa

SEQ ID NO: 4887588 - DNA, 25 bp, Homo sapien
tatgtgtcaaatgaggaagttaacc

SEQ ID NO: 4887589 - DNA, 25 bp, Homo sapien
gactaccactgaacaacttaggaaa

SEQ ID NO: 4887590 - DNA, 25 bp, Homo sapien
caaatagatgtctgaagtagttaac

SEQ ID NO: 4887591 - DNA, 25 bp, Homo sapien
gttctcatggtctttcttgttttgc

SEQ ID NO: 4887592 - DNA, 25 bp, Homo sapien
ttgttttgctccctggagtctgctg

SEQ ID NO: 4887593 - DNA, 25 bp, Homo sapien
agttacttcctttgttctcatggtc

SEQ ID NO: 4887594 - DNA, 25 bp, Homo sapien
catggtctttcttgttttgctccct

SEQ ID NO: 4887595 - DNA, 25 bp, Homo sapien
cacaagcagcctgcactcgccttac

SEQ ID NO: 4887596 - DNA, 25 bp, Homo sapien
gagcttgcgccctggccacaagcag

SEQ ID NO: 4887597 - DNA, 25 bp, Homo sapien
tgtccacagagagcttgcgccctgg

SEQ ID NO: 4887598 - DNA, 25 bp, Homo sapien
tgaccctgtccacagagagcttgcg

SEQ ID NO: 4887599 - DNA, 25 bp, Homo sapien
tcttagcagtcagctttccagagag

SEQ ID NO: 4887600 - DNA, 25 bp, Homo sapien
ttccagagagttgatttgactgaag

SEQ ID NO: 4887601 - DNA, 25 bp, Homo sapien
aagcaaattcttggctactagagat

SEQ ID NO: 4887602 - DNA, 25 bp, Homo sapien
gagttgatttgactgaagcaaattc

SEQ ID NO: 4887603 - DNA, 25 bp, Homo sapien
tagtgccgagttcataaggactggg

SEQ ID NO: 4887604 - DNA, 25 bp, Homo sapien
cataacagctttgtccctcgcagca

SEQ ID NO: 4887605 - DNA, 25 bp, Homo sapien
ggccctgatgatcttagtgcagaag

SEQ ID NO: 4887606 - DNA, 25 bp, Homo sapien
gatcttcagaacaaatcaggtcctt

SEQ ID NO: 4887607 - DNA, 25 bp, Homo sapien
ctctgtattcagagcactcatgcct

SEQ ID NO: 4887608 - DNA, 25 bp, Homo sapien
tgaacactatctgaatactgctgct

SEQ ID NO: 4887609 - DNA, 25 bp, Homo sapien
actatctgaatactgctgctctgta

SEQ ID NO: 4887610 - DNA, 25 bp, Homo sapien
tgtattcagagcactcatgcctttc

SEQ ID NO: 4887611 - DNA, 25 bp, Homo sapien
agagtcttgttctatcaccagcctg

SEQ ID NO: 4887612 - DNA, 25 bp, Homo sapien
atcatgcccagctaatttttatatt

SEQ ID NO: 4887613 - DNA, 25 bp, Homo sapien
accagcctggagtgcagtggtgcga

SEQ ID NO: 4887614 - DNA, 25 bp, Homo sapien
acagagtcttgttctatcaccagcc

SEQ ID NO: 4887615 - DNA, 25 bp, Homo sapien
tactagcaatggcagcctggttgag

SEQ ID NO: 4887616 - DNA, 25 bp, Homo sapien
gcctggttgagagcttgtctctgaa

SEQ ID NO: 4887617 - DNA, 25 bp, Homo sapien
tggcagcctggttgagagcttgtct

SEQ ID NO: 4887618 - DNA, 25 bp, Homo sapien
agcaatggcagcctggttgagagct

SEQ ID NO: 4887619 - DNA, 25 bp, Homo sapien
tctgtgagcagttccaccaatgggc

SEQ ID NO: 4887620 - DNA, 25 bp, Homo sapien
gatgtctgggctttagggttgttaa

SEQ ID NO: 4887621 - DNA, 25 bp, Homo sapien
tgttcactgccagagatgtctgggc

SEQ ID NO: 4887622 - DNA, 25 bp, Homo sapien
tcttcaatgccagagatttctaact

SEQ ID NO: 4887623 - DNA, 25 bp, Homo sapien
tcatcatcattctctccagtagtaa

SEQ ID NO: 4887624 - DNA, 25 bp, Homo sapien
ccacccacagattgtttggacagtg

SEQ ID NO: 4887625 - DNA, 25 bp, Homo sapien
ttttccacccacagattgtttggac

SEQ ID NO: 4887626 - DNA, 25 bp, Homo sapien
catcatcattctctccagtagtaag

SEQ ID NO: 4887627 - DNA, 25 bp, Homo sapien
tagtgtccaagggacttgagcttaa

SEQ ID NO: 4887628 - DNA, 25 bp, Homo sapien
ctaaacattgttattgctaaatatg

SEQ ID NO: 4887629 - DNA, 25 bp, Homo sapien
acattgttattgctaaatatgttat

SEQ ID NO: 4887630 - DNA, 25 bp, Homo sapien
tattgctaaatatgttattgtaaac

SEQ ID NO: 4887631 - DNA, 25 bp, Homo sapien
tgttattgctaaatatgttattgta

SEQ ID NO: 4887632 - DNA, 25 bp, Homo sapien
tgaggttgaacaaatcacagtccag

SEQ ID NO: 4887633 - DNA, 25 bp, Homo sapien
tagtgaggttgaacaaatcacagtc

SEQ ID NO: 4887634 - DNA, 25 bp, Homo sapien
gaacaaatcacagtccaggcaatct

SEQ ID NO: 4887635 - DNA, 25 bp, Homo sapien
ggttgaacaaatcacagtccaggca

SEQ ID NO: 4887636 - DNA, 25 bp, Homo sapien
tcaaatgacagcatggtaggcactg

SEQ ID NO: 4887637 - DNA, 25 bp, Homo sapien
aaatgacagcatggtaggcactgtc

SEQ ID NO: 4887638 - DNA, 25 bp, Homo sapien
caaatgacagcatggtaggcactgt

SEQ ID NO: 4887639 - DNA, 25 bp, Homo sapien
atgacagcatggtaggcactgtcat

SEQ ID NO: 4887640 - DNA, 25 bp, Homo sapien
tataaggtggacatgatagtagcag

SEQ ID NO: 4887641 - DNA, 25 bp, Homo sapien
agtgctctcacagaataagcattca

SEQ ID NO: 4887642 - DNA, 25 bp, Homo sapien
gcagggcctaccctcataggattgt

SEQ ID NO: 4887643 - DNA, 25 bp, Homo sapien
cacaaaaagttctctactcagtgct

SEQ ID NO: 4887644 - DNA, 25 bp, Homo sapien
catgccctgcaacagacatatcttt

SEQ ID NO: 4887645 - DNA, 25 bp, Homo sapien
aagtgatatgcctgctcaagcctcc

SEQ ID NO: 4887646 - DNA, 25 bp, Homo sapien
cctttgattggtagcagctttgaga

SEQ ID NO: 4887647 - DNA, 25 bp, Homo sapien
catccagctctattagtgattgcat

SEQ ID NO: 4887648 - DNA, 25 bp, Homo sapien
taagattgcgtaagcataacctgtc

SEQ ID NO: 4887649 - DNA, 25 bp, Homo sapien
ttttctaagtgtattgcacacagcc

SEQ ID NO: 4887650 - DNA, 25 bp, Homo sapien
tggcatgattggagcctactgtagc

SEQ ID NO: 4887651 - DNA, 25 bp, Homo sapien
taactgaagataaccagctcgtagg

SEQ ID NO: 4887652 - DNA, 25 bp, Homo sapien
ccttccatgccttgataaatggcaa

SEQ ID NO: 4887653 - DNA, 25 bp, Homo sapien
cattttgtgattgttcagtgatacg

SEQ ID NO: 4887654 - DNA, 25 bp, Homo sapien
tgatacggctgatttgattctttgg

SEQ ID NO: 4887655 - DNA, 25 bp, Homo sapien
gctgatttgattctttggtgtccat

SEQ ID NO: 4887656 - DNA, 25 bp, Homo sapien
catgagggttgatatatgggccatt

SEQ ID NO: 4887657 - DNA, 25 bp, Homo sapien
tgcttatcagtttaggaagctttcg

SEQ ID NO: 4887658 - DNA, 25 bp, Homo sapien
tttaggaagctttcgggctgagact

SEQ ID NO: 4887659 - DNA, 25 bp, Homo sapien
agatgctggatcatgctgtcttcaa

SEQ ID NO: 4887660 - DNA, 25 bp, Homo sapien
tttctagatgctggatcatgctgtc

SEQ ID NO: 4887661 - DNA, 25 bp, Homo sapien
acatctgccgtggtagtttgccaca

SEQ ID NO: 4887662 - DNA, 25 bp, Homo sapien
aaacatctgccgtggtagtttgcca

SEQ ID NO: 4887663 - DNA, 25 bp, Homo sapien
taaacatctgccgtggtagtttgcc

SEQ ID NO: 4887664 - DNA, 25 bp, Homo sapien
ggtctcactatatcaggtcttgaac

SEQ ID NO: 4887665 - DNA, 25 bp, Homo sapien
acctgaaaaggcataagtagaaatt

SEQ ID NO: 4887666 - DNA, 25 bp, Homo sapien
cctatggagttacaactttaggcac

SEQ ID NO: 4887667 - DNA, 25 bp, Homo sapien
gggatatttgatccaaggcttcgaa

SEQ ID NO: 4887668 - DNA, 25 bp, Homo sapien
cagttctactattgactttgtccct

SEQ ID NO: 4887669 - DNA, 25 bp, Homo sapien
gaacttagatatgggagattatcag

SEQ ID NO: 4887670 - DNA, 25 bp, Homo sapien
tatgggagattatcagggttggcca

SEQ ID NO: 4887671 - DNA, 25 bp, Homo sapien
acttagatatgggagattatcaggg

SEQ ID NO: 4887672 - DNA, 25 bp, Homo sapien
tagatatgggagattatcagggttg

SEQ ID NO: 4887673 - DNA, 25 bp, Homo sapien
aaacaaataaatctgtaaatggttg

SEQ ID NO: 4887674 - DNA, 25 bp, Homo sapien
gtaaagcagtgagagtggagaagaa

SEQ ID NO: 4887675 - DNA, 25 bp, Homo sapien
agaagaaacaaataaatctgtaaat

SEQ ID NO: 4887676 - DNA, 25 bp, Homo sapien
gtgagagtggagaagaaacaaataa

SEQ ID NO: 4887677 - DNA, 25 bp, Homo sapien
aattccttatatttgctgatcagaa

SEQ ID NO: 4887678 - DNA, 25 bp, Homo sapien
tagtgggatatgtaattgagttttc

SEQ ID NO: 4887679 - DNA, 25 bp, Homo sapien
agagtctgctaaaatcttttgcacg

SEQ ID NO: 4887680 - DNA, 25 bp, Homo sapien
ggatgacaaatgatattcagcatgc

SEQ ID NO: 4887681 - DNA, 25 bp, Homo sapien
aagcatgcatcactacacctgacta

SEQ ID NO: 4887682 - DNA, 25 bp, Homo sapien
tgtgagccactgtattcagcaagct

SEQ ID NO: 4887683 - DNA, 25 bp, Homo sapien
tataagcatgcatcactacacctga

SEQ ID NO: 4887684 - DNA, 25 bp, Homo sapien
actataagcatgcatcactacacct

SEQ ID NO: 4887685 - DNA, 25 bp, Homo sapien
tgcaaggttcctcgacgctgtttct

SEQ ID NO: 4887686 - DNA, 25 bp, Homo sapien
aaggttcctcgacgctgtttcttgc

SEQ ID NO: 4887687 - DNA, 25 bp, Homo sapien
tctgcaaggttcctcgacgctgttt

SEQ ID NO: 4887688 - DNA, 25 bp, Homo sapien
gttcctcgacgctgtttcttgctgt

SEQ ID NO: 4887689 - DNA, 25 bp, Homo sapien
catcactcggccattgtaataagac

SEQ ID NO: 4887690 - DNA, 25 bp, Homo sapien
gagcccagacacatatgttctaaag

SEQ ID NO: 4887691 - DNA, 25 bp, Homo sapien
cataagaattcattggattgaagtg

SEQ ID NO: 4887692 - DNA, 25 bp, Homo sapien
tcctagacttgcagaaacacttgga

SEQ ID NO: 4887693 - DNA, 25 bp, Homo sapien
cacaagagccttgtggtcataggag

SEQ ID NO: 4887694 - DNA, 25 bp, Homo sapien
cataggagggctctcgtgggatctt

SEQ ID NO: 4887695 - DNA, 25 bp, Homo sapien
gcttgggtgcccgaaattggtcttg

SEQ ID NO: 4887696 - DNA, 25 bp, Homo sapien
ttggcctagattcaggcttgggtgc

SEQ ID NO: 4887697 - DNA, 25 bp, Homo sapien
aacttggtatagctaaattccctga

SEQ ID NO: 4887698 - DNA, 25 bp, Homo sapien
cattttacagaggtttgcccatggt

SEQ ID NO: 4887699 - DNA, 25 bp, Homo sapien
tcagaggtgatggaaaacttggtat

SEQ ID NO: 4887700 - DNA, 25 bp, Homo sapien
tgcccatggttatacacaaatggag

SEQ ID NO: 4887701 - DNA, 25 bp, Homo sapien
tggacctcagcgtccggtttacatg

SEQ ID NO: 4887702 - DNA, 25 bp, Homo sapien
gtcctggacctcagcgtccggttta

SEQ ID NO: 4887703 - DNA, 25 bp, Homo sapien
tcctggacctcagcgtccggtttac

SEQ ID NO: 4887704 - DNA, 25 bp, Homo sapien
ctggacctcagcgtccggtttacat

SEQ ID NO: 4887705 - DNA, 25 bp, Homo sapien
cgttgtcttagacacgacgaagtct

SEQ ID NO: 4887706 - DNA, 25 bp, Homo sapien
tggcagtaactcaccgaggccggtt

SEQ ID NO: 4887707 - DNA, 25 bp, Homo sapien
taaaatggcatatgctgtagtgatc

SEQ ID NO: 4887708 - DNA, 25 bp, Homo sapien
gacgaagtctaaagccactttagga

SEQ ID NO: 4887709 - DNA, 25 bp, Homo sapien
tacaccattttgagtcttgcaacaa

SEQ ID NO: 4887710 - DNA, 25 bp, Homo sapien
tgcaccaaaacagagataactgtgc

SEQ ID NO: 4887711 - DNA, 25 bp, Homo sapien
gaaattcttgtcttgtagcagtcat

SEQ ID NO: 4887712 - DNA, 25 bp, Homo sapien
gctttggcaatttaggaatgcacca

SEQ ID NO: 4887713 - DNA, 25 bp, Homo sapien
ggtcttcgtgtctgaagccagcaca

SEQ ID NO: 4887714 - DNA, 25 bp, Homo sapien
ctgtagagggctgcaccacttctgg

SEQ ID NO: 4887715 - DNA, 25 bp, Homo sapien
tgcattcaagatccccaactggttc

SEQ ID NO: 4887716 - DNA, 25 bp, Homo sapien
gaatgatctggataacaagctccgt

SEQ ID NO: 4887717 - DNA, 25 bp, Homo sapien
tgatatgggaacacgaaaccatttg

SEQ ID NO: 4887718 - DNA, 25 bp, Homo sapien
gctgcacgagaactaatggccttta

SEQ ID NO: 4887719 - DNA, 25 bp, Homo sapien
tgtagctcagtattcaacttcacag

SEQ ID NO: 4887720 - DNA, 25 bp, Homo sapien
acttcacagctgcacgagaactaat

SEQ ID NO: 4887721 - DNA, 25 bp, Homo sapien
tgttttctacctctttgcagtagaa

SEQ ID NO: 4887722 - DNA, 25 bp, Homo sapien
gttttctacctctttgcagtagaaa

SEQ ID NO: 4887723 - DNA, 25 bp, Homo sapien
tgaaaggacagcgacgggatgaata

SEQ ID NO: 4887724 - DNA, 25 bp, Homo sapien
gcaggcttgatccagaaggctccac

SEQ ID NO: 4887725 - DNA, 25 bp, Homo sapien
gatgaatagagtccatgcaggcttg

SEQ ID NO: 4887726 - DNA, 25 bp, Homo sapien
agaaggctccaccttggcacagagc

SEQ ID NO: 4887727 - DNA, 25 bp, Homo sapien
acagagcatgttgggctccaaggga

SEQ ID NO: 4887728 - DNA, 25 bp, Homo sapien
cagtggccttttcgggtcccagagt

SEQ ID NO: 4887729 - DNA, 25 bp, Homo sapien
tataggtggagacgggttggcgaga

SEQ ID NO: 4887730 - DNA, 25 bp, Homo sapien
ctccaagggaaaattggtataggtg

SEQ ID NO: 4887731 - DNA, 25 bp, Homo sapien
tgaaagatcgacaaaattgatagac

SEQ ID NO: 4887732 - DNA, 25 bp, Homo sapien
tggttttctgaaagatcgacaaaat

SEQ ID NO: 4887733 - DNA, 25 bp, Homo sapien
ggatatcataaaggttctgaaattg

SEQ ID NO: 4887734 - DNA, 25 bp, Homo sapien
tgataaagggatatcataaaggttc

SEQ ID NO: 4887735 - DNA, 25 bp, Homo sapien
ttaacgggtgaaacaaccagctagc

SEQ ID NO: 4887736 - DNA, 25 bp, Homo sapien
catcaattaacgggtgaaacaacca

SEQ ID NO: 4887737 - DNA, 25 bp, Homo sapien
attaacgggtgaaacaaccagctag

SEQ ID NO: 4887738 - DNA, 25 bp, Homo sapien
tcaattaacgggtgaaacaaccagc

SEQ ID NO: 4887739 - DNA, 25 bp, Homo sapien
ctctcgaggaccagccacttgcgtc

SEQ ID NO: 4887740 - DNA, 25 bp, Homo sapien
catggcctgccggtggtgtgtcggt

SEQ ID NO: 4887741 - DNA, 25 bp, Homo sapien
caccgtgcccgcagtcttgggtttt

SEQ ID NO: 4887742 - DNA, 25 bp, Homo sapien
tgtcggtgcctgtcgttgtgtgctc

SEQ ID NO: 4887743 - DNA, 25 bp, Homo sapien
gaggaccactggtctaggaaagaag

SEQ ID NO: 4887744 - DNA, 25 bp, Homo sapien
ggaccactggtctaggaaagaagaa

SEQ ID NO: 4887745 - DNA, 25 bp, Homo sapien
gtttgaggaccactggtctaggaaa

SEQ ID NO: 4887746 - DNA, 25 bp, Homo sapien
ttgaggaccactggtctaggaaaga

SEQ ID NO: 4887747 - DNA, 25 bp, Homo sapien
ggtagggtaaagtctcgcatctcac

SEQ ID NO: 4887748 - DNA, 25 bp, Homo sapien
cgcatctcacgttcattcacaaaca

SEQ ID NO: 4887749 - DNA, 25 bp, Homo sapien
ggcaggcagtattgtcctcattctc

SEQ ID NO: 4887750 - DNA, 25 bp, Homo sapien
tcacactaacacaggacgggcaccg

SEQ ID NO: 4887751 - DNA, 25 bp, Homo sapien
tccagacaatacatcgaggtaagtg

SEQ ID NO: 4887752 - DNA, 25 bp, Homo sapien
gtcgatataagaagagacagtccct

SEQ ID NO: 4887753 - DNA, 25 bp, Homo sapien
cagcagacggagttttgacgaagga

SEQ ID NO: 4887754 - DNA, 25 bp, Homo sapien
gtccctctgcaacacggagccatat

SEQ ID NO: 4887755 - DNA, 25 bp, Homo sapien
tttcttagtgtcaaactttttagca

SEQ ID NO: 4887756 - DNA, 25 bp, Homo sapien
agcacagttttattggctgaatttt

SEQ ID NO: 4887757 - DNA, 25 bp, Homo sapien
gcacagttttattggctgaattttc

SEQ ID NO: 4887758 - DNA, 25 bp, Homo sapien
tagtgtcaaactttttagcacagtt

SEQ ID NO: 4887759 - DNA, 25 bp, Homo sapien
agacttgcctgttattttgctttgc

SEQ ID NO: 4887760 - DNA, 25 bp, Homo sapien
tcagacttgcctgttattttgcttt

SEQ ID NO: 4887761 - DNA, 25 bp, Homo sapien
cagacttgcctgttattttgctttg

SEQ ID NO: 4887762 - DNA, 25 bp, Homo sapien
tgaggcttagcgtgactggcaacac

SEQ ID NO: 4887763 - DNA, 25 bp, Homo sapien
tggcacctggttatactgagcaaaa

SEQ ID NO: 4887764 - DNA, 25 bp, Homo sapien
aaatcgtgctacttctccatgtgag

SEQ ID NO: 4887765 - DNA, 25 bp, Homo sapien
tgtcctaagcaaaggccaatggttt

SEQ ID NO: 4887766 - DNA, 25 bp, Homo sapien
cttaattgataagccaaaccgtggg

SEQ ID NO: 4887767 - DNA, 25 bp, Homo sapien
atgcccacttggctcccagcgcttc

SEQ ID NO: 4887768 - DNA, 25 bp, Homo sapien
tgagccaatcccatgcccacttggc

SEQ ID NO: 4887769 - DNA, 25 bp, Homo sapien
gttcctgtgctcctcttaattgata

SEQ ID NO: 4887770 - DNA, 25 bp, Homo sapien
agaagtacgcgatttccctgggcag

SEQ ID NO: 4887771 - DNA, 25 bp, Homo sapien
tcataggagcaagttgacctgccag

SEQ ID NO: 4887772 - DNA, 25 bp, Homo sapien
gcatactcacatgggatagggcaag

SEQ ID NO: 4887773 - DNA, 25 bp, Homo sapien
agcaagttgacctgccagagatggc

SEQ ID NO: 4887774 - DNA, 25 bp, Homo sapien
cacttatccttcttgaactagcagg

SEQ ID NO: 4887775 - DNA, 25 bp, Homo sapien
ccatgtcacttatccttcttgaact

SEQ ID NO: 4887776 - DNA, 25 bp, Homo sapien
gggtgactctatgccccatgtcact

SEQ ID NO: 4887777 - DNA, 25 bp, Homo sapien
taggtctcaggggtgactctatgcc

SEQ ID NO: 4887778 - DNA, 25 bp, Homo sapien
gacgcagaacttccaaagtgaagaa

SEQ ID NO: 4887779 - DNA, 25 bp, Homo sapien
ggaaagcttcactgacaggctcctt

SEQ ID NO: 4887780 - DNA, 25 bp, Homo sapien
gaaaaattccaagacgcagaacttc

SEQ ID NO: 4887781 - DNA, 25 bp, Homo sapien
cctggaggaaagcttcactgacagg

SEQ ID NO: 4887782 - DNA, 25 bp, Homo sapien
tatggtttgctctgacggaatggcc

SEQ ID NO: 4887783 - DNA, 25 bp, Homo sapien
tgatccttatgcagtatttgccctt

SEQ ID NO: 4887784 - DNA, 25 bp, Homo sapien
aagaaacacttttgccctgtgattt

SEQ ID NO: 4887785 - DNA, 25 bp, Homo sapien
ggttacttcagctgatctttatgtc

SEQ ID NO: 4887786 - DNA, 25 bp, Homo sapien
tgtatctctacagaaaggctctaaa

SEQ ID NO: 4887787 - DNA, 25 bp, Homo sapien
gcagtttaagttgccatgctgctag

SEQ ID NO: 4887788 - DNA, 25 bp, Homo sapien
gcattatggagtttcagtggaacca

SEQ ID NO: 4887789 - DNA, 25 bp, Homo sapien
cttcctggaaaaagtagtagctctc

SEQ ID NO: 4887790 - DNA, 25 bp, Homo sapien
cgtggagttttactaacatacatat

SEQ ID NO: 4887791 - DNA, 25 bp, Homo sapien
caacacgtggagttttactaacata

SEQ ID NO: 4887792 - DNA, 25 bp, Homo sapien
acacgtggagttttactaacataca

SEQ ID NO: 4887793 - DNA, 25 bp, Homo sapien
tacaacacgtggagttttactaaca

SEQ ID NO: 4887794 - DNA, 25 bp, Homo sapien
caaggacttcgctgtcaaatgtgaa

SEQ ID NO: 4887795 - DNA, 25 bp, Homo sapien
gaagaaggccattactattagccag

SEQ ID NO: 4887796 - DNA, 25 bp, Homo sapien
tactccatcatagcttgaagaaggc

SEQ ID NO: 4887797 - DNA, 25 bp, Homo sapien
gagagtcagtcacacatacgctact

SEQ ID NO: 4887798 - DNA, 25 bp, Homo sapien
gcaaaagcttctatcatttttgtta

SEQ ID NO: 4887799 - DNA, 25 bp, Homo sapien
ggcaaaagcttctatcatttttgtt

SEQ ID NO: 4887800 - DNA, 25 bp, Homo sapien
agacacatctcacatataagcgtga

SEQ ID NO: 4887801 - DNA, 25 bp, Homo sapien
caggtcagaacaaagtttgagggag

SEQ ID NO: 4887802 - DNA, 25 bp, Homo sapien
gacaggtaaggtgctcaggtcagaa

SEQ ID NO: 4887803 - DNA, 25 bp, Homo sapien
gggagagacacatctcacatataag

SEQ ID NO: 4887804 - DNA, 25 bp, Homo sapien
gtgctgagccacgaattcgtcctgc

SEQ ID NO: 4887805 - DNA, 25 bp, Homo sapien
tggcgattcgcaagaaaagcaccaa

SEQ ID NO: 4887806 - DNA, 25 bp, Homo sapien
catcgtctcctgtgtggcgatggtc

SEQ ID NO: 4887807 - DNA, 25 bp, Homo sapien
ttcgtcctgcagaatcacgcggaca

SEQ ID NO: 4887808 - DNA, 25 bp, Homo sapien
gagaatacaccgtacccttgtggag

SEQ ID NO: 4887809 - DNA, 25 bp, Homo sapien
caagagtagaaataagtccccagca

SEQ ID NO: 4887810 - DNA, 25 bp, Homo sapien
ccttgtggagtcaggtagtattcgt

SEQ ID NO: 4887811 - DNA, 25 bp, Homo sapien
tagaagtgacaatgtgcaacaggcc

SEQ ID NO: 4887812 - DNA, 25 bp, Homo sapien
gtcatcacactatctccactcctga

SEQ ID NO: 4887813 - DNA, 25 bp, Homo sapien
acacacataagaaatcaatctgcct

SEQ ID NO: 4887814 - DNA, 25 bp, Homo sapien
cataagaaatcaatctgcctgaggg

SEQ ID NO: 4887815 - DNA, 25 bp, Homo sapien
gtccctggtgggatagctcatccct

SEQ ID NO: 4887816 - DNA, 25 bp, Homo sapien
ccctggtgggatagctcatccctgt

SEQ ID NO: 4887817 - DNA, 25 bp, Homo sapien
tcccatgtcccaagctgaattagtc

SEQ ID NO: 4887818 - DNA, 25 bp, Homo sapien
tgaaggcagatcgaaaaccaaagaa

SEQ ID NO: 4887819 - DNA, 25 bp, Homo sapien
cccaaagaccagacatgcatgtgaa

SEQ ID NO: 4887820 - DNA, 25 bp, Homo sapien
catgtgaagaaacccagtgcaccta

SEQ ID NO: 4887821 - DNA, 25 bp, Homo sapien
ctcatataggcaggtggccttctgg

SEQ ID NO: 4887822 - DNA, 25 bp, Homo sapien
atataggcaggtggccttctgggac

SEQ ID NO: 4887823 - DNA, 25 bp, Homo sapien
cagcaatatttactgttctgcaata

SEQ ID NO: 4887824 - DNA, 25 bp, Homo sapien
gacctacagctgagggacctgttag

SEQ ID NO: 4887825 - DNA, 25 bp, Homo sapien
gaagtcatctctccagaaaaagtta

SEQ ID NO: 4887826 - DNA, 25 bp, Homo sapien
aaaagttagtgaagtggctggtagc

SEQ ID NO: 4887827 - DNA, 25 bp, Homo sapien
ggtcaactctgtgcaacgttaatcg

SEQ ID NO: 4887828 - DNA, 25 bp, Homo sapien
gcatttagcccagctacccctgtgg

SEQ ID NO: 4887829 - DNA, 25 bp, Homo sapien
gaatatcactttaagttggagagac

SEQ ID NO: 4887830 - DNA, 25 bp, Homo sapien
caggcgctaggaaggtcagtagcac

SEQ ID NO: 4887831 - DNA, 25 bp, Homo sapien
tcctgagaatttacatgaaatggct

SEQ ID NO: 4887832 - DNA, 25 bp, Homo sapien
cagtggaccacaagctggaaccaaa

SEQ ID NO: 4887833 - DNA, 25 bp, Homo sapien
tttcttatatagggtagaatttata

SEQ ID NO: 4887834 - DNA, 25 bp, Homo sapien
tgcagaagctcttaaccacaatgag

SEQ ID NO: 4887835 - DNA, 25 bp, Homo sapien
cagaagctcttaaccacaatgagat

SEQ ID NO: 4887836 - DNA, 25 bp, Homo sapien
ataaatgcatgttaagtttcttata

SEQ ID NO: 4887837 - DNA, 25 bp, Homo sapien
tagcaaagcacctctgatgtcattt

SEQ ID NO: 4887838 - DNA, 25 bp, Homo sapien
ctttagcaaagcacctctgatgtca

SEQ ID NO: 4887839 - DNA, 25 bp, Homo sapien
ttagcaaagcacctctgatgtcatt

SEQ ID NO: 4887840 - DNA, 25 bp, Homo sapien
tttagcaaagcacctctgatgtcat

SEQ ID NO: 4887841 - DNA, 25 bp, Homo sapien
tggattcctggagtgaattgatgcc

SEQ ID NO: 4887842 - DNA, 25 bp, Homo sapien
agaaacggaacagtatcagtgtccc

SEQ ID NO: 4887843 - DNA, 25 bp, Homo sapien
caaattgaacaaggcccataagcag

SEQ ID NO: 4887844 - DNA, 25 bp, Homo sapien
agtgtcccagaaatctcccttgtgc

SEQ ID NO: 4887845 - DNA, 25 bp, Homo sapien
tcttgtgactctaccctcctgaagg

SEQ ID NO: 4887846 - DNA, 25 bp, Homo sapien
tgcatgctcagctcgatcaatccag

SEQ ID NO: 4887847 - DNA, 25 bp, Homo sapien
agtcataagtcacccctcactgtag

SEQ ID NO: 4887848 - DNA, 25 bp, Homo sapien
caagtaatgatgtatgctccttcca

SEQ ID NO: 4887849 - DNA, 25 bp, Homo sapien
agtaaatgtcccttagccagggaag

SEQ ID NO: 4887850 - DNA, 25 bp, Homo sapien
ttatgactagacactacctattgca

SEQ ID NO: 4887851 - DNA, 25 bp, Homo sapien
cccacggaatcctcagagagaagaa

SEQ ID NO: 4887852 - DNA, 25 bp, Homo sapien
gatgtgattaagactgagggagcca

SEQ ID NO: 4887853 - DNA, 25 bp, Homo sapien
taggcacctggatagagaagagttt

SEQ ID NO: 4887854 - DNA, 25 bp, Homo sapien
tcaggatgccgaagctagctacttt

SEQ ID NO: 4887855 - DNA, 25 bp, Homo sapien
cagtacttgtagcaaggacctcatg

SEQ ID NO: 4887856 - DNA, 25 bp, Homo sapien
gacacctttgctacatgttaggcac

SEQ ID NO: 4887857 - DNA, 25 bp, Homo sapien
aaactattttatgccagggacggtg

SEQ ID NO: 4887858 - DNA, 25 bp, Homo sapien
cataaaatcgtgaggaagggcaaac

SEQ ID NO: 4887859 - DNA, 25 bp, Homo sapien
tggatcttgaggaacatgtcacccc

SEQ ID NO: 4887860 - DNA, 25 bp, Homo sapien
tggttggcacattcagggcacagta

SEQ ID NO: 4887861 - DNA, 25 bp, Homo sapien
gcccccgtgacagaggcagattcca

SEQ ID NO: 4887862 - DNA, 25 bp, Homo sapien
tctaggacacaaacccgtgaggcac

SEQ ID NO: 4887863 - DNA, 25 bp, Homo sapien
taaaatgtctctcgcccacttggat

SEQ ID NO: 4887864 - DNA, 25 bp, Homo sapien
cacttggatccactcgcctgtctag

SEQ ID NO: 4887865 - DNA, 25 bp, Homo sapien
cttgtgaatattttacttcttcttc

SEQ ID NO: 4887866 - DNA, 25 bp, Homo sapien
ttgtgaatattttacttcttcttca

SEQ ID NO: 4887867 - DNA, 25 bp, Homo sapien
agccatctttgactcaaagtccctt

SEQ ID NO: 4887868 - DNA, 25 bp, Homo sapien
atctttgactcaaagtcccttctgg

SEQ ID NO: 4887869 - DNA, 25 bp, Homo sapien
taaaaactcctccttgcaagcaatg

SEQ ID NO: 4887870 - DNA, 25 bp, Homo sapien
tctaggtccaatgttacaaggcttt

SEQ ID NO: 4887871 - DNA, 25 bp, Homo sapien
tgggaacactaacactaaagtgact

SEQ ID NO: 4887872 - DNA, 25 bp, Homo sapien
cactgagccacaagtgttccaaaaa

SEQ ID NO: 4887873 - DNA, 25 bp, Homo sapien
caatgctgatgaaaatagttctgta

SEQ ID NO: 4887874 - DNA, 25 bp, Homo sapien
gttctgtagatgtgcaaattttcca

SEQ ID NO: 4887875 - DNA, 25 bp, Homo sapien
atgaaaatagttctgtagatgtgca

SEQ ID NO: 4887876 - DNA, 25 bp, Homo sapien
ttaaggtcctcatttcaatgctgat

SEQ ID NO: 4887877 - DNA, 25 bp, Homo sapien
gaaattcgcttgtccatgctccaga

SEQ ID NO: 4887878 - DNA, 25 bp, Homo sapien
caggtaggtctcaaatagtctgagc

SEQ ID NO: 4887879 - DNA, 25 bp, Homo sapien
tctgagcatgctcaaatcagtcact

SEQ ID NO: 4887880 - DNA, 25 bp, Homo sapien
cacgaagttactagtattgctgtca

SEQ ID NO: 4887881 - DNA, 25 bp, Homo sapien
gcacagcaagagaccatgatggccg

SEQ ID NO: 4887882 - DNA, 25 bp, Homo sapien
tccattaagaagctttttgtcaggc

SEQ ID NO: 4887883 - DNA, 25 bp, Homo sapien
gaagtacaacactcagcatccacga

SEQ ID NO: 4887884 - DNA, 25 bp, Homo sapien
cagttgaccaagaaatagcacagca

SEQ ID NO: 4887885 - DNA, 25 bp, Homo sapien
catattatacctaacaaccaaagaa

SEQ ID NO: 4887886 - DNA, 25 bp, Homo sapien
ccatattatacctaacaaccaaaga

SEQ ID NO: 4887887 - DNA, 25 bp, Homo sapien
tgcccatattatacctaacaaccaa

SEQ ID NO: 4887888 - DNA, 25 bp, Homo sapien
cttggtattctgtcccttaatatta

SEQ ID NO: 4887889 - DNA, 25 bp, Homo sapien
taataacaagacattggacacttgg

SEQ ID NO: 4887890 - DNA, 25 bp, Homo sapien
taagaatgaatccaacaacaatcct

SEQ ID NO: 4887891 - DNA, 25 bp, Homo sapien
caaagtgcccagtaccctaacaata

SEQ ID NO: 4887892 - DNA, 25 bp, Homo sapien
tgaatagcttattccattaggaaat

SEQ ID NO: 4887893 - DNA, 25 bp, Homo sapien
atatcataaatgaatagcttattcc

SEQ ID NO: 4887894 - DNA, 25 bp, Homo sapien
ttccattaggaaatatctcattcta

SEQ ID NO: 4887895 - DNA, 25 bp, Homo sapien
ttaggaaatatctcattctacattc

SEQ ID NO: 4887896 - DNA, 25 bp, Homo sapien
tgaattggagatttcatggatgaaa

SEQ ID NO: 4887897 - DNA, 25 bp, Homo sapien
gatttcatggatgaaagcacagcag

SEQ ID NO: 4887898 - DNA, 25 bp, Homo sapien
cacagcagatgctaaaaatttgttt

SEQ ID NO: 4887899 - DNA, 25 bp, Homo sapien
ctctactcaacctgtccccaactgc

SEQ ID NO: 4887900 - DNA, 25 bp, Homo sapien
ctcaaagcacttcacagcaaaaaaa

SEQ ID NO: 4887901 - DNA, 25 bp, Homo sapien
aaaaaaaagcaagcagacactggag

SEQ ID NO: 4887902 - DNA, 25 bp, Homo sapien
caaagcacttcacagcaaaaaaaag

SEQ ID NO: 4887903 - DNA, 25 bp, Homo sapien
aaaaagcaagcagacactggagaga

SEQ ID NO: 4887904 - DNA, 25 bp, Homo sapien
tgcgctggttaagcttgcctgcaaa

SEQ ID NO: 4887905 - DNA, 25 bp, Homo sapien
tgcccaacggtagcaaccatacttg

SEQ ID NO: 4887906 - DNA, 25 bp, Homo sapien
acatttcatacaactttgctggccc

SEQ ID NO: 4887907 - DNA, 25 bp, Homo sapien
gaagtatggcttcataaatcataga

SEQ ID NO: 4887908 - DNA, 25 bp, Homo sapien
gattgtgcagttatcaaagttctct

SEQ ID NO: 4887909 - DNA, 25 bp, Homo sapien
tctttgtagatgaagttgaatccag

SEQ ID NO: 4887910 - DNA, 25 bp, Homo sapien
tagatgaagttgaatccagccttgc

SEQ ID NO: 4887911 - DNA, 25 bp, Homo sapien
gatgattgtgcagttatcaaagttc

SEQ ID NO: 4887912 - DNA, 25 bp, Homo sapien
tagtgaagttttggacctactttca

SEQ ID NO: 4887913 - DNA, 25 bp, Homo sapien
gaaacagccgaagtaatcaattctt

SEQ ID NO: 4887914 - DNA, 25 bp, Homo sapien
ttaatcacagggctaagatgagtcc

SEQ ID NO: 4887915 - DNA, 25 bp, Homo sapien
catcaaatcacagtagtgtacaggt

SEQ ID NO: 4887916 - DNA, 25 bp, Homo sapien
ctgcctccagagcatcatcctgttc

SEQ ID NO: 4887917 - DNA, 25 bp, Homo sapien
catattatttacaatcatgcctgac

SEQ ID NO: 4887918 - DNA, 25 bp, Homo sapien
aacttttgccactaatggtaacatc

SEQ ID NO: 4887919 - DNA, 25 bp, Homo sapien
tgtctcagcaacaatagtcaagatt

SEQ ID NO: 4887920 - DNA, 25 bp, Homo sapien
tgcctgaccctagatcagctggtct

SEQ ID NO: 4887921 - DNA, 25 bp, Homo sapien
tgaggtacaaacaagttccacagat

SEQ ID NO: 4887922 - DNA, 25 bp, Homo sapien
ccaaaaccctgtgaatttagactca

SEQ ID NO: 4887923 - DNA, 25 bp, Homo sapien
tcgaggatgcacaggcctctcaggg

SEQ ID NO: 4887924 - DNA, 25 bp, Homo sapien
cctggccagcagttgcctcgaggat

SEQ ID NO: 4887925 - DNA, 25 bp, Homo sapien
attcagtctagtggtgagaaattcc

SEQ ID NO: 4887926 - DNA, 25 bp, Homo sapien
catcccattgtaagactcccttaag

SEQ ID NO: 4887927 - DNA, 25 bp, Homo sapien
ggatgtcatatatgtcacatgggct

SEQ ID NO: 4887928 - DNA, 25 bp, Homo sapien
ctataatgtgctgtgaaggcctttt

SEQ ID NO: 4887929 - DNA, 25 bp, Homo sapien
tacaaattggcctatttttgcagca

SEQ ID NO: 4887930 - DNA, 25 bp, Homo sapien
aactgacaattatgtcttgggttgc

SEQ ID NO: 4887931 - DNA, 25 bp, Homo sapien
catctttgcacgtaggtgggtctcc

SEQ ID NO: 4887932 - DNA, 25 bp, Homo sapien
aattggcctatttttgcagcagctg

SEQ ID NO: 4887933 - DNA, 25 bp, Homo sapien
ctaaaaacagaagctctccttctga

SEQ ID NO: 4887934 - DNA, 25 bp, Homo sapien
ttctaaaaacagaagctctccttct

SEQ ID NO: 4887935 - DNA, 25 bp, Homo sapien
tctaaaaacagaagctctccttctg

SEQ ID NO: 4887936 - DNA, 25 bp, Homo sapien
ctgtgatagggcagggaaataagga

SEQ ID NO: 4887937 - DNA, 25 bp, Homo sapien
gatagggcagggaaataaggaaaga

SEQ ID NO: 4887938 - DNA, 25 bp, Homo sapien
tgatagggcagggaaataaggaaag

SEQ ID NO: 4887939 - DNA, 25 bp, Homo sapien
tgtgatagggcagggaaataaggaa

SEQ ID NO: 4887940 - DNA, 25 bp, Homo sapien
ctgggtgctgctgtagttgctatgc

SEQ ID NO: 4887941 - DNA, 25 bp, Homo sapien
aatgtaaatgcatactctgggatca

SEQ ID NO: 4887942 - DNA, 25 bp, Homo sapien
gttcctgaccctcatggagcaggca

SEQ ID NO: 4887943 - DNA, 25 bp, Homo sapien
gtggccacactgcatacagacagtt

SEQ ID NO: 4887944 - DNA, 25 bp, Homo sapien
tgacagccattagatagacactgct

SEQ ID NO: 4887945 - DNA, 25 bp, Homo sapien
acttggaactaactggcttgggtca

SEQ ID NO: 4887946 - DNA, 25 bp, Homo sapien
gctggtctctgaatctaagtggcga

SEQ ID NO: 4887947 - DNA, 25 bp, Homo sapien
gctctttggcatatggactgcaaca

SEQ ID NO: 4887948 - DNA, 25 bp, Homo sapien
catttgtttagggaagatttgaaga

SEQ ID NO: 4887949 - DNA, 25 bp, Homo sapien
ctaaagcaccatttgtttagggaag

SEQ ID NO: 4887950 - DNA, 25 bp, Homo sapien
cattgggcttacaaatctctggtgt

SEQ ID NO: 4887951 - DNA, 25 bp, Homo sapien
ggcagtacacattgggcttacaaat

SEQ ID NO: 4887952 - DNA, 25 bp, Homo sapien
ataatgactggtgagaattccattc

SEQ ID NO: 4887953 - DNA, 25 bp, Homo sapien
gataacatccgtccacaaatttgta

SEQ ID NO: 4887954 - DNA, 25 bp, Homo sapien
ttaatggataacatccgtccacaaa

SEQ ID NO: 4887955 - DNA, 25 bp, Homo sapien
aaataatgactggtgagaattccat

SEQ ID NO: 4887956 - DNA, 25 bp, Homo sapien
gctttgctcctggtgcctgaaaggc

SEQ ID NO: 4887957 - DNA, 25 bp, Homo sapien
ttttactgtggaaactgatacaact

SEQ ID NO: 4887958 - DNA, 25 bp, Homo sapien
tttgctcctggtgcctgaaaggctt

SEQ ID NO: 4887959 - DNA, 25 bp, Homo sapien
tactgtggaaactgatacaacttca

SEQ ID NO: 4887960 - DNA, 25 bp, Homo sapien
cagattcagtctgaactgcggcatt

SEQ ID NO: 4887961 - DNA, 25 bp, Homo sapien
gaactgcggcatttatatgatcttc

SEQ ID NO: 4887962 - DNA, 25 bp, Homo sapien
cctggttatggttgccccagacttc

SEQ ID NO: 4887963 - DNA, 25 bp, Homo sapien
cagaaacatcctggttatggttgcc

SEQ ID NO: 4887964 - DNA, 25 bp, Homo sapien
aaatataactcccaaaggctcagag

SEQ ID NO: 4887965 - DNA, 25 bp, Homo sapien
aagcagtggtaacatgtgctaccca

SEQ ID NO: 4887966 - DNA, 25 bp, Homo sapien
caattctcagagtggataggaggga

SEQ ID NO: 4887967 - DNA, 25 bp, Homo sapien
ctaataggatgtaccaccaagcagt

SEQ ID NO: 4887968 - DNA, 25 bp, Homo sapien
aaacagcatcctgctcgattcctct

SEQ ID NO: 4887969 - DNA, 25 bp, Homo sapien
tctttgacctttgctgctacttaat

SEQ ID NO: 4887970 - DNA, 25 bp, Homo sapien
gaagaagcgatgagaggtaactggt

SEQ ID NO: 4887971 - DNA, 25 bp, Homo sapien
aggtaatgacctcaaacgcccctcg

SEQ ID NO: 4887972 - DNA, 25 bp, Homo sapien
tacatctgttttcaacaatacaacc

SEQ ID NO: 4887973 - DNA, 25 bp, Homo sapien
aattggatacgtgtctgtgtctgcg

SEQ ID NO: 4887974 - DNA, 25 bp, Homo sapien
cagaaaaattggatacgtgtctgtg

SEQ ID NO: 4887975 - DNA, 25 bp, Homo sapien
tttcaacaatacaacctcaaccttc

SEQ ID NO: 4887976 - DNA, 25 bp, Homo sapien
agtgcaaagggcatagtaatctcca

SEQ ID NO: 4887977 - DNA, 25 bp, Homo sapien
ttggcagtagtgcaaagggcatagt

SEQ ID NO: 4887978 - DNA, 25 bp, Homo sapien
ctttggcagtagtgcaaagggcata

SEQ ID NO: 4887979 - DNA, 25 bp, Homo sapien
cagtagtgcaaagggcatagtaatc

SEQ ID NO: 4887980 - DNA, 25 bp, Homo sapien
gatgtacagcaccaaccgtataaac

SEQ ID NO: 4887981 - DNA, 25 bp, Homo sapien
actaatggccatatgtaaaccgcac

SEQ ID NO: 4887982 - DNA, 25 bp, Homo sapien
gattgtcattaacctttatagtggc

SEQ ID NO: 4887983 - DNA, 25 bp, Homo sapien
aaccgcacatggatatttatagcag

SEQ ID NO: 4887984 - DNA, 25 bp, Homo sapien
agtctcctccccactagactttggt

SEQ ID NO: 4887985 - DNA, 25 bp, Homo sapien
tccaagaacccactggttattctgt

SEQ ID NO: 4887986 - DNA, 25 bp, Homo sapien
ggccctattctactagctctaccag

SEQ ID NO: 4887987 - DNA, 25 bp, Homo sapien
ctttgaccatgtagggcaagatctc

SEQ ID NO: 4887988 - DNA, 25 bp, Homo sapien
tggggatagtgcttctctggagttt

SEQ ID NO: 4887989 - DNA, 25 bp, Homo sapien
ctcatctttatgctggacctgggga

SEQ ID NO: 4887990 - DNA, 25 bp, Homo sapien
tcatggtctccaccaagtacttcac

SEQ ID NO: 4887991 - DNA, 25 bp, Homo sapien
catggtctccaccaagtacttcaca

SEQ ID NO: 4887992 - DNA, 25 bp, Homo sapien
cccatagagggaagcctacttccaa

SEQ ID NO: 4887993 - DNA, 25 bp, Homo sapien
gagaagctgacaaccagatagagcc

SEQ ID NO: 4887994 - DNA, 25 bp, Homo sapien
tacttccaaacgccacagctggaac

SEQ ID NO: 4887995 - DNA, 25 bp, Homo sapien
ctggtcctggttcctagagaagctg

SEQ ID NO: 4887996 - DNA, 25 bp, Homo sapien
gcccaccagttgtgaaatgctaagg

SEQ ID NO: 4887997 - DNA, 25 bp, Homo sapien
gcccatctaaattctgcccaccagt

SEQ ID NO: 4887998 - DNA, 25 bp, Homo sapien
ctgcccaccagttgtgaaatgctaa

SEQ ID NO: 4887999 - DNA, 25 bp, Homo sapien
ttctgcccatctaaattctgcccac

SEQ ID NO: 4888000 - DNA, 25 bp, Homo sapien
gactgaatcacgagccaaaccgttg

SEQ ID NO: 4888001 - DNA, 25 bp, Homo sapien
gaagtggtgaaacgtcagcgccaga

SEQ ID NO: 4888002 - DNA, 25 bp, Homo sapien
tcttgccagaatagctctgtgtgac

SEQ ID NO: 4888003 - DNA, 25 bp, Homo sapien
tgtgtgactctgtcatgactgaatc

SEQ ID NO: 4888004 - DNA, 25 bp, Homo sapien
gtaaaagatttgacctcgatgcctc

SEQ ID NO: 4888005 - DNA, 25 bp, Homo sapien
ggtaaaagatttgacctcgatgcct

SEQ ID NO: 4888006 - DNA, 25 bp, Homo sapien
aggtaaaagatttgacctcgatgcc

SEQ ID NO: 4888007 - DNA, 25 bp, Homo sapien
tgggcaaggccatctctctgcgagg

SEQ ID NO: 4888008 - DNA, 25 bp, Homo sapien
tccaatttgaagaccgaagccagtc

SEQ ID NO: 4888009 - DNA, 25 bp, Homo sapien
caccagaggacttcatcatgggcaa

SEQ ID NO: 4888010 - DNA, 25 bp, Homo sapien
gatgtatagttccattgactgaggc

SEQ ID NO: 4888011 - DNA, 25 bp, Homo sapien
ctgatgagagaataaccaggaaact

SEQ ID NO: 4888012 - DNA, 25 bp, Homo sapien
tacttcaaagtcatgaacactctga

SEQ ID NO: 4888013 - DNA, 25 bp, Homo sapien
ctacttcaaagtcatgaacactctg

SEQ ID NO: 4888014 - DNA, 25 bp, Homo sapien
aacttaattaacaagctgagaactt

SEQ ID NO: 4888015 - DNA, 25 bp, Homo sapien
taaagcctaaggtgcacaggtgaca

SEQ ID NO: 4888016 - DNA, 25 bp, Homo sapien
taatttaagaaacctctggccttgc

SEQ ID NO: 4888017 - DNA, 25 bp, Homo sapien
aaactgacaggatgacttgcggcaa

SEQ ID NO: 4888018 - DNA, 25 bp, Homo sapien
tgacaatagctaggctgacaaccct

SEQ ID NO: 4888019 - DNA, 25 bp, Homo sapien
cacacgatgctaatccggaaatcag

SEQ ID NO: 4888020 - DNA, 25 bp, Homo sapien
ccctgaggaaggttcattgccattg

SEQ ID NO: 4888021 - DNA, 25 bp, Homo sapien
tttgacccgaagtagttgaagagct

SEQ ID NO: 4888022 - DNA, 25 bp, Homo sapien
tgtcaagaccaaaagcatggatgtc

SEQ ID NO: 4888023 - DNA, 25 bp, Homo sapien
caatttccgcctggtgatgcgcagt

SEQ ID NO: 4888024 - DNA, 25 bp, Homo sapien
gcctttgtggtgaatggaggaccac

SEQ ID NO: 4888025 - DNA, 25 bp, Homo sapien
gatgcgcagttgctgtcagtcttga

SEQ ID NO: 4888026 - DNA, 25 bp, Homo sapien
ggcctccagaacttagcaatttccg

SEQ ID NO: 4888027 - DNA, 25 bp, Homo sapien
aacagcgctcggcactttgacagcg

SEQ ID NO: 4888028 - DNA, 25 bp, Homo sapien
ctgtaacagcgctcggcactttgac

SEQ ID NO: 4888029 - DNA, 25 bp, Homo sapien
cagcgctcggcactttgacagcgca

SEQ ID NO: 4888030 - DNA, 25 bp, Homo sapien
tgtaacagcgctcggcactttgaca

SEQ ID NO: 4888031 - DNA, 25 bp, Homo sapien
gcagcacgcgatgcccttctggagg

SEQ ID NO: 4888032 - DNA, 25 bp, Homo sapien
gctgcagcacgcgatgcccttctgg

SEQ ID NO: 4888033 - DNA, 25 bp, Homo sapien
tccagccactcggacctcatggccc

SEQ ID NO: 4888034 - DNA, 25 bp, Homo sapien
gcacgcgatgcccttctggaggatc

SEQ ID NO: 4888035 - DNA, 25 bp, Homo sapien
ggtttattcacgtgtatcacaaaca

SEQ ID NO: 4888036 - DNA, 25 bp, Homo sapien
ttcatggatgatgtaacttctgagt

SEQ ID NO: 4888037 - DNA, 25 bp, Homo sapien
tttggagcagtgaaagttcatcaca

SEQ ID NO: 4888038 - DNA, 25 bp, Homo sapien
tccccttggtttattcacgtgtatc

SEQ ID NO: 4888039 - DNA, 25 bp, Homo sapien
tcagtgcaggattctgattgcacca

SEQ ID NO: 4888040 - DNA, 25 bp, Homo sapien
tctgattgcaccaatagttttcaga

SEQ ID NO: 4888041 - DNA, 25 bp, Homo sapien
ttgcattgttaatggttgtaacttg

SEQ ID NO: 4888042 - DNA, 25 bp, Homo sapien
gttttcagatttgcattgttaatgg

SEQ ID NO: 4888043 - DNA, 25 bp, Homo sapien
tgttttcccatcaggcaaaattttg

SEQ ID NO: 4888044 - DNA, 25 bp, Homo sapien
tgcatatcccccaagttcatttcag

SEQ ID NO: 4888045 - DNA, 25 bp, Homo sapien
ctgcatatcccccaagttcatttca

SEQ ID NO: 4888046 - DNA, 25 bp, Homo sapien
aagagtaggggtaacacacgggcat

SEQ ID NO: 4888047 - DNA, 25 bp, Homo sapien
cacttcccaaacttaacaggcatgg

SEQ ID NO: 4888048 - DNA, 25 bp, Homo sapien
ttcttgccacttcccaaacttaaca

SEQ ID NO: 4888049 - DNA, 25 bp, Homo sapien
ccaaacttaacaggcatggcagatg

SEQ ID NO: 4888050 - DNA, 25 bp, Homo sapien
ggctgctggaaggtagaacttgggc

SEQ ID NO: 4888051 - DNA, 25 bp, Homo sapien
gtagggatgtgggtagtgctggaag

SEQ ID NO: 4888052 - DNA, 25 bp, Homo sapien
cagtgcttaagggggtgggatgtac

SEQ ID NO: 4888053 - DNA, 25 bp, Homo sapien
gctggaaggtagaacttgggccaca

SEQ ID NO: 4888054 - DNA, 25 bp, Homo sapien
catcttttggaagaaccagtgatgg

SEQ ID NO: 4888055 - DNA, 25 bp, Homo sapien
ttggaagaaccagtgatggcccctt

SEQ ID NO: 4888056 - DNA, 25 bp, Homo sapien
tcctagagttgggtcatctttcctg

SEQ ID NO: 4888057 - DNA, 25 bp, Homo sapien
agagttgggtcatctttcctggtga

SEQ ID NO: 4888058 - DNA, 25 bp, Homo sapien
tgtttgtaagctgcctcacgaacat

SEQ ID NO: 4888059 - DNA, 25 bp, Homo sapien
tcctcaatgtttgtaagctgcctca

SEQ ID NO: 4888060 - DNA, 25 bp, Homo sapien
ccttcctcaatgtttgtaagctgcc

SEQ ID NO: 4888061 - DNA, 25 bp, Homo sapien
caatgtttgtaagctgcctcacgaa

SEQ ID NO: 4888062 - DNA, 25 bp, Homo sapien
ctgtgcgggagagggaggattgatt

SEQ ID NO: 4888063 - DNA, 25 bp, Homo sapien
gagggaggattgattgtagaaagtc

SEQ ID NO: 4888064 - DNA, 25 bp, Homo sapien
ggagagggaggattgattgtagaaa

SEQ ID NO: 4888065 - DNA, 25 bp, Homo sapien
gcgggagagggaggattgattgtag

SEQ ID NO: 4888066 - DNA, 25 bp, Homo sapien
gtgtaataaggtaacatgaactgtg

SEQ ID NO: 4888067 - DNA, 25 bp, Homo sapien
aacatgaactgtggtgggcgggcat

SEQ ID NO: 4888068 - DNA, 25 bp, Homo sapien
tgtgtaataaggtaacatgaactgt

SEQ ID NO: 4888069 - DNA, 25 bp, Homo sapien
atgaactgtggtgggcgggcatctc

SEQ ID NO: 4888070 - DNA, 25 bp, Homo sapien
tccagcaggctgaattgtgcgactt

SEQ ID NO: 4888071 - DNA, 25 bp, Homo sapien
tgtgcgactttcatgagtcttacgt

SEQ ID NO: 4888072 - DNA, 25 bp, Homo sapien
tccaggagtgggaactcactgaact

SEQ ID NO: 4888073 - DNA, 25 bp, Homo sapien
tatgcattttgccagaatactgtgc

SEQ ID NO: 4888074 - DNA, 25 bp, Homo sapien
accagagcagtaggacaccagtgtc

SEQ ID NO: 4888075 - DNA, 25 bp, Homo sapien
gaagctaaactcttagcatggcacc

SEQ ID NO: 4888076 - DNA, 25 bp, Homo sapien
gctaaactcttagcatggcaccaga

SEQ ID NO: 4888077 - DNA, 25 bp, Homo sapien
gctttaggggacaacacaactccaa

SEQ ID NO: 4888078 - DNA, 25 bp, Homo sapien
aagacccgtgtggtccatttcctca

SEQ ID NO: 4888079 - DNA, 25 bp, Homo sapien
cctgcatggactgcaagaagacccg

SEQ ID NO: 4888080 - DNA, 25 bp, Homo sapien
cattttccccttctgatccacattc

SEQ ID NO: 4888081 - DNA, 25 bp, Homo sapien
catgagccatagaactgttcctgcc

SEQ ID NO: 4888082 - DNA, 25 bp, Homo sapien
gggaatcttgccgatattgaatttc

SEQ ID NO: 4888083 - DNA, 25 bp, Homo sapien
cagtataagagggaattcaatatgc

SEQ ID NO: 4888084 - DNA, 25 bp, Homo sapien
taaggtgttggacgggaatcttgcc

SEQ ID NO: 4888085 - DNA, 25 bp, Homo sapien
gaattcaatatgcatgggaaaccat

SEQ ID NO: 4888086 - DNA, 25 bp, Homo sapien
tcattatgaagtgaagcttggggag

SEQ ID NO: 4888087 - DNA, 25 bp, Homo sapien
ttatgaagtgaagcttggggagtga

SEQ ID NO: 4888088 - DNA, 25 bp, Homo sapien
cattatgaagtgaagcttggggagt

SEQ ID NO: 4888089 - DNA, 25 bp, Homo sapien
atgaagtgaagcttggggagtgaca

SEQ ID NO: 4888090 - DNA, 25 bp, Homo sapien
ttcaaagagtgtgagatgagcaaaa

SEQ ID NO: 4888091 - DNA, 25 bp, Homo sapien
tctgagctctgggttaggggttcct

SEQ ID NO: 4888092 - DNA, 25 bp, Homo sapien
cattcagtcttggtgggacctggac

SEQ ID NO: 4888093 - DNA, 25 bp, Homo sapien
tccttgtctgaaatagctgttcaaa

SEQ ID NO: 4888094 - DNA, 25 bp, Homo sapien
cattttagagggtttaagtgaccag

SEQ ID NO: 4888095 - DNA, 25 bp, Homo sapien
tgtactcctcataatacaaattggg

SEQ ID NO: 4888096 - DNA, 25 bp, Homo sapien
ggactccccagtagcagtgcttagg

SEQ ID NO: 4888097 - DNA, 25 bp, Homo sapien
caccaaaaaatggtagacagactct

SEQ ID NO: 4888098 - DNA, 25 bp, Homo sapien
ttccctagcaaacagcagcgctgtg

SEQ ID NO: 4888099 - DNA, 25 bp, Homo sapien
cagcgctgtgcaagaaccagtggca

SEQ ID NO: 4888100 - DNA, 25 bp, Homo sapien
gtgtgtgagagtccttcctgtggtc

SEQ ID NO: 4888101 - DNA, 25 bp, Homo sapien
cagaggctttgatgacaaggacttc

SEQ ID NO: 4888102 - DNA, 25 bp, Homo sapien
cagtactcattgttaggagcttcat

SEQ ID NO: 4888103 - DNA, 25 bp, Homo sapien
atcagtactcattgttaggagcttc

SEQ ID NO: 4888104 - DNA, 25 bp, Homo sapien
tcagtactcattgttaggagcttca

SEQ ID NO: 4888105 - DNA, 25 bp, Homo sapien
caatcagtactcattgttaggagct

SEQ ID NO: 4888106 - DNA, 25 bp, Homo sapien
tcctcaagttgcaggtaaggatatt

SEQ ID NO: 4888107 - DNA, 25 bp, Homo sapien
cagttcagatgttgctgtttcctca

SEQ ID NO: 4888108 - DNA, 25 bp, Homo sapien
tgctgtttcctcaagttgcaggtaa

SEQ ID NO: 4888109 - DNA, 25 bp, Homo sapien
aggtgcaaacatctcaagccagttc

SEQ ID NO: 4888110 - DNA, 25 bp, Homo sapien
tgacaaggggaggaggaggatagac

SEQ ID NO: 4888111 - DNA, 25 bp, Homo sapien
ctgacaaggggaggaggaggataga

SEQ ID NO: 4888112 - DNA, 25 bp, Homo sapien
gaatcactatcacgtcatttggctg

SEQ ID NO: 4888113 - DNA, 25 bp, Homo sapien
actatcacgtcatttggctgccttc

SEQ ID NO: 4888114 - DNA, 25 bp, Homo sapien
atgaatcactatcacgtcatttggc

SEQ ID NO: 4888115 - DNA, 25 bp, Homo sapien
gggaggggtaatcccatttgcagct

SEQ ID NO: 4888116 - DNA, 25 bp, Homo sapien
tcattcgctatttttttccaagcac

SEQ ID NO: 4888117 - DNA, 25 bp, Homo sapien
caaagcctgcacattagttaagttg

SEQ ID NO: 4888118 - DNA, 25 bp, Homo sapien
gcagtgactgtcaaagcctgcacat

SEQ ID NO: 4888119 - DNA, 25 bp, Homo sapien
aagggcagtgactgtcaaagcctgc

SEQ ID NO: 4888120 - DNA, 25 bp, Homo sapien
cattagttaagttgttcagtgaagt

SEQ ID NO: 4888121 - DNA, 25 bp, Homo sapien
cacattaaactggtggatgcagcag

SEQ ID NO: 4888122 - DNA, 25 bp, Homo sapien
ttgaaaaattgtagtgactgacaac

SEQ ID NO: 4888123 - DNA, 25 bp, Homo sapien
gatgcagcagatgtaagcgctgtaa

SEQ ID NO: 4888124 - DNA, 25 bp, Homo sapien
taagcgctgtaagtacaagctgact

SEQ ID NO: 4888125 - DNA, 25 bp, Homo sapien
gagcgcctgagagcccccgcgcgta

SEQ ID NO: 4888126 - DNA, 25 bp, Homo sapien
ctttcccctgcagaggcgctccact

SEQ ID NO: 4888127 - DNA, 25 bp, Homo sapien
cagaagcgccgcggctgcaccagag

SEQ ID NO: 4888128 - DNA, 25 bp, Homo sapien
cgcgcgtacccatccaggagcaaaa

SEQ ID NO: 4888129 - DNA, 25 bp, Homo sapien
gggaacacgttttcgctcagtcgct

SEQ ID NO: 4888130 - DNA, 25 bp, Homo sapien
gccgtccactgtggcgggtttcttc

SEQ ID NO: 4888131 - DNA, 25 bp, Homo sapien
acgttttcgctcagtcgctcggcag

SEQ ID NO: 4888132 - DNA, 25 bp, Homo sapien
cttccgactttaagccttcctgttg

SEQ ID NO: 4888133 - DNA, 25 bp, Homo sapien
gctgatggctccgagtttggggcga

SEQ ID NO: 4888134 - DNA, 25 bp, Homo sapien
ccaaacagaacggtgggagctgatg

SEQ ID NO: 4888135 - DNA, 25 bp, Homo sapien
aacagaacggtgggagctgatggct

SEQ ID NO: 4888136 - DNA, 25 bp, Homo sapien
ctgatggctccgagtttggggcgag

SEQ ID NO: 4888137 - DNA, 25 bp, Homo sapien
tggggaaggagcgctgggcgcaaag

SEQ ID NO: 4888138 - DNA, 25 bp, Homo sapien
ggtggggaaggagcgctgggcgcaa

SEQ ID NO: 4888139 - DNA, 25 bp, Homo sapien
ggaaggagcgctgggcgcaaagctg

SEQ ID NO: 4888140 - DNA, 25 bp, Homo sapien
ctatctgccgctgctgtttggtggg

SEQ ID NO: 4888141 - DNA, 25 bp, Homo sapien
cacccctggaattgaagtaatgatc

SEQ ID NO: 4888142 - DNA, 25 bp, Homo sapien
tgaagtaatgatccattgctcatcc

SEQ ID NO: 4888143 - DNA, 25 bp, Homo sapien
acaattgattgatcacccctggaat

SEQ ID NO: 4888144 - DNA, 25 bp, Homo sapien
gattgatcacccctggaattgaagt

SEQ ID NO: 4888145 - DNA, 25 bp, Homo sapien
ggaatactgcccctctttcaggctg

SEQ ID NO: 4888146 - DNA, 25 bp, Homo sapien
gaatactgggacatgattccaatga

SEQ ID NO: 4888147 - DNA, 25 bp, Homo sapien
tttcaggctgttccagcaagcatgc

SEQ ID NO: 4888148 - DNA, 25 bp, Homo sapien
ctggcttgtccattggttccctgga

SEQ ID NO: 4888149 - DNA, 25 bp, Homo sapien
agacagcatgatggggagcggcagc

SEQ ID NO: 4888150 - DNA, 25 bp, Homo sapien
aggagggtggtaagacagcatgatg

SEQ ID NO: 4888151 - DNA, 25 bp, Homo sapien
gagggtggtaagacagcatgatggg

SEQ ID NO: 4888152 - DNA, 25 bp, Homo sapien
gtaagacagcatgatggggagcggc

SEQ ID NO: 4888153 - DNA, 25 bp, Homo sapien
atgaggcttgtgaagaatttcacag

SEQ ID NO: 4888154 - DNA, 25 bp, Homo sapien
ctttgtttctttcagcatgaccctg

SEQ ID NO: 4888155 - DNA, 25 bp, Homo sapien
tctgcagggcagacgtgctttctta

SEQ ID NO: 4888156 - DNA, 25 bp, Homo sapien
ttgtttctttcagcatgaccctgag

SEQ ID NO: 4888157 - DNA, 25 bp, Homo sapien
gcagggcagacgtgctttcttagaa

SEQ ID NO: 4888158 - DNA, 25 bp, Homo sapien
cttgttcctcactcttgaatttgga

SEQ ID NO: 4888159 - DNA, 25 bp, Homo sapien
ttcctcactcttgaatttggaacca

SEQ ID NO: 4888160 - DNA, 25 bp, Homo sapien
tcctcactcttgaatttggaaccac

SEQ ID NO: 4888161 - DNA, 25 bp, Homo sapien
tgttcctcactcttgaatttggaac

SEQ ID NO: 4888162 - DNA, 25 bp, Homo sapien
aacctggaagtaattctttagatgg

SEQ ID NO: 4888163 - DNA, 25 bp, Homo sapien
ggcaggctgcactcctaactcacaa

SEQ ID NO: 4888164 - DNA, 25 bp, Homo sapien
ttagatggtttggaatcagcagcag

SEQ ID NO: 4888165 - DNA, 25 bp, Homo sapien
caaagctgcaagttcttaaaacctg

SEQ ID NO: 4888166 - DNA, 25 bp, Homo sapien
gatgctggttggcattaacattatg

SEQ ID NO: 4888167 - DNA, 25 bp, Homo sapien
tatgcttggtacaatcaagtcagct

SEQ ID NO: 4888168 - DNA, 25 bp, Homo sapien
ccagtagttccttccacatgggatg

SEQ ID NO: 4888169 - DNA, 25 bp, Homo sapien
tagagtgaaataaacccagtagttc

SEQ ID NO: 4888170 - DNA, 25 bp, Homo sapien
tagttcctgcagggctgatggttgc

SEQ ID NO: 4888171 - DNA, 25 bp, Homo sapien
cgacacctaacctgagacccatttg

SEQ ID NO: 4888172 - DNA, 25 bp, Homo sapien
tcagtcggccactgctaatggactg

SEQ ID NO: 4888173 - DNA, 25 bp, Homo sapien
tgccaacgtccggtaggatcatagt

SEQ ID NO: 4888174 - DNA, 25 bp, Homo sapien
taaggagcatacataatctggtgcc

SEQ ID NO: 4888175 - DNA, 25 bp, Homo sapien
gcattgaagttcactcagtaaggag

SEQ ID NO: 4888176 - DNA, 25 bp, Homo sapien
tacttcacaatttaaggtactggaa

SEQ ID NO: 4888177 - DNA, 25 bp, Homo sapien
ccgagaaatggtttgtacttcacaa

SEQ ID NO: 4888178 - DNA, 25 bp, Homo sapien
tgttttcaatcgtggtgagctggac

SEQ ID NO: 4888179 - DNA, 25 bp, Homo sapien
tgctggttgactatggtttggctgc

SEQ ID NO: 4888180 - DNA, 25 bp, Homo sapien
ctatggtttggctgctttagggctg

SEQ ID NO: 4888181 - DNA, 25 bp, Homo sapien
gatttgacccatgagtctctcatca

SEQ ID NO: 4888182 - DNA, 25 bp, Homo sapien
gagggtcctcttggcctgatatgat

SEQ ID NO: 4888183 - DNA, 25 bp, Homo sapien
tcttagacatgtgcgtgagctcgaa

SEQ ID NO: 4888184 - DNA, 25 bp, Homo sapien
gagctcgaagctccagtaatgggaa

SEQ ID NO: 4888185 - DNA, 25 bp, Homo sapien
cgctgcacgtggagggatgtgtcaa

SEQ ID NO: 4888186 - DNA, 25 bp, Homo sapien
gaaagaaaaagccaccgctggctcg

SEQ ID NO: 4888187 - DNA, 25 bp, Homo sapien
cctggtgtcgctgtgcactcggagc

SEQ ID NO: 4888188 - DNA, 25 bp, Homo sapien
ggctcgaatttctggaagccggagc

SEQ ID NO: 4888189 - DNA, 25 bp, Homo sapien
tgaggcctctccgtagaaaacgctg

SEQ ID NO: 4888190 - DNA, 25 bp, Homo sapien
caaggccatatgaaagtgggtttcc

SEQ ID NO: 4888191 - DNA, 25 bp, Homo sapien
tcagaaactcgttcaacatttagat

SEQ ID NO: 4888192 - DNA, 25 bp, Homo sapien
gaaactcgttcaacatttagatcgg

SEQ ID NO: 4888193 - DNA, 25 bp, Homo sapien
ttagatcggtttttatccaaggcca

SEQ ID NO: 4888194 - DNA, 25 bp, Homo sapien
gcagagatggccacacacttcccat

SEQ ID NO: 4888195 - DNA, 25 bp, Homo sapien
tgcagagatggccacacacttccca

SEQ ID NO: 4888196 - DNA, 25 bp, Homo sapien
atggccacacacttcccatggtttc

SEQ ID NO: 4888197 - DNA, 25 bp, Homo sapien
ccttgcagagatggccacacacttc

SEQ ID NO: 4888198 - DNA, 25 bp, Homo sapien
caaggacatgggacggtggatatca

SEQ ID NO: 4888199 - DNA, 25 bp, Homo sapien
gacggtggatatcagttgaagtccc

SEQ ID NO: 4888200 - DNA, 25 bp, Homo sapien
ccttgcatccgaagaatggtgctaa

SEQ ID NO: 4888201 - DNA, 25 bp, Homo sapien
tgttattcaaagctccacaaggaca

SEQ ID NO: 4888202 - DNA, 25 bp, Homo sapien
gcgctctcccccggcaccggcgagg

SEQ ID NO: 4888203 - DNA, 25 bp, Homo sapien
ctctcccccggcaccggcgaggcga

SEQ ID NO: 4888204 - DNA, 25 bp, Homo sapien
cgctctcccccggcaccggcgaggc

SEQ ID NO: 4888205 - DNA, 25 bp, Homo sapien
gctctcccccggcaccggcgaggcg

SEQ ID NO: 4888206 - DNA, 25 bp, Homo sapien
cgtttgcttctagccgacgctgaca

SEQ ID NO: 4888207 - DNA, 25 bp, Homo sapien
ctagcgctaggaggagaaaccgacg

SEQ ID NO: 4888208 - DNA, 25 bp, Homo sapien
tgtccctgtccatcgaaaccttgtg

SEQ ID NO: 4888209 - DNA, 25 bp, Homo sapien
gacgctgacagtggagtgccagaaa

SEQ ID NO: 4888210 - DNA, 25 bp, Homo sapien
taatagctttccaagcggacagtca

SEQ ID NO: 4888211 - DNA, 25 bp, Homo sapien
gtgtcaccggagaaagaacgttgcc

SEQ ID NO: 4888212 - DNA, 25 bp, Homo sapien
tagaaatagggaaaacgacagctgc

SEQ ID NO: 4888213 - DNA, 25 bp, Homo sapien
tgaaggtgcttacaacgaatgtcgg

SEQ ID NO: 4888214 - DNA, 25 bp, Homo sapien
gctgcagagaattttacggtttccc

SEQ ID NO: 4888215 - DNA, 25 bp, Homo sapien
aaaaggcaatttatagcgtgtgctg

SEQ ID NO: 4888216 - DNA, 25 bp, Homo sapien
caatttatagcgtgtgctgcagaga

SEQ ID NO: 4888217 - DNA, 25 bp, Homo sapien
ctaaagtagtcaagaaaatgtcctt

SEQ ID NO: 4888218 - DNA, 25 bp, Homo sapien
cagccggaccctttcatggttgtca

SEQ ID NO: 4888219 - DNA, 25 bp, Homo sapien
gccggaccctttcatggttgtcagc

SEQ ID NO: 4888220 - DNA, 25 bp, Homo sapien
ttgtctcagccggaccctttcatgg

SEQ ID NO: 4888221 - DNA, 25 bp, Homo sapien
ctcagccggaccctttcatggttgt

SEQ ID NO: 4888222 - DNA, 25 bp, Homo sapien
ggcagaccctggactaaaatgtttg

SEQ ID NO: 4888223 - DNA, 25 bp, Homo sapien
tttccagttctcctttgagactact

SEQ ID NO: 4888224 - DNA, 25 bp, Homo sapien
cactgtggtccaccaagactctctt

SEQ ID NO: 4888225 - DNA, 25 bp, Homo sapien
tactaacactgcttatcccttgggc

SEQ ID NO: 4888226 - DNA, 25 bp, Homo sapien
ctttgaataggttataatcttctgt

SEQ ID NO: 4888227 - DNA, 25 bp, Homo sapien
cagccctgtacttaattgctccctg

SEQ ID NO: 4888228 - DNA, 25 bp, Homo sapien
cctgtacttaattgctccctgggaa

SEQ ID NO: 4888229 - DNA, 25 bp, Homo sapien
ttaattgctccctgggaaaattcaa

SEQ ID NO: 4888230 - DNA, 25 bp, Homo sapien
tgtacttaattgctccctgggaaaa

SEQ ID NO: 4888231 - DNA, 25 bp, Homo sapien
gattatccacactcgcaataggaag

SEQ ID NO: 4888232 - DNA, 25 bp, Homo sapien
ggccagcatctgaaatcttaggaat

SEQ ID NO: 4888233 - DNA, 25 bp, Homo sapien
cactgtgataggcagcggaaatttg

SEQ ID NO: 4888234 - DNA, 25 bp, Homo sapien
gcctaatagatgaatctggcatgat

SEQ ID NO: 4888235 - DNA, 25 bp, Homo sapien
gtagaacagagcctgatagccctgc

SEQ ID NO: 4888236 - DNA, 25 bp, Homo sapien
ggtagaacagagcctgatagccctg

SEQ ID NO: 4888237 - DNA, 25 bp, Homo sapien
tagaacagagcctgatagccctgcc

SEQ ID NO: 4888238 - DNA, 25 bp, Homo sapien
tagggacctggtgagcatagaaaaa

SEQ ID NO: 4888239 - DNA, 25 bp, Homo sapien
ttaatatgacgagcctatgagaccc

SEQ ID NO: 4888240 - DNA, 25 bp, Homo sapien
gcaggtaaacgggtaaatcactcat

SEQ ID NO: 4888241 - DNA, 25 bp, Homo sapien
ttgaaagcctgttgaattccagacc

SEQ ID NO: 4888242 - DNA, 25 bp, Homo sapien
tgttccatttgctgacactggccgt

SEQ ID NO: 4888243 - DNA, 25 bp, Homo sapien
actgctgattctgcatgctgattca

SEQ ID NO: 4888244 - DNA, 25 bp, Homo sapien
cactggccgttcctcttttaacctg

SEQ ID NO: 4888245 - DNA, 25 bp, Homo sapien
gatgccttcccattcttggtgactt

SEQ ID NO: 4888246 - DNA, 25 bp, Homo sapien
agcaccatagaccaccagggatgag

SEQ ID NO: 4888247 - DNA, 25 bp, Homo sapien
actgcaggtgctgctagcactgcct

SEQ ID NO: 4888248 - DNA, 25 bp, Homo sapien
caggacggaggccagcaccatagac

SEQ ID NO: 4888249 - DNA, 25 bp, Homo sapien
accatagaccaccagggatgagaca

SEQ ID NO: 4888250 - DNA, 25 bp, Homo sapien
tcactccttcccagtgtcatgggga

SEQ ID NO: 4888251 - DNA, 25 bp, Homo sapien
cactccttcccagtgtcatggggag

SEQ ID NO: 4888252 - DNA, 25 bp, Homo sapien
taaattctattaccgctgtcctggc

SEQ ID NO: 4888253 - DNA, 25 bp, Homo sapien
tcttttaaattctattaccgctgtc

SEQ ID NO: 4888254 - DNA, 25 bp, Homo sapien
tttaaattctattaccgctgtcctg

SEQ ID NO: 4888255 - DNA, 25 bp, Homo sapien
ttctattaccgctgtcctggcagag

SEQ ID NO: 4888256 - DNA, 25 bp, Homo sapien
ctttgatagagttctgctgatgcca

SEQ ID NO: 4888257 - DNA, 25 bp, Homo sapien
gctgatgccaagtggaattttgcca

SEQ ID NO: 4888258 - DNA, 25 bp, Homo sapien
tagttgatagtaaacactgctacca

SEQ ID NO: 4888259 - DNA, 25 bp, Homo sapien
aaaggattctataatgctttgatag

SEQ ID NO: 4888260 - DNA, 25 bp, Homo sapien
aagtctttacactgctgttggaaag

SEQ ID NO: 4888261 - DNA, 25 bp, Homo sapien
ctcttcacatcaatgtggtcatgca

SEQ ID NO: 4888262 - DNA, 25 bp, Homo sapien
gtcatgcaattgagaggcttctgtg

SEQ ID NO: 4888263 - DNA, 25 bp, Homo sapien
cacatcaatgtggtcatgcaattga

SEQ ID NO: 4888264 - DNA, 25 bp, Homo sapien
ccatctggataagttcaatatgcta

SEQ ID NO: 4888265 - DNA, 25 bp, Homo sapien
tagaatttaaaccatctggataagt

SEQ ID NO: 4888266 - DNA, 25 bp, Homo sapien
gataacaaaagcatatacatcagtt

SEQ ID NO: 4888267 - DNA, 25 bp, Homo sapien
gactgatttctgatacttcacataa

SEQ ID NO: 4888268 - DNA, 25 bp, Homo sapien
ttggggcagcgctaccaaccaagga

SEQ ID NO: 4888269 - DNA, 25 bp, Homo sapien
tcctggttggggcagcgctaccaac

SEQ ID NO: 4888270 - DNA, 25 bp, Homo sapien
tgttgagccttcagtatagctgcca

SEQ ID NO: 4888271 - DNA, 25 bp, Homo sapien
cttggcatgaggacgtgggggtgtt

SEQ ID NO: 4888272 - DNA, 25 bp, Homo sapien
taaggctgcctttgcctgagaaatt

SEQ ID NO: 4888273 - DNA, 25 bp, Homo sapien
ttaaggctgcctttgcctgagaaat

SEQ ID NO: 4888274 - DNA, 25 bp, Homo sapien
catgtgcatccatgtgaagagatca

SEQ ID NO: 4888275 - DNA, 25 bp, Homo sapien
caaatttcatgtgcatccatgtgaa

SEQ ID NO: 4888276 - DNA, 25 bp, Homo sapien
ttcatgtgcatccatgtgaagagat

SEQ ID NO: 4888277 - DNA, 25 bp, Homo sapien
tgtgcatccatgtgaagagatcacc

SEQ ID NO: 4888278 - DNA, 25 bp, Homo sapien
tcatttgttgatccattcagctact

SEQ ID NO: 4888279 - DNA, 25 bp, Homo sapien
atcatttgttgatccattcagctac

SEQ ID NO: 4888280 - DNA, 25 bp, Homo sapien
tttggagactcacccatgtttgtgt

SEQ ID NO: 4888281 - DNA, 25 bp, Homo sapien
tgatgttttggagactcacccatgt

SEQ ID NO: 4888282 - DNA, 25 bp, Homo sapien
tctagctgggctgaccacaatccaa

SEQ ID NO: 4888283 - DNA, 25 bp, Homo sapien
cacaatccaagttgccctggctgaa

SEQ ID NO: 4888284 - DNA, 25 bp, Homo sapien
caaagatcagctagcccagtggaaa

SEQ ID NO: 4888285 - DNA, 25 bp, Homo sapien
ggtaatatgtttccgccactgcaga

SEQ ID NO: 4888286 - DNA, 25 bp, Homo sapien
ggcaagtactattagcacactgatt

SEQ ID NO: 4888287 - DNA, 25 bp, Homo sapien
cagtaacctgaagagactcaaaatc

SEQ ID NO: 4888288 - DNA, 25 bp, Homo sapien
tccaagtgcactttagccatacaaa

SEQ ID NO: 4888289 - DNA, 25 bp, Homo sapien
aaactaggtgaatccatcagtaacc

SEQ ID NO: 4888290 - DNA, 25 bp, Homo sapien
tttgtgctccgctcaaaaatgggag

SEQ ID NO: 4888291 - DNA, 25 bp, Homo sapien
cacccagtatatgggccagagtata

SEQ ID NO: 4888292 - DNA, 25 bp, Homo sapien
gctgattataccacagcctagagct

SEQ ID NO: 4888293 - DNA, 25 bp, Homo sapien
aattgtatggtctaaggcaggaggc

SEQ ID NO: 4888294 - DNA, 25 bp, Homo sapien
gaatgtcttcagctctagtagataa

SEQ ID NO: 4888295 - DNA, 25 bp, Homo sapien
tttctcctcataacttcatacttca

SEQ ID NO: 4888296 - DNA, 25 bp, Homo sapien
tcatatctagttctcagggcacatg

SEQ ID NO: 4888297 - DNA, 25 bp, Homo sapien
cacttcagagtagaattgttggatc

SEQ ID NO: 4888298 - DNA, 25 bp, Homo sapien
cgagtagtggatccagggcacagca

SEQ ID NO: 4888299 - DNA, 25 bp, Homo sapien
tttgcttcactcagccgagtagtgg

SEQ ID NO: 4888300 - DNA, 25 bp, Homo sapien
tgtgtctgttccaagtccatccagc

SEQ ID NO: 4888301 - DNA, 25 bp, Homo sapien
tttgagatgagctcttgctgtcccc

SEQ ID NO: 4888302 - DNA, 25 bp, Homo sapien
gaaggggagaccttgtcagcttgaa

SEQ ID NO: 4888303 - DNA, 25 bp, Homo sapien
tccaacgatgccaactgaacttctt

SEQ ID NO: 4888304 - DNA, 25 bp, Homo sapien
gacttgtccaacgatgccaactgaa

SEQ ID NO: 4888305 - DNA, 25 bp, Homo sapien
ctatcagacttgtccaacgatgcca

SEQ ID NO: 4888306 - DNA, 25 bp, Homo sapien
gccggcagatcagcgtcagttccag

SEQ ID NO: 4888307 - DNA, 25 bp, Homo sapien
cagatcagcgtcagttccagagagt

SEQ ID NO: 4888308 - DNA, 25 bp, Homo sapien
atccctgtgccctgtagagccggca

SEQ ID NO: 4888309 - DNA, 25 bp, Homo sapien
gctgtcagtgttacccaaagaagag

SEQ ID NO: 4888310 - DNA, 25 bp, Homo sapien
tgagctctctggctgcctcccagaa

SEQ ID NO: 4888311 - DNA, 25 bp, Homo sapien
ctgagctctctggctgcctcccaga

SEQ ID NO: 4888312 - DNA, 25 bp, Homo sapien
gagctctctggctgcctcccagaag

SEQ ID NO: 4888313 - DNA, 25 bp, Homo sapien
gctctctggctgcctcccagaagcc

SEQ ID NO: 4888314 - DNA, 25 bp, Homo sapien
aaatccatgtatatccttcccaact

SEQ ID NO: 4888315 - DNA, 25 bp, Homo sapien
tcttaaatccatgtatatccttccc

SEQ ID NO: 4888316 - DNA, 25 bp, Homo sapien
tgtacatcctattttttgtcatggg

SEQ ID NO: 4888317 - DNA, 25 bp, Homo sapien
agtttcagtatggatctccctgtac

SEQ ID NO: 4888318 - DNA, 25 bp, Homo sapien
taattcaaaacgtcaagcaagttcc

SEQ ID NO: 4888319 - DNA, 25 bp, Homo sapien
gcagagatggctagctatccactga

SEQ ID NO: 4888320 - DNA, 25 bp, Homo sapien
gacaagtgggtatacaatcagtaca

SEQ ID NO: 4888321 - DNA, 25 bp, Homo sapien
ctataacaagtaaacaagtgtcggg

SEQ ID NO: 4888322 - DNA, 25 bp, Homo sapien
accttgtacagtgctaacaaatggt

SEQ ID NO: 4888323 - DNA, 25 bp, Homo sapien
cttgtacagtgctaacaaatggtat

SEQ ID NO: 4888324 - DNA, 25 bp, Homo sapien
tgtacagtgctaacaaatggtattc

SEQ ID NO: 4888325 - DNA, 25 bp, Homo sapien
ccttgtacagtgctaacaaatggta

SEQ ID NO: 4888326 - DNA, 25 bp, Homo sapien
ttcctcttgtgcaaaggggcttaac

SEQ ID NO: 4888327 - DNA, 25 bp, Homo sapien
cagaagtcatggataccatgattcc

SEQ ID NO: 4888328 - DNA, 25 bp, Homo sapien
tcatggataccatgattcctcttgt

SEQ ID NO: 4888329 - DNA, 25 bp, Homo sapien
ctcttgtgcaaaggggcttaacgtc

SEQ ID NO: 4888330 - DNA, 25 bp, Homo sapien
ggcccttccgtgtgatcggatatca

SEQ ID NO: 4888331 - DNA, 25 bp, Homo sapien
tgatcggatatcaaatgacttgttg

SEQ ID NO: 4888332 - DNA, 25 bp, Homo sapien
caaggtggtctgtaatgccctgggt

SEQ ID NO: 4888333 - DNA, 25 bp, Homo sapien
tgacttcaaaggctactaccgctga

SEQ ID NO: 4888334 - DNA, 25 bp, Homo sapien
ttctggatcttgaaaagtaactgga

SEQ ID NO: 4888335 - DNA, 25 bp, Homo sapien
ctggaattgaacctggaattggagt

SEQ ID NO: 4888336 - DNA, 25 bp, Homo sapien
tggagttccaattttggacctggac

SEQ ID NO: 4888337 - DNA, 25 bp, Homo sapien
taattatggaactgacaatggtact

SEQ ID NO: 4888338 - DNA, 25 bp, Homo sapien
tagttcactaggctcaattacatct

SEQ ID NO: 4888339 - DNA, 25 bp, Homo sapien
ggttagttcactaggctcaattaca

SEQ ID NO: 4888340 - DNA, 25 bp, Homo sapien
cctgtggttagttcactaggctcaa

SEQ ID NO: 4888341 - DNA, 25 bp, Homo sapien
ttttcctgtggttagttcactaggc

SEQ ID NO: 4888342 - DNA, 25 bp, Homo sapien
cgagtttctcatcgcagcagctttt

SEQ ID NO: 4888343 - DNA, 25 bp, Homo sapien
cttggatgtcgagtttctcatcgca

SEQ ID NO: 4888344 - DNA, 25 bp, Homo sapien
gtttctcatcgcagcagcttttcct

SEQ ID NO: 4888345 - DNA, 25 bp, Homo sapien
gtcgagtttctcatcgcagcagctt

SEQ ID NO: 4888346 - DNA, 25 bp, Homo sapien
aggtcactgtgtagaacattgtggg

SEQ ID NO: 4888347 - DNA, 25 bp, Homo sapien
tcaggaagatgatactgttaccagc

SEQ ID NO: 4888348 - DNA, 25 bp, Homo sapien
tcctgacaagagtggatgtggtgaa

SEQ ID NO: 4888349 - DNA, 25 bp, Homo sapien
tcagtccctcaaggtcactgtgtag

SEQ ID NO: 4888350 - DNA, 25 bp, Homo sapien
tcctttcctcaagccagagtggttt

SEQ ID NO: 4888351 - DNA, 25 bp, Homo sapien
ccagagtggtttaggtcactggtca

SEQ ID NO: 4888352 - DNA, 25 bp, Homo sapien
actggtcatgaatacaaggatcggg

SEQ ID NO: 4888353 - DNA, 25 bp, Homo sapien
ggttgtacgccttctcaaagacctc

SEQ ID NO: 4888354 - DNA, 25 bp, Homo sapien
ataattgagcgccacgcagccggtc

SEQ ID NO: 4888355 - DNA, 25 bp, Homo sapien
gcagccggtcccagtaataaaaaga

SEQ ID NO: 4888356 - DNA, 25 bp, Homo sapien
cacgcagccggtcccagtaataaaa

SEQ ID NO: 4888357 - DNA, 25 bp, Homo sapien
ggaaaaataattgagcgccacgcag

SEQ ID NO: 4888358 - DNA, 25 bp, Homo sapien
ccaccaatgcaacccagggagtggc

SEQ ID NO: 4888359 - DNA, 25 bp, Homo sapien
ttccttggcggtgcccaccaatgca

SEQ ID NO: 4888360 - DNA, 25 bp, Homo sapien
cgaaagcgcagaaaggagtcaaggc

SEQ ID NO: 4888361 - DNA, 25 bp, Homo sapien
ttgacacgggacgaaagcgcagaaa

SEQ ID NO: 4888362 - DNA, 25 bp, Homo sapien
gaacaacggatgagccatagagcta

SEQ ID NO: 4888363 - DNA, 25 bp, Homo sapien
ggagttaactcggaacaacggatga

SEQ ID NO: 4888364 - DNA, 25 bp, Homo sapien
ctcggaacaacggatgagccataga

SEQ ID NO: 4888365 - DNA, 25 bp, Homo sapien
taactcggaacaacggatgagccat

SEQ ID NO: 4888366 - DNA, 25 bp, Homo sapien
cagagaaatccttcaaacccagggc

SEQ ID NO: 4888367 - DNA, 25 bp, Homo sapien
atttttcgtctttctcccacaacag

SEQ ID NO: 4888368 - DNA, 25 bp, Homo sapien
cgtggccatatctcctttcagtgtg

SEQ ID NO: 4888369 - DNA, 25 bp, Homo sapien
catccctttcactgttgtgttcacg

SEQ ID NO: 4888370 - DNA, 25 bp, Homo sapien
tgggcggcttaccatagcaagtgat

SEQ ID NO: 4888371 - DNA, 25 bp, Homo sapien
aaccgtgtgccccttggaggtgtca

SEQ ID NO: 4888372 - DNA, 25 bp, Homo sapien
agtgatcctgcgatagggaacgcgc

SEQ ID NO: 4888373 - DNA, 25 bp, Homo sapien
taagggctgatctcctctggtcagg

SEQ ID NO: 4888374 - DNA, 25 bp, Homo sapien
gggcgaccacgttttgcctctccaa

SEQ ID NO: 4888375 - DNA, 25 bp, Homo sapien
gaagtttccgctggattctccttga

SEQ ID NO: 4888376 - DNA, 25 bp, Homo sapien
acggctacagctgcgccggatctgg

SEQ ID NO: 4888377 - DNA, 25 bp, Homo sapien
ccctggaactgtgatcgtgacaggt

SEQ ID NO: 4888378 - DNA, 25 bp, Homo sapien
gccattcgtggtctcgggaagaccg

SEQ ID NO: 4888379 - DNA, 25 bp, Homo sapien
gccaacagactatgtggaaccaccg

SEQ ID NO: 4888380 - DNA, 25 bp, Homo sapien
gacaccaaagaagtttccgcagcca

SEQ ID NO: 4888381 - DNA, 25 bp, Homo sapien
aagaccggactctgacaccaaagaa

SEQ ID NO: 4888382 - DNA, 25 bp, Homo sapien
gcggtggtggcaagaagcccctccc

SEQ ID NO: 4888383 - DNA, 25 bp, Homo sapien
agcgcggaaggctgcaagaggaagc

SEQ ID NO: 4888384 - DNA, 25 bp, Homo sapien
cagtgacaactcgtcggcagaggag

SEQ ID NO: 4888385 - DNA, 25 bp, Homo sapien
tccgcggcgtagagcgcagctacgc

SEQ ID NO: 4888386 - DNA, 25 bp, Homo sapien
tgtccacgggctcggtgagtgatcc

SEQ ID NO: 4888387 - DNA, 25 bp, Homo sapien
tccttggagcgctctctggcctccg

SEQ ID NO: 4888388 - DNA, 25 bp, Homo sapien
aaggcggagacagcgagactggcca

SEQ ID NO: 4888389 - DNA, 25 bp, Homo sapien
gaggaaagaggacgcgtgtgggcaa

SEQ ID NO: 4888390 - DNA, 25 bp, Homo sapien
tgggcgccaactcgtagtccacgct

SEQ ID NO: 4888391 - DNA, 25 bp, Homo sapien
gcggtgcgcgcggattctggacttg

SEQ ID NO: 4888392 - DNA, 25 bp, Homo sapien
cgcggattctggacttgggcgccaa

SEQ ID NO: 4888393 - DNA, 25 bp, Homo sapien
gacttgggcgccaactcgtagtcca

SEQ ID NO: 4888394 - DNA, 25 bp, Homo sapien
caaggcttgggtagacaatcataca

SEQ ID NO: 4888395 - DNA, 25 bp, Homo sapien
tgcgcagacatgttgaagggccgtc

SEQ ID NO: 4888396 - DNA, 25 bp, Homo sapien
gaaagctcacttatcctgcgcagac

SEQ ID NO: 4888397 - DNA, 25 bp, Homo sapien
tcttcggcatgcagaaaagcggtcc

SEQ ID NO: 4888398 - DNA, 25 bp, Homo sapien
agctgactagaataccgacgggcca

SEQ ID NO: 4888399 - DNA, 25 bp, Homo sapien
tccagtgatgtgtgacccggaggca

SEQ ID NO: 4888400 - DNA, 25 bp, Homo sapien
catggaactctcaagatagtggaaa

SEQ ID NO: 4888401 - DNA, 25 bp, Homo sapien
gaaaataccagctacaacatccagt

SEQ ID NO: 4888402 - DNA, 25 bp, Homo sapien
gggcccgtatccacagacgtactta

SEQ ID NO: 4888403 - DNA, 25 bp, Homo sapien
gaacatgatcattcagggtgctcct

SEQ ID NO: 4888404 - DNA, 25 bp, Homo sapien
tgaccaggaactgcgatgaccttcg

SEQ ID NO: 4888405 - DNA, 25 bp, Homo sapien
gaatggacgattgtgctaacttagc

SEQ ID NO: 4888406 - DNA, 25 bp, Homo sapien
caagttcaagttcaaacgctccagg

SEQ ID NO: 4888407 - DNA, 25 bp, Homo sapien
tttccctaccctagagagagctgag

SEQ ID NO: 4888408 - DNA, 25 bp, Homo sapien
tctgctgtacgaactggcgggagcc

SEQ ID NO: 4888409 - DNA, 25 bp, Homo sapien
caaggcgatcctagagtcaagttca

SEQ ID NO: 4888410 - DNA, 25 bp, Homo sapien
gactttcttgaaagcgaacagaggg

SEQ ID NO: 4888411 - DNA, 25 bp, Homo sapien
gtatgtcacttgtcaaaaccatgaa

SEQ ID NO: 4888412 - DNA, 25 bp, Homo sapien
gaccaaatgccagatattacaaaca

SEQ ID NO: 4888413 - DNA, 25 bp, Homo sapien
tatacttacactgttcagctcgaga

SEQ ID NO: 4888414 - DNA, 25 bp, Homo sapien
acaatgctccacagtttccacagga

SEQ ID NO: 4888415 - DNA, 25 bp, Homo sapien
tctacaatgctccacagtttccaca

SEQ ID NO: 4888416 - DNA, 25 bp, Homo sapien
aatgctccacagtttccacaggagc

SEQ ID NO: 4888417 - DNA, 25 bp, Homo sapien
cttctacaatgctccacagtttcca

SEQ ID NO: 4888418 - DNA, 25 bp, Homo sapien
catctaaatctccaagagtatttcc

SEQ ID NO: 4888419 - DNA, 25 bp, Homo sapien
ccaagagtatttcccctgaactcca

SEQ ID NO: 4888420 - DNA, 25 bp, Homo sapien
catgggtccccaactgtagaatctt

SEQ ID NO: 4888421 - DNA, 25 bp, Homo sapien
tgaactccaagttcctaaattgcat

SEQ ID NO: 4888422 - DNA, 25 bp, Homo sapien
ataattctttttgatggtcttgtgc

SEQ ID NO: 4888423 - DNA, 25 bp, Homo sapien
tataattctttttgatggtcttgtg

SEQ ID NO: 4888424 - DNA, 25 bp, Homo sapien
atataattctttttgatggtcttgt

SEQ ID NO: 4888425 - DNA, 25 bp, Homo sapien
ttcacacattcatacatagaggggg

SEQ ID NO: 4888426 - DNA, 25 bp, Homo sapien
tcacaagaaagggaggtgctaatct

SEQ ID NO: 4888427 - DNA, 25 bp, Homo sapien
tagagcctatttccctacttgatgg

SEQ ID NO: 4888428 - DNA, 25 bp, Homo sapien
tctgtttggtaagagcttcacttcc

SEQ ID NO: 4888429 - DNA, 25 bp, Homo sapien
gagagggactctactcttgatagaa

SEQ ID NO: 4888430 - DNA, 25 bp, Homo sapien
caggtttgtctaaccccagagttca

SEQ ID NO: 4888431 - DNA, 25 bp, Homo sapien
aaattgaggctaagaaatcacagcg

SEQ ID NO: 4888432 - DNA, 25 bp, Homo sapien
atcacagcgaggagtaatgaagccc

SEQ ID NO: 4888433 - DNA, 25 bp, Homo sapien
ggatctaactggtgctaccatcaat

SEQ ID NO: 4888434 - DNA, 25 bp, Homo sapien
tattatgtggacatatcagtaggca

SEQ ID NO: 4888435 - DNA, 25 bp, Homo sapien
ttcatctaaacacttgagttgaaac

SEQ ID NO: 4888436 - DNA, 25 bp, Homo sapien
gccttcttaaagctatattcttacc

SEQ ID NO: 4888437 - DNA, 25 bp, Homo sapien
gaatgcctgattgagttgtacagga

SEQ ID NO: 4888438 - DNA, 25 bp, Homo sapien
aatgcctgattgagttgtacaggaa

SEQ ID NO: 4888439 - DNA, 25 bp, Homo sapien
cctgattgagttgtacaggaatatc

SEQ ID NO: 4888440 - DNA, 25 bp, Homo sapien
tgcctgattgagttgtacaggaata

SEQ ID NO: 4888441 - DNA, 25 bp, Homo sapien
acagttttgttcacttctccctgca

SEQ ID NO: 4888442 - DNA, 25 bp, Homo sapien
gatgagtctggcagtattactgcta

SEQ ID NO: 4888443 - DNA, 25 bp, Homo sapien
tcctttgagatgatacagatgagtc

SEQ ID NO: 4888444 - DNA, 25 bp, Homo sapien
tatggcttctagatcccctgctcca

SEQ ID NO: 4888445 - DNA, 25 bp, Homo sapien
tgaagcaagttctcccaaagcctga

SEQ ID NO: 4888446 - DNA, 25 bp, Homo sapien
caagcacttgcatacaccctgagga

SEQ ID NO: 4888447 - DNA, 25 bp, Homo sapien
tgctcagtcaccaagaaagtcacct

SEQ ID NO: 4888448 - DNA, 25 bp, Homo sapien
aatacaataaccctggagcctgagg

SEQ ID NO: 4888449 - DNA, 25 bp, Homo sapien
gagactaatacacggagctgcctgg

SEQ ID NO: 4888450 - DNA, 25 bp, Homo sapien
gaaaatgccttatgcacagagggag

SEQ ID NO: 4888451 - DNA, 25 bp, Homo sapien
tgagagcccaactcctaccagattg

SEQ ID NO: 4888452 - DNA, 25 bp, Homo sapien
aaaagagcccctaggcctttgcagg

SEQ ID NO: 4888453 - DNA, 25 bp, Homo sapien
tccatgcattgaatcttcagggcaa

SEQ ID NO: 4888454 - DNA, 25 bp, Homo sapien
atgcattgaatcttcagggcaacca

SEQ ID NO: 4888455 - DNA, 25 bp, Homo sapien
ctgatcctcggcatttgactccaca

SEQ ID NO: 4888456 - DNA, 25 bp, Homo sapien
tgatcctcggcatttgactccacat

SEQ ID NO: 4888457 - DNA, 25 bp, Homo sapien
catccctgattctaaaaccatccct

SEQ ID NO: 4888458 - DNA, 25 bp, Homo sapien
aaccatccctctgagccaaatagtc

SEQ ID NO: 4888459 - DNA, 25 bp, Homo sapien
aaaaccatccctctgagccaaatag

SEQ ID NO: 4888460 - DNA, 25 bp, Homo sapien
tccctgattctaaaaccatccctct

SEQ ID NO: 4888461 - DNA, 25 bp, Homo sapien
cactagcatctggaaataagatggc

SEQ ID NO: 4888462 - DNA, 25 bp, Homo sapien
taagcctagtcggtctccagatgct

SEQ ID NO: 4888463 - DNA, 25 bp, Homo sapien
gaggttctcaagttgtggcctggaa

SEQ ID NO: 4888464 - DNA, 25 bp, Homo sapien
tcgaaactactatgatgggaatact

SEQ ID NO: 4888465 - DNA, 25 bp, Homo sapien
actaagtgctataaactctcctggg

SEQ ID NO: 4888466 - DNA, 25 bp, Homo sapien
gagtactttgttctccctatgcctc

SEQ ID NO: 4888467 - DNA, 25 bp, Homo sapien
gcttcggtctgactgaatcattggt

SEQ ID NO: 4888468 - DNA, 25 bp, Homo sapien
cctatgcctctgattctactggaaa

SEQ ID NO: 4888469 - DNA, 25 bp, Homo sapien
caaatactgtgcatgcctaaaatac

SEQ ID NO: 4888470 - DNA, 25 bp, Homo sapien
tcaatgtcagtattctaaggtacaa

SEQ ID NO: 4888471 - DNA, 25 bp, Homo sapien
cttgaatacattgagcctagctttt

SEQ ID NO: 4888472 - DNA, 25 bp, Homo sapien
ttagaacctctccaaatgagtaaaa

SEQ ID NO: 4888473 - DNA, 25 bp, Homo sapien
tatcttgggcaaaaactaagaagga

SEQ ID NO: 4888474 - DNA, 25 bp, Homo sapien
ctctttagaaagatggctgattcca

SEQ ID NO: 4888475 - DNA, 25 bp, Homo sapien
gagacatgtcaatagaccaaagagg

SEQ ID NO: 4888476 - DNA, 25 bp, Homo sapien
agtacacctagcatgaaaatcttgg

SEQ ID NO: 4888477 - DNA, 25 bp, Homo sapien
cagaattatggaacaacatcaagag

SEQ ID NO: 4888478 - DNA, 25 bp, Homo sapien
gaacactaatgttaaagttatgaga

SEQ ID NO: 4888479 - DNA, 25 bp, Homo sapien
taggcaagaagagggtacagaaaaa

SEQ ID NO: 4888480 - DNA, 25 bp, Homo sapien
ccgtaccaaggaagatcataatcaa

SEQ ID NO: 4888481 - DNA, 25 bp, Homo sapien
gagaccgattttccctggtgcagga

SEQ ID NO: 4888482 - DNA, 25 bp, Homo sapien
gcatggttgctggaatacctcccca

SEQ ID NO: 4888483 - DNA, 25 bp, Homo sapien
gagtagctgatacctctagggacca

SEQ ID NO: 4888484 - DNA, 25 bp, Homo sapien
tacagtagaagcaacaagggtcacc

SEQ ID NO: 4888485 - DNA, 25 bp, Homo sapien
caggtagtgggtgctggctaagtag

SEQ ID NO: 4888486 - DNA, 25 bp, Homo sapien
aacaattaatgaaggcaggtagtgg

SEQ ID NO: 4888487 - DNA, 25 bp, Homo sapien
ggtggttcaaaaggcctgcccgtga

SEQ ID NO: 4888488 - DNA, 25 bp, Homo sapien
aaaggcctgcccgtgagaacaatta

SEQ ID NO: 4888489 - DNA, 25 bp, Homo sapien
gacagcctaaagcaccagggttggt

SEQ ID NO: 4888490 - DNA, 25 bp, Homo sapien
ttcattgcctagaaatggcacagac

SEQ ID NO: 4888491 - DNA, 25 bp, Homo sapien
ggcacagacagcctaaagcaccagg

SEQ ID NO: 4888492 - DNA, 25 bp, Homo sapien
ctcgttcattgcctagaaatggcac

SEQ ID NO: 4888493 - DNA, 25 bp, Homo sapien
ttaaactccagggactacctgtatc

SEQ ID NO: 4888494 - DNA, 25 bp, Homo sapien
tgagaaattaaactccagggactac

SEQ ID NO: 4888495 - DNA, 25 bp, Homo sapien
cagttcaccacctgagaaattaaac

SEQ ID NO: 4888496 - DNA, 25 bp, Homo sapien
actccagggactacctgtatcttcc

SEQ ID NO: 4888497 - DNA, 25 bp, Homo sapien
cagactcgggaagtatctcacagga

SEQ ID NO: 4888498 - DNA, 25 bp, Homo sapien
tttgttgtgcaagtagggatttaga

SEQ ID NO: 4888499 - DNA, 25 bp, Homo sapien
gattctggggatccggacataaaag

SEQ ID NO: 4888500 - DNA, 25 bp, Homo sapien
gttaggtttgttatccccactctca

SEQ ID NO: 4888501 - DNA, 25 bp, Homo sapien
gcaactcttcataaatgttgaggtc

SEQ ID NO: 4888502 - DNA, 25 bp, Homo sapien
tgaggtctcagggtaatggcatcta

SEQ ID NO: 4888503 - DNA, 25 bp, Homo sapien
caggtctgcaactcttcataaatgt

SEQ ID NO: 4888504 - DNA, 25 bp, Homo sapien
cataaatgttgaggtctcagggtaa

SEQ ID NO: 4888505 - DNA, 25 bp, Homo sapien
gagctggtgtggagagtcagaacca

SEQ ID NO: 4888506 - DNA, 25 bp, Homo sapien
ccacagcatggagcagagctggtgt

SEQ ID NO: 4888507 - DNA, 25 bp, Homo sapien
acaggggcgaggcagccacagcatg

SEQ ID NO: 4888508 - DNA, 25 bp, Homo sapien
tagaaccaagacaagggacaggggc

SEQ ID NO: 4888509 - DNA, 25 bp, Homo sapien
aacacacaggatagtgtgggcgatt

SEQ ID NO: 4888510 - DNA, 25 bp, Homo sapien
ggcaccagggtgagtctgagctgaa

SEQ ID NO: 4888511 - DNA, 25 bp, Homo sapien
ctgagctgaatgtgggttagagtcc

SEQ ID NO: 4888512 - DNA, 25 bp, Homo sapien
tgtgggttagagtccgggaccatcc

SEQ ID NO: 4888513 - DNA, 25 bp, Homo sapien
ttacattggcctcagctgaaccttg

SEQ ID NO: 4888514 - DNA, 25 bp, Homo sapien
ccttggacgtggcaggtattgcaaa

SEQ ID NO: 4888515 - DNA, 25 bp, Homo sapien
ggcccagtggtttccaacgacattg

SEQ ID NO: 4888516 - DNA, 25 bp, Homo sapien
aacgacattgggctctcagtctgag

SEQ ID NO: 4888517 - DNA, 25 bp, Homo sapien
tctgcagctatacaggaagcacgac

SEQ ID NO: 4888518 - DNA, 25 bp, Homo sapien
cagctatacaggaagcacgacagca

SEQ ID NO: 4888519 - DNA, 25 bp, Homo sapien
tgcagctatacaggaagcacgacag

SEQ ID NO: 4888520 - DNA, 25 bp, Homo sapien
gctatacaggaagcacgacagcatc

SEQ ID NO: 4888521 - DNA, 25 bp, Homo sapien
tcaaggcaaggagaccaatccacag

SEQ ID NO: 4888522 - DNA, 25 bp, Homo sapien
tcaagtcatttcacggagagactcc

SEQ ID NO: 4888523 - DNA, 25 bp, Homo sapien
ggcaaccacatagcagaatgcgctt

SEQ ID NO: 4888524 - DNA, 25 bp, Homo sapien
cttgatgctgatgggtttaggtgcc

SEQ ID NO: 4888525 - DNA, 25 bp, Homo sapien
caatagtacacagcctgatatggga

SEQ ID NO: 4888526 - DNA, 25 bp, Homo sapien
cattaactctgcatacaggtgaagg

SEQ ID NO: 4888527 - DNA, 25 bp, Homo sapien
taaggagatgggcacattaagccac

SEQ ID NO: 4888528 - DNA, 25 bp, Homo sapien
gaaacccaggtagatcagggaagaa

SEQ ID NO: 4888529 - DNA, 25 bp, Homo sapien
ggccatgatcctaagtgaaccgata

SEQ ID NO: 4888530 - DNA, 25 bp, Homo sapien
aaataccacgtgtcctcagttatga

SEQ ID NO: 4888531 - DNA, 25 bp, Homo sapien
taaagtacacgtggacataaggatg

SEQ ID NO: 4888532 - DNA, 25 bp, Homo sapien
gatgtgatacgtatccagcatggaa

SEQ ID NO: 4888533 - DNA, 25 bp, Homo sapien
tatgcaatgatgacttctaatgaca

SEQ ID NO: 4888534 - DNA, 25 bp, Homo sapien
cacaaaagactcatttgggccaaaa

SEQ ID NO: 4888535 - DNA, 25 bp, Homo sapien
tcttctctcacatatgcaatgatga

SEQ ID NO: 4888536 - DNA, 25 bp, Homo sapien
ttcacccaatctccatgaacaaagg

SEQ ID NO: 4888537 - DNA, 25 bp, Homo sapien
agatgactagaaacatatttcttcc

SEQ ID NO: 4888538 - DNA, 25 bp, Homo sapien
cattagccatgaggattcatcctat

SEQ ID NO: 4888539 - DNA, 25 bp, Homo sapien
tcatcctatggattggaagctatac

SEQ ID NO: 4888540 - DNA, 25 bp, Homo sapien
catggtggttctaatgttcttccag

SEQ ID NO: 4888541 - DNA, 25 bp, Homo sapien
tgttaggcagtccaacaatgaaagc

SEQ ID NO: 4888542 - DNA, 25 bp, Homo sapien
gaagctaatagctttccaaggatgc

SEQ ID NO: 4888543 - DNA, 25 bp, Homo sapien
tatgtgactggaaactcctagttgg

SEQ ID NO: 4888544 - DNA, 25 bp, Homo sapien
tagctatctgatgtcttgtctcctg

SEQ ID NO: 4888545 - DNA, 25 bp, Homo sapien
tggcctcgcattcctcggcagggtg

SEQ ID NO: 4888546 - DNA, 25 bp, Homo sapien
tctgacaggtaagtcaagggtggcc

SEQ ID NO: 4888547 - DNA, 25 bp, Homo sapien
gtctgatccttttctgacaggtaag

SEQ ID NO: 4888548 - DNA, 25 bp, Homo sapien
agaggaaccactccggtaccattag

SEQ ID NO: 4888549 - DNA, 25 bp, Homo sapien
tggaagaaatagtttgccatgttat

SEQ ID NO: 4888550 - DNA, 25 bp, Homo sapien
atgttattctcaagagaacatctgg

SEQ ID NO: 4888551 - DNA, 25 bp, Homo sapien
caatcttatcttaatgtggaagaaa

SEQ ID NO: 4888552 - DNA, 25 bp, Homo sapien
caagagaacatctggatattattgt

SEQ ID NO: 4888553 - DNA, 25 bp, Homo sapien
ccgccagagtgggagaccttttgcc

SEQ ID NO: 4888554 - DNA, 25 bp, Homo sapien
gatacgtgaagtgggaaccaagcag

SEQ ID NO: 4888555 - DNA, 25 bp, Homo sapien
tcagggatcaaaaagccgccagagt

SEQ ID NO: 4888556 - DNA, 25 bp, Homo sapien
tgcaaagatggaccccacaaaggga

SEQ ID NO: 4888557 - DNA, 25 bp, Homo sapien
ctgtgttcggaataaaaacgactgg

SEQ ID NO: 4888558 - DNA, 25 bp, Homo sapien
tttaatgttctgactgtgttcggaa

SEQ ID NO: 4888559 - DNA, 25 bp, Homo sapien
cttaagtcgctgcttgggtttccct

SEQ ID NO: 4888560 - DNA, 25 bp, Homo sapien
ctgcttgggtttccctgctaatgca

SEQ ID NO: 4888561 - DNA, 25 bp, Homo sapien
ccagttgctggtaaggtgcgaatga

SEQ ID NO: 4888562 - DNA, 25 bp, Homo sapien
ttaccagttgctggtaaggtgcgaa

SEQ ID NO: 4888563 - DNA, 25 bp, Homo sapien
ggtaaggtgcgaatgatacagcatg

SEQ ID NO: 4888564 - DNA, 25 bp, Homo sapien
ttgctggtaaggtgcgaatgataca

SEQ ID NO: 4888565 - DNA, 25 bp, Homo sapien
caagtcctaaaatatgcggatttta

SEQ ID NO: 4888566 - DNA, 25 bp, Homo sapien
tatgcggattttattggaatgcttt

SEQ ID NO: 4888567 - DNA, 25 bp, Homo sapien
gcatataaaagatctacaagtccta

SEQ ID NO: 4888568 - DNA, 25 bp, Homo sapien
aaaagcatataaaagatctacaagt

SEQ ID NO: 4888569 - DNA, 25 bp, Homo sapien
acaggaccacaaacccagacaccag

SEQ ID NO: 4888570 - DNA, 25 bp, Homo sapien
gagcccatggtcaacagctgagaaa

SEQ ID NO: 4888571 - DNA, 25 bp, Homo sapien
acaccagatcggcagagcccatggt

SEQ ID NO: 4888572 - DNA, 25 bp, Homo sapien
atcggcagagcccatggtcaacagc

SEQ ID NO: 4888573 - DNA, 25 bp, Homo sapien
tggtcttgatatctggatattggtc

SEQ ID NO: 4888574 - DNA, 25 bp, Homo sapien
gatatctggatattggtccaaccat

SEQ ID NO: 4888575 - DNA, 25 bp, Homo sapien
atctggatattggtccaaccatctg

SEQ ID NO: 4888576 - DNA, 25 bp, Homo sapien
cttgatatctggatattggtccaac

SEQ ID NO: 4888577 - DNA, 25 bp, Homo sapien
cccattatctgtgggtagagcagca

SEQ ID NO: 4888578 - DNA, 25 bp, Homo sapien
ggactttgctatcagaccactgtga

SEQ ID NO: 4888579 - DNA, 25 bp, Homo sapien
tggtacaatgggatagccacaagag

SEQ ID NO: 4888580 - DNA, 25 bp, Homo sapien
tatttttggccaagcagtgtccacc

SEQ ID NO: 4888581 - DNA, 25 bp, Homo sapien
ctgtggtcagcatcatcggcctcat

SEQ ID NO: 4888582 - DNA, 25 bp, Homo sapien
cagcctgtggtcagcatcatcggcc

SEQ ID NO: 4888583 - DNA, 25 bp, Homo sapien
acaaagccctttccacagcctgtgg

SEQ ID NO: 4888584 - DNA, 25 bp, Homo sapien
cacagcctgtggtcagcatcatcgg

SEQ ID NO: 4888585 - DNA, 25 bp, Homo sapien
cttttcctgacagatggccatccag

SEQ ID NO: 4888586 - DNA, 25 bp, Homo sapien
atcacgccacaccattgcatcccag

SEQ ID NO: 4888587 - DNA, 25 bp, Homo sapien
gatgctccaaattagttgcagtgag

SEQ ID NO: 4888588 - DNA, 25 bp, Homo sapien
aaagtcttagaaagatgctccaaat

SEQ ID NO: 4888589 - DNA, 25 bp, Homo sapien
tgtgctggcaagctagcccctgttg

SEQ ID NO: 4888590 - DNA, 25 bp, Homo sapien
aacttatatatccacgggtcccctg

SEQ ID NO: 4888591 - DNA, 25 bp, Homo sapien
tacggatgtcatctaaccaacggtg

SEQ ID NO: 4888592 - DNA, 25 bp, Homo sapien
caaaggttagtgtcagccaaatcca

SEQ ID NO: 4888593 - DNA, 25 bp, Homo sapien
tgattctcaaaacctatgtggtagg

SEQ ID NO: 4888594 - DNA, 25 bp, Homo sapien
tgtggtaggcgctatgataattatc

SEQ ID NO: 4888595 - DNA, 25 bp, Homo sapien
gaaaaggcttatgaagtttactgtg

SEQ ID NO: 4888596 - DNA, 25 bp, Homo sapien
ttccaagcactatgtactaactcac

SEQ ID NO: 4888597 - DNA, 25 bp, Homo sapien
tgtaaagtatgtgccatttaccctc

SEQ ID NO: 4888598 - DNA, 25 bp, Homo sapien
gtaaagtatgtgccatttaccctcc

SEQ ID NO: 4888599 - DNA, 25 bp, Homo sapien
ctgtaaagtatgtgccatttaccct

SEQ ID NO: 4888600 - DNA, 25 bp, Homo sapien
actgtaaagtatgtgccatttaccc

SEQ ID NO: 4888601 - DNA, 25 bp, Homo sapien
tggtcctaaacttctccccagctgg

SEQ ID NO: 4888602 - DNA, 25 bp, Homo sapien
caggttaacagagggctctgggcca

SEQ ID NO: 4888603 - DNA, 25 bp, Homo sapien
agtggactccacagggaaagcccag

SEQ ID NO: 4888604 - DNA, 25 bp, Homo sapien
gcgtcggattcccataacaccaggt

SEQ ID NO: 4888605 - DNA, 25 bp, Homo sapien
aacacaggtaacacttgcttgccac

SEQ ID NO: 4888606 - DNA, 25 bp, Homo sapien
tcaaataaaccatggacaacacagg

SEQ ID NO: 4888607 - DNA, 25 bp, Homo sapien
ataagaactgctccaatccagaatc

SEQ ID NO: 4888608 - DNA, 25 bp, Homo sapien
tcttccatgtgactcaaacctttat

SEQ ID NO: 4888609 - DNA, 25 bp, Homo sapien
tctctggtgttgggatgatttgaag

SEQ ID NO: 4888610 - DNA, 25 bp, Homo sapien
ctctggtgttgggatgatttgaagt

SEQ ID NO: 4888611 - DNA, 25 bp, Homo sapien
ccacgccaaagccgttgcgcttctt

SEQ ID NO: 4888612 - DNA, 25 bp, Homo sapien
ggaaggccacgccaaagccgttgcg

SEQ ID NO: 4888613 - DNA, 25 bp, Homo sapien
aggccacgccaaagccgttgcgctt

SEQ ID NO: 4888614 - DNA, 25 bp, Homo sapien
cacgccaaagccgttgcgcttcttc

SEQ ID NO: 4888615 - DNA, 25 bp, Homo sapien
catcatgcgtccatgggcgggtaca

SEQ ID NO: 4888616 - DNA, 25 bp, Homo sapien
tagacccaggccagacagttgttgc

SEQ ID NO: 4888617 - DNA, 25 bp, Homo sapien
aatttgaagtgcacagatcgcctgg

SEQ ID NO: 4888618 - DNA, 25 bp, Homo sapien
taggtatgacacagacatgctaagc

SEQ ID NO: 4888619 - DNA, 25 bp, Homo sapien
tagatgcaacagatcaaagagctgg

SEQ ID NO: 4888620 - DNA, 25 bp, Homo sapien
tacaagacataagtgatacgaggct

SEQ ID NO: 4888621 - DNA, 25 bp, Homo sapien
caggtaagggtcagtctagcaatgt

SEQ ID NO: 4888622 - DNA, 25 bp, Homo sapien
tgaagacaacgatgggtgtactcct

SEQ ID NO: 4888623 - DNA, 25 bp, Homo sapien
tggttcaagcggtaacaagagctat

SEQ ID NO: 4888624 - DNA, 25 bp, Homo sapien
tattgccaggtgtaagtaaaaagcc

SEQ ID NO: 4888625 - DNA, 25 bp, Homo sapien
tcagtgctagccataatatagacac

SEQ ID NO: 4888626 - DNA, 25 bp, Homo sapien
taactagtcgtatggttcagtgcta

SEQ ID NO: 4888627 - DNA, 25 bp, Homo sapien
cattagaatcacgtgggtagctcac

SEQ ID NO: 4888628 - DNA, 25 bp, Homo sapien
agaatcacgtgggtagctcacaaaa

SEQ ID NO: 4888629 - DNA, 25 bp, Homo sapien
ttagaatcacgtgggtagctcacaa

SEQ ID NO: 4888630 - DNA, 25 bp, Homo sapien
cacattagaatcacgtgggtagctc

SEQ ID NO: 4888631 - DNA, 25 bp, Homo sapien
tctccacctggctgtgcaaaatggt

SEQ ID NO: 4888632 - DNA, 25 bp, Homo sapien
gaagttaaggcctaccctcagaaga

SEQ ID NO: 4888633 - DNA, 25 bp, Homo sapien
tatgaataatgggaaagccacccct

SEQ ID NO: 4888634 - DNA, 25 bp, Homo sapien
tagacccagtggaggtaactcttca

SEQ ID NO: 4888635 - DNA, 25 bp, Homo sapien
gacatgtccggtttggccacagaca

SEQ ID NO: 4888636 - DNA, 25 bp, Homo sapien
tctgttgacatgtccggtttggcca

SEQ ID NO: 4888637 - DNA, 25 bp, Homo sapien
gcctcccaaggtgagtctgttgaca

SEQ ID NO: 4888638 - DNA, 25 bp, Homo sapien
cccaaggtgagtctgttgacatgtc

SEQ ID NO: 4888639 - DNA, 25 bp, Homo sapien
ttgactccgtcagtgcgctgctgca

SEQ ID NO: 4888640 - DNA, 25 bp, Homo sapien
gcgggcctgagaactccttccagaa

SEQ ID NO: 4888641 - DNA, 25 bp, Homo sapien
tctttgcgaaggagctccgcgtttc

SEQ ID NO: 4888642 - DNA, 25 bp, Homo sapien
tgcactacaaaagtagcgcgggcct

SEQ ID NO: 4888643 - DNA, 25 bp, Homo sapien
tcccttgtctgtacgtaaaagtaga

SEQ ID NO: 4888644 - DNA, 25 bp, Homo sapien
tagaaccagcctcttcgattgagac

SEQ ID NO: 4888645 - DNA, 25 bp, Homo sapien
cgattgagacacttcgattgacact

SEQ ID NO: 4888646 - DNA, 25 bp, Homo sapien
gacacttaatgaagagcagtcctat

SEQ ID NO: 4888647 - DNA, 25 bp, Homo sapien
gcacctatgccagttcctggatcca

SEQ ID NO: 4888648 - DNA, 25 bp, Homo sapien
caggtgaatacgacaatccagggcc

SEQ ID NO: 4888649 - DNA, 25 bp, Homo sapien
tgaatacgacaatccagggccttca

SEQ ID NO: 4888650 - DNA, 25 bp, Homo sapien
tgagcaggtgaatacgacaatccag

SEQ ID NO: 4888651 - DNA, 25 bp, Homo sapien
ggtaggtgaaacaaacttataagca

SEQ ID NO: 4888652 - DNA, 25 bp, Homo sapien
tgctgtgtctaattgacaaattaaa

SEQ ID NO: 4888653 - DNA, 25 bp, Homo sapien
taagtgattggtttcaagtagacag

SEQ ID NO: 4888654 - DNA, 25 bp, Homo sapien
tgcattacaaaggaaccatggtagg

SEQ ID NO: 4888655 - DNA, 25 bp, Homo sapien
cctgctaagtgctccagctttcatt

SEQ ID NO: 4888656 - DNA, 25 bp, Homo sapien
ggcattaaaccctcacatggcagtg

SEQ ID NO: 4888657 - DNA, 25 bp, Homo sapien
ggcacagatccaggcattaaaccct

SEQ ID NO: 4888658 - DNA, 25 bp, Homo sapien
tcctcctgtttgcttcatggcacag

SEQ ID NO: 4888659 - DNA, 25 bp, Homo sapien
ctttctaaagctgagtcataacttt

SEQ ID NO: 4888660 - DNA, 25 bp, Homo sapien
taactttaataaatgactcaacgta

SEQ ID NO: 4888661 - DNA, 25 bp, Homo sapien
aaatgactcaacgtatttgacaact

SEQ ID NO: 4888662 - DNA, 25 bp, Homo sapien
tcatggctcatggcaaagcccgcct

SEQ ID NO: 4888663 - DNA, 25 bp, Homo sapien
cactcctgttcaagaccatactgga

SEQ ID NO: 4888664 - DNA, 25 bp, Homo sapien
cctgttcaagaccatactggaatcc

SEQ ID NO: 4888665 - DNA, 25 bp, Homo sapien
tcctgttcaagaccatactggaatc

SEQ ID NO: 4888666 - DNA, 25 bp, Homo sapien
catcactcctgttcaagaccatact

SEQ ID NO: 4888667 - DNA, 25 bp, Homo sapien
tcagctccacattgggcactacttg

SEQ ID NO: 4888668 - DNA, 25 bp, Homo sapien
gcttaggaaataattcaagagtgag

SEQ ID NO: 4888669 - DNA, 25 bp, Homo sapien
gggcactacttgatgcagagcaggc

SEQ ID NO: 4888670 - DNA, 25 bp, Homo sapien
catctgtcacaccatcgtcttctct

SEQ ID NO: 4888671 - DNA, 25 bp, Homo sapien
catccgcaagatagaaggttccacc

SEQ ID NO: 4888672 - DNA, 25 bp, Homo sapien
gtactcagacccctattgacttggg

SEQ ID NO: 4888673 - DNA, 25 bp, Homo sapien
ccttgatctagtatgggtgggaaca

SEQ ID NO: 4888674 - DNA, 25 bp, Homo sapien
tatccagggaatctcacagccatct

SEQ ID NO: 4888675 - DNA, 25 bp, Homo sapien
tgaggcaacaggagatgcagccaac

SEQ ID NO: 4888676 - DNA, 25 bp, Homo sapien
ggcaacaggagatgcagccaactca

SEQ ID NO: 4888677 - DNA, 25 bp, Homo sapien
gcaacaggagatgcagccaactcat

SEQ ID NO: 4888678 - DNA, 25 bp, Homo sapien
gaggcaacaggagatgcagccaact

SEQ ID NO: 4888679 - DNA, 25 bp, Homo sapien
tgggcttcacccttagcaggacttt

SEQ ID NO: 4888680 - DNA, 25 bp, Homo sapien
tcactcatatcaaatgttgtgaagg

SEQ ID NO: 4888681 - DNA, 25 bp, Homo sapien
gcaggactttataaacatcgtggaa

SEQ ID NO: 4888682 - DNA, 25 bp, Homo sapien
tgttcaacctcatgtccaggcacca

SEQ ID NO: 4888683 - DNA, 25 bp, Homo sapien
tgtgctctctaagtaaggtctagtg

SEQ ID NO: 4888684 - DNA, 25 bp, Homo sapien
tatctatcctaagccagagcttggg

SEQ ID NO: 4888685 - DNA, 25 bp, Homo sapien
tcattgtgttgaaagagtattcctt

SEQ ID NO: 4888686 - DNA, 25 bp, Homo sapien
gtcttcgagaagattgcagtcactg

SEQ ID NO: 4888687 - DNA, 25 bp, Homo sapien
cctcccacattatccctccaggcag

SEQ ID NO: 4888688 - DNA, 25 bp, Homo sapien
tttccaagttctttgcaggttgaat

SEQ ID NO: 4888689 - DNA, 25 bp, Homo sapien
ttttccaagttctttgcaggttgaa

SEQ ID NO: 4888690 - DNA, 25 bp, Homo sapien
cccacattatccctccaggcagctg

SEQ ID NO: 4888691 - DNA, 25 bp, Homo sapien
acctatcagagtgcatttctgggca

SEQ ID NO: 4888692 - DNA, 25 bp, Homo sapien
aatctggccgttacccttggcagcc

SEQ ID NO: 4888693 - DNA, 25 bp, Homo sapien
agtacacctatcagagtgcatttct

SEQ ID NO: 4888694 - DNA, 25 bp, Homo sapien
tccacatcaatctggccgttaccct

SEQ ID NO: 4888695 - DNA, 25 bp, Homo sapien
catgctcaggagatgaggggcttct

SEQ ID NO: 4888696 - DNA, 25 bp, Homo sapien
gggaagatccttgcacatctcctcc

SEQ ID NO: 4888697 - DNA, 25 bp, Homo sapien
actcttgtccaagatccgttcttcc

SEQ ID NO: 4888698 - DNA, 25 bp, Homo sapien
gggcttctactcttgtccaagatcc

SEQ ID NO: 4888699 - DNA, 25 bp, Homo sapien
gactcagtgaaggtgtagcagattc

SEQ ID NO: 4888700 - DNA, 25 bp, Homo sapien
cagtgaaggtgtagcagattcagca

SEQ ID NO: 4888701 - DNA, 25 bp, Homo sapien
caggaaaggttcagtgaaaagactc

SEQ ID NO: 4888702 - DNA, 25 bp, Homo sapien
agattcagcagtgtggagccccagg

SEQ ID NO: 4888703 - DNA, 25 bp, Homo sapien
tgcaggagggcctgttcattaccag

SEQ ID NO: 4888704 - DNA, 25 bp, Homo sapien
acactctgcaggagggcctgttcat

SEQ ID NO: 4888705 - DNA, 25 bp, Homo sapien
tctgcaggagggcctgttcattacc

SEQ ID NO: 4888706 - DNA, 25 bp, Homo sapien
ctgttcattaccagggtctaataaa

SEQ ID NO: 4888707 - DNA, 25 bp, Homo sapien
tcaagtgcgaggaagacaccagaac

SEQ ID NO: 4888708 - DNA, 25 bp, Homo sapien
gaacgagcagctcctgataaggtgg

SEQ ID NO: 4888709 - DNA, 25 bp, Homo sapien
tcagtgcgagggagacatcaaaaca

SEQ ID NO: 4888710 - DNA, 25 bp, Homo sapien
cagtgcgagacagatatgagaaccg

SEQ ID NO: 4888711 - DNA, 25 bp, Homo sapien
caagccattcttgcgagcagctggt

SEQ ID NO: 4888712 - DNA, 25 bp, Homo sapien
cagatcaagccattcttgcgagcag

SEQ ID NO: 4888713 - DNA, 25 bp, Homo sapien
gcgagcagctggtttttgcacagtg

SEQ ID NO: 4888714 - DNA, 25 bp, Homo sapien
cattcttgcgagcagctggtttttg

SEQ ID NO: 4888715 - DNA, 25 bp, Homo sapien
tcagtaagtctgagcaccattttct

SEQ ID NO: 4888716 - DNA, 25 bp, Homo sapien
gcttgtgctcaagctggggcccttg

SEQ ID NO: 4888717 - DNA, 25 bp, Homo sapien
cttctgtaggttcagtaagtctgag

SEQ ID NO: 4888718 - DNA, 25 bp, Homo sapien
gcaccattttcttgagtcctcaaag

SEQ ID NO: 4888719 - DNA, 25 bp, Homo sapien
gatggtatgtttctctacctagaaa

SEQ ID NO: 4888720 - DNA, 25 bp, Homo sapien
cctatagactcagcccaaaagttgc

SEQ ID NO: 4888721 - DNA, 25 bp, Homo sapien
tatgacaaacccacacttaacacca

SEQ ID NO: 4888722 - DNA, 25 bp, Homo sapien
acctagaaaatcctatagactcagc

SEQ ID NO: 4888723 - DNA, 25 bp, Homo sapien
actggaacttatgtgttgcacttgc

SEQ ID NO: 4888724 - DNA, 25 bp, Homo sapien
ccctaactggaacttatgtgttgca

SEQ ID NO: 4888725 - DNA, 25 bp, Homo sapien
ctaatacccctaactggaacttatg

SEQ ID NO: 4888726 - DNA, 25 bp, Homo sapien
tatgtgttgcacttgcttgctgtgc

SEQ ID NO: 4888727 - DNA, 25 bp, Homo sapien
gccaagctctgtgagtggtcttctt

SEQ ID NO: 4888728 - DNA, 25 bp, Homo sapien
gggaacacggtgacaaccctcaaca

SEQ ID NO: 4888729 - DNA, 25 bp, Homo sapien
atgccaagctctgtgagtggtcttc

SEQ ID NO: 4888730 - DNA, 25 bp, Homo sapien
tgccaagctctgtgagtggtcttct

SEQ ID NO: 4888731 - DNA, 25 bp, Homo sapien
tgtagtacactcctcttgctctgcc

SEQ ID NO: 4888732 - DNA, 25 bp, Homo sapien
tgccttcagagtggttggccagatc

SEQ ID NO: 4888733 - DNA, 25 bp, Homo sapien
tccttgcttttggtagaagagtggc

SEQ ID NO: 4888734 - DNA, 25 bp, Homo sapien
gacattttcaggtaggcatcaggta

SEQ ID NO: 4888735 - DNA, 25 bp, Homo sapien
tgatatctaagaatgtttgtaattg

SEQ ID NO: 4888736 - DNA, 25 bp, Homo sapien
ctgagatcactgttaagaggactca

SEQ ID NO: 4888737 - DNA, 25 bp, Homo sapien
gttaagaggactcacgaacaccttc

SEQ ID NO: 4888738 - DNA, 25 bp, Homo sapien
taagaggactcacgaacaccttcct

SEQ ID NO: 4888739 - DNA, 25 bp, Homo sapien
ctatcatccaattatcttcacctgg

SEQ ID NO: 4888740 - DNA, 25 bp, Homo sapien
gcccctgtcaaatctcatgtatctt

SEQ ID NO: 4888741 - DNA, 25 bp, Homo sapien
acaaaccctaaccatgtcattccag

SEQ ID NO: 4888742 - DNA, 25 bp, Homo sapien
tgtccctatcatccaattatcttca

SEQ ID NO: 4888743 - DNA, 25 bp, Homo sapien
gttagtggccagatgacaaacccat

SEQ ID NO: 4888744 - DNA, 25 bp, Homo sapien
catttcccaatataggatgcagtgg

SEQ ID NO: 4888745 - DNA, 25 bp, Homo sapien
gaggatttaaggcaggttcagacac

SEQ ID NO: 4888746 - DNA, 25 bp, Homo sapien
aaatgcaaagtacaagttagtggcc

SEQ ID NO: 4888747 - DNA, 25 bp, Homo sapien
tctagtggtgatgcactttctcgcc

SEQ ID NO: 4888748 - DNA, 25 bp, Homo sapien
tctcgccctatgtttacctgggaaa

SEQ ID NO: 4888749 - DNA, 25 bp, Homo sapien
tagcctgcaatgtttctgcctagaa

SEQ ID NO: 4888750 - DNA, 25 bp, Homo sapien
tatatgttgacctttaccagagagt

SEQ ID NO: 4888751 - DNA, 25 bp, Homo sapien
gaaatgagtttcagccattaatcac

SEQ ID NO: 4888752 - DNA, 25 bp, Homo sapien
atgtcttttaggcagttcagccatg

SEQ ID NO: 4888753 - DNA, 25 bp, Homo sapien
tctctggtgtcagggatgattcgaa

SEQ ID NO: 4888754 - DNA, 25 bp, Homo sapien
caaagcagattaggcattgtcacca

SEQ ID NO: 4888755 - DNA, 25 bp, Homo sapien
aaatcggcacttggaaatttacctg

SEQ ID NO: 4888756 - DNA, 25 bp, Homo sapien
tatttaaccagtcttgcactgatgg

SEQ ID NO: 4888757 - DNA, 25 bp, Homo sapien
tatgaactcgcagatttccactttg

SEQ ID NO: 4888758 - DNA, 25 bp, Homo sapien
cagcttcataacatcccactgtatg

SEQ ID NO: 4888759 - DNA, 25 bp, Homo sapien
caccaaaggtaccaatgaacttcac

SEQ ID NO: 4888760 - DNA, 25 bp, Homo sapien
gatatctaataaacgtttgtaattg

SEQ ID NO: 4888761 - DNA, 25 bp, Homo sapien
tcttactcacatcactgttaagaag

SEQ ID NO: 4888762 - DNA, 25 bp, Homo sapien
tccttcaccaccaaaggtaccaatg

SEQ ID NO: 4888763 - DNA, 25 bp, Homo sapien
gattgttaaaaacgtgatccaacta

SEQ ID NO: 4888764 - DNA, 25 bp, Homo sapien
catggtcaaggttacccacctggaa

SEQ ID NO: 4888765 - DNA, 25 bp, Homo sapien
tacaggagacagagtttagattcaa

SEQ ID NO: 4888766 - DNA, 25 bp, Homo sapien
gattgactagatccatgaatgaaga

SEQ ID NO: 4888767 - DNA, 25 bp, Homo sapien
atcagactagatggggcgcactcag

SEQ ID NO: 4888768 - DNA, 25 bp, Homo sapien
agatggggcgcactcagggtggtaa

SEQ ID NO: 4888769 - DNA, 25 bp, Homo sapien
actagatggggcgcactcagggtgg

SEQ ID NO: 4888770 - DNA, 25 bp, Homo sapien
gatcagactagatggggcgcactca

SEQ ID NO: 4888771 - DNA, 25 bp, Homo sapien
tccaaacaaatttacacagggtctc

SEQ ID NO: 4888772 - DNA, 25 bp, Homo sapien
tagagctgggattagcctgttactc

SEQ ID NO: 4888773 - DNA, 25 bp, Homo sapien
taatagttgggcactgaaaaagcag

SEQ ID NO: 4888774 - DNA, 25 bp, Homo sapien
tctgagtgggagtagcatatttgcc

SEQ ID NO: 4888775 - DNA, 25 bp, Homo sapien
gagtacatgtgttccctacatctgg

SEQ ID NO: 4888776 - DNA, 25 bp, Homo sapien
tcacggagctatcactgaggtggtc

SEQ ID NO: 4888777 - DNA, 25 bp, Homo sapien
gcagggcaactgactgacagggtat

SEQ ID NO: 4888778 - DNA, 25 bp, Homo sapien
actttctctgtagggctcacggagc

SEQ ID NO: 4888779 - DNA, 25 bp, Homo sapien
gattttagccccatcagaggtcaga

SEQ ID NO: 4888780 - DNA, 25 bp, Homo sapien
gaggtcagatttctaacctacagaa

SEQ ID NO: 4888781 - DNA, 25 bp, Homo sapien
cagatgggtccgatgcaatcacagg

SEQ ID NO: 4888782 - DNA, 25 bp, Homo sapien
tgtgagctctgctagaagtgggaaa

SEQ ID NO: 4888783 - DNA, 25 bp, Homo sapien
aaacatggctcgacatctcctgtga

SEQ ID NO: 4888784 - DNA, 25 bp, Homo sapien
aacatggctcgacatctcctgtgaa

SEQ ID NO: 4888785 - DNA, 25 bp, Homo sapien
gaaacatggctcgacatctcctgtg

SEQ ID NO: 4888786 - DNA, 25 bp, Homo sapien
ctttctccagcagttgtgccttgtg

SEQ ID NO: 4888787 - DNA, 25 bp, Homo sapien
caggggattcaggatggctttggtt

SEQ ID NO: 4888788 - DNA, 25 bp, Homo sapien
aggggtccaggggattcaggatggc

SEQ ID NO: 4888789 - DNA, 25 bp, Homo sapien
ttctccagcagttgtgccttgtgcc

SEQ ID NO: 4888790 - DNA, 25 bp, Homo sapien
tccaaaagcaaaagctcataggaga

SEQ ID NO: 4888791 - DNA, 25 bp, Homo sapien
ggctggctcccttgacttacttctg

SEQ ID NO: 4888792 - DNA, 25 bp, Homo sapien
ggctcccttgacttacttctgtctg

SEQ ID NO: 4888793 - DNA, 25 bp, Homo sapien
gaagcaaaagtagcctggaactcta

SEQ ID NO: 4888794 - DNA, 25 bp, Homo sapien
taataacctgcatgtgtacccacta

SEQ ID NO: 4888795 - DNA, 25 bp, Homo sapien
gaaagcatttaccaccaaacaagca

SEQ ID NO: 4888796 - DNA, 25 bp, Homo sapien
taaattaatgagcaaacaacttact

SEQ ID NO: 4888797 - DNA, 25 bp, Homo sapien
gaacatttgacaatacctaaagcgt

SEQ ID NO: 4888798 - DNA, 25 bp, Homo sapien
catgaaagatgattatactgtagat

SEQ ID NO: 4888799 - DNA, 25 bp, Homo sapien
gattatactgtagataatttatact

SEQ ID NO: 4888800 - DNA, 25 bp, Homo sapien
tgcatgaaagatgattatactgtag

SEQ ID NO: 4888801 - DNA, 25 bp, Homo sapien
tcaaagttagtacaggctgcatgaa

SEQ ID NO: 4888802 - DNA, 25 bp, Homo sapien
ggtgctcaggaggatgcaaagtcta

SEQ ID NO: 4888803 - DNA, 25 bp, Homo sapien
tcagtagagatatctggtggtgctc

SEQ ID NO: 4888804 - DNA, 25 bp, Homo sapien
catgtagtccaatagtcttgttctg

SEQ ID NO: 4888805 - DNA, 25 bp, Homo sapien
tgccttgagagtgaagctgcatctc

SEQ ID NO: 4888806 - DNA, 25 bp, Homo sapien
atctttaaaagtggttcactctggg

SEQ ID NO: 4888807 - DNA, 25 bp, Homo sapien
tcacatctttaaaagtggttcactc

SEQ ID NO: 4888808 - DNA, 25 bp, Homo sapien
aaagtggttcactctggggactggt

SEQ ID NO: 4888809 - DNA, 25 bp, Homo sapien
acatctttaaaagtggttcactctg

SEQ ID NO: 4888810 - DNA, 25 bp, Homo sapien
cagggtaccagtgaaacatgagcag

SEQ ID NO: 4888811 - DNA, 25 bp, Homo sapien
ggatattcagctttctgcgaagtgg

SEQ ID NO: 4888812 - DNA, 25 bp, Homo sapien
tatgttcttcgtagacttgctggag

SEQ ID NO: 4888813 - DNA, 25 bp, Homo sapien
ggctcagtctgggaccagggtacca

SEQ ID NO: 4888814 - DNA, 25 bp, Homo sapien
tccccgttgctgtgaaaacctctgg

SEQ ID NO: 4888815 - DNA, 25 bp, Homo sapien
tactgtagtctccaatgtggaatca

SEQ ID NO: 4888816 - DNA, 25 bp, Homo sapien
cccagcttgggccatgtgtactgta

SEQ ID NO: 4888817 - DNA, 25 bp, Homo sapien
tgctgtgactcgtctttggtcccag

SEQ ID NO: 4888818 - DNA, 25 bp, Homo sapien
ctcgccgcgcggaaggagccagaaa

SEQ ID NO: 4888819 - DNA, 25 bp, Homo sapien
agcccgggagttgccgctcgctggg

SEQ ID NO: 4888820 - DNA, 25 bp, Homo sapien
ggaagctaaggcatcctttaaaaga

SEQ ID NO: 4888821 - DNA, 25 bp, Homo sapien
gaacaataatcttcatcgatcttca

SEQ ID NO: 4888822 - DNA, 25 bp, Homo sapien
tttacatccctgactctggttcacg

SEQ ID NO: 4888823 - DNA, 25 bp, Homo sapien
gctggagctcccggcgtgctttccc

SEQ ID NO: 4888824 - DNA, 25 bp, Homo sapien
aggagggtctccccggctggctgga

SEQ ID NO: 4888825 - DNA, 25 bp, Homo sapien
catccctgactctggttcacggtct

SEQ ID NO: 4888826 - DNA, 25 bp, Homo sapien
gatccccttcgccaatgacctgtcg

SEQ ID NO: 4888827 - DNA, 25 bp, Homo sapien
cttcgccaatgacctgtcgctggaa

SEQ ID NO: 4888828 - DNA, 25 bp, Homo sapien
cacgggctcgggcaccacaaagggc

SEQ ID NO: 4888829 - DNA, 25 bp, Homo sapien
cgcgacgatccccttcgccaatgac

SEQ ID NO: 4888830 - DNA, 25 bp, Homo sapien
tgaggatcgttcatacatcagagac

SEQ ID NO: 4888831 - DNA, 25 bp, Homo sapien
catgaagctctttccttagagaccc

SEQ ID NO: 4888832 - DNA, 25 bp, Homo sapien
gaatcgtgctacagaacggagaccg

SEQ ID NO: 4888833 - DNA, 25 bp, Homo sapien
cccctagcagagtgtgttggaaaca

SEQ ID NO: 4888834 - DNA, 25 bp, Homo sapien
tcaactgaagcaatatccctctggg

SEQ ID NO: 4888835 - DNA, 25 bp, Homo sapien
ggtcaactgaagcaatatccctctg

SEQ ID NO: 4888836 - DNA, 25 bp, Homo sapien
aaaatgaggtcaactgaagcaatat

SEQ ID NO: 4888837 - DNA, 25 bp, Homo sapien
tgaggtcaactgaagcaatatccct

SEQ ID NO: 4888838 - DNA, 25 bp, Homo sapien
tggacaaagccgcagagccagggtc

SEQ ID NO: 4888839 - DNA, 25 bp, Homo sapien
ctggacaaagccgcagagccagggt

SEQ ID NO: 4888840 - DNA, 25 bp, Homo sapien
cacaggacttcgtggttgaggcccc

SEQ ID NO: 4888841 - DNA, 25 bp, Homo sapien
gattatagtcgtcgcacacttccag

SEQ ID NO: 4888842 - DNA, 25 bp, Homo sapien
catcatatggagtttcccggtccgg

SEQ ID NO: 4888843 - DNA, 25 bp, Homo sapien
gttcttggccaaacgaaagtgcaca

SEQ ID NO: 4888844 - DNA, 25 bp, Homo sapien
tcagtgcctgatgggtctgagctag

SEQ ID NO: 4888845 - DNA, 25 bp, Homo sapien
gagctagggctttctcctcaacctc

SEQ ID NO: 4888846 - DNA, 25 bp, Homo sapien
tcgtcttccacaagactcagtgcct

SEQ ID NO: 4888847 - DNA, 25 bp, Homo sapien
tccctttgttcaagatggagctcag

SEQ ID NO: 4888848 - DNA, 25 bp, Homo sapien
gctgcaccatgccaacgacaatgga

SEQ ID NO: 4888849 - DNA, 25 bp, Homo sapien
gcagctcccgacttgatccaaggat

SEQ ID NO: 4888850 - DNA, 25 bp, Homo sapien
gaaactcataatttggacccctggc

SEQ ID NO: 4888851 - DNA, 25 bp, Homo sapien
gatggctaaggtctcctggcccttc

SEQ ID NO: 4888852 - DNA, 25 bp, Homo sapien
ggccctcttcagatgcaaccaagaa

SEQ ID NO: 4888853 - DNA, 25 bp, Homo sapien
tctagaaataggatcgctgcagcta

SEQ ID NO: 4888854 - DNA, 25 bp, Homo sapien
tgcttggaaattaagactggccctc

SEQ ID NO: 4888855 - DNA, 25 bp, Homo sapien
gacaaaaggcattagccaggactat

SEQ ID NO: 4888856 - DNA, 25 bp, Homo sapien
gcttggggtcaccttcatctttctc

SEQ ID NO: 4888857 - DNA, 25 bp, Homo sapien
tggaacagcttgctggtgtggcttg

SEQ ID NO: 4888858 - DNA, 25 bp, Homo sapien
tgtggaacagcttgctggtgtggct

SEQ ID NO: 4888859 - DNA, 25 bp, Homo sapien
tatgtggaacagcttgctggtgtgg

SEQ ID NO: 4888860 - DNA, 25 bp, Homo sapien
tgatagatacagtaagtgcaacttg

SEQ ID NO: 4888861 - DNA, 25 bp, Homo sapien
aaggaggttaagaactggatgttgc

SEQ ID NO: 4888862 - DNA, 25 bp, Homo sapien
tagatacagtaagtgcaacttgcct

SEQ ID NO: 4888863 - DNA, 25 bp, Homo sapien
gaactggatgttgctgatagataca

SEQ ID NO: 4888864 - DNA, 25 bp, Homo sapien
cctgtccttagtaatatccagagga

SEQ ID NO: 4888865 - DNA, 25 bp, Homo sapien
cagccaccgtagacacagaaacttg

SEQ ID NO: 4888866 - DNA, 25 bp, Homo sapien
tggcttcagccaccgtagacacaga

SEQ ID NO: 4888867 - DNA, 25 bp, Homo sapien
caaacatcagttgggttcaggtacc

SEQ ID NO: 4888868 - DNA, 25 bp, Homo sapien
tagaacaggttgttcaccacaggga

SEQ ID NO: 4888869 - DNA, 25 bp, Homo sapien
gctgcaaccaagcaaacccatctgg

SEQ ID NO: 4888870 - DNA, 25 bp, Homo sapien
cactgctgtggcgtaggcttgaagt

SEQ ID NO: 4888871 - DNA, 25 bp, Homo sapien
gctgcaccgggttgacttggctgtc

SEQ ID NO: 4888872 - DNA, 25 bp, Homo sapien
tagtgtggggcactcgacacacatt

SEQ ID NO: 4888873 - DNA, 25 bp, Homo sapien
agactgggtatgaatatcaatatgg

SEQ ID NO: 4888874 - DNA, 25 bp, Homo sapien
gaatatcaatatggcattagtgtgg

SEQ ID NO: 4888875 - DNA, 25 bp, Homo sapien
ctgggtatgaatatcaatatggcat

SEQ ID NO: 4888876 - DNA, 25 bp, Homo sapien
ccgtagaaatgggatgccttccaat

SEQ ID NO: 4888877 - DNA, 25 bp, Homo sapien
gctggaagtgcaacatctgagacag

SEQ ID NO: 4888878 - DNA, 25 bp, Homo sapien
tgctgcagtgcaagtagggcacatg

SEQ ID NO: 4888879 - DNA, 25 bp, Homo sapien
tgaacaggatgccttctgcggtccc

SEQ ID NO: 4888880 - DNA, 25 bp, Homo sapien
gggactgattaaggctctttctgaa

SEQ ID NO: 4888881 - DNA, 25 bp, Homo sapien
gctaaattagagaatcccatcagta

SEQ ID NO: 4888882 - DNA, 25 bp, Homo sapien
gttcccctaagctgataccattatt

SEQ ID NO: 4888883 - DNA, 25 bp, Homo sapien
ggattacaatgaaagtcagttcccc

SEQ ID NO: 4888884 - DNA, 25 bp, Homo sapien
cccaggagacatcggcccatttttg

SEQ ID NO: 4888885 - DNA, 25 bp, Homo sapien
ttttgaggcaggtacccagttcttc

SEQ ID NO: 4888886 - DNA, 25 bp, Homo sapien
tgtgttggaagtaactcaaaacgga

SEQ ID NO: 4888887 - DNA, 25 bp, Homo sapien
gagacatcggcccatttttgaggca

SEQ ID NO: 4888888 - DNA, 25 bp, Homo sapien
tctcatgtgcctctccactggcccc

SEQ ID NO: 4888889 - DNA, 25 bp, Homo sapien
tcactctctttagcattaccactgc

SEQ ID NO: 4888890 - DNA, 25 bp, Homo sapien
ccacaccaatactgctgctcctctg

SEQ ID NO: 4888891 - DNA, 25 bp, Homo sapien
tctctttagcattaccactgcccat

SEQ ID NO: 4888892 - DNA, 25 bp, Homo sapien
ggagtgccttgtaatcattcttgag

SEQ ID NO: 4888893 - DNA, 25 bp, Homo sapien
tgcatttgaaacaaggggtccttgg

SEQ ID NO: 4888894 - DNA, 25 bp, Homo sapien
tcagtctccagtaaatacattgcta

SEQ ID NO: 4888895 - DNA, 25 bp, Homo sapien
tctccccgaaattactgcatttgaa

SEQ ID NO: 4888896 - DNA, 25 bp, Homo sapien
ttcaatatatttgcatttgccagga

SEQ ID NO: 4888897 - DNA, 25 bp, Homo sapien
tatatttgcatttgccaggacatgc

SEQ ID NO: 4888898 - DNA, 25 bp, Homo sapien
caatatatttgcatttgccaggaca

SEQ ID NO: 4888899 - DNA, 25 bp, Homo sapien
tttgcatttgccaggacatgccagc

SEQ ID NO: 4888900 - DNA, 25 bp, Homo sapien
gtaagacaaacagggtcagttccaa

SEQ ID NO: 4888901 - DNA, 25 bp, Homo sapien
tcaaaatgagctatagtctactgtc

SEQ ID NO: 4888902 - DNA, 25 bp, Homo sapien
tccaagtagcagtgaaatagtgact

SEQ ID NO: 4888903 - DNA, 25 bp, Homo sapien
tctgtgatgctagcctatactgaca

SEQ ID NO: 4888904 - DNA, 25 bp, Homo sapien
caaagtcgacggtcatcttcagaac

SEQ ID NO: 4888905 - DNA, 25 bp, Homo sapien
agtcgacggtcatcttcagaacagg

SEQ ID NO: 4888906 - DNA, 25 bp, Homo sapien
tcaaagtcgacggtcatcttcagaa

SEQ ID NO: 4888907 - DNA, 25 bp, Homo sapien
aagtcgacggtcatcttcagaacag

SEQ ID NO: 4888908 - DNA, 25 bp, Homo sapien
tattgatcctcacgactagcctatg

SEQ ID NO: 4888909 - DNA, 25 bp, Homo sapien
tcttagttaagtagcctgcccaagg

SEQ ID NO: 4888910 - DNA, 25 bp, Homo sapien
gagctgagcttagcagagtcctatg

SEQ ID NO: 4888911 - DNA, 25 bp, Homo sapien
tcctatgaaattcctggtactgcag

SEQ ID NO: 4888912 - DNA, 25 bp, Homo sapien
aggagcatctggttgtgatggcaca

SEQ ID NO: 4888913 - DNA, 25 bp, Homo sapien
ggctccatgcgctggcagacacttg

SEQ ID NO: 4888914 - DNA, 25 bp, Homo sapien
caggcaggattccttcatcggacca

SEQ ID NO: 4888915 - DNA, 25 bp, Homo sapien
gtccagcatcccacgtgaaccagat

SEQ ID NO: 4888916 - DNA, 25 bp, Homo sapien
cacgtccatacgatgctgctttcat

SEQ ID NO: 4888917 - DNA, 25 bp, Homo sapien
gattcaccaatccacgtccatacga

SEQ ID NO: 4888918 - DNA, 25 bp, Homo sapien
cagcagcccatataggattcaccaa

SEQ ID NO: 4888919 - DNA, 25 bp, Homo sapien
gccacagcagcccatataggattca

SEQ ID NO: 4888920 - DNA, 25 bp, Homo sapien
cattttgagggtcgtctttgactta

SEQ ID NO: 4888921 - DNA, 25 bp, Homo sapien
agtgtaaccattttgagggtcgtct

SEQ ID NO: 4888922 - DNA, 25 bp, Homo sapien
gacttatttttcacattgtctttaa

SEQ ID NO: 4888923 - DNA, 25 bp, Homo sapien
tcaattgttgcatgtttgctccttt

SEQ ID NO: 4888924 - DNA, 25 bp, Homo sapien
gctccagaggacgtttatcatgacc

SEQ ID NO: 4888925 - DNA, 25 bp, Homo sapien
gcttttcaggagactatgctacgta

SEQ ID NO: 4888926 - DNA, 25 bp, Homo sapien
tagccacccagtaagtcatgttgag

SEQ ID NO: 4888927 - DNA, 25 bp, Homo sapien
gaggcagagtcaggcaatacagcaa

SEQ ID NO: 4888928 - DNA, 25 bp, Homo sapien
ccaatttttagggagcgatgactcc

SEQ ID NO: 4888929 - DNA, 25 bp, Homo sapien
gagtgcttactatgaatctgaggct

SEQ ID NO: 4888930 - DNA, 25 bp, Homo sapien
gatgactccctaggtaaaatctttg

SEQ ID NO: 4888931 - DNA, 25 bp, Homo sapien
tgacgatgatgacacttactgagtg

SEQ ID NO: 4888932 - DNA, 25 bp, Homo sapien
taagacttgggtacgactgatgcca

SEQ ID NO: 4888933 - DNA, 25 bp, Homo sapien
atggcctccagctacctatatgttg

SEQ ID NO: 4888934 - DNA, 25 bp, Homo sapien
tacttgtgcaggtatatttcatggg

SEQ ID NO: 4888935 - DNA, 25 bp, Homo sapien
tcatctttacgttcatgggtaccca

SEQ ID NO: 4888936 - DNA, 25 bp, Homo sapien
cctggaaatccataggacacctggc

SEQ ID NO: 4888937 - DNA, 25 bp, Homo sapien
tctaaggtataatagcagctccaca

SEQ ID NO: 4888938 - DNA, 25 bp, Homo sapien
tagtgcagacgcagtgcacagaaag

SEQ ID NO: 4888939 - DNA, 25 bp, Homo sapien
ctaacacctggtgacacagctgctt

SEQ ID NO: 4888940 - DNA, 25 bp, Homo sapien
tctgagccaaaatccatgatgcact

SEQ ID NO: 4888941 - DNA, 25 bp, Homo sapien
taatatgggtcactgtggactacac

SEQ ID NO: 4888942 - DNA, 25 bp, Homo sapien
tatgcatgaggaaaaacctggcacc

SEQ ID NO: 4888943 - DNA, 25 bp, Homo sapien
aaatccctgtgcctatatgcatgag

SEQ ID NO: 4888944 - DNA, 25 bp, Homo sapien
ctaagataatgcaccagaagatggc

SEQ ID NO: 4888945 - DNA, 25 bp, Homo sapien
ccctggaaggctacctggactggac

SEQ ID NO: 4888946 - DNA, 25 bp, Homo sapien
gagcgcttagctgtttgtccaacaa

SEQ ID NO: 4888947 - DNA, 25 bp, Homo sapien
gagatgaatgctcccctgaagcatg

SEQ ID NO: 4888948 - DNA, 25 bp, Homo sapien
tagtgactccttaacaatctggcag

SEQ ID NO: 4888949 - DNA, 25 bp, Homo sapien
tatcaaagggtgaacgatgtgtctc

SEQ ID NO: 4888950 - DNA, 25 bp, Homo sapien
catgtttggctattgatgtccacaa

SEQ ID NO: 4888951 - DNA, 25 bp, Homo sapien
aaatctctcatgtaactaaggctgc

SEQ ID NO: 4888952 - DNA, 25 bp, Homo sapien
ctcaagttgttaaagtcattctcca

SEQ ID NO: 4888953 - DNA, 25 bp, Homo sapien
gattgcatcggttactgaggcttgt

SEQ ID NO: 4888954 - DNA, 25 bp, Homo sapien
gccttcttctctcaagttgttaaag

SEQ ID NO: 4888955 - DNA, 25 bp, Homo sapien
catcatgtagttcttgtgctgtggt

SEQ ID NO: 4888956 - DNA, 25 bp, Homo sapien
agtgggaactcctcattgtgcagat

SEQ ID NO: 4888957 - DNA, 25 bp, Homo sapien
tgatcccaagttacaaagagtttct

SEQ ID NO: 4888958 - DNA, 25 bp, Homo sapien
gatttcctcagcacttcctatgggc

SEQ ID NO: 4888959 - DNA, 25 bp, Homo sapien
tattggtgcgcattcctagcagaac

SEQ ID NO: 4888960 - DNA, 25 bp, Homo sapien
ctcaaacatttgctaagaggaaagg

SEQ ID NO: 4888961 - DNA, 25 bp, Homo sapien
gcgcccggcaagacccaaatattct

SEQ ID NO: 4888962 - DNA, 25 bp, Homo sapien
cccgtgtatggtcaggaaattggcc

SEQ ID NO: 4888963 - DNA, 25 bp, Homo sapien
gaacattgtcaactgtcttcgtact

SEQ ID NO: 4888964 - DNA, 25 bp, Homo sapien
tggccactgcaacagaatcattcag

SEQ ID NO: 4888965 - DNA, 25 bp, Homo sapien
ttgaagtgtgagtttctggccactg

SEQ ID NO: 4888966 - DNA, 25 bp, Homo sapien
tatagaccagttctttgaagtgtga

SEQ ID NO: 4888967 - DNA, 25 bp, Homo sapien
catccaatccacctttatagaccag

SEQ ID NO: 4888968 - DNA, 25 bp, Homo sapien
gcagtgacttccaacagaggcttcc

SEQ ID NO: 4888969 - DNA, 25 bp, Homo sapien
tccacttggctgcagtgacttccaa

SEQ ID NO: 4888970 - DNA, 25 bp, Homo sapien
agtgacttccaacagaggcttcctc

SEQ ID NO: 4888971 - DNA, 25 bp, Homo sapien
cagatagaatccacttggctgcagt

SEQ ID NO: 4888972 - DNA, 25 bp, Homo sapien
tgaagctgtcgaaaatcttccttgt

SEQ ID NO: 4888973 - DNA, 25 bp, Homo sapien
ttattatgaggtgctccatgcacca

SEQ ID NO: 4888974 - DNA, 25 bp, Homo sapien
ccttgttattatgaggtgctccatg

SEQ ID NO: 4888975 - DNA, 25 bp, Homo sapien
gtcgaaaatcttccttgttattatg

SEQ ID NO: 4888976 - DNA, 25 bp, Homo sapien
tacaagctgccgaattcattagcac

SEQ ID NO: 4888977 - DNA, 25 bp, Homo sapien
ttcattagcacaagcctgcatggac

SEQ ID NO: 4888978 - DNA, 25 bp, Homo sapien
gtacaagctgccgaattcattagca

SEQ ID NO: 4888979 - DNA, 25 bp, Homo sapien
aagcctgcatggaccacctgcctgg

SEQ ID NO: 4888980 - DNA, 25 bp, Homo sapien
caggtctctggagaaaatgcccctt

SEQ ID NO: 4888981 - DNA, 25 bp, Homo sapien
cagacgtcatgggtaaagtcatagg

SEQ ID NO: 4888982 - DNA, 25 bp, Homo sapien
caggatcccgtgcattggctctggc

SEQ ID NO: 4888983 - DNA, 25 bp, Homo sapien
tgggtaaagtcataggctgactgca

SEQ ID NO: 4888984 - DNA, 25 bp, Homo sapien
cagtttctgtgtattgctcaaggtc

SEQ ID NO: 4888985 - DNA, 25 bp, Homo sapien
gctgtcacacatgtcgggaagcaca

SEQ ID NO: 4888986 - DNA, 25 bp, Homo sapien
tgtcgggaagcacagaaggcagttt

SEQ ID NO: 4888987 - DNA, 25 bp, Homo sapien
tggaaaaccagtagatgaagccaca

SEQ ID NO: 4888988 - DNA, 25 bp, Homo sapien
tggaatcccttgctgagttgggagg

SEQ ID NO: 4888989 - DNA, 25 bp, Homo sapien
ggaatcccttgctgagttgggagga

SEQ ID NO: 4888990 - DNA, 25 bp, Homo sapien
ggaaccaagaagtcctgaggcatct

SEQ ID NO: 4888991 - DNA, 25 bp, Homo sapien
gtacatgtagccattaacgcacgtg

SEQ ID NO: 4888992 - DNA, 25 bp, Homo sapien
taataagcataacccataacccagg

SEQ ID NO: 4888993 - DNA, 25 bp, Homo sapien
caagcttctcaagtcagggcctgac

SEQ ID NO: 4888994 - DNA, 25 bp, Homo sapien
caaatcttgaataaaggtggcacat

SEQ ID NO: 4888995 - DNA, 25 bp, Homo sapien
gaataaaggtggcacattctcccat

SEQ ID NO: 4888996 - DNA, 25 bp, Homo sapien
ggccctcattctgttatttgccaaa

SEQ ID NO: 4888997 - DNA, 25 bp, Homo sapien
ttctgcaggccctcattctgttatt

SEQ ID NO: 4888998 - DNA, 25 bp, Homo sapien
tacactgtgtacatcaactgtccaa

SEQ ID NO: 4888999 - DNA, 25 bp, Homo sapien
caagtggatggcactgcctgtttcc

SEQ ID NO: 4889000 - DNA, 25 bp, Homo sapien
cctgaccatcacactagttgataga

SEQ ID NO: 4889001 - DNA, 25 bp, Homo sapien
gactctacttagaactggatgccaa

SEQ ID NO: 4889002 - DNA, 25 bp, Homo sapien
ccaattgttaatgggctgctctcct

SEQ ID NO: 4889003 - DNA, 25 bp, Homo sapien
ccgggttgggttgctgtctgtctct

SEQ ID NO: 4889004 - DNA, 25 bp, Homo sapien
ctggccaattgttaatgggctgctc

SEQ ID NO: 4889005 - DNA, 25 bp, Homo sapien
tctctttgtaatgcaaaccgggttg

SEQ ID NO: 4889006 - DNA, 25 bp, Homo sapien
taagaaagctaaacaggctgtctgg

SEQ ID NO: 4889007 - DNA, 25 bp, Homo sapien
tccaatgaccactaaacctgagtgt

SEQ ID NO: 4889008 - DNA, 25 bp, Homo sapien
gaactggagaccaaatgagagtgat

SEQ ID NO: 4889009 - DNA, 25 bp, Homo sapien
aacatggtggcaacaattaactggg

SEQ ID NO: 4889010 - DNA, 25 bp, Homo sapien
caccgaaaggattggtaggaagcca

SEQ ID NO: 4889011 - DNA, 25 bp, Homo sapien
tattcccccaataaagaggtgtatc

SEQ ID NO: 4889012 - DNA, 25 bp, Homo sapien
aatctaagctgcagaactgttggct

SEQ ID NO: 4889013 - DNA, 25 bp, Homo sapien
aaggtgaggtaactgctgcaccgaa

SEQ ID NO: 4889014 - DNA, 25 bp, Homo sapien
tctcttctcgagtctctcatgccaa

SEQ ID NO: 4889015 - DNA, 25 bp, Homo sapien
tcttctcgagtctctcatgccaaag

SEQ ID NO: 4889016 - DNA, 25 bp, Homo sapien
tttctcttctcgagtctctcatgcc

SEQ ID NO: 4889017 - DNA, 25 bp, Homo sapien
ctcatgccaaagccttgatcggcat

SEQ ID NO: 4889018 - DNA, 25 bp, Homo sapien
aatggtatcatctctcttagggcaa

SEQ ID NO: 4889019 - DNA, 25 bp, Homo sapien
cattcagcacctaaaccagtgattg

SEQ ID NO: 4889020 - DNA, 25 bp, Homo sapien
tccagagagtgaaagaaccatagca

SEQ ID NO: 4889021 - DNA, 25 bp, Homo sapien
ccagtgattgatacacagcaggcac

SEQ ID NO: 4889022 - DNA, 25 bp, Homo sapien
gggaaagtactagcatgaagcaatg

SEQ ID NO: 4889023 - DNA, 25 bp, Homo sapien
tgagccctgggagtgttactctgca

SEQ ID NO: 4889024 - DNA, 25 bp, Homo sapien
caaatttgatatccctgagccctgg

SEQ ID NO: 4889025 - DNA, 25 bp, Homo sapien
gagctctaggcattgatttattgtc

SEQ ID NO: 4889026 - DNA, 25 bp, Homo sapien
tcttttgtacccatagtgtctggca

SEQ ID NO: 4889027 - DNA, 25 bp, Homo sapien
gatgatgggctcatctataattaga

SEQ ID NO: 4889028 - DNA, 25 bp, Homo sapien
tatgtttctggctcgtcacaattac

SEQ ID NO: 4889029 - DNA, 25 bp, Homo sapien
gatttaagtatggagttcaggttct

SEQ ID NO: 4889030 - DNA, 25 bp, Homo sapien
ctcccctcgagtgccaaagttctta

SEQ ID NO: 4889031 - DNA, 25 bp, Homo sapien
tggctgctgtcacagaacaatcctc

SEQ ID NO: 4889032 - DNA, 25 bp, Homo sapien
tgtggcattgagtcctgttaccctg

SEQ ID NO: 4889033 - DNA, 25 bp, Homo sapien
acattctaacgacgccacttctgca

SEQ ID NO: 4889034 - DNA, 25 bp, Homo sapien
ccttgactgctaatagagaaggaca

SEQ ID NO: 4889035 - DNA, 25 bp, Homo sapien
cagtagtcaggtctctttttgcaca

SEQ ID NO: 4889036 - DNA, 25 bp, Homo sapien
aaagtctattgctgcccctttgcaa

SEQ ID NO: 4889037 - DNA, 25 bp, Homo sapien
ctcaaggtcacagccaggactagag

SEQ ID NO: 4889038 - DNA, 25 bp, Homo sapien
acttggtgctgaaccctctgcggta

SEQ ID NO: 4889039 - DNA, 25 bp, Homo sapien
gaaccctctgcggtaagttccttca

SEQ ID NO: 4889040 - DNA, 25 bp, Homo sapien
ttttctcaagacattcctctttccc

SEQ ID NO: 4889041 - DNA, 25 bp, Homo sapien
gcggtaagttccttcagcctgactg

SEQ ID NO: 4889042 - DNA, 25 bp, Homo sapien
tagaagtgaggagaataccccttgg

SEQ ID NO: 4889043 - DNA, 25 bp, Homo sapien
aaaagcatgcactcatgacttcatt

SEQ ID NO: 4889044 - DNA, 25 bp, Homo sapien
caaaaacaggcaatctaatttatga

SEQ ID NO: 4889045 - DNA, 25 bp, Homo sapien
tctatgggaatgcttaatttgtgag

SEQ ID NO: 4889046 - DNA, 25 bp, Homo sapien
catggctaaaacgataaagatggga

SEQ ID NO: 4889047 - DNA, 25 bp, Homo sapien
caagaatgcttataagcggtacaag

SEQ ID NO: 4889048 - DNA, 25 bp, Homo sapien
aagagaactctcacatactgctgga

SEQ ID NO: 4889049 - DNA, 25 bp, Homo sapien
ctggtcgtacctgtaaaagctgaac

SEQ ID NO: 4889050 - DNA, 25 bp, Homo sapien
gatctggtttgcttacaacagggaa

SEQ ID NO: 4889051 - DNA, 25 bp, Homo sapien
caaaaatgaagacgctcctagaatc

SEQ ID NO: 4889052 - DNA, 25 bp, Homo sapien
gagtcacagtgtgcaagaaacggca

SEQ ID NO: 4889053 - DNA, 25 bp, Homo sapien
catctggaggcctcgggatgagtca

SEQ ID NO: 4889054 - DNA, 25 bp, Homo sapien
caaaggggatgagcggttgatgagg

SEQ ID NO: 4889055 - DNA, 25 bp, Homo sapien
gggatgagcggttgatgagggtact

SEQ ID NO: 4889056 - DNA, 25 bp, Homo sapien
ggggatgagcggttgatgagggtac

SEQ ID NO: 4889057 - DNA, 25 bp, Homo sapien
tgctcaaaggggatgagcggttgat

SEQ ID NO: 4889058 - DNA, 25 bp, Homo sapien
gccttgaaccatcctggtagatctt

SEQ ID NO: 4889059 - DNA, 25 bp, Homo sapien
ccttgaaccatcctggtagatcttc

SEQ ID NO: 4889060 - DNA, 25 bp, Homo sapien
cagccttgaaccatcctggtagatc

SEQ ID NO: 4889061 - DNA, 25 bp, Homo sapien
tgaaccatcctggtagatcttcaca

SEQ ID NO: 4889062 - DNA, 25 bp, Homo sapien
aagaaaatgcaagagccaaatgcaa

SEQ ID NO: 4889063 - DNA, 25 bp, Homo sapien
agaaaatgcaagagccaaatgcaag

SEQ ID NO: 4889064 - DNA, 25 bp, Homo sapien
atcaacactatgaagaaaccgcatc

SEQ ID NO: 4889065 - DNA, 25 bp, Homo sapien
tcaacactatgaagaaaccgcatca

SEQ ID NO: 4889066 - DNA, 25 bp, Homo sapien
atgggcaaaataactagctagcatc

SEQ ID NO: 4889067 - DNA, 25 bp, Homo sapien
tagctagcatcataatgacaagatc

SEQ ID NO: 4889068 - DNA, 25 bp, Homo sapien
caattgcaaggccactggcaatgat

SEQ ID NO: 4889069 - DNA, 25 bp, Homo sapien
caatgatggcaggttctattacaga

SEQ ID NO: 4889070 - DNA, 25 bp, Homo sapien
ttacagatttatagcgacaactatc

SEQ ID NO: 4889071 - DNA, 25 bp, Homo sapien
ggtcccattccatagtcaattgcaa

SEQ ID NO: 4889072 - DNA, 25 bp, Homo sapien
caacatgtattgaggaagagagaag

SEQ ID NO: 4889073 - DNA, 25 bp, Homo sapien
caggaagaggagcaacccttattgt

SEQ ID NO: 4889074 - DNA, 25 bp, Homo sapien
agaggagcaacccttattgtataag

SEQ ID NO: 4889075 - DNA, 25 bp, Homo sapien
tataagacaacatgtattgaggaag

SEQ ID NO: 4889076 - DNA, 25 bp, Homo sapien
ggcaggctgggtgagcggcccacca

SEQ ID NO: 4889077 - DNA, 25 bp, Homo sapien
caggcaggccgattgagaatttcct

SEQ ID NO: 4889078 - DNA, 25 bp, Homo sapien
ggcaggccgattgagaatttccttt

SEQ ID NO: 4889079 - DNA, 25 bp, Homo sapien
gcccaccaggaagggtcaatgccaa

SEQ ID NO: 4889080 - DNA, 25 bp, Homo sapien
acctctctcatacaccctgatagag

SEQ ID NO: 4889081 - DNA, 25 bp, Homo sapien
gaggtgctggctcgtcagtgttcat

SEQ ID NO: 4889082 - DNA, 25 bp, Homo sapien
tctcatacaccctgatagaggtgct

SEQ ID NO: 4889083 - DNA, 25 bp, Homo sapien
ctgatagaggtgctggctcgtcagt

SEQ ID NO: 4889084 - DNA, 25 bp, Homo sapien
tccagatgctgcagctggtgaatcc

SEQ ID NO: 4889085 - DNA, 25 bp, Homo sapien
tgctgcagctggtgaatcccactca

SEQ ID NO: 4889086 - DNA, 25 bp, Homo sapien
tgactgtccagatgctgcagctggt

SEQ ID NO: 4889087 - DNA, 25 bp, Homo sapien
gatgctgcagctggtgaatcccact

SEQ ID NO: 4889088 - DNA, 25 bp, Homo sapien
agtcctcagtgacctacaaagagac

SEQ ID NO: 4889089 - DNA, 25 bp, Homo sapien
aagcaagtcctcagtgacctacaaa

SEQ ID NO: 4889090 - DNA, 25 bp, Homo sapien
cataaagcaagtcctcagtgaccta

SEQ ID NO: 4889091 - DNA, 25 bp, Homo sapien
aagtcctcagtgacctacaaagaga

SEQ ID NO: 4889092 - DNA, 25 bp, Homo sapien
ctaaataacacctgatcacttcagt

SEQ ID NO: 4889093 - DNA, 25 bp, Homo sapien
taaataacacctgatcacttcagta

SEQ ID NO: 4889094 - DNA, 25 bp, Homo sapien
ataacacctgatcacttcagtacat

SEQ ID NO: 4889095 - DNA, 25 bp, Homo sapien
aataacacctgatcacttcagtaca

SEQ ID NO: 4889096 - DNA, 25 bp, Homo sapien
ccagagtggtataggcggcccatga

SEQ ID NO: 4889097 - DNA, 25 bp, Homo sapien
tcaggaatctgatgagtgctttgtc

SEQ ID NO: 4889098 - DNA, 25 bp, Homo sapien
tgctttgtcgggcacaggtgtgccc

SEQ ID NO: 4889099 - DNA, 25 bp, Homo sapien
ggccagagtggtataggcggcccat

SEQ ID NO: 4889100 - DNA, 25 bp, Homo sapien
cttgcattccaagggtagcccctga

SEQ ID NO: 4889101 - DNA, 25 bp, Homo sapien
cgcgtgatgaactgtgacctcaatg

SEQ ID NO: 4889102 - DNA, 25 bp, Homo sapien
tcctcacttacttgcattccaaggg

SEQ ID NO: 4889103 - DNA, 25 bp, Homo sapien
tgtgacctcaatgtacactctccct

SEQ ID NO: 4889104 - DNA, 25 bp, Homo sapien
tggaatcccacgaccgactgggtct

SEQ ID NO: 4889105 - DNA, 25 bp, Homo sapien
ggatttctgctagcagaccatcatc

SEQ ID NO: 4889106 - DNA, 25 bp, Homo sapien
gaccatcatcttgtttctctggcag

SEQ ID NO: 4889107 - DNA, 25 bp, Homo sapien
gagctccttgaggatttctgctagc

SEQ ID NO: 4889108 - DNA, 25 bp, Homo sapien
gtggtgaccactgggaacaggtgag

SEQ ID NO: 4889109 - DNA, 25 bp, Homo sapien
gagcctcacaggtctgaagagcact

SEQ ID NO: 4889110 - DNA, 25 bp, Homo sapien
gctgctggttcttgtggtgaccact

SEQ ID NO: 4889111 - DNA, 25 bp, Homo sapien
aggtgaggcagtgtgatgggaccgg

SEQ ID NO: 4889112 - DNA, 25 bp, Homo sapien
tttctccaagatgtaccctccatat

SEQ ID NO: 4889113 - DNA, 25 bp, Homo sapien
ccctccaagagggtctgtgacagtt

SEQ ID NO: 4889114 - DNA, 25 bp, Homo sapien
tctgtccctccaagagggtctgtga

SEQ ID NO: 4889115 - DNA, 25 bp, Homo sapien
caagagggtctgtgacagttttctc

SEQ ID NO: 4889116 - DNA, 25 bp, Homo sapien
ttccatgtggagttgggttacacat

SEQ ID NO: 4889117 - DNA, 25 bp, Homo sapien
tgagaggttttccactccccacaac

SEQ ID NO: 4889118 - DNA, 25 bp, Homo sapien
ctttccatgtggagttgggttacac

SEQ ID NO: 4889119 - DNA, 25 bp, Homo sapien
gagaggttttccactccccacaaca

SEQ ID NO: 4889120 - DNA, 25 bp, Homo sapien
aaatcttgtggccttttccctgaag

SEQ ID NO: 4889121 - DNA, 25 bp, Homo sapien
tgtgacttgtctcataaaggctatg

SEQ ID NO: 4889122 - DNA, 25 bp, Homo sapien
aaaggctatgaatgttggaatggat

SEQ ID NO: 4889123 - DNA, 25 bp, Homo sapien
tcataagtggagagccgccagtcat

SEQ ID NO: 4889124 - DNA, 25 bp, Homo sapien
tgatctgataagaccaggtctgatc

SEQ ID NO: 4889125 - DNA, 25 bp, Homo sapien
tcatatctggagaaccaaagtaaca

SEQ ID NO: 4889126 - DNA, 25 bp, Homo sapien
ctggagaaccaaagtaacatctgag

SEQ ID NO: 4889127 - DNA, 25 bp, Homo sapien
gatctgataagaccaggtctgatcc

SEQ ID NO: 4889128 - DNA, 25 bp, Homo sapien
agctgttcctccgtatagtgctgaa

SEQ ID NO: 4889129 - DNA, 25 bp, Homo sapien
gagaagacttagtgggcagggctat

SEQ ID NO: 4889130 - DNA, 25 bp, Homo sapien
gggctctttagatgtgccttgtggg

SEQ ID NO: 4889131 - DNA, 25 bp, Homo sapien
agggctatgggaactccacttcggc

SEQ ID NO: 4889132 - DNA, 25 bp, Homo sapien
gatagacctacatatggtcactcca

SEQ ID NO: 4889133 - DNA, 25 bp, Homo sapien
tggtcgaatgcaatcagtttgtcag

SEQ ID NO: 4889134 - DNA, 25 bp, Homo sapien
gtcactccatcatagcctgtggcca

SEQ ID NO: 4889135 - DNA, 25 bp, Homo sapien
caatcagtttgtcagtgatagacct

SEQ ID NO: 4889136 - DNA, 25 bp, Homo sapien
agcaaatcctcttagttgcttaggc

SEQ ID NO: 4889137 - DNA, 25 bp, Homo sapien
caaatcctcttagttgcttaggcag

SEQ ID NO: 4889138 - DNA, 25 bp, Homo sapien
agaaaagtccaagtcagcaaatcct

SEQ ID NO: 4889139 - DNA, 25 bp, Homo sapien
ggaaaagagaaaagtccaagtcagc

SEQ ID NO: 4889140 - DNA, 25 bp, Homo sapien
gctccggcagcgtattgagagacaa

SEQ ID NO: 4889141 - DNA, 25 bp, Homo sapien
aattcgtccgtttcctgcagctccg

SEQ ID NO: 4889142 - DNA, 25 bp, Homo sapien
taagaatcgcaaaaggtactccatg

SEQ ID NO: 4889143 - DNA, 25 bp, Homo sapien
tgaacaggatagacacgatggccag

SEQ ID NO: 4889144 - DNA, 25 bp, Homo sapien
ttcattgtaactccgcctaagggtg

SEQ ID NO: 4889145 - DNA, 25 bp, Homo sapien
tcaacaagcccaattcattgtaact

SEQ ID NO: 4889146 - DNA, 25 bp, Homo sapien
ctccgcctaagggtgaaacccagag

SEQ ID NO: 4889147 - DNA, 25 bp, Homo sapien
ccaattcattgtaactccgcctaag

SEQ ID NO: 4889148 - DNA, 25 bp, Homo sapien
caggtgattatcgtcggcggagtcc

SEQ ID NO: 4889149 - DNA, 25 bp, Homo sapien
tcagttccatacttcgagcgaaggc

SEQ ID NO: 4889150 - DNA, 25 bp, Homo sapien
taaatgtcaccatagccaacagtgg

SEQ ID NO: 4889151 - DNA, 25 bp, Homo sapien
ctctgtctctgtgaagtcggtggca

SEQ ID NO: 4889152 - DNA, 25 bp, Homo sapien
ctgtcggtggcattgtcagactgca

SEQ ID NO: 4889153 - DNA, 25 bp, Homo sapien
ttgtcagactgcaaaggactatgta

SEQ ID NO: 4889154 - DNA, 25 bp, Homo sapien
tctggactttagtgggttgctgcct

SEQ ID NO: 4889155 - DNA, 25 bp, Homo sapien
gggtctgtggtgcactgcctctatt

SEQ ID NO: 4889156 - DNA, 25 bp, Homo sapien
taagaggatggtactgatgtgctgc

SEQ ID NO: 4889157 - DNA, 25 bp, Homo sapien
gttgctgccttttagagagctctta

SEQ ID NO: 4889158 - DNA, 25 bp, Homo sapien
aagcaatttgggctggagtccacct

SEQ ID NO: 4889159 - DNA, 25 bp, Homo sapien
gcaaagcaatttgggctggagtcca

SEQ ID NO: 4889160 - DNA, 25 bp, Homo sapien
caaagcaatttgggctggagtccac

SEQ ID NO: 4889161 - DNA, 25 bp, Homo sapien
tgcaaagcaatttgggctggagtcc

SEQ ID NO: 4889162 - DNA, 25 bp, Homo sapien
tcctgggttggaatgaatttctggg

SEQ ID NO: 4889163 - DNA, 25 bp, Homo sapien
atcttgcacccttcttgactactgt

SEQ ID NO: 4889164 - DNA, 25 bp, Homo sapien
tcactcacagcatggtaaatgtctt

SEQ ID NO: 4889165 - DNA, 25 bp, Homo sapien
tacagttgtgacctgtgtcctgcgg

SEQ ID NO: 4889166 - DNA, 25 bp, Homo sapien
atgctggtttcacgtgtgggacaat

SEQ ID NO: 4889167 - DNA, 25 bp, Homo sapien
gctggtttcacgtgtgggacaataa

SEQ ID NO: 4889168 - DNA, 25 bp, Homo sapien
ctggtttcacgtgtgggacaataac

SEQ ID NO: 4889169 - DNA, 25 bp, Homo sapien
tgctggtttcacgtgtgggacaata

SEQ ID NO: 4889170 - DNA, 25 bp, Homo sapien
tgcattttgcaagctcacagtacct

SEQ ID NO: 4889171 - DNA, 25 bp, Homo sapien
gcatttctgtaatcggctgtggcat

SEQ ID NO: 4889172 - DNA, 25 bp, Homo sapien
tgcaacaggaagtctgtacagctcc

SEQ ID NO: 4889173 - DNA, 25 bp, Homo sapien
tgttcatgacacttttgcatccagg

SEQ ID NO: 4889174 - DNA, 25 bp, Homo sapien
tacaggcttgcctagaatcccacat

SEQ ID NO: 4889175 - DNA, 25 bp, Homo sapien
caactctatgagtggcagcggcaat

SEQ ID NO: 4889176 - DNA, 25 bp, Homo sapien
tgtacaaagtgcatcaggctgaggc

SEQ ID NO: 4889177 - DNA, 25 bp, Homo sapien
catgttgagaaatatagggtgaccc

SEQ ID NO: 4889178 - DNA, 25 bp, Homo sapien
gaagtgctacacaagtgcatcctgg

SEQ ID NO: 4889179 - DNA, 25 bp, Homo sapien
taggattcttcgactaggcaagctt

SEQ ID NO: 4889180 - DNA, 25 bp, Homo sapien
gcagtgttgtcagcagaaggcctaa

SEQ ID NO: 4889181 - DNA, 25 bp, Homo sapien
gggcatcagtcaactcttagcgcat

SEQ ID NO: 4889182 - DNA, 25 bp, Homo sapien
gaattgttgactttcctaggccagt

SEQ ID NO: 4889183 - DNA, 25 bp, Homo sapien
taggccagtgtctacaggagagtga

SEQ ID NO: 4889184 - DNA, 25 bp, Homo sapien
gaggccaagttctattcaccaggga

SEQ ID NO: 4889185 - DNA, 25 bp, Homo sapien
aaattaatgggaacagacacttggc

SEQ ID NO: 4889186 - DNA, 25 bp, Homo sapien
ggttgtaccctagcaccatacaggg

SEQ ID NO: 4889187 - DNA, 25 bp, Homo sapien
gcagccctctgcttaatgagtacgt

SEQ ID NO: 4889188 - DNA, 25 bp, Homo sapien
tatgcaaaagatggtcaatgccagt

SEQ ID NO: 4889189 - DNA, 25 bp, Homo sapien
ttaagtgggccaggcagtaagctcc

SEQ ID NO: 4889190 - DNA, 25 bp, Homo sapien
gggtggcatctagctcagcatacag

SEQ ID NO: 4889191 - DNA, 25 bp, Homo sapien
tctctcagactgaccagtagagggc

SEQ ID NO: 4889192 - DNA, 25 bp, Homo sapien
tagagggcactcgacacagggagta

SEQ ID NO: 4889193 - DNA, 25 bp, Homo sapien
aaacattgctcagatgggcgttcgg

SEQ ID NO: 4889194 - DNA, 25 bp, Homo sapien
aggccttgctacgttttctgactgc

SEQ ID NO: 4889195 - DNA, 25 bp, Homo sapien
catagccgctatgtagttaagttaa

SEQ ID NO: 4889196 - DNA, 25 bp, Homo sapien
tactccaggtacactaggtaatgtt

SEQ ID NO: 4889197 - DNA, 25 bp, Homo sapien
tggccgaggcatgtctacaaatggt

SEQ ID NO: 4889198 - DNA, 25 bp, Homo sapien
tgcaagaatttccaagttagcctgt

SEQ ID NO: 4889199 - DNA, 25 bp, Homo sapien
tatctgctttggttgagtaggtgca

SEQ ID NO: 4889200 - DNA, 25 bp, Homo sapien
tagcattagtgttggctgcaccctt

SEQ ID NO: 4889201 - DNA, 25 bp, Homo sapien
taaggactgtacagcgtgcttgctg

SEQ ID NO: 4889202 - DNA, 25 bp, Homo sapien
aatacatttagtgggctggtgggca

SEQ ID NO: 4889203 - DNA, 25 bp, Homo sapien
taaaagcgttattgcactgcctcag

SEQ ID NO: 4889204 - DNA, 25 bp, Homo sapien
tgcagcagacatgggacagtcaaca

SEQ ID NO: 4889205 - DNA, 25 bp, Homo sapien
taaatgattccaacagtgagccagt

SEQ ID NO: 4889206 - DNA, 25 bp, Homo sapien
ctttttccctgcagcattcagagca

SEQ ID NO: 4889207 - DNA, 25 bp, Homo sapien
tgagactagacaacaagacttaacc

SEQ ID NO: 4889208 - DNA, 25 bp, Homo sapien
gactgaaatggagaacaatgccagc

SEQ ID NO: 4889209 - DNA, 25 bp, Homo sapien
gctgaacaaacacgagtatgctaac

SEQ ID NO: 4889210 - DNA, 25 bp, Homo sapien
gcccctctaatttcaggaagctgca

SEQ ID NO: 4889211 - DNA, 25 bp, Homo sapien
ggcccctctaatttcaggaagctgc

SEQ ID NO: 4889212 - DNA, 25 bp, Homo sapien
cccctctaatttcaggaagctgcat

SEQ ID NO: 4889213 - DNA, 25 bp, Homo sapien
tgcccatctcttatgtccatcaaaa

SEQ ID NO: 4889214 - DNA, 25 bp, Homo sapien
cttatgtccatcaaaatgcatcttt

SEQ ID NO: 4889215 - DNA, 25 bp, Homo sapien
gaaatgacacccagattgtcaattg

SEQ ID NO: 4889216 - DNA, 25 bp, Homo sapien
tgaaatgacacccagattgtcaatt

SEQ ID NO: 4889217 - DNA, 25 bp, Homo sapien
tgtggcccaaattgtgcactgtagg

SEQ ID NO: 4889218 - DNA, 25 bp, Homo sapien
ttttttgtggcccaaattgtgcact

SEQ ID NO: 4889219 - DNA, 25 bp, Homo sapien
tttgtggcccaaattgtgcactgta

SEQ ID NO: 4889220 - DNA, 25 bp, Homo sapien
ggcccaaattgtgcactgtaggatt

SEQ ID NO: 4889221 - DNA, 25 bp, Homo sapien
gaaggagaagcatccaattgatgtt

SEQ ID NO: 4889222 - DNA, 25 bp, Homo sapien
gagaagcatccaattgatgttgttg

SEQ ID NO: 4889223 - DNA, 25 bp, Homo sapien
catccaattgatgttgttggcagac

SEQ ID NO: 4889224 - DNA, 25 bp, Homo sapien
cttgaaggagaagcatccaattgat

SEQ ID NO: 4889225 - DNA, 25 bp, Homo sapien
ggcttgactcttgccctcaacagtg

SEQ ID NO: 4889226 - DNA, 25 bp, Homo sapien
ccaggagttgagtgttgactctggc

SEQ ID NO: 4889227 - DNA, 25 bp, Homo sapien
tctggtgaggtgcactggagttgcc

SEQ ID NO: 4889228 - DNA, 25 bp, Homo sapien
ggtgtgatcaccatccatggggcca

SEQ ID NO: 4889229 - DNA, 25 bp, Homo sapien
gtgggctgcaagggctgcaaggact

SEQ ID NO: 4889230 - DNA, 25 bp, Homo sapien
gggctgcaagggctgcaaggactgg

SEQ ID NO: 4889231 - DNA, 25 bp, Homo sapien
gctgcaagggctgcaaggactgggc

SEQ ID NO: 4889232 - DNA, 25 bp, Homo sapien
ctgcaagggctgcaaggactgggcc

SEQ ID NO: 4889233 - DNA, 25 bp, Homo sapien
gcaaatcctcttgcactgtctgatg

SEQ ID NO: 4889234 - DNA, 25 bp, Homo sapien
agcaaatcctcttgcactgtctgat

SEQ ID NO: 4889235 - DNA, 25 bp, Homo sapien
caaatcctcttgcactgtctgatgc

SEQ ID NO: 4889236 - DNA, 25 bp, Homo sapien
ggactgaatatgctaatttggcctg

SEQ ID NO: 4889237 - DNA, 25 bp, Homo sapien
tcaagctagggcaagagatatttgg

SEQ ID NO: 4889238 - DNA, 25 bp, Homo sapien
tttggaattaaatcaaattcagagt

SEQ ID NO: 4889239 - DNA, 25 bp, Homo sapien
tctgaactcaagctagggcaagaga

SEQ ID NO: 4889240 - DNA, 25 bp, Homo sapien
gtgagcgctccctatggaccagaca

SEQ ID NO: 4889241 - DNA, 25 bp, Homo sapien
tgaaagcacttcagcagcaagaagc

SEQ ID NO: 4889242 - DNA, 25 bp, Homo sapien
tcttgagtcctgaccactagggctg

SEQ ID NO: 4889243 - DNA, 25 bp, Homo sapien
tcaactgaatcactgtggagtggtc

SEQ ID NO: 4889244 - DNA, 25 bp, Homo sapien
cagggtcgctagctaccaaaccata

SEQ ID NO: 4889245 - DNA, 25 bp, Homo sapien
tcaataaggtaatgctcaaggactg

SEQ ID NO: 4889246 - DNA, 25 bp, Homo sapien
ttcaaagtatctctaggcgattcca

SEQ ID NO: 4889247 - DNA, 25 bp, Homo sapien
gattccagtatagaaccagggtcgc

SEQ ID NO: 4889248 - DNA, 25 bp, Homo sapien
ggcgagcggttcaagcctggcttct

SEQ ID NO: 4889249 - DNA, 25 bp, Homo sapien
ctgcctctgggcgttgaatttgccg

SEQ ID NO: 4889250 - DNA, 25 bp, Homo sapien
tctgattggccgacacctgttccgg

SEQ ID NO: 4889251 - DNA, 25 bp, Homo sapien
ttctgattggccgacacctgttcct

SEQ ID NO: 4889252 - DNA, 25 bp, Homo sapien
cgattggctcgcattcgagggctcg

SEQ ID NO: 4889253 - DNA, 25 bp, Homo sapien
caggcgccgagcaacgattggctcg

SEQ ID NO: 4889254 - DNA, 25 bp, Homo sapien
cgtggccgcggagagtctcttccgc

SEQ ID NO: 4889255 - DNA, 25 bp, Homo sapien
taaatggctcgcttgggtactgccc

SEQ ID NO: 4889256 - DNA, 25 bp, Homo sapien
tcggggccgctgaggaaacatcctc

SEQ ID NO: 4889257 - DNA, 25 bp, Homo sapien
ctcggggccgctgaggaaacatcct

SEQ ID NO: 4889258 - DNA, 25 bp, Homo sapien
gggccgctgaggaaacatcctccgc

SEQ ID NO: 4889259 - DNA, 25 bp, Homo sapien
ggctcggggccgctgaggaaacatc

SEQ ID NO: 4889260 - DNA, 25 bp, Homo sapien
ccaccaggcccgcgtcctcctcctc

SEQ ID NO: 4889261 - DNA, 25 bp, Homo sapien
caccaggcccgcgtcctcctcctcc

SEQ ID NO: 4889262 - DNA, 25 bp, Homo sapien
gtcctgcggaagtcctcggagcggc

SEQ ID NO: 4889263 - DNA, 25 bp, Homo sapien
cctctgcgctgttgcgggtcctgcg

SEQ ID NO: 4889264 - DNA, 25 bp, Homo sapien
agaggcagaggaaatcgagcatcca

SEQ ID NO: 4889265 - DNA, 25 bp, Homo sapien
ccgtcgcggaaagctcggcaaagag

SEQ ID NO: 4889266 - DNA, 25 bp, Homo sapien
caggaatacctgagtagaaagcgcc

SEQ ID NO: 4889267 - DNA, 25 bp, Homo sapien
tgtaatcttacagctgcgggtggtg

SEQ ID NO: 4889268 - DNA, 25 bp, Homo sapien
gataatgcgcctaaccactcaagag

SEQ ID NO: 4889269 - DNA, 25 bp, Homo sapien
cctggctccagtgttaaccgcaata

SEQ ID NO: 4889270 - DNA, 25 bp, Homo sapien
tctactgccagcctgtgttaggagg

SEQ ID NO: 4889271 - DNA, 25 bp, Homo sapien
catctactgccagcctgtgttagga

SEQ ID NO: 4889272 - DNA, 25 bp, Homo sapien
atctactgccagcctgtgttaggag

SEQ ID NO: 4889273 - DNA, 25 bp, Homo sapien
tatgtatatcgttctcaactggcaa

SEQ ID NO: 4889274 - DNA, 25 bp, Homo sapien
tggcaagctgttagactggatagtc

SEQ ID NO: 4889275 - DNA, 25 bp, Homo sapien
catatgtatatcgttctcaactggc

SEQ ID NO: 4889276 - DNA, 25 bp, Homo sapien
tgtatatcgttctcaactggcaagc

SEQ ID NO: 4889277 - DNA, 25 bp, Homo sapien
caagggtgtaattcgttcatcattt

SEQ ID NO: 4889278 - DNA, 25 bp, Homo sapien
tccaagggtgtaattcgttcatcat

SEQ ID NO: 4889279 - DNA, 25 bp, Homo sapien
agggtgtaattcgttcatcattttc

SEQ ID NO: 4889280 - DNA, 25 bp, Homo sapien
gattccaagggtgtaattcgttcat

SEQ ID NO: 4889281 - DNA, 25 bp, Homo sapien
tccacaacatagaggcaacatatgc

SEQ ID NO: 4889282 - DNA, 25 bp, Homo sapien
ttgagagtgcacaaacccctggttt

SEQ ID NO: 4889283 - DNA, 25 bp, Homo sapien
gaatgacgttttgggctacttactg

SEQ ID NO: 4889284 - DNA, 25 bp, Homo sapien
gacaatcaccacactaattcttggg

SEQ ID NO: 4889285 - DNA, 25 bp, Homo sapien
tgagaatttggatcaccaaatattc

SEQ ID NO: 4889286 - DNA, 25 bp, Homo sapien
ggatcaccaaatattctttcaaaga

SEQ ID NO: 4889287 - DNA, 25 bp, Homo sapien
gcttctttaaagttgccattttcca

SEQ ID NO: 4889288 - DNA, 25 bp, Homo sapien
catatgagaatttggatcaccaaat

SEQ ID NO: 4889289 - DNA, 25 bp, Homo sapien
ttcattagaaaggttgatgattttt

SEQ ID NO: 4889290 - DNA, 25 bp, Homo sapien
tcattagaaaggttgatgatttttc

SEQ ID NO: 4889291 - DNA, 25 bp, Homo sapien
cttcattagaaaggttgatgatttt

SEQ ID NO: 4889292 - DNA, 25 bp, Homo sapien
agaaaggttgatgatttttcactta

SEQ ID NO: 4889293 - DNA, 25 bp, Homo sapien
agtacatatcactcataaatctttt

SEQ ID NO: 4889294 - DNA, 25 bp, Homo sapien
aaagtacatatcactcataaatctt

SEQ ID NO: 4889295 - DNA, 25 bp, Homo sapien
aaaagtacatatcactcataaatct

SEQ ID NO: 4889296 - DNA, 25 bp, Homo sapien
gtacatatcactcataaatctttta

SEQ ID NO: 4889297 - DNA, 25 bp, Homo sapien
catgttagccacctgaccgtgtgat

SEQ ID NO: 4889298 - DNA, 25 bp, Homo sapien
accatgttagccacctgaccgtgtg

SEQ ID NO: 4889299 - DNA, 25 bp, Homo sapien
tcaccatgttagccacctgaccgtg

SEQ ID NO: 4889300 - DNA, 25 bp, Homo sapien
atgttagccacctgaccgtgtgatc

SEQ ID NO: 4889301 - DNA, 25 bp, Homo sapien
aagttattgttcttgtccttttgct

SEQ ID NO: 4889302 - DNA, 25 bp, Homo sapien
tccatttcaacatcattaccactag

SEQ ID NO: 4889303 - DNA, 25 bp, Homo sapien
tcttgagaagttattgttcttgtcc

SEQ ID NO: 4889304 - DNA, 25 bp, Homo sapien
cattaccactaggtttatcttgaga

SEQ ID NO: 4889305 - DNA, 25 bp, Homo sapien
taccgcagactgtttgtcactaaca

SEQ ID NO: 4889306 - DNA, 25 bp, Homo sapien
tcagttaccgcagactgtttgtcac

SEQ ID NO: 4889307 - DNA, 25 bp, Homo sapien
tgaggattcagttaccgcagactgt

SEQ ID NO: 4889308 - DNA, 25 bp, Homo sapien
attcagttaccgcagactgtttgtc

SEQ ID NO: 4889309 - DNA, 25 bp, Homo sapien
tatagatactctaggtgaccagcca

SEQ ID NO: 4889310 - DNA, 25 bp, Homo sapien
aacttcagccttgaggattcatgcc

SEQ ID NO: 4889311 - DNA, 25 bp, Homo sapien
taaactataggactccagagacagc

SEQ ID NO: 4889312 - DNA, 25 bp, Homo sapien
gcttagtaccccatcttaacctgtg

SEQ ID NO: 4889313 - DNA, 25 bp, Homo sapien
tttgaggagttcctactcttctttc

SEQ ID NO: 4889314 - DNA, 25 bp, Homo sapien
gggttccatgttgcaacttagataa

SEQ ID NO: 4889315 - DNA, 25 bp, Homo sapien
taaggtcttgttgctgggttccatg

SEQ ID NO: 4889316 - DNA, 25 bp, Homo sapien
cttattaaggtcttgttgctgggtt

SEQ ID NO: 4889317 - DNA, 25 bp, Homo sapien
taagcatatgtcaattttacaacac

SEQ ID NO: 4889318 - DNA, 25 bp, Homo sapien
agcatatgtcaattttacaacacaa

SEQ ID NO: 4889319 - DNA, 25 bp, Homo sapien
aagcatatgtcaattttacaacaca

SEQ ID NO: 4889320 - DNA, 25 bp, Homo sapien
ttcatagtcagtttggtaagacaaa

SEQ ID NO: 4889321 - DNA, 25 bp, Homo sapien
catagtcagtttggtaagacaaata

SEQ ID NO: 4889322 - DNA, 25 bp, Homo sapien
tattcatagtcagtttggtaagaca

SEQ ID NO: 4889323 - DNA, 25 bp, Homo sapien
tcttattcatagtcagtttggtaag

SEQ ID NO: 4889324 - DNA, 25 bp, Homo sapien
cggctgactctttgaaacaggtatt

SEQ ID NO: 4889325 - DNA, 25 bp, Homo sapien
tttcagtggctcttctgctttcttt

SEQ ID NO: 4889326 - DNA, 25 bp, Homo sapien
tctgctttcagtggctcttctgctt

SEQ ID NO: 4889327 - DNA, 25 bp, Homo sapien
aacaggtattctgctttcagtggct

SEQ ID NO: 4889328 - DNA, 25 bp, Homo sapien
gtctttttctagctcgatgtttttc

SEQ ID NO: 4889329 - DNA, 25 bp, Homo sapien
tctagctcgatgtttttcaggagtt

SEQ ID NO: 4889330 - DNA, 25 bp, Homo sapien
tagctcgatgtttttcaggagttac

SEQ ID NO: 4889331 - DNA, 25 bp, Homo sapien
ctgtctttttctagctcgatgtttt

SEQ ID NO: 4889332 - DNA, 25 bp, Homo sapien
aattttagcctttgacacctacagc

SEQ ID NO: 4889333 - DNA, 25 bp, Homo sapien
aaaagcagtctctagggaaacccag

SEQ ID NO: 4889334 - DNA, 25 bp, Homo sapien
cgttatagttgaaagaggtccctca

SEQ ID NO: 4889335 - DNA, 25 bp, Homo sapien
tacaaacggtaactcctagacagat

SEQ ID NO: 4889336 - DNA, 25 bp, Homo sapien
cctccaaatctccaaataggctttg

SEQ ID NO: 4889337 - DNA, 25 bp, Homo sapien
cattttatgtaagctcagctgccca

SEQ ID NO: 4889338 - DNA, 25 bp, Homo sapien
aaagtggcagtgctacatgtcaact

SEQ ID NO: 4889339 - DNA, 25 bp, Homo sapien
taatgcttagtttcttaaagacgga

SEQ ID NO: 4889340 - DNA, 25 bp, Homo sapien
tcttttaacatgacacttgtccggt

SEQ ID NO: 4889341 - DNA, 25 bp, Homo sapien
catgacacttgtccggttgttgaat

SEQ ID NO: 4889342 - DNA, 25 bp, Homo sapien
cagtattttagaccagtttccctct

SEQ ID NO: 4889343 - DNA, 25 bp, Homo sapien
catatttcctcacgccagatctcaa

SEQ ID NO: 4889344 - DNA, 25 bp, Homo sapien
gaggaaatcagttttagtttcttca

SEQ ID NO: 4889345 - DNA, 25 bp, Homo sapien
cagtcttcgctgtctgaggaaatca

SEQ ID NO: 4889346 - DNA, 25 bp, Homo sapien
tcagtcttcgctgtctgaggaaatc

SEQ ID NO: 4889347 - DNA, 25 bp, Homo sapien
gaaatcagttttagtttcttcatgg

SEQ ID NO: 4889348 - DNA, 25 bp, Homo sapien
ctaaatgtggcagggttcaacaaat

SEQ ID NO: 4889349 - DNA, 25 bp, Homo sapien
tgatcaaaatacttaactgtccttt

SEQ ID NO: 4889350 - DNA, 25 bp, Homo sapien
gtgatcaaaatacttaactgtcctt

SEQ ID NO: 4889351 - DNA, 25 bp, Homo sapien
gatactaaatgtggcagggttcaac

SEQ ID NO: 4889352 - DNA, 25 bp, Homo sapien
ttacgttacagggttgaggtcagcc

SEQ ID NO: 4889353 - DNA, 25 bp, Homo sapien
gagcacagtccccagtaggtaagtt

SEQ ID NO: 4889354 - DNA, 25 bp, Homo sapien
gaaaattcattttaggcaggacgca

SEQ ID NO: 4889355 - DNA, 25 bp, Homo sapien
gagttggagaacatcctgaccagca

SEQ ID NO: 4889356 - DNA, 25 bp, Homo sapien
caagtctattttggctcatgatgcc

SEQ ID NO: 4889357 - DNA, 25 bp, Homo sapien
gccagccttggcactaatcatcaaa

SEQ ID NO: 4889358 - DNA, 25 bp, Homo sapien
ggtgtaacaagataaaggagtcagg

SEQ ID NO: 4889359 - DNA, 25 bp, Homo sapien
gtcaggaagtatatggtactcatcc

SEQ ID NO: 4889360 - DNA, 25 bp, Homo sapien
tctgctaaacacaagagatcgtggc

SEQ ID NO: 4889361 - DNA, 25 bp, Homo sapien
gtggctgattcctttgctaccgcaa

SEQ ID NO: 4889362 - DNA, 25 bp, Homo sapien
aggtgcaggcctagagtcctctcag

SEQ ID NO: 4889363 - DNA, 25 bp, Homo sapien
tgtggccttccggactacctagtac

SEQ ID NO: 4889364 - DNA, 25 bp, Homo sapien
taactgcttgccagaacaaggtcca

SEQ ID NO: 4889365 - DNA, 25 bp, Homo sapien
tataacctgtggctaaatccagcct

SEQ ID NO: 4889366 - DNA, 25 bp, Homo sapien
tacagaagaagtttgccacgcacct

SEQ ID NO: 4889367 - DNA, 25 bp, Homo sapien
taatttgaggcagagtatacagact

SEQ ID NO: 4889368 - DNA, 25 bp, Homo sapien
cctgctttgtgatagatggacatgg

SEQ ID NO: 4889369 - DNA, 25 bp, Homo sapien
gctggactctgtaaacatctgttga

SEQ ID NO: 4889370 - DNA, 25 bp, Homo sapien
tatcaatataatggctctcagctcc

SEQ ID NO: 4889371 - DNA, 25 bp, Homo sapien
ccagttatcaatataatggctctca

SEQ ID NO: 4889372 - DNA, 25 bp, Homo sapien
caatgcaatccgaaggagggcctac

SEQ ID NO: 4889373 - DNA, 25 bp, Homo sapien
tccacgggtatcgagatcacaggcc

SEQ ID NO: 4889374 - DNA, 25 bp, Homo sapien
tgtgccacaattgagaggcccctgg

SEQ ID NO: 4889375 - DNA, 25 bp, Homo sapien
caaaaaacggtcgtggtgatgcaca

SEQ ID NO: 4889376 - DNA, 25 bp, Homo sapien
agttatcttttcgtgttctctgtaa

SEQ ID NO: 4889377 - DNA, 25 bp, Homo sapien
ggagttatcttttcgtgttctctgt

SEQ ID NO: 4889378 - DNA, 25 bp, Homo sapien
tcttttcgtgttctctgtaattccc

SEQ ID NO: 4889379 - DNA, 25 bp, Homo sapien
actcgtctaatctttcttcaaagtt

SEQ ID NO: 4889380 - DNA, 25 bp, Homo sapien
tctccctgctttctcttggtgggca

SEQ ID NO: 4889381 - DNA, 25 bp, Homo sapien
ccttcatttagttatttacccagca

SEQ ID NO: 4889382 - DNA, 25 bp, Homo sapien
gtcaattttagatctctccctgctt

SEQ ID NO: 4889383 - DNA, 25 bp, Homo sapien
catttagttatttacccagcagtca

SEQ ID NO: 4889384 - DNA, 25 bp, Homo sapien
agagcaagcacggaaagctttttca

SEQ ID NO: 4889385 - DNA, 25 bp, Homo sapien
ggagagcaagcacggaaagcttttt

SEQ ID NO: 4889386 - DNA, 25 bp, Homo sapien
gagagcaagcacggaaagctttttc

SEQ ID NO: 4889387 - DNA, 25 bp, Homo sapien
aggagagcaagcacggaaagctttt

SEQ ID NO: 4889388 - DNA, 25 bp, Homo sapien
tgatgtccggtgagggccctctcct

SEQ ID NO: 4889389 - DNA, 25 bp, Homo sapien
ttggtttggagatggatgccttctc

SEQ ID NO: 4889390 - DNA, 25 bp, Homo sapien
cagtagatctgatgtccggtgaggg

SEQ ID NO: 4889391 - DNA, 25 bp, Homo sapien
tggtttggagatggatgccttctcg

SEQ ID NO: 4889392 - DNA, 25 bp, Homo sapien
caaagagcaccgtgagggaggtcac

SEQ ID NO: 4889393 - DNA, 25 bp, Homo sapien
aacaggagtccccatgaagacagca

SEQ ID NO: 4889394 - DNA, 25 bp, Homo sapien
gaaagccaaacacctagatctacgg

SEQ ID NO: 4889395 - DNA, 25 bp, Homo sapien
gagaataagtccacagcagatgaga

SEQ ID NO: 4889396 - DNA, 25 bp, Homo sapien
catgtttaaggacctgggatgacaa

SEQ ID NO: 4889397 - DNA, 25 bp, Homo sapien
tgctggaaaagctaagcccctttca

SEQ ID NO: 4889398 - DNA, 25 bp, Homo sapien
gaaggcatagacgtcattacaggtg

SEQ ID NO: 4889399 - DNA, 25 bp, Homo sapien
caatgacctagaggcaaaatggcat

SEQ ID NO: 4889400 - DNA, 25 bp, Homo sapien
caggtggcccgtgagacacagaata

SEQ ID NO: 4889401 - DNA, 25 bp, Homo sapien
taactcagtccgattattggtgacg

SEQ ID NO: 4889402 - DNA, 25 bp, Homo sapien
catcattgccacactctgaagtaga

SEQ ID NO: 4889403 - DNA, 25 bp, Homo sapien
tatacaggtatgcacactctacaca

SEQ ID NO: 4889404 - DNA, 25 bp, Homo sapien
taggccactgctcattacagcaagt

SEQ ID NO: 4889405 - DNA, 25 bp, Homo sapien
ccttaaaggtgattgacacgtaact

SEQ ID NO: 4889406 - DNA, 25 bp, Homo sapien
caaatgcccttggaggtgacaggct

SEQ ID NO: 4889407 - DNA, 25 bp, Homo sapien
gaagatgtactcactacctgctcca

SEQ ID NO: 4889408 - DNA, 25 bp, Homo sapien
tagagttgccttagagtaatcctcc

SEQ ID NO: 4889409 - DNA, 25 bp, Homo sapien
tcttgtagaggtccacaacacccaa

SEQ ID NO: 4889410 - DNA, 25 bp, Homo sapien
ggaattgcagacagatactctcaca

SEQ ID NO: 4889411 - DNA, 25 bp, Homo sapien
tcttagcctggattcttgggtgtgc

SEQ ID NO: 4889412 - DNA, 25 bp, Homo sapien
ggcttcatagcccccactctctttc

SEQ ID NO: 4889413 - DNA, 25 bp, Homo sapien
tctctttctccaaacattcctgcat

SEQ ID NO: 4889414 - DNA, 25 bp, Homo sapien
ctggcttcatagcccccactctctt

SEQ ID NO: 4889415 - DNA, 25 bp, Homo sapien
cttcatagcccccactctctttctc

SEQ ID NO: 4889416 - DNA, 25 bp, Homo sapien
tcagttccggttcatagactattcc

SEQ ID NO: 4889417 - DNA, 25 bp, Homo sapien
ctctccaggtgtgttgtaattcagt

SEQ ID NO: 4889418 - DNA, 25 bp, Homo sapien
caggtgtgttgtaattcagttccgg

SEQ ID NO: 4889419 - DNA, 25 bp, Homo sapien
gactattcctaccagtcctctgaag

SEQ ID NO: 4889420 - DNA, 25 bp, Homo sapien
agcactgattggactgagcatcaac

SEQ ID NO: 4889421 - DNA, 25 bp, Homo sapien
gggatcttctgaaactaatttgttc

SEQ ID NO: 4889422 - DNA, 25 bp, Homo sapien
accaccatccaccaagccctggagt

SEQ ID NO: 4889423 - DNA, 25 bp, Homo sapien
tctgcctccttagtgggtccatctc

SEQ ID NO: 4889424 - DNA, 25 bp, Homo sapien
tccatattgtggctagagggatctt

SEQ ID NO: 4889425 - DNA, 25 bp, Homo sapien
gaagagtttcaagggcagacatcgg

SEQ ID NO: 4889426 - DNA, 25 bp, Homo sapien
ctagaagagtttcaagggcagacat

SEQ ID NO: 4889427 - DNA, 25 bp, Homo sapien
tagaagagtttcaagggcagacatc

SEQ ID NO: 4889428 - DNA, 25 bp, Homo sapien
tcctagaagagtttcaagggcagac

SEQ ID NO: 4889429 - DNA, 25 bp, Homo sapien
gaagctttattctctttaggcctct

SEQ ID NO: 4889430 - DNA, 25 bp, Homo sapien
ccttctgtttatcacgaaggtaggg

SEQ ID NO: 4889431 - DNA, 25 bp, Homo sapien
gggtgatcaccttctgattatctgt

SEQ ID NO: 4889432 - DNA, 25 bp, Homo sapien
cacagttgttcagcccttctgttta

SEQ ID NO: 4889433 - DNA, 25 bp, Homo sapien
aaagaagccgattaggagccagagc

SEQ ID NO: 4889434 - DNA, 25 bp, Homo sapien
catggtcattagtgttatttaggga

SEQ ID NO: 4889435 - DNA, 25 bp, Homo sapien
gggcctgcttcgcttctctgtacag

SEQ ID NO: 4889436 - DNA, 25 bp, Homo sapien
gagccagagcttgggttctgggcct

SEQ ID NO: 4889437 - DNA, 25 bp, Homo sapien
cagtccctaaatgaagacattgtct

SEQ ID NO: 4889438 - DNA, 25 bp, Homo sapien
gaggtccatggactgtggctcgtat

SEQ ID NO: 4889439 - DNA, 25 bp, Homo sapien
tgtggctcgtatcccagtccctaaa

SEQ ID NO: 4889440 - DNA, 25 bp, Homo sapien
tcgtatcccagtccctaaatgaaga

SEQ ID NO: 4889441 - DNA, 25 bp, Homo sapien
gaaggggagacttctgggtctccca

SEQ ID NO: 4889442 - DNA, 25 bp, Homo sapien
gctgtttagatttgcaactggaata

SEQ ID NO: 4889443 - DNA, 25 bp, Homo sapien
agaatactgctgtttagatttgcaa

SEQ ID NO: 4889444 - DNA, 25 bp, Homo sapien
tactgctgtttagatttgcaactgg

SEQ ID NO: 4889445 - DNA, 25 bp, Homo sapien
ggtcctgatccagggtttatctgtt

SEQ ID NO: 4889446 - DNA, 25 bp, Homo sapien
ttagaggatgagttgtggactcctg

SEQ ID NO: 4889447 - DNA, 25 bp, Homo sapien
ctgatccagggtttatctgtttctc

SEQ ID NO: 4889448 - DNA, 25 bp, Homo sapien
tcctgatccagggtttatctgtttc

SEQ ID NO: 4889449 - DNA, 25 bp, Homo sapien
cagagactggccatcaagctccctg

SEQ ID NO: 4889450 - DNA, 25 bp, Homo sapien
tcatgtctcattcttgtccagagac

SEQ ID NO: 4889451 - DNA, 25 bp, Homo sapien
actggccatcaagctccctgagaaa

SEQ ID NO: 4889452 - DNA, 25 bp, Homo sapien
cttgtccagagactggccatcaagc

SEQ ID NO: 4889453 - DNA, 25 bp, Homo sapien
gggcctccgaacagatttgcctggg

SEQ ID NO: 4889454 - DNA, 25 bp, Homo sapien
taaggcatttggaccttccaaggaa

SEQ ID NO: 4889455 - DNA, 25 bp, Homo sapien
gatacccgcaggctctaaggcattt

SEQ ID NO: 4889456 - DNA, 25 bp, Homo sapien
cagagacatgctaggactccacggg

SEQ ID NO: 4889457 - DNA, 25 bp, Homo sapien
ctatttaagacgttagagggtctgt

SEQ ID NO: 4889458 - DNA, 25 bp, Homo sapien
ctggactttctatttaagacgttag

SEQ ID NO: 4889459 - DNA, 25 bp, Homo sapien
tctatttaagacgttagagggtctg

SEQ ID NO: 4889460 - DNA, 25 bp, Homo sapien
tggactttctatttaagacgttaga

SEQ ID NO: 4889461 - DNA, 25 bp, Homo sapien
ggcagaccacgagtttccttaatga

SEQ ID NO: 4889462 - DNA, 25 bp, Homo sapien
tgcaaccacagttgttgaggaggta

SEQ ID NO: 4889463 - DNA, 25 bp, Homo sapien
tgagttcttacataaacatcaggtc

SEQ ID NO: 4889464 - DNA, 25 bp, Homo sapien
tgggttcatgcacacatgggcccgt

SEQ ID NO: 4889465 - DNA, 25 bp, Homo sapien
gatggactacagctctgttccaggc

SEQ ID NO: 4889466 - DNA, 25 bp, Homo sapien
atcttctcgaatcttcttgttctgg

SEQ ID NO: 4889467 - DNA, 25 bp, Homo sapien
cactcaagagcagcagatggactac

SEQ ID NO: 4889468 - DNA, 25 bp, Homo sapien
ctccttttcacatcttctcgaatct

SEQ ID NO: 4889469 - DNA, 25 bp, Homo sapien
ctagatggcgcagtgacacaggccc

SEQ ID NO: 4889470 - DNA, 25 bp, Homo sapien
actagatggcgcagtgacacaggcc

SEQ ID NO: 4889471 - DNA, 25 bp, Homo sapien
gaatgagcgtggaatgatggttacc

SEQ ID NO: 4889472 - DNA, 25 bp, Homo sapien
caaagctttggaccctgtagtgtga

SEQ ID NO: 4889473 - DNA, 25 bp, Homo sapien
cactagctgtgttatggaaggtaac

SEQ ID NO: 4889474 - DNA, 25 bp, Homo sapien
gaagtagaaaccatagaatgagcgt

SEQ ID NO: 4889475 - DNA, 25 bp, Homo sapien
gatatcctttccatgcaaaaagtgc

SEQ ID NO: 4889476 - DNA, 25 bp, Homo sapien
ctttctattccatagttttgagttc

SEQ ID NO: 4889477 - DNA, 25 bp, Homo sapien
ggacaccaaatatccttatttggga

SEQ ID NO: 4889478 - DNA, 25 bp, Homo sapien
caaatatccttatttgggatcatct

SEQ ID NO: 4889479 - DNA, 25 bp, Homo sapien
ttcagggacaccaaatatccttatt

SEQ ID NO: 4889480 - DNA, 25 bp, Homo sapien
agacaggcaggtccctgaggagaaa

SEQ ID NO: 4889481 - DNA, 25 bp, Homo sapien
caagcataacaaggcctcttcactg

SEQ ID NO: 4889482 - DNA, 25 bp, Homo sapien
ctgtgtagacaggcaggtccctgag

SEQ ID NO: 4889483 - DNA, 25 bp, Homo sapien
gcacatcagcgcctttactgccaag

SEQ ID NO: 4889484 - DNA, 25 bp, Homo sapien
tcttggcctgatagaataaaatgcc

SEQ ID NO: 4889485 - DNA, 25 bp, Homo sapien
atttattgttagtccctgatggcct

SEQ ID NO: 4889486 - DNA, 25 bp, Homo sapien
tctttggtataaccttggtctggaa

SEQ ID NO: 4889487 - DNA, 25 bp, Homo sapien
aatgttcagaaatgcagatgtccgc

SEQ ID NO: 4889488 - DNA, 25 bp, Homo sapien
tatgcccagccagctgttacttaaa

SEQ ID NO: 4889489 - DNA, 25 bp, Homo sapien
cactatgcttggctgttttaaaatt

SEQ ID NO: 4889490 - DNA, 25 bp, Homo sapien
ccactatgcttggctgttttaaaat

SEQ ID NO: 4889491 - DNA, 25 bp, Homo sapien
ccattatgcccagccagctgttact

SEQ ID NO: 4889492 - DNA, 25 bp, Homo sapien
gctgtgaatagaaaccatacctctg

SEQ ID NO: 4889493 - DNA, 25 bp, Homo sapien
tccaggcaatccagagtacttacat

SEQ ID NO: 4889494 - DNA, 25 bp, Homo sapien
gggctccagtctctgccatattaat

SEQ ID NO: 4889495 - DNA, 25 bp, Homo sapien
tgtgaccactctaaatactctggac

SEQ ID NO: 4889496 - DNA, 25 bp, Homo sapien
tcgtgcaaaatcagggtcgagtctg

SEQ ID NO: 4889497 - DNA, 25 bp, Homo sapien
gcatcttttgccatacttacgtgag

SEQ ID NO: 4889498 - DNA, 25 bp, Homo sapien
tctgtgtgaaagacatctcttgggt

SEQ ID NO: 4889499 - DNA, 25 bp, Homo sapien
tgtcttcccttaactactgtggcaa

SEQ ID NO: 4889500 - DNA, 25 bp, Homo sapien
tgattatttttctaagctggttggt

SEQ ID NO: 4889501 - DNA, 25 bp, Homo sapien
tctaccatgattatttttctaagct

SEQ ID NO: 4889502 - DNA, 25 bp, Homo sapien
atgattatttttctaagctggttgg

SEQ ID NO: 4889503 - DNA, 25 bp, Homo sapien
gtgtctaccatgattatttttctaa

SEQ ID NO: 4889504 - DNA, 25 bp, Homo sapien
caggcttattagaagaatgaactaa

SEQ ID NO: 4889505 - DNA, 25 bp, Homo sapien
tcaacaggcttattagaagaatgaa

SEQ ID NO: 4889506 - DNA, 25 bp, Homo sapien
gagatctatactgttggaaaacgct

SEQ ID NO: 4889507 - DNA, 25 bp, Homo sapien
gaccagatcaacaggcttattagaa

SEQ ID NO: 4889508 - DNA, 25 bp, Homo sapien
aatgaactaatctacaagcgtggtt

SEQ ID NO: 4889509 - DNA, 25 bp, Homo sapien
cccaatctgaagtcagtaaatgaac

SEQ ID NO: 4889510 - DNA, 25 bp, Homo sapien
gaagtcagtaaatgaactaatctac

SEQ ID NO: 4889511 - DNA, 25 bp, Homo sapien
ggtaccccaatctgaagtcagtaaa

SEQ ID NO: 4889512 - DNA, 25 bp, Homo sapien
agtgagcccaaaggttcgaaaggtg

SEQ ID NO: 4889513 - DNA, 25 bp, Homo sapien
gattgtagagccatatattgcatgg

SEQ ID NO: 4889514 - DNA, 25 bp, Homo sapien
caacaaggcttcgattaacatgctg

SEQ ID NO: 4889515 - DNA, 25 bp, Homo sapien
caatggaacctttgtgaagctcaac

SEQ ID NO: 4889516 - DNA, 25 bp, Homo sapien
gaatataggcagatgtacagaactg

SEQ ID NO: 4889517 - DNA, 25 bp, Homo sapien
aagcaaagcactatcacaaggaata

SEQ ID NO: 4889518 - DNA, 25 bp, Homo sapien
cccaaattggcgtttgtcatcagaa

SEQ ID NO: 4889519 - DNA, 25 bp, Homo sapien
tacagaactgaaattcgaatggcga

SEQ ID NO: 4889520 - DNA, 25 bp, Homo sapien
cctgagaaagaagtttgcccaaaag

SEQ ID NO: 4889521 - DNA, 25 bp, Homo sapien
gcctgagaaagaagtttgcccaaaa

SEQ ID NO: 4889522 - DNA, 25 bp, Homo sapien
aattgtgttcgtccttggctggtgc

SEQ ID NO: 4889523 - DNA, 25 bp, Homo sapien
tcttaggacggaggttttggagatc

SEQ ID NO: 4889524 - DNA, 25 bp, Homo sapien
ccagtcctcggtagagggtctttcg

SEQ ID NO: 4889525 - DNA, 25 bp, Homo sapien
ggaggcgcagaacctctgaattgtg

SEQ ID NO: 4889526 - DNA, 25 bp, Homo sapien
tgagtcgtggggcttctctcgcgaa

SEQ ID NO: 4889527 - DNA, 25 bp, Homo sapien
gaagtctttaagtggacagtacgca

SEQ ID NO: 4889528 - DNA, 25 bp, Homo sapien
gtggacagtacgcatgcgccaactt

SEQ ID NO: 4889529 - DNA, 25 bp, Homo sapien
ggcttctctcgcgaagtctttaagt

SEQ ID NO: 4889530 - DNA, 25 bp, Homo sapien
ctccggggcgcttgtcacagaggcc

SEQ ID NO: 4889531 - DNA, 25 bp, Homo sapien
ggtgcccgccgggttggagtgcgcg

SEQ ID NO: 4889532 - DNA, 25 bp, Homo sapien
cacagaggccgggacgagaaggctg

SEQ ID NO: 4889533 - DNA, 25 bp, Homo sapien
gcacgagcccagtgcctgcgtccgc

SEQ ID NO: 4889534 - DNA, 25 bp, Homo sapien
agccgtctcctcgttgctttgcgtg

SEQ ID NO: 4889535 - DNA, 25 bp, Homo sapien
gtagatgtggcgcaccatgccagcc

SEQ ID NO: 4889536 - DNA, 25 bp, Homo sapien
ccgcctccaggtcgcggtagatgtg

SEQ ID NO: 4889537 - DNA, 25 bp, Homo sapien
tgaaagtgaccacgaagaactccac

SEQ ID NO: 4889538 - DNA, 25 bp, Homo sapien
cttctccctggtaatacagaagtga

SEQ ID NO: 4889539 - DNA, 25 bp, Homo sapien
cctttatcaggaagcgaattccact

SEQ ID NO: 4889540 - DNA, 25 bp, Homo sapien
aagtgatcgcgttcctttatcagga

SEQ ID NO: 4889541 - DNA, 25 bp, Homo sapien
gaagcgaattccactcgtctcccaa

SEQ ID NO: 4889542 - DNA, 25 bp, Homo sapien
gcttgctggagctaaagacacctgc

SEQ ID NO: 4889543 - DNA, 25 bp, Homo sapien
tcacatggcgatcagtaggacaaag

SEQ ID NO: 4889544 - DNA, 25 bp, Homo sapien
tgtgacaagcccaatacaagtagac

SEQ ID NO: 4889545 - DNA, 25 bp, Homo sapien
aaatttctaacgctgcaaggcttgc

SEQ ID NO: 4889546 - DNA, 25 bp, Homo sapien
tgcaagttacagtggggcagaattt

SEQ ID NO: 4889547 - DNA, 25 bp, Homo sapien
ctgcaagttacagtggggcagaatt

SEQ ID NO: 4889548 - DNA, 25 bp, Homo sapien
tgaccaggactgagacttcgccaac

SEQ ID NO: 4889549 - DNA, 25 bp, Homo sapien
tgaccatcatggttctctcaatgag

SEQ ID NO: 4889550 - DNA, 25 bp, Homo sapien
tgcggactctttcagccgtcaggta

SEQ ID NO: 4889551 - DNA, 25 bp, Homo sapien
ccagaagtgtgcatggcaattgacc

SEQ ID NO: 4889552 - DNA, 25 bp, Homo sapien
tctcattaaggagggcccagcaaag

SEQ ID NO: 4889553 - DNA, 25 bp, Homo sapien
aaccttctcattaaggagggcccag

SEQ ID NO: 4889554 - DNA, 25 bp, Homo sapien
ccttctcattaaggagggcccagca

SEQ ID NO: 4889555 - DNA, 25 bp, Homo sapien
caaccttctcattaaggagggccca

SEQ ID NO: 4889556 - DNA, 25 bp, Homo sapien
tagggtgatatttgcgaggcactgt

SEQ ID NO: 4889557 - DNA, 25 bp, Homo sapien
gaggcactgtctaacccgagagagt

SEQ ID NO: 4889558 - DNA, 25 bp, Homo sapien
ctagggtcctattagggtgatattt

SEQ ID NO: 4889559 - DNA, 25 bp, Homo sapien
taacccgagagagtcccgaagcgtc

SEQ ID NO: 4889560 - DNA, 25 bp, Homo sapien
tattgaatcgtatctgtctacaaaa

SEQ ID NO: 4889561 - DNA, 25 bp, Homo sapien
tctttattgaatcgtatctgtctac

SEQ ID NO: 4889562 - DNA, 25 bp, Homo sapien
gaatcgtatctgtctacaaaaggaa

SEQ ID NO: 4889563 - DNA, 25 bp, Homo sapien
ctccttctttattgaatcgtatctg

SEQ ID NO: 4889564 - DNA, 25 bp, Homo sapien
gctgaagttgcccaaactgtatttg

SEQ ID NO: 4889565 - DNA, 25 bp, Homo sapien
gaagttgcccaaactgtatttggtg

SEQ ID NO: 4889566 - DNA, 25 bp, Homo sapien
ctgaagttgcccaaactgtatttgg

SEQ ID NO: 4889567 - DNA, 25 bp, Homo sapien
gcaaggactttaattcagttcccca

SEQ ID NO: 4889568 - DNA, 25 bp, Homo sapien
cgcttcgcataagaggactactgga

SEQ ID NO: 4889569 - DNA, 25 bp, Homo sapien
caggtggctcttgtgacactcctta

SEQ ID NO: 4889570 - DNA, 25 bp, Homo sapien
gaaaagttgccaccaacgcttcgca

SEQ ID NO: 4889571 - DNA, 25 bp, Homo sapien
caaagtgacgtcattaccatcaagg

SEQ ID NO: 4889572 - DNA, 25 bp, Homo sapien
tgagatagagaccagcaaaaggtga

SEQ ID NO: 4889573 - DNA, 25 bp, Homo sapien
gagaccagcaaaaggtgaagtgcta

SEQ ID NO: 4889574 - DNA, 25 bp, Homo sapien
gtccttgacactgcttgacagcaca

SEQ ID NO: 4889575 - DNA, 25 bp, Homo sapien
cttgacactgcttgacagcacaaag

SEQ ID NO: 4889576 - DNA, 25 bp, Homo sapien
gctctgactagaaactcagacacca

SEQ ID NO: 4889577 - DNA, 25 bp, Homo sapien
ggctctgactagaaactcagacacc

SEQ ID NO: 4889578 - DNA, 25 bp, Homo sapien
tgaacaatcccaaggaacttgcaac

SEQ ID NO: 4889579 - DNA, 25 bp, Homo sapien
gcaactgtcacaatatgaccatgat

SEQ ID NO: 4889580 - DNA, 25 bp, Homo sapien
ctcaactccggcagtactgaacaat

SEQ ID NO: 4889581 - DNA, 25 bp, Homo sapien
tcaactccggcagtactgaacaatc

SEQ ID NO: 4889582 - DNA, 25 bp, Homo sapien
cagttttggcaaggtgaccacaacc

SEQ ID NO: 4889583 - DNA, 25 bp, Homo sapien
gaccacaaccgaatgtgaacctctg

SEQ ID NO: 4889584 - DNA, 25 bp, Homo sapien
tgcctcctgccatcgtcaagtgaag

SEQ ID NO: 4889585 - DNA, 25 bp, Homo sapien
taatacaagatagctcagttttggc

SEQ ID NO: 4889586 - DNA, 25 bp, Homo sapien
gaacatgccagtgtctacaagataa

SEQ ID NO: 4889587 - DNA, 25 bp, Homo sapien
gattcggcagcctctgaacatgcca

SEQ ID NO: 4889588 - DNA, 25 bp, Homo sapien
caagataagggcaaaccaaggttgt

SEQ ID NO: 4889589 - DNA, 25 bp, Homo sapien
gcagcctttagttcatggctcaggg

SEQ ID NO: 4889590 - DNA, 25 bp, Homo sapien
gaacacattttattggcacagtctg

SEQ ID NO: 4889591 - DNA, 25 bp, Homo sapien
cacagtctggagaacaagttgggaa

SEQ ID NO: 4889592 - DNA, 25 bp, Homo sapien
gctgctatgctacactggaggaaac

SEQ ID NO: 4889593 - DNA, 25 bp, Homo sapien
caagcctgactttggagtgattcaa

SEQ ID NO: 4889594 - DNA, 25 bp, Homo sapien
atggcctgcttcacacagtaatcag

SEQ ID NO: 4889595 - DNA, 25 bp, Homo sapien
tcagtgaggatggccttcatggcct

SEQ ID NO: 4889596 - DNA, 25 bp, Homo sapien
tgaaggtcacgatgtacatgaggcg

SEQ ID NO: 4889597 - DNA, 25 bp, Homo sapien
gtggcagaaaaggctcaatttcttt

SEQ ID NO: 4889598 - DNA, 25 bp, Homo sapien
gggtacatacacttgtccgctccta

SEQ ID NO: 4889599 - DNA, 25 bp, Homo sapien
ggaaccgatacatgcacacaactgc

SEQ ID NO: 4889600 - DNA, 25 bp, Homo sapien
tacacttgtccgctcctaggaaccg

SEQ ID NO: 4889601 - DNA, 25 bp, Homo sapien
gtccgctcctaggaaccgatacatg

SEQ ID NO: 4889602 - DNA, 25 bp, Homo sapien
caacacaagtttagaatccataaaa

SEQ ID NO: 4889603 - DNA, 25 bp, Homo sapien
ggactgaaacatcttgatcatcttc

SEQ ID NO: 4889604 - DNA, 25 bp, Homo sapien
gatgtgcactggactgaaacatctt

SEQ ID NO: 4889605 - DNA, 25 bp, Homo sapien
catcttctgatagaagtaatattcc

SEQ ID NO: 4889606 - DNA, 25 bp, Homo sapien
ttctgcctaaaaggaccctgttggc

SEQ ID NO: 4889607 - DNA, 25 bp, Homo sapien
tggtaacctgaagatgtcacactgc

SEQ ID NO: 4889608 - DNA, 25 bp, Homo sapien
gaaattgcgaagatgtcaactggct

SEQ ID NO: 4889609 - DNA, 25 bp, Homo sapien
gataagagtccatccaaagaaatga

SEQ ID NO: 4889610 - DNA, 25 bp, Homo sapien
gaacattagcacacaccaggacctt

SEQ ID NO: 4889611 - DNA, 25 bp, Homo sapien
taacatcggctatttgagtgcaggc

SEQ ID NO: 4889612 - DNA, 25 bp, Homo sapien
cagatttgatctgtggtgcagccaa

SEQ ID NO: 4889613 - DNA, 25 bp, Homo sapien
ggacctttcctatatgtagacacag

SEQ ID NO: 4889614 - DNA, 25 bp, Homo sapien
tgttgagacccttcagagtacttct

SEQ ID NO: 4889615 - DNA, 25 bp, Homo sapien
tctggtgtactccaggctcgctggg

SEQ ID NO: 4889616 - DNA, 25 bp, Homo sapien
gcctccattgttataagggccataa

SEQ ID NO: 4889617 - DNA, 25 bp, Homo sapien
tgggaggcagacctggataatctct

SEQ ID NO: 4889618 - DNA, 25 bp, Homo sapien
ctgggatgggcgcttcggcagatgc

SEQ ID NO: 4889619 - DNA, 25 bp, Homo sapien
catgtgtacttgtgagttacctgca

SEQ ID NO: 4889620 - DNA, 25 bp, Homo sapien
tcagtcataatgagtataatctact

SEQ ID NO: 4889621 - DNA, 25 bp, Homo sapien
tggcatgtgcacataggtacttaca

SEQ ID NO: 4889622 - DNA, 25 bp, Homo sapien
tttccttcccttactgagatgtcat

SEQ ID NO: 4889623 - DNA, 25 bp, Homo sapien
ctttatctccagctagtgtgctttg

SEQ ID NO: 4889624 - DNA, 25 bp, Homo sapien
tggtgttctaatactaacttggagt

SEQ ID NO: 4889625 - DNA, 25 bp, Homo sapien
tactttcctgggatgagcacagcaa

SEQ ID NO: 4889626 - DNA, 25 bp, Homo sapien
tctagacattctgcctctagattca

SEQ ID NO: 4889627 - DNA, 25 bp, Homo sapien
tttaccgcctctgtgtcctctaagg

SEQ ID NO: 4889628 - DNA, 25 bp, Homo sapien
ggtatgggtctcttctatgctcaaa

SEQ ID NO: 4889629 - DNA, 25 bp, Homo sapien
agcaggtagcccaaacagtgtccct

SEQ ID NO: 4889630 - DNA, 25 bp, Homo sapien
cttggttattgccacttccccaggg

SEQ ID NO: 4889631 - DNA, 25 bp, Homo sapien
ggaagagtttctctgctagtggctt

SEQ ID NO: 4889632 - DNA, 25 bp, Homo sapien
gaagagtttctctgctagtggcttt

SEQ ID NO: 4889633 - DNA, 25 bp, Homo sapien
aggagcagtttcttcctcttctgct

SEQ ID NO: 4889634 - DNA, 25 bp, Homo sapien
gaacctgcccatctgaggagcagtt

SEQ ID NO: 4889635 - DNA, 25 bp, Homo sapien
ctgaggagcagtttcttcctcttct

SEQ ID NO: 4889636 - DNA, 25 bp, Homo sapien
tgcccatctgaggagcagtttcttc

SEQ ID NO: 4889637 - DNA, 25 bp, Homo sapien
gcagagctactgaggacggtcacca

SEQ ID NO: 4889638 - DNA, 25 bp, Homo sapien
tactgaggacggtcaccacctttgt

SEQ ID NO: 4889639 - DNA, 25 bp, Homo sapien
ctgagtgtcctaattccacagcaga

SEQ ID NO: 4889640 - DNA, 25 bp, Homo sapien
ctaattccacagcagagctactgag

SEQ ID NO: 4889641 - DNA, 25 bp, Homo sapien
tgtggagtaggacttcagtcaggct

SEQ ID NO: 4889642 - DNA, 25 bp, Homo sapien
gagtaggacttcagtcaggctgtcc

SEQ ID NO: 4889643 - DNA, 25 bp, Homo sapien
ctgctttgtggagtaggacttcagt

SEQ ID NO: 4889644 - DNA, 25 bp, Homo sapien
gtaggacttcagtcaggctgtccca

SEQ ID NO: 4889645 - DNA, 25 bp, Homo sapien
taacgaagagccaatgggctgtcag

SEQ ID NO: 4889646 - DNA, 25 bp, Homo sapien
ggagtcagataacgaagagccaatg

SEQ ID NO: 4889647 - DNA, 25 bp, Homo sapien
gtgactgtgagtcaccgcaggaccg

SEQ ID NO: 4889648 - DNA, 25 bp, Homo sapien
cacggacaggacatgtgcggctctg

SEQ ID NO: 4889649 - DNA, 25 bp, Homo sapien
tgaaaaaatgcccttgggactgatc

SEQ ID NO: 4889650 - DNA, 25 bp, Homo sapien
gctcaccacttaagtcatttatact

SEQ ID NO: 4889651 - DNA, 25 bp, Homo sapien
ctgaaaaaatgcccttgggactgat

SEQ ID NO: 4889652 - DNA, 25 bp, Homo sapien
catttatactttggctgcccaggcc

SEQ ID NO: 4889653 - DNA, 25 bp, Homo sapien
ttcagggttgaggccgactctagtg

SEQ ID NO: 4889654 - DNA, 25 bp, Homo sapien
tcacagtgctttagcgccattaaag

SEQ ID NO: 4889655 - DNA, 25 bp, Homo sapien
gctttaggcgcttcctcgcttcaca

SEQ ID NO: 4889656 - DNA, 25 bp, Homo sapien
tgagcaagggctccaaaccaggatt

SEQ ID NO: 4889657 - DNA, 25 bp, Homo sapien
gctctcagagggcaaaagtattctt

SEQ ID NO: 4889658 - DNA, 25 bp, Homo sapien
tttattctgtgttaagaatcagctc

SEQ ID NO: 4889659 - DNA, 25 bp, Homo sapien
atggtgtcttagtcccattatgctg

SEQ ID NO: 4889660 - DNA, 25 bp, Homo sapien
ttctgatggtgtcttagtcccatta

SEQ ID NO: 4889661 - DNA, 25 bp, Homo sapien
aaacacaggattcccgaggagggag

SEQ ID NO: 4889662 - DNA, 25 bp, Homo sapien
atgagatgtgcaggccaaccagggc

SEQ ID NO: 4889663 - DNA, 25 bp, Homo sapien
ctgtttcccatgagatgtgcaggcc

SEQ ID NO: 4889664 - DNA, 25 bp, Homo sapien
ttcccatgagatgtgcaggccaacc

SEQ ID NO: 4889665 - DNA, 25 bp, Homo sapien
ctccgggttccgagttggctgaact

SEQ ID NO: 4889666 - DNA, 25 bp, Homo sapien
gccctcagtggcaatagttctagtc

SEQ ID NO: 4889667 - DNA, 25 bp, Homo sapien
cgatgatgccgactgtgttcttctg

SEQ ID NO: 4889668 - DNA, 25 bp, Homo sapien
tctgggctcttcacaaagggaggta

SEQ ID NO: 4889669 - DNA, 25 bp, Homo sapien
cttaatggaaactgcataggctttg

SEQ ID NO: 4889670 - DNA, 25 bp, Homo sapien
tgcttaatggaaactgcataggctt

SEQ ID NO: 4889671 - DNA, 25 bp, Homo sapien
gcttaatggaaactgcataggcttt

SEQ ID NO: 4889672 - DNA, 25 bp, Homo sapien
ttaatggaaactgcataggctttgg

SEQ ID NO: 4889673 - DNA, 25 bp, Homo sapien
cagtaatggacgattctagctaggg

SEQ ID NO: 4889674 - DNA, 25 bp, Homo sapien
gctacctggcatgtaaagatgtcag

SEQ ID NO: 4889675 - DNA, 25 bp, Homo sapien
gggacccagtgctgctttacaattg

SEQ ID NO: 4889676 - DNA, 25 bp, Homo sapien
cctacctctctaaaaggccagggtg

SEQ ID NO: 4889677 - DNA, 25 bp, Homo sapien
cccacagagatataaacggatgaat

SEQ ID NO: 4889678 - DNA, 25 bp, Homo sapien
ctcacagaaggcactcccacagaga

SEQ ID NO: 4889679 - DNA, 25 bp, Homo sapien
tcacagaaggcactcccacagagat

SEQ ID NO: 4889680 - DNA, 25 bp, Homo sapien
tataaacggatgaatgctttcttca

SEQ ID NO: 4889681 - DNA, 25 bp, Homo sapien
ggaacagaggcaaaacctgcatcat

SEQ ID NO: 4889682 - DNA, 25 bp, Homo sapien
ctcttgttccggggaacagaggcaa

SEQ ID NO: 4889683 - DNA, 25 bp, Homo sapien
cggggaacagaggcaaaacctgcat

SEQ ID NO: 4889684 - DNA, 25 bp, Homo sapien
tcttgttccggggaacagaggcaaa

SEQ ID NO: 4889685 - DNA, 25 bp, Homo sapien
gccacaaccggcatttgggtaccag

SEQ ID NO: 4889686 - DNA, 25 bp, Homo sapien
cttttgctgctgcaaatactgccac

SEQ ID NO: 4889687 - DNA, 25 bp, Homo sapien
tacatggagcaacttgttttctaaa

SEQ ID NO: 4889688 - DNA, 25 bp, Homo sapien
ccagtttcttgcatacatggagcaa

SEQ ID NO: 4889689 - DNA, 25 bp, Homo sapien
tcatgaattatagactcgtttccaa

SEQ ID NO: 4889690 - DNA, 25 bp, Homo sapien
catgaattatagactcgtttccaac

SEQ ID NO: 4889691 - DNA, 25 bp, Homo sapien
cagagacgcctggagttcgtgcatt

SEQ ID NO: 4889692 - DNA, 25 bp, Homo sapien
cctggagttcgtgcattggttcctt

SEQ ID NO: 4889693 - DNA, 25 bp, Homo sapien
ttgcctggcagagacgcctggagtt

SEQ ID NO: 4889694 - DNA, 25 bp, Homo sapien
agttcgtgcattggttccttctcag

SEQ ID NO: 4889695 - DNA, 25 bp, Homo sapien
cttctgcatggctcgatcctgctag

SEQ ID NO: 4889696 - DNA, 25 bp, Homo sapien
ccccacaggttcgtcatcgttgagt

SEQ ID NO: 4889697 - DNA, 25 bp, Homo sapien
tcgatcctgctaggaaatgaagcag

SEQ ID NO: 4889698 - DNA, 25 bp, Homo sapien
aatgaagcaggattctccgacaccg

SEQ ID NO: 4889699 - DNA, 25 bp, Homo sapien
ctgtcttcctcagagagagagggcg

SEQ ID NO: 4889700 - DNA, 25 bp, Homo sapien
tccaggccagacaaacgaatgtaaa

SEQ ID NO: 4889701 - DNA, 25 bp, Homo sapien
tgcgcttccttggaagacggcaggc

SEQ ID NO: 4889702 - DNA, 25 bp, Homo sapien
agggcggataatgcagactgcgctt

SEQ ID NO: 4889703 - DNA, 25 bp, Homo sapien
gagttcctgtctccagcccacgatt

SEQ ID NO: 4889704 - DNA, 25 bp, Homo sapien
tggccaggtgttgtccccagcagtc

SEQ ID NO: 4889705 - DNA, 25 bp, Homo sapien
tgtctccagcccacgatttgccgat

SEQ ID NO: 4889706 - DNA, 25 bp, Homo sapien
catggcagcgatgtacaacaaagac

SEQ ID NO: 4889707 - DNA, 25 bp, Homo sapien
tacgagaacatgtttcactgtctgc

SEQ ID NO: 4889708 - DNA, 25 bp, Homo sapien
tgcaagccctgctcgcttcgaggtc

SEQ ID NO: 4889709 - DNA, 25 bp, Homo sapien
tgtttgcgagctctccgtggatctg

SEQ ID NO: 4889710 - DNA, 25 bp, Homo sapien
gggaagccacttttgactcctctga

SEQ ID NO: 4889711 - DNA, 25 bp, Homo sapien
ttaaataacggggagtgcaatggag

SEQ ID NO: 4889712 - DNA, 25 bp, Homo sapien
aacggggagtgcaatggagaaacac

SEQ ID NO: 4889713 - DNA, 25 bp, Homo sapien
taacggggagtgcaatggagaaaca

SEQ ID NO: 4889714 - DNA, 25 bp, Homo sapien
aataacggggagtgcaatggagaaa

SEQ ID NO: 4889715 - DNA, 25 bp, Homo sapien
tgataagccacaaatgcagaactga

SEQ ID NO: 4889716 - DNA, 25 bp, Homo sapien
gacacttgtttcgttattggtgaca

SEQ ID NO: 4889717 - DNA, 25 bp, Homo sapien
gccaaactctgtacagagatgcgtg

SEQ ID NO: 4889718 - DNA, 25 bp, Homo sapien
tgacaatggacccagcactgccaaa

SEQ ID NO: 4889719 - DNA, 25 bp, Homo sapien
taggatgttctctgtgagcccgagg

SEQ ID NO: 4889720 - DNA, 25 bp, Homo sapien
gctgcagaacatccctcgggctggc

SEQ ID NO: 4889721 - DNA, 25 bp, Homo sapien
tctgtgagcccgagggtggcataaa

SEQ ID NO: 4889722 - DNA, 25 bp, Homo sapien
ctgggagccataggatgttctctgt

SEQ ID NO: 4889723 - DNA, 25 bp, Homo sapien
agcacccacacacatttccccacct

SEQ ID NO: 4889724 - DNA, 25 bp, Homo sapien
aaaaagggatcagggaagcagcagc

SEQ ID NO: 4889725 - DNA, 25 bp, Homo sapien
tttcaaaaaagggatcagggaagca

SEQ ID NO: 4889726 - DNA, 25 bp, Homo sapien
tttccccacctccaagcatcttaat

SEQ ID NO: 4889727 - DNA, 25 bp, Homo sapien
ccgtgagaggaccccgatcctccat

SEQ ID NO: 4889728 - DNA, 25 bp, Homo sapien
cgtgagaggaccccgatcctccatt

SEQ ID NO: 4889729 - DNA, 25 bp, Homo sapien
gtgagaggaccccgatcctccattc

SEQ ID NO: 4889730 - DNA, 25 bp, Homo sapien
tcaactttctcttcccctagttgac

SEQ ID NO: 4889731 - DNA, 25 bp, Homo sapien
tagttgacacccttggtctccctgg

SEQ ID NO: 4889732 - DNA, 25 bp, Homo sapien
ctagttcaactttctcttcccctag

SEQ ID NO: 4889733 - DNA, 25 bp, Homo sapien
gctacccccattgccggaggccttg

SEQ ID NO: 4889734 - DNA, 25 bp, Homo sapien
ttcccagtaacgcatattcagcagc

SEQ ID NO: 4889735 - DNA, 25 bp, Homo sapien
gagttcaggctgccaacacactgcc

SEQ ID NO: 4889736 - DNA, 25 bp, Homo sapien
tccattcccagtaacgcatattcag

SEQ ID NO: 4889737 - DNA, 25 bp, Homo sapien
caggacattgtggtgccttctccag

SEQ ID NO: 4889738 - DNA, 25 bp, Homo sapien
tcgaatgacaggctggccgagctcg

SEQ ID NO: 4889739 - DNA, 25 bp, Homo sapien
gtctacagcccttgaagttcatagt

SEQ ID NO: 4889740 - DNA, 25 bp, Homo sapien
gaaggaatgttgatcgaatgacagg

SEQ ID NO: 4889741 - DNA, 25 bp, Homo sapien
catcacagagtctacagcccttgaa

SEQ ID NO: 4889742 - DNA, 25 bp, Homo sapien
gccctgactcttctcccgtgaccac

SEQ ID NO: 4889743 - DNA, 25 bp, Homo sapien
gactcttctcccgtgaccaccagcg

SEQ ID NO: 4889744 - DNA, 25 bp, Homo sapien
gcccagggcccaagttactgacagc

SEQ ID NO: 4889745 - DNA, 25 bp, Homo sapien
agggcccaagttactgacagcctgg

SEQ ID NO: 4889746 - DNA, 25 bp, Homo sapien
gatctattgcctcatcaaagactgt

SEQ ID NO: 4889747 - DNA, 25 bp, Homo sapien
aaaccgtctttgcagccgaaaccat

SEQ ID NO: 4889748 - DNA, 25 bp, Homo sapien
aaaacagccatgtaagatctattgc

SEQ ID NO: 4889749 - DNA, 25 bp, Homo sapien
tgtggaaactgatccagaaaccgtc

SEQ ID NO: 4889750 - DNA, 25 bp, Homo sapien
ccttggcagcaagaatctcagaccc

SEQ ID NO: 4889751 - DNA, 25 bp, Homo sapien
agcaagaatctcagaccctttaagt

SEQ ID NO: 4889752 - DNA, 25 bp, Homo sapien
ttccttggcagcaagaatctcagac

SEQ ID NO: 4889753 - DNA, 25 bp, Homo sapien
tggcagcaagaatctcagacccttt

SEQ ID NO: 4889754 - DNA, 25 bp, Homo sapien
tccttgttgtaggagcatccagtgc

SEQ ID NO: 4889755 - DNA, 25 bp, Homo sapien
tgtctttcaagtagctcaagagggc

SEQ ID NO: 4889756 - DNA, 25 bp, Homo sapien
aagagggctggcgttcctttggcct

SEQ ID NO: 4889757 - DNA, 25 bp, Homo sapien
ctgtctccttgttgtaggagcatcc

SEQ ID NO: 4889758 - DNA, 25 bp, Homo sapien
ctgtgtggcacacaatcctgcccac

SEQ ID NO: 4889759 - DNA, 25 bp, Homo sapien
cattagcatccatctgtgtggcaca

SEQ ID NO: 4889760 - DNA, 25 bp, Homo sapien
ccattagcatccatctgtgtggcac

SEQ ID NO: 4889761 - DNA, 25 bp, Homo sapien
catctgtgtggcacacaatcctgcc

SEQ ID NO: 4889762 - DNA, 25 bp, Homo sapien
tgctgtagcaggagtcagtgcccac

SEQ ID NO: 4889763 - DNA, 25 bp, Homo sapien
cctcggagatggcaactgctgctgc

SEQ ID NO: 4889764 - DNA, 25 bp, Homo sapien
tgaagaaacgatgctgctgtcagcg

SEQ ID NO: 4889765 - DNA, 25 bp, Homo sapien
tataaggactagcaattggcacagc

SEQ ID NO: 4889766 - DNA, 25 bp, Homo sapien
ttctccttattgatttgcaaacatt

SEQ ID NO: 4889767 - DNA, 25 bp, Homo sapien
ccaacgtcatcgcattgttcaggct

SEQ ID NO: 4889768 - DNA, 25 bp, Homo sapien
ctgctcgacccaacatgacaatagg

SEQ ID NO: 4889769 - DNA, 25 bp, Homo sapien
aacactacatggtctaactgctcga

SEQ ID NO: 4889770 - DNA, 25 bp, Homo sapien
gcttgtgttcagttatattctctct

SEQ ID NO: 4889771 - DNA, 25 bp, Homo sapien
tgttatgattgttttgtcgtggtgc

SEQ ID NO: 4889772 - DNA, 25 bp, Homo sapien
caaatactgcttgacaattcgaaaa

SEQ ID NO: 4889773 - DNA, 25 bp, Homo sapien
aatagagaagttgggtttggttctg

SEQ ID NO: 4889774 - DNA, 25 bp, Homo sapien
tgaggacctactgtccattcctctg

SEQ ID NO: 4889775 - DNA, 25 bp, Homo sapien
tcccctcagtctgcatgaggaccta

SEQ ID NO: 4889776 - DNA, 25 bp, Homo sapien
caaggtggaaaatttggatgtcaca

SEQ ID NO: 4889777 - DNA, 25 bp, Homo sapien
caatacctttatgcttactttggaa

SEQ ID NO: 4889778 - DNA, 25 bp, Homo sapien
gcttgttgctatctgtacatcacag

SEQ ID NO: 4889779 - DNA, 25 bp, Homo sapien
tcgcttcacctttgcaatcccagtg

SEQ ID NO: 4889780 - DNA, 25 bp, Homo sapien
ccttcacccttgatttttattcgct

SEQ ID NO: 4889781 - DNA, 25 bp, Homo sapien
gaacatgttgagcttgttgctatct

SEQ ID NO: 4889782 - DNA, 25 bp, Homo sapien
gtattggcatgatcctgtagaaaga

SEQ ID NO: 4889783 - DNA, 25 bp, Homo sapien
ttccatagcgttctttaatctgtaa

SEQ ID NO: 4889784 - DNA, 25 bp, Homo sapien
gccgctctgagggttctgtccgtac

SEQ ID NO: 4889785 - DNA, 25 bp, Homo sapien
taatctgtaaagtgttgtttctggg

SEQ ID NO: 4889786 - DNA, 25 bp, Homo sapien
gcatctccataccagctggccaggg

SEQ ID NO: 4889787 - DNA, 25 bp, Homo sapien
cagggagcgtgtggataacgctgac

SEQ ID NO: 4889788 - DNA, 25 bp, Homo sapien
cagggggggcatctccataccagct

SEQ ID NO: 4889789 - DNA, 25 bp, Homo sapien
tggccagggagcgtgtggataacgc

SEQ ID NO: 4889790 - DNA, 25 bp, Homo sapien
tgctgagaggaaagccaaccagggc

SEQ ID NO: 4889791 - DNA, 25 bp, Homo sapien
gagaggaaagccaaccagggcaaga

SEQ ID NO: 4889792 - DNA, 25 bp, Homo sapien
gaaagccaaccagggcaagatgctg

SEQ ID NO: 4889793 - DNA, 25 bp, Homo sapien
ggaaagccaaccagggcaagatgct

SEQ ID NO: 4889794 - DNA, 25 bp, Homo sapien
gaaaggtgatgactgtctgttagcg

SEQ ID NO: 4889795 - DNA, 25 bp, Homo sapien
gatgactgtctgttagcgcccagcg

SEQ ID NO: 4889796 - DNA, 25 bp, Homo sapien
tgactgtctgttagcgcccagcgtg

SEQ ID NO: 4889797 - DNA, 25 bp, Homo sapien
ggtgatgactgtctgttagcgccca

SEQ ID NO: 4889798 - DNA, 25 bp, Homo sapien
cattgctgtatgtcctttcctcaca

SEQ ID NO: 4889799 - DNA, 25 bp, Homo sapien
tccctgtggctcaccccaaatgctg

SEQ ID NO: 4889800 - DNA, 25 bp, Homo sapien
aatctgagtggctttgcgccccagc

SEQ ID NO: 4889801 - DNA, 25 bp, Homo sapien
atttcctccagggtgacttgagcac

SEQ ID NO: 4889802 - DNA, 25 bp, Homo sapien
gatgcagtcttctaaacggagacgt

SEQ ID NO: 4889803 - DNA, 25 bp, Homo sapien
cggagacgttgaggaaccaggtata

SEQ ID NO: 4889804 - DNA, 25 bp, Homo sapien
cacaatactgtccatggagaacccc

SEQ ID NO: 4889805 - DNA, 25 bp, Homo sapien
ggtgaaggtcaggtccaaatgtgtc

SEQ ID NO: 4889806 - DNA, 25 bp, Homo sapien
tggaagcggctgattaacaccctct

SEQ ID NO: 4889807 - DNA, 25 bp, Homo sapien
tcttaagaggctccaggacatggtc

SEQ ID NO: 4889808 - DNA, 25 bp, Homo sapien
actgacagtggcttgggctagaacc

SEQ ID NO: 4889809 - DNA, 25 bp, Homo sapien
ttctaagggatttaagccatcggcc

SEQ ID NO: 4889810 - DNA, 25 bp, Homo sapien
ggattgtcgttgctctgtccaccaa

SEQ ID NO: 4889811 - DNA, 25 bp, Homo sapien
gctccagctggattgtcgttgctct

SEQ ID NO: 4889812 - DNA, 25 bp, Homo sapien
ccagctggattgtcgttgctctgtc

SEQ ID NO: 4889813 - DNA, 25 bp, Homo sapien
gaaccatcgctccagctggattgtc

SEQ ID NO: 4889814 - DNA, 25 bp, Homo sapien
ctcctcagagtacccgctgtccgcg

SEQ ID NO: 4889815 - DNA, 25 bp, Homo sapien
cgcacgtggcggtgggaatattccc

SEQ ID NO: 4889816 - DNA, 25 bp, Homo sapien
aatattcccgcgctgagcactggcc

SEQ ID NO: 4889817 - DNA, 25 bp, Homo sapien
cagggaccggctgtccacttgcgtt

SEQ ID NO: 4889818 - DNA, 25 bp, Homo sapien
ggccaaggagggacccatcctgatg

SEQ ID NO: 4889819 - DNA, 25 bp, Homo sapien
cagcagatgcttgcggcctaactcg

SEQ ID NO: 4889820 - DNA, 25 bp, Homo sapien
gtccctgctcgaaggccgctgttgg

SEQ ID NO: 4889821 - DNA, 25 bp, Homo sapien
tctgcctggtgtcctcagaagaggg

SEQ ID NO: 4889822 - DNA, 25 bp, Homo sapien
gggtccagatagtgaccctgcagag

SEQ ID NO: 4889823 - DNA, 25 bp, Homo sapien
acgggctgggtccagatagtgaccc

SEQ ID NO: 4889824 - DNA, 25 bp, Homo sapien
gctgggtccagatagtgaccctgca

SEQ ID NO: 4889825 - DNA, 25 bp, Homo sapien
tctgcagaaggtgcccaacgggctg

SEQ ID NO: 4889826 - DNA, 25 bp, Homo sapien
actgcctcttggaaggtatctggcc

SEQ ID NO: 4889827 - DNA, 25 bp, Homo sapien
gttgtccactgatcccttgcctctg

SEQ ID NO: 4889828 - DNA, 25 bp, Homo sapien
agcccggcatatcctgctgcctttg

SEQ ID NO: 4889829 - DNA, 25 bp, Homo sapien
gcctttgtccaggactgcctcttgg

SEQ ID NO: 4889830 - DNA, 25 bp, Homo sapien
ttggctaaaaagatctccagttggt

SEQ ID NO: 4889831 - DNA, 25 bp, Homo sapien
cttaaccttttttgagccatggact

SEQ ID NO: 4889832 - DNA, 25 bp, Homo sapien
gactctttggcaatcgggtgaaact

SEQ ID NO: 4889833 - DNA, 25 bp, Homo sapien
catctcatccgtggctttggttaaa

SEQ ID NO: 4889834 - DNA, 25 bp, Homo sapien
ttgctccagagcagttgaacttttc

SEQ ID NO: 4889835 - DNA, 25 bp, Homo sapien
gttgctccagagcagttgaactttt

SEQ ID NO: 4889836 - DNA, 25 bp, Homo sapien
cagttgctccagagcagttgaactt

SEQ ID NO: 4889837 - DNA, 25 bp, Homo sapien
atattttgaagccctgaactttcca

SEQ ID NO: 4889838 - DNA, 25 bp, Homo sapien
caggagggtggctggtaactacaaa

SEQ ID NO: 4889839 - DNA, 25 bp, Homo sapien
gagggtacttgagatgatcagcatt

SEQ ID NO: 4889840 - DNA, 25 bp, Homo sapien
tttagggcaaccacaccctgagatg

SEQ ID NO: 4889841 - DNA, 25 bp, Homo sapien
ctaatcagcttggagcaaaaacagc

SEQ ID NO: 4889842 - DNA, 25 bp, Homo sapien
ccacatcctcatgtgctggcattag

SEQ ID NO: 4889843 - DNA, 25 bp, Homo sapien
ctacaggctttgccggcagcgtgtg

SEQ ID NO: 4889844 - DNA, 25 bp, Homo sapien
gcacacggataactgggttcttcag

SEQ ID NO: 4889845 - DNA, 25 bp, Homo sapien
cttcagtgtttgtgaggatggattc

SEQ ID NO: 4889846 - DNA, 25 bp, Homo sapien
gacacccctattaaagaagctgacg

SEQ ID NO: 4889847 - DNA, 25 bp, Homo sapien
cactgtgttagaggaacgctttctc

SEQ ID NO: 4889848 - DNA, 25 bp, Homo sapien
cagcaaggtctgtcaggagtgccca

SEQ ID NO: 4889849 - DNA, 25 bp, Homo sapien
tgtgagtttccccaactgagctcag

SEQ ID NO: 4889850 - DNA, 25 bp, Homo sapien
agcatgccgccaagctcctttaact

SEQ ID NO: 4889851 - DNA, 25 bp, Homo sapien
ttgaaatagacacggtttgggttga

SEQ ID NO: 4889852 - DNA, 25 bp, Homo sapien
cacggtttgggttgaacctgcactt

SEQ ID NO: 4889853 - DNA, 25 bp, Homo sapien
ccttgggcagcatgccgccaagctc

SEQ ID NO: 4889854 - DNA, 25 bp, Homo sapien
caaaaggtctcagccaaggaggaca

SEQ ID NO: 4889855 - DNA, 25 bp, Homo sapien
tgaaatactagaaagcgagcccctg

SEQ ID NO: 4889856 - DNA, 25 bp, Homo sapien
tcagagcaagtgtgcagcgaagccc

SEQ ID NO: 4889857 - DNA, 25 bp, Homo sapien
gaggtttgcaagagtggccctgacc

SEQ ID NO: 4889858 - DNA, 25 bp, Homo sapien
gcttaaggcacagacgtttagtgac

SEQ ID NO: 4889859 - DNA, 25 bp, Homo sapien
acttcagtgttattgcttaaggcac

SEQ ID NO: 4889860 - DNA, 25 bp, Homo sapien
tactacttcagtgttattgcttaag

SEQ ID NO: 4889861 - DNA, 25 bp, Homo sapien
cagacgtttagtgacaggaaggaga

SEQ ID NO: 4889862 - DNA, 25 bp, Homo sapien
gagtcagagtcatttactagccaca

SEQ ID NO: 4889863 - DNA, 25 bp, Homo sapien
gcaatgcccaactaaaagatgtaaa

SEQ ID NO: 4889864 - DNA, 25 bp, Homo sapien
aactcagtaacgtggaacaaatgga

SEQ ID NO: 4889865 - DNA, 25 bp, Homo sapien
ccgactttcttctggctcgttggag

SEQ ID NO: 4889866 - DNA, 25 bp, Homo sapien
ctcgcactcctggtttgggctgctc

SEQ ID NO: 4889867 - DNA, 25 bp, Homo sapien
gcactcctggtttgggctgctctgg

SEQ ID NO: 4889868 - DNA, 25 bp, Homo sapien
ccagagcccaatggggacaagtccc

SEQ ID NO: 4889869 - DNA, 25 bp, Homo sapien
agcccaatggggacaagtcccacat

SEQ ID NO: 4889870 - DNA, 25 bp, Homo sapien
catgtgtgggatgtgacgatatgtg

SEQ ID NO: 4889871 - DNA, 25 bp, Homo sapien
ggcggagctgcgtgagcttgaggtt

SEQ ID NO: 4889872 - DNA, 25 bp, Homo sapien
cagggcccttagtaacagcccgttg

SEQ ID NO: 4889873 - DNA, 25 bp, Homo sapien
gtaacagcccgttgggtgttgtgac

SEQ ID NO: 4889874 - DNA, 25 bp, Homo sapien
caattctagtacactaccgccctgt

SEQ ID NO: 4889875 - DNA, 25 bp, Homo sapien
ggcgaatccattctgcattcccttc

SEQ ID NO: 4889876 - DNA, 25 bp, Homo sapien
acacactgatgaaaggcgaatccat

SEQ ID NO: 4889877 - DNA, 25 bp, Homo sapien
caactgtatagcttttcatgaagcc

SEQ ID NO: 4889878 - DNA, 25 bp, Homo sapien
aaacgcccagtgtgcacattgcttg

SEQ ID NO: 4889879 - DNA, 25 bp, Homo sapien
caaaaacgcccagtgtgcacattgc

SEQ ID NO: 4889880 - DNA, 25 bp, Homo sapien
acattgcttggacttgaggcgtgtg

SEQ ID NO: 4889881 - DNA, 25 bp, Homo sapien
cttggacttgaggcgtgtggatttt

SEQ ID NO: 4889882 - DNA, 25 bp, Homo sapien
ggccaatgttcagatcacaagacaa

SEQ ID NO: 4889883 - DNA, 25 bp, Homo sapien
gggaagaaggtgccagtcctcacac

SEQ ID NO: 4889884 - DNA, 25 bp, Homo sapien
actggcaaatccaagcctctggccg

SEQ ID NO: 4889885 - DNA, 25 bp, Homo sapien
catcgcatatccatatatctgaggt

SEQ ID NO: 4889886 - DNA, 25 bp, Homo sapien
ctttggccagcaagtcatctgtggg

SEQ ID NO: 4889887 - DNA, 25 bp, Homo sapien
gccagcaagtcatctgtgggtataa

SEQ ID NO: 4889888 - DNA, 25 bp, Homo sapien
ttggccagcaagtcatctgtgggta

SEQ ID NO: 4889889 - DNA, 25 bp, Homo sapien
ggccagcaagtcatctgtgggtata

SEQ ID NO: 4889890 - DNA, 25 bp, Homo sapien
ccacttcttagtctggctgctctca

SEQ ID NO: 4889891 - DNA, 25 bp, Homo sapien
cacttcttagtctggctgctctcac

SEQ ID NO: 4889892 - DNA, 25 bp, Homo sapien
ggacacccctgtacatgctcatata

SEQ ID NO: 4889893 - DNA, 25 bp, Homo sapien
ttaatctttatagcccttatctgta

SEQ ID NO: 4889894 - DNA, 25 bp, Homo sapien
atctttatagcccttatctgtaagt

SEQ ID NO: 4889895 - DNA, 25 bp, Homo sapien
attggacacccctgtacatgctcat

SEQ ID NO: 4889896 - DNA, 25 bp, Homo sapien
tcatgcgtaagtcagattgctcagc

SEQ ID NO: 4889897 - DNA, 25 bp, Homo sapien
taaacgatgtcagagtgaatgtggc

SEQ ID NO: 4889898 - DNA, 25 bp, Homo sapien
tggacaggaggattctaagggcttc

SEQ ID NO: 4889899 - DNA, 25 bp, Homo sapien
gtttgcaattacagtctctcacagg

SEQ ID NO: 4889900 - DNA, 25 bp, Homo sapien
caatttgttcatatgtgcaaatgtc

SEQ ID NO: 4889901 - DNA, 25 bp, Homo sapien
ccaatttgttcatatgtgcaaatgt

SEQ ID NO: 4889902 - DNA, 25 bp, Homo sapien
tgttcatatgtgcaaatgtctatta

SEQ ID NO: 4889903 - DNA, 25 bp, Homo sapien
atttgttcatatgtgcaaatgtcta

SEQ ID NO: 4889904 - DNA, 25 bp, Homo sapien
aagtgccaaggcgaaggatttcttc

SEQ ID NO: 4889905 - DNA, 25 bp, Homo sapien
gagcttctttggcatagactgctcg

SEQ ID NO: 4889906 - DNA, 25 bp, Homo sapien
tagactgctcgtatgagagtgtgtg

SEQ ID NO: 4889907 - DNA, 25 bp, Homo sapien
tgtgtgtttgcaagtagtcagtttg

SEQ ID NO: 4889908 - DNA, 25 bp, Homo sapien
tcagttatgtaacggcaaatcttgc

SEQ ID NO: 4889909 - DNA, 25 bp, Homo sapien
ggcaaatcttgcatataatagtaag

SEQ ID NO: 4889910 - DNA, 25 bp, Homo sapien
gctgctttagagcaaatggtacttt

SEQ ID NO: 4889911 - DNA, 25 bp, Homo sapien
tactttaagtataaatgattggaac

SEQ ID NO: 4889912 - DNA, 25 bp, Homo sapien
gaacatccatcctcttaaaccaagg

SEQ ID NO: 4889913 - DNA, 25 bp, Homo sapien
tacacgaacatccatcctcttaaac

SEQ ID NO: 4889914 - DNA, 25 bp, Homo sapien
catttacacgaacatccatcctctt

SEQ ID NO: 4889915 - DNA, 25 bp, Homo sapien
tcatttacacgaacatccatcctct

SEQ ID NO: 4889916 - DNA, 25 bp, Homo sapien
ttggacctgcacatatgctgcttat

SEQ ID NO: 4889917 - DNA, 25 bp, Homo sapien
gttttggacctgcacatatgctgct

SEQ ID NO: 4889918 - DNA, 25 bp, Homo sapien
cacgccagcacacctaataagctaa

SEQ ID NO: 4889919 - DNA, 25 bp, Homo sapien
acgccagcacacctaataagctaat

SEQ ID NO: 4889920 - DNA, 25 bp, Homo sapien
catcaacttagtcccataacttggg

SEQ ID NO: 4889921 - DNA, 25 bp, Homo sapien
gaccaaaacgtcataatgcagcatg

SEQ ID NO: 4889922 - DNA, 25 bp, Homo sapien
gcatgtgactgtatgtagaacaact

SEQ ID NO: 4889923 - DNA, 25 bp, Homo sapien
ggtattgtaaccttctgggagcacc

SEQ ID NO: 4889924 - DNA, 25 bp, Homo sapien
tagagtctgcttccctcattattgc

SEQ ID NO: 4889925 - DNA, 25 bp, Homo sapien
tagaaatgtctgagagtaacactgc

SEQ ID NO: 4889926 - DNA, 25 bp, Homo sapien
cactgtagtcaacatgtagagtctg

SEQ ID NO: 4889927 - DNA, 25 bp, Homo sapien
tctatctataatctccgtaggatga

SEQ ID NO: 4889928 - DNA, 25 bp, Homo sapien
gatacacgctgtatgggtttttact

SEQ ID NO: 4889929 - DNA, 25 bp, Homo sapien
gacttgaccacttctattggatatt

SEQ ID NO: 4889930 - DNA, 25 bp, Homo sapien
atatgtatacagttagtgttgtgtc

SEQ ID NO: 4889931 - DNA, 25 bp, Homo sapien
gttgtgtctttgttgacttgaccac

SEQ ID NO: 4889932 - DNA, 25 bp, Homo sapien
gcatggatttgagcagagtgaaacc

SEQ ID NO: 4889933 - DNA, 25 bp, Homo sapien
gcaaccagagttgtttaggtgagag

SEQ ID NO: 4889934 - DNA, 25 bp, Homo sapien
agatgcatgcaaggtacaggaaaaa

SEQ ID NO: 4889935 - DNA, 25 bp, Homo sapien
gactacctgcaaaaaggaatagaga

SEQ ID NO: 4889936 - DNA, 25 bp, Homo sapien
tagatgaggactacccacattgtgg

SEQ ID NO: 4889937 - DNA, 25 bp, Homo sapien
gtaaaatctgatgggacagcctgac

SEQ ID NO: 4889938 - DNA, 25 bp, Homo sapien
cccagggaggtcagcgttttgttct

SEQ ID NO: 4889939 - DNA, 25 bp, Homo sapien
tgaaatttcagtccaaaaacagtct

SEQ ID NO: 4889940 - DNA, 25 bp, Homo sapien
ggaactcagagacattctttgagtc

SEQ ID NO: 4889941 - DNA, 25 bp, Homo sapien
tgaactgggcatactacttctagtg

SEQ ID NO: 4889942 - DNA, 25 bp, Homo sapien
cagtatgccactggaaacacattcc

SEQ ID NO: 4889943 - DNA, 25 bp, Homo sapien
tctagtgctagactcagagcttctc

SEQ ID NO: 4889944 - DNA, 25 bp, Homo sapien
ttgaaaagttaaaagtggctgggca

SEQ ID NO: 4889945 - DNA, 25 bp, Homo sapien
gaaggacttgagagattttctacac

SEQ ID NO: 4889946 - DNA, 25 bp, Homo sapien
taagtattttctagagctcgtttcg

SEQ ID NO: 4889947 - DNA, 25 bp, Homo sapien
catatgcttgtggacttaatggaga

SEQ ID NO: 4889948 - DNA, 25 bp, Homo sapien
aagtgtgttactcatagccgaagaa

SEQ ID NO: 4889949 - DNA, 25 bp, Homo sapien
tgcagtgaggcataatcgcacgact

SEQ ID NO: 4889950 - DNA, 25 bp, Homo sapien
gacagtggtattggctccagagcat

SEQ ID NO: 4889951 - DNA, 25 bp, Homo sapien
gaaaagtgggcttcgagtcagacag

SEQ ID NO: 4889952 - DNA, 25 bp, Homo sapien
gatattgtcagaggccataaggacc

SEQ ID NO: 4889953 - DNA, 25 bp, Homo sapien
ttgtcagaggccataaggacctctt

SEQ ID NO: 4889954 - DNA, 25 bp, Homo sapien
gtcagaggccataaggacctcttcc

SEQ ID NO: 4889955 - DNA, 25 bp, Homo sapien
aaattgatattgtcagaggccataa

SEQ ID NO: 4889956 - DNA, 25 bp, Homo sapien
tctggacctccgacagctgcatttc

SEQ ID NO: 4889957 - DNA, 25 bp, Homo sapien
cagtgactccgagaagaggctgttc

SEQ ID NO: 4889958 - DNA, 25 bp, Homo sapien
gccaggcgtttggccctttcctcaa

SEQ ID NO: 4889959 - DNA, 25 bp, Homo sapien
aaaatgcatcccgtctccggcagag

SEQ ID NO: 4889960 - DNA, 25 bp, Homo sapien
tgaatacgtttattgctataactgt

SEQ ID NO: 4889961 - DNA, 25 bp, Homo sapien
gaattctccttcgaccattgtttta

SEQ ID NO: 4889962 - DNA, 25 bp, Homo sapien
ccggcctctgaattctttttagcaa

SEQ ID NO: 4889963 - DNA, 25 bp, Homo sapien
gttgtcattgacacctaaacctggt

SEQ ID NO: 4889964 - DNA, 25 bp, Homo sapien
tgcatgataacaatagctaaaaggc

SEQ ID NO: 4889965 - DNA, 25 bp, Homo sapien
cactagaaatggtaactacttgggt

SEQ ID NO: 4889966 - DNA, 25 bp, Homo sapien
gacagcaggaaaatgataccagatg

SEQ ID NO: 4889967 - DNA, 25 bp, Homo sapien
ctctgtgtgaggtgataatatcact

SEQ ID NO: 4889968 - DNA, 25 bp, Homo sapien
atcaaaagacgggcagtaactggtt

SEQ ID NO: 4889969 - DNA, 25 bp, Homo sapien
gggcagtaactggttttgaggacga

SEQ ID NO: 4889970 - DNA, 25 bp, Homo sapien
gaatcaaaagacgggcagtaactgg

SEQ ID NO: 4889971 - DNA, 25 bp, Homo sapien
aagacgggcagtaactggttttgag

SEQ ID NO: 4889972 - DNA, 25 bp, Homo sapien
cagacggcagacatttaggtagatc

SEQ ID NO: 4889973 - DNA, 25 bp, Homo sapien
gcaccaggaactctattcttttctc

SEQ ID NO: 4889974 - DNA, 25 bp, Homo sapien
ctgcctgactggaaattggtgggaa

SEQ ID NO: 4889975 - DNA, 25 bp, Homo sapien
gctcatgtctcttgtagccatagaa

SEQ ID NO: 4889976 - DNA, 25 bp, Homo sapien
gggatacagcagtttggtcaatatt

SEQ ID NO: 4889977 - DNA, 25 bp, Homo sapien
taccagtcattgaggttatcagcta

SEQ ID NO: 4889978 - DNA, 25 bp, Homo sapien
ccagtttttggagccgtgagggata

SEQ ID NO: 4889979 - DNA, 25 bp, Homo sapien
catgcttcaaataaatcaggtgagt

SEQ ID NO: 4889980 - DNA, 25 bp, Homo sapien
tcataaaagaggtggtagtcaagct

SEQ ID NO: 4889981 - DNA, 25 bp, Homo sapien
caaagggcaccacagtttggcatct

SEQ ID NO: 4889982 - DNA, 25 bp, Homo sapien
catgtggctcttgcagggttcagtt

SEQ ID NO: 4889983 - DNA, 25 bp, Homo sapien
catctggaagctctactggtggaag

SEQ ID NO: 4889984 - DNA, 25 bp, Homo sapien
tcatttgaaaccaggaggcggatct

SEQ ID NO: 4889985 - DNA, 25 bp, Homo sapien
gagaccagcctgacgaacatggaga

SEQ ID NO: 4889986 - DNA, 25 bp, Homo sapien
tgaatcacctgagggttgggggttc

SEQ ID NO: 4889987 - DNA, 25 bp, Homo sapien
aatgtaaaattagccggccgtggtg

SEQ ID NO: 4889988 - DNA, 25 bp, Homo sapien
cagttccgcagcacggggaacccgg

SEQ ID NO: 4889989 - DNA, 25 bp, Homo sapien
gacttccgcgccgccggcgaagaag

SEQ ID NO: 4889990 - DNA, 25 bp, Homo sapien
cgccgccggcgaagaaggcagaggg

SEQ ID NO: 4889991 - DNA, 25 bp, Homo sapien
tggggagccctgcagttccgcagca

SEQ ID NO: 4889992 - DNA, 25 bp, Homo sapien
ccttggcagacgagggggcggggag

SEQ ID NO: 4889993 - DNA, 25 bp, Homo sapien
ttgcgcagtcgctcgcccgcgtgcc

SEQ ID NO: 4889994 - DNA, 25 bp, Homo sapien
agtcgcgccggggacgaggagactg

SEQ ID NO: 4889995 - DNA, 25 bp, Homo sapien
gcgcgctccttgcgcagtcgctcgc

SEQ ID NO: 4889996 - DNA, 25 bp, Homo sapien
cacagggtgcggaccagaaagagca

SEQ ID NO: 4889997 - DNA, 25 bp, Homo sapien
ggtacgagcggggaatcagagcaca

SEQ ID NO: 4889998 - DNA, 25 bp, Homo sapien
aagagcagacggtcagtcgggcggg

SEQ ID NO: 4889999 - DNA, 25 bp, Homo sapien
aagttgccgagttgcaggtgtggaa

SEQ ID NO: 4890000 - DNA, 25 bp, Homo sapien
ctaaaccgtgcgttgcacagcggcg

SEQ ID NO: 4890001 - DNA, 25 bp, Homo sapien
ggatggtcgcgcgtcccctgcacag

SEQ ID NO: 4890002 - DNA, 25 bp, Homo sapien
aaccgtgcgttgcacagcggcggcc

SEQ ID NO: 4890003 - DNA, 25 bp, Homo sapien
gagcagacgcgggatggtcgcgcgt

SEQ ID NO: 4890004 - DNA, 25 bp, Homo sapien
tctgctaatgttcttccctcctaga

SEQ ID NO: 4890005 - DNA, 25 bp, Homo sapien
gcttccactgccgtctgctaatgtt

SEQ ID NO: 4890006 - DNA, 25 bp, Homo sapien
gcagtagcaatgcaagcttccactg

SEQ ID NO: 4890007 - DNA, 25 bp, Homo sapien
ccttgtttcataagcagtagcaatg

SEQ ID NO: 4890008 - DNA, 25 bp, Homo sapien
caggagcaccttagtcctcattgag

SEQ ID NO: 4890009 - DNA, 25 bp, Homo sapien
ggtaattctaagcttttctgcaggg

SEQ ID NO: 4890010 - DNA, 25 bp, Homo sapien
cttagtcctcattgaggcagccatt

SEQ ID NO: 4890011 - DNA, 25 bp, Homo sapien
ttaaatatgctctgctggtaattct

SEQ ID NO: 4890012 - DNA, 25 bp, Homo sapien
tggaaggaatgcctgaatagaagct

SEQ ID NO: 4890013 - DNA, 25 bp, Homo sapien
aaggatggtcctacaacgattctaa

SEQ ID NO: 4890014 - DNA, 25 bp, Homo sapien
caaattggtggtcaggttcaaggta

SEQ ID NO: 4890015 - DNA, 25 bp, Homo sapien
gtgtcagataccatgaaaatgcatc

SEQ ID NO: 4890016 - DNA, 25 bp, Homo sapien
tatgcactgtgatcctaaggttaac

SEQ ID NO: 4890017 - DNA, 25 bp, Homo sapien
tgctgcagtccataatttgggcttg

SEQ ID NO: 4890018 - DNA, 25 bp, Homo sapien
caatgggcgttgtaacaggaaaagt

SEQ ID NO: 4890019 - DNA, 25 bp, Homo sapien
ccaggtcctcatgtattgtgcaata

SEQ ID NO: 4890020 - DNA, 25 bp, Homo sapien
agactaccgatgtgtgccacgacgc

SEQ ID NO: 4890021 - DNA, 25 bp, Homo sapien
tatgagacagagcctccctctgcct

SEQ ID NO: 4890022 - DNA, 25 bp, Homo sapien
tgagactaccgatgtgtgccacgac

SEQ ID NO: 4890023 - DNA, 25 bp, Homo sapien
gctgagactaccgatgtgtgccacg

SEQ ID NO: 4890024 - DNA, 25 bp, Homo sapien
tgagtgctttcacaactcttggcca

SEQ ID NO: 4890025 - DNA, 25 bp, Homo sapien
catatatatgtgttgaggctaccag

SEQ ID NO: 4890026 - DNA, 25 bp, Homo sapien
taatcctaaagttgtctgtgttaca

SEQ ID NO: 4890027 - DNA, 25 bp, Homo sapien
tcttggccaccagtcttagtttctt

SEQ ID NO: 4890028 - DNA, 25 bp, Homo sapien
taaaatagtctgaagttcatacagt

SEQ ID NO: 4890029 - DNA, 25 bp, Homo sapien
tgagaaatccatactttgctgactg

SEQ ID NO: 4890030 - DNA, 25 bp, Homo sapien
gacacgtaatctccaagtaagccga

SEQ ID NO: 4890031 - DNA, 25 bp, Homo sapien
gctgactgaagtagaaagttctttt

SEQ ID NO: 4890032 - DNA, 25 bp, Homo sapien
tctggttcagatagattcaatctca

SEQ ID NO: 4890033 - DNA, 25 bp, Homo sapien
gccaattaggaatattgacaaacat

SEQ ID NO: 4890034 - DNA, 25 bp, Homo sapien
ttatcttactatagtgagttcccac

SEQ ID NO: 4890035 - DNA, 25 bp, Homo sapien
aaaatccttgagtgtcagaaactcc

SEQ ID NO: 4890036 - DNA, 25 bp, Homo sapien
gagtgcagtttcgcaacttcggctc

SEQ ID NO: 4890037 - DNA, 25 bp, Homo sapien
tggagtgcagtttcgcaacttcggc

SEQ ID NO: 4890038 - DNA, 25 bp, Homo sapien
gtgcagtttcgcaacttcggctcac

SEQ ID NO: 4890039 - DNA, 25 bp, Homo sapien
agtgcagtttcgcaacttcggctca

SEQ ID NO: 4890040 - DNA, 25 bp, Homo sapien
ttctaggtcttccagcagattctcc

SEQ ID NO: 4890041 - DNA, 25 bp, Homo sapien
tccaggaaagccacccatttggctg

SEQ ID NO: 4890042 - DNA, 25 bp, Homo sapien
ttaatcttttcatgccttctaggtc

SEQ ID NO: 4890043 - DNA, 25 bp, Homo sapien
acccatttggctgtgctcttgaggc

SEQ ID NO: 4890044 - DNA, 25 bp, Homo sapien
ttgtggcgaggccttactggaaaga

SEQ ID NO: 4890045 - DNA, 25 bp, Homo sapien
tgtggcgaggccttactggaaagaa

SEQ ID NO: 4890046 - DNA, 25 bp, Homo sapien
gtggcgaggccttactggaaagaaa

SEQ ID NO: 4890047 - DNA, 25 bp, Homo sapien
agtactgatgtacctatcatcgcag

SEQ ID NO: 4890048 - DNA, 25 bp, Homo sapien
taaacagtaatgttccctactgaag

SEQ ID NO: 4890049 - DNA, 25 bp, Homo sapien
catcgcagctctctgaaatagcaaa

SEQ ID NO: 4890050 - DNA, 25 bp, Homo sapien
ccaagtagtagtgctttttcagtac

SEQ ID NO: 4890051 - DNA, 25 bp, Homo sapien
ggtattatacacctggctgcaagta

SEQ ID NO: 4890052 - DNA, 25 bp, Homo sapien
tccccctcagtttccggagtagcta

SEQ ID NO: 4890053 - DNA, 25 bp, Homo sapien
tcttcacctgtgtttagtttcttta

SEQ ID NO: 4890054 - DNA, 25 bp, Homo sapien
ggccatcttcctaagtagaaattct

SEQ ID NO: 4890055 - DNA, 25 bp, Homo sapien
tgtgagagtggaattatattatata

SEQ ID NO: 4890056 - DNA, 25 bp, Homo sapien
gtattttgtgagagtggaattatat

SEQ ID NO: 4890057 - DNA, 25 bp, Homo sapien
ccccagaaagaaactccttatccat

SEQ ID NO: 4890058 - DNA, 25 bp, Homo sapien
cccagaaagaaactccttatccatt

SEQ ID NO: 4890059 - DNA, 25 bp, Homo sapien
caattataattttactcagtacaca

SEQ ID NO: 4890060 - DNA, 25 bp, Homo sapien
tactcagtacacaagtatacacatg

SEQ ID NO: 4890061 - DNA, 25 bp, Homo sapien
tataattttactcagtacacaagta

SEQ ID NO: 4890062 - DNA, 25 bp, Homo sapien
caggcgtggtagagcgcatctgtaa

SEQ ID NO: 4890063 - DNA, 25 bp, Homo sapien
ttctcaggtgaatcctaaaattgaa

SEQ ID NO: 4890064 - DNA, 25 bp, Homo sapien
tttgaaagtgtagcagtattgaggt

SEQ ID NO: 4890065 - DNA, 25 bp, Homo sapien
tattacatgaaaagtttcttgtagc

SEQ ID NO: 4890066 - DNA, 25 bp, Homo sapien
ctaaaattgataggagttaaacaga

SEQ ID NO: 4890067 - DNA, 25 bp, Homo sapien
atgttgagcccccgcggcgtgacgc

SEQ ID NO: 4890068 - DNA, 25 bp, Homo sapien
ccgcgcccgggatgttgagcccccg

SEQ ID NO: 4890069 - DNA, 25 bp, Homo sapien
cgcggcgtgacgcgagcacggcagc

SEQ ID NO: 4890070 - DNA, 25 bp, Homo sapien
cccgcggcgtgacgcgagcacggca

SEQ ID NO: 4890071 - DNA, 25 bp, Homo sapien
ggctaacaccggatatgcttctggc

SEQ ID NO: 4890072 - DNA, 25 bp, Homo sapien
ttccggtttaccaagagcatccaaa

SEQ ID NO: 4890073 - DNA, 25 bp, Homo sapien
caaacatccctcaaggacacagtca

SEQ ID NO: 4890074 - DNA, 25 bp, Homo sapien
tgtaatgttgatgacacaacaaggc

SEQ ID NO: 4890075 - DNA, 25 bp, Homo sapien
ggaagatctcaggcacatacacagc

SEQ ID NO: 4890076 - DNA, 25 bp, Homo sapien
gaatctcctcgtaagctgatggaca

SEQ ID NO: 4890077 - DNA, 25 bp, Homo sapien
tgagatgagggagaatctcctcgta

SEQ ID NO: 4890078 - DNA, 25 bp, Homo sapien
tacacagcttgggtatgtccagatt

SEQ ID NO: 4890079 - DNA, 25 bp, Homo sapien
tggaggcatagactcaagcaaggac

SEQ ID NO: 4890080 - DNA, 25 bp, Homo sapien
caaatgttcacaggactgcttctga

SEQ ID NO: 4890081 - DNA, 25 bp, Homo sapien
taagaacaaactactgggtggaggc

SEQ ID NO: 4890082 - DNA, 25 bp, Homo sapien
tctgctgagatcagcccctaggaga

SEQ ID NO: 4890083 - DNA, 25 bp, Homo sapien
caaactgttggtgactgaactgtct

SEQ ID NO: 4890084 - DNA, 25 bp, Homo sapien
aatcacagagctaagataagaatac

SEQ ID NO: 4890085 - DNA, 25 bp, Homo sapien
gtctgacttgcgcattttattgata

SEQ ID NO: 4890086 - DNA, 25 bp, Homo sapien
gattagaagccttacctaagcttgt

SEQ ID NO: 4890087 - DNA, 25 bp, Homo sapien
gataagaatacaagccttggattct

SEQ ID NO: 4890088 - DNA, 25 bp, Homo sapien
gttatgaaattatgtctccaaaaaa

SEQ ID NO: 4890089 - DNA, 25 bp, Homo sapien
caagtgttatgaaattatgtctcca

SEQ ID NO: 4890090 - DNA, 25 bp, Homo sapien
agtgttatgaaattatgtctccaaa

SEQ ID NO: 4890091 - DNA, 25 bp, Homo sapien
gagaacaagtgttatgaaattatgt

SEQ ID NO: 4890092 - DNA, 25 bp, Homo sapien
ggatcaggatgagcactcaactctt

SEQ ID NO: 4890093 - DNA, 25 bp, Homo sapien
gagcactcaactcttctggttccca

SEQ ID NO: 4890094 - DNA, 25 bp, Homo sapien
tcccaatccagggtttttcgcacag

SEQ ID NO: 4890095 - DNA, 25 bp, Homo sapien
cagggtttttcgcacagcatcttgg

SEQ ID NO: 4890096 - DNA, 25 bp, Homo sapien
cctcgttctgaatggttggcacctt

SEQ ID NO: 4890097 - DNA, 25 bp, Homo sapien
gatatcgcttctcgtcaatgtggtg

SEQ ID NO: 4890098 - DNA, 25 bp, Homo sapien
agcagagacttttcaggaccccaca

SEQ ID NO: 4890099 - DNA, 25 bp, Homo sapien
catggtctgactaaagatacccagc

SEQ ID NO: 4890100 - DNA, 25 bp, Homo sapien
tatctgaaactgttagcagtggaga

SEQ ID NO: 4890101 - DNA, 25 bp, Homo sapien
gtgagagcctgaggcaagttttatt

SEQ ID NO: 4890102 - DNA, 25 bp, Homo sapien
cagatcataggaatttgcatatcca

SEQ ID NO: 4890103 - DNA, 25 bp, Homo sapien
tccataagggtttgcagcaacctca

SEQ ID NO: 4890104 - DNA, 25 bp, Homo sapien
catttatgtggtgcatgtacagcac

SEQ ID NO: 4890105 - DNA, 25 bp, Homo sapien
ggctaccatgaatagttctgtgaac

SEQ ID NO: 4890106 - DNA, 25 bp, Homo sapien
agtgcagttgcttgatcatatgaca

SEQ ID NO: 4890107 - DNA, 25 bp, Homo sapien
acagaactgtttcacggtggctgaa

SEQ ID NO: 4890108 - DNA, 25 bp, Homo sapien
ttctatgctcgacttcatgagttgg

SEQ ID NO: 4890109 - DNA, 25 bp, Homo sapien
ggccgtccagtcttgtctgaaagga

SEQ ID NO: 4890110 - DNA, 25 bp, Homo sapien
gtatcgtgcatctactggccgtcca

SEQ ID NO: 4890111 - DNA, 25 bp, Homo sapien
taacttgttgggtgattctatgctc

SEQ ID NO: 4890112 - DNA, 25 bp, Homo sapien
gctgagcgcgggagggtggagttag

SEQ ID NO: 4890113 - DNA, 25 bp, Homo sapien
gccagcgagactgggccttctccgg

SEQ ID NO: 4890114 - DNA, 25 bp, Homo sapien
gcgccgctcggtgggtttggaaaga

SEQ ID NO: 4890115 - DNA, 25 bp, Homo sapien
cgagactgggccttctccgggctga

SEQ ID NO: 4890116 - DNA, 25 bp, Homo sapien
gctgcgggactgacgagtgagtctc

SEQ ID NO: 4890117 - DNA, 25 bp, Homo sapien
aggtacggatctcccgcgcgtcgcc

SEQ ID NO: 4890118 - DNA, 25 bp, Homo sapien
gcggaagtaattctttcgactgccc

SEQ ID NO: 4890119 - DNA, 25 bp, Homo sapien
gcgcgtcgccgaaagcggctctgac

SEQ ID NO: 4890120 - DNA, 25 bp, Homo sapien
cagcaattggatcagggtctgcgct

SEQ ID NO: 4890121 - DNA, 25 bp, Homo sapien
gactcggattggtcgaaatttgccg

SEQ ID NO: 4890122 - DNA, 25 bp, Homo sapien
ctgggaatccagaagagctagactc

SEQ ID NO: 4890123 - DNA, 25 bp, Homo sapien
aaatttgccggttgcgttcataggc

SEQ ID NO: 4890124 - DNA, 25 bp, Homo sapien
caaaatcttaacacgcagtgcgaga

SEQ ID NO: 4890125 - DNA, 25 bp, Homo sapien
gaggtacggacagtctctgtaacca

SEQ ID NO: 4890126 - DNA, 25 bp, Homo sapien
taaccctaaatgagaggtacggaca

SEQ ID NO: 4890127 - DNA, 25 bp, Homo sapien
acgccgacggtatccaccagagaaa

SEQ ID NO: 4890128 - DNA, 25 bp, Homo sapien
gaaatgaggccagccgattgcgcta

SEQ ID NO: 4890129 - DNA, 25 bp, Homo sapien
gatctcgttagcaaagaaaccgccc

SEQ ID NO: 4890130 - DNA, 25 bp, Homo sapien
tttctgtgcgtgagctccggatcca

SEQ ID NO: 4890131 - DNA, 25 bp, Homo sapien
cacagcaacttttcaccagggacag

SEQ ID NO: 4890132 - DNA, 25 bp, Homo sapien
gcagagggctgtacgagaatgacaa

SEQ ID NO: 4890133 - DNA, 25 bp, Homo sapien
ggacgacatcactaaaaactgtttc

SEQ ID NO: 4890134 - DNA, 25 bp, Homo sapien
ttttttctcgtggacgacatcacta

SEQ ID NO: 4890135 - DNA, 25 bp, Homo sapien
acgagaatgacaatgcccagaagcc

SEQ ID NO: 4890136 - DNA, 25 bp, Homo sapien
acgcgggtgacgagcggctgcggac

SEQ ID NO: 4890137 - DNA, 25 bp, Homo sapien
cagctgcacgagtccacgactgcga

SEQ ID NO: 4890138 - DNA, 25 bp, Homo sapien
gtccacgactgcgagacacggcttc

SEQ ID NO: 4890139 - DNA, 25 bp, Homo sapien
agcggctgcggacgccccagctgca

SEQ ID NO: 4890140 - DNA, 25 bp, Homo sapien
ttccgcagagaggcagttcgaccgc

SEQ ID NO: 4890141 - DNA, 25 bp, Homo sapien
tccttccgcagagaggcagttcgac

SEQ ID NO: 4890142 - DNA, 25 bp, Homo sapien
agagaggcagttcgaccgcccacgg

SEQ ID NO: 4890143 - DNA, 25 bp, Homo sapien
cagagaggcagttcgaccgcccacg

SEQ ID NO: 4890144 - DNA, 25 bp, Homo sapien
tcgacccggacgccggagaaggcgc

SEQ ID NO: 4890145 - DNA, 25 bp, Homo sapien
tactccagccggctaccggccccga

SEQ ID NO: 4890146 - DNA, 25 bp, Homo sapien
tgctggaggacgcccgggagacaga

SEQ ID NO: 4890147 - DNA, 25 bp, Homo sapien
gacgccggagaaggcgcgcggctcc

SEQ ID NO: 4890148 - DNA, 25 bp, Homo sapien
ctgatttgtcagatggcgtatttaa

SEQ ID NO: 4890149 - DNA, 25 bp, Homo sapien
ggcgtatttaagaatcgaacatatc

SEQ ID NO: 4890150 - DNA, 25 bp, Homo sapien
tgtcagatggcgtatttaagaatcg

SEQ ID NO: 4890151 - DNA, 25 bp, Homo sapien
cagatggcgtatttaagaatcgaac

SEQ ID NO: 4890152 - DNA, 25 bp, Homo sapien
gaggcgaagagtatggtgaaccaag

SEQ ID NO: 4890153 - DNA, 25 bp, Homo sapien
gggaggcgaagagtatggtgaacca

SEQ ID NO: 4890154 - DNA, 25 bp, Homo sapien
ggaggcgaagagtatggtgaaccaa

SEQ ID NO: 4890155 - DNA, 25 bp, Homo sapien
tgaacatgggaggcgaagagtatgg

SEQ ID NO: 4890156 - DNA, 25 bp, Homo sapien
aaaagagagaggatcaatactttta

SEQ ID NO: 4890157 - DNA, 25 bp, Homo sapien
gaaaaaaagagagaggatcaatact

SEQ ID NO: 4890158 - DNA, 25 bp, Homo sapien
aaagagagaggatcaatacttttaa

SEQ ID NO: 4890159 - DNA, 25 bp, Homo sapien
aaaaaagagagaggatcaatacttt

SEQ ID NO: 4890160 - DNA, 25 bp, Homo sapien
ggtgatcaccgtaaagcttcccatg

SEQ ID NO: 4890161 - DNA, 25 bp, Homo sapien
tcattctggtgaaacactgtactcg

SEQ ID NO: 4890162 - DNA, 25 bp, Homo sapien
gtaaggccaatcagactcgtagaat

SEQ ID NO: 4890163 - DNA, 25 bp, Homo sapien
tataagtgtctgttgtggcctcatg

SEQ ID NO: 4890164 - DNA, 25 bp, Homo sapien
acccattagatggatatagtcttca

SEQ ID NO: 4890165 - DNA, 25 bp, Homo sapien
tcttcacggtttggaaagagcactg

SEQ ID NO: 4890166 - DNA, 25 bp, Homo sapien
ggatatagtcttcacggtttggaaa

SEQ ID NO: 4890167 - DNA, 25 bp, Homo sapien
tttgtcataacccattagatggata

SEQ ID NO: 4890168 - DNA, 25 bp, Homo sapien
tatttttaacaatcagtcactaacg

SEQ ID NO: 4890169 - DNA, 25 bp, Homo sapien
tgagcacgaacactaacaaataggc

SEQ ID NO: 4890170 - DNA, 25 bp, Homo sapien
aatcacatttgagcacgaacactaa

SEQ ID NO: 4890171 - DNA, 25 bp, Homo sapien
cagtcactaacggaatgcaaaaggc

SEQ ID NO: 4890172 - DNA, 25 bp, Homo sapien
tctaaaacacgaatggtagatacta

SEQ ID NO: 4890173 - DNA, 25 bp, Homo sapien
ctaaaacacgaatggtagatactac

SEQ ID NO: 4890174 - DNA, 25 bp, Homo sapien
taaaacacgaatggtagatactaca

SEQ ID NO: 4890175 - DNA, 25 bp, Homo sapien
atccagggattttacgttgcaactc

SEQ ID NO: 4890176 - DNA, 25 bp, Homo sapien
tttagagtcaaccacagtaacacag

SEQ ID NO: 4890177 - DNA, 25 bp, Homo sapien
gcttcctagccagcttcctgacaga

SEQ ID NO: 4890178 - DNA, 25 bp, Homo sapien
tgacagacttggtcctcaggcaaca

SEQ ID NO: 4890179 - DNA, 25 bp, Homo sapien
tttcctttgctcctcagatcaagtc

SEQ ID NO: 4890180 - DNA, 25 bp, Homo sapien
ttgctcctcagatcaagtcagcaca

SEQ ID NO: 4890181 - DNA, 25 bp, Homo sapien
caaactggtcctttcactgattctt

SEQ ID NO: 4890182 - DNA, 25 bp, Homo sapien
ttcaaactggtcctttcactgattc

SEQ ID NO: 4890183 - DNA, 25 bp, Homo sapien
aagtttttcttgtagtgattctcaa

SEQ ID NO: 4890184 - DNA, 25 bp, Homo sapien
tttttcttgtagtgattctcaaagt

SEQ ID NO: 4890185 - DNA, 25 bp, Homo sapien
taagtttttcttgtagtgattctca

SEQ ID NO: 4890186 - DNA, 25 bp, Homo sapien
tcaccgtaagtttttcttgtagtga

SEQ ID NO: 4890187 - DNA, 25 bp, Homo sapien
tctgcttaactatctgaggactgcg

SEQ ID NO: 4890188 - DNA, 25 bp, Homo sapien
tatctgaggactgcgcaagtcaatg

SEQ ID NO: 4890189 - DNA, 25 bp, Homo sapien
taactatctgaggactgcgcaagtc

SEQ ID NO: 4890190 - DNA, 25 bp, Homo sapien
agtaatctgcttaactatctgagga

SEQ ID NO: 4890191 - DNA, 25 bp, Homo sapien
gccaccaagggaggagtgcacagtt

SEQ ID NO: 4890192 - DNA, 25 bp, Homo sapien
tgttcttatgggcaatcatgccagg

SEQ ID NO: 4890193 - DNA, 25 bp, Homo sapien
tggttttcctacacccatagggtgc

SEQ ID NO: 4890194 - DNA, 25 bp, Homo sapien
catttcccgtatagctaaccaccag

SEQ ID NO: 4890195 - DNA, 25 bp, Homo sapien
attgctccatctgtgagggcgcccc

SEQ ID NO: 4890196 - DNA, 25 bp, Homo sapien
cattgctccatctgtgagggcgccc

SEQ ID NO: 4890197 - DNA, 25 bp, Homo sapien
tgagggcgcccccttctatagaagt

SEQ ID NO: 4890198 - DNA, 25 bp, Homo sapien
catctgtgagggcgcccccttctat

SEQ ID NO: 4890199 - DNA, 25 bp, Homo sapien
agccggtgggcagtgagtctgcagg

SEQ ID NO: 4890200 - DNA, 25 bp, Homo sapien
ggagccggtgggcagtgagtctgca

SEQ ID NO: 4890201 - DNA, 25 bp, Homo sapien
tgggcagtgagtctgcagggcatcc

SEQ ID NO: 4890202 - DNA, 25 bp, Homo sapien
ggcagtgagtctgcagggcatcctc

SEQ ID NO: 4890203 - DNA, 25 bp, Homo sapien
ggaccagttatggttacaccaacat

SEQ ID NO: 4890204 - DNA, 25 bp, Homo sapien
agcacagcgacaatctttttcagga

SEQ ID NO: 4890205 - DNA, 25 bp, Homo sapien
tcgtctgcaccgagacaaaaaatga

SEQ ID NO: 4890206 - DNA, 25 bp, Homo sapien
tctacaatgatgcacttttcgtctg

SEQ ID NO: 4890207 - DNA, 25 bp, Homo sapien
tgcatccttggatgttgcacagatc

SEQ ID NO: 4890208 - DNA, 25 bp, Homo sapien
tcattgcatccttggatgttgcaca

SEQ ID NO: 4890209 - DNA, 25 bp, Homo sapien
ccttggatgttgcacagatcatttt

SEQ ID NO: 4890210 - DNA, 25 bp, Homo sapien
ggatgttgcacagatcattttactt

SEQ ID NO: 4890211 - DNA, 25 bp, Homo sapien
cctatttataggaagtatagaagac

SEQ ID NO: 4890212 - DNA, 25 bp, Homo sapien
tacagctcagggatacaagtagaaa

SEQ ID NO: 4890213 - DNA, 25 bp, Homo sapien
gggtaattcattatgcagcaagata

SEQ ID NO: 4890214 - DNA, 25 bp, Homo sapien
tagaccatgagaagatctaagtgac

SEQ ID NO: 4890215 - DNA, 25 bp, Homo sapien
gatcagtaactaatcatcagactct

SEQ ID NO: 4890216 - DNA, 25 bp, Homo sapien
gattcaatatctccaaagctttaca

SEQ ID NO: 4890217 - DNA, 25 bp, Homo sapien
taactaatcatcagactcttccttt

SEQ ID NO: 4890218 - DNA, 25 bp, Homo sapien
aaagaggatcagtaactaatcatca

SEQ ID NO: 4890219 - DNA, 25 bp, Homo sapien
gcttctgagcttcagtaaatatgga

SEQ ID NO: 4890220 - DNA, 25 bp, Homo sapien
acttgcatcggatgagttgcagacc

SEQ ID NO: 4890221 - DNA, 25 bp, Homo sapien
taggtgtatgaaatacttgcatcgg

SEQ ID NO: 4890222 - DNA, 25 bp, Homo sapien
tgcagacccaatactgcttctgagc

SEQ ID NO: 4890223 - DNA, 25 bp, Homo sapien
tggaaaagggcagccaacccatggt

SEQ ID NO: 4890224 - DNA, 25 bp, Homo sapien
catacgtttggagggaattcagtgc

SEQ ID NO: 4890225 - DNA, 25 bp, Homo sapien
aacccatggtaagcagcacggtgga

SEQ ID NO: 4890226 - DNA, 25 bp, Homo sapien
gatcccaggacacttgctaatgagc

SEQ ID NO: 4890227 - DNA, 25 bp, Homo sapien
aacagactgtcataactataaggtg

SEQ ID NO: 4890228 - DNA, 25 bp, Homo sapien
ggtttgaatgcattgcctgaagttc

SEQ ID NO: 4890229 - DNA, 25 bp, Homo sapien
tccaactcctaaagtgtagagttgt

SEQ ID NO: 4890230 - DNA, 25 bp, Homo sapien
atccccagtgcaagagtgttgaggg

SEQ ID NO: 4890231 - DNA, 25 bp, Homo sapien
taatgtcaataaattactacaaatc

SEQ ID NO: 4890232 - DNA, 25 bp, Homo sapien
tgtcaataaattactacaaatcatc

SEQ ID NO: 4890233 - DNA, 25 bp, Homo sapien
aaattactacaaatcatctccatta

SEQ ID NO: 4890234 - DNA, 25 bp, Homo sapien
caataaattactacaaatcatctcc

SEQ ID NO: 4890235 - DNA, 25 bp, Homo sapien
cattaattgaaattgggtattgcat

SEQ ID NO: 4890236 - DNA, 25 bp, Homo sapien
tttcaattctatacaggggttaaca

SEQ ID NO: 4890237 - DNA, 25 bp, Homo sapien
aaatgtgcaataatcctttggatct

SEQ ID NO: 4890238 - DNA, 25 bp, Homo sapien
tctatacaggggttaacattaattg

SEQ ID NO: 4890239 - DNA, 25 bp, Homo sapien
gtgttgacagttatatagagattga

SEQ ID NO: 4890240 - DNA, 25 bp, Homo sapien
gttgacagttatatagagattgaaa

SEQ ID NO: 4890241 - DNA, 25 bp, Homo sapien
ggtgttgacagttatatagagattg

SEQ ID NO: 4890242 - DNA, 25 bp, Homo sapien
tgttgacagttatatagagattgaa

SEQ ID NO: 4890243 - DNA, 25 bp, Homo sapien
gcaaaaagagtaatcgtcatcagat

SEQ ID NO: 4890244 - DNA, 25 bp, Homo sapien
acttctttgcgctttggaagattca

SEQ ID NO: 4890245 - DNA, 25 bp, Homo sapien
tcagatcctcggcaaataacttctt

SEQ ID NO: 4890246 - DNA, 25 bp, Homo sapien
taatcgtcatcagatcctcggcaaa

SEQ ID NO: 4890247 - DNA, 25 bp, Homo sapien
gaatagtttgcgaattttttctcat

SEQ ID NO: 4890248 - DNA, 25 bp, Homo sapien
ttttctcatatactacaggttgtct

SEQ ID NO: 4890249 - DNA, 25 bp, Homo sapien
ttctcatatactacaggttgtctgt

SEQ ID NO: 4890250 - DNA, 25 bp, Homo sapien
gttgttgctgttgagttgcttgagt

SEQ ID NO: 4890251 - DNA, 25 bp, Homo sapien
tttattcccttgaaggagaatgata

SEQ ID NO: 4890252 - DNA, 25 bp, Homo sapien
aaagccagcgcccttatgcaaagga

SEQ ID NO: 4890253 - DNA, 25 bp, Homo sapien
tacttttgcccatgtatgttagagg

SEQ ID NO: 4890254 - DNA, 25 bp, Homo sapien
caaaagacctaatactaaggctggg

SEQ ID NO: 4890255 - DNA, 25 bp, Homo sapien
tacacaatggtcatccagtgctttc

SEQ ID NO: 4890256 - DNA, 25 bp, Homo sapien
tgaattaggttggtgtaggatgaca

SEQ ID NO: 4890257 - DNA, 25 bp, Homo sapien
taatttgaattaggttggtgtagga

SEQ ID NO: 4890258 - DNA, 25 bp, Homo sapien
ccagaaatagcttcaacaacacatt

SEQ ID NO: 4890259 - DNA, 25 bp, Homo sapien
tctgggctcccagaaatagcttcaa

SEQ ID NO: 4890260 - DNA, 25 bp, Homo sapien
gctgcaagcacaggtaatcagaaca

SEQ ID NO: 4890261 - DNA, 25 bp, Homo sapien
caagcacaggtaatcagaacagaac

SEQ ID NO: 4890262 - DNA, 25 bp, Homo sapien
caatgtctggaatcggtcaggggtt

SEQ ID NO: 4890263 - DNA, 25 bp, Homo sapien
cagggcgcagcacgccgggctgtct

SEQ ID NO: 4890264 - DNA, 25 bp, Homo sapien
tcatccagaggctaattccctttta

SEQ ID NO: 4890265 - DNA, 25 bp, Homo sapien
ggctaattcccttttatggtcatca

SEQ ID NO: 4890266 - DNA, 25 bp, Homo sapien
tgtgggcaacattcctcgtttacat

SEQ ID NO: 4890267 - DNA, 25 bp, Homo sapien
cagatgattgtccacagaaatgtgg

SEQ ID NO: 4890268 - DNA, 25 bp, Homo sapien
gtcaccgttgcgctggggctgtagc

SEQ ID NO: 4890269 - DNA, 25 bp, Homo sapien
gggctgtagctaagtttctctgtat

SEQ ID NO: 4890270 - DNA, 25 bp, Homo sapien
gctggggctgtagctaagtttctct

SEQ ID NO: 4890271 - DNA, 25 bp, Homo sapien
gtagctaagtttctctgtatggttc

SEQ ID NO: 4890272 - DNA, 25 bp, Homo sapien
cattagcagttatatccagatcagg

SEQ ID NO: 4890273 - DNA, 25 bp, Homo sapien
taaggaaacaagctcttcacttccc

SEQ ID NO: 4890274 - DNA, 25 bp, Homo sapien
caaagcctggtgtgtactttttgcc

SEQ ID NO: 4890275 - DNA, 25 bp, Homo sapien
gatcaggccggctcatgaacactaa

SEQ ID NO: 4890276 - DNA, 25 bp, Homo sapien
tagacaaggccaacgggctaaactg

SEQ ID NO: 4890277 - DNA, 25 bp, Homo sapien
aaagtaggtctatattagatgagga

SEQ ID NO: 4890278 - DNA, 25 bp, Homo sapien
gaccagcctagacaaggccaacggg

SEQ ID NO: 4890279 - DNA, 25 bp, Homo sapien
gcctacaatatctgagccttaatct

SEQ ID NO: 4890280 - DNA, 25 bp, Homo sapien
tagttgggcttgctgctacaactct

SEQ ID NO: 4890281 - DNA, 25 bp, Homo sapien
gctgctacaactctgtcccaaaagg

SEQ ID NO: 4890282 - DNA, 25 bp, Homo sapien
cttgctgctacaactctgtcccaaa

SEQ ID NO: 4890283 - DNA, 25 bp, Homo sapien
ttcttctatagttgggcttgctgct

SEQ ID NO: 4890284 - DNA, 25 bp, Homo sapien
agcttcatcattctccagctcagca

SEQ ID NO: 4890285 - DNA, 25 bp, Homo sapien
agcaaggcttacctcaatatcacaa

SEQ ID NO: 4890286 - DNA, 25 bp, Homo sapien
agctcagcaaggcttacctcaatat

SEQ ID NO: 4890287 - DNA, 25 bp, Homo sapien
aacattctcagtaattagtttgaat

SEQ ID NO: 4890288 - DNA, 25 bp, Homo sapien
ggtgctgagcataagcaaaatgcaa

SEQ ID NO: 4890289 - DNA, 25 bp, Homo sapien
gtgctgagcataagcaaaatgcaaa

SEQ ID NO: 4890290 - DNA, 25 bp, Homo sapien
ggcaaggctttctatgtctttctag

SEQ ID NO: 4890291 - DNA, 25 bp, Homo sapien
aaggctttctatgtctttctagtgc

SEQ ID NO: 4890292 - DNA, 25 bp, Homo sapien
ctggcaaggctttctatgtctttct

SEQ ID NO: 4890293 - DNA, 25 bp, Homo sapien
ggctttctatgtctttctagtgctg

SEQ ID NO: 4890294 - DNA, 25 bp, Homo sapien
gaagacctcatggacagggtaacta

SEQ ID NO: 4890295 - DNA, 25 bp, Homo sapien
taatgaagacctcatggacagggta

SEQ ID NO: 4890296 - DNA, 25 bp, Homo sapien
tctaatgaagacctcatggacaggg

SEQ ID NO: 4890297 - DNA, 25 bp, Homo sapien
agacctcatggacagggtaactaga

SEQ ID NO: 4890298 - DNA, 25 bp, Homo sapien
ccgtgaagctccctgagttttctcg

SEQ ID NO: 4890299 - DNA, 25 bp, Homo sapien
gaactgctcccttcaccgtgaagct

SEQ ID NO: 4890300 - DNA, 25 bp, Homo sapien
tgaagctccctgagttttctcgatt

SEQ ID NO: 4890301 - DNA, 25 bp, Homo sapien
agaactgctcccttcaccgtgaagc

SEQ ID NO: 4890302 - DNA, 25 bp, Homo sapien
tatctatctgctcgttcaaccttcc

SEQ ID NO: 4890303 - DNA, 25 bp, Homo sapien
gtggctcatatctatctgctcgttc

SEQ ID NO: 4890304 - DNA, 25 bp, Homo sapien
ttaaacaggttcttgaactggtggc

SEQ ID NO: 4890305 - DNA, 25 bp, Homo sapien
aacaggttcttgaactggtggctca

SEQ ID NO: 4890306 - DNA, 25 bp, Homo sapien
cctctgagagctgtcttagaataag

SEQ ID NO: 4890307 - DNA, 25 bp, Homo sapien
tgagagctgtcttagaataagggag

SEQ ID NO: 4890308 - DNA, 25 bp, Homo sapien
gagctgtcttagaataagggagtca

SEQ ID NO: 4890309 - DNA, 25 bp, Homo sapien
ctgtcttagaataagggagtcagca

SEQ ID NO: 4890310 - DNA, 25 bp, Homo sapien
tgtcaactcctaggatgagcccctg

SEQ ID NO: 4890311 - DNA, 25 bp, Homo sapien
tctgaagggctttatgcacatatgc

SEQ ID NO: 4890312 - DNA, 25 bp, Homo sapien
ggctagccggatgcacaagaacact

SEQ ID NO: 4890313 - DNA, 25 bp, Homo sapien
catgagtcacaaggacggctagccg

SEQ ID NO: 4890314 - DNA, 25 bp, Homo sapien
attggtgcaatcttaatacacatgc

SEQ ID NO: 4890315 - DNA, 25 bp, Homo sapien
gcaatcttaatacacatgctgccaa

SEQ ID NO: 4890316 - DNA, 25 bp, Homo sapien
ggtgcaatcttaatacacatgctgc

SEQ ID NO: 4890317 - DNA, 25 bp, Homo sapien
tggtgcaatcttaatacacatgctg

SEQ ID NO: 4890318 - DNA, 25 bp, Homo sapien
cagcaattttagaagccaaagcggg

SEQ ID NO: 4890319 - DNA, 25 bp, Homo sapien
ttcagctcaggttcaatgccaccac

SEQ ID NO: 4890320 - DNA, 25 bp, Homo sapien
tgacatagcgacaccctgtttcgaa

SEQ ID NO: 4890321 - DNA, 25 bp, Homo sapien
gtcctcattggagtatcccacagcc

SEQ ID NO: 4890322 - DNA, 25 bp, Homo sapien
tcaacagattataggaggagtcatt

SEQ ID NO: 4890323 - DNA, 25 bp, Homo sapien
ggtggagttttaggccctctgacat

SEQ ID NO: 4890324 - DNA, 25 bp, Homo sapien
gcacattctccatagactggccaga

SEQ ID NO: 4890325 - DNA, 25 bp, Homo sapien
aagtgtagtctctggtcagaagcca

SEQ ID NO: 4890326 - DNA, 25 bp, Homo sapien
caaacttgcccagattctacaaaga

SEQ ID NO: 4890327 - DNA, 25 bp, Homo sapien
tctacaaagatgagcacaaggtggg

SEQ ID NO: 4890328 - DNA, 25 bp, Homo sapien
caggcagagaatagacttcaaaaat

SEQ ID NO: 4890329 - DNA, 25 bp, Homo sapien
gaagccatgcaatgcagcatgctct

SEQ ID NO: 4890330 - DNA, 25 bp, Homo sapien
tctagatgggagaaggcctcatgaa

SEQ ID NO: 4890331 - DNA, 25 bp, Homo sapien
caaagcatccagaatactcctgaga

SEQ ID NO: 4890332 - DNA, 25 bp, Homo sapien
aagcagtaactgatccaggtcaaag

SEQ ID NO: 4890333 - DNA, 25 bp, Homo sapien
tactcctgagaaagattctagatgg

SEQ ID NO: 4890334 - DNA, 25 bp, Homo sapien
ccacagggaggcatgtgagtacgag

SEQ ID NO: 4890335 - DNA, 25 bp, Homo sapien
tccacagggaggcatgtgagtacga

SEQ ID NO: 4890336 - DNA, 25 bp, Homo sapien
gactaccctcaataaaagcttggcg

SEQ ID NO: 4890337 - DNA, 25 bp, Homo sapien
taacagtgccagactaccctcaata

SEQ ID NO: 4890338 - DNA, 25 bp, Homo sapien
caataaaagcttggcgtacacccat

SEQ ID NO: 4890339 - DNA, 25 bp, Homo sapien
tccccaccctaacagtgccagacta

SEQ ID NO: 4890340 - DNA, 25 bp, Homo sapien
cagtgcagtccacctgcgtgaggga

SEQ ID NO: 4890341 - DNA, 25 bp, Homo sapien
gagggaatccctgcacatctttgct

SEQ ID NO: 4890342 - DNA, 25 bp, Homo sapien
tcactggcgcaaagatgtacacctg

SEQ ID NO: 4890343 - DNA, 25 bp, Homo sapien
gggatccactgactcccagtcggca

SEQ ID NO: 4890344 - DNA, 25 bp, Homo sapien
agactgtgagaaaacgtagtatctg

SEQ ID NO: 4890345 - DNA, 25 bp, Homo sapien
ctgtgagaaaacgtagtatctgggc

SEQ ID NO: 4890346 - DNA, 25 bp, Homo sapien
gactgtgagaaaacgtagtatctgg

SEQ ID NO: 4890347 - DNA, 25 bp, Homo sapien
tgtgagaaaacgtagtatctgggct

SEQ ID NO: 4890348 - DNA, 25 bp, Homo sapien
gcagctctgggccaattgcaaattg

SEQ ID NO: 4890349 - DNA, 25 bp, Homo sapien
ccatagatatatccctgggccggaa

SEQ ID NO: 4890350 - DNA, 25 bp, Homo sapien
tccgtggccaaatcgaagaggattc

SEQ ID NO: 4890351 - DNA, 25 bp, Homo sapien
tgtatacaaaatgctcctccgtggc

SEQ ID NO: 4890352 - DNA, 25 bp, Homo sapien
gaaagatgcttaggaacgtgaacca

SEQ ID NO: 4890353 - DNA, 25 bp, Homo sapien
aggacacaaatggagatgacccatc

SEQ ID NO: 4890354 - DNA, 25 bp, Homo sapien
gccaacaagatgcacaaaaggacac

SEQ ID NO: 4890355 - DNA, 25 bp, Homo sapien
aaggagcacagcgtagaaaaggagc

SEQ ID NO: 4890356 - DNA, 25 bp, Homo sapien
tttcatctgagagatctgatcggcc

SEQ ID NO: 4890357 - DNA, 25 bp, Homo sapien
agtgacttaggcctcactgtttggg

SEQ ID NO: 4890358 - DNA, 25 bp, Homo sapien
tggggcttgtctcccatccctttta

SEQ ID NO: 4890359 - DNA, 25 bp, Homo sapien
ctgcccacttgaagagtgacttagg

SEQ ID NO: 4890360 - DNA, 25 bp, Homo sapien
tgcacttattggaatttatccccat

SEQ ID NO: 4890361 - DNA, 25 bp, Homo sapien
tagtcttgcacttattggaatttat

SEQ ID NO: 4890362 - DNA, 25 bp, Homo sapien
gtcttgcacttattggaatttatcc

SEQ ID NO: 4890363 - DNA, 25 bp, Homo sapien
tcttgcacttattggaatttatccc

SEQ ID NO: 4890364 - DNA, 25 bp, Homo sapien
gatcacctggatgtactccaaccat

SEQ ID NO: 4890365 - DNA, 25 bp, Homo sapien
cattggaaataccacgtcgctgctc

SEQ ID NO: 4890366 - DNA, 25 bp, Homo sapien
tactcatcaggtgccacgtactgtt

SEQ ID NO: 4890367 - DNA, 25 bp, Homo sapien
tccgaaatacctttgactgtactca

SEQ ID NO: 4890368 - DNA, 25 bp, Homo sapien
cactcagcaaacattccgaaatacc

SEQ ID NO: 4890369 - DNA, 25 bp, Homo sapien
tccctgaggcactctggtagtcagt

SEQ ID NO: 4890370 - DNA, 25 bp, Homo sapien
gtccctgaggcactctggtagtcag

SEQ ID NO: 4890371 - DNA, 25 bp, Homo sapien
ctgaggcactctggtagtcagtcat

SEQ ID NO: 4890372 - DNA, 25 bp, Homo sapien
cctgaggcactctggtagtcagtca

SEQ ID NO: 4890373 - DNA, 25 bp, Homo sapien
gacaaacgaatgcaggtgttaggaa

SEQ ID NO: 4890374 - DNA, 25 bp, Homo sapien
ctgacaaacgaatgcaggtgttagg

SEQ ID NO: 4890375 - DNA, 25 bp, Homo sapien
acaaacgaatgcaggtgttaggaaa

SEQ ID NO: 4890376 - DNA, 25 bp, Homo sapien
tgacaaacgaatgcaggtgttagga

SEQ ID NO: 4890377 - DNA, 25 bp, Homo sapien
ctgcatggagcttctttgctgtgct

SEQ ID NO: 4890378 - DNA, 25 bp, Homo sapien
catggagcttctttgctgtgctatc

SEQ ID NO: 4890379 - DNA, 25 bp, Homo sapien
atggagcttctttgctgtgctatca

SEQ ID NO: 4890380 - DNA, 25 bp, Homo sapien
gcatggagcttctttgctgtgctat

SEQ ID NO: 4890381 - DNA, 25 bp, Homo sapien
ccctggttcccaatcgctgggccag

SEQ ID NO: 4890382 - DNA, 25 bp, Homo sapien
tggttcccaatcgctgggccaggtc

SEQ ID NO: 4890383 - DNA, 25 bp, Homo sapien
ggttcccaatcgctgggccaggtca

SEQ ID NO: 4890384 - DNA, 25 bp, Homo sapien
gtccctggttcccaatcgctgggcc

SEQ ID NO: 4890385 - DNA, 25 bp, Homo sapien
tcaaataatgtgtggcgctgaacca

SEQ ID NO: 4890386 - DNA, 25 bp, Homo sapien
gaagtatccatctttaccagggcac

SEQ ID NO: 4890387 - DNA, 25 bp, Homo sapien
caacaattactatgtggcaatgcca

SEQ ID NO: 4890388 - DNA, 25 bp, Homo sapien
ggctgttacagcttcaaccatcacg

SEQ ID NO: 4890389 - DNA, 25 bp, Homo sapien
ttctgctataatgcagcttcaaagt

SEQ ID NO: 4890390 - DNA, 25 bp, Homo sapien
gggctttggcacattggcaaaccag

SEQ ID NO: 4890391 - DNA, 25 bp, Homo sapien
gccatcaggatcaccagatgaaagt

SEQ ID NO: 4890392 - DNA, 25 bp, Homo sapien
cagccctgcaagcaaccaagttagg

SEQ ID NO: 4890393 - DNA, 25 bp, Homo sapien
caggacaacacgactgaggctcagg

SEQ ID NO: 4890394 - DNA, 25 bp, Homo sapien
tcagcttaatcatgaagggcgagga

SEQ ID NO: 4890395 - DNA, 25 bp, Homo sapien
ttcagcttaatcatgaagggcgagg

SEQ ID NO: 4890396 - DNA, 25 bp, Homo sapien
agcttaatcatgaagggcgaggagg

SEQ ID NO: 4890397 - DNA, 25 bp, Homo sapien
cagcttaatcatgaagggcgaggag

SEQ ID NO: 4890398 - DNA, 25 bp, Homo sapien
cacgtgttgcatctcaaggaaaaga

SEQ ID NO: 4890399 - DNA, 25 bp, Homo sapien
tggccggacgaaacacacgtgttgc

SEQ ID NO: 4890400 - DNA, 25 bp, Homo sapien
aaacgactgcccgaggaatgcggtc

SEQ ID NO: 4890401 - DNA, 25 bp, Homo sapien
tagaagaaataggtagcagcatcac

SEQ ID NO: 4890402 - DNA, 25 bp, Homo sapien
gagctaaaaattaaagcgatcacac

SEQ ID NO: 4890403 - DNA, 25 bp, Homo sapien
gctggatggaaagtgaagacgtagg

SEQ ID NO: 4890404 - DNA, 25 bp, Homo sapien
agtacaggtggaacatccagaatgc

SEQ ID NO: 4890405 - DNA, 25 bp, Homo sapien
ttaaagcgatcacactcatggagat

SEQ ID NO: 4890406 - DNA, 25 bp, Homo sapien
ttcaaggaggagttctagagggtgc

SEQ ID NO: 4890407 - DNA, 25 bp, Homo sapien
tgtgagttcaaggaggagttctaga

SEQ ID NO: 4890408 - DNA, 25 bp, Homo sapien
caaggaggagttctagagggtgcat

SEQ ID NO: 4890409 - DNA, 25 bp, Homo sapien
actgtgagttcaaggaggagttcta

SEQ ID NO: 4890410 - DNA, 25 bp, Homo sapien
catactgttcggcatcagaagcctg

SEQ ID NO: 4890411 - DNA, 25 bp, Homo sapien
ctttttgttcttcgctagttgggca

SEQ ID NO: 4890412 - DNA, 25 bp, Homo sapien
ggatagaccttaagatgcgcaatgg

SEQ ID NO: 4890413 - DNA, 25 bp, Homo sapien
gcgcaatggttttgggcacagtccc

SEQ ID NO: 4890414 - DNA, 25 bp, Homo sapien
agttctctcataaattctgtaactt

SEQ ID NO: 4890415 - DNA, 25 bp, Homo sapien
cagttctctcataaattctgtaact

SEQ ID NO: 4890416 - DNA, 25 bp, Homo sapien
acagttctctcataaattctgtaac

SEQ ID NO: 4890417 - DNA, 25 bp, Homo sapien
aaacagttctctcataaattctgta

SEQ ID NO: 4890418 - DNA, 25 bp, Homo sapien
tccaagtaaccactggtaacattct

SEQ ID NO: 4890419 - DNA, 25 bp, Homo sapien
gcagagctggtttagcaatgctagt

SEQ ID NO: 4890420 - DNA, 25 bp, Homo sapien
gcaatgctagttaatttccagttga

SEQ ID NO: 4890421 - DNA, 25 bp, Homo sapien
tattagttttatctgtagcttgcag

SEQ ID NO: 4890422 - DNA, 25 bp, Homo sapien
taatagcatgcacagttgtcaccgt

SEQ ID NO: 4890423 - DNA, 25 bp, Homo sapien
caccgtgcaccggtgtttcagcaga

SEQ ID NO: 4890424 - DNA, 25 bp, Homo sapien
tgctagtcggaaaggctgtttcaat

SEQ ID NO: 4890425 - DNA, 25 bp, Homo sapien
taattggtgtgtcagcagatgactg

SEQ ID NO: 4890426 - DNA, 25 bp, Homo sapien
ttgcgttgcagtgccgtcgagtaca

SEQ ID NO: 4890427 - DNA, 25 bp, Homo sapien
attttgcgttgcagtgccgtcgagt

SEQ ID NO: 4890428 - DNA, 25 bp, Homo sapien
gcagtgccgtcgagtacagctgagt

SEQ ID NO: 4890429 - DNA, 25 bp, Homo sapien
cgttgcagtgccgtcgagtacagct

SEQ ID NO: 4890430 - DNA, 25 bp, Homo sapien
ttaatcttctcctgatattctgggt

SEQ ID NO: 4890431 - DNA, 25 bp, Homo sapien
tcctgatattctgggttgatgtttc

SEQ ID NO: 4890432 - DNA, 25 bp, Homo sapien
ttttagcttcatagcctgtttaatc

SEQ ID NO: 4890433 - DNA, 25 bp, Homo sapien
tgatgtttcgtaatggctcccattg

SEQ ID NO: 4890434 - DNA, 25 bp, Homo sapien
gcaacactccttgcctgaatgcctt

SEQ ID NO: 4890435 - DNA, 25 bp, Homo sapien
accagcaacactccttgcctgaatg

SEQ ID NO: 4890436 - DNA, 25 bp, Homo sapien
tgcaactggcaggtgctatgaggct

SEQ ID NO: 4890437 - DNA, 25 bp, Homo sapien
gcaggttggagggacccactgagag

SEQ ID NO: 4890438 - DNA, 25 bp, Homo sapien
ttggctgcctgtcactctttgcaac

SEQ ID NO: 4890439 - DNA, 25 bp, Homo sapien
gacgcttggttgaaatacccagact

SEQ ID NO: 4890440 - DNA, 25 bp, Homo sapien
gtgcttctagggcaaattccagacg

SEQ ID NO: 4890441 - DNA, 25 bp, Homo sapien
accttggctgcctgtcactctttgc

SEQ ID NO: 4890442 - DNA, 25 bp, Homo sapien
agggcaaggcgcacgggcatggcat

SEQ ID NO: 4890443 - DNA, 25 bp, Homo sapien
gagtactcgggctcctggtcgcacg

SEQ ID NO: 4890444 - DNA, 25 bp, Homo sapien
aagggccagggcgagtactcgggct

SEQ ID NO: 4890445 - DNA, 25 bp, Homo sapien
gcatggcatctgcacggggcccaag

SEQ ID NO: 4890446 - DNA, 25 bp, Homo sapien
gagccgagcggcagcgcgagctgcc

SEQ ID NO: 4890447 - DNA, 25 bp, Homo sapien
agggcgctgtcgtgagctcgcccgc

SEQ ID NO: 4890448 - DNA, 25 bp, Homo sapien
tggagccgagcggcagcgcgagctg

SEQ ID NO: 4890449 - DNA, 25 bp, Homo sapien
ctgcccagggcgctgtcgtgagctc

SEQ ID NO: 4890450 - DNA, 25 bp, Homo sapien
gtccgctcgggaacctgggctgtcc

SEQ ID NO: 4890451 - DNA, 25 bp, Homo sapien
agctgaaggtccgctcgggaacctg

SEQ ID NO: 4890452 - DNA, 25 bp, Homo sapien
gtgggcgggcgggagcagctgaagg

SEQ ID NO: 4890453 - DNA, 25 bp, Homo sapien
gcagctgaaggtccgctcgggaacc

SEQ ID NO: 4890454 - DNA, 25 bp, Homo sapien
ccccacacaggcagccgcgccttca

SEQ ID NO: 4890455 - DNA, 25 bp, Homo sapien
cccacacaggcagccgcgccttcat

SEQ ID NO: 4890456 - DNA, 25 bp, Homo sapien
cggcgcccgcgagcggcccccacac

SEQ ID NO: 4890457 - DNA, 25 bp, Homo sapien
ctccggcgcccgcgagcggccccca

SEQ ID NO: 4890458 - DNA, 25 bp, Homo sapien
taccagtggagaggtgtgcattcca

SEQ ID NO: 4890459 - DNA, 25 bp, Homo sapien
tatacaatgtacacagaccgagccg

SEQ ID NO: 4890460 - DNA, 25 bp, Homo sapien
gtgcattccagacacttatacaatg

SEQ ID NO: 4890461 - DNA, 25 bp, Homo sapien
gaccgagccgtctacctgttgggca

SEQ ID NO: 4890462 - DNA, 25 bp, Homo sapien
tcagaaggggatgttactgaacaac

SEQ ID NO: 4890463 - DNA, 25 bp, Homo sapien
gtcaagtccaggctatgtccgaggc

SEQ ID NO: 4890464 - DNA, 25 bp, Homo sapien
tccgaggcccgagtgaatagtggaa

SEQ ID NO: 4890465 - DNA, 25 bp, Homo sapien
aatagtggaagtctcagaaggggat

SEQ ID NO: 4890466 - DNA, 25 bp, Homo sapien
tcagaccagggttgccacatgactg

SEQ ID NO: 4890467 - DNA, 25 bp, Homo sapien
cagaccagggttgccacatgactgc

SEQ ID NO: 4890468 - DNA, 25 bp, Homo sapien
catcgaaggaaatgatggtgcatac

SEQ ID NO: 4890469 - DNA, 25 bp, Homo sapien
aaacaaggcatgatttagcataggc

SEQ ID NO: 4890470 - DNA, 25 bp, Homo sapien
tgaagttatcagtcctaaaggaaca

SEQ ID NO: 4890471 - DNA, 25 bp, Homo sapien
tagcataggctgttacatcgaagga

SEQ ID NO: 4890472 - DNA, 25 bp, Homo sapien
cccagagcaaaggtgctgattctgt

SEQ ID NO: 4890473 - DNA, 25 bp, Homo sapien
ttaccttcctgattacatctgggcc

SEQ ID NO: 4890474 - DNA, 25 bp, Homo sapien
tcactgaaatctgatgggccctctt

SEQ ID NO: 4890475 - DNA, 25 bp, Homo sapien
tgatgatcaatgagagccctctttt

SEQ ID NO: 4890476 - DNA, 25 bp, Homo sapien
ggtgcgcgagcacgggtgcgcccag

SEQ ID NO: 4890477 - DNA, 25 bp, Homo sapien
cgcccagcctgtccgccctggactt

SEQ ID NO: 4890478 - DNA, 25 bp, Homo sapien
ccagcctgtccgccctggacttctc

SEQ ID NO: 4890479 - DNA, 25 bp, Homo sapien
cttggggtgcgcgagcacgggtgcg

SEQ ID NO: 4890480 - DNA, 25 bp, Homo sapien
cttttgagagctgaacgaatgcgtc

SEQ ID NO: 4890481 - DNA, 25 bp, Homo sapien
cgtccaatggtacagaatgagctta

SEQ ID NO: 4890482 - DNA, 25 bp, Homo sapien
tgagcttaacctccgcgtcggcctt

SEQ ID NO: 4890483 - DNA, 25 bp, Homo sapien
tcggccttgccttccgccctcaagg

SEQ ID NO: 4890484 - DNA, 25 bp, Homo sapien
gagttcacactggttactacaacac

SEQ ID NO: 4890485 - DNA, 25 bp, Homo sapien
gttcacactggttactacaacacat

SEQ ID NO: 4890486 - DNA, 25 bp, Homo sapien
ctggaagagttcacactggttacta

SEQ ID NO: 4890487 - DNA, 25 bp, Homo sapien
aagagttcacactggttactacaac

SEQ ID NO: 4890488 - DNA, 25 bp, Homo sapien
aaaccaaggctcattgtgctcactc

SEQ ID NO: 4890489 - DNA, 25 bp, Homo sapien
aggctcattgtgctcactcaagggc

SEQ ID NO: 4890490 - DNA, 25 bp, Homo sapien
accaaggctcattgtgctcactcaa

SEQ ID NO: 4890491 - DNA, 25 bp, Homo sapien
caaggctcattgtgctcactcaagg

SEQ ID NO: 4890492 - DNA, 25 bp, Homo sapien
tatgttttccccgtggataaggaca

SEQ ID NO: 4890493 - DNA, 25 bp, Homo sapien
gatctgagtggcctcacaaattatg

SEQ ID NO: 4890494 - DNA, 25 bp, Homo sapien
caagataatcaatgatctgagtggc

SEQ ID NO: 4890495 - DNA, 25 bp, Homo sapien
ggcacttctccagttgagttcaaac

SEQ ID NO: 4890496 - DNA, 25 bp, Homo sapien
gcagctctcggtaatgttgtacccg

SEQ ID NO: 4890497 - DNA, 25 bp, Homo sapien
aatgcagccatgtgtataggcatcc

SEQ ID NO: 4890498 - DNA, 25 bp, Homo sapien
cttgtagttgcataagccgggatca

SEQ ID NO: 4890499 - DNA, 25 bp, Homo sapien
tccattggcaaggagtcaagcagct

SEQ ID NO: 4890500 - DNA, 25 bp, Homo sapien
cacttagagcaaggcccagcacttt

SEQ ID NO: 4890501 - DNA, 25 bp, Homo sapien
gagttttacccaagattggccctca

SEQ ID NO: 4890502 - DNA, 25 bp, Homo sapien
tccgactggttcatggatcgatcca

SEQ ID NO: 4890503 - DNA, 25 bp, Homo sapien
cataatcctaggcagatcccaggtt

SEQ ID NO: 4890504 - DNA, 25 bp, Homo sapien
ctacaccagtaacaaggagaagcag

SEQ ID NO: 4890505 - DNA, 25 bp, Homo sapien
ctcacctttcaaatggaaccataag

SEQ ID NO: 4890506 - DNA, 25 bp, Homo sapien
gaaactcaatgacaagagcatgagc

SEQ ID NO: 4890507 - DNA, 25 bp, Homo sapien
tctgccttgggcttaccctgtctat

SEQ ID NO: 4890508 - DNA, 25 bp, Homo sapien
tgtatgcttcttgtaaatctgggtt

SEQ ID NO: 4890509 - DNA, 25 bp, Homo sapien
gttttgcaatgtatgcttcttgtaa

SEQ ID NO: 4890510 - DNA, 25 bp, Homo sapien
tgcaatgtatgcttcttgtaaatct

SEQ ID NO: 4890511 - DNA, 25 bp, Homo sapien
caagtttcttcagctcagactctgt

SEQ ID NO: 4890512 - DNA, 25 bp, Homo sapien
aagtagaacatttactccgtgcagt

SEQ ID NO: 4890513 - DNA, 25 bp, Homo sapien
cgtgcagtgtatgtcaactgaggac

SEQ ID NO: 4890514 - DNA, 25 bp, Homo sapien
tattctagaaatagtggtactttac

SEQ ID NO: 4890515 - DNA, 25 bp, Homo sapien
catgtgtactggtgaactgcaatat

SEQ ID NO: 4890516 - DNA, 25 bp, Homo sapien
cattgtcatgatcaagcagctttga

SEQ ID NO: 4890517 - DNA, 25 bp, Homo sapien
tacttgacattgtcatgatcaagca

SEQ ID NO: 4890518 - DNA, 25 bp, Homo sapien
tcagtttcaacctgatccaagactt

SEQ ID NO: 4890519 - DNA, 25 bp, Homo sapien
tcttcaaatacttgacattgtcatg

SEQ ID NO: 4890520 - DNA, 25 bp, Homo sapien
actttagattggaggctgtctccct

SEQ ID NO: 4890521 - DNA, 25 bp, Homo sapien
ccagtctacagatgcccacgtgctg

SEQ ID NO: 4890522 - DNA, 25 bp, Homo sapien
gtctacagatgcccacgtgctggtc

SEQ ID NO: 4890523 - DNA, 25 bp, Homo sapien
acgtgctggtccttattacacttta

SEQ ID NO: 4890524 - DNA, 25 bp, Homo sapien
tcagtcgatgcaatgtgacagcgag

SEQ ID NO: 4890525 - DNA, 25 bp, Homo sapien
gtgaaggattcaccgcagagccaag

SEQ ID NO: 4890526 - DNA, 25 bp, Homo sapien
caagacacgctcgtaataggtttcc

SEQ ID NO: 4890527 - DNA, 25 bp, Homo sapien
tgacagcgagtgagacgtctgccag

SEQ ID NO: 4890528 - DNA, 25 bp, Homo sapien
taatatattgttgacatgtcctaaa

SEQ ID NO: 4890529 - DNA, 25 bp, Homo sapien
gcagcactgcagagattaatatatt

SEQ ID NO: 4890530 - DNA, 25 bp, Homo sapien
cacaagggtcgtgccaagaactttt

SEQ ID NO: 4890531 - DNA, 25 bp, Homo sapien
cttggccacccggaatgctgttggc

SEQ ID NO: 4890532 - DNA, 25 bp, Homo sapien
aaataatttggtctgggtctaaatg

SEQ ID NO: 4890533 - DNA, 25 bp, Homo sapien
ctaaatgctaatatcatgctgccaa

SEQ ID NO: 4890534 - DNA, 25 bp, Homo sapien
ttggtctgggtctaaatgctaatat

SEQ ID NO: 4890535 - DNA, 25 bp, Homo sapien
aaatgctaatatcatgctgccaagc

SEQ ID NO: 4890536 - DNA, 25 bp, Homo sapien
tggaggcacccgaagcttactttct

SEQ ID NO: 4890537 - DNA, 25 bp, Homo sapien
tattgctacctgaacccctgtgttg

SEQ ID NO: 4890538 - DNA, 25 bp, Homo sapien
caggcagccatgaacgttggaggca

SEQ ID NO: 4890539 - DNA, 25 bp, Homo sapien
cacgggcaatcacagggtctagcta

SEQ ID NO: 4890540 - DNA, 25 bp, Homo sapien
cttccacatgaactgaggtatcccc

SEQ ID NO: 4890541 - DNA, 25 bp, Homo sapien
ttcatgggacacaccgagactgtcc

SEQ ID NO: 4890542 - DNA, 25 bp, Homo sapien
caaaccatttgttgcagttccaagg

SEQ ID NO: 4890543 - DNA, 25 bp, Homo sapien
gggacctcggcacatcatctctatg

SEQ ID NO: 4890544 - DNA, 25 bp, Homo sapien
ggtatgtcccagcaacagattcaga

SEQ ID NO: 4890545 - DNA, 25 bp, Homo sapien
gatgagtacactgaccagtcaccga

SEQ ID NO: 4890546 - DNA, 25 bp, Homo sapien
aatggattcaaaaggcatctgctgc

SEQ ID NO: 4890547 - DNA, 25 bp, Homo sapien
aaatctacaacgctggtgtcaacag

SEQ ID NO: 4890548 - DNA, 25 bp, Homo sapien
taaccgtgcatatttaaatgaagca

SEQ ID NO: 4890549 - DNA, 25 bp, Homo sapien
taggccgctattcattttaaccgtg

SEQ ID NO: 4890550 - DNA, 25 bp, Homo sapien
ggcatcctatagctaagtatcttga

SEQ ID NO: 4890551 - DNA, 25 bp, Homo sapien
tgttataacgaaaatatggcatcct

SEQ ID NO: 4890552 - DNA, 25 bp, Homo sapien
caaagagtatatcaaggcccaccac

SEQ ID NO: 4890553 - DNA, 25 bp, Homo sapien
tttgtctcaagtgctacagagctgc

SEQ ID NO: 4890554 - DNA, 25 bp, Homo sapien
gcaataaaggatactgctgtcatcc

SEQ ID NO: 4890555 - DNA, 25 bp, Homo sapien
tcaggccccaacttaggtgcaagca

SEQ ID NO: 4890556 - DNA, 25 bp, Homo sapien
aacaccaccgcactcagagccagcc

SEQ ID NO: 4890557 - DNA, 25 bp, Homo sapien
aaacaccaccgcactcagagccagc

SEQ ID NO: 4890558 - DNA, 25 bp, Homo sapien
taaacaccaccgcactcagagccag

SEQ ID NO: 4890559 - DNA, 25 bp, Homo sapien
gtaaacaccaccgcactcagagcca

SEQ ID NO: 4890560 - DNA, 25 bp, Homo sapien
aaatgttttatccttagaattgctt

SEQ ID NO: 4890561 - DNA, 25 bp, Homo sapien
gactctgtagggtaacctatgtctt

SEQ ID NO: 4890562 - DNA, 25 bp, Homo sapien
cttacatgcctgaactaccaaaaaa

SEQ ID NO: 4890563 - DNA, 25 bp, Homo sapien
taaagtggagaaatacactgaacat

SEQ ID NO: 4890564 - DNA, 25 bp, Homo sapien
tgcagacacgcccacatacattagg

SEQ ID NO: 4890565 - DNA, 25 bp, Homo sapien
tcagatacagtacttggacaggacc

SEQ ID NO: 4890566 - DNA, 25 bp, Homo sapien
catgagaagtttacaggccagcaaa

SEQ ID NO: 4890567 - DNA, 25 bp, Homo sapien
catatgaaagcaggattgtgtgacc

SEQ ID NO: 4890568 - DNA, 25 bp, Homo sapien
cacattagaaggattcaaggattgg

SEQ ID NO: 4890569 - DNA, 25 bp, Homo sapien
tccagtggggaatactcactgccac

SEQ ID NO: 4890570 - DNA, 25 bp, Homo sapien
cactgccacattagaaggattcaag

SEQ ID NO: 4890571 - DNA, 25 bp, Homo sapien
gggaatactcactgccacattagaa

SEQ ID NO: 4890572 - DNA, 25 bp, Homo sapien
ccagccgaggcttcagaaatcttta

SEQ ID NO: 4890573 - DNA, 25 bp, Homo sapien
aatctttaaatcaccctctggcatg

SEQ ID NO: 4890574 - DNA, 25 bp, Homo sapien
taatgttctcttaatactttgcgtc

SEQ ID NO: 4890575 - DNA, 25 bp, Homo sapien
ttttgttgacaaatctgctggcagt

SEQ ID NO: 4890576 - DNA, 25 bp, Homo sapien
gaattagaatcaaccatcactggag

SEQ ID NO: 4890577 - DNA, 25 bp, Homo sapien
cattgagcaatctagaagtgtacca

SEQ ID NO: 4890578 - DNA, 25 bp, Homo sapien
cactctggaaggatatctttgctag

SEQ ID NO: 4890579 - DNA, 25 bp, Homo sapien
tgtcctacaagtacctgaggctctg

SEQ ID NO: 4890580 - DNA, 25 bp, Homo sapien
tgttgttcaatttgttttcaggagg

SEQ ID NO: 4890581 - DNA, 25 bp, Homo sapien
gcatagaattcctcttaaggaccca

SEQ ID NO: 4890582 - DNA, 25 bp, Homo sapien
gcccaagggcaaacaagggtataga

SEQ ID NO: 4890583 - DNA, 25 bp, Homo sapien
caaacaagggtatagatcaagcaat

SEQ ID NO: 4890584 - DNA, 25 bp, Homo sapien
atatacctaatgttagacttttatt

SEQ ID NO: 4890585 - DNA, 25 bp, Homo sapien
aaacctctgggccaggcatgggtgg

SEQ ID NO: 4890586 - DNA, 25 bp, Homo sapien
acaaaacaaacctctgggccaggca

SEQ ID NO: 4890587 - DNA, 25 bp, Homo sapien
tatttgtagctttcttaacaaaaca

SEQ ID NO: 4890588 - DNA, 25 bp, Homo sapien
caaaactcatgtgttggaatccaca

SEQ ID NO: 4890589 - DNA, 25 bp, Homo sapien
caactgcatagaaccatattgtgtg

SEQ ID NO: 4890590 - DNA, 25 bp, Homo sapien
tccagtagatatccaatgaaagcca

SEQ ID NO: 4890591 - DNA, 25 bp, Homo sapien
caggtaacactgtccgtgatgtgca

SEQ ID NO: 4890592 - DNA, 25 bp, Homo sapien
accagggtctgattgtacccctcca

SEQ ID NO: 4890593 - DNA, 25 bp, Homo sapien
ccagggtctgattgtacccctccat

SEQ ID NO: 4890594 - DNA, 25 bp, Homo sapien
gaacctagcaggattagctgagctg

SEQ ID NO: 4890595 - DNA, 25 bp, Homo sapien
ggtccagttatcctagaagcttcag

SEQ ID NO: 4890596 - DNA, 25 bp, Homo sapien
cagctggctacacacataggcgaga

SEQ ID NO: 4890597 - DNA, 25 bp, Homo sapien
gatttttggcctagcaaccctgaca

SEQ ID NO: 4890598 - DNA, 25 bp, Homo sapien
attcatcttccttaaggtatgtttt

SEQ ID NO: 4890599 - DNA, 25 bp, Homo sapien
tcatcttccttaaggtatgtttttg

SEQ ID NO: 4890600 - DNA, 25 bp, Homo sapien
gcattcatcttccttaaggtatgtt

SEQ ID NO: 4890601 - DNA, 25 bp, Homo sapien
tgcattcatcttccttaaggtatgt

SEQ ID NO: 4890602 - DNA, 25 bp, Homo sapien
cactgttgtctttggcaccaggtga

SEQ ID NO: 4890603 - DNA, 25 bp, Homo sapien
tgttcttccaccagtatgctgcata

SEQ ID NO: 4890604 - DNA, 25 bp, Homo sapien
tcttccaccagtatgctgcatatga

SEQ ID NO: 4890605 - DNA, 25 bp, Homo sapien
ccactgttgtctttggcaccaggtg

SEQ ID NO: 4890606 - DNA, 25 bp, Homo sapien
tttgctgaaataaacccaactggca

SEQ ID NO: 4890607 - DNA, 25 bp, Homo sapien
ctgaaataaacccaactggcaggtg

SEQ ID NO: 4890608 - DNA, 25 bp, Homo sapien
ttgctgaaataaacccaactggcag

SEQ ID NO: 4890609 - DNA, 25 bp, Homo sapien
aaataaacccaactggcaggtgcca

SEQ ID NO: 4890610 - DNA, 25 bp, Homo sapien
cataccactgagtccacaagagcaa

SEQ ID NO: 4890611 - DNA, 25 bp, Homo sapien
cacgagtcaagaatatgtcatctgg

SEQ ID NO: 4890612 - DNA, 25 bp, Homo sapien
tgttcacagctatattgcacagggc

SEQ ID NO: 4890613 - DNA, 25 bp, Homo sapien
aatttaggccattaacacgagtcaa

SEQ ID NO: 4890614 - DNA, 25 bp, Homo sapien
ctaggcttaggccaagttaacctgg

SEQ ID NO: 4890615 - DNA, 25 bp, Homo sapien
taactcactttcgtaaagctaatga

SEQ ID NO: 4890616 - DNA, 25 bp, Homo sapien
cagctaaggtgtagatgtaaacaat

SEQ ID NO: 4890617 - DNA, 25 bp, Homo sapien
gactccccacttggtgttcttgtga

SEQ ID NO: 4890618 - DNA, 25 bp, Homo sapien
tatatgtcaagatgagggtctagtt

SEQ ID NO: 4890619 - DNA, 25 bp, Homo sapien
tttaaacatgatgtgattgcatttg

SEQ ID NO: 4890620 - DNA, 25 bp, Homo sapien
gatgggtagcttgtaactattttct

SEQ ID NO: 4890621 - DNA, 25 bp, Homo sapien
cttgactatgcttgtgggataattc

SEQ ID NO: 4890622 - DNA, 25 bp, Homo sapien
aacatttgtagggtatgtgagatat

SEQ ID NO: 4890623 - DNA, 25 bp, Homo sapien
ccttcccagctcttaataggcatca

SEQ ID NO: 4890624 - DNA, 25 bp, Homo sapien
ttaaccagctccatattccccacaa

SEQ ID NO: 4890625 - DNA, 25 bp, Homo sapien
agtttccctttcgatgcagagctca

SEQ ID NO: 4890626 - DNA, 25 bp, Homo sapien
ttggaatattatgcaccatagaaag

SEQ ID NO: 4890627 - DNA, 25 bp, Homo sapien
tgtcaaagacctagaggtagaaata

SEQ ID NO: 4890628 - DNA, 25 bp, Homo sapien
gcaatttgtcaaagacctagaggta

SEQ ID NO: 4890629 - DNA, 25 bp, Homo sapien
atgaacaccttggaatattatgcac

SEQ ID NO: 4890630 - DNA, 25 bp, Homo sapien
gtccctggatgagctcttgtacctg

SEQ ID NO: 4890631 - DNA, 25 bp, Homo sapien
cttcctaaggcccatggtgcgtgca

SEQ ID NO: 4890632 - DNA, 25 bp, Homo sapien
gaacagatggcacttggtccctgga

SEQ ID NO: 4890633 - DNA, 25 bp, Homo sapien
gatggcatataagacccgataccta

SEQ ID NO: 4890634 - DNA, 25 bp, Homo sapien
tgtggtgaaatgatgtctccgacat

SEQ ID NO: 4890635 - DNA, 25 bp, Homo sapien
atgtggtgaaatgatgtctccgaca

SEQ ID NO: 4890636 - DNA, 25 bp, Homo sapien
gagtggatcctgtaaacttgcctca

SEQ ID NO: 4890637 - DNA, 25 bp, Homo sapien
taggctttgaggaatgaccccaggg

SEQ ID NO: 4890638 - DNA, 25 bp, Homo sapien
cacacttaggagttatggcaacact

SEQ ID NO: 4890639 - DNA, 25 bp, Homo sapien
gaccccagggagctagatatgaact

SEQ ID NO: 4890640 - DNA, 25 bp, Homo sapien
gagctagacatatgaccaatttggg

SEQ ID NO: 4890641 - DNA, 25 bp, Homo sapien
agaggtggcgatgaaatcctgtgcc

SEQ ID NO: 4890642 - DNA, 25 bp, Homo sapien
catgcagacatgtgatagggctgac

SEQ ID NO: 4890643 - DNA, 25 bp, Homo sapien
catcaccctgagaagaatttgcctg

SEQ ID NO: 4890644 - DNA, 25 bp, Homo sapien
ttcaaggctccgtgatgtgatggga

SEQ ID NO: 4890645 - DNA, 25 bp, Homo sapien
tcagggaacaataccaccatgcagg

SEQ ID NO: 4890646 - DNA, 25 bp, Homo sapien
gggagctctgctgtaagtaaagcac

SEQ ID NO: 4890647 - DNA, 25 bp, Homo sapien
agtaaagcactaatcagtgaggaga

SEQ ID NO: 4890648 - DNA, 25 bp, Homo sapien
tagttttataagcttctacctggga

SEQ ID NO: 4890649 - DNA, 25 bp, Homo sapien
ctgtctgtcatggaaatgttaagaa

SEQ ID NO: 4890650 - DNA, 25 bp, Homo sapien
tgttggtgctgagatccatatttag

SEQ ID NO: 4890651 - DNA, 25 bp, Homo sapien
cagtttagtactgtaaagtcaggaa

SEQ ID NO: 4890652 - DNA, 25 bp, Homo sapien
tttgtctctggatcatgggatctct

SEQ ID NO: 4890653 - DNA, 25 bp, Homo sapien
gtaggctacaggaaacaacttgcat

SEQ ID NO: 4890654 - DNA, 25 bp, Homo sapien
tgtagagcaaactagaacaaatggc

SEQ ID NO: 4890655 - DNA, 25 bp, Homo sapien
ttacaaagaagatagcaagtcagtc

SEQ ID NO: 4890656 - DNA, 25 bp, Homo sapien
tgtcagaggcactaaatggtagctc

SEQ ID NO: 4890657 - DNA, 25 bp, Homo sapien
tatcaatacgtcctccgacagccac

SEQ ID NO: 4890658 - DNA, 25 bp, Homo sapien
gggatgcccagatcataaggatcgc

SEQ ID NO: 4890659 - DNA, 25 bp, Homo sapien
actatcaatacgtcctccgacagcc

SEQ ID NO: 4890660 - DNA, 25 bp, Homo sapien
gaagccactatcaatacgtcctccg

SEQ ID NO: 4890661 - DNA, 25 bp, Homo sapien
gtggatcccaaacttatccagtaat

SEQ ID NO: 4890662 - DNA, 25 bp, Homo sapien
taattaaggaccagtgcaaatgaca

SEQ ID NO: 4890663 - DNA, 25 bp, Homo sapien
tttctttctatatctgtggatccca

SEQ ID NO: 4890664 - DNA, 25 bp, Homo sapien
gtaattaaggaccagtgcaaatgac

SEQ ID NO: 4890665 - DNA, 25 bp, Homo sapien
tataagaacataaagagcaagtgga

SEQ ID NO: 4890666 - DNA, 25 bp, Homo sapien
gtccttataagaacataaagagcaa

SEQ ID NO: 4890667 - DNA, 25 bp, Homo sapien
taagaacataaagagcaagtggatg

SEQ ID NO: 4890668 - DNA, 25 bp, Homo sapien
cttataagaacataaagagcaagtg

SEQ ID NO: 4890669 - DNA, 25 bp, Homo sapien
gagaactccagagctttcgtacagt

SEQ ID NO: 4890670 - DNA, 25 bp, Homo sapien
caggcagtcacattctctgagaact

SEQ ID NO: 4890671 - DNA, 25 bp, Homo sapien
taatgaccttaaacaagcagggcag

SEQ ID NO: 4890672 - DNA, 25 bp, Homo sapien
tgctctaagtcttttggcaaaggcc

SEQ ID NO: 4890673 - DNA, 25 bp, Homo sapien
gagggtgcttggattctgttatctt

SEQ ID NO: 4890674 - DNA, 25 bp, Homo sapien
aagagggtgcttggattctgttatc

SEQ ID NO: 4890675 - DNA, 25 bp, Homo sapien
gggtgcttggattctgttatcttta

SEQ ID NO: 4890676 - DNA, 25 bp, Homo sapien
gaaagagggtgcttggattctgtta

SEQ ID NO: 4890677 - DNA, 25 bp, Homo sapien
gttagccaattttcacggtggaata

SEQ ID NO: 4890678 - DNA, 25 bp, Homo sapien
ttcttgagtgttaaagagatccctg

SEQ ID NO: 4890679 - DNA, 25 bp, Homo sapien
tggaggatcgtttctttctcatcac

SEQ ID NO: 4890680 - DNA, 25 bp, Homo sapien
catctgagtagtttgcatcgtacgc

SEQ ID NO: 4890681 - DNA, 25 bp, Homo sapien
cactgctcaggggacaggtgcacaa

SEQ ID NO: 4890682 - DNA, 25 bp, Homo sapien
ggtgcacaaaaatctcggaaaccat

SEQ ID NO: 4890683 - DNA, 25 bp, Homo sapien
agactactcactgggtacagtatac

SEQ ID NO: 4890684 - DNA, 25 bp, Homo sapien
tgaaataatggcactcgtagccacc

SEQ ID NO: 4890685 - DNA, 25 bp, Homo sapien
tccataaggacttgtggaataaaaa

SEQ ID NO: 4890686 - DNA, 25 bp, Homo sapien
ccataaggacttgtggaataaaaat

SEQ ID NO: 4890687 - DNA, 25 bp, Homo sapien
ttccataaggacttgtggaataaaa

SEQ ID NO: 4890688 - DNA, 25 bp, Homo sapien
cataaggacttgtggaataaaaatt

SEQ ID NO: 4890689 - DNA, 25 bp, Homo sapien
tctgaacaagctaccagtagtccca

SEQ ID NO: 4890690 - DNA, 25 bp, Homo sapien
accgggacctctgaacaagctacca

SEQ ID NO: 4890691 - DNA, 25 bp, Homo sapien
aaggacaccgggacctctgaacaag

SEQ ID NO: 4890692 - DNA, 25 bp, Homo sapien
atagctcaaggacaccgggacctct

SEQ ID NO: 4890693 - DNA, 25 bp, Homo sapien
agataccgcctaaacttcttacaag

SEQ ID NO: 4890694 - DNA, 25 bp, Homo sapien
tccttgtgggtaccggatgtcttcc

SEQ ID NO: 4890695 - DNA, 25 bp, Homo sapien
tcctggttccatttattgccttcga

SEQ ID NO: 4890696 - DNA, 25 bp, Homo sapien
tgaagtttactctcaagataccgcc

SEQ ID NO: 4890697 - DNA, 25 bp, Homo sapien
atcatcttcaaatcagatgaaactg

SEQ ID NO: 4890698 - DNA, 25 bp, Homo sapien
ttcccagtaatattcaataagcaac

SEQ ID NO: 4890699 - DNA, 25 bp, Homo sapien
cactccagaacattcctcctaattt

SEQ ID NO: 4890700 - DNA, 25 bp, Homo sapien
aaagataaatcactccagaacattc

SEQ ID NO: 4890701 - DNA, 25 bp, Homo sapien
cctgttttcccagtaatattcaata

SEQ ID NO: 4890702 - DNA, 25 bp, Homo sapien
tcaatcaaactctgatgcaaaagtt

SEQ ID NO: 4890703 - DNA, 25 bp, Homo sapien
tcaaactctgatgcaaaagttgccc

SEQ ID NO: 4890704 - DNA, 25 bp, Homo sapien
tgatgcaaaagttgccccatttagt

SEQ ID NO: 4890705 - DNA, 25 bp, Homo sapien
aaactctgatgcaaaagttgcccca

SEQ ID NO: 4890706 - DNA, 25 bp, Homo sapien
ccctcgtgctctggttcgtgcaaga

SEQ ID NO: 4890707 - DNA, 25 bp, Homo sapien
tgggagttggactaacactggcagc

SEQ ID NO: 4890708 - DNA, 25 bp, Homo sapien
caacattgcacataatcttgggagt

SEQ ID NO: 4890709 - DNA, 25 bp, Homo sapien
gatacaagagaactggagaccaagg

SEQ ID NO: 4890710 - DNA, 25 bp, Homo sapien
gtattttaatttgtgggtcattgtc

SEQ ID NO: 4890711 - DNA, 25 bp, Homo sapien
gcagttattcagttcatcattacca

SEQ ID NO: 4890712 - DNA, 25 bp, Homo sapien
tattttaatttgtgggtcattgtcc

SEQ ID NO: 4890713 - DNA, 25 bp, Homo sapien
gacgctaagtgagtgagtctgtcct

SEQ ID NO: 4890714 - DNA, 25 bp, Homo sapien
tcctagacgctaagtgagtgagtct

SEQ ID NO: 4890715 - DNA, 25 bp, Homo sapien
ctgactcctagacgctaagtgagtg

SEQ ID NO: 4890716 - DNA, 25 bp, Homo sapien
gactcctagacgctaagtgagtgag

SEQ ID NO: 4890717 - DNA, 25 bp, Homo sapien
cagtgtagggctatcggagacagca

SEQ ID NO: 4890718 - DNA, 25 bp, Homo sapien
tttgttcagtgtagggctatcggag

SEQ ID NO: 4890719 - DNA, 25 bp, Homo sapien
agcagaagaaccttcaatgaccttc

SEQ ID NO: 4890720 - DNA, 25 bp, Homo sapien
tgaccttccgggctttagcataaaa

SEQ ID NO: 4890721 - DNA, 25 bp, Homo sapien
tttctggcacacaacaacgagggct

SEQ ID NO: 4890722 - DNA, 25 bp, Homo sapien
tttgaaggtcttgcatgggtcagca

SEQ ID NO: 4890723 - DNA, 25 bp, Homo sapien
cagtgagctgagaaaatcgatgtga

SEQ ID NO: 4890724 - DNA, 25 bp, Homo sapien
gctctctgttggatcccctctgaaa

SEQ ID NO: 4890725 - DNA, 25 bp, Homo sapien
gatacttatcacaactcggaagctg

SEQ ID NO: 4890726 - DNA, 25 bp, Homo sapien
tcggaagctgtcaatagagtgcatc

SEQ ID NO: 4890727 - DNA, 25 bp, Homo sapien
gagtgcatccagaggttaaagaggc

SEQ ID NO: 4890728 - DNA, 25 bp, Homo sapien
tgccaacaaaaggaagtcaccattt

SEQ ID NO: 4890729 - DNA, 25 bp, Homo sapien
tctgtacccacggatgtttgctgca

SEQ ID NO: 4890730 - DNA, 25 bp, Homo sapien
ttcaagaaattgatgacggtttccc

SEQ ID NO: 4890731 - DNA, 25 bp, Homo sapien
gaggaaatgccagaatagctgtagc

SEQ ID NO: 4890732 - DNA, 25 bp, Homo sapien
tgatgacggtttcccatatgaggaa

SEQ ID NO: 4890733 - DNA, 25 bp, Homo sapien
aatgtgttgatctggtggctggact

SEQ ID NO: 4890734 - DNA, 25 bp, Homo sapien
ggtagcctctccaaagttaatgagt

SEQ ID NO: 4890735 - DNA, 25 bp, Homo sapien
tctgggtagcctctccaaagttaat

SEQ ID NO: 4890736 - DNA, 25 bp, Homo sapien
agtttggagaatgtgttgatctggt

SEQ ID NO: 4890737 - DNA, 25 bp, Homo sapien
ctgcaataatggctttcaggtagtc

SEQ ID NO: 4890738 - DNA, 25 bp, Homo sapien
cacctgcaataatggctttcaggta

SEQ ID NO: 4890739 - DNA, 25 bp, Homo sapien
ctaatcagcacctgcaataatggct

SEQ ID NO: 4890740 - DNA, 25 bp, Homo sapien
taatcagcacctgcaataatggctt

SEQ ID NO: 4890741 - DNA, 25 bp, Homo sapien
gtacctaactcagtagctgctcttc

SEQ ID NO: 4890742 - DNA, 25 bp, Homo sapien
ttctcgccttcatcactagctgtag

SEQ ID NO: 4890743 - DNA, 25 bp, Homo sapien
gaaatgactgaaagtgtacctaact

SEQ ID NO: 4890744 - DNA, 25 bp, Homo sapien
ctttccccttgcgtctaactttcag

SEQ ID NO: 4890745 - DNA, 25 bp, Homo sapien
cagcaggccctgactatagaagaat

SEQ ID NO: 4890746 - DNA, 25 bp, Homo sapien
cattgaagaagaccaagctgggatc

SEQ ID NO: 4890747 - DNA, 25 bp, Homo sapien
taggcatcacgaaaatgaaggactc

SEQ ID NO: 4890748 - DNA, 25 bp, Homo sapien
taaactcaggcggttgggctgacat

SEQ ID NO: 4890749 - DNA, 25 bp, Homo sapien
ctgcacccagacagtatggccagtt

SEQ ID NO: 4890750 - DNA, 25 bp, Homo sapien
tgcacccagacagtatggccagttt

SEQ ID NO: 4890751 - DNA, 25 bp, Homo sapien
taactccagttctatcttgaggaaa

SEQ ID NO: 4890752 - DNA, 25 bp, Homo sapien
ctaaaatgtgctatggaatcctgga

SEQ ID NO: 4890753 - DNA, 25 bp, Homo sapien
gctacttctatagtgtttctcccca

SEQ ID NO: 4890754 - DNA, 25 bp, Homo sapien
tgcagaaactgtcccggtcaagagg

SEQ ID NO: 4890755 - DNA, 25 bp, Homo sapien
tatatcaatctaaactttccatggg

SEQ ID NO: 4890756 - DNA, 25 bp, Homo sapien
tgaaatcgtaaatagcaatcggtac

SEQ ID NO: 4890757 - DNA, 25 bp, Homo sapien
caatcggtacatcagagtgctcctc

SEQ ID NO: 4890758 - DNA, 25 bp, Homo sapien
agattcatgccccatggccaagtta

SEQ ID NO: 4890759 - DNA, 25 bp, Homo sapien
gatggtaagtccctggaatctgagg

SEQ ID NO: 4890760 - DNA, 25 bp, Homo sapien
aacgttcaactctccgacatgatgg

SEQ ID NO: 4890761 - DNA, 25 bp, Homo sapien
gcatgcttatgagcacaaacgttca

SEQ ID NO: 4890762 - DNA, 25 bp, Homo sapien
cagactggccacactattgacaagg

SEQ ID NO: 4890763 - DNA, 25 bp, Homo sapien
tctttttacaaactctctgagagca

SEQ ID NO: 4890764 - DNA, 25 bp, Homo sapien
gaggagtgtgtctttttacaaactc

SEQ ID NO: 4890765 - DNA, 25 bp, Homo sapien
tctgagagcaaagctctgcaaggtt

SEQ ID NO: 4890766 - DNA, 25 bp, Homo sapien
caaaaatttaaggttctttgctatg

SEQ ID NO: 4890767 - DNA, 25 bp, Homo sapien
tgaactcaagcctaggagataacct

SEQ ID NO: 4890768 - DNA, 25 bp, Homo sapien
tagggccagagggtatgaatttaca

SEQ ID NO: 4890769 - DNA, 25 bp, Homo sapien
tgtcatgaggcagacccctaagagg

SEQ ID NO: 4890770 - DNA, 25 bp, Homo sapien
gaatgtgaaccatttgccccaaatg

SEQ ID NO: 4890771 - DNA, 25 bp, Homo sapien
agaagaggccaccgagtttactttg

SEQ ID NO: 4890772 - DNA, 25 bp, Homo sapien
ggacgacggtacttgcttcacagag

SEQ ID NO: 4890773 - DNA, 25 bp, Homo sapien
ctgcgaaatgtagcgcttccgcctg

SEQ ID NO: 4890774 - DNA, 25 bp, Homo sapien
ggatatccgctgaatctaattgtgc

SEQ ID NO: 4890775 - DNA, 25 bp, Homo sapien
tgctgacggcagagattgctatcat

SEQ ID NO: 4890776 - DNA, 25 bp, Homo sapien
tgctgccggtgggaacactttgccc

SEQ ID NO: 4890777 - DNA, 25 bp, Homo sapien
cactttgccccgaacttgattatga

SEQ ID NO: 4890778 - DNA, 25 bp, Homo sapien
tattccatatttgctgccggtggga

SEQ ID NO: 4890779 - DNA, 25 bp, Homo sapien
attatgataatcaagaatggcgatc

SEQ ID NO: 4890780 - DNA, 25 bp, Homo sapien
aaaaatgtgttcacggcaagttgga

SEQ ID NO: 4890781 - DNA, 25 bp, Homo sapien
tgtgttcacggcaagttggaacagt

SEQ ID NO: 4890782 - DNA, 25 bp, Homo sapien
cacggcaagttggaacagtgtgcaa

SEQ ID NO: 4890783 - DNA, 25 bp, Homo sapien
aaagagcaaaaaatgtgttcacggc

SEQ ID NO: 4890784 - DNA, 25 bp, Homo sapien
atccctaatccttctctaaaatctt

SEQ ID NO: 4890785 - DNA, 25 bp, Homo sapien
gcagctgtgcggttcttccttatct

SEQ ID NO: 4890786 - DNA, 25 bp, Homo sapien
ttactcgggagttaccacctctctg

SEQ ID NO: 4890787 - DNA, 25 bp, Homo sapien
ccactttatgttggagcagctgtgc

SEQ ID NO: 4890788 - DNA, 25 bp, Homo sapien
tctttgcctgaaggattggcattgc

SEQ ID NO: 4890789 - DNA, 25 bp, Homo sapien
tgcagcggaagtcagagggccccat

SEQ ID NO: 4890790 - DNA, 25 bp, Homo sapien
actgcagcggaagtcagagggcccc

SEQ ID NO: 4890791 - DNA, 25 bp, Homo sapien
cccactgcagcggaagtcagagggc

SEQ ID NO: 4890792 - DNA, 25 bp, Homo sapien
gatgcccactgcagcggaagtcaga

SEQ ID NO: 4890793 - DNA, 25 bp, Homo sapien
cttccagtgcgtacagatagatttt

SEQ ID NO: 4890794 - DNA, 25 bp, Homo sapien
tggtcccaaatgcaagtagccgccc

SEQ ID NO: 4890795 - DNA, 25 bp, Homo sapien
gcctctgccgattttgcaagatttt

SEQ ID NO: 4890796 - DNA, 25 bp, Homo sapien
tcagtaagtaagaaggtccatggtc

SEQ ID NO: 4890797 - DNA, 25 bp, Homo sapien
acttcatcataccatggcttgacca

SEQ ID NO: 4890798 - DNA, 25 bp, Homo sapien
gaccaactggagaatagagcgatat

SEQ ID NO: 4890799 - DNA, 25 bp, Homo sapien
tgcgtataatgtgtgcacatgggac

SEQ ID NO: 4890800 - DNA, 25 bp, Homo sapien
catgggaccaaaacatctcatagga

SEQ ID NO: 4890801 - DNA, 25 bp, Homo sapien
atccgattggaagtggcccaaacca

SEQ ID NO: 4890802 - DNA, 25 bp, Homo sapien
ctatccgattggaagtggcccaaac

SEQ ID NO: 4890803 - DNA, 25 bp, Homo sapien
tatccgattggaagtggcccaaacc

SEQ ID NO: 4890804 - DNA, 25 bp, Homo sapien
tccgattggaagtggcccaaaccat

SEQ ID NO: 4890805 - DNA, 25 bp, Homo sapien
taccaagtaaactgcacgtcgccac

SEQ ID NO: 4890806 - DNA, 25 bp, Homo sapien
gggcatagttgcataccaagtaaac

SEQ ID NO: 4890807 - DNA, 25 bp, Homo sapien
gtaaactgcacgtcgccacacagat

SEQ ID NO: 4890808 - DNA, 25 bp, Homo sapien
tagttgcataccaagtaaactgcac

SEQ ID NO: 4890809 - DNA, 25 bp, Homo sapien
tgccactggcatactaccacataaa

SEQ ID NO: 4890810 - DNA, 25 bp, Homo sapien
caccaagagtgtcataaatcctttg

SEQ ID NO: 4890811 - DNA, 25 bp, Homo sapien
ttttaataatgcagacacagtctac

SEQ ID NO: 4890812 - DNA, 25 bp, Homo sapien
gttttgctaaaaaggtaagccagca

SEQ ID NO: 4890813 - DNA, 25 bp, Homo sapien
ttgacgtaactcctggaaaacacag

SEQ ID NO: 4890814 - DNA, 25 bp, Homo sapien
gacaagatgaacatggtacccctac

SEQ ID NO: 4890815 - DNA, 25 bp, Homo sapien
ccccataacttggaggacaagatga

SEQ ID NO: 4890816 - DNA, 25 bp, Homo sapien
actttatatggtgcttctccaatcc

SEQ ID NO: 4890817 - DNA, 25 bp, Homo sapien
tgtagtaagcactcaactcatgacg

SEQ ID NO: 4890818 - DNA, 25 bp, Homo sapien
tgtgttaagaagtcccatcacctcg

SEQ ID NO: 4890819 - DNA, 25 bp, Homo sapien
ggcattatcctttggtggactcaaa

SEQ ID NO: 4890820 - DNA, 25 bp, Homo sapien
tgagggcgggaaccatgtctaatta

SEQ ID NO: 4890821 - DNA, 25 bp, Homo sapien
caaaattggaacttagtgtagccat

SEQ ID NO: 4890822 - DNA, 25 bp, Homo sapien
tagtagtgtctacatatgtgcccac

SEQ ID NO: 4890823 - DNA, 25 bp, Homo sapien
taagaacccctgtgaaatatgtagc

SEQ ID NO: 4890824 - DNA, 25 bp, Homo sapien
caagaaactgcaaacgtgtatggaa

SEQ ID NO: 4890825 - DNA, 25 bp, Homo sapien
taaaccctggtcttaatctgatata

SEQ ID NO: 4890826 - DNA, 25 bp, Homo sapien
taatcacagctttatatttaagaca

SEQ ID NO: 4890827 - DNA, 25 bp, Homo sapien
gactattgcctaagtgtgtaaaccc

SEQ ID NO: 4890828 - DNA, 25 bp, Homo sapien
tttgtcttaagcatggaaaggtggg

SEQ ID NO: 4890829 - DNA, 25 bp, Homo sapien
taaatgaatgttatggcgctgccaa

SEQ ID NO: 4890830 - DNA, 25 bp, Homo sapien
aaatttgtagggcaactctgctgcg

SEQ ID NO: 4890831 - DNA, 25 bp, Homo sapien
gataagcatggcatcaacacaaagc

SEQ ID NO: 4890832 - DNA, 25 bp, Homo sapien
cagagcctgggtatatggctacaca

SEQ ID NO: 4890833 - DNA, 25 bp, Homo sapien
taatgttggactgttgaattaaaac

SEQ ID NO: 4890834 - DNA, 25 bp, Homo sapien
ctgcaatattattagctgtagaagt

SEQ ID NO: 4890835 - DNA, 25 bp, Homo sapien
gactttggacattgccaagctataa

SEQ ID NO: 4890836 - DNA, 25 bp, Homo sapien
gaagtaatctaaccagtttaggtga

SEQ ID NO: 4890837 - DNA, 25 bp, Homo sapien
tgtgatagaatcaatcctagggctc

SEQ ID NO: 4890838 - DNA, 25 bp, Homo sapien
gcttttgctgtaggtcaagtagcca

SEQ ID NO: 4890839 - DNA, 25 bp, Homo sapien
tattcctaggcactggagaaggtga

SEQ ID NO: 4890840 - DNA, 25 bp, Homo sapien
tcataaggacagaggtttacacagg

SEQ ID NO: 4890841 - DNA, 25 bp, Homo sapien
tgtgactacttttgtcaagacagaa

SEQ ID NO: 4890842 - DNA, 25 bp, Homo sapien
cacacacttgttcctaaattctcta

SEQ ID NO: 4890843 - DNA, 25 bp, Homo sapien
gagggtatttggctcaagttcccac

SEQ ID NO: 4890844 - DNA, 25 bp, Homo sapien
gacagaaccatattctactcctctg

SEQ ID NO: 4890845 - DNA, 25 bp, Homo sapien
tgtaggcccatactctagactcctc

SEQ ID NO: 4890846 - DNA, 25 bp, Homo sapien
ccacagacgtagctactctgggact

SEQ ID NO: 4890847 - DNA, 25 bp, Homo sapien
cctgcaacttgctgatctaagctga

SEQ ID NO: 4890848 - DNA, 25 bp, Homo sapien
gaattatccagtgttttacctgcaa

SEQ ID NO: 4890849 - DNA, 25 bp, Homo sapien
actggtccttaaaactgtttctgca

SEQ ID NO: 4890850 - DNA, 25 bp, Homo sapien
ctggtccttaaaactgtttctgcac

SEQ ID NO: 4890851 - DNA, 25 bp, Homo sapien
cactaagctgctttgaccactaggt

SEQ ID NO: 4890852 - DNA, 25 bp, Homo sapien
gacgactgctcagatgtctcctcca

SEQ ID NO: 4890853 - DNA, 25 bp, Homo sapien
cattgatgccctttctgtaaggaac

SEQ ID NO: 4890854 - DNA, 25 bp, Homo sapien
tgggattctcggatgctgtctttga

SEQ ID NO: 4890855 - DNA, 25 bp, Homo sapien
taaatctgtttgtactttgaccaaa

SEQ ID NO: 4890856 - DNA, 25 bp, Homo sapien
atctgtttgtactttgaccaaaaat

SEQ ID NO: 4890857 - DNA, 25 bp, Homo sapien
tttaaatctgtttgtactttgacca

SEQ ID NO: 4890858 - DNA, 25 bp, Homo sapien
ctgtttgtactttgaccaaaaatgt

SEQ ID NO: 4890859 - DNA, 25 bp, Homo sapien
ttccaaacaagtggcataggccagg

SEQ ID NO: 4890860 - DNA, 25 bp, Homo sapien
ataggccaggcacccattggaagct

SEQ ID NO: 4890861 - DNA, 25 bp, Homo sapien
tgagagtgcccctcacaaggagaga

SEQ ID NO: 4890862 - DNA, 25 bp, Homo sapien
tgcagactccactactgccctgaga

SEQ ID NO: 4890863 - DNA, 25 bp, Homo sapien
gaagcaacctccaaacaaccagaaa

SEQ ID NO: 4890864 - DNA, 25 bp, Homo sapien
tacttgtcaatagtaacactgaatg

SEQ ID NO: 4890865 - DNA, 25 bp, Homo sapien
tcaactttttaagacctagacagta

SEQ ID NO: 4890866 - DNA, 25 bp, Homo sapien
gcagcattaagttcttactcatcag

SEQ ID NO: 4890867 - DNA, 25 bp, Homo sapien
tgccaaagttagaatccatctacag

SEQ ID NO: 4890868 - DNA, 25 bp, Homo sapien
tggacattaatgaccagtggtgaac

SEQ ID NO: 4890869 - DNA, 25 bp, Homo sapien
tattcactcagtgccaaatatacac

SEQ ID NO: 4890870 - DNA, 25 bp, Homo sapien
aaaaaatcagtaaggtcaagtcaca

SEQ ID NO: 4890871 - DNA, 25 bp, Homo sapien
actaccctttagtagtctcctcgca

SEQ ID NO: 4890872 - DNA, 25 bp, Homo sapien
cctttagtagtctcctcgcagaact

SEQ ID NO: 4890873 - DNA, 25 bp, Homo sapien
ttagtagtctcctcgcagaactcat

SEQ ID NO: 4890874 - DNA, 25 bp, Homo sapien
taccctttagtagtctcctcgcaga

SEQ ID NO: 4890875 - DNA, 25 bp, Homo sapien
acagagagatctgaaccatgagtat

SEQ ID NO: 4890876 - DNA, 25 bp, Homo sapien
agctgttagattgtgcatcttcttc

SEQ ID NO: 4890877 - DNA, 25 bp, Homo sapien
gagtatagctgttagattgtgcatc

SEQ ID NO: 4890878 - DNA, 25 bp, Homo sapien
gatctgaaccatgagtatagctgtt

SEQ ID NO: 4890879 - DNA, 25 bp, Homo sapien
caagcccggaaggtctggcccctgg

SEQ ID NO: 4890880 - DNA, 25 bp, Homo sapien
atgtgtgcaaggagggccccaaccc

SEQ ID NO: 4890881 - DNA, 25 bp, Homo sapien
ctgctgagatgctgaaatgccttta

SEQ ID NO: 4890882 - DNA, 25 bp, Homo sapien
gtgctttgggctcccgagacccaag

SEQ ID NO: 4890883 - DNA, 25 bp, Homo sapien
tcgcgttcgcgagcatttattgcgg

SEQ ID NO: 4890884 - DNA, 25 bp, Homo sapien
agaaccaggcgcctagcgcttccgt

SEQ ID NO: 4890885 - DNA, 25 bp, Homo sapien
ggctggcggcgacctcttgctcctg

SEQ ID NO: 4890886 - DNA, 25 bp, Homo sapien
gctccgtacagccagtacgcgcaga

SEQ ID NO: 4890887 - DNA, 25 bp, Homo sapien
ccagggtgggcgccccagcgtttct

SEQ ID NO: 4890888 - DNA, 25 bp, Homo sapien
ctgcttcgttagtctgccagggtgg

SEQ ID NO: 4890889 - DNA, 25 bp, Homo sapien
gaagggagctgcttcgttagtctgc

SEQ ID NO: 4890890 - DNA, 25 bp, Homo sapien
gagctgcttcgttagtctgccaggg

SEQ ID NO: 4890891 - DNA, 25 bp, Homo sapien
gcaggcaaagcgtccaaaattagac

SEQ ID NO: 4890892 - DNA, 25 bp, Homo sapien
gaagaaatggcaggcaaagcgtcca

SEQ ID NO: 4890893 - DNA, 25 bp, Homo sapien
tggaagaaatggcaggcaaagcgtc

SEQ ID NO: 4890894 - DNA, 25 bp, Homo sapien
gaaatggcaggcaaagcgtccaaaa

SEQ ID NO: 4890895 - DNA, 25 bp, Homo sapien
acaagggaccgcagacggagagccc

SEQ ID NO: 4890896 - DNA, 25 bp, Homo sapien
ggagagccccgctcgcgaagggcct

SEQ ID NO: 4890897 - DNA, 25 bp, Homo sapien
gggcgacgtgggtgctgactgcagg

SEQ ID NO: 4890898 - DNA, 25 bp, Homo sapien
tgactgcaggaatacgcgagcctcc

SEQ ID NO: 4890899 - DNA, 25 bp, Homo sapien
caaaccggacggccggcctctgcag

SEQ ID NO: 4890900 - DNA, 25 bp, Homo sapien
accggacggccggcctctgcagccg

SEQ ID NO: 4890901 - DNA, 25 bp, Homo sapien
agccaaaccggacggccggcctctg

SEQ ID NO: 4890902 - DNA, 25 bp, Homo sapien
tgagccaaaccggacggccggcctc

SEQ ID NO: 4890903 - DNA, 25 bp, Homo sapien
tatcgtcgctgctttccgggtagcc

SEQ ID NO: 4890904 - DNA, 25 bp, Homo sapien
aatttctatcgtcgctgctttccgg

SEQ ID NO: 4890905 - DNA, 25 bp, Homo sapien
gagctcccgctaatttctatcgtcg

SEQ ID NO: 4890906 - DNA, 25 bp, Homo sapien
aagaactagagctcccgctaatttc

SEQ ID NO: 4890907 - DNA, 25 bp, Homo sapien
atgacctcaggatttccccaggaaa

SEQ ID NO: 4890908 - DNA, 25 bp, Homo sapien
agacaggctcttccactccttttgg

SEQ ID NO: 4890909 - DNA, 25 bp, Homo sapien
caggaaaatctccaagacaggctct

SEQ ID NO: 4890910 - DNA, 25 bp, Homo sapien
aatgaatgacctcaggatttcccca

SEQ ID NO: 4890911 - DNA, 25 bp, Homo sapien
catgaacagcactgtggttactctg

SEQ ID NO: 4890912 - DNA, 25 bp, Homo sapien
ctgtggttactctgagccactcccg

SEQ ID NO: 4890913 - DNA, 25 bp, Homo sapien
ctagccatgaacagcactgtggtta

SEQ ID NO: 4890914 - DNA, 25 bp, Homo sapien
gcactgtggttactctgagccactc

SEQ ID NO: 4890915 - DNA, 25 bp, Homo sapien
catattagaggctgttggatacacc

SEQ ID NO: 4890916 - DNA, 25 bp, Homo sapien
caataaagtggcattgggaaccacc

SEQ ID NO: 4890917 - DNA, 25 bp, Homo sapien
tcgttgtttggctatccaccactca

SEQ ID NO: 4890918 - DNA, 25 bp, Homo sapien
aatactctgcatgtcattgtctgtg

SEQ ID NO: 4890919 - DNA, 25 bp, Homo sapien
tcgtcctactctgaatgtcaagagc

SEQ ID NO: 4890920 - DNA, 25 bp, Homo sapien
gaagactgctgactgaaagcatgaa

SEQ ID NO: 4890921 - DNA, 25 bp, Homo sapien
tacagcacttagtaggaacattgca

SEQ ID NO: 4890922 - DNA, 25 bp, Homo sapien
cactatattaaccttcctggtgaga

SEQ ID NO: 4890923 - DNA, 25 bp, Homo sapien
gcaaccaagggctgatattaccggc

SEQ ID NO: 4890924 - DNA, 25 bp, Homo sapien
tattaccggccgtggtatgagccac

SEQ ID NO: 4890925 - DNA, 25 bp, Homo sapien
ccacggcgctggactaaacctaaga

SEQ ID NO: 4890926 - DNA, 25 bp, Homo sapien
tcaactcagctgatgatcttgacag

SEQ ID NO: 4890927 - DNA, 25 bp, Homo sapien
cacctttactggattgtccagcgtt

SEQ ID NO: 4890928 - DNA, 25 bp, Homo sapien
tgaccaagcataagatatagtttca

SEQ ID NO: 4890929 - DNA, 25 bp, Homo sapien
tttcatgttttattaccagcagcac

SEQ ID NO: 4890930 - DNA, 25 bp, Homo sapien
gatacagatttgacacgtcttgacc

SEQ ID NO: 4890931 - DNA, 25 bp, Homo sapien
cagatctttccagctctacatccca

SEQ ID NO: 4890932 - DNA, 25 bp, Homo sapien
tgcagatctttccagctctacatcc

SEQ ID NO: 4890933 - DNA, 25 bp, Homo sapien
ctgcagatctttccagctctacatc

SEQ ID NO: 4890934 - DNA, 25 bp, Homo sapien
gcagatctttccagctctacatccc

SEQ ID NO: 4890935 - DNA, 25 bp, Homo sapien
cacaagcaactttcagcccaggatt

SEQ ID NO: 4890936 - DNA, 25 bp, Homo sapien
ttcccacaagcaactttcagcccag

SEQ ID NO: 4890937 - DNA, 25 bp, Homo sapien
gttcccacaagcaactttcagccca

SEQ ID NO: 4890938 - DNA, 25 bp, Homo sapien
ccacaagcaactttcagcccaggat

SEQ ID NO: 4890939 - DNA, 25 bp, Homo sapien
ttgatggaagcaagcttgcaggtcc

SEQ ID NO: 4890940 - DNA, 25 bp, Homo sapien
tgtccaattgatggaagcaagcttg

SEQ ID NO: 4890941 - DNA, 25 bp, Homo sapien
caattgatggaagcaagcttgcagg

SEQ ID NO: 4890942 - DNA, 25 bp, Homo sapien
gatggaagcaagcttgcaggtccat

SEQ ID NO: 4890943 - DNA, 25 bp, Homo sapien
gaaaatagtcacagagggcaagcaa

SEQ ID NO: 4890944 - DNA, 25 bp, Homo sapien
agtcacagagggcaagcaaagttgg

SEQ ID NO: 4890945 - DNA, 25 bp, Homo sapien
tattagaaagaaaatagtcacagag

SEQ ID NO: 4890946 - DNA, 25 bp, Homo sapien
agggcaagcaaagttggagaaaata

SEQ ID NO: 4890947 - DNA, 25 bp, Homo sapien
cacttcatcataccacgattgtaca

SEQ ID NO: 4890948 - DNA, 25 bp, Homo sapien
cctgaatggacaatatgggttgcat

SEQ ID NO: 4890949 - DNA, 25 bp, Homo sapien
catatgggtagctaaagtctttcac

SEQ ID NO: 4890950 - DNA, 25 bp, Homo sapien
ccacgattgtacatgaaacgtcggg

SEQ ID NO: 4890951 - DNA, 25 bp, Homo sapien
aaccgattctgttactagttgccca

SEQ ID NO: 4890952 - DNA, 25 bp, Homo sapien
tggcacaaccgattctgttactagt

SEQ ID NO: 4890953 - DNA, 25 bp, Homo sapien
acacaaattaatggcacaaccgatt

SEQ ID NO: 4890954 - DNA, 25 bp, Homo sapien
ttctgttactagttgcccacacgac

SEQ ID NO: 4890955 - DNA, 25 bp, Homo sapien
gacagctttgggccatatctgcccc

SEQ ID NO: 4890956 - DNA, 25 bp, Homo sapien
attgcacaccaggtagacagctttg

SEQ ID NO: 4890957 - DNA, 25 bp, Homo sapien
ggagtaattgcacaccaggtagaca

SEQ ID NO: 4890958 - DNA, 25 bp, Homo sapien
gtaattgcacaccaggtagacagct

SEQ ID NO: 4890959 - DNA, 25 bp, Homo sapien
aacagggccgcccatgtttgtaagg

SEQ ID NO: 4890960 - DNA, 25 bp, Homo sapien
taggtgggcaagcagaacagggccg

SEQ ID NO: 4890961 - DNA, 25 bp, Homo sapien
acagggccgcccatgtttgtaaggg

SEQ ID NO: 4890962 - DNA, 25 bp, Homo sapien
gcaagcagaacagggccgcccatgt

SEQ ID NO: 4890963 - DNA, 25 bp, Homo sapien
ctttgtagcacagattttctctaca

SEQ ID NO: 4890964 - DNA, 25 bp, Homo sapien
gattttctctacagccccctccaaa

SEQ ID NO: 4890965 - DNA, 25 bp, Homo sapien
agattttctctacagccccctccaa

SEQ ID NO: 4890966 - DNA, 25 bp, Homo sapien
cgagggggataatacctgtctgacc

SEQ ID NO: 4890967 - DNA, 25 bp, Homo sapien
gactgctgtcgttctatttcatttg

SEQ ID NO: 4890968 - DNA, 25 bp, Homo sapien
gatcttgtccggacatgggtgtcat

SEQ ID NO: 4890969 - DNA, 25 bp, Homo sapien
gctactatcatctgatcttgtccgg

SEQ ID NO: 4890970 - DNA, 25 bp, Homo sapien
ttttataagtaatatggaggtctta

SEQ ID NO: 4890971 - DNA, 25 bp, Homo sapien
tttataagtaatatggaggtcttac

SEQ ID NO: 4890972 - DNA, 25 bp, Homo sapien
tgaaaatttttataagtaatatgga

SEQ ID NO: 4890973 - DNA, 25 bp, Homo sapien
atttttataagtaatatggaggtct

SEQ ID NO: 4890974 - DNA, 25 bp, Homo sapien
aggttgttcctttgcactgatctct

SEQ ID NO: 4890975 - DNA, 25 bp, Homo sapien
tcataatgtacactgccaataactt

SEQ ID NO: 4890976 - DNA, 25 bp, Homo sapien
tagctttactatccaaacagccagc

SEQ ID NO: 4890977 - DNA, 25 bp, Homo sapien
gccaataactttagctttactatcc

SEQ ID NO: 4890978 - DNA, 25 bp, Homo sapien
catttcataatgtacactgccaata

SEQ ID NO: 4890979 - DNA, 25 bp, Homo sapien
gccaccatcattgtctattatacca

SEQ ID NO: 4890980 - DNA, 25 bp, Homo sapien
tgtctagtgatatctacccagccac

SEQ ID NO: 4890981 - DNA, 25 bp, Homo sapien
gtttgaataccatttctattggact

SEQ ID NO: 4890982 - DNA, 25 bp, Homo sapien
ttggacttgatgaaataatgctttc

SEQ ID NO: 4890983 - DNA, 25 bp, Homo sapien
actttagagactgtgaaggaattag

SEQ ID NO: 4890984 - DNA, 25 bp, Homo sapien
gagactgtgaaggaattagcagact

SEQ ID NO: 4890985 - DNA, 25 bp, Homo sapien
gaaggaattagcagactgatatttg

SEQ ID NO: 4890986 - DNA, 25 bp, Homo sapien
tgtgaaggaattagcagactgatat

SEQ ID NO: 4890987 - DNA, 25 bp, Homo sapien
gagctgttccacagttgtttcacaa

SEQ ID NO: 4890988 - DNA, 25 bp, Homo sapien
agctgttccacagttgtttcacaag

SEQ ID NO: 4890989 - DNA, 25 bp, Homo sapien
taagactggatatatggagacatac

SEQ ID NO: 4890990 - DNA, 25 bp, Homo sapien
taacttaccaaatgcaatcagattg

SEQ ID NO: 4890991 - DNA, 25 bp, Homo sapien
acagttttcatcttagcttggccaa

SEQ ID NO: 4890992 - DNA, 25 bp, Homo sapien
cagtcttccgctataaagattccgt

SEQ ID NO: 4890993 - DNA, 25 bp, Homo sapien
tgtggatttgcttgcatacagttac

SEQ ID NO: 4890994 - DNA, 25 bp, Homo sapien
gcttgcatacagttacgaggacagt

SEQ ID NO: 4890995 - DNA, 25 bp, Homo sapien
ccaattacacgagcataatgtggat

SEQ ID NO: 4890996 - DNA, 25 bp, Homo sapien
tcagaataaactcgagttccaatta

SEQ ID NO: 4890997 - DNA, 25 bp, Homo sapien
aggcattacatcaacataaccaccg

SEQ ID NO: 4890998 - DNA, 25 bp, Homo sapien
tgaaaagaagcaatgtaggtctttc

SEQ ID NO: 4890999 - DNA, 25 bp, Homo sapien
taaccaccgtgatttcgaaccactc

SEQ ID NO: 4891000 - DNA, 25 bp, Homo sapien
cactccagcatgtactgctgctctg

SEQ ID NO: 4891001 - DNA, 25 bp, Homo sapien
tcacacaacagcaaacactctgaat

SEQ ID NO: 4891002 - DNA, 25 bp, Homo sapien
aaacactctgaatgcctttcctcct

SEQ ID NO: 4891003 - DNA, 25 bp, Homo sapien
acaacagcaaacactctgaatgcct

SEQ ID NO: 4891004 - DNA, 25 bp, Homo sapien
cagcaaacactctgaatgcctttcc

SEQ ID NO: 4891005 - DNA, 25 bp, Homo sapien
ggctgaaaatagttgatgtactctg

SEQ ID NO: 4891006 - DNA, 25 bp, Homo sapien
caagatttatatgcatttggcacct

SEQ ID NO: 4891007 - DNA, 25 bp, Homo sapien
attttatagactttgtttatcaaga

SEQ ID NO: 4891008 - DNA, 25 bp, Homo sapien
gtacagtaatgttacagttttatac

SEQ ID NO: 4891009 - DNA, 25 bp, Homo sapien
tattagtggcatatacaaagcacca

SEQ ID NO: 4891010 - DNA, 25 bp, Homo sapien
gattcattttattagtggcatatac

SEQ ID NO: 4891011 - DNA, 25 bp, Homo sapien
ccatataatatatgaaacgtagaac

SEQ ID NO: 4891012 - DNA, 25 bp, Homo sapien
gaaacgtagaacaatcatgactatg

SEQ ID NO: 4891013 - DNA, 25 bp, Homo sapien
taatatgtaaatccaccagcagaaa

SEQ ID NO: 4891014 - DNA, 25 bp, Homo sapien
aatgcactagatgattttctgaggg

SEQ ID NO: 4891015 - DNA, 25 bp, Homo sapien
ttttaaggccattcccaaggaatca

SEQ ID NO: 4891016 - DNA, 25 bp, Homo sapien
catagaaagctctggctgtccatgc

SEQ ID NO: 4891017 - DNA, 25 bp, Homo sapien
ggctccagctgaaggtattacaata

SEQ ID NO: 4891018 - DNA, 25 bp, Homo sapien
cacgccttgtgtagaagataggtaa

SEQ ID NO: 4891019 - DNA, 25 bp, Homo sapien
tgacagaactgatcgggcttccctg

SEQ ID NO: 4891020 - DNA, 25 bp, Homo sapien
tatatgacagatgaatagtttcccc

SEQ ID NO: 4891021 - DNA, 25 bp, Homo sapien
aaagggatatcatattagagagcat

SEQ ID NO: 4891022 - DNA, 25 bp, Homo sapien
ttaattcttacaaggagaatcacag

SEQ ID NO: 4891023 - DNA, 25 bp, Homo sapien
ctttcagaaatgattcaccatatcc

SEQ ID NO: 4891024 - DNA, 25 bp, Homo sapien
ttcctttcagaaatgattcaccata

SEQ ID NO: 4891025 - DNA, 25 bp, Homo sapien
tttcagaaatgattcaccatatcct

SEQ ID NO: 4891026 - DNA, 25 bp, Homo sapien
tcctttcagaaatgattcaccatat

SEQ ID NO: 4891027 - DNA, 25 bp, Homo sapien
tttacagattctagttctctggtga

SEQ ID NO: 4891028 - DNA, 25 bp, Homo sapien
ctagttctctggtgaaattctccat

SEQ ID NO: 4891029 - DNA, 25 bp, Homo sapien
cttttacagattctagttctctggt

SEQ ID NO: 4891030 - DNA, 25 bp, Homo sapien
ttctagttctctggtgaaattctcc

SEQ ID NO: 4891031 - DNA, 25 bp, Homo sapien
ggcagggctacactgaagactactg

SEQ ID NO: 4891032 - DNA, 25 bp, Homo sapien
cagttgagtgctccaaccagtgagc

SEQ ID NO: 4891033 - DNA, 25 bp, Homo sapien
tatttggctggtgcatgcctaggct

SEQ ID NO: 4891034 - DNA, 25 bp, Homo sapien
gatttactcagcgtgtgaggacgtg

SEQ ID NO: 4891035 - DNA, 25 bp, Homo sapien
atctcctcttgtgctaggaaaacag

SEQ ID NO: 4891036 - DNA, 25 bp, Homo sapien
cacttcaatgggagtcaatcctaca

SEQ ID NO: 4891037 - DNA, 25 bp, Homo sapien
aatcctacaccatatgtatctcctc

SEQ ID NO: 4891038 - DNA, 25 bp, Homo sapien
gtcaatcctacaccatatgtatctc

SEQ ID NO: 4891039 - DNA, 25 bp, Homo sapien
tccattactattgatgattagctca

SEQ ID NO: 4891040 - DNA, 25 bp, Homo sapien
gggaaactgacaccgtttcataagc

SEQ ID NO: 4891041 - DNA, 25 bp, Homo sapien
gacaccgtttcataagccattccat

SEQ ID NO: 4891042 - DNA, 25 bp, Homo sapien
gtgaaaacagtgaaaagctggtgaa

SEQ ID NO: 4891043 - DNA, 25 bp, Homo sapien
aaaataacgtgctctgcatccccat

SEQ ID NO: 4891044 - DNA, 25 bp, Homo sapien
cagcttgaaaataacgtgctctgca

SEQ ID NO: 4891045 - DNA, 25 bp, Homo sapien
cttgaaaataacgtgctctgcatcc

SEQ ID NO: 4891046 - DNA, 25 bp, Homo sapien
tgaaaataacgtgctctgcatcccc

SEQ ID NO: 4891047 - DNA, 25 bp, Homo sapien
gaatgcaaaaaagggattctcccac

SEQ ID NO: 4891048 - DNA, 25 bp, Homo sapien
caggattcttcactggacccgagga

SEQ ID NO: 4891049 - DNA, 25 bp, Homo sapien
tgcaatattactgtgtcaacaccag

SEQ ID NO: 4891050 - DNA, 25 bp, Homo sapien
tctgaatgatttgaggaccttaaca

SEQ ID NO: 4891051 - DNA, 25 bp, Homo sapien
ttcgccatcatgtaggagacgttcc

SEQ ID NO: 4891052 - DNA, 25 bp, Homo sapien
gatttgctaagacatcctgagtagg

SEQ ID NO: 4891053 - DNA, 25 bp, Homo sapien
ttgctctgaggctccataacccctg

SEQ ID NO: 4891054 - DNA, 25 bp, Homo sapien
ccattagggctgaactgagatttgc

SEQ ID NO: 4891055 - DNA, 25 bp, Homo sapien
catggctattctatgggaataattt

SEQ ID NO: 4891056 - DNA, 25 bp, Homo sapien
tggctattctatgggaataatttct

SEQ ID NO: 4891057 - DNA, 25 bp, Homo sapien
ttacatggctattctatgggaataa

SEQ ID NO: 4891058 - DNA, 25 bp, Homo sapien
gctattctatgggaataatttcttt

SEQ ID NO: 4891059 - DNA, 25 bp, Homo sapien
gcggaaagcattgctggaaaggatt

SEQ ID NO: 4891060 - DNA, 25 bp, Homo sapien
aaagcattgctggaaaggatttcaa

SEQ ID NO: 4891061 - DNA, 25 bp, Homo sapien
gggcggaaagcattgctggaaagga

SEQ ID NO: 4891062 - DNA, 25 bp, Homo sapien
gatttcaagatcagtcctttttgtt

SEQ ID NO: 4891063 - DNA, 25 bp, Homo sapien
aatagggagtccttttgactttgct

SEQ ID NO: 4891064 - DNA, 25 bp, Homo sapien
atgactgtaggtgtgcaactttatt

SEQ ID NO: 4891065 - DNA, 25 bp, Homo sapien
tgtattggtgaaaagtaatggtcaa

SEQ ID NO: 4891066 - DNA, 25 bp, Homo sapien
tctgtctttgtacaggtatcatgct

SEQ ID NO: 4891067 - DNA, 25 bp, Homo sapien
tgtagccagtcagagctccttgctg

SEQ ID NO: 4891068 - DNA, 25 bp, Homo sapien
agctccttgctgaatacactgcatc

SEQ ID NO: 4891069 - DNA, 25 bp, Homo sapien
atatgttgtagccagtcagagctcc

SEQ ID NO: 4891070 - DNA, 25 bp, Homo sapien
tttgcacatatagacccatatgttg

SEQ ID NO: 4891071 - DNA, 25 bp, Homo sapien
tctgtctgagtttctttttaaatcc

SEQ ID NO: 4891072 - DNA, 25 bp, Homo sapien
tgtccacctccaggttgatatgttt

SEQ ID NO: 4891073 - DNA, 25 bp, Homo sapien
gcacagaattcttggctgacttccc

SEQ ID NO: 4891074 - DNA, 25 bp, Homo sapien
attttgctatttccctcagttccag

SEQ ID NO: 4891075 - DNA, 25 bp, Homo sapien
acaaaagttttccggcacagaccat

SEQ ID NO: 4891076 - DNA, 25 bp, Homo sapien
atctaacaaaagttttccggcacag

SEQ ID NO: 4891077 - DNA, 25 bp, Homo sapien
tctaacaaaagttttccggcacaga

SEQ ID NO: 4891078 - DNA, 25 bp, Homo sapien
catctaacaaaagttttccggcaca

SEQ ID NO: 4891079 - DNA, 25 bp, Homo sapien
ttcccaccagtaaggagctttgtca

SEQ ID NO: 4891080 - DNA, 25 bp, Homo sapien
tcccaccagtaaggagctttgtcat

SEQ ID NO: 4891081 - DNA, 25 bp, Homo sapien
cttcccaccagtaaggagctttgtc

SEQ ID NO: 4891082 - DNA, 25 bp, Homo sapien
cccttcccaccagtaaggagctttg

SEQ ID NO: 4891083 - DNA, 25 bp, Homo sapien
ctcacactgatgacacctggaaaac

SEQ ID NO: 4891084 - DNA, 25 bp, Homo sapien
tcctcacactgatgacacctggaaa

SEQ ID NO: 4891085 - DNA, 25 bp, Homo sapien
ctgcatcttggaatataaacatcct

SEQ ID NO: 4891086 - DNA, 25 bp, Homo sapien
ggaatataaacatcctcacactgat

SEQ ID NO: 4891087 - DNA, 25 bp, Homo sapien
ttgacagcaattgcttgaagactct

SEQ ID NO: 4891088 - DNA, 25 bp, Homo sapien
gttgacagcaattgcttgaagactc

SEQ ID NO: 4891089 - DNA, 25 bp, Homo sapien
gggatgaatggtgcgtctttagctc

SEQ ID NO: 4891090 - DNA, 25 bp, Homo sapien
ggtgcgtctttagctctgctaataa

SEQ ID NO: 4891091 - DNA, 25 bp, Homo sapien
gtacaatccctgtgcaacaattgct

SEQ ID NO: 4891092 - DNA, 25 bp, Homo sapien
tcaatttgtacaatccctgtgcaac

SEQ ID NO: 4891093 - DNA, 25 bp, Homo sapien
ctagcccatatcaacggtcattgct

SEQ ID NO: 4891094 - DNA, 25 bp, Homo sapien
aaaattcataagtatcaaacatcat

SEQ ID NO: 4891095 - DNA, 25 bp, Homo sapien
tgtaaaattcataagtatcaaacat

SEQ ID NO: 4891096 - DNA, 25 bp, Homo sapien
taaaattcataagtatcaaacatca

SEQ ID NO: 4891097 - DNA, 25 bp, Homo sapien
gtaaaattcataagtatcaaacatc

SEQ ID NO: 4891098 - DNA, 25 bp, Homo sapien
cctagtctctatggtctttacattt

SEQ ID NO: 4891099 - DNA, 25 bp, Homo sapien
tcctagtctctatggtctttacatt

SEQ ID NO: 4891100 - DNA, 25 bp, Homo sapien
gggcaaaatgaaaaggtgatcatct

SEQ ID NO: 4891101 - DNA, 25 bp, Homo sapien
gcaaaatgaaaaggtgatcatcttc

SEQ ID NO: 4891102 - DNA, 25 bp, Homo sapien
tcagttgggcaaaatgaaaaggtga

SEQ ID NO: 4891103 - DNA, 25 bp, Homo sapien
aatgaaaaggtgatcatcttcatac

SEQ ID NO: 4891104 - DNA, 25 bp, Homo sapien
acatcccattttgttaattcatcaa

SEQ ID NO: 4891105 - DNA, 25 bp, Homo sapien
tgttaattcatcaaactctgaccct

SEQ ID NO: 4891106 - DNA, 25 bp, Homo sapien
actctgaccctaatttcaccgtcat

SEQ ID NO: 4891107 - DNA, 25 bp, Homo sapien
caaactctgaccctaatttcaccgt

SEQ ID NO: 4891108 - DNA, 25 bp, Homo sapien
tttgtatctgtttcttcttctttta

SEQ ID NO: 4891109 - DNA, 25 bp, Homo sapien
ttgtatctgtttcttcttcttttaa

SEQ ID NO: 4891110 - DNA, 25 bp, Homo sapien
tgtatctgtttcttcttcttttaaa

SEQ ID NO: 4891111 - DNA, 25 bp, Homo sapien
gcagtgttggcatcttcgaaagtag

SEQ ID NO: 4891112 - DNA, 25 bp, Homo sapien
gtctgtagatacatttggtagcccg

SEQ ID NO: 4891113 - DNA, 25 bp, Homo sapien
taatgattccttttggctgtgtgtt

SEQ ID NO: 4891114 - DNA, 25 bp, Homo sapien
tggtagcccgttggtaatgattcct

SEQ ID NO: 4891115 - DNA, 25 bp, Homo sapien
tgtgctaagaatttcaccactgact

SEQ ID NO: 4891116 - DNA, 25 bp, Homo sapien
ataaatgccttcaactgtgctaaga

SEQ ID NO: 4891117 - DNA, 25 bp, Homo sapien
aatgccttcaactgtgctaagaatt

SEQ ID NO: 4891118 - DNA, 25 bp, Homo sapien
ctgtgctaagaatttcaccactgac

SEQ ID NO: 4891119 - DNA, 25 bp, Homo sapien
aatagagcagcatggtttaaagagt

SEQ ID NO: 4891120 - DNA, 25 bp, Homo sapien
tctggttgcctcaacatttgaaacc

SEQ ID NO: 4891121 - DNA, 25 bp, Homo sapien
cagggatctcaaatggcacattaaa

SEQ ID NO: 4891122 - DNA, 25 bp, Homo sapien
tcaaattgtcagtatactatcctat

SEQ ID NO: 4891123 - DNA, 25 bp, Homo sapien
ccttcaaattggtgaattattatct

SEQ ID NO: 4891124 - DNA, 25 bp, Homo sapien
ttaaaggcagcaggtgaattagtgc

SEQ ID NO: 4891125 - DNA, 25 bp, Homo sapien
aggaacagctctagtctacatatcc

SEQ ID NO: 4891126 - DNA, 25 bp, Homo sapien
gctctagtctacatatcccagcatg

SEQ ID NO: 4891127 - DNA, 25 bp, Homo sapien
ttgttctaggctttgactttctgca

SEQ ID NO: 4891128 - DNA, 25 bp, Homo sapien
tttgattgccaacttgttctaggct

SEQ ID NO: 4891129 - DNA, 25 bp, Homo sapien
tctaggctttgactttctgcatagt

SEQ ID NO: 4891130 - DNA, 25 bp, Homo sapien
gactttctgcatagttttcaaacat

SEQ ID NO: 4891131 - DNA, 25 bp, Homo sapien
taaaagggaagttgtttctgcctca

SEQ ID NO: 4891132 - DNA, 25 bp, Homo sapien
ctgagtagttgagtaaaagggaagt

SEQ ID NO: 4891133 - DNA, 25 bp, Homo sapien
tgagtaaaagggaagttgtttctgc

SEQ ID NO: 4891134 - DNA, 25 bp, Homo sapien
aaaagggaagttgtttctgcctcat

SEQ ID NO: 4891135 - DNA, 25 bp, Homo sapien
agcacagggaagatgccacggtaca

SEQ ID NO: 4891136 - DNA, 25 bp, Homo sapien
gggaagatgccacggtacaggtggg

SEQ ID NO: 4891137 - DNA, 25 bp, Homo sapien
gcacagggaagatgccacggtacag

SEQ ID NO: 4891138 - DNA, 25 bp, Homo sapien
acagggaagatgccacggtacaggt

SEQ ID NO: 4891139 - DNA, 25 bp, Homo sapien
gttcacccggaggtccacgtcctca

SEQ ID NO: 4891140 - DNA, 25 bp, Homo sapien
ccggaggtccacgtcctcagcccag

SEQ ID NO: 4891141 - DNA, 25 bp, Homo sapien
cagcccaggcctcttggactgggtc

SEQ ID NO: 4891142 - DNA, 25 bp, Homo sapien
tcagcccaggcctcttggactgggt

SEQ ID NO: 4891143 - DNA, 25 bp, Homo sapien
cttcttgaagaaggcttgggccttg

SEQ ID NO: 4891144 - DNA, 25 bp, Homo sapien
ggtgccacccggtcagcacaatgac

SEQ ID NO: 4891145 - DNA, 25 bp, Homo sapien
cacatctcccttcttgaagaaggct

SEQ ID NO: 4891146 - DNA, 25 bp, Homo sapien
gaagaaggcttgggccttgccaaca

SEQ ID NO: 4891147 - DNA, 25 bp, Homo sapien
cattacagcccacagtgagctctac

SEQ ID NO: 4891148 - DNA, 25 bp, Homo sapien
aacacagccatgtttcagcgaggca

SEQ ID NO: 4891149 - DNA, 25 bp, Homo sapien
gctctacaagcgttgctggcctaat

SEQ ID NO: 4891150 - DNA, 25 bp, Homo sapien
catgtttcagcgaggcattgatctt

SEQ ID NO: 4891151 - DNA, 25 bp, Homo sapien
ggtggggccacatgatgggcagcca

SEQ ID NO: 4891152 - DNA, 25 bp, Homo sapien
ctccttcttcccttgattgggtggg

SEQ ID NO: 4891153 - DNA, 25 bp, Homo sapien
ctggggcctccagtccagcattcct

SEQ ID NO: 4891154 - DNA, 25 bp, Homo sapien
gctctgggctgtcccactggagcag

SEQ ID NO: 4891155 - DNA, 25 bp, Homo sapien
aaaggaactgaacagagtaaacaca

SEQ ID NO: 4891156 - DNA, 25 bp, Homo sapien
aggaactgaacagagtaaacacaag

SEQ ID NO: 4891157 - DNA, 25 bp, Homo sapien
ctaaaggaactgaacagagtaaaca

SEQ ID NO: 4891158 - DNA, 25 bp, Homo sapien
gaactgaacagagtaaacacaagaa

SEQ ID NO: 4891159 - DNA, 25 bp, Homo sapien
gttgggagtcctctgggcatccatt

SEQ ID NO: 4891160 - DNA, 25 bp, Homo sapien
ttgggagtcctctgggcatccattt

SEQ ID NO: 4891161 - DNA, 25 bp, Homo sapien
ggagcaactgccctgtgccctaagg

SEQ ID NO: 4891162 - DNA, 25 bp, Homo sapien
gagcaactgccctgtgccctaaggc

SEQ ID NO: 4891163 - DNA, 25 bp, Homo sapien
cagtggagcaactgccctgtgccct

SEQ ID NO: 4891164 - DNA, 25 bp, Homo sapien
gtggagcaactgccctgtgccctaa

SEQ ID NO: 4891165 - DNA, 25 bp, Homo sapien
gaggctctgcagtagtaggggaaaa

SEQ ID NO: 4891166 - DNA, 25 bp, Homo sapien
ctggaggctctgcagtagtagggga

SEQ ID NO: 4891167 - DNA, 25 bp, Homo sapien
aggctctgcagtagtaggggaaaat

SEQ ID NO: 4891168 - DNA, 25 bp, Homo sapien
ggaggctctgcagtagtaggggaaa

SEQ ID NO: 4891169 - DNA, 25 bp, Homo sapien
tattcttgattcttggtccagccag

SEQ ID NO: 4891170 - DNA, 25 bp, Homo sapien
cttggtccagccagttgtggctgca

SEQ ID NO: 4891171 - DNA, 25 bp, Homo sapien
cactgaccagcaaagggtccctggt

SEQ ID NO: 4891172 - DNA, 25 bp, Homo sapien
cttcttgtgagctgtacatgtgctg

SEQ ID NO: 4891173 - DNA, 25 bp, Homo sapien
cttatattcaaccttggtcaagttt

SEQ ID NO: 4891174 - DNA, 25 bp, Homo sapien
tttgttctttaagttcgcattcttc

SEQ ID NO: 4891175 - DNA, 25 bp, Homo sapien
caagttttgttctttaagttcgcat

SEQ ID NO: 4891176 - DNA, 25 bp, Homo sapien
cagaaactcattcttatattcaacc

SEQ ID NO: 4891177 - DNA, 25 bp, Homo sapien
gagctgctccctgaacctgtgtgaa

SEQ ID NO: 4891178 - DNA, 25 bp, Homo sapien
gctgctccctgaacctgtgtgaata

SEQ ID NO: 4891179 - DNA, 25 bp, Homo sapien
tccctcttctgggttccaaacagga

SEQ ID NO: 4891180 - DNA, 25 bp, Homo sapien
gctccctgaacctgtgtgaatatgt

SEQ ID NO: 4891181 - DNA, 25 bp, Homo sapien
tgttttttaggatctatgtaggaga

SEQ ID NO: 4891182 - DNA, 25 bp, Homo sapien
gattgaacatggcacagggattgat

SEQ ID NO: 4891183 - DNA, 25 bp, Homo sapien
aaaaatcagtagaacagaccgattg

SEQ ID NO: 4891184 - DNA, 25 bp, Homo sapien
agggattgattagtactcccagtcc

SEQ ID NO: 4891185 - DNA, 25 bp, Homo sapien
gattgattagtactcccagtcctac

SEQ ID NO: 4891186 - DNA, 25 bp, Homo sapien
ggcctggagcaatagcggactgcaa

SEQ ID NO: 4891187 - DNA, 25 bp, Homo sapien
tgcaccgtagcctccaacgaggtcc

SEQ ID NO: 4891188 - DNA, 25 bp, Homo sapien
ctgcaactgggaccccgggactttg

SEQ ID NO: 4891189 - DNA, 25 bp, Homo sapien
tttggtaccctcctctactgtttca

SEQ ID NO: 4891190 - DNA, 25 bp, Homo sapien
ccaacgccaccaagattgtcttgat

SEQ ID NO: 4891191 - DNA, 25 bp, Homo sapien
caggttctcccacgaaccgttctga

SEQ ID NO: 4891192 - DNA, 25 bp, Homo sapien
cctactctcgcgcttcccaacgcca

SEQ ID NO: 4891193 - DNA, 25 bp, Homo sapien
ttgtcttgataagaactccaggttc

SEQ ID NO: 4891194 - DNA, 25 bp, Homo sapien
acttgcagaagtgggtctcagaccc

SEQ ID NO: 4891195 - DNA, 25 bp, Homo sapien
taccctttagctttcgacttgcaga

SEQ ID NO: 4891196 - DNA, 25 bp, Homo sapien
ccagatgcgctgatcttcttggtca

SEQ ID NO: 4891197 - DNA, 25 bp, Homo sapien
agacccgtcccagatgcgctgatct

SEQ ID NO: 4891198 - DNA, 25 bp, Homo sapien
caaagattttagaccatatgctggg

SEQ ID NO: 4891199 - DNA, 25 bp, Homo sapien
agggcagcggcctgactctcacagt

SEQ ID NO: 4891200 - DNA, 25 bp, Homo sapien
gaaaactgaaagcagcgaggccgcc

SEQ ID NO: 4891201 - DNA, 25 bp, Homo sapien
taaacagtaaccagcagactcaatg

SEQ ID NO: 4891202 - DNA, 25 bp, Homo sapien
ctcccggagctcccgagtcgcagtc

SEQ ID NO: 4891203 - DNA, 25 bp, Homo sapien
ccacccaccccgtcgcgctgtcccg

SEQ ID NO: 4891204 - DNA, 25 bp, Homo sapien
ccaccccgtcgcgctgtcccgcgcc

SEQ ID NO: 4891205 - DNA, 25 bp, Homo sapien
acccaccccgtcgcgctgtcccgcg

SEQ ID NO: 4891206 - DNA, 25 bp, Homo sapien
gtatctgctttcaacacggcctggc

SEQ ID NO: 4891207 - DNA, 25 bp, Homo sapien
gggtatctgctttcaacacggcctg

SEQ ID NO: 4891208 - DNA, 25 bp, Homo sapien
gaggcctcggggtatctgctttcaa

SEQ ID NO: 4891209 - DNA, 25 bp, Homo sapien
ctgctttcaacacggcctggcctag

SEQ ID NO: 4891210 - DNA, 25 bp, Homo sapien
ctaaggaaaaacggtgacagctaga

SEQ ID NO: 4891211 - DNA, 25 bp, Homo sapien
aaggaaaaacggtgacagctagaca

SEQ ID NO: 4891212 - DNA, 25 bp, Homo sapien
taaggaaaaacggtgacagctagac

SEQ ID NO: 4891213 - DNA, 25 bp, Homo sapien
aggaaaaacggtgacagctagacag

SEQ ID NO: 4891214 - DNA, 25 bp, Homo sapien
tttatattaatatgtctgtatgttg

SEQ ID NO: 4891215 - DNA, 25 bp, Homo sapien
ttatattaatatgtctgtatgttgt

SEQ ID NO: 4891216 - DNA, 25 bp, Homo sapien
cctgagtggctaaaactatgggtgc

SEQ ID NO: 4891217 - DNA, 25 bp, Homo sapien
cacttaaggtgttagcaggagtaca

SEQ ID NO: 4891218 - DNA, 25 bp, Homo sapien
gaggtctctcacagggtacacttaa

SEQ ID NO: 4891219 - DNA, 25 bp, Homo sapien
agagtcatgagccatcggagctggc

SEQ ID NO: 4891220 - DNA, 25 bp, Homo sapien
cctggaaatatgatgagtatgacac

SEQ ID NO: 4891221 - DNA, 25 bp, Homo sapien
tgttgctcactaatgctgacagtgt

SEQ ID NO: 4891222 - DNA, 25 bp, Homo sapien
tcctagatagtttaaggccccttgc

SEQ ID NO: 4891223 - DNA, 25 bp, Homo sapien
tgcctaaagtgtatgccagttcctg

SEQ ID NO: 4891224 - DNA, 25 bp, Homo sapien
gccatatatatcacatgttcttact

SEQ ID NO: 4891225 - DNA, 25 bp, Homo sapien
ataagtaaaccagcaaatacactgg

SEQ ID NO: 4891226 - DNA, 25 bp, Homo sapien
ctacaaaaaagattgacatagaaga

SEQ ID NO: 4891227 - DNA, 25 bp, Homo sapien
tgtacacaatatagataggtgaaaa

SEQ ID NO: 4891228 - DNA, 25 bp, Homo sapien
tgcaccaactcgtcatctagcctta

SEQ ID NO: 4891229 - DNA, 25 bp, Homo sapien
ggtattccccttcatgtgtccaggt

SEQ ID NO: 4891230 - DNA, 25 bp, Homo sapien
tcttgtatcatgtctgacacttttt

SEQ ID NO: 4891231 - DNA, 25 bp, Homo sapien
tatttaaatcatcttgtatcatgtc

SEQ ID NO: 4891232 - DNA, 25 bp, Homo sapien
taacagagtgctgatcgttccattt

SEQ ID NO: 4891233 - DNA, 25 bp, Homo sapien
ttaacagagtgctgatcgttccatt

SEQ ID NO: 4891234 - DNA, 25 bp, Homo sapien
gccatacagttgtgacaaggaccat

SEQ ID NO: 4891235 - DNA, 25 bp, Homo sapien
ggagatcagacaaagaagttacatg

SEQ ID NO: 4891236 - DNA, 25 bp, Homo sapien
gacaaggaccataaggagatcagac

SEQ ID NO: 4891237 - DNA, 25 bp, Homo sapien
tgaatgtatgagtgattaaaagcca

SEQ ID NO: 4891238 - DNA, 25 bp, Homo sapien
tttcagaggactgttgagtcaaatg

SEQ ID NO: 4891239 - DNA, 25 bp, Homo sapien
ttcagaggactgttgagtcaaatga

SEQ ID NO: 4891240 - DNA, 25 bp, Homo sapien
aaatctcactaaggctgtgacaccc

SEQ ID NO: 4891241 - DNA, 25 bp, Homo sapien
tactcgtgcttatcagatttgccca

SEQ ID NO: 4891242 - DNA, 25 bp, Homo sapien
tgtgtacatcctagaaagtgccttg

SEQ ID NO: 4891243 - DNA, 25 bp, Homo sapien
tcttctattcatcgccctactcgtg

SEQ ID NO: 4891244 - DNA, 25 bp, Homo sapien
agagcagggacggtcaaggcagcaa

SEQ ID NO: 4891245 - DNA, 25 bp, Homo sapien
gcagggacggtcaaggcagcaatca

SEQ ID NO: 4891246 - DNA, 25 bp, Homo sapien
ttcaagagcagggacggtcaaggca

SEQ ID NO: 4891247 - DNA, 25 bp, Homo sapien
caagagcagggacggtcaaggcagc

SEQ ID NO: 4891248 - DNA, 25 bp, Homo sapien
cagggtccttgctcatttgtactta

SEQ ID NO: 4891249 - DNA, 25 bp, Homo sapien
tcagggtccttgctcatttgtactt

SEQ ID NO: 4891250 - DNA, 25 bp, Homo sapien
agggtccttgctcatttgtacttac

SEQ ID NO: 4891251 - DNA, 25 bp, Homo sapien
gaacggagtctatatttgtagagaa

SEQ ID NO: 4891252 - DNA, 25 bp, Homo sapien
cagactggctgctttcgctggtgct

SEQ ID NO: 4891253 - DNA, 25 bp, Homo sapien
gaatcaatacaaggagtaagctgtc

SEQ ID NO: 4891254 - DNA, 25 bp, Homo sapien
ctgtggtagggaacggagtctatat

SEQ ID NO: 4891255 - DNA, 25 bp, Homo sapien
aatgtcaggatcctgttagctcctc

SEQ ID NO: 4891256 - DNA, 25 bp, Homo sapien
ctcatacaagttccaaagttgacag

SEQ ID NO: 4891257 - DNA, 25 bp, Homo sapien
ttaaatgtcaggatcctgttagctc

SEQ ID NO: 4891258 - DNA, 25 bp, Homo sapien
tacaagttccaaagttgacagaatg

SEQ ID NO: 4891259 - DNA, 25 bp, Homo sapien
ggagatcgggaccctcctgtctaaa

SEQ ID NO: 4891260 - DNA, 25 bp, Homo sapien
aacagggcactaaacatgttgtgaa

SEQ ID NO: 4891261 - DNA, 25 bp, Homo sapien
tggagatcgggaccctcctgtctaa

SEQ ID NO: 4891262 - DNA, 25 bp, Homo sapien
tctggagatcgggaccctcctgtct

SEQ ID NO: 4891263 - DNA, 25 bp, Homo sapien
acatacaagtggcaccacaagccca

SEQ ID NO: 4891264 - DNA, 25 bp, Homo sapien
agcccagagtgcgtgatgagtgttt

SEQ ID NO: 4891265 - DNA, 25 bp, Homo sapien
tgcgtgatgagtgttttgatgtgtt

SEQ ID NO: 4891266 - DNA, 25 bp, Homo sapien
ccagagtgcgtgatgagtgttttga

SEQ ID NO: 4891267 - DNA, 25 bp, Homo sapien
gtccagtattggttctgataccctc

SEQ ID NO: 4891268 - DNA, 25 bp, Homo sapien
tccagtattggttctgataccctca

SEQ ID NO: 4891269 - DNA, 25 bp, Homo sapien
attatatagaatctgcatagtttca

SEQ ID NO: 4891270 - DNA, 25 bp, Homo sapien
tccaaagttgtgtaagttgggtcca

SEQ ID NO: 4891271 - DNA, 25 bp, Homo sapien
tgcatagtttcaaactccaaagttg

SEQ ID NO: 4891272 - DNA, 25 bp, Homo sapien
cacttgaattatatagaatctgcat

SEQ ID NO: 4891273 - DNA, 25 bp, Homo sapien
ttacatctataaacagatgataact

SEQ ID NO: 4891274 - DNA, 25 bp, Homo sapien
catctataaacagatgataactcac

SEQ ID NO: 4891275 - DNA, 25 bp, Homo sapien
ttctttacatctataaacagatgat

SEQ ID NO: 4891276 - DNA, 25 bp, Homo sapien
tctttacatctataaacagatgata

SEQ ID NO: 4891277 - DNA, 25 bp, Homo sapien
tgtccccacagatagcacacagaca

SEQ ID NO: 4891278 - DNA, 25 bp, Homo sapien
ctctgtccccacagatagcacacag

SEQ ID NO: 4891279 - DNA, 25 bp, Homo sapien
gttgacaccgttgtctgtggtattc

SEQ ID NO: 4891280 - DNA, 25 bp, Homo sapien
ccacagatagcacacagacagttga

SEQ ID NO: 4891281 - DNA, 25 bp, Homo sapien
aatgctgcgtctgaagaaacccttg

SEQ ID NO: 4891282 - DNA, 25 bp, Homo sapien
gaatgctgcgtctgaagaaaccctt

SEQ ID NO: 4891283 - DNA, 25 bp, Homo sapien
ctgcaagaataaacgtgactcttac

SEQ ID NO: 4891284 - DNA, 25 bp, Homo sapien
aacagcctactggaaatgcgtgaca

SEQ ID NO: 4891285 - DNA, 25 bp, Homo sapien
tagacctaggatgtaatggcactta

SEQ ID NO: 4891286 - DNA, 25 bp, Homo sapien
catgaaatggcaatggtagttacct

SEQ ID NO: 4891287 - DNA, 25 bp, Homo sapien
tgtaatctgcattcaaggacagtca

SEQ ID NO: 4891288 - DNA, 25 bp, Homo sapien
tcgacaatatctacattgattcctt

SEQ ID NO: 4891289 - DNA, 25 bp, Homo sapien
ctttcttaatcgacaatatctacat

SEQ ID NO: 4891290 - DNA, 25 bp, Homo sapien
tcttaatcgacaatatctacattga

SEQ ID NO: 4891291 - DNA, 25 bp, Homo sapien
aacactttcttaatcgacaatatct

SEQ ID NO: 4891292 - DNA, 25 bp, Homo sapien
tctggtgcttattctgtcacgttca

SEQ ID NO: 4891293 - DNA, 25 bp, Homo sapien
cttcttctggtgcttattctgtcac

SEQ ID NO: 4891294 - DNA, 25 bp, Homo sapien
tattctgtcacgttcattttgtaca

SEQ ID NO: 4891295 - DNA, 25 bp, Homo sapien
ggtgcttattctgtcacgttcattt

SEQ ID NO: 4891296 - DNA, 25 bp, Homo sapien
attaaatagggtttgatgctgccgt

SEQ ID NO: 4891297 - DNA, 25 bp, Homo sapien
atagggtttgatgctgccgtgccac

SEQ ID NO: 4891298 - DNA, 25 bp, Homo sapien
agggtttgatgctgccgtgccacag

SEQ ID NO: 4891299 - DNA, 25 bp, Homo sapien
taaatagggtttgatgctgccgtgc

SEQ ID NO: 4891300 - DNA, 25 bp, Homo sapien
gcaattttcttaacgtttatgtcag

SEQ ID NO: 4891301 - DNA, 25 bp, Homo sapien
gtcagtgcttgacccagggcttgag

SEQ ID NO: 4891302 - DNA, 25 bp, Homo sapien
cacagacatcaccaatacttgcaat

SEQ ID NO: 4891303 - DNA, 25 bp, Homo sapien
tcttaacgtttatgtcagtgcttga

SEQ ID NO: 4891304 - DNA, 25 bp, Homo sapien
tcccctgcgtgagctctcaacagtg

SEQ ID NO: 4891305 - DNA, 25 bp, Homo sapien
tagctccaagcagtaagtgctcccc

SEQ ID NO: 4891306 - DNA, 25 bp, Homo sapien
ctgcgtgagctctcaacagtgccac

SEQ ID NO: 4891307 - DNA, 25 bp, Homo sapien
aagcagtaagtgctcccctgcgtga

SEQ ID NO: 4891308 - DNA, 25 bp, Homo sapien
cagctcatctagaacacgattggcc

SEQ ID NO: 4891309 - DNA, 25 bp, Homo sapien
ggccacacggctaatctcaacttca

SEQ ID NO: 4891310 - DNA, 25 bp, Homo sapien
gaaatggtctaaccagctcatctag

SEQ ID NO: 4891311 - DNA, 25 bp, Homo sapien
tgcctttaaacaagcatactcattg

SEQ ID NO: 4891312 - DNA, 25 bp, Homo sapien
gatgtagtcctccaaaccgatctgc

SEQ ID NO: 4891313 - DNA, 25 bp, Homo sapien
cccgggagtcatactgccgatcatt

SEQ ID NO: 4891314 - DNA, 25 bp, Homo sapien
tcatttgccacgtgatgctctgcag

SEQ ID NO: 4891315 - DNA, 25 bp, Homo sapien
taatttttactggatcgcttagccc

SEQ ID NO: 4891316 - DNA, 25 bp, Homo sapien
ctgcatgaaccagtgttgacatggg

SEQ ID NO: 4891317 - DNA, 25 bp, Homo sapien
ttaatgggtcttgagacaaatgtgg

SEQ ID NO: 4891318 - DNA, 25 bp, Homo sapien
gtctgcatgaaccagtgttgacatg

SEQ ID NO: 4891319 - DNA, 25 bp, Homo sapien
gacaaatgtggatgcattggatgat

SEQ ID NO: 4891320 - DNA, 25 bp, Homo sapien
attaagaaatatcttggttgaaaag

SEQ ID NO: 4891321 - DNA, 25 bp, Homo sapien
ctaatagattctttcccacaattcc

SEQ ID NO: 4891322 - DNA, 25 bp, Homo sapien
tcttggttgaaaagtagtctataaa

SEQ ID NO: 4891323 - DNA, 25 bp, Homo sapien
tctggttactaatagattctttccc

SEQ ID NO: 4891324 - DNA, 25 bp, Homo sapien
ggcccatgacgtactgttagagagt

SEQ ID NO: 4891325 - DNA, 25 bp, Homo sapien
tacataacaccaatacacattagcg

SEQ ID NO: 4891326 - DNA, 25 bp, Homo sapien
gagtctaatggtggcagtcagtctt

SEQ ID NO: 4891327 - DNA, 25 bp, Homo sapien
gatttgtagaatgcattattggccc

SEQ ID NO: 4891328 - DNA, 25 bp, Homo sapien
agctattttgtactgttcttgccca

SEQ ID NO: 4891329 - DNA, 25 bp, Homo sapien
gctattttgtactgttcttgcccag

SEQ ID NO: 4891330 - DNA, 25 bp, Homo sapien
tcaattggttcaggcacaatgcagg

SEQ ID NO: 4891331 - DNA, 25 bp, Homo sapien
gacatttggtacatccctgggctgc

SEQ ID NO: 4891332 - DNA, 25 bp, Homo sapien
gataattctcctggctaccgtggga

SEQ ID NO: 4891333 - DNA, 25 bp, Homo sapien
tgacatggctttggctgacacagac

SEQ ID NO: 4891334 - DNA, 25 bp, Homo sapien
ttgagagccagttttattgtacact

SEQ ID NO: 4891335 - DNA, 25 bp, Homo sapien
tcagagttgtaatagttggattgct

SEQ ID NO: 4891336 - DNA, 25 bp, Homo sapien
tattgtacactttagatgctttcag

SEQ ID NO: 4891337 - DNA, 25 bp, Homo sapien
aagattcttggtgcaacttccatgg

SEQ ID NO: 4891338 - DNA, 25 bp, Homo sapien
caattattaaattccctagcttcat

SEQ ID NO: 4891339 - DNA, 25 bp, Homo sapien
tcatatttctcataccgataaaatt

SEQ ID NO: 4891340 - DNA, 25 bp, Homo sapien
tttctcataccgataaaattaaatc

SEQ ID NO: 4891341 - DNA, 25 bp, Homo sapien
taccgataaaattaaatctgcagct

SEQ ID NO: 4891342 - DNA, 25 bp, Homo sapien
tcctgccttcgagcatagccaggac

SEQ ID NO: 4891343 - DNA, 25 bp, Homo sapien
ctgccttcgagcatagccaggacat

SEQ ID NO: 4891344 - DNA, 25 bp, Homo sapien
ccttcgagcatagccaggacattta

SEQ ID NO: 4891345 - DNA, 25 bp, Homo sapien
gccttcgagcatagccaggacattt

SEQ ID NO: 4891346 - DNA, 25 bp, Homo sapien
cccctgaagtaagctgtttctcatg

SEQ ID NO: 4891347 - DNA, 25 bp, Homo sapien
tccatcccctgaagtaagctgtttc

SEQ ID NO: 4891348 - DNA, 25 bp, Homo sapien
tgtttctcatgctccaatccatctt

SEQ ID NO: 4891349 - DNA, 25 bp, Homo sapien
taaatccatcccctgaagtaagctg

SEQ ID NO: 4891350 - DNA, 25 bp, Homo sapien
gcctagaactgtccactaaatcagg

SEQ ID NO: 4891351 - DNA, 25 bp, Homo sapien
tcagggatgtagtagtttcaacaca

SEQ ID NO: 4891352 - DNA, 25 bp, Homo sapien
ggacccatgacaatatctgacctga

SEQ ID NO: 4891353 - DNA, 25 bp, Homo sapien
taaatcctcaaagcgtaacccagcc

SEQ ID NO: 4891354 - DNA, 25 bp, Homo sapien
aaataatgatgttcagctgttgaaa

SEQ ID NO: 4891355 - DNA, 25 bp, Homo sapien
caggtaacataggtatagtttttat

SEQ ID NO: 4891356 - DNA, 25 bp, Homo sapien
aactcgtaatgaattccagaatgtc

SEQ ID NO: 4891357 - DNA, 25 bp, Homo sapien
caggggcagaagatatctcaatgaa

SEQ ID NO: 4891358 - DNA, 25 bp, Homo sapien
gagtagacatattcacttagcaggg

SEQ ID NO: 4891359 - DNA, 25 bp, Homo sapien
atttaatccattgacttccgtgatt

SEQ ID NO: 4891360 - DNA, 25 bp, Homo sapien
atgagtagacatattcacttagcag

SEQ ID NO: 4891361 - DNA, 25 bp, Homo sapien
tgacttccgtgatttcttttatacc

SEQ ID NO: 4891362 - DNA, 25 bp, Homo sapien
tttcactggcatgatactaagcatc

SEQ ID NO: 4891363 - DNA, 25 bp, Homo sapien
tcactggcatgatactaagcatcac

SEQ ID NO: 4891364 - DNA, 25 bp, Homo sapien
ttttcactggcatgatactaagcat

SEQ ID NO: 4891365 - DNA, 25 bp, Homo sapien
actggcatgatactaagcatcacca

SEQ ID NO: 4891366 - DNA, 25 bp, Homo sapien
tctagaaacttctgcctcgagctct

SEQ ID NO: 4891367 - DNA, 25 bp, Homo sapien
cagcctggatgattgtgtgaccaga

SEQ ID NO: 4891368 - DNA, 25 bp, Homo sapien
cttgatgcttgaataagagatgtat

SEQ ID NO: 4891369 - DNA, 25 bp, Homo sapien
tttgcacagatcttgatgcttgaat

SEQ ID NO: 4891370 - DNA, 25 bp, Homo sapien
gagagcaatctaacatccagggata

SEQ ID NO: 4891371 - DNA, 25 bp, Homo sapien
tgccgtgaaggcttacagtaatccc

SEQ ID NO: 4891372 - DNA, 25 bp, Homo sapien
tctcatcagtggctggcagactgcc

SEQ ID NO: 4891373 - DNA, 25 bp, Homo sapien
gacagcaatcacagccgtcacaagg

SEQ ID NO: 4891374 - DNA, 25 bp, Homo sapien
gctcagtacaaaacggattttcttc

SEQ ID NO: 4891375 - DNA, 25 bp, Homo sapien
ctcagtacaaaacggattttcttct

SEQ ID NO: 4891376 - DNA, 25 bp, Homo sapien
caacaggtcatcaatgagtccatca

SEQ ID NO: 4891377 - DNA, 25 bp, Homo sapien
tacactcaaacacactgatgtaact

SEQ ID NO: 4891378 - DNA, 25 bp, Homo sapien
tcaccacttgacagacaacaggtca

SEQ ID NO: 4891379 - DNA, 25 bp, Homo sapien
catcatttacactcaaacacactga

SEQ ID NO: 4891380 - DNA, 25 bp, Homo sapien
aaaatcaatactttcagttgtagct

SEQ ID NO: 4891381 - DNA, 25 bp, Homo sapien
gtagctgcagttacccgttttactg

SEQ ID NO: 4891382 - DNA, 25 bp, Homo sapien
caatactttcagttgtagctgcagt

SEQ ID NO: 4891383 - DNA, 25 bp, Homo sapien
tgcagttacccgttttactgcttta

SEQ ID NO: 4891384 - DNA, 25 bp, Homo sapien
tgcattattgtctctagaccaggca

SEQ ID NO: 4891385 - DNA, 25 bp, Homo sapien
gaccaggcaaccagtgtccttgctg

SEQ ID NO: 4891386 - DNA, 25 bp, Homo sapien
ctgaatgcattattgtctctagacc

SEQ ID NO: 4891387 - DNA, 25 bp, Homo sapien
ctctagaccaggcaaccagtgtcct

SEQ ID NO: 4891388 - DNA, 25 bp, Homo sapien
catcaagttctaaaactgtcactcc

SEQ ID NO: 4891389 - DNA, 25 bp, Homo sapien
gatgatcctatcattttgaagccag

SEQ ID NO: 4891390 - DNA, 25 bp, Homo sapien
tgaaatctacctccaagatgatcct

SEQ ID NO: 4891391 - DNA, 25 bp, Homo sapien
actgttattgttgagatttacttcc

SEQ ID NO: 4891392 - DNA, 25 bp, Homo sapien
gagccattgccaacacaagtttctg

SEQ ID NO: 4891393 - DNA, 25 bp, Homo sapien
tggtaacccccatgtggagccattg

SEQ ID NO: 4891394 - DNA, 25 bp, Homo sapien
gagctgatggtaacccccatgtgga

SEQ ID NO: 4891395 - DNA, 25 bp, Homo sapien
gctccagaagctgctaagagctgat

SEQ ID NO: 4891396 - DNA, 25 bp, Homo sapien
ctctgactgagcaagactataaaga

SEQ ID NO: 4891397 - DNA, 25 bp, Homo sapien
gagtttgaagagctttgttccccat

SEQ ID NO: 4891398 - DNA, 25 bp, Homo sapien
cttgagagtttgaagagctttgttc

SEQ ID NO: 4891399 - DNA, 25 bp, Homo sapien
cttcttgagagtttgaagagctttg

SEQ ID NO: 4891400 - DNA, 25 bp, Homo sapien
ctccttgtttcttcttgagagtttg

SEQ ID NO: 4891401 - DNA, 25 bp, Homo sapien
tgcttacggtcatcagggctttacc

SEQ ID NO: 4891402 - DNA, 25 bp, Homo sapien
cattgatgtaatcgttataaccttc

SEQ ID NO: 4891403 - DNA, 25 bp, Homo sapien
taataatttctgcttacggtcatca

SEQ ID NO: 4891404 - DNA, 25 bp, Homo sapien
ggctttaccattgatgtaatcgtta

SEQ ID NO: 4891405 - DNA, 25 bp, Homo sapien
tagaacagtttctttgttgtatgtc

SEQ ID NO: 4891406 - DNA, 25 bp, Homo sapien
tcattctgttcacttagaacagttt

SEQ ID NO: 4891407 - DNA, 25 bp, Homo sapien
tcactttgtatcattctgttcactt

SEQ ID NO: 4891408 - DNA, 25 bp, Homo sapien
agaacagtttctttgttgtatgtca

SEQ ID NO: 4891409 - DNA, 25 bp, Homo sapien
cggtgataaccataatgtgaagagc

SEQ ID NO: 4891410 - DNA, 25 bp, Homo sapien
gataaccataatgtgaagagcaggg

SEQ ID NO: 4891411 - DNA, 25 bp, Homo sapien
ttagaacattgtcaggacggtgata

SEQ ID NO: 4891412 - DNA, 25 bp, Homo sapien
tgtcaggacggtgataaccataatg

SEQ ID NO: 4891413 - DNA, 25 bp, Homo sapien
atggaaaagaagagatatctgatga

SEQ ID NO: 4891414 - DNA, 25 bp, Homo sapien
ggatggaaaagaagagatatctgat

SEQ ID NO: 4891415 - DNA, 25 bp, Homo sapien
gcaaaaatcataagaggtaggatgg

SEQ ID NO: 4891416 - DNA, 25 bp, Homo sapien
tgcaaaaatcataagaggtaggatg

SEQ ID NO: 4891417 - DNA, 25 bp, Homo sapien
agagagtgggggccaatattcaaca

SEQ ID NO: 4891418 - DNA, 25 bp, Homo sapien
tgtaaagaccatcaattctaagaag

SEQ ID NO: 4891419 - DNA, 25 bp, Homo sapien
ctcagcagaaaacctacaagctaga

SEQ ID NO: 4891420 - DNA, 25 bp, Homo sapien
attcaacattcttaaagaaaagaat

SEQ ID NO: 4891421 - DNA, 25 bp, Homo sapien
aattcctggtgagatgattaagcag

SEQ ID NO: 4891422 - DNA, 25 bp, Homo sapien
gattaagcagtttcccgtatattcc

SEQ ID NO: 4891423 - DNA, 25 bp, Homo sapien
atttctcatgccctggtagttccaa

SEQ ID NO: 4891424 - DNA, 25 bp, Homo sapien
cttccttattcttggagatgacatt

SEQ ID NO: 4891425 - DNA, 25 bp, Homo sapien
tgtcatcatgaaggatgctgccaat

SEQ ID NO: 4891426 - DNA, 25 bp, Homo sapien
ttcataatagtgatctcttgtactg

SEQ ID NO: 4891427 - DNA, 25 bp, Homo sapien
atttttattgtattccagagaagga

SEQ ID NO: 4891428 - DNA, 25 bp, Homo sapien
attccagagaaggaaaggtgttgaa

SEQ ID NO: 4891429 - DNA, 25 bp, Homo sapien
tccagagaaggaaaggtgttgaaaa

SEQ ID NO: 4891430 - DNA, 25 bp, Homo sapien
aaatttttattgtattccagagaag

SEQ ID NO: 4891431 - DNA, 25 bp, Homo sapien
tctggccagctgttagttagggcat

SEQ ID NO: 4891432 - DNA, 25 bp, Homo sapien
accgcgtctggccagctgttagtta

SEQ ID NO: 4891433 - DNA, 25 bp, Homo sapien
cgcgtctggccagctgttagttagg

SEQ ID NO: 4891434 - DNA, 25 bp, Homo sapien
cgtctggccagctgttagttagggc

SEQ ID NO: 4891435 - DNA, 25 bp, Homo sapien
gaatttcaagtttttggcattgaga

SEQ ID NO: 4891436 - DNA, 25 bp, Homo sapien
cattgagatggcaagacgtttagtt

SEQ ID NO: 4891437 - DNA, 25 bp, Homo sapien
aaacattctctagacgaagaatttc

SEQ ID NO: 4891438 - DNA, 25 bp, Homo sapien
tctctagacgaagaatttcaagttt

SEQ ID NO: 4891439 - DNA, 25 bp, Homo sapien
acttgctgattggtagcaggcaggc

SEQ ID NO: 4891440 - DNA, 25 bp, Homo sapien
gctgattggtagcaggcaggctctc

SEQ ID NO: 4891441 - DNA, 25 bp, Homo sapien
ttgctgattggtagcaggcaggctc

SEQ ID NO: 4891442 - DNA, 25 bp, Homo sapien
tgctgattggtagcaggcaggctct

SEQ ID NO: 4891443 - DNA, 25 bp, Homo sapien
gaacttgacccatgattgttacttg

SEQ ID NO: 4891444 - DNA, 25 bp, Homo sapien
ccggcttgttcgtataacatgaatc

SEQ ID NO: 4891445 - DNA, 25 bp, Homo sapien
tctccagtggtgtggctcggaattc

SEQ ID NO: 4891446 - DNA, 25 bp, Homo sapien
tatgtgtccacttcacaactaagtg

SEQ ID NO: 4891447 - DNA, 25 bp, Homo sapien
taaatgcttcgcatcagcatgagca

SEQ ID NO: 4891448 - DNA, 25 bp, Homo sapien
catttgtggtctggtaacccttcct

SEQ ID NO: 4891449 - DNA, 25 bp, Homo sapien
tgagcatcccacaacatttgtggtc

SEQ ID NO: 4891450 - DNA, 25 bp, Homo sapien
ttttctcttgatgtaaatgcttcgc

SEQ ID NO: 4891451 - DNA, 25 bp, Homo sapien
ctcaatgttgggtaaagacaaagtc

SEQ ID NO: 4891452 - DNA, 25 bp, Homo sapien
gtaaagacaaagtccctctagtgta

SEQ ID NO: 4891453 - DNA, 25 bp, Homo sapien
tgttttctcaatgttgggtaaagac

SEQ ID NO: 4891454 - DNA, 25 bp, Homo sapien
caaagtccctctagtgtatactaac

SEQ ID NO: 4891455 - DNA, 25 bp, Homo sapien
tctgagatttcgttatccaagccag

SEQ ID NO: 4891456 - DNA, 25 bp, Homo sapien
gatgtgtctctagctctttaaagac

SEQ ID NO: 4891457 - DNA, 25 bp, Homo sapien
tcatagttacaaagtggccgagcca

SEQ ID NO: 4891458 - DNA, 25 bp, Homo sapien
catgtctggctatttcattgtgaag

SEQ ID NO: 4891459 - DNA, 25 bp, Homo sapien
aaagccattgaaagtacatgtgaat

SEQ ID NO: 4891460 - DNA, 25 bp, Homo sapien
caaagccattgaaagtacatgtgaa

SEQ ID NO: 4891461 - DNA, 25 bp, Homo sapien
acaaagccattgaaagtacatgtga

SEQ ID NO: 4891462 - DNA, 25 bp, Homo sapien
aagccattgaaagtacatgtgaatt

SEQ ID NO: 4891463 - DNA, 25 bp, Homo sapien
tccagagcctccttgaatatgtagg

SEQ ID NO: 4891464 - DNA, 25 bp, Homo sapien
cagagcctccttgaatatgtaggtc

SEQ ID NO: 4891465 - DNA, 25 bp, Homo sapien
ttccagagcctccttgaatatgtag

SEQ ID NO: 4891466 - DNA, 25 bp, Homo sapien
gagcctccttgaatatgtaggtcat

SEQ ID NO: 4891467 - DNA, 25 bp, Homo sapien
aaacagatggaattatctggtttca

SEQ ID NO: 4891468 - DNA, 25 bp, Homo sapien
gaattatctggtttcatttgagtca

SEQ ID NO: 4891469 - DNA, 25 bp, Homo sapien
ttaagaaaattctgcaagctgcaga

SEQ ID NO: 4891470 - DNA, 25 bp, Homo sapien
tgactgcgaattgggtcaaagggaa

SEQ ID NO: 4891471 - DNA, 25 bp, Homo sapien
caggttctgtgttacatcagtacca

SEQ ID NO: 4891472 - DNA, 25 bp, Homo sapien
ttccacttggaaactgaactgcaac

SEQ ID NO: 4891473 - DNA, 25 bp, Homo sapien
gccttggcatgctgaattagcaaat

SEQ ID NO: 4891474 - DNA, 25 bp, Homo sapien
catcagtaccaatgccaaagccttg

SEQ ID NO: 4891475 - DNA, 25 bp, Homo sapien
taattgctgatttccatacacctcg

SEQ ID NO: 4891476 - DNA, 25 bp, Homo sapien
atacacctcgccgtgctttcaccat

SEQ ID NO: 4891477 - DNA, 25 bp, Homo sapien
tctatcaaatgcacatgtagtatgt

SEQ ID NO: 4891478 - DNA, 25 bp, Homo sapien
cccaaagaagatgccccacatgagt

SEQ ID NO: 4891479 - DNA, 25 bp, Homo sapien
tacgggcagatcctaaagccagaca

SEQ ID NO: 4891480 - DNA, 25 bp, Homo sapien
caaaactgcccttagaagtgcttga

SEQ ID NO: 4891481 - DNA, 25 bp, Homo sapien
gaatagcctgaactcttatcaaaac

SEQ ID NO: 4891482 - DNA, 25 bp, Homo sapien
aagcctgactcattgtgacttggag

SEQ ID NO: 4891483 - DNA, 25 bp, Homo sapien
cattaaacattccaggccttgggca

SEQ ID NO: 4891484 - DNA, 25 bp, Homo sapien
tattacatggtctcaattcaattgt

SEQ ID NO: 4891485 - DNA, 25 bp, Homo sapien
caattcaattgtgaacgtccccatt

SEQ ID NO: 4891486 - DNA, 25 bp, Homo sapien
gctgacacagcgtattccaattgtt

SEQ ID NO: 4891487 - DNA, 25 bp, Homo sapien
atttaggactctgcagaaactgaca

SEQ ID NO: 4891488 - DNA, 25 bp, Homo sapien
gtacaggaagtgtagccaaagcagg

SEQ ID NO: 4891489 - DNA, 25 bp, Homo sapien
atgtacaggaagtgtagccaaagca

SEQ ID NO: 4891490 - DNA, 25 bp, Homo sapien
agcagggacaagtattaatttagga

SEQ ID NO: 4891491 - DNA, 25 bp, Homo sapien
cctaggatccaatccttgtcaatca

SEQ ID NO: 4891492 - DNA, 25 bp, Homo sapien
aattggattcttgaatagggaaatc

SEQ ID NO: 4891493 - DNA, 25 bp, Homo sapien
tgtcaatcaggcatgttaaattgga

SEQ ID NO: 4891494 - DNA, 25 bp, Homo sapien
gattccctaggatccaatccttgtc

SEQ ID NO: 4891495 - DNA, 25 bp, Homo sapien
cttacagaatgaggagtatgctgat

SEQ ID NO: 4891496 - DNA, 25 bp, Homo sapien
ttacagaatgaggagtatgctgatt

SEQ ID NO: 4891497 - DNA, 25 bp, Homo sapien
acatgaagcatagtgtgcacatcca

SEQ ID NO: 4891498 - DNA, 25 bp, Homo sapien
agcatagtgtgcacatccactcaga

SEQ ID NO: 4891499 - DNA, 25 bp, Homo sapien
tatttcttccatacatgaagcatag

SEQ ID NO: 4891500 - DNA, 25 bp, Homo sapien
gatatttcttccatacatgaagcat

SEQ ID NO: 4891501 - DNA, 25 bp, Homo sapien
gttggtatcagtgcccactgtagcc

SEQ ID NO: 4891502 - DNA, 25 bp, Homo sapien
ctagttggtatcagtgcccactgta

SEQ ID NO: 4891503 - DNA, 25 bp, Homo sapien
tgatccagagaaaagcccaattatg

SEQ ID NO: 4891504 - DNA, 25 bp, Homo sapien
cctgctgatccagagaaaagcccaa

SEQ ID NO: 4891505 - DNA, 25 bp, Homo sapien
gactgccctagctccaaaccgtcta

SEQ ID NO: 4891506 - DNA, 25 bp, Homo sapien
gaactagcgtcaagggctgttttag

SEQ ID NO: 4891507 - DNA, 25 bp, Homo sapien
tctggtctcccttcacagaggcagt

SEQ ID NO: 4891508 - DNA, 25 bp, Homo sapien
aggaggattaagaactagcgtcaag

SEQ ID NO: 4891509 - DNA, 25 bp, Homo sapien
gagcaacactataagatccttgaca

SEQ ID NO: 4891510 - DNA, 25 bp, Homo sapien
gacatttttaaggatgctaacgagc

SEQ ID NO: 4891511 - DNA, 25 bp, Homo sapien
tccttttcagagcagagcaacacta

SEQ ID NO: 4891512 - DNA, 25 bp, Homo sapien
gctaacgagccaagtagatgcttgt

SEQ ID NO: 4891513 - DNA, 25 bp, Homo sapien
gataaggatggcaggcacgtaacat

SEQ ID NO: 4891514 - DNA, 25 bp, Homo sapien
ggcataggataaggatggcaggcac

SEQ ID NO: 4891515 - DNA, 25 bp, Homo sapien
cataggataaggatggcaggcacgt

SEQ ID NO: 4891516 - DNA, 25 bp, Homo sapien
taggataaggatggcaggcacgtaa

SEQ ID NO: 4891517 - DNA, 25 bp, Homo sapien
ggaatatcccaagtgccaccgaact

SEQ ID NO: 4891518 - DNA, 25 bp, Homo sapien
tcagagaactccacgccggaatggg

SEQ ID NO: 4891519 - DNA, 25 bp, Homo sapien
ctgaagtggaatatcccaagtgcca

SEQ ID NO: 4891520 - DNA, 25 bp, Homo sapien
caagtgccaccgaactcagagaact

SEQ ID NO: 4891521 - DNA, 25 bp, Homo sapien
aggagcaattggataccacaacatt

SEQ ID NO: 4891522 - DNA, 25 bp, Homo sapien
ggagcaattggataccacaacatta

SEQ ID NO: 4891523 - DNA, 25 bp, Homo sapien
gagcaattggataccacaacattat

SEQ ID NO: 4891524 - DNA, 25 bp, Homo sapien
caggaaaacttcctggatgaggcag

SEQ ID NO: 4891525 - DNA, 25 bp, Homo sapien
tactctaacgaagcaggaaaacttc

SEQ ID NO: 4891526 - DNA, 25 bp, Homo sapien
gaaaacgaagatactctaacgaagc

SEQ ID NO: 4891527 - DNA, 25 bp, Homo sapien
gatgaggcagatccatctcaaggct

SEQ ID NO: 4891528 - DNA, 25 bp, Homo sapien
tcaaacagcaagcacgcataagatc

SEQ ID NO: 4891529 - DNA, 25 bp, Homo sapien
ccgatttccaatgcaggaggttgct

SEQ ID NO: 4891530 - DNA, 25 bp, Homo sapien
ttccatggagccgtgcactggcgtg

SEQ ID NO: 4891531 - DNA, 25 bp, Homo sapien
tcctggagtagtcccccgatttcca

SEQ ID NO: 4891532 - DNA, 25 bp, Homo sapien
ccaagatcatgcagtaaggcttgct

SEQ ID NO: 4891533 - DNA, 25 bp, Homo sapien
caaagcttagcagatccgatgatcc

SEQ ID NO: 4891534 - DNA, 25 bp, Homo sapien
ttgtctaatttacgccaagtccctg

SEQ ID NO: 4891535 - DNA, 25 bp, Homo sapien
ttcacgggtaaaattcttgcatgcc

SEQ ID NO: 4891536 - DNA, 25 bp, Homo sapien
tctttatgataaattcagtctacat

SEQ ID NO: 4891537 - DNA, 25 bp, Homo sapien
ttactaaaagttcatagttccttgc

SEQ ID NO: 4891538 - DNA, 25 bp, Homo sapien
gttccttgcagtataccaaaagaaa

SEQ ID NO: 4891539 - DNA, 25 bp, Homo sapien
gttcatagttccttgcagtatacca

SEQ ID NO: 4891540 - DNA, 25 bp, Homo sapien
acagcagtgacctgaccgtgaagat

SEQ ID NO: 4891541 - DNA, 25 bp, Homo sapien
gcagtgacctgaccgtgaagatact

SEQ ID NO: 4891542 - DNA, 25 bp, Homo sapien
atccagaggtagagtaagctgtgtg

SEQ ID NO: 4891543 - DNA, 25 bp, Homo sapien
catccagaggtagagtaagctgtgt

SEQ ID NO: 4891544 - DNA, 25 bp, Homo sapien
tcgcttcatctgacaaagtcttact

SEQ ID NO: 4891545 - DNA, 25 bp, Homo sapien
tctcgcttcatctgacaaagtctta

SEQ ID NO: 4891546 - DNA, 25 bp, Homo sapien
gcttcatctgacaaagtcttactca

SEQ ID NO: 4891547 - DNA, 25 bp, Homo sapien
cgtctcgcttcatctgacaaagtct

SEQ ID NO: 4891548 - DNA, 25 bp, Homo sapien
ttcctcctttcactacaccttagtg

SEQ ID NO: 4891549 - DNA, 25 bp, Homo sapien
tcacatcattagacttagccttcat

SEQ ID NO: 4891550 - DNA, 25 bp, Homo sapien
ttcactacaccttagtgtctgctcc

SEQ ID NO: 4891551 - DNA, 25 bp, Homo sapien
caaagaggattcacatcattagact

SEQ ID NO: 4891552 - DNA, 25 bp, Homo sapien
ctctttcagtttctaatgtggcaag

SEQ ID NO: 4891553 - DNA, 25 bp, Homo sapien
ttcagtttctaatgtggcaagaagg

SEQ ID NO: 4891554 - DNA, 25 bp, Homo sapien
tctctttcagtttctaatgtggcaa

SEQ ID NO: 4891555 - DNA, 25 bp, Homo sapien
ctttcagtttctaatgtggcaagaa

SEQ ID NO: 4891556 - DNA, 25 bp, Homo sapien
caaagctcagctatagatttgaggg

SEQ ID NO: 4891557 - DNA, 25 bp, Homo sapien
gggctgttgccgaaccaatgtaaag

SEQ ID NO: 4891558 - DNA, 25 bp, Homo sapien
tttcagagggaagtatgcaggtctc

SEQ ID NO: 4891559 - DNA, 25 bp, Homo sapien
gatactttgaatttgacatgcacaa

SEQ ID NO: 4891560 - DNA, 25 bp, Homo sapien
tggtcagtaggaagatccctccttt

SEQ ID NO: 4891561 - DNA, 25 bp, Homo sapien
gttgaaaggaatcattctcaggctg

SEQ ID NO: 4891562 - DNA, 25 bp, Homo sapien
cttcttctctcggagttgaaaggaa

SEQ ID NO: 4891563 - DNA, 25 bp, Homo sapien
tgttcaggtcttctggtcagtagga

SEQ ID NO: 4891564 - DNA, 25 bp, Homo sapien
tctctgtagacaatgcacactcttg

SEQ ID NO: 4891565 - DNA, 25 bp, Homo sapien
gccatgatgacccattttacgtcaa

SEQ ID NO: 4891566 - DNA, 25 bp, Homo sapien
tctaactgggcttccttgaattaac

SEQ ID NO: 4891567 - DNA, 25 bp, Homo sapien
cacagtgataatagtagggcaaatc

SEQ ID NO: 4891568 - DNA, 25 bp, Homo sapien
gaggcattaccctaccaatggctga

SEQ ID NO: 4891569 - DNA, 25 bp, Homo sapien
tctgctgggtggtcgttaggtcaaa

SEQ ID NO: 4891570 - DNA, 25 bp, Homo sapien
caaaagtggaggttcccgagtcatc

SEQ ID NO: 4891571 - DNA, 25 bp, Homo sapien
tgttgcctcggaacaggatccacag

SEQ ID NO: 4891572 - DNA, 25 bp, Homo sapien
ctatgtacacattctgcacattctg

SEQ ID NO: 4891573 - DNA, 25 bp, Homo sapien
acctatgtacacattctgcacattc

SEQ ID NO: 4891574 - DNA, 25 bp, Homo sapien
gccttttcagggactagcttctcat

SEQ ID NO: 4891575 - DNA, 25 bp, Homo sapien
tttcagggactagcttctcataaaa

SEQ ID NO: 4891576 - DNA, 25 bp, Homo sapien
gactagcttctcataaaagatcaga

SEQ ID NO: 4891577 - DNA, 25 bp, Homo sapien
tcataaaagatcagattggtgggtt

SEQ ID NO: 4891578 - DNA, 25 bp, Homo sapien
tcccactgccctgaatgaaatctac

SEQ ID NO: 4891579 - DNA, 25 bp, Homo sapien
gaaatctactggttggacgttctgt

SEQ ID NO: 4891580 - DNA, 25 bp, Homo sapien
tgccacaacctgagggcattgcagg

SEQ ID NO: 4891581 - DNA, 25 bp, Homo sapien
taggttcaagtgctaaacttctccc

SEQ ID NO: 4891582 - DNA, 25 bp, Homo sapien
catgtctaaataggtagtaggtgac

SEQ ID NO: 4891583 - DNA, 25 bp, Homo sapien
cctaggaaagccattagttgagaac

SEQ ID NO: 4891584 - DNA, 25 bp, Homo sapien
taggtgactgacaggcttgcgtctc

SEQ ID NO: 4891585 - DNA, 25 bp, Homo sapien
cgtttgatttgaatgcacgtggcat

SEQ ID NO: 4891586 - DNA, 25 bp, Homo sapien
ccatttattagagccctgccttctt

SEQ ID NO: 4891587 - DNA, 25 bp, Homo sapien
cagagaaggccgcttggcttgccag

SEQ ID NO: 4891588 - DNA, 25 bp, Homo sapien
ttctgatgcagtaaataactaggcg

SEQ ID NO: 4891589 - DNA, 25 bp, Homo sapien
tactctgatgtattccactgcttga

SEQ ID NO: 4891590 - DNA, 25 bp, Homo sapien
gatgctctgcatgtgatacggtaaa

SEQ ID NO: 4891591 - DNA, 25 bp, Homo sapien
tagcattacagtcaatgtgcttcgc

SEQ ID NO: 4891592 - DNA, 25 bp, Homo sapien
gtgcttcgcttgaccttgaccaaca

SEQ ID NO: 4891593 - DNA, 25 bp, Homo sapien
tacagtcaatgtgcttcgcttgacc

SEQ ID NO: 4891594 - DNA, 25 bp, Homo sapien
ttcctctctagcattacagtcaatg

SEQ ID NO: 4891595 - DNA, 25 bp, Homo sapien
tctacttcacggacacagacatttg

SEQ ID NO: 4891596 - DNA, 25 bp, Homo sapien
tcagcaggagccttatcatattttg

SEQ ID NO: 4891597 - DNA, 25 bp, Homo sapien
tctgcttgatcccacttcatctact

SEQ ID NO: 4891598 - DNA, 25 bp, Homo sapien
ttctagtgccattataccctggtcg

SEQ ID NO: 4891599 - DNA, 25 bp, Homo sapien
gcaatgtcggcactgatctgccctt

SEQ ID NO: 4891600 - DNA, 25 bp, Homo sapien
tggcaatgtcggcactgatctgccc

SEQ ID NO: 4891601 - DNA, 25 bp, Homo sapien
ttgtggcaatgtcggcactgatctg

SEQ ID NO: 4891602 - DNA, 25 bp, Homo sapien
aatgtcggcactgatctgccctttt

SEQ ID NO: 4891603 - DNA, 25 bp, Homo sapien
ttttgagagcattgtagcattgatc

SEQ ID NO: 4891604 - DNA, 25 bp, Homo sapien
tcatattctggcaagttagaacatt

SEQ ID NO: 4891605 - DNA, 25 bp, Homo sapien
tgaggccaccttgtaaatatgctgc

SEQ ID NO: 4891606 - DNA, 25 bp, Homo sapien
aatatgctgcattttatgttgagct

SEQ ID NO: 4891607 - DNA, 25 bp, Homo sapien
tgacaagtgcagtttcggtgaagtt

SEQ ID NO: 4891608 - DNA, 25 bp, Homo sapien
tgagactcataagcacagagatggc

SEQ ID NO: 4891609 - DNA, 25 bp, Homo sapien
tatatgagactatcttgggagagag

SEQ ID NO: 4891610 - DNA, 25 bp, Homo sapien
ttcgggactgagcaggtagaaactc

SEQ ID NO: 4891611 - DNA, 25 bp, Homo sapien
tttccgctgtttgccacggtagaga

SEQ ID NO: 4891612 - DNA, 25 bp, Homo sapien
tcaaattgttttccgctgtttgcca

SEQ ID NO: 4891613 - DNA, 25 bp, Homo sapien
aattgttttccgctgtttgccacgg

SEQ ID NO: 4891614 - DNA, 25 bp, Homo sapien
cgctgtttgccacggtagagaaagt

SEQ ID NO: 4891615 - DNA, 25 bp, Homo sapien
tgcattctcctttacccggctcttg

SEQ ID NO: 4891616 - DNA, 25 bp, Homo sapien
tcctttacccggctcttgtgactga

SEQ ID NO: 4891617 - DNA, 25 bp, Homo sapien
ccggctcttgtgactgatgtattta

SEQ ID NO: 4891618 - DNA, 25 bp, Homo sapien
tttacccggctcttgtgactgatgt

SEQ ID NO: 4891619 - DNA, 25 bp, Homo sapien
gctttttgcccttcgttcccatgtg

SEQ ID NO: 4891620 - DNA, 25 bp, Homo sapien
gatcagagttgaccttttttgtaag

SEQ ID NO: 4891621 - DNA, 25 bp, Homo sapien
atttccagatcagagttgacctttt

SEQ ID NO: 4891622 - DNA, 25 bp, Homo sapien
ctcgctttccgcttggctttttgcc

SEQ ID NO: 4891623 - DNA, 25 bp, Homo sapien
tagaatcttggggtgtgggtactgg

SEQ ID NO: 4891624 - DNA, 25 bp, Homo sapien
tggctggcctgtgcttttagaatct

SEQ ID NO: 4891625 - DNA, 25 bp, Homo sapien
gtactggggactggaacctgccctg

SEQ ID NO: 4891626 - DNA, 25 bp, Homo sapien
ctgccctgctgagtgtgttcgtcac

SEQ ID NO: 4891627 - DNA, 25 bp, Homo sapien
gcagaaccatgataattaccaaccg

SEQ ID NO: 4891628 - DNA, 25 bp, Homo sapien
tgtatttaataaccatgtcgactgt

SEQ ID NO: 4891629 - DNA, 25 bp, Homo sapien
catgtcgactgtcttaattacccta

SEQ ID NO: 4891630 - DNA, 25 bp, Homo sapien
attggcatttgaccctccacggcat

SEQ ID NO: 4891631 - DNA, 25 bp, Homo sapien
cttacatctggaagagcaataattc

SEQ ID NO: 4891632 - DNA, 25 bp, Homo sapien
ttcatgggatttcgcctgacagcca

SEQ ID NO: 4891633 - DNA, 25 bp, Homo sapien
ccagtaccacaaaccacaggcagtt

SEQ ID NO: 4891634 - DNA, 25 bp, Homo sapien
tcagaaaaggaggagtcggcacatg

SEQ ID NO: 4891635 - DNA, 25 bp, Homo sapien
ctgactgactcagtgagctttgggt

SEQ ID NO: 4891636 - DNA, 25 bp, Homo sapien
gctggctctgccaactgactgactc

SEQ ID NO: 4891637 - DNA, 25 bp, Homo sapien
tgactcagtgagctttgggtgagat

SEQ ID NO: 4891638 - DNA, 25 bp, Homo sapien
tggctctgccaactgactgactcag

SEQ ID NO: 4891639 - DNA, 25 bp, Homo sapien
tgtgttgctgatggttacaaacaaa

SEQ ID NO: 4891640 - DNA, 25 bp, Homo sapien
gctgatggttacaaacaaatgttcc

SEQ ID NO: 4891641 - DNA, 25 bp, Homo sapien
gttgctgatggttacaaacaaatgt

SEQ ID NO: 4891642 - DNA, 25 bp, Homo sapien
gtgtgttgctgatggttacaaacaa

SEQ ID NO: 4891643 - DNA, 25 bp, Homo sapien
ccctgagctgcaatttggtggatgg

SEQ ID NO: 4891644 - DNA, 25 bp, Homo sapien
catctccttaatgtaatgtaccagg

SEQ ID NO: 4891645 - DNA, 25 bp, Homo sapien
ggatggacattgtatcataagctta

SEQ ID NO: 4891646 - DNA, 25 bp, Homo sapien
taaatgaaagtgaggtgagcatctc

SEQ ID NO: 4891647 - DNA, 25 bp, Homo sapien
ccgttgacttgggacacttgtgccc

SEQ ID NO: 4891648 - DNA, 25 bp, Homo sapien
tagggcatagtacagccgtctgcag

SEQ ID NO: 4891649 - DNA, 25 bp, Homo sapien
ccaaattgtcgctgtgtagggcata

SEQ ID NO: 4891650 - DNA, 25 bp, Homo sapien
tgtgccctcgtgtgtgaccacaagg

SEQ ID NO: 4891651 - DNA, 25 bp, Homo sapien
gcaaaaatctttccctttatgactg

SEQ ID NO: 4891652 - DNA, 25 bp, Homo sapien
caaaaatctttccctttatgactga

SEQ ID NO: 4891653 - DNA, 25 bp, Homo sapien
gctttctgcattctttcatttttaa

SEQ ID NO: 4891654 - DNA, 25 bp, Homo sapien
atgctttctgcattctttcattttt

SEQ ID NO: 4891655 - DNA, 25 bp, Homo sapien
ttatgatgctttctgcattctttca

SEQ ID NO: 4891656 - DNA, 25 bp, Homo sapien
tgatgctttctgcattctttcattt

SEQ ID NO: 4891657 - DNA, 25 bp, Homo sapien
gaacattatgattacataaacttgt

SEQ ID NO: 4891658 - DNA, 25 bp, Homo sapien
atgcctctaagtatgtatcagtttg

SEQ ID NO: 4891659 - DNA, 25 bp, Homo sapien
cattatcatcaatttataggagatt

SEQ ID NO: 4891660 - DNA, 25 bp, Homo sapien
taggagattttaatgcctctaagta

SEQ ID NO: 4891661 - DNA, 25 bp, Homo sapien
ataaaaggtgtgttgcgtgtaatgt

SEQ ID NO: 4891662 - DNA, 25 bp, Homo sapien
gtgtgttgcgtgtaatgtgtgttct

SEQ ID NO: 4891663 - DNA, 25 bp, Homo sapien
aggtgtgttgcgtgtaatgtgtgtt

SEQ ID NO: 4891664 - DNA, 25 bp, Homo sapien
aaaaggtgtgttgcgtgtaatgtgt

SEQ ID NO: 4891665 - DNA, 25 bp, Homo sapien
cgctgaaattcgctgtggccgctgc

SEQ ID NO: 4891666 - DNA, 25 bp, Homo sapien
gcctatcaaatcaccggctggcgtg

SEQ ID NO: 4891667 - DNA, 25 bp, Homo sapien
gaggcaagaagtcaacaccatggca

SEQ ID NO: 4891668 - DNA, 25 bp, Homo sapien
cagacctccagtcattgggcagctc

SEQ ID NO: 4891669 - DNA, 25 bp, Homo sapien
taaatattagacacaagagcactct

SEQ ID NO: 4891670 - DNA, 25 bp, Homo sapien
gctccaagatatgatccaaatggga

SEQ ID NO: 4891671 - DNA, 25 bp, Homo sapien
gacaatatactaaactccggccacc

SEQ ID NO: 4891672 - DNA, 25 bp, Homo sapien
agagcactcttaaatcctacagcaa

SEQ ID NO: 4891673 - DNA, 25 bp, Homo sapien
tacaagatgtcagcgttaggaactc

SEQ ID NO: 4891674 - DNA, 25 bp, Homo sapien
agcactcggaccctgacattgagca

SEQ ID NO: 4891675 - DNA, 25 bp, Homo sapien
tgtgatgagggagccaaagatttct

SEQ ID NO: 4891676 - DNA, 25 bp, Homo sapien
tcagaggtcagagctcagacagtgc

SEQ ID NO: 4891677 - DNA, 25 bp, Homo sapien
gccgctccgagaactttccctagat

SEQ ID NO: 4891678 - DNA, 25 bp, Homo sapien
gagttaaagcatgtgccgaccgcgg

SEQ ID NO: 4891679 - DNA, 25 bp, Homo sapien
ctgattaagttgagtgcgcatgtct

SEQ ID NO: 4891680 - DNA, 25 bp, Homo sapien
tcacatccaagtaaaacgagagggt

SEQ ID NO: 4891681 - DNA, 25 bp, Homo sapien
tgggtgaaaataaaaacgctggagc

SEQ ID NO: 4891682 - DNA, 25 bp, Homo sapien
tttcagaggatgagtgcggaggacc

SEQ ID NO: 4891683 - DNA, 25 bp, Homo sapien
gaggatgagtgcggaggaccagtca

SEQ ID NO: 4891684 - DNA, 25 bp, Homo sapien
ctttcagaggatgagtgcggaggac

SEQ ID NO: 4891685 - DNA, 25 bp, Homo sapien
aggatgagtgcggaggaccagtcat

SEQ ID NO: 4891686 - DNA, 25 bp, Homo sapien
gccttaatctaagcaacacccgaaa

SEQ ID NO: 4891687 - DNA, 25 bp, Homo sapien
ttttgcattgctctcaatggaagcg

SEQ ID NO: 4891688 - DNA, 25 bp, Homo sapien
tgtcactgtcgcgtcccaatcgcag

SEQ ID NO: 4891689 - DNA, 25 bp, Homo sapien
ggaagcgatcgatgcccgtgtcact

SEQ ID NO: 4891690 - DNA, 25 bp, Homo sapien
ggcaattgctacatggggatctcat

SEQ ID NO: 4891691 - DNA, 25 bp, Homo sapien
gatctcatttcatccagcctgtcag

SEQ ID NO: 4891692 - DNA, 25 bp, Homo sapien
gcaattgctacatggggatctcatt

SEQ ID NO: 4891693 - DNA, 25 bp, Homo sapien
ctcatttcatccagcctgtcaggga

SEQ ID NO: 4891694 - DNA, 25 bp, Homo sapien
gataggaggggagtcacaggtttcc

SEQ ID NO: 4891695 - DNA, 25 bp, Homo sapien
ataggaggggagtcacaggtttcca

SEQ ID NO: 4891696 - DNA, 25 bp, Homo sapien
taggaggggagtcacaggtttccat

SEQ ID NO: 4891697 - DNA, 25 bp, Homo sapien
cacacaggagtttttggctgagcca

SEQ ID NO: 4891698 - DNA, 25 bp, Homo sapien
gaaaagcgctccataaaccgcggaa

SEQ ID NO: 4891699 - DNA, 25 bp, Homo sapien
tatatatgctgacccatcaggctgg

SEQ ID NO: 4891700 - DNA, 25 bp, Homo sapien
ttagggacatctttggacacacagg

SEQ ID NO: 4891701 - DNA, 25 bp, Homo sapien
tcatcagaaacagtcgccgaggagg

SEQ ID NO: 4891702 - DNA, 25 bp, Homo sapien
acagtcgccgaggaggacgaggtac

SEQ ID NO: 4891703 - DNA, 25 bp, Homo sapien
atcagaaacagtcgccgaggaggac

SEQ ID NO: 4891704 - DNA, 25 bp, Homo sapien
gaaacagtcgccgaggaggacgagg

SEQ ID NO: 4891705 - DNA, 25 bp, Homo sapien
gagttcctcgagtgcatcatagtca

SEQ ID NO: 4891706 - DNA, 25 bp, Homo sapien
tcatatgaccaccaagagacctcga

SEQ ID NO: 4891707 - DNA, 25 bp, Homo sapien
cacaacggaagggtttatagccaca

SEQ ID NO: 4891708 - DNA, 25 bp, Homo sapien
ccccgggctatttcacttggatgag

SEQ ID NO: 4891709 - DNA, 25 bp, Homo sapien
gcagagtggccaaacacctgctcac

SEQ ID NO: 4891710 - DNA, 25 bp, Homo sapien
ctggggcagagtggccaaacacctg

SEQ ID NO: 4891711 - DNA, 25 bp, Homo sapien
gggcagagtggccaaacacctgctc

SEQ ID NO: 4891712 - DNA, 25 bp, Homo sapien
tggggcagagtggccaaacacctgc

SEQ ID NO: 4891713 - DNA, 25 bp, Homo sapien
cacaaacttcacaccgccaggtggg

SEQ ID NO: 4891714 - DNA, 25 bp, Homo sapien
tcattccggtcaggcctatgttctg

SEQ ID NO: 4891715 - DNA, 25 bp, Homo sapien
ctgataaagctctgcttccgccggg

SEQ ID NO: 4891716 - DNA, 25 bp, Homo sapien
tatgaattcggaggttcctggcgac

SEQ ID NO: 4891717 - DNA, 25 bp, Homo sapien
gatttcaggcggcagctcattattt

SEQ ID NO: 4891718 - DNA, 25 bp, Homo sapien
cacccattagctgaccactggcaag

SEQ ID NO: 4891719 - DNA, 25 bp, Homo sapien
gagggacaggtcatcacccattagc

SEQ ID NO: 4891720 - DNA, 25 bp, Homo sapien
gctgaccactggcaagccggatttc

SEQ ID NO: 4891721 - DNA, 25 bp, Homo sapien
tcagcgctgggtcactgatataagg

SEQ ID NO: 4891722 - DNA, 25 bp, Homo sapien
cacttagggcctccaggctgtcaga

SEQ ID NO: 4891723 - DNA, 25 bp, Homo sapien
tacattttaggtgaacagggttgcc

SEQ ID NO: 4891724 - DNA, 25 bp, Homo sapien
cacactggaatagcttcagcgctgg

SEQ ID NO: 4891725 - DNA, 25 bp, Homo sapien
gctccaagctctgaaagagttaatt

SEQ ID NO: 4891726 - DNA, 25 bp, Homo sapien
cttttctactctgtgccaacggaaa

SEQ ID NO: 4891727 - DNA, 25 bp, Homo sapien
taagttggagacttgtgctccaagc

SEQ ID NO: 4891728 - DNA, 25 bp, Homo sapien
aacggaaatggatgtcactgcttac

SEQ ID NO: 4891729 - DNA, 25 bp, Homo sapien
taatcatatttagagcttgttacaa

SEQ ID NO: 4891730 - DNA, 25 bp, Homo sapien
tagacaacacttgcaaaatggattt

SEQ ID NO: 4891731 - DNA, 25 bp, Homo sapien
tcaatagacaacacttgcaaaatgg

SEQ ID NO: 4891732 - DNA, 25 bp, Homo sapien
tatttagagcttgttacaatgacta

SEQ ID NO: 4891733 - DNA, 25 bp, Homo sapien
catccaactctccatgaaaaggaac

SEQ ID NO: 4891734 - DNA, 25 bp, Homo sapien
ggaacttcaagggtaactgtggcac

SEQ ID NO: 4891735 - DNA, 25 bp, Homo sapien
ccaactctccatgaaaaggaacttc

SEQ ID NO: 4891736 - DNA, 25 bp, Homo sapien
ttcaagggtaactgtggcaccaagc

SEQ ID NO: 4891737 - DNA, 25 bp, Homo sapien
gctgcctaaatcctgccaaatatat

SEQ ID NO: 4891738 - DNA, 25 bp, Homo sapien
cattgatcagtttcaagtcaagcag

SEQ ID NO: 4891739 - DNA, 25 bp, Homo sapien
gcatacatctaatgttaaagctgcc

SEQ ID NO: 4891740 - DNA, 25 bp, Homo sapien
tgacaatgcaagaggtaaagtggcc

SEQ ID NO: 4891741 - DNA, 25 bp, Homo sapien
tgcattatggcatggcgtcccaaca

SEQ ID NO: 4891742 - DNA, 25 bp, Homo sapien
cattacctaaatgacctcagggtgg

SEQ ID NO: 4891743 - DNA, 25 bp, Homo sapien
caagaccctttcagcagtgtgaggc

SEQ ID NO: 4891744 - DNA, 25 bp, Homo sapien
gaacacctttgtctgcattacctaa

SEQ ID NO: 4891745 - DNA, 25 bp, Homo sapien
aatttccagcaacatttccagcaaa

SEQ ID NO: 4891746 - DNA, 25 bp, Homo sapien
tctaggagatgcattagtagcaaca

SEQ ID NO: 4891747 - DNA, 25 bp, Homo sapien
gagatgcattagtagcaacatcctc

SEQ ID NO: 4891748 - DNA, 25 bp, Homo sapien
gcattagtagcaacatcctcatgtt

SEQ ID NO: 4891749 - DNA, 25 bp, Homo sapien
gatgcattagtagcaacatcctcat

SEQ ID NO: 4891750 - DNA, 25 bp, Homo sapien
cagatttgtcaactggatatacagc

SEQ ID NO: 4891751 - DNA, 25 bp, Homo sapien
agatttgtcaactggatatacagcc

SEQ ID NO: 4891752 - DNA, 25 bp, Homo sapien
atttgtcaactggatatacagccat

SEQ ID NO: 4891753 - DNA, 25 bp, Homo sapien
gatttgtcaactggatatacagcca

SEQ ID NO: 4891754 - DNA, 25 bp, Homo sapien
ctgtcgtaggagaagactcacagag

SEQ ID NO: 4891755 - DNA, 25 bp, Homo sapien
cgtaggagaagactcacagagaaga

SEQ ID NO: 4891756 - DNA, 25 bp, Homo sapien
tgtcgtaggagaagactcacagaga

SEQ ID NO: 4891757 - DNA, 25 bp, Homo sapien
tcgtaggagaagactcacagagaag

SEQ ID NO: 4891758 - DNA, 25 bp, Homo sapien
aagagtatgcagcattggcagaccc

SEQ ID NO: 4891759 - DNA, 25 bp, Homo sapien
tattcctgcaggctctaaagtttct

SEQ ID NO: 4891760 - DNA, 25 bp, Homo sapien
gctctaaagtttctgtgctacttgc

SEQ ID NO: 4891761 - DNA, 25 bp, Homo sapien
gaagattttaggaataatgatacca

SEQ ID NO: 4891762 - DNA, 25 bp, Homo sapien
cctgcaggctctaaagtttctgtgc

SEQ ID NO: 4891763 - DNA, 25 bp, Homo sapien
ctgaaaggtttaaagtggttagctg

SEQ ID NO: 4891764 - DNA, 25 bp, Homo sapien
gaggacattcaatgatgacatctat

SEQ ID NO: 4891765 - DNA, 25 bp, Homo sapien
catttgtttcaaaggggcatgcatg

SEQ ID NO: 4891766 - DNA, 25 bp, Homo sapien
gtctctatcctctaataggtgatca

SEQ ID NO: 4891767 - DNA, 25 bp, Homo sapien
tgatcactctaatggaaagaattgc

SEQ ID NO: 4891768 - DNA, 25 bp, Homo sapien
tagaaccaaggttatcacagttgat

SEQ ID NO: 4891769 - DNA, 25 bp, Homo sapien
cttaaggagtgggtatatcaaaatc

SEQ ID NO: 4891770 - DNA, 25 bp, Homo sapien
tattccaaaggaaccatgaggtagt

SEQ ID NO: 4891771 - DNA, 25 bp, Homo sapien
accattccatttactcgtgataggc

SEQ ID NO: 4891772 - DNA, 25 bp, Homo sapien
tttactcgtgataggcaagaatgcc

SEQ ID NO: 4891773 - DNA, 25 bp, Homo sapien
tatattcatatcacttgtgaatgat

SEQ ID NO: 4891774 - DNA, 25 bp, Homo sapien
tataccttttattatccctccctgc

SEQ ID NO: 4891775 - DNA, 25 bp, Homo sapien
caattgttgccaagaccactgtgtc

SEQ ID NO: 4891776 - DNA, 25 bp, Homo sapien
gagagactggaggttacaatttgtc

SEQ ID NO: 4891777 - DNA, 25 bp, Homo sapien
cattcactgctaggctaacccacaa

SEQ ID NO: 4891778 - DNA, 25 bp, Homo sapien
cattagttaggctgagatacactct

SEQ ID NO: 4891779 - DNA, 25 bp, Homo sapien
gacttcatagaactttcataaactg

SEQ ID NO: 4891780 - DNA, 25 bp, Homo sapien
tcatgcaggtaattgaacattacac

SEQ ID NO: 4891781 - DNA, 25 bp, Homo sapien
tctgatgtcccgtaaaggattgcag

SEQ ID NO: 4891782 - DNA, 25 bp, Homo sapien
aaaaacatactttagagccatacta

SEQ ID NO: 4891783 - DNA, 25 bp, Homo sapien
tttctagtaatctcatagacaactg

SEQ ID NO: 4891784 - DNA, 25 bp, Homo sapien
cacactcatttcttcctgatgagca

SEQ ID NO: 4891785 - DNA, 25 bp, Homo sapien
gatgagcatatgatatcacttcaat

SEQ ID NO: 4891786 - DNA, 25 bp, Homo sapien
gggcaaagccaattaccacactcat

SEQ ID NO: 4891787 - DNA, 25 bp, Homo sapien
aagaaaaggcttgggctaaatagat

SEQ ID NO: 4891788 - DNA, 25 bp, Homo sapien
tctttgactgtcagggattagagcc

SEQ ID NO: 4891789 - DNA, 25 bp, Homo sapien
tattatctgatcttccgtaaaacac

SEQ ID NO: 4891790 - DNA, 25 bp, Homo sapien
gaacagcaaggctcctattatctga

SEQ ID NO: 4891791 - DNA, 25 bp, Homo sapien
tgttgcaccacctaaagctttcagg

SEQ ID NO: 4891792 - DNA, 25 bp, Homo sapien
ttcaccctgtgttgcaccacctaaa

SEQ ID NO: 4891793 - DNA, 25 bp, Homo sapien
gcaccacctaaagctttcaggccat

SEQ ID NO: 4891794 - DNA, 25 bp, Homo sapien
cctgtgttgcaccacctaaagcttt

SEQ ID NO: 4891795 - DNA, 25 bp, Homo sapien
aaaaaatctgtttcgcaagctctgc

SEQ ID NO: 4891796 - DNA, 25 bp, Homo sapien
cacagcatgtaacaggatcctctta

SEQ ID NO: 4891797 - DNA, 25 bp, Homo sapien
tgtttcgcaagctctgctgactctg

SEQ ID NO: 4891798 - DNA, 25 bp, Homo sapien
tgacccacaacaaatttttgctaaa

SEQ ID NO: 4891799 - DNA, 25 bp, Homo sapien
cacagtagtaatagcaggattcggg

SEQ ID NO: 4891800 - DNA, 25 bp, Homo sapien
ggtgtaatcacacacggcacagtag

SEQ ID NO: 4891801 - DNA, 25 bp, Homo sapien
agtctgctgatgcttcaccgaacgg

SEQ ID NO: 4891802 - DNA, 25 bp, Homo sapien
caccgaacggacatgttgtaccaga

SEQ ID NO: 4891803 - DNA, 25 bp, Homo sapien
agggaggctcagagacagccctctt

SEQ ID NO: 4891804 - DNA, 25 bp, Homo sapien
gaggctcagagacagccctcttcag

SEQ ID NO: 4891805 - DNA, 25 bp, Homo sapien
tgtgtgatgaagtggtgtggaggga

SEQ ID NO: 4891806 - DNA, 25 bp, Homo sapien
tgtgtgtgatgaagtggtgtggagg

SEQ ID NO: 4891807 - DNA, 25 bp, Homo sapien
ttacactgggggacaggctcgagtt

SEQ ID NO: 4891808 - DNA, 25 bp, Homo sapien
agattaagagctgccgtgttttaca

SEQ ID NO: 4891809 - DNA, 25 bp, Homo sapien
tttacactgggggacaggctcgagt

SEQ ID NO: 4891810 - DNA, 25 bp, Homo sapien
aagagctgccgtgttttacactggg

SEQ ID NO: 4891811 - DNA, 25 bp, Homo sapien
agaaagctttaatgggaacaacatg

SEQ ID NO: 4891812 - DNA, 25 bp, Homo sapien
aagaaagctttaatgggaacaacat

SEQ ID NO: 4891813 - DNA, 25 bp, Homo sapien
tcactgtgagatcctcccaaggtag

SEQ ID NO: 4891814 - DNA, 25 bp, Homo sapien
tagagtttcataacctcctgcatgc

SEQ ID NO: 4891815 - DNA, 25 bp, Homo sapien
caccgcatgcaggaccgcgtatggt

SEQ ID NO: 4891816 - DNA, 25 bp, Homo sapien
tcctgcatgcctgctaaagatgtca

SEQ ID NO: 4891817 - DNA, 25 bp, Homo sapien
tgctcagttgagaaaggcgaccttg

SEQ ID NO: 4891818 - DNA, 25 bp, Homo sapien
tattgtataatggaccctgactagg

SEQ ID NO: 4891819 - DNA, 25 bp, Homo sapien
ggaatgccattcaaaacgtgttagc

SEQ ID NO: 4891820 - DNA, 25 bp, Homo sapien
tacacttattagctgctggcagcaa

SEQ ID NO: 4891821 - DNA, 25 bp, Homo sapien
ctgattcactgatgctgatttgatt

SEQ ID NO: 4891822 - DNA, 25 bp, Homo sapien
tctgattcactgatgctgatttgat

SEQ ID NO: 4891823 - DNA, 25 bp, Homo sapien
tgattcactgatgctgatttgattt

SEQ ID NO: 4891824 - DNA, 25 bp, Homo sapien
ttctgattcactgatgctgatttga

SEQ ID NO: 4891825 - DNA, 25 bp, Homo sapien
taacatcaaggaactgctaaactgc

SEQ ID NO: 4891826 - DNA, 25 bp, Homo sapien
taatggagtacgctctcaagctctg

SEQ ID NO: 4891827 - DNA, 25 bp, Homo sapien
ttatggatgacttttcgctgctgca

SEQ ID NO: 4891828 - DNA, 25 bp, Homo sapien
gcagagaaaaatcgtggcacgcagc

SEQ ID NO: 4891829 - DNA, 25 bp, Homo sapien
ttctgctgctgatgagcctgttggg

SEQ ID NO: 4891830 - DNA, 25 bp, Homo sapien
ctccagaagatttggcaagaagatg

SEQ ID NO: 4891831 - DNA, 25 bp, Homo sapien
tctgctgctgatgagcctgttgggc

SEQ ID NO: 4891832 - DNA, 25 bp, Homo sapien
gaggaaattacaagcgctccagaag

SEQ ID NO: 4891833 - DNA, 25 bp, Homo sapien
aaaagttctgtctcaaaacgtctgc

SEQ ID NO: 4891834 - DNA, 25 bp, Homo sapien
aaacgtctgctcattctctatagcg

SEQ ID NO: 4891835 - DNA, 25 bp, Homo sapien
tcccagatgagaactgatagctagt

SEQ ID NO: 4891836 - DNA, 25 bp, Homo sapien
tagtgaacccgttcagattcagagt

SEQ ID NO: 4891837 - DNA, 25 bp, Homo sapien
tctggagtatcactacctaatcact

SEQ ID NO: 4891838 - DNA, 25 bp, Homo sapien
tattagctaccttatctgggttctc

SEQ ID NO: 4891839 - DNA, 25 bp, Homo sapien
aaacctgcccgtatttcaagactct

SEQ ID NO: 4891840 - DNA, 25 bp, Homo sapien
taccatgcatctcagccaaactgtg

SEQ ID NO: 4891841 - DNA, 25 bp, Homo sapien
attgagcttgaattcccagcagcat

SEQ ID NO: 4891842 - DNA, 25 bp, Homo sapien
gttacatcacttttacactgaccac

SEQ ID NO: 4891843 - DNA, 25 bp, Homo sapien
tattgagcttgaattcccagcagca

SEQ ID NO: 4891844 - DNA, 25 bp, Homo sapien
catgtgactggacagcgtgatgaaa

SEQ ID NO: 4891845 - DNA, 25 bp, Homo sapien
tgacagaaggagaggcaccactgag

SEQ ID NO: 4891846 - DNA, 25 bp, Homo sapien
cttcaaaatagacgcaaagcatgtg

SEQ ID NO: 4891847 - DNA, 25 bp, Homo sapien
tctgctacattctctaaaggcgagg

SEQ ID NO: 4891848 - DNA, 25 bp, Homo sapien
caggtgagaaaatataatgtttggc

SEQ ID NO: 4891849 - DNA, 25 bp, Homo sapien
aatataatgtttggctgactccatt

SEQ ID NO: 4891850 - DNA, 25 bp, Homo sapien
taggcaaccctgcaggtgagaaaat

SEQ ID NO: 4891851 - DNA, 25 bp, Homo sapien
ctaggcaaccctgcaggtgagaaaa

SEQ ID NO: 4891852 - DNA, 25 bp, Homo sapien
atttgcagaggactgtcaggatgtg

SEQ ID NO: 4891853 - DNA, 25 bp, Homo sapien
aggactgtcaggatgtgccaacatc

SEQ ID NO: 4891854 - DNA, 25 bp, Homo sapien
catttgcagaggactgtcaggatgt

SEQ ID NO: 4891855 - DNA, 25 bp, Homo sapien
cagaggactgtcaggatgtgccaac

SEQ ID NO: 4891856 - DNA, 25 bp, Homo sapien
caaacagggcgtttatttccatctt

SEQ ID NO: 4891857 - DNA, 25 bp, Homo sapien
atcaaacagggcgtttatttccatc

SEQ ID NO: 4891858 - DNA, 25 bp, Homo sapien
tctcttatcaaacagggcgtttatt

SEQ ID NO: 4891859 - DNA, 25 bp, Homo sapien
tcttatcaaacagggcgtttatttc

SEQ ID NO: 4891860 - DNA, 25 bp, Homo sapien
ttcgctcctgaggtaataaatcctg

SEQ ID NO: 4891861 - DNA, 25 bp, Homo sapien
tgcagcacttgacccataggaatgg

SEQ ID NO: 4891862 - DNA, 25 bp, Homo sapien
caaaagctaactctgaggaaatgcc

SEQ ID NO: 4891863 - DNA, 25 bp, Homo sapien
ttctaccatggctgccacgggcaga

SEQ ID NO: 4891864 - DNA, 25 bp, Homo sapien
ttattaagcgtgaagtctgctgatc

SEQ ID NO: 4891865 - DNA, 25 bp, Homo sapien
agaaacacagctgttgctcgcaaac

SEQ ID NO: 4891866 - DNA, 25 bp, Homo sapien
gctcgcaaactgcaaattttagaat

SEQ ID NO: 4891867 - DNA, 25 bp, Homo sapien
aacagtgcacttaagttttataatc

SEQ ID NO: 4891868 - DNA, 25 bp, Homo sapien
agaaggctcgagaggccgaactgtg

SEQ ID NO: 4891869 - DNA, 25 bp, Homo sapien
ttagaaggctcgagaggccgaactg

SEQ ID NO: 4891870 - DNA, 25 bp, Homo sapien
aaggctcgagaggccgaactgtggc

SEQ ID NO: 4891871 - DNA, 25 bp, Homo sapien
tagaaggctcgagaggccgaactgt

SEQ ID NO: 4891872 - DNA, 25 bp, Homo sapien
taaaaaccacttgcttgcagaagct

SEQ ID NO: 4891873 - DNA, 25 bp, Homo sapien
ggttgcacaggaattgtctcaagaa

SEQ ID NO: 4891874 - DNA, 25 bp, Homo sapien
tctggataatcttgaaggctgcctt

SEQ ID NO: 4891875 - DNA, 25 bp, Homo sapien
ttaaagcaagccaaacacgattgta

SEQ ID NO: 4891876 - DNA, 25 bp, Homo sapien
ggcttcctgtctgtgacctctgaaa

SEQ ID NO: 4891877 - DNA, 25 bp, Homo sapien
taccagcagttatctgaggagcctg

SEQ ID NO: 4891878 - DNA, 25 bp, Homo sapien
tttcatccatacagaagccgaaggg

SEQ ID NO: 4891879 - DNA, 25 bp, Homo sapien
ctgaaaagcattggaggccagggtt

SEQ ID NO: 4891880 - DNA, 25 bp, Homo sapien
tggggtttcagggatggcattaaac

SEQ ID NO: 4891881 - DNA, 25 bp, Homo sapien
tgaatacatggtaagattagtggag

SEQ ID NO: 4891882 - DNA, 25 bp, Homo sapien
ggtttcagggatggcattaaacaca

SEQ ID NO: 4891883 - DNA, 25 bp, Homo sapien
atacatggtaagattagtggagtgg

SEQ ID NO: 4891884 - DNA, 25 bp, Homo sapien
gtcctggctcccaatgaggcagttt

SEQ ID NO: 4891885 - DNA, 25 bp, Homo sapien
acaagtcctggctcccaatgaggca

SEQ ID NO: 4891886 - DNA, 25 bp, Homo sapien
caagtcctggctcccaatgaggcag

SEQ ID NO: 4891887 - DNA, 25 bp, Homo sapien
agtcctggctcccaatgaggcagtt

SEQ ID NO: 4891888 - DNA, 25 bp, Homo sapien
caaaagcaactcatttaggacaagg

SEQ ID NO: 4891889 - DNA, 25 bp, Homo sapien
gaatgtttattccatcaattatgag

SEQ ID NO: 4891890 - DNA, 25 bp, Homo sapien
caattatgagagtaacaaaagcaac

SEQ ID NO: 4891891 - DNA, 25 bp, Homo sapien
agatctaattagagaagttccagag

SEQ ID NO: 4891892 - DNA, 25 bp, Homo sapien
tggcatttatcaaagggagttgaaa

SEQ ID NO: 4891893 - DNA, 25 bp, Homo sapien
tgctcttatcatacaatctagtaat

SEQ ID NO: 4891894 - DNA, 25 bp, Homo sapien
aaaagcctggacaccgatgctcata

SEQ ID NO: 4891895 - DNA, 25 bp, Homo sapien
tcatagtagttttattcgtaattgc

SEQ ID NO: 4891896 - DNA, 25 bp, Homo sapien
tacttcacttcctttgctcgaccga

SEQ ID NO: 4891897 - DNA, 25 bp, Homo sapien
gtgactcccatgctaagttcagtgg

SEQ ID NO: 4891898 - DNA, 25 bp, Homo sapien
tggattttattgcaccaggtaattg

SEQ ID NO: 4891899 - DNA, 25 bp, Homo sapien
gagtgtctccagtattagtactaag

SEQ ID NO: 4891900 - DNA, 25 bp, Homo sapien
tatatcaaggtccatttgaacatcc

SEQ ID NO: 4891901 - DNA, 25 bp, Homo sapien
ggtccatttgaacatcccaattttc

SEQ ID NO: 4891902 - DNA, 25 bp, Homo sapien
caaggtccatttgaacatcccaatt

SEQ ID NO: 4891903 - DNA, 25 bp, Homo sapien
catgtatatcaaggtccatttgaac

SEQ ID NO: 4891904 - DNA, 25 bp, Homo sapien
gagtttttgccttcactattgtctc

SEQ ID NO: 4891905 - DNA, 25 bp, Homo sapien
cctcggccactgctgtaggcttaat

SEQ ID NO: 4891906 - DNA, 25 bp, Homo sapien
tgtaggcttaatagctccttctgcc

SEQ ID NO: 4891907 - DNA, 25 bp, Homo sapien
ttgtgtctttttcatcgtcctcggc

SEQ ID NO: 4891908 - DNA, 25 bp, Homo sapien
ttccaatctcatcatagcatggcat

SEQ ID NO: 4891909 - DNA, 25 bp, Homo sapien
gccattccaatctcatcatagcatg

SEQ ID NO: 4891910 - DNA, 25 bp, Homo sapien
cattccaatctcatcatagcatggc

SEQ ID NO: 4891911 - DNA, 25 bp, Homo sapien
cagccattccaatctcatcatagca

SEQ ID NO: 4891912 - DNA, 25 bp, Homo sapien
tgtaggttttgacctttttgttgca

SEQ ID NO: 4891913 - DNA, 25 bp, Homo sapien
gttttgacctttttgttgcaacatc

SEQ ID NO: 4891914 - DNA, 25 bp, Homo sapien
ctgttcatgacagaatttattgtcc

SEQ ID NO: 4891915 - DNA, 25 bp, Homo sapien
ttcatgacagaatttattgtcctct

SEQ ID NO: 4891916 - DNA, 25 bp, Homo sapien
gataggacgtgcatctggatacgac

SEQ ID NO: 4891917 - DNA, 25 bp, Homo sapien
ggtccctactattgtagttacaata

SEQ ID NO: 4891918 - DNA, 25 bp, Homo sapien
gctgcaccgagtgctgtgataggac

SEQ ID NO: 4891919 - DNA, 25 bp, Homo sapien
gatacgactttggtccctactattg

SEQ ID NO: 4891920 - DNA, 25 bp, Homo sapien
gcaaatgcgtcagatgcagttggag

SEQ ID NO: 4891921 - DNA, 25 bp, Homo sapien
tgtgcaaatgcgtcagatgcagttg

SEQ ID NO: 4891922 - DNA, 25 bp, Homo sapien
gagacacactgtgcaaatgcgtcag

SEQ ID NO: 4891923 - DNA, 25 bp, Homo sapien
cacactgtgcaaatgcgtcagatgc

SEQ ID NO: 4891924 - DNA, 25 bp, Homo sapien
ttatgtcacacatgcatcaatattt

SEQ ID NO: 4891925 - DNA, 25 bp, Homo sapien
gcaggtgtgtcccgctctgatttct

SEQ ID NO: 4891926 - DNA, 25 bp, Homo sapien
tgcaggtgtgtcccgctctgatttc

SEQ ID NO: 4891927 - DNA, 25 bp, Homo sapien
cagctgctggcagtagcatactgtt

SEQ ID NO: 4891928 - DNA, 25 bp, Homo sapien
gcagctgctggcagtagcatactgt

SEQ ID NO: 4891929 - DNA, 25 bp, Homo sapien
tcacaagtcttgatgataagatggc

SEQ ID NO: 4891930 - DNA, 25 bp, Homo sapien
taaggtccgctttggttcagagccc

SEQ ID NO: 4891931 - DNA, 25 bp, Homo sapien
tggaatctaacatcccctggccagg

SEQ ID NO: 4891932 - DNA, 25 bp, Homo sapien
tagcctttgaatcctcgagacctgc

SEQ ID NO: 4891933 - DNA, 25 bp, Homo sapien
gaatgtacggaaactgcgctggcag

SEQ ID NO: 4891934 - DNA, 25 bp, Homo sapien
tgtggcttggtattgttgtgcttgt

SEQ ID NO: 4891935 - DNA, 25 bp, Homo sapien
gtggcttggtattgttgtgcttgtt

SEQ ID NO: 4891936 - DNA, 25 bp, Homo sapien
taagatggcacatccttcatgattt

SEQ ID NO: 4891937 - DNA, 25 bp, Homo sapien
cttataagatggcacatccttcatg

SEQ ID NO: 4891938 - DNA, 25 bp, Homo sapien
atccttcatgatttggcagtctgca

SEQ ID NO: 4891939 - DNA, 25 bp, Homo sapien
ttcatgatttggcagtctgcactca

SEQ ID NO: 4891940 - DNA, 25 bp, Homo sapien
ttcacttataaattcctgctttggt

SEQ ID NO: 4891941 - DNA, 25 bp, Homo sapien
tcacttataaattcctgctttggtt

SEQ ID NO: 4891942 - DNA, 25 bp, Homo sapien
cttcacttataaattcctgctttgg

SEQ ID NO: 4891943 - DNA, 25 bp, Homo sapien
atggatggttccaaggatttttgct

SEQ ID NO: 4891944 - DNA, 25 bp, Homo sapien
gatggatggttccaaggatttttgc

SEQ ID NO: 4891945 - DNA, 25 bp, Homo sapien
tggatggttccaaggatttttgctt

SEQ ID NO: 4891946 - DNA, 25 bp, Homo sapien
ggatggttccaaggatttttgcttc

SEQ ID NO: 4891947 - DNA, 25 bp, Homo sapien
aagttttccaataacgctttggcag

SEQ ID NO: 4891948 - DNA, 25 bp, Homo sapien
ccaataacgctttggcagcatttcc

SEQ ID NO: 4891949 - DNA, 25 bp, Homo sapien
cttctgcctgttttcgttatactga

SEQ ID NO: 4891950 - DNA, 25 bp, Homo sapien
tatactgaatgaccagttcaaaacc

SEQ ID NO: 4891951 - DNA, 25 bp, Homo sapien
cacatgttccacattctagtttgtc

SEQ ID NO: 4891952 - DNA, 25 bp, Homo sapien
catgttccacattctagtttgtcag

SEQ ID NO: 4891953 - DNA, 25 bp, Homo sapien
ttcaccacttttgcccttcttctgt

SEQ ID NO: 4891954 - DNA, 25 bp, Homo sapien
tttgtcagtgttttcgccttcacca

SEQ ID NO: 4891955 - DNA, 25 bp, Homo sapien
gactctttaaaataagaacattgga

SEQ ID NO: 4891956 - DNA, 25 bp, Homo sapien
tgactctttaaaataagaacattgg

SEQ ID NO: 4891957 - DNA, 25 bp, Homo sapien
tggtgactctttaaaataagaacat

SEQ ID NO: 4891958 - DNA, 25 bp, Homo sapien
ttggtgactctttaaaataagaaca

SEQ ID NO: 4891959 - DNA, 25 bp, Homo sapien
ggagaaattggataaagcttgtcat

SEQ ID NO: 4891960 - DNA, 25 bp, Homo sapien
taggcctccctgtattgacgagcaa

SEQ ID NO: 4891961 - DNA, 25 bp, Homo sapien
caaatttttctagcgctgcatatgg

SEQ ID NO: 4891962 - DNA, 25 bp, Homo sapien
tacaggacccatagaagaaggctgt

SEQ ID NO: 4891963 - DNA, 25 bp, Homo sapien
aggtccagagaaaccggcagttgga

SEQ ID NO: 4891964 - DNA, 25 bp, Homo sapien
aagcgcagggtgttgcacaggttgc

SEQ ID NO: 4891965 - DNA, 25 bp, Homo sapien
cacaggttgcatcataatggaagga

SEQ ID NO: 4891966 - DNA, 25 bp, Homo sapien
atggaaggaaagagcggcaggtcca

SEQ ID NO: 4891967 - DNA, 25 bp, Homo sapien
cagagagtgcgtccatctgtggcag

SEQ ID NO: 4891968 - DNA, 25 bp, Homo sapien
tgcagagagtgcgtccatctgtggc

SEQ ID NO: 4891969 - DNA, 25 bp, Homo sapien
gcagagagtgcgtccatctgtggca

SEQ ID NO: 4891970 - DNA, 25 bp, Homo sapien
gaaccctaagctggtagtcagtaaa

SEQ ID NO: 4891971 - DNA, 25 bp, Homo sapien
cccgggtaggcagattgagaacagt

SEQ ID NO: 4891972 - DNA, 25 bp, Homo sapien
tctggaaccatacaacaataacccg

SEQ ID NO: 4891973 - DNA, 25 bp, Homo sapien
tctgtaattcttgtccgtgggcgtt

SEQ ID NO: 4891974 - DNA, 25 bp, Homo sapien
gcagcagcgtttttagctgcatccg

SEQ ID NO: 4891975 - DNA, 25 bp, Homo sapien
gagaagtcttctcaggttctggttt

SEQ ID NO: 4891976 - DNA, 25 bp, Homo sapien
gctttggcttttctgcgggatattc

SEQ ID NO: 4891977 - DNA, 25 bp, Homo sapien
gctgcatccgtttggccagacactg

SEQ ID NO: 4891978 - DNA, 25 bp, Homo sapien
ccgaggaagtcgatgctaatggcag

SEQ ID NO: 4891979 - DNA, 25 bp, Homo sapien
cagtggactggaagggaccggtgtt

SEQ ID NO: 4891980 - DNA, 25 bp, Homo sapien
ctggagagacgtcatggaaatttgc

SEQ ID NO: 4891981 - DNA, 25 bp, Homo sapien
ccgagggaggtcttccgataagttg

SEQ ID NO: 4891982 - DNA, 25 bp, Homo sapien
tgtagtaactgtggaggtagactgt

SEQ ID NO: 4891983 - DNA, 25 bp, Homo sapien
actgatcacattggtattgtagtaa

SEQ ID NO: 4891984 - DNA, 25 bp, Homo sapien
tattgtagtaactgtggaggtagac

SEQ ID NO: 4891985 - DNA, 25 bp, Homo sapien
cattggtattgtagtaactgtggag

SEQ ID NO: 4891986 - DNA, 25 bp, Homo sapien
gacccggccgatcattacttttgga

SEQ ID NO: 4891987 - DNA, 25 bp, Homo sapien
tgtaaaagctttggtcgtggtcgcc

SEQ ID NO: 4891988 - DNA, 25 bp, Homo sapien
tttagggaagcagcaaccgttgtgg

SEQ ID NO: 4891989 - DNA, 25 bp, Homo sapien
aatttgtcatcgcagacctccgtgg

SEQ ID NO: 4891990 - DNA, 25 bp, Homo sapien
tactaggactgaacaaggttagcca

SEQ ID NO: 4891991 - DNA, 25 bp, Homo sapien
gacagctcaggatagaaaagggact

SEQ ID NO: 4891992 - DNA, 25 bp, Homo sapien
cagaagtctaatggctggctgacag

SEQ ID NO: 4891993 - DNA, 25 bp, Homo sapien
caagggaaggctcactaccaaatga

SEQ ID NO: 4891994 - DNA, 25 bp, Homo sapien
tggagtctgcagcaaaggtttggtg

SEQ ID NO: 4891995 - DNA, 25 bp, Homo sapien
gacagggcaggagacgaagtagctg

SEQ ID NO: 4891996 - DNA, 25 bp, Homo sapien
gtagctgaagtaggaaacccaagca

SEQ ID NO: 4891997 - DNA, 25 bp, Homo sapien
gtaggaaacccaagcatgcctgcac

SEQ ID NO: 4891998 - DNA, 25 bp, Homo sapien
caaacccagggataaagtatggcaa

SEQ ID NO: 4891999 - DNA, 25 bp, Homo sapien
gaactgtccgcctataaaggaagct

SEQ ID NO: 4892000 - DNA, 25 bp, Homo sapien
tgcaactgaataggatcgacatgtg

SEQ ID NO: 4892001 - DNA, 25 bp, Homo sapien
cattgtagggccataaggaaagagg

SEQ ID NO: 4892002 - DNA, 25 bp, Homo sapien
ttgctgcttttgcagggactcctgc

SEQ ID NO: 4892003 - DNA, 25 bp, Homo sapien
tgctgcttttgcagggactcctgca

SEQ ID NO: 4892004 - DNA, 25 bp, Homo sapien
cctggcagacgcttggaaaaggata

SEQ ID NO: 4892005 - DNA, 25 bp, Homo sapien
catcgttggagttttgcggctggtc

SEQ ID NO: 4892006 - DNA, 25 bp, Homo sapien
cgaagcactgtctcttgtgggtcaa

SEQ ID NO: 4892007 - DNA, 25 bp, Homo sapien
tttgctgactgggacacgaagcact

SEQ ID NO: 4892008 - DNA, 25 bp, Homo sapien
tctacaagaaaagggtgacactggt

SEQ ID NO: 4892009 - DNA, 25 bp, Homo sapien
gacattagctcactatagcggcagg

SEQ ID NO: 4892010 - DNA, 25 bp, Homo sapien
cacatcgtgttaactgccaggacag

SEQ ID NO: 4892011 - DNA, 25 bp, Homo sapien
tgaattcagtcctacgtgcgcaggg

SEQ ID NO: 4892012 - DNA, 25 bp, Homo sapien
taaaggagtatacaagacaaaatct

SEQ ID NO: 4892013 - DNA, 25 bp, Homo sapien
cacctccacactcgggttcttgtta

SEQ ID NO: 4892014 - DNA, 25 bp, Homo sapien
agccaaacgatcctactgactctac

SEQ ID NO: 4892015 - DNA, 25 bp, Homo sapien
gcagctttgaactccagcagccaaa

SEQ ID NO: 4892016 - DNA, 25 bp, Homo sapien
aggagagttatcagactctgacacc

SEQ ID NO: 4892017 - DNA, 25 bp, Homo sapien
caggagagttatcagactctgacac

SEQ ID NO: 4892018 - DNA, 25 bp, Homo sapien
acaggagagttatcagactctgaca

SEQ ID NO: 4892019 - DNA, 25 bp, Homo sapien
tgtcccgagagctaaaactgccagt

SEQ ID NO: 4892020 - DNA, 25 bp, Homo sapien
ctgccagtaatggtcttactttttg

SEQ ID NO: 4892021 - DNA, 25 bp, Homo sapien
tgtcttgaagacaccacatctgaag

SEQ ID NO: 4892022 - DNA, 25 bp, Homo sapien
catctgaagcctaatggcagcacta

SEQ ID NO: 4892023 - DNA, 25 bp, Homo sapien
gaagagaccatgcataggtgaattc

SEQ ID NO: 4892024 - DNA, 25 bp, Homo sapien
gcataggtgaattcataggcctcat

SEQ ID NO: 4892025 - DNA, 25 bp, Homo sapien
ccatgcataggtgaattcataggcc

SEQ ID NO: 4892026 - DNA, 25 bp, Homo sapien
tgaaagaagagaccatgcataggtg

SEQ ID NO: 4892027 - DNA, 25 bp, Homo sapien
gaagatggtgatatctcaaatgcca

SEQ ID NO: 4892028 - DNA, 25 bp, Homo sapien
gctgactgtataactcaaaccagga

SEQ ID NO: 4892029 - DNA, 25 bp, Homo sapien
caggaaagataagttgcggaagatg

SEQ ID NO: 4892030 - DNA, 25 bp, Homo sapien
ggattttctacacctcagctgactg

SEQ ID NO: 4892031 - DNA, 25 bp, Homo sapien
cgtgggaagggctttaactggacat

SEQ ID NO: 4892032 - DNA, 25 bp, Homo sapien
aactattatccaagatccccatggg

SEQ ID NO: 4892033 - DNA, 25 bp, Homo sapien
cacgtggcagcccaaatgaagagaa

SEQ ID NO: 4892034 - DNA, 25 bp, Homo sapien
tttcaaacagtctttcatgaagaag

SEQ ID NO: 4892035 - DNA, 25 bp, Homo sapien
gaatggagacttcgttactggaatg

SEQ ID NO: 4892036 - DNA, 25 bp, Homo sapien
tctggcacactttaggaaatggatg

SEQ ID NO: 4892037 - DNA, 25 bp, Homo sapien
gcagataaaagaggcttctggcaca

SEQ ID NO: 4892038 - DNA, 25 bp, Homo sapien
catttttatctcagcaagatggaca

SEQ ID NO: 4892039 - DNA, 25 bp, Homo sapien
ccttcataagcgttcaaatgccttc

SEQ ID NO: 4892040 - DNA, 25 bp, Homo sapien
gaaaggtgtgagtgctttcttctgc

SEQ ID NO: 4892041 - DNA, 25 bp, Homo sapien
cttgagtgattgtgggctgaaaacc

SEQ ID NO: 4892042 - DNA, 25 bp, Homo sapien
tttacttgcttgagtgattgtgggc

SEQ ID NO: 4892043 - DNA, 25 bp, Homo sapien
gaaaacaccacaaaccgcaatagct

SEQ ID NO: 4892044 - DNA, 25 bp, Homo sapien
cagggaaaacaccacaaaccgcaat

SEQ ID NO: 4892045 - DNA, 25 bp, Homo sapien
agctcagggaaaacaccacaaaccg

SEQ ID NO: 4892046 - DNA, 25 bp, Homo sapien
tccaaagacaccctctcttccagta

SEQ ID NO: 4892047 - DNA, 25 bp, Homo sapien
ggccacagatatgaattgaaaggta

SEQ ID NO: 4892048 - DNA, 25 bp, Homo sapien
caggaggccacagatatgaattgaa

SEQ ID NO: 4892049 - DNA, 25 bp, Homo sapien
cacagatatgaattgaaaggtaggg

SEQ ID NO: 4892050 - DNA, 25 bp, Homo sapien
agatatgaattgaaaggtagggaac

SEQ ID NO: 4892051 - DNA, 25 bp, Homo sapien
tttaagaagttcagtcctcagctgt

SEQ ID NO: 4892052 - DNA, 25 bp, Homo sapien
tgcttggccgcctcagttgtaatgt

SEQ ID NO: 4892053 - DNA, 25 bp, Homo sapien
aattacttaaggcagcttggaagtg

SEQ ID NO: 4892054 - DNA, 25 bp, Homo sapien
gggcaactagtatgaacagcactat

SEQ ID NO: 4892055 - DNA, 25 bp, Homo sapien
gtcaggtgactactaacaatgctcc

SEQ ID NO: 4892056 - DNA, 25 bp, Homo sapien
taatgtcaagaataatggacagctt

SEQ ID NO: 4892057 - DNA, 25 bp, Homo sapien
gagactctgggatgagtgtgcattt

SEQ ID NO: 4892058 - DNA, 25 bp, Homo sapien
aaccttaagacctgatgcctcagtt

SEQ ID NO: 4892059 - DNA, 25 bp, Homo sapien
tgacgtgtactttacttgtcctaag

SEQ ID NO: 4892060 - DNA, 25 bp, Homo sapien
gcagccactgaaatcaggaatcgag

SEQ ID NO: 4892061 - DNA, 25 bp, Homo sapien
cagaagtacacagtctgcagccact

SEQ ID NO: 4892062 - DNA, 25 bp, Homo sapien
tataaggaatgtgctcctagccact

SEQ ID NO: 4892063 - DNA, 25 bp, Homo sapien
tgacaatacattagccaccagtggc

SEQ ID NO: 4892064 - DNA, 25 bp, Homo sapien
caactttgacagaacgtctcctagg

SEQ ID NO: 4892065 - DNA, 25 bp, Homo sapien
aatgtccagaagttgaaagccaagc

SEQ ID NO: 4892066 - DNA, 25 bp, Homo sapien
tgcgctctatgtggagagtggccca

SEQ ID NO: 4892067 - DNA, 25 bp, Homo sapien
ggtttcagtctttcgaaatgagatt

SEQ ID NO: 4892068 - DNA, 25 bp, Homo sapien
gtttcagtctttcgaaatgagattt

SEQ ID NO: 4892069 - DNA, 25 bp, Homo sapien
tcgaaatgagatttgccaaaattag

SEQ ID NO: 4892070 - DNA, 25 bp, Homo sapien
aaggtttcagtctttcgaaatgaga

SEQ ID NO: 4892071 - DNA, 25 bp, Homo sapien
tataacaaatcttgttgtactgctg

SEQ ID NO: 4892072 - DNA, 25 bp, Homo sapien
gaagattccataattgggttaattg

SEQ ID NO: 4892073 - DNA, 25 bp, Homo sapien
gctgcccttttctaaagagagtatt

SEQ ID NO: 4892074 - DNA, 25 bp, Homo sapien
cccttttctaaagagagtattctag

SEQ ID NO: 4892075 - DNA, 25 bp, Homo sapien
tgtgatataaagtcgtttatggcat

SEQ ID NO: 4892076 - DNA, 25 bp, Homo sapien
gatataaagtcgtttatggcattta

SEQ ID NO: 4892077 - DNA, 25 bp, Homo sapien
ttatgtgatataaagtcgtttatgg

SEQ ID NO: 4892078 - DNA, 25 bp, Homo sapien
taaagtcgtttatggcatttatgct

SEQ ID NO: 4892079 - DNA, 25 bp, Homo sapien
tagtatagtcttcctcttgatttcc

SEQ ID NO: 4892080 - DNA, 25 bp, Homo sapien
ttgggcatgggtgttggcaatcctt

SEQ ID NO: 4892081 - DNA, 25 bp, Homo sapien
gagtactagtttaccaaaagcactg

SEQ ID NO: 4892082 - DNA, 25 bp, Homo sapien
tggcaatccttgtaacagaagtaag

SEQ ID NO: 4892083 - DNA, 25 bp, Homo sapien
tactgagagtcttggaacaggtcaa

SEQ ID NO: 4892084 - DNA, 25 bp, Homo sapien
gagaatcacgtttctgctgacaaag

SEQ ID NO: 4892085 - DNA, 25 bp, Homo sapien
taattacgttaatattgacaggccc

SEQ ID NO: 4892086 - DNA, 25 bp, Homo sapien
gacaggcccttgacaatacccacat

SEQ ID NO: 4892087 - DNA, 25 bp, Homo sapien
aacgttaaaggtattagcaggcttg

SEQ ID NO: 4892088 - DNA, 25 bp, Homo sapien
cgttaaaggtattagcaggcttgct

SEQ ID NO: 4892089 - DNA, 25 bp, Homo sapien
ttaaaggtattagcaggcttgctca

SEQ ID NO: 4892090 - DNA, 25 bp, Homo sapien
ctgaacgttaaaggtattagcaggc

SEQ ID NO: 4892091 - DNA, 25 bp, Homo sapien
ccggagtgcaaacccgaggtcttgt

SEQ ID NO: 4892092 - DNA, 25 bp, Homo sapien
gactcctaaggtcagtgtctgccct

SEQ ID NO: 4892093 - DNA, 25 bp, Homo sapien
gtctgccctagagagccggagtgca

SEQ ID NO: 4892094 - DNA, 25 bp, Homo sapien
gcgtgggcgtttcgcagactcctaa

SEQ ID NO: 4892095 - DNA, 25 bp, Homo sapien
aagcctgcgagttccggaagccttg

SEQ ID NO: 4892096 - DNA, 25 bp, Homo sapien
gcgtcgctccggaagcctgcgagtt

SEQ ID NO: 4892097 - DNA, 25 bp, Homo sapien
acttccggctcctgcgtcgctccgg

SEQ ID NO: 4892098 - DNA, 25 bp, Homo sapien
ggaagccttggtaatccagattcgg

SEQ ID NO: 4892099 - DNA, 25 bp, Homo sapien
aaagcgcagttctcgttggtgtaac

SEQ ID NO: 4892100 - DNA, 25 bp, Homo sapien
gcgttcgcggttgtttggccatcca

SEQ ID NO: 4892101 - DNA, 25 bp, Homo sapien
gctcttcggcttgtcggcgttcgcg

SEQ ID NO: 4892102 - DNA, 25 bp, Homo sapien
ggttcgtgactctcctgccaatcag

SEQ ID NO: 4892103 - DNA, 25 bp, Homo sapien
ttgcggcccctgacccggggctgac

SEQ ID NO: 4892104 - DNA, 25 bp, Homo sapien
ggagcgctttgcagggcggatgact

SEQ ID NO: 4892105 - DNA, 25 bp, Homo sapien
gcggatgactgacgggccagctacc

SEQ ID NO: 4892106 - DNA, 25 bp, Homo sapien
gagcctgcagagataaacagcctat

SEQ ID NO: 4892107 - DNA, 25 bp, Homo sapien
tctacggggtctctcgggagcgctt

SEQ ID NO: 4892108 - DNA, 25 bp, Homo sapien
gaaaggaacacaatcctgtggacac

SEQ ID NO: 4892109 - DNA, 25 bp, Homo sapien
aggaacacaatcctgtggacacctt

SEQ ID NO: 4892110 - DNA, 25 bp, Homo sapien
aaaggaacacaatcctgtggacacc

SEQ ID NO: 4892111 - DNA, 25 bp, Homo sapien
agaaaggaacacaatcctgtggaca

SEQ ID NO: 4892112 - DNA, 25 bp, Homo sapien
tgatggcccacatacacaacagtgg

SEQ ID NO: 4892113 - DNA, 25 bp, Homo sapien
tagaacgatagatgctagcctagag

SEQ ID NO: 4892114 - DNA, 25 bp, Homo sapien
cagataacactgaaggtaccatggt

SEQ ID NO: 4892115 - DNA, 25 bp, Homo sapien
gaaaagtcctggtgcccttctagag

SEQ ID NO: 4892116 - DNA, 25 bp, Homo sapien
ctagggaaggatctgcgtctcaatt

SEQ ID NO: 4892117 - DNA, 25 bp, Homo sapien
caagcatttcaaggatcaactaggg

SEQ ID NO: 4892118 - DNA, 25 bp, Homo sapien
ctatgggtaaggcatacgaggtcct

SEQ ID NO: 4892119 - DNA, 25 bp, Homo sapien
tcaaggtgtccatagagctgcaagc

SEQ ID NO: 4892120 - DNA, 25 bp, Homo sapien
gactaatatagtgtcatacattcag

SEQ ID NO: 4892121 - DNA, 25 bp, Homo sapien
ggcaagcacgctcccacaaatgttt

SEQ ID NO: 4892122 - DNA, 25 bp, Homo sapien
gtacaaatcttatttcattgattgc

SEQ ID NO: 4892123 - DNA, 25 bp, Homo sapien
attctcctgcaaaatgtcctgagca

SEQ ID NO: 4892124 - DNA, 25 bp, Homo sapien
gcttgatcgcctctgatcacaccta

SEQ ID NO: 4892125 - DNA, 25 bp, Homo sapien
ttgatcgcctctgatcacacctaac

SEQ ID NO: 4892126 - DNA, 25 bp, Homo sapien
cttggcttgatcgcctctgatcaca

SEQ ID NO: 4892127 - DNA, 25 bp, Homo sapien
tctgatcacacctaaccctcccagg

SEQ ID NO: 4892128 - DNA, 25 bp, Homo sapien
tagtttagatcctccaaaaagcaaa

SEQ ID NO: 4892129 - DNA, 25 bp, Homo sapien
aaaagcaaatgcctaggcaaaatta

SEQ ID NO: 4892130 - DNA, 25 bp, Homo sapien
catgtaaggattttagtagagcaaa

SEQ ID NO: 4892131 - DNA, 25 bp, Homo sapien
gcctaggcaaaattaagcatgtaag

SEQ ID NO: 4892132 - DNA, 25 bp, Homo sapien
ttcgcataacatttccattagttgt

SEQ ID NO: 4892133 - DNA, 25 bp, Homo sapien
catttggagctttcgcataacattt

SEQ ID NO: 4892134 - DNA, 25 bp, Homo sapien
gagctttcgcataacatttccatta

SEQ ID NO: 4892135 - DNA, 25 bp, Homo sapien
gttttgctgttactgacagcaccat

SEQ ID NO: 4892136 - DNA, 25 bp, Homo sapien
agttttgctcaaatatcatttcatc

SEQ ID NO: 4892137 - DNA, 25 bp, Homo sapien
tgtgtttctgattatagccctgtat

SEQ ID NO: 4892138 - DNA, 25 bp, Homo sapien
gtttctgattatagccctgtattat

SEQ ID NO: 4892139 - DNA, 25 bp, Homo sapien
tctgtgtttctgattatagccctgt

SEQ ID NO: 4892140 - DNA, 25 bp, Homo sapien
gaagttggatatgcactgtgaaaat

SEQ ID NO: 4892141 - DNA, 25 bp, Homo sapien
cactgtgaaaatctggtgggtgtgt

SEQ ID NO: 4892142 - DNA, 25 bp, Homo sapien
tgcatgtgggtgtatttcaaagcta

SEQ ID NO: 4892143 - DNA, 25 bp, Homo sapien
ccttagaagttggatatgcactgtg

SEQ ID NO: 4892144 - DNA, 25 bp, Homo sapien
taaatatgtgtaccagaagctccat

SEQ ID NO: 4892145 - DNA, 25 bp, Homo sapien
tacataagtaaatatgtgtaccaga

SEQ ID NO: 4892146 - DNA, 25 bp, Homo sapien
gattcctctatactcagactatccg

SEQ ID NO: 4892147 - DNA, 25 bp, Homo sapien
cagactatccgagaaattgattatg

SEQ ID NO: 4892148 - DNA, 25 bp, Homo sapien
tggctcctgtgaacatcaaagtgtg

SEQ ID NO: 4892149 - DNA, 25 bp, Homo sapien
tagatggtatgatgatcttcacact

SEQ ID NO: 4892150 - DNA, 25 bp, Homo sapien
tcatcaggaaatcctgtccttgtag

SEQ ID NO: 4892151 - DNA, 25 bp, Homo sapien
gcacctggaccagtagatggtatga

SEQ ID NO: 4892152 - DNA, 25 bp, Homo sapien
tcttgaaggcttatttgagaaatat

SEQ ID NO: 4892153 - DNA, 25 bp, Homo sapien
accatgtggtaataaatcttgaagg

SEQ ID NO: 4892154 - DNA, 25 bp, Homo sapien
acatgtgcagagaagattctggctg

SEQ ID NO: 4892155 - DNA, 25 bp, Homo sapien
ttaaccatgtggtaataaatcttga

SEQ ID NO: 4892156 - DNA, 25 bp, Homo sapien
gatcataccttttcacccgttcttc

SEQ ID NO: 4892157 - DNA, 25 bp, Homo sapien
ctcaatgcattctcattgtcattat

SEQ ID NO: 4892158 - DNA, 25 bp, Homo sapien
tcaaaaagcgaaattgatcatacct

SEQ ID NO: 4892159 - DNA, 25 bp, Homo sapien
tgtcattattgttcaaaaagcgaaa

SEQ ID NO: 4892160 - DNA, 25 bp, Homo sapien
tttctgtcactggtgtagagtatac

SEQ ID NO: 4892161 - DNA, 25 bp, Homo sapien
cactggtgtagagtatacatcaatg

SEQ ID NO: 4892162 - DNA, 25 bp, Homo sapien
ctgtcactggtgtagagtatacatc

SEQ ID NO: 4892163 - DNA, 25 bp, Homo sapien
ggtgtagagtatacatcaatggtat

SEQ ID NO: 4892164 - DNA, 25 bp, Homo sapien
gctgctcccattggaaagttctgga

SEQ ID NO: 4892165 - DNA, 25 bp, Homo sapien
ctttaacatggtgacaacttgagga

SEQ ID NO: 4892166 - DNA, 25 bp, Homo sapien
tctggaagctgtgtgagttatctca

SEQ ID NO: 4892167 - DNA, 25 bp, Homo sapien
ctgggaaccaactcttgaggaagtt

SEQ ID NO: 4892168 - DNA, 25 bp, Homo sapien
tggtctcttggatagatcaggcggc

SEQ ID NO: 4892169 - DNA, 25 bp, Homo sapien
ttggatagatcaggcggcggtaact

SEQ ID NO: 4892170 - DNA, 25 bp, Homo sapien
gatcaggcggcggtaacttctgtat

SEQ ID NO: 4892171 - DNA, 25 bp, Homo sapien
caggcggcggtaacttctgtatcag

SEQ ID NO: 4892172 - DNA, 25 bp, Homo sapien
gactgaagagctcaccaggttgcct

SEQ ID NO: 4892173 - DNA, 25 bp, Homo sapien
ggataacaggtgctccaaggactga

SEQ ID NO: 4892174 - DNA, 25 bp, Homo sapien
tttgaaatccatggataacaggtgc

SEQ ID NO: 4892175 - DNA, 25 bp, Homo sapien
ggaccatcaaacaggattaagtgct

SEQ ID NO: 4892176 - DNA, 25 bp, Homo sapien
catgcttcacgaacagagaagctag

SEQ ID NO: 4892177 - DNA, 25 bp, Homo sapien
caggaaggtagttcaccatggtaac

SEQ ID NO: 4892178 - DNA, 25 bp, Homo sapien
gaagctagtaatttcttatgggtga

SEQ ID NO: 4892179 - DNA, 25 bp, Homo sapien
ccatggtaaccttggtcttgatgct

SEQ ID NO: 4892180 - DNA, 25 bp, Homo sapien
gtaaaccaattatctttaggactca

SEQ ID NO: 4892181 - DNA, 25 bp, Homo sapien
taaaccaattatctttaggactcat

SEQ ID NO: 4892182 - DNA, 25 bp, Homo sapien
catttttttctcagatcttttttca

SEQ ID NO: 4892183 - DNA, 25 bp, Homo sapien
ctatcatttttttctcagatctttt

SEQ ID NO: 4892184 - DNA, 25 bp, Homo sapien
ttctcagatcttttttcaccttttc

SEQ ID NO: 4892185 - DNA, 25 bp, Homo sapien
tcatttttttctcagatcttttttc

SEQ ID NO: 4892186 - DNA, 25 bp, Homo sapien
tatgtacgagagacaagacaaagcc

SEQ ID NO: 4892187 - DNA, 25 bp, Homo sapien
caaacagcgtttttcagcaattaaa

SEQ ID NO: 4892188 - DNA, 25 bp, Homo sapien
tcccatttgaactgcatatgtgagt

SEQ ID NO: 4892189 - DNA, 25 bp, Homo sapien
gcattgtcaatagaacatgaagctg

SEQ ID NO: 4892190 - DNA, 25 bp, Homo sapien
gagaatcctgagcagtggccgccat

SEQ ID NO: 4892191 - DNA, 25 bp, Homo sapien
tacacacgtcaatctctcaggaacg

SEQ ID NO: 4892192 - DNA, 25 bp, Homo sapien
caggaacggtgttagtcaagcgaga

SEQ ID NO: 4892193 - DNA, 25 bp, Homo sapien
tgttagtcaagcgagaatcctgagc

SEQ ID NO: 4892194 - DNA, 25 bp, Homo sapien
tttagagccaatttagtaacaggag

SEQ ID NO: 4892195 - DNA, 25 bp, Homo sapien
gaggagtaccacaatcaaatgtctg

SEQ ID NO: 4892196 - DNA, 25 bp, Homo sapien
taccaatgggcagagagaatgccga

SEQ ID NO: 4892197 - DNA, 25 bp, Homo sapien
gtgcatactgtacatgtttagagcc

SEQ ID NO: 4892198 - DNA, 25 bp, Homo sapien
cacaaaaccacctcagcaaatccta

SEQ ID NO: 4892199 - DNA, 25 bp, Homo sapien
acaaaaccacctcagcaaatcctaa

SEQ ID NO: 4892200 - DNA, 25 bp, Homo sapien
caaaaccacctcagcaaatcctaaa

SEQ ID NO: 4892201 - DNA, 25 bp, Homo sapien
tcacaaaaccacctcagcaaatcct

SEQ ID NO: 4892202 - DNA, 25 bp, Homo sapien
atattttgacttagggatttggtca

SEQ ID NO: 4892203 - DNA, 25 bp, Homo sapien
tattttgacttagggatttggtcat

SEQ ID NO: 4892204 - DNA, 25 bp, Homo sapien
gacagcactgcaatttgtgaatgat

SEQ ID NO: 4892205 - DNA, 25 bp, Homo sapien
gagacagcactgcaatttgtgaatg

SEQ ID NO: 4892206 - DNA, 25 bp, Homo sapien
cagcactgcaatttgtgaatgatgt

SEQ ID NO: 4892207 - DNA, 25 bp, Homo sapien
cactgcaatttgtgaatgatgtcat

SEQ ID NO: 4892208 - DNA, 25 bp, Homo sapien
tgcaagccaaaaggcttcaagtcaa

SEQ ID NO: 4892209 - DNA, 25 bp, Homo sapien
ctgcaagccaaaaggcttcaagtca

SEQ ID NO: 4892210 - DNA, 25 bp, Homo sapien
gcaagccaaaaggcttcaagtcaag

SEQ ID NO: 4892211 - DNA, 25 bp, Homo sapien
gttacacgatgccgaaagcagtctt

SEQ ID NO: 4892212 - DNA, 25 bp, Homo sapien
ctgtgttacacgatgccgaaagcag

SEQ ID NO: 4892213 - DNA, 25 bp, Homo sapien
gtgttacacgatgccgaaagcagtc

SEQ ID NO: 4892214 - DNA, 25 bp, Homo sapien
tgtgttacacgatgccgaaagcagt

SEQ ID NO: 4892215 - DNA, 25 bp, Homo sapien
tcagctacattcctaaactcgaaac

SEQ ID NO: 4892216 - DNA, 25 bp, Homo sapien
gggcaagagagctgatacaagtctt

SEQ ID NO: 4892217 - DNA, 25 bp, Homo sapien
gatacaagtcttctggggcattctg

SEQ ID NO: 4892218 - DNA, 25 bp, Homo sapien
ccttcacagagtgtaattcagctac

SEQ ID NO: 4892219 - DNA, 25 bp, Homo sapien
taccacatatggtcttataagaact

SEQ ID NO: 4892220 - DNA, 25 bp, Homo sapien
ttttgaaagcaatgagcttgctagc

SEQ ID NO: 4892221 - DNA, 25 bp, Homo sapien
agtctcccagacacaaattctgatg

SEQ ID NO: 4892222 - DNA, 25 bp, Homo sapien
gcttgctagcaatacctcacactga

SEQ ID NO: 4892223 - DNA, 25 bp, Homo sapien
tcaaaggatataagttcctcttttg

SEQ ID NO: 4892224 - DNA, 25 bp, Homo sapien
aggatataagttcctcttttgaggg

SEQ ID NO: 4892225 - DNA, 25 bp, Homo sapien
aaggatataagttcctcttttgagg

SEQ ID NO: 4892226 - DNA, 25 bp, Homo sapien
caaaggatataagttcctcttttga

SEQ ID NO: 4892227 - DNA, 25 bp, Homo sapien
taagacagtcttatctttatgctct

SEQ ID NO: 4892228 - DNA, 25 bp, Homo sapien
aattaagacagtcttatctttatgc

SEQ ID NO: 4892229 - DNA, 25 bp, Homo sapien
agacagtcttatctttatgctcttt

SEQ ID NO: 4892230 - DNA, 25 bp, Homo sapien
tagcaattaagacagtcttatcttt

SEQ ID NO: 4892231 - DNA, 25 bp, Homo sapien
gatgtgacgctgatatcagctcgac

SEQ ID NO: 4892232 - DNA, 25 bp, Homo sapien
tcagctcgactcaagcagagattca

SEQ ID NO: 4892233 - DNA, 25 bp, Homo sapien
gctacaagagcttttgatgtgacgc

SEQ ID NO: 4892234 - DNA, 25 bp, Homo sapien
attgcatgtgtgtagctacaagagc

SEQ ID NO: 4892235 - DNA, 25 bp, Homo sapien
tgcgatctaagcagctacaacaagt

SEQ ID NO: 4892236 - DNA, 25 bp, Homo sapien
caaacctagcctttggcagactgca

SEQ ID NO: 4892237 - DNA, 25 bp, Homo sapien
aactgctctagcgagtgtgcttgca

SEQ ID NO: 4892238 - DNA, 25 bp, Homo sapien
tagaactgtgcaatcttgccaaggg

SEQ ID NO: 4892239 - DNA, 25 bp, Homo sapien
gttcaaacgctcctgcggccactaa

SEQ ID NO: 4892240 - DNA, 25 bp, Homo sapien
ctctgtgatgtagccactctggtat

SEQ ID NO: 4892241 - DNA, 25 bp, Homo sapien
caggaatccagggttcaaacgctcc

SEQ ID NO: 4892242 - DNA, 25 bp, Homo sapien
tggtattgtactctccccaggaatc

SEQ ID NO: 4892243 - DNA, 25 bp, Homo sapien
cttgctaccaccacctcaaaccttg

SEQ ID NO: 4892244 - DNA, 25 bp, Homo sapien
tcacttcctccaaccttacttgcta

SEQ ID NO: 4892245 - DNA, 25 bp, Homo sapien
cttcctccaaccttacttgctacca

SEQ ID NO: 4892246 - DNA, 25 bp, Homo sapien
tccaaccttacttgctaccaccacc

SEQ ID NO: 4892247 - DNA, 25 bp, Homo sapien
cagatttatcttcgagccatctaca

SEQ ID NO: 4892248 - DNA, 25 bp, Homo sapien
ggcagatttatcttcgagccatcta

SEQ ID NO: 4892249 - DNA, 25 bp, Homo sapien
gcagatttatcttcgagccatctac

SEQ ID NO: 4892250 - DNA, 25 bp, Homo sapien
agatttatcttcgagccatctacag

SEQ ID NO: 4892251 - DNA, 25 bp, Homo sapien
tgattttgatggcttcgtgtgcctg

SEQ ID NO: 4892252 - DNA, 25 bp, Homo sapien
ttttgatggcttcgtgtgcctgcag

SEQ ID NO: 4892253 - DNA, 25 bp, Homo sapien
gattttgatggcttcgtgtgcctgc

SEQ ID NO: 4892254 - DNA, 25 bp, Homo sapien
tttgatggcttcgtgtgcctgcaga

SEQ ID NO: 4892255 - DNA, 25 bp, Homo sapien
gcaataatcccttctgtcactgtct

SEQ ID NO: 4892256 - DNA, 25 bp, Homo sapien
gctcttgagtagctttcaagctgga

SEQ ID NO: 4892257 - DNA, 25 bp, Homo sapien
caagctggattccattagaagaagt

SEQ ID NO: 4892258 - DNA, 25 bp, Homo sapien
ttcatcttgactggcaagttctggg

SEQ ID NO: 4892259 - DNA, 25 bp, Homo sapien
tggcgagacatgtccatactttttt

SEQ ID NO: 4892260 - DNA, 25 bp, Homo sapien
ctctgcagaatacagccctggcgag

SEQ ID NO: 4892261 - DNA, 25 bp, Homo sapien
gtaaatgttaaaggagaagaatcca

SEQ ID NO: 4892262 - DNA, 25 bp, Homo sapien
gaatacagccctggcgagacatgtc

SEQ ID NO: 4892263 - DNA, 25 bp, Homo sapien
taacgtctaactatttgtcaccagc

SEQ ID NO: 4892264 - DNA, 25 bp, Homo sapien
tgccatttgttctagtgaccaaaaa

SEQ ID NO: 4892265 - DNA, 25 bp, Homo sapien
tgtcaccagctcttatatgaaatct

SEQ ID NO: 4892266 - DNA, 25 bp, Homo sapien
tgtagtaatatgaagctgctagact

SEQ ID NO: 4892267 - DNA, 25 bp, Homo sapien
tgtggaacttcaacaaccactgtct

SEQ ID NO: 4892268 - DNA, 25 bp, Homo sapien
cttcattacgcaggtaagaatcttc

SEQ ID NO: 4892269 - DNA, 25 bp, Homo sapien
tattgattgtacataaaggtgctga

SEQ ID NO: 4892270 - DNA, 25 bp, Homo sapien
taattttgcaacacatcaatgtgct

SEQ ID NO: 4892271 - DNA, 25 bp, Homo sapien
catttatcaaggcacaaataagggc

SEQ ID NO: 4892272 - DNA, 25 bp, Homo sapien
ttaacctgtttaatcttgtatccat

SEQ ID NO: 4892273 - DNA, 25 bp, Homo sapien
tagttgccgggtactactttatatc

SEQ ID NO: 4892274 - DNA, 25 bp, Homo sapien
aataagggcaatattctccaaatat

SEQ ID NO: 4892275 - DNA, 25 bp, Homo sapien
catttgtgctaatagtccttggtct

SEQ ID NO: 4892276 - DNA, 25 bp, Homo sapien
aatcgacatgctgaggctcgtattt

SEQ ID NO: 4892277 - DNA, 25 bp, Homo sapien
tcgacatgctgaggctcgtatttat

SEQ ID NO: 4892278 - DNA, 25 bp, Homo sapien
ttcttaatgaacattcatgagattt

SEQ ID NO: 4892279 - DNA, 25 bp, Homo sapien
aaactgaacatcacggctaaggcag

SEQ ID NO: 4892280 - DNA, 25 bp, Homo sapien
tagaaactgaacatcacggctaagg

SEQ ID NO: 4892281 - DNA, 25 bp, Homo sapien
tattagaaactgaacatcacggcta

SEQ ID NO: 4892282 - DNA, 25 bp, Homo sapien
gaaactgaacatcacggctaaggca

SEQ ID NO: 4892283 - DNA, 25 bp, Homo sapien
aattagataaacttttgcaagggca

SEQ ID NO: 4892284 - DNA, 25 bp, Homo sapien
ccagccacagtagacctccacagat

SEQ ID NO: 4892285 - DNA, 25 bp, Homo sapien
aagggcattcagaacagccaatcca

SEQ ID NO: 4892286 - DNA, 25 bp, Homo sapien
cctgttttcatattggaagctcata

SEQ ID NO: 4892287 - DNA, 25 bp, Homo sapien
cacacctcctacaacgaagttgtaa

SEQ ID NO: 4892288 - DNA, 25 bp, Homo sapien
aattaatcatatcccacatgtttta

SEQ ID NO: 4892289 - DNA, 25 bp, Homo sapien
tactatgtgcaatactaaaaattaa

SEQ ID NO: 4892290 - DNA, 25 bp, Homo sapien
aaaaattaatcatatcccacatgtt

SEQ ID NO: 4892291 - DNA, 25 bp, Homo sapien
aatcatatcccacatgttttattga

SEQ ID NO: 4892292 - DNA, 25 bp, Homo sapien
catggttactcttggtgtctcttga

SEQ ID NO: 4892293 - DNA, 25 bp, Homo sapien
gtacatggttactcttggtgtctct

SEQ ID NO: 4892294 - DNA, 25 bp, Homo sapien
tgtctcttgatgtcctaatctcctc

SEQ ID NO: 4892295 - DNA, 25 bp, Homo sapien
tgtacatggttactcttggtgtctc

SEQ ID NO: 4892296 - DNA, 25 bp, Homo sapien
cagatgtagaagctgttgcaaatta

SEQ ID NO: 4892297 - DNA, 25 bp, Homo sapien
agatgtagaagctgttgcaaattaa

SEQ ID NO: 4892298 - DNA, 25 bp, Homo sapien
tgatgttatcaagcttccaaagtgc

SEQ ID NO: 4892299 - DNA, 25 bp, Homo sapien
cagtagccgtcataatagagacaag

SEQ ID NO: 4892300 - DNA, 25 bp, Homo sapien
ccttgttgtttgacgttgttggcat

SEQ ID NO: 4892301 - DNA, 25 bp, Homo sapien
tatattccccagatatataagccct

SEQ ID NO: 4892302 - DNA, 25 bp, Homo sapien
gagagctttcaccacatttatgagt

SEQ ID NO: 4892303 - DNA, 25 bp, Homo sapien
ctgcaagcttgacagtgctttggtc

SEQ ID NO: 4892304 - DNA, 25 bp, Homo sapien
tgtctgcaagcttgacagtgctttg

SEQ ID NO: 4892305 - DNA, 25 bp, Homo sapien
tctgcaagcttgacagtgctttggt

SEQ ID NO: 4892306 - DNA, 25 bp, Homo sapien
gtctgcaagcttgacagtgctttgg

SEQ ID NO: 4892307 - DNA, 25 bp, Homo sapien
gtaacaaataaagctggagagggga

SEQ ID NO: 4892308 - DNA, 25 bp, Homo sapien
agtaacaaataaagctggagagggg

SEQ ID NO: 4892309 - DNA, 25 bp, Homo sapien
gctaagcacgtggaatccaaaaatg

SEQ ID NO: 4892310 - DNA, 25 bp, Homo sapien
gtccatatttatgttaaagcacggg

SEQ ID NO: 4892311 - DNA, 25 bp, Homo sapien
ggcaccataggatactctgggtgct

SEQ ID NO: 4892312 - DNA, 25 bp, Homo sapien
gcactgttttactctcacgcaggtt

SEQ ID NO: 4892313 - DNA, 25 bp, Homo sapien
agctgccactgggtttacaaacatg

SEQ ID NO: 4892314 - DNA, 25 bp, Homo sapien
cttggcctcgccagtctcaggattt

SEQ ID NO: 4892315 - DNA, 25 bp, Homo sapien
gattttgactacttgttcccatctc

SEQ ID NO: 4892316 - DNA, 25 bp, Homo sapien
tacaaacatgatatggattccaatt

SEQ ID NO: 4892317 - DNA, 25 bp, Homo sapien
cctccattagagaaggtgacaagct

SEQ ID NO: 4892318 - DNA, 25 bp, Homo sapien
ttcctccattagagaaggtgacaag

SEQ ID NO: 4892319 - DNA, 25 bp, Homo sapien
tcttcctccattagagaaggtgaca

SEQ ID NO: 4892320 - DNA, 25 bp, Homo sapien
ccattagagaaggtgacaagctcat

SEQ ID NO: 4892321 - DNA, 25 bp, Homo sapien
tgagattatcaagacatgtcccaac

SEQ ID NO: 4892322 - DNA, 25 bp, Homo sapien
gttgtaactccatgcaattcctgat

SEQ ID NO: 4892323 - DNA, 25 bp, Homo sapien
cacacaaagcgctaaaggaagttaa

SEQ ID NO: 4892324 - DNA, 25 bp, Homo sapien
gagcaggatggttagaaatttgaga

SEQ ID NO: 4892325 - DNA, 25 bp, Homo sapien
gcagtggttcaatgcagtgtttatc

SEQ ID NO: 4892326 - DNA, 25 bp, Homo sapien
gatcttgtaatcagcaatgcagtgg

SEQ ID NO: 4892327 - DNA, 25 bp, Homo sapien
ttatctgaataatgggatattcccc

SEQ ID NO: 4892328 - DNA, 25 bp, Homo sapien
tgcagattggatagtgtggaccaaa

SEQ ID NO: 4892329 - DNA, 25 bp, Homo sapien
ctctagctatacagtggtgaggata

SEQ ID NO: 4892330 - DNA, 25 bp, Homo sapien
taattaaattatcaactgctggtgg

SEQ ID NO: 4892331 - DNA, 25 bp, Homo sapien
tatggtaaccacttgccaaaaacca

SEQ ID NO: 4892332 - DNA, 25 bp, Homo sapien
ctgctggtggtaaaacagttgagta

SEQ ID NO: 4892333 - DNA, 25 bp, Homo sapien
tatgtccttgattcactgctagatg

SEQ ID NO: 4892334 - DNA, 25 bp, Homo sapien
tgctcctggccaaacacatttcagt

SEQ ID NO: 4892335 - DNA, 25 bp, Homo sapien
gatgacctgggcttaacacagtgca

SEQ ID NO: 4892336 - DNA, 25 bp, Homo sapien
tttattcctgtagacctcataaggg

SEQ ID NO: 4892337 - DNA, 25 bp, Homo sapien
gcctgggctcggtgtatagttttca

SEQ ID NO: 4892338 - DNA, 25 bp, Homo sapien
cctgggctcggtgtatagttttcag

SEQ ID NO: 4892339 - DNA, 25 bp, Homo sapien
tgcctgggctcggtgtatagttttc

SEQ ID NO: 4892340 - DNA, 25 bp, Homo sapien
ttccatgttgttattccaacaagat

SEQ ID NO: 4892341 - DNA, 25 bp, Homo sapien
tcactttctgtaggagtaaaatatg

SEQ ID NO: 4892342 - DNA, 25 bp, Homo sapien
gccactctcatcttaaatttatcac

SEQ ID NO: 4892343 - DNA, 25 bp, Homo sapien
aatataatactctccccagtgttcc

SEQ ID NO: 4892344 - DNA, 25 bp, Homo sapien
cattaaagtgtagaaaatgttcgcc

SEQ ID NO: 4892345 - DNA, 25 bp, Homo sapien
gcctgcccattactccacactgatg

SEQ ID NO: 4892346 - DNA, 25 bp, Homo sapien
cactgatgagtaaaattccttagat

SEQ ID NO: 4892347 - DNA, 25 bp, Homo sapien
tctttgttatgctgccattaaagtg

SEQ ID NO: 4892348 - DNA, 25 bp, Homo sapien
cacacctaaagtgagtgccacaacc

SEQ ID NO: 4892349 - DNA, 25 bp, Homo sapien
gtggaaagtaatctagcaatcagct

SEQ ID NO: 4892350 - DNA, 25 bp, Homo sapien
aataacctgattgaagcctgctaca

SEQ ID NO: 4892351 - DNA, 25 bp, Homo sapien
gaaggtatgacgaagaaagagcatc

SEQ ID NO: 4892352 - DNA, 25 bp, Homo sapien
aggaccttccaatctgtaatcatat

SEQ ID NO: 4892353 - DNA, 25 bp, Homo sapien
ttttgtgtaacctggctttccatgc

SEQ ID NO: 4892354 - DNA, 25 bp, Homo sapien
tccaggaacggaatgttttgtgtaa

SEQ ID NO: 4892355 - DNA, 25 bp, Homo sapien
ctgagtagccatttggacatggatc

SEQ ID NO: 4892356 - DNA, 25 bp, Homo sapien
catggatcattccaggaacggaatg

SEQ ID NO: 4892357 - DNA, 25 bp, Homo sapien
tggaagccaaaccacttgacaggta

SEQ ID NO: 4892358 - DNA, 25 bp, Homo sapien
aaagatacatctgtacattcaaacc

SEQ ID NO: 4892359 - DNA, 25 bp, Homo sapien
gaagccaaaccacttgacaggtatt

SEQ ID NO: 4892360 - DNA, 25 bp, Homo sapien
tatctagagtctttctcagagtcat

SEQ ID NO: 4892361 - DNA, 25 bp, Homo sapien
aaaggccatcagacaagctaaagtg

SEQ ID NO: 4892362 - DNA, 25 bp, Homo sapien
aatcactaccgtcaaatcacaaatg

SEQ ID NO: 4892363 - DNA, 25 bp, Homo sapien
tgtccttcaggcaccagtaaaggcc

SEQ ID NO: 4892364 - DNA, 25 bp, Homo sapien
aacagctgaaatcactaccgtcaaa

SEQ ID NO: 4892365 - DNA, 25 bp, Homo sapien
tcctaaatataatgcacacaaacat

SEQ ID NO: 4892366 - DNA, 25 bp, Homo sapien
cggctctggtttatatcattctgca

SEQ ID NO: 4892367 - DNA, 25 bp, Homo sapien
aaccagaggcacaaatttcagccag

SEQ ID NO: 4892368 - DNA, 25 bp, Homo sapien
ggaaaaatcggctctggtttatatc

SEQ ID NO: 4892369 - DNA, 25 bp, Homo sapien
gctcctttctgtcgtgaagtgttgc

SEQ ID NO: 4892370 - DNA, 25 bp, Homo sapien
tatatctgtttaaatgtccacttgc

SEQ ID NO: 4892371 - DNA, 25 bp, Homo sapien
atatctgtttaaatgtccacttgcc

SEQ ID NO: 4892372 - DNA, 25 bp, Homo sapien
ggcagtttgactctctttcctgcac

SEQ ID NO: 4892373 - DNA, 25 bp, Homo sapien
ttgccatatgggcagtttgactctc

SEQ ID NO: 4892374 - DNA, 25 bp, Homo sapien
catgtgccgtggacaaagtttcacc

SEQ ID NO: 4892375 - DNA, 25 bp, Homo sapien
aattttcaatgccatgtgccgtgga

SEQ ID NO: 4892376 - DNA, 25 bp, Homo sapien
tgccatgtgccgtggacaaagtttc

SEQ ID NO: 4892377 - DNA, 25 bp, Homo sapien
tcaatgccatgtgccgtggacaaag

SEQ ID NO: 4892378 - DNA, 25 bp, Homo sapien
tccagaggtttaggcaatatccaag

SEQ ID NO: 4892379 - DNA, 25 bp, Homo sapien
gattcttgccgacatatacttcagg

SEQ ID NO: 4892380 - DNA, 25 bp, Homo sapien
cagagctggcttgttcatcaataaa

SEQ ID NO: 4892381 - DNA, 25 bp, Homo sapien
gaaacggacattaaggattcttgcc

SEQ ID NO: 4892382 - DNA, 25 bp, Homo sapien
agatggacttgtcatgagcatcaca

SEQ ID NO: 4892383 - DNA, 25 bp, Homo sapien
acttgtcatgagcatcacatttgca

SEQ ID NO: 4892384 - DNA, 25 bp, Homo sapien
ggacttgtcatgagcatcacatttg

SEQ ID NO: 4892385 - DNA, 25 bp, Homo sapien
ttgtcatgagcatcacatttgcaag

SEQ ID NO: 4892386 - DNA, 25 bp, Homo sapien
ctgtgcaaagctccagtgaataatt

SEQ ID NO: 4892387 - DNA, 25 bp, Homo sapien
gcaaagctccagtgaataatttata

SEQ ID NO: 4892388 - DNA, 25 bp, Homo sapien
gtgcaaagctccagtgaataattta

SEQ ID NO: 4892389 - DNA, 25 bp, Homo sapien
aagctccagtgaataatttatatca

SEQ ID NO: 4892390 - DNA, 25 bp, Homo sapien
gaagcttatcactgtttgtcaactg

SEQ ID NO: 4892391 - DNA, 25 bp, Homo sapien
gcctgattgacacaagtaaccctta

SEQ ID NO: 4892392 - DNA, 25 bp, Homo sapien
tcatacaccaagtcccctgagaagc

SEQ ID NO: 4892393 - DNA, 25 bp, Homo sapien
gtaaaataccatgattaattgaaga

SEQ ID NO: 4892394 - DNA, 25 bp, Homo sapien
gacagttcccattcaagccagttgc

SEQ ID NO: 4892395 - DNA, 25 bp, Homo sapien
ctttgagtctatctgcatctacaac

SEQ ID NO: 4892396 - DNA, 25 bp, Homo sapien
gcttcaattttgagggttctcttgt

SEQ ID NO: 4892397 - DNA, 25 bp, Homo sapien
tgcatctacaactgacagttcccat

SEQ ID NO: 4892398 - DNA, 25 bp, Homo sapien
catcttcgtatttcctcaagttgaa

SEQ ID NO: 4892399 - DNA, 25 bp, Homo sapien
atttgctgatgcctacggtatagtc

SEQ ID NO: 4892400 - DNA, 25 bp, Homo sapien
gaatttgctgatgcctacggtatag

SEQ ID NO: 4892401 - DNA, 25 bp, Homo sapien
ttgaatttgctgatgcctacggtat

SEQ ID NO: 4892402 - DNA, 25 bp, Homo sapien
caaatgtgtgcaatgtgctagaaca

SEQ ID NO: 4892403 - DNA, 25 bp, Homo sapien
ttagtttactacacaaatggcctct

SEQ ID NO: 4892404 - DNA, 25 bp, Homo sapien
tacgattgaacaccactattagaag

SEQ ID NO: 4892405 - DNA, 25 bp, Homo sapien
gaacaaatcgggcatataggaagtc

SEQ ID NO: 4892406 - DNA, 25 bp, Homo sapien
atttcattattggaagctctgcttg

SEQ ID NO: 4892407 - DNA, 25 bp, Homo sapien
tctgcttgtcgtttaacatttagca

SEQ ID NO: 4892408 - DNA, 25 bp, Homo sapien
gagcatgcagtactgcaagtaacat

SEQ ID NO: 4892409 - DNA, 25 bp, Homo sapien
gatggcattccccaatttcattatt

SEQ ID NO: 4892410 - DNA, 25 bp, Homo sapien
tcgcctagattgtttgggatcctcc

SEQ ID NO: 4892411 - DNA, 25 bp, Homo sapien
tctgtcatactctcgcctagattgt

SEQ ID NO: 4892412 - DNA, 25 bp, Homo sapien
catactctcgcctagattgtttggg

SEQ ID NO: 4892413 - DNA, 25 bp, Homo sapien
tcatctgtcatactctcgcctagat

SEQ ID NO: 4892414 - DNA, 25 bp, Homo sapien
acagagagttgaaaatcgagcagct

SEQ ID NO: 4892415 - DNA, 25 bp, Homo sapien
tggttgcctacaaagagatcttgac

SEQ ID NO: 4892416 - DNA, 25 bp, Homo sapien
tgaataaagccctaaaactctgaat

SEQ ID NO: 4892417 - DNA, 25 bp, Homo sapien
tgaatttcatgtggcctgactcggc

SEQ ID NO: 4892418 - DNA, 25 bp, Homo sapien
tgaacatgattttatgctcactttc

SEQ ID NO: 4892419 - DNA, 25 bp, Homo sapien
ctttggactgatgaaatgaacatga

SEQ ID NO: 4892420 - DNA, 25 bp, Homo sapien
tttggactgatgaaatgaacatgat

SEQ ID NO: 4892421 - DNA, 25 bp, Homo sapien
tgttggaataatcaactgaattacc

SEQ ID NO: 4892422 - DNA, 25 bp, Homo sapien
tctgttggaataatcaactgaatta

SEQ ID NO: 4892423 - DNA, 25 bp, Homo sapien
attctgttggaataatcaactgaat

SEQ ID NO: 4892424 - DNA, 25 bp, Homo sapien
ttattctgttggaataatcaactga

SEQ ID NO: 4892425 - DNA, 25 bp, Homo sapien
ccagagccatttgattgcaattcag

SEQ ID NO: 4892426 - DNA, 25 bp, Homo sapien
agccatttgattgcaattcagggta

SEQ ID NO: 4892427 - DNA, 25 bp, Homo sapien
ctcccagagccatttgattgcaatt

SEQ ID NO: 4892428 - DNA, 25 bp, Homo sapien
ctctcccagagccatttgattgcaa

SEQ ID NO: 4892429 - DNA, 25 bp, Homo sapien
aagcagttgcctttgataaaagttg

SEQ ID NO: 4892430 - DNA, 25 bp, Homo sapien
tgctactgctgaggagacgtactcc

SEQ ID NO: 4892431 - DNA, 25 bp, Homo sapien
tttgaaagtcttgccaaaacagttg

SEQ ID NO: 4892432 - DNA, 25 bp, Homo sapien
gtaatccagatgtcactgctactgc

SEQ ID NO: 4892433 - DNA, 25 bp, Homo sapien
gccacagttattggctttcttgctg

SEQ ID NO: 4892434 - DNA, 25 bp, Homo sapien
tgggttgccaagatatgtccagagt

SEQ ID NO: 4892435 - DNA, 25 bp, Homo sapien
ttcaagaatggagccccggaccttc

SEQ ID NO: 4892436 - DNA, 25 bp, Homo sapien
catctgggttgccaagatatgtcca

SEQ ID NO: 4892437 - DNA, 25 bp, Homo sapien
tgccaagatatgtccagagttggtt

SEQ ID NO: 4892438 - DNA, 25 bp, Homo sapien
tgggtaggaaggattcgtatagtta

SEQ ID NO: 4892439 - DNA, 25 bp, Homo sapien
gattcgtatagttatcctttcatga

SEQ ID NO: 4892440 - DNA, 25 bp, Homo sapien
aggaacatcatgatttagagcgaat

SEQ ID NO: 4892441 - DNA, 25 bp, Homo sapien
agagcgaatgcattccactacaggg

SEQ ID NO: 4892442 - DNA, 25 bp, Homo sapien
ccagcattgtaatgtggtatcacga

SEQ ID NO: 4892443 - DNA, 25 bp, Homo sapien
catgcatagtggaagcaaacttttc

SEQ ID NO: 4892444 - DNA, 25 bp, Homo sapien
tcaagatgatcgctggaggtccagt

SEQ ID NO: 4892445 - DNA, 25 bp, Homo sapien
tcacgatgacctaattgaccatggc

SEQ ID NO: 4892446 - DNA, 25 bp, Homo sapien
ccacattagaacaagttgcagggtt

SEQ ID NO: 4892447 - DNA, 25 bp, Homo sapien
tggagggtccacattctttgtagat

SEQ ID NO: 4892448 - DNA, 25 bp, Homo sapien
ttgcagggttggagggtccacattc

SEQ ID NO: 4892449 - DNA, 25 bp, Homo sapien
tcactgtcttgaaaaggagccacat

SEQ ID NO: 4892450 - DNA, 25 bp, Homo sapien
gtgtaaatactctcattggtgtact

SEQ ID NO: 4892451 - DNA, 25 bp, Homo sapien
tactctcattggtgtactatcttct

SEQ ID NO: 4892452 - DNA, 25 bp, Homo sapien
ttggtgtactatcttctgggcaggt

SEQ ID NO: 4892453 - DNA, 25 bp, Homo sapien
tctcattggtgtactatcttctggg

SEQ ID NO: 4892454 - DNA, 25 bp, Homo sapien
atcagggcattcaagtgcgtgtagt

SEQ ID NO: 4892455 - DNA, 25 bp, Homo sapien
gcattcaagtgcgtgtagtttcctt

SEQ ID NO: 4892456 - DNA, 25 bp, Homo sapien
gtttccttgggtcttatctcttctc

SEQ ID NO: 4892457 - DNA, 25 bp, Homo sapien
gcgtgtagtttccttgggtcttatc

SEQ ID NO: 4892458 - DNA, 25 bp, Homo sapien
cccatgaatatctggccctgaaagc

SEQ ID NO: 4892459 - DNA, 25 bp, Homo sapien
caggactcttgatgatgtgcggttt

SEQ ID NO: 4892460 - DNA, 25 bp, Homo sapien
gacagcaagctttctgccaggactc

SEQ ID NO: 4892461 - DNA, 25 bp, Homo sapien
gactcttgatgatgtgcggttttct

SEQ ID NO: 4892462 - DNA, 25 bp, Homo sapien
gccagaacccttttctgactagacc

SEQ ID NO: 4892463 - DNA, 25 bp, Homo sapien
ttcccgattgtcttcaattttgaaa

SEQ ID NO: 4892464 - DNA, 25 bp, Homo sapien
gaccattctcttcccgattgtcttc

SEQ ID NO: 4892465 - DNA, 25 bp, Homo sapien
tattaaatactagctcaagttccac

SEQ ID NO: 4892466 - DNA, 25 bp, Homo sapien
tcagtagagtcaaagaagaggatgc

SEQ ID NO: 4892467 - DNA, 25 bp, Homo sapien
tgcttgggacaaaggagacttgcct

SEQ ID NO: 4892468 - DNA, 25 bp, Homo sapien
gccatactggttaggcagttctgaa

SEQ ID NO: 4892469 - DNA, 25 bp, Homo sapien
taggcctttctatgaccacaagagc

SEQ ID NO: 4892470 - DNA, 25 bp, Homo sapien
taactgactggtaaattccccagat

SEQ ID NO: 4892471 - DNA, 25 bp, Homo sapien
cagatcccaggattctaatctcaac

SEQ ID NO: 4892472 - DNA, 25 bp, Homo sapien
tccttctcaccaatattctgcttgt

SEQ ID NO: 4892473 - DNA, 25 bp, Homo sapien
gattctaatctcaactgttctcctt

SEQ ID NO: 4892474 - DNA, 25 bp, Homo sapien
tcagctgtgatctcctggttgcaca

SEQ ID NO: 4892475 - DNA, 25 bp, Homo sapien
ggaattagacacacttgtaccagat

SEQ ID NO: 4892476 - DNA, 25 bp, Homo sapien
cacttgtaccagatctaaaacataa

SEQ ID NO: 4892477 - DNA, 25 bp, Homo sapien
ttctctgtggaattagacacacttg

SEQ ID NO: 4892478 - DNA, 25 bp, Homo sapien
gtagttctgtcctcatatcatctgg

SEQ ID NO: 4892479 - DNA, 25 bp, Homo sapien
cattgtagttctgtcctcatatcat

SEQ ID NO: 4892480 - DNA, 25 bp, Homo sapien
tgggtatctgttactgccactgtca

SEQ ID NO: 4892481 - DNA, 25 bp, Homo sapien
ggtatctgttactgccactgtcacc

SEQ ID NO: 4892482 - DNA, 25 bp, Homo sapien
taatgacatgattgggcactatccc

SEQ ID NO: 4892483 - DNA, 25 bp, Homo sapien
tgtactacgtttctcctaatcatgg

SEQ ID NO: 4892484 - DNA, 25 bp, Homo sapien
ccatagctcccctgcttcagtataa

SEQ ID NO: 4892485 - DNA, 25 bp, Homo sapien
tgttccttttcctggcggcaagttg

SEQ ID NO: 4892486 - DNA, 25 bp, Homo sapien
caaggctttgatgtttgtactgaca

SEQ ID NO: 4892487 - DNA, 25 bp, Homo sapien
gtttgtactgacaccaaataccaaa

SEQ ID NO: 4892488 - DNA, 25 bp, Homo sapien
tttgggtcaaggctttgatgtttgt

SEQ ID NO: 4892489 - DNA, 25 bp, Homo sapien
ggctttgatgtttgtactgacacca

SEQ ID NO: 4892490 - DNA, 25 bp, Homo sapien
ggctgccgagaatctaccacaagga

SEQ ID NO: 4892491 - DNA, 25 bp, Homo sapien
tgccgagaatctaccacaaggatca

SEQ ID NO: 4892492 - DNA, 25 bp, Homo sapien
tgaggctgccgagaatctaccacaa

SEQ ID NO: 4892493 - DNA, 25 bp, Homo sapien
gaggctgccgagaatctaccacaag

SEQ ID NO: 4892494 - DNA, 25 bp, Homo sapien
ttggaaggcatggtgcaaggttcac

SEQ ID NO: 4892495 - DNA, 25 bp, Homo sapien
ggaaggcatggtgcaaggttcacca

SEQ ID NO: 4892496 - DNA, 25 bp, Homo sapien
tggaaggcatggtgcaaggttcacc

SEQ ID NO: 4892497 - DNA, 25 bp, Homo sapien
cttggaaggcatggtgcaaggttca

SEQ ID NO: 4892498 - DNA, 25 bp, Homo sapien
ttcctttcagtatgaggaatgtcta

SEQ ID NO: 4892499 - DNA, 25 bp, Homo sapien
ctttcagtatgaggaatgtctaaaa

SEQ ID NO: 4892500 - DNA, 25 bp, Homo sapien
gaagaggctcagcagtagagtggag

SEQ ID NO: 4892501 - DNA, 25 bp, Homo sapien
tcagagtttctgatctttccgtctc

SEQ ID NO: 4892502 - DNA, 25 bp, Homo sapien
gagccatgtaattgtgtttctgcat

SEQ ID NO: 4892503 - DNA, 25 bp, Homo sapien
ccagacgaagaaatgcatgatgcca

SEQ ID NO: 4892504 - DNA, 25 bp, Homo sapien
tcagctggacaagcccacaatgttt

SEQ ID NO: 4892505 - DNA, 25 bp, Homo sapien
gcccacaatgtttgtggctccactt

SEQ ID NO: 4892506 - DNA, 25 bp, Homo sapien
ggacaagcccacaatgtttgtggct

SEQ ID NO: 4892507 - DNA, 25 bp, Homo sapien
tggctccactttgcaccttaaaact

SEQ ID NO: 4892508 - DNA, 25 bp, Homo sapien
gatgctcactgggaagttttacatc

SEQ ID NO: 4892509 - DNA, 25 bp, Homo sapien
tgttgagcaccttatcatttgcaag

SEQ ID NO: 4892510 - DNA, 25 bp, Homo sapien
ttcatcagaatacttgttgagcacc

SEQ ID NO: 4892511 - DNA, 25 bp, Homo sapien
tacaatgataagcacatggactgtg

SEQ ID NO: 4892512 - DNA, 25 bp, Homo sapien
agctctgagtagaaagacatttgca

SEQ ID NO: 4892513 - DNA, 25 bp, Homo sapien
tggaggtggtgagtctagtgctaga

SEQ ID NO: 4892514 - DNA, 25 bp, Homo sapien
agctggggtgatgatcaggatttct

SEQ ID NO: 4892515 - DNA, 25 bp, Homo sapien
catttgcattaatccagctggggtg

SEQ ID NO: 4892516 - DNA, 25 bp, Homo sapien
taagatgtagagagtgtccagaggt

SEQ ID NO: 4892517 - DNA, 25 bp, Homo sapien
atgtagagagtgtccagaggtgacc

SEQ ID NO: 4892518 - DNA, 25 bp, Homo sapien
agaggtgacctatacctggtatgac

SEQ ID NO: 4892519 - DNA, 25 bp, Homo sapien
tacctggtatgacctttagattcca

SEQ ID NO: 4892520 - DNA, 25 bp, Homo sapien
ctgtggcgacttgggacagtcccag

SEQ ID NO: 4892521 - DNA, 25 bp, Homo sapien
caacaattgtctcaagagtgaaaga

SEQ ID NO: 4892522 - DNA, 25 bp, Homo sapien
cctgaggcagtagggatgcaactgt

SEQ ID NO: 4892523 - DNA, 25 bp, Homo sapien
agacaacaattgtctcaagagtgaa

SEQ ID NO: 4892524 - DNA, 25 bp, Homo sapien
tggctgaatttgagagcaggaattg

SEQ ID NO: 4892525 - DNA, 25 bp, Homo sapien
ttggctgaatttgagagcaggaatt

SEQ ID NO: 4892526 - DNA, 25 bp, Homo sapien
ggctgaatttgagagcaggaattgt

SEQ ID NO: 4892527 - DNA, 25 bp, Homo sapien
cttttacagctgcagcatcgctgga

SEQ ID NO: 4892528 - DNA, 25 bp, Homo sapien
tggaaacggcgctcgacgatcgctg

SEQ ID NO: 4892529 - DNA, 25 bp, Homo sapien
catcgctggattatggattgagaga

SEQ ID NO: 4892530 - DNA, 25 bp, Homo sapien
tgccccgcgaggttgtggattgatt

SEQ ID NO: 4892531 - DNA, 25 bp, Homo sapien
tgcatgaagtcatccccgccccggg

SEQ ID NO: 4892532 - DNA, 25 bp, Homo sapien
cgggacggatcaccacattccgcgc

SEQ ID NO: 4892533 - DNA, 25 bp, Homo sapien
acattccgcgccagccacgggggga

SEQ ID NO: 4892534 - DNA, 25 bp, Homo sapien
ccccgggacggatcaccacattccg

SEQ ID NO: 4892535 - DNA, 25 bp, Homo sapien
gcccgccgagtgctcggtcagctcg

SEQ ID NO: 4892536 - DNA, 25 bp, Homo sapien
gccgagtgctcggtcagctcgcgcc

SEQ ID NO: 4892537 - DNA, 25 bp, Homo sapien
gagtgctcggtcagctcgcgccggc

SEQ ID NO: 4892538 - DNA, 25 bp, Homo sapien
ccgccgagtgctcggtcagctcgcg

SEQ ID NO: 4892539 - DNA, 25 bp, Homo sapien
cagtcttgaagcaggtgttttgcca

SEQ ID NO: 4892540 - DNA, 25 bp, Homo sapien
caacttataataccccagagggaag

SEQ ID NO: 4892541 - DNA, 25 bp, Homo sapien
catgatctagacataagtggtagcc

SEQ ID NO: 4892542 - DNA, 25 bp, Homo sapien
tatctcgtgaagatgtgacaggccc

SEQ ID NO: 4892543 - DNA, 25 bp, Homo sapien
aaagtccccatctgctatagttgaa

SEQ ID NO: 4892544 - DNA, 25 bp, Homo sapien
aaaataattcatgaacatttgggaa

SEQ ID NO: 4892545 - DNA, 25 bp, Homo sapien
aaaaataattcatgaacatttggga

SEQ ID NO: 4892546 - DNA, 25 bp, Homo sapien
gaaaaaataattcatgaacatttgg

SEQ ID NO: 4892547 - DNA, 25 bp, Homo sapien
aataattcatgaacatttgggaaaa

SEQ ID NO: 4892548 - DNA, 25 bp, Homo sapien
tagccaattgacttttgccaggtga

SEQ ID NO: 4892549 - DNA, 25 bp, Homo sapien
cacggtctctgtaaattcttcgggc

SEQ ID NO: 4892550 - DNA, 25 bp, Homo sapien
tgataatgagccagtgaaacgagtg

SEQ ID NO: 4892551 - DNA, 25 bp, Homo sapien
caacctcgcattacagtggacccaa

SEQ ID NO: 4892552 - DNA, 25 bp, Homo sapien
caaccagctagcaggaatttgccat

SEQ ID NO: 4892553 - DNA, 25 bp, Homo sapien
taaatggccatacaacaaagagtag

SEQ ID NO: 4892554 - DNA, 25 bp, Homo sapien
ccttagcctcaaaagcgaatgatca

SEQ ID NO: 4892555 - DNA, 25 bp, Homo sapien
gagtgtggagtctcaaaacagacca

SEQ ID NO: 4892556 - DNA, 25 bp, Homo sapien
tgagtcagtcactccaagtggaccc

SEQ ID NO: 4892557 - DNA, 25 bp, Homo sapien
cagactggacagtttggtgagcaag

SEQ ID NO: 4892558 - DNA, 25 bp, Homo sapien
tggaccccatccctaaaccttgaga

SEQ ID NO: 4892559 - DNA, 25 bp, Homo sapien
ttcgataggttcctgagcagcagtg

SEQ ID NO: 4892560 - DNA, 25 bp, Homo sapien
gaagcttaatatggcagtggttgtc

SEQ ID NO: 4892561 - DNA, 25 bp, Homo sapien
taatatattacctcagcgcacacca

SEQ ID NO: 4892562 - DNA, 25 bp, Homo sapien
agagtttcatcaggatctactaccg

SEQ ID NO: 4892563 - DNA, 25 bp, Homo sapien
ccagatgaggtaaagtgcagaaaca

SEQ ID NO: 4892564 - DNA, 25 bp, Homo sapien
cttgtttctctgcacttttttggtc

SEQ ID NO: 4892565 - DNA, 25 bp, Homo sapien
tttctctgcacttttttggtctatc

SEQ ID NO: 4892566 - DNA, 25 bp, Homo sapien
tctctgcacttttttggtctatcat

SEQ ID NO: 4892567 - DNA, 25 bp, Homo sapien
tgtttctctgcacttttttggtcta

SEQ ID NO: 4892568 - DNA, 25 bp, Homo sapien
gaggatcatgcattatatgtaatat

SEQ ID NO: 4892569 - DNA, 25 bp, Homo sapien
tgcaattagagaaatcttcacattc

SEQ ID NO: 4892570 - DNA, 25 bp, Homo sapien
tcttttatctagcaatctatcctca

SEQ ID NO: 4892571 - DNA, 25 bp, Homo sapien
attaaattcgtagaggatcatgcat

SEQ ID NO: 4892572 - DNA, 25 bp, Homo sapien
ttctgttggagatggtagagggaat

SEQ ID NO: 4892573 - DNA, 25 bp, Homo sapien
cttctgttggagatggtagagggaa

SEQ ID NO: 4892574 - DNA, 25 bp, Homo sapien
taaatgaggcaaacggtactgatga

SEQ ID NO: 4892575 - DNA, 25 bp, Homo sapien
tgtaaactctagcaaacctgggctc

SEQ ID NO: 4892576 - DNA, 25 bp, Homo sapien
caaataaactagtcatgtccccagg

SEQ ID NO: 4892577 - DNA, 25 bp, Homo sapien
tatgctaagcttacactagggattc

SEQ ID NO: 4892578 - DNA, 25 bp, Homo sapien
agtcactggtgggaactatatcccc

SEQ ID NO: 4892579 - DNA, 25 bp, Homo sapien
cacctgatagtgcatgtatttgtcc

SEQ ID NO: 4892580 - DNA, 25 bp, Homo sapien
tatattgtagatgtagagtcactgg

SEQ ID NO: 4892581 - DNA, 25 bp, Homo sapien
ttcacaagccacttaaccaaggtgc

SEQ ID NO: 4892582 - DNA, 25 bp, Homo sapien
gaattgtgagcaaacttgagaccag

SEQ ID NO: 4892583 - DNA, 25 bp, Homo sapien
tatacatatacccagtgcagctttc

SEQ ID NO: 4892584 - DNA, 25 bp, Homo sapien
tagtgtgcatatctgctactctagc

SEQ ID NO: 4892585 - DNA, 25 bp, Homo sapien
gagaccagttaatcatgcccatcat

SEQ ID NO: 4892586 - DNA, 25 bp, Homo sapien
ttatgcattgttgagctaacttgga

SEQ ID NO: 4892587 - DNA, 25 bp, Homo sapien
tattctatggaaagacacttaggtc

SEQ ID NO: 4892588 - DNA, 25 bp, Homo sapien
taatgcttagagaacaagtcttagg

SEQ ID NO: 4892589 - DNA, 25 bp, Homo sapien
aaaattaaacccttgcagtcatcaa

SEQ ID NO: 4892590 - DNA, 25 bp, Homo sapien
tatctgactgtttaaggatgacctt

SEQ ID NO: 4892591 - DNA, 25 bp, Homo sapien
gatgaccttttgtggtgttataaaa

SEQ ID NO: 4892592 - DNA, 25 bp, Homo sapien
gatttggtcatctaaccctcttcca

SEQ ID NO: 4892593 - DNA, 25 bp, Homo sapien
gttaatcttatctgactgtttaagg

SEQ ID NO: 4892594 - DNA, 25 bp, Homo sapien
cttgccgctgccatgaaaggagtgc

SEQ ID NO: 4892595 - DNA, 25 bp, Homo sapien
ttgccgctgccatgaaaggagtgct

SEQ ID NO: 4892596 - DNA, 25 bp, Homo sapien
tcttcagtgatcttcgtattccctt

SEQ ID NO: 4892597 - DNA, 25 bp, Homo sapien
ctttttgttagagttaatgtgaaag

SEQ ID NO: 4892598 - DNA, 25 bp, Homo sapien
gaagccagtaaatggcccactgtca

SEQ ID NO: 4892599 - DNA, 25 bp, Homo sapien
gttaatgtgaaaggccattcacact

SEQ ID NO: 4892600 - DNA, 25 bp, Homo sapien
ctgatgatgacgactatctcagcca

SEQ ID NO: 4892601 - DNA, 25 bp, Homo sapien
tgatgatgacgactatctcagccag

SEQ ID NO: 4892602 - DNA, 25 bp, Homo sapien
gatgatgacgactatctcagccagg

SEQ ID NO: 4892603 - DNA, 25 bp, Homo sapien
attgactatactagatctctttttt

SEQ ID NO: 4892604 - DNA, 25 bp, Homo sapien
tcattgactatactagatctctttt

SEQ ID NO: 4892605 - DNA, 25 bp, Homo sapien
ttgactatactagatctcttttttc

SEQ ID NO: 4892606 - DNA, 25 bp, Homo sapien
cattgactatactagatctcttttt

SEQ ID NO: 4892607 - DNA, 25 bp, Homo sapien
tttattatcacatttaaggtcatcc

SEQ ID NO: 4892608 - DNA, 25 bp, Homo sapien
tgtggagaccaaggtcatcattcat

SEQ ID NO: 4892609 - DNA, 25 bp, Homo sapien
ccaaggtcatcattcatcttcaatc

SEQ ID NO: 4892610 - DNA, 25 bp, Homo sapien
tattatcacatttaaggtcatccat

SEQ ID NO: 4892611 - DNA, 25 bp, Homo sapien
tcagcatgcgctgaagacttctctt

SEQ ID NO: 4892612 - DNA, 25 bp, Homo sapien
tgtatagacgacttgtacttttgct

SEQ ID NO: 4892613 - DNA, 25 bp, Homo sapien
ctgtatagacgacttgtacttttgc

SEQ ID NO: 4892614 - DNA, 25 bp, Homo sapien
gtatagacgacttgtacttttgctt

SEQ ID NO: 4892615 - DNA, 25 bp, Homo sapien
tatagacgacttgtacttttgcttt

SEQ ID NO: 4892616 - DNA, 25 bp, Homo sapien
aaggtttagaactgaacatgcacat

SEQ ID NO: 4892617 - DNA, 25 bp, Homo sapien
gagtcacaagagatattcaagctct

SEQ ID NO: 4892618 - DNA, 25 bp, Homo sapien
gaacatgcacatcaatctagcaaat

SEQ ID NO: 4892619 - DNA, 25 bp, Homo sapien
gtggagtcacaagagatattcaagc

SEQ ID NO: 4892620 - DNA, 25 bp, Homo sapien
ctgcatcttcctctgagaagatacg

SEQ ID NO: 4892621 - DNA, 25 bp, Homo sapien
gcatcttcctctgagaagatacggg

SEQ ID NO: 4892622 - DNA, 25 bp, Homo sapien
catcttcctctgagaagatacggga

SEQ ID NO: 4892623 - DNA, 25 bp, Homo sapien
tcttcctctgagaagatacgggaca

SEQ ID NO: 4892624 - DNA, 25 bp, Homo sapien
gctaccaaatatccacatagcaggg

SEQ ID NO: 4892625 - DNA, 25 bp, Homo sapien
ctaccaaatatccacatagcaggga

SEQ ID NO: 4892626 - DNA, 25 bp, Homo sapien
tatcaagacctgctaatttcaaggc

SEQ ID NO: 4892627 - DNA, 25 bp, Homo sapien
aaaatctgcatatgtagtttccaca

SEQ ID NO: 4892628 - DNA, 25 bp, Homo sapien
gaaaccaggatatcatgtattgcat

SEQ ID NO: 4892629 - DNA, 25 bp, Homo sapien
tcaaggctaattcattgctgttgcc

SEQ ID NO: 4892630 - DNA, 25 bp, Homo sapien
ccactttgttctgtagaacttcgtt

SEQ ID NO: 4892631 - DNA, 25 bp, Homo sapien
ttctgtagaacttcgttgtgcatct

SEQ ID NO: 4892632 - DNA, 25 bp, Homo sapien
tttgttctgtagaacttcgttgtgc

SEQ ID NO: 4892633 - DNA, 25 bp, Homo sapien
tagaacttcgttgtgcatcttcttc

SEQ ID NO: 4892634 - DNA, 25 bp, Homo sapien
cagaggtagggaaaagtctgcctgc

SEQ ID NO: 4892635 - DNA, 25 bp, Homo sapien
gagcaggttcctgcaatgcagcaca

SEQ ID NO: 4892636 - DNA, 25 bp, Homo sapien
gaatcatcatctaggtcggagctac

SEQ ID NO: 4892637 - DNA, 25 bp, Homo sapien
cattttcaggtgtggtcgagggtca

SEQ ID NO: 4892638 - DNA, 25 bp, Homo sapien
tgcagacaccaaacagactgaattc

SEQ ID NO: 4892639 - DNA, 25 bp, Homo sapien
cagtctgtgcagacaccaaacagac

SEQ ID NO: 4892640 - DNA, 25 bp, Homo sapien
tgtgcagacaccaaacagactgaat

SEQ ID NO: 4892641 - DNA, 25 bp, Homo sapien
gtctgtgcagacaccaaacagactg

SEQ ID NO: 4892642 - DNA, 25 bp, Homo sapien
taagaagcacgatgttaaaacacag

SEQ ID NO: 4892643 - DNA, 25 bp, Homo sapien
tctgagagggctgaaaaaagacatg

SEQ ID NO: 4892644 - DNA, 25 bp, Homo sapien
tgatttcataatactgaccagaggg

SEQ ID NO: 4892645 - DNA, 25 bp, Homo sapien
gaccagagggattacacagctcaca

SEQ ID NO: 4892646 - DNA, 25 bp, Homo sapien
tccagggagccttgagaacggcaat

SEQ ID NO: 4892647 - DNA, 25 bp, Homo sapien
tcgttctgctctcggaaaggctcac

SEQ ID NO: 4892648 - DNA, 25 bp, Homo sapien
gaagggctgagtttctggcacaacc

SEQ ID NO: 4892649 - DNA, 25 bp, Homo sapien
taaaagttcccttacagctctgcag

SEQ ID NO: 4892650 - DNA, 25 bp, Homo sapien
tttttggactgaagaacgtgcctgg

SEQ ID NO: 4892651 - DNA, 25 bp, Homo sapien
cttcattatgagcttcaggagggca

SEQ ID NO: 4892652 - DNA, 25 bp, Homo sapien
gattcaatgactatggcagagacga

SEQ ID NO: 4892653 - DNA, 25 bp, Homo sapien
gaacttttgttcaaggcctgcaaga

SEQ ID NO: 4892654 - DNA, 25 bp, Homo sapien
gactgaatcatatctagcagcttga

SEQ ID NO: 4892655 - DNA, 25 bp, Homo sapien
ttgtaccacctgttcctcgccaata

SEQ ID NO: 4892656 - DNA, 25 bp, Homo sapien
gcattatttatgcatccctcctctc

SEQ ID NO: 4892657 - DNA, 25 bp, Homo sapien
gctccatacttccaacaaactttag

SEQ ID NO: 4892658 - DNA, 25 bp, Homo sapien
tagtggaactgggtaccacccacca

SEQ ID NO: 4892659 - DNA, 25 bp, Homo sapien
tcatggtggcagcagttagtggaac

SEQ ID NO: 4892660 - DNA, 25 bp, Homo sapien
gaattccactggatagacagatgac

SEQ ID NO: 4892661 - DNA, 25 bp, Homo sapien
tcttaggagctatcagtcaacattc

SEQ ID NO: 4892662 - DNA, 25 bp, Homo sapien
taattccaataaccataccactata

SEQ ID NO: 4892663 - DNA, 25 bp, Homo sapien
ctataaaatactcctgtaaggtgca

SEQ ID NO: 4892664 - DNA, 25 bp, Homo sapien
taaataattccaataaccataccac

SEQ ID NO: 4892665 - DNA, 25 bp, Homo sapien
ctcctgtaaggtgcaaaagttgaaa

SEQ ID NO: 4892666 - DNA, 25 bp, Homo sapien
cgaagattttaggtcacaaggaggt

SEQ ID NO: 4892667 - DNA, 25 bp, Homo sapien
tttcagtgagttcataaagctgcat

SEQ ID NO: 4892668 - DNA, 25 bp, Homo sapien
caagagccgaagattttaggtcaca

SEQ ID NO: 4892669 - DNA, 25 bp, Homo sapien
cacaaggaggtactatttcagtgag

SEQ ID NO: 4892670 - DNA, 25 bp, Homo sapien
tttctcaatccctcattctctttac

SEQ ID NO: 4892671 - DNA, 25 bp, Homo sapien
tttctcaaggcaaaaatttgaattg

SEQ ID NO: 4892672 - DNA, 25 bp, Homo sapien
attggctgtttgcttaacatcagcc

SEQ ID NO: 4892673 - DNA, 25 bp, Homo sapien
catcagccttcaatgtaactttgta

SEQ ID NO: 4892674 - DNA, 25 bp, Homo sapien
gacaattatagctgaatggggtgag

SEQ ID NO: 4892675 - DNA, 25 bp, Homo sapien
tcagacaattatagctgaatggggt

SEQ ID NO: 4892676 - DNA, 25 bp, Homo sapien
cagacaattatagctgaatggggtg

SEQ ID NO: 4892677 - DNA, 25 bp, Homo sapien
caattatagctgaatggggtgagga

SEQ ID NO: 4892678 - DNA, 25 bp, Homo sapien
catcctactccatgcgtttaactta

SEQ ID NO: 4892679 - DNA, 25 bp, Homo sapien
ttaacttaaaggcaatcatgtcagg

SEQ ID NO: 4892680 - DNA, 25 bp, Homo sapien
taaaggcaatcatgtcagggtcacc

SEQ ID NO: 4892681 - DNA, 25 bp, Homo sapien
tactccatgcgtttaacttaaaggc

SEQ ID NO: 4892682 - DNA, 25 bp, Homo sapien
tatgctgcactgaagggaataaagt

SEQ ID NO: 4892683 - DNA, 25 bp, Homo sapien
aaaatgggcgatctgactgactacg

SEQ ID NO: 4892684 - DNA, 25 bp, Homo sapien
tggtccgtcctcatcattgcgagaa

SEQ ID NO: 4892685 - DNA, 25 bp, Homo sapien
caatgaatgaaggtcttcttaaggg

SEQ ID NO: 4892686 - DNA, 25 bp, Homo sapien
tatagatagatgttcgctggctgga

SEQ ID NO: 4892687 - DNA, 25 bp, Homo sapien
tcgctggctggaggtcttatccaag

SEQ ID NO: 4892688 - DNA, 25 bp, Homo sapien
tagatgttcgctggctggaggtctt

SEQ ID NO: 4892689 - DNA, 25 bp, Homo sapien
tcatatagatagatgttcgctggct

SEQ ID NO: 4892690 - DNA, 25 bp, Homo sapien
tttgatttgttagcccagtgtttac

SEQ ID NO: 4892691 - DNA, 25 bp, Homo sapien
tctgggactcccttttgtcggcatt

SEQ ID NO: 4892692 - DNA, 25 bp, Homo sapien
ttaccgcatcactggcattctttag

SEQ ID NO: 4892693 - DNA, 25 bp, Homo sapien
catttcccgataatgagtttccttc

SEQ ID NO: 4892694 - DNA, 25 bp, Homo sapien
gaagcttccccaattactgccagat

SEQ ID NO: 4892695 - DNA, 25 bp, Homo sapien
agaaaccagttctctgcagttgcag

SEQ ID NO: 4892696 - DNA, 25 bp, Homo sapien
cagccgtgtactttctcagaagctt

SEQ ID NO: 4892697 - DNA, 25 bp, Homo sapien
taagaaaccagttctctgcagttgc

SEQ ID NO: 4892698 - DNA, 25 bp, Homo sapien
aaacatatcgacagtcccttcttgg

SEQ ID NO: 4892699 - DNA, 25 bp, Homo sapien
aatacacttatcttgggccaatgtg

SEQ ID NO: 4892700 - DNA, 25 bp, Homo sapien
tggatggcctcaaacatatcgacag

SEQ ID NO: 4892701 - DNA, 25 bp, Homo sapien
gaatgagagtaatacacttatcttg

SEQ ID NO: 4892702 - DNA, 25 bp, Homo sapien
gccaagtgttttcggatgtatcttt

SEQ ID NO: 4892703 - DNA, 25 bp, Homo sapien
ggacagccaagtgttttcggatgta

SEQ ID NO: 4892704 - DNA, 25 bp, Homo sapien
cagccaagtgttttcggatgtatct

SEQ ID NO: 4892705 - DNA, 25 bp, Homo sapien
ccaggacagccaagtgttttcggat

SEQ ID NO: 4892706 - DNA, 25 bp, Homo sapien
cactcacatgaaggtatgtttaaac

SEQ ID NO: 4892707 - DNA, 25 bp, Homo sapien
cacatgaaggtatgtttaaacaagc

SEQ ID NO: 4892708 - DNA, 25 bp, Homo sapien
tccactcacatgaaggtatgtttaa

SEQ ID NO: 4892709 - DNA, 25 bp, Homo sapien
ctcacatgaaggtatgtttaaacaa

SEQ ID NO: 4892710 - DNA, 25 bp, Homo sapien
ggcgaggttcctgcggtctcctcct

SEQ ID NO: 4892711 - DNA, 25 bp, Homo sapien
gcggaggcgaggttcctgcggtctc

SEQ ID NO: 4892712 - DNA, 25 bp, Homo sapien
gccgggagccgcttcaggttgcaat

SEQ ID NO: 4892713 - DNA, 25 bp, Homo sapien
ccgtctctccgggttactctccagg

SEQ ID NO: 4892714 - DNA, 25 bp, Homo sapien
tcccacccgctaacattccgagctc

SEQ ID NO: 4892715 - DNA, 25 bp, Homo sapien
ctcccacccgctaacattccgagct

SEQ ID NO: 4892716 - DNA, 25 bp, Homo sapien
cccacccgctaacattccgagctcc

SEQ ID NO: 4892717 - DNA, 25 bp, Homo sapien
ccacccgctaacattccgagctccc

SEQ ID NO: 4892718 - DNA, 25 bp, Homo sapien
gcgccacctcctcgagctcagcgag

SEQ ID NO: 4892719 - DNA, 25 bp, Homo sapien
ccacctcctcgagctcagcgagact

SEQ ID NO: 4892720 - DNA, 25 bp, Homo sapien
tcctcgagctcagcgagactccttc

SEQ ID NO: 4892721 - DNA, 25 bp, Homo sapien
gctcagcgagactccttcagcagcg

SEQ ID NO: 4892722 - DNA, 25 bp, Homo sapien
gaaagcccagttgaagaccgtctga

SEQ ID NO: 4892723 - DNA, 25 bp, Homo sapien
cactcaggagtcaagcaagatcaga

SEQ ID NO: 4892724 - DNA, 25 bp, Homo sapien
ggcagcctggtagcgttagctccac

SEQ ID NO: 4892725 - DNA, 25 bp, Homo sapien
gctgcagcacaaagtggcctgttgg

SEQ ID NO: 4892726 - DNA, 25 bp, Homo sapien
taggagatgctctgacatccctccg

SEQ ID NO: 4892727 - DNA, 25 bp, Homo sapien
caaatcctccgggtaatctattgta

SEQ ID NO: 4892728 - DNA, 25 bp, Homo sapien
aaagctggccagtgacacttcctta

SEQ ID NO: 4892729 - DNA, 25 bp, Homo sapien
tattgtaccggctctaaagctggcc

SEQ ID NO: 4892730 - DNA, 25 bp, Homo sapien
tgactgaaaaagttaccggctacca

SEQ ID NO: 4892731 - DNA, 25 bp, Homo sapien
tggcatgcaacaatacacaagactc

SEQ ID NO: 4892732 - DNA, 25 bp, Homo sapien
taagctgggccctataacatcataa

SEQ ID NO: 4892733 - DNA, 25 bp, Homo sapien
caactgaatccgtgtaaactaggag

SEQ ID NO: 4892734 - DNA, 25 bp, Homo sapien
ctaagtaatattaacacaaggacag

SEQ ID NO: 4892735 - DNA, 25 bp, Homo sapien
tagaaaaaccacgtaccaagcatgt

SEQ ID NO: 4892736 - DNA, 25 bp, Homo sapien
caattattgctctcataaagctaac

SEQ ID NO: 4892737 - DNA, 25 bp, Homo sapien
tagatctaagaaccaaatcaactcc

SEQ ID NO: 4892738 - DNA, 25 bp, Homo sapien
tcttccacaaatcttgcaaggtaac

SEQ ID NO: 4892739 - DNA, 25 bp, Homo sapien
tgttcttccacaaatcttgcaaggt

SEQ ID NO: 4892740 - DNA, 25 bp, Homo sapien
caaatcttgcaaggtaacaattctc

SEQ ID NO: 4892741 - DNA, 25 bp, Homo sapien
tccacaaatcttgcaaggtaacaat

SEQ ID NO: 4892742 - DNA, 25 bp, Homo sapien
tctctgtctgcttgaatcaaaagtc

SEQ ID NO: 4892743 - DNA, 25 bp, Homo sapien
ctctgtctgcttgaatcaaaagtct

SEQ ID NO: 4892744 - DNA, 25 bp, Homo sapien
ctctctgtctgcttgaatcaaaagt

SEQ ID NO: 4892745 - DNA, 25 bp, Homo sapien
ctactatcaccatgttacagtgaac

SEQ ID NO: 4892746 - DNA, 25 bp, Homo sapien
gttacagtgaacagaagcataatta

SEQ ID NO: 4892747 - DNA, 25 bp, Homo sapien
ggataatcttatgtaatccctacaa

SEQ ID NO: 4892748 - DNA, 25 bp, Homo sapien
taatattcattgaaatcaccatgga

SEQ ID NO: 4892749 - DNA, 25 bp, Homo sapien
gaggcccagggtagctatacaaact

SEQ ID NO: 4892750 - DNA, 25 bp, Homo sapien
tcctggtacagctatttgcaagaag

SEQ ID NO: 4892751 - DNA, 25 bp, Homo sapien
ccaaacagtgttccgagagcagcaa

SEQ ID NO: 4892752 - DNA, 25 bp, Homo sapien
taaggcgtctctgtgtaattacacc

SEQ ID NO: 4892753 - DNA, 25 bp, Homo sapien
ctttgggtagtcttttactatgcat

SEQ ID NO: 4892754 - DNA, 25 bp, Homo sapien
caatctgtcttttgaccttgtcttt

SEQ ID NO: 4892755 - DNA, 25 bp, Homo sapien
aatctgtcttttgaccttgtctttg

SEQ ID NO: 4892756 - DNA, 25 bp, Homo sapien
cctttagctgctcttatggtagcaa

SEQ ID NO: 4892757 - DNA, 25 bp, Homo sapien
gaagtttgccaccctctttgagggc

SEQ ID NO: 4892758 - DNA, 25 bp, Homo sapien
ctctttgagggcctgatcaaggcct

SEQ ID NO: 4892759 - DNA, 25 bp, Homo sapien
ctcttatggtagcaatgaattcttc

SEQ ID NO: 4892760 - DNA, 25 bp, Homo sapien
cgtgctgcctgttctttacagaaat

SEQ ID NO: 4892761 - DNA, 25 bp, Homo sapien
ttccctttattactaatacgtgctg

SEQ ID NO: 4892762 - DNA, 25 bp, Homo sapien
ctgtgtccgagaagttggttttcct

SEQ ID NO: 4892763 - DNA, 25 bp, Homo sapien
cctttattactaatacgtgctgcct

SEQ ID NO: 4892764 - DNA, 25 bp, Homo sapien
gctgcggtaatcgtgaagatcctga

SEQ ID NO: 4892765 - DNA, 25 bp, Homo sapien
tgccagcgccacttggctgcggtaa

SEQ ID NO: 4892766 - DNA, 25 bp, Homo sapien
ctacaacagttttgccagcgccact

SEQ ID NO: 4892767 - DNA, 25 bp, Homo sapien
tgactttttaagtgcgggtggctta

SEQ ID NO: 4892768 - DNA, 25 bp, Homo sapien
caagttgcttttcggctatcattac

SEQ ID NO: 4892769 - DNA, 25 bp, Homo sapien
tcaagttgcttttcggctatcatta

SEQ ID NO: 4892770 - DNA, 25 bp, Homo sapien
tgagagggagataaggtctgaagtt

SEQ ID NO: 4892771 - DNA, 25 bp, Homo sapien
tgaggggctgctatccctttatgag

SEQ ID NO: 4892772 - DNA, 25 bp, Homo sapien
gagctgctacttgaagacactttac

SEQ ID NO: 4892773 - DNA, 25 bp, Homo sapien
aaagagctgctacttgaagacactt

SEQ ID NO: 4892774 - DNA, 25 bp, Homo sapien
atagcaagcccagaagtaagaccac

SEQ ID NO: 4892775 - DNA, 25 bp, Homo sapien
tagcaagcccagaagtaagaccaca

SEQ ID NO: 4892776 - DNA, 25 bp, Homo sapien
gcaagcccagaagtaagaccacaca

SEQ ID NO: 4892777 - DNA, 25 bp, Homo sapien
aagcccagaagtaagaccacacacc

SEQ ID NO: 4892778 - DNA, 25 bp, Homo sapien
cctttttcagaccagcaaatgctgt

SEQ ID NO: 4892779 - DNA, 25 bp, Homo sapien
tccaactcaaaatttcatatcaggc

SEQ ID NO: 4892780 - DNA, 25 bp, Homo sapien
cacacctggctaacattcttaaaga

SEQ ID NO: 4892781 - DNA, 25 bp, Homo sapien
taggaatttgttaccaccagacctg

SEQ ID NO: 4892782 - DNA, 25 bp, Homo sapien
agcaggacctcacaactgggacctc

SEQ ID NO: 4892783 - DNA, 25 bp, Homo sapien
atccctgctggtattctctggccca

SEQ ID NO: 4892784 - DNA, 25 bp, Homo sapien
tgggacgaaagtggtaacccagcac

SEQ ID NO: 4892785 - DNA, 25 bp, Homo sapien
cagctgctctaggaaagtgtggcca

SEQ ID NO: 4892786 - DNA, 25 bp, Homo sapien
cttgggtcaagagacgcccttgtga

SEQ ID NO: 4892787 - DNA, 25 bp, Homo sapien
caacggatctttgcaacccttgggt

SEQ ID NO: 4892788 - DNA, 25 bp, Homo sapien
tgggaaaccacgcttctccaacgga

SEQ ID NO: 4892789 - DNA, 25 bp, Homo sapien
ccaccttggagcgacacagagcaag

SEQ ID NO: 4892790 - DNA, 25 bp, Homo sapien
tgacaaagagatacatgcccaaagc

SEQ ID NO: 4892791 - DNA, 25 bp, Homo sapien
cagattatgatgcagaaacctagtc

SEQ ID NO: 4892792 - DNA, 25 bp, Homo sapien
tgtcaaggtctaaccagagtcacag

SEQ ID NO: 4892793 - DNA, 25 bp, Homo sapien
tattgttacctaacatggaggccaa

SEQ ID NO: 4892794 - DNA, 25 bp, Homo sapien
tgagcattacacctgaccaaatgtc

SEQ ID NO: 4892795 - DNA, 25 bp, Homo sapien
catgccaatagattaacagatgagg

SEQ ID NO: 4892796 - DNA, 25 bp, Homo sapien
gatgataattctgtgacatgccaat

SEQ ID NO: 4892797 - DNA, 25 bp, Homo sapien
ctggtatgcctgattaaagtggact

SEQ ID NO: 4892798 - DNA, 25 bp, Homo sapien
gttagctccctatccaaaatctcca

SEQ ID NO: 4892799 - DNA, 25 bp, Homo sapien
tctggaattctaggttatcacaagc

SEQ ID NO: 4892800 - DNA, 25 bp, Homo sapien
tatccacataagaaaccgaggtctg

SEQ ID NO: 4892801 - DNA, 25 bp, Homo sapien
catacctctacttttgatcctaaat

SEQ ID NO: 4892802 - DNA, 25 bp, Homo sapien
ggcactgtctgattttgtatcactg

SEQ ID NO: 4892803 - DNA, 25 bp, Homo sapien
gtatcactgtcatacaacctttgca

SEQ ID NO: 4892804 - DNA, 25 bp, Homo sapien
caagtcttcccgttcgaagtggagg

SEQ ID NO: 4892805 - DNA, 25 bp, Homo sapien
gaagtggagggcctaacttgtccat

SEQ ID NO: 4892806 - DNA, 25 bp, Homo sapien
taacatctagaatggccttgatcac

SEQ ID NO: 4892807 - DNA, 25 bp, Homo sapien
tgaaaaacggctcacagcacaaact

SEQ ID NO: 4892808 - DNA, 25 bp, Homo sapien
cgagcttgactctttggcagtgtca

SEQ ID NO: 4892809 - DNA, 25 bp, Homo sapien
gttcaccatcggcttatctaagaga

SEQ ID NO: 4892810 - DNA, 25 bp, Homo sapien
taaattgtgaggctactacgtggcc

SEQ ID NO: 4892811 - DNA, 25 bp, Homo sapien
tatgaagccagatactacacatgcc

SEQ ID NO: 4892812 - DNA, 25 bp, Homo sapien
tacgtggccagagtagtacttgaac

SEQ ID NO: 4892813 - DNA, 25 bp, Homo sapien
caaggtgaccctgctagtgtgttcc

SEQ ID NO: 4892814 - DNA, 25 bp, Homo sapien
tgggctatccgaaatcagagggact

SEQ ID NO: 4892815 - DNA, 25 bp, Homo sapien
tgatataacactaaaagcagaggct

SEQ ID NO: 4892816 - DNA, 25 bp, Homo sapien
agagggacttctggttggatcatcc

SEQ ID NO: 4892817 - DNA, 25 bp, Homo sapien
tcaaatgctaatgctactgacagct

SEQ ID NO: 4892818 - DNA, 25 bp, Homo sapien
aagaatacttagaagcttcagagaa

SEQ ID NO: 4892819 - DNA, 25 bp, Homo sapien
gcttcagagaagttcaaaagattaa

SEQ ID NO: 4892820 - DNA, 25 bp, Homo sapien
tactaatactattctgatagtaaat

SEQ ID NO: 4892821 - DNA, 25 bp, Homo sapien
ttctcaaattacctattcacatgac

SEQ ID NO: 4892822 - DNA, 25 bp, Homo sapien
ggctatgtagctctcagtatatgtt

SEQ ID NO: 4892823 - DNA, 25 bp, Homo sapien
tggaatttcggggtttgacattagc

SEQ ID NO: 4892824 - DNA, 25 bp, Homo sapien
gatttcttgccaaactaggtggtgt

SEQ ID NO: 4892825 - DNA, 25 bp, Homo sapien
tcttgccaaactaggtggtgtggaa

SEQ ID NO: 4892826 - DNA, 25 bp, Homo sapien
attctacagggtatttagtcccaca

SEQ ID NO: 4892827 - DNA, 25 bp, Homo sapien
agggtatttagtcccacactcatgg

SEQ ID NO: 4892828 - DNA, 25 bp, Homo sapien
tatttccaccattaagggaagatgc

SEQ ID NO: 4892829 - DNA, 25 bp, Homo sapien
catagaatcattcttcgaatgccac

SEQ ID NO: 4892830 - DNA, 25 bp, Homo sapien
ttaactggaaatggtatttcgagta

SEQ ID NO: 4892831 - DNA, 25 bp, Homo sapien
cacaaactaactagaggatgtgctc

SEQ ID NO: 4892832 - DNA, 25 bp, Homo sapien
gatgtgctctagctgtccaagcagc

SEQ ID NO: 4892833 - DNA, 25 bp, Homo sapien
atggtatttcgagtatttttagcac

SEQ ID NO: 4892834 - DNA, 25 bp, Homo sapien
tacttatcctaaagcttgaagggct

SEQ ID NO: 4892835 - DNA, 25 bp, Homo sapien
tctgaagataggcaccaataataca

SEQ ID NO: 4892836 - DNA, 25 bp, Homo sapien
gaagggctaagcactagagtatgag

SEQ ID NO: 4892837 - DNA, 25 bp, Homo sapien
catgctctacaggagtgaccttaac

SEQ ID NO: 4892838 - DNA, 25 bp, Homo sapien
taaaactatcttcacgggttatgga

SEQ ID NO: 4892839 - DNA, 25 bp, Homo sapien
tattaagtttgtaactcctgcccaa

SEQ ID NO: 4892840 - DNA, 25 bp, Homo sapien
ggcaatctactactaactactatga

SEQ ID NO: 4892841 - DNA, 25 bp, Homo sapien
cagtgggtccttaatgtgacgtgaa

SEQ ID NO: 4892842 - DNA, 25 bp, Homo sapien
cacatagggtgtggtttctatacca

SEQ ID NO: 4892843 - DNA, 25 bp, Homo sapien
aactagcttaagtagatcacaggac

SEQ ID NO: 4892844 - DNA, 25 bp, Homo sapien
tcttagttaaagatcacacataggg

SEQ ID NO: 4892845 - DNA, 25 bp, Homo sapien
aaaattatacctctagttgacaggc

SEQ ID NO: 4892846 - DNA, 25 bp, Homo sapien
ccagtggcaaactaggtagatcgtt

SEQ ID NO: 4892847 - DNA, 25 bp, Homo sapien
cagtgatagatccagttccattagg

SEQ ID NO: 4892848 - DNA, 25 bp, Homo sapien
gagcttcagcttaagtacaaacgga

SEQ ID NO: 4892849 - DNA, 25 bp, Homo sapien
taatagtgccaaagtgctaccagtg

SEQ ID NO: 4892850 - DNA, 25 bp, Homo sapien
tcaagtggaatagcttgtcttccaa

SEQ ID NO: 4892851 - DNA, 25 bp, Homo sapien
cagctcaagtggaatagcttgtctt

SEQ ID NO: 4892852 - DNA, 25 bp, Homo sapien
gaatagcttgtcttccaatgtacag

SEQ ID NO: 4892853 - DNA, 25 bp, Homo sapien
gtggaatagcttgtcttccaatgta

SEQ ID NO: 4892854 - DNA, 25 bp, Homo sapien
tttcccacgcaaccagtgagtttgg

SEQ ID NO: 4892855 - DNA, 25 bp, Homo sapien
gttggattctgagctcctagctctt

SEQ ID NO: 4892856 - DNA, 25 bp, Homo sapien
gagcaggaacaagggccaaatggta

SEQ ID NO: 4892857 - DNA, 25 bp, Homo sapien
aagtggagatgcagatcagagatgc

SEQ ID NO: 4892858 - DNA, 25 bp, Homo sapien
ggcatagaggcccacagatgtacca

SEQ ID NO: 4892859 - DNA, 25 bp, Homo sapien
gaatagggcaactctcctaagtgca

SEQ ID NO: 4892860 - DNA, 25 bp, Homo sapien
tctatgccaggaattacaaccacag

SEQ ID NO: 4892861 - DNA, 25 bp, Homo sapien
taagtgcaactaattaacaggctgg

SEQ ID NO: 4892862 - DNA, 25 bp, Homo sapien
cattttcgtgtgtgtgatggtgact

SEQ ID NO: 4892863 - DNA, 25 bp, Homo sapien
tatttagtgacatccctggtctgca

SEQ ID NO: 4892864 - DNA, 25 bp, Homo sapien
tagtctattgccctgaagagttgca

SEQ ID NO: 4892865 - DNA, 25 bp, Homo sapien
tactaccacttgaaaccattgctct

SEQ ID NO: 4892866 - DNA, 25 bp, Homo sapien
taacgtaaagattaatgcatcttgc

SEQ ID NO: 4892867 - DNA, 25 bp, Homo sapien
tgccatgaaaaatcttaacgtaaag

SEQ ID NO: 4892868 - DNA, 25 bp, Homo sapien
ctaatctgttcacagccaaataggg

SEQ ID NO: 4892869 - DNA, 25 bp, Homo sapien
tactaggattgagactaatctgttc

SEQ ID NO: 4892870 - DNA, 25 bp, Homo sapien
aagtaaccattatctaccccgtcat

SEQ ID NO: 4892871 - DNA, 25 bp, Homo sapien
cagcatgatcttccagaaaattaca

SEQ ID NO: 4892872 - DNA, 25 bp, Homo sapien
gtcttctagtagaaccagcatgatc

SEQ ID NO: 4892873 - DNA, 25 bp, Homo sapien
tcatgtgaggtaaaagtcttctagt

SEQ ID NO: 4892874 - DNA, 25 bp, Homo sapien
gaagaagttcagcttgaggagcatc

SEQ ID NO: 4892875 - DNA, 25 bp, Homo sapien
taacatattctagaaatggtccaaa

SEQ ID NO: 4892876 - DNA, 25 bp, Homo sapien
tcttataacatattctagaaatggt

SEQ ID NO: 4892877 - DNA, 25 bp, Homo sapien
gaagttcagcttgaggagcatccaa

SEQ ID NO: 4892878 - DNA, 25 bp, Homo sapien
ttatgaatgacttaataaggcagaa

SEQ ID NO: 4892879 - DNA, 25 bp, Homo sapien
gacttaataaggcagaatacttaaa

SEQ ID NO: 4892880 - DNA, 25 bp, Homo sapien
actactagacattattagataaatt

SEQ ID NO: 4892881 - DNA, 25 bp, Homo sapien
aatacttaaatggatctgactaaac

SEQ ID NO: 4892882 - DNA, 25 bp, Homo sapien
caaatagattagatgagctgaaggc

SEQ ID NO: 4892883 - DNA, 25 bp, Homo sapien
gaattttcttcatgagccaggcacg

SEQ ID NO: 4892884 - DNA, 25 bp, Homo sapien
taggcagacctacaaaattatggat

SEQ ID NO: 4892885 - DNA, 25 bp, Homo sapien
caaacaactggaggagcaatgaaga

SEQ ID NO: 4892886 - DNA, 25 bp, Homo sapien
caatggattatacttaggtgagtcg

SEQ ID NO: 4892887 - DNA, 25 bp, Homo sapien
actaatgctatagtgtcttgattac

SEQ ID NO: 4892888 - DNA, 25 bp, Homo sapien
tttgttgaaaagagactgctccatt

SEQ ID NO: 4892889 - DNA, 25 bp, Homo sapien
aattgagtggtgtcagtcctctaac

SEQ ID NO: 4892890 - DNA, 25 bp, Homo sapien
gtcaaagatcagattgttgtagatg

SEQ ID NO: 4892891 - DNA, 25 bp, Homo sapien
tcaaagatcagattgttgtagatgt

SEQ ID NO: 4892892 - DNA, 25 bp, Homo sapien
tgttgtagatgtgtggcattatttc

SEQ ID NO: 4892893 - DNA, 25 bp, Homo sapien
atcagattgttgtagatgtgtggca

SEQ ID NO: 4892894 - DNA, 25 bp, Homo sapien
catgggctttgtaaccaggcaaacc

SEQ ID NO: 4892895 - DNA, 25 bp, Homo sapien
cattacttatatgacaaattcgggt

SEQ ID NO: 4892896 - DNA, 25 bp, Homo sapien
tcgggtaatagaaaaagcatgggct

SEQ ID NO: 4892897 - DNA, 25 bp, Homo sapien
cagtatttgcatgctagccctgcca

SEQ ID NO: 4892898 - DNA, 25 bp, Homo sapien
ttgccaaggcgttgagagatcatct

SEQ ID NO: 4892899 - DNA, 25 bp, Homo sapien
aactcatggttctagctcccagtcg

SEQ ID NO: 4892900 - DNA, 25 bp, Homo sapien
ttaccagattaggtggacccacagg

SEQ ID NO: 4892901 - DNA, 25 bp, Homo sapien
tacagcagacggagcagaaagagac

SEQ ID NO: 4892902 - DNA, 25 bp, Homo sapien
tcagataaatgtgcacgtggaagtc

SEQ ID NO: 4892903 - DNA, 25 bp, Homo sapien
tattagccaattcagataaatgtgc

SEQ ID NO: 4892904 - DNA, 25 bp, Homo sapien
gacgaatagtttgatttattagcca

SEQ ID NO: 4892905 - DNA, 25 bp, Homo sapien
gcacgtggaagtcatagttaaatat

SEQ ID NO: 4892906 - DNA, 25 bp, Homo sapien
tatcttgccaaattgctctgatggg

SEQ ID NO: 4892907 - DNA, 25 bp, Homo sapien
tctccactgagtacgacgttagctg

SEQ ID NO: 4892908 - DNA, 25 bp, Homo sapien
tctaatctagctatctgggttttcc

SEQ ID NO: 4892909 - DNA, 25 bp, Homo sapien
catccgttaggatgatcatgtggtt

SEQ ID NO: 4892910 - DNA, 25 bp, Homo sapien
tgctctgtccaataccatacgtggg

SEQ ID NO: 4892911 - DNA, 25 bp, Homo sapien
tgttagaaccctcctatggcaatgg

SEQ ID NO: 4892912 - DNA, 25 bp, Homo sapien
tatcaagaacttatcccagcacgtg

SEQ ID NO: 4892913 - DNA, 25 bp, Homo sapien
ggaaggccccattaacgtatagctg

SEQ ID NO: 4892914 - DNA, 25 bp, Homo sapien
atcaaggtttagctctctaggaaag

SEQ ID NO: 4892915 - DNA, 25 bp, Homo sapien
gatgagggtcctgctatcaaggttt

SEQ ID NO: 4892916 - DNA, 25 bp, Homo sapien
cataggatgagggtcctgctatcaa

SEQ ID NO: 4892917 - DNA, 25 bp, Homo sapien
tcaaggtttagctctctaggaaaga

SEQ ID NO: 4892918 - DNA, 25 bp, Homo sapien
aacataggtgttatttccgttgtcc

SEQ ID NO: 4892919 - DNA, 25 bp, Homo sapien
ggacaacggaaataacacctatgtt

SEQ ID NO: 4892920 - DNA, 25 bp, Homo sapien
ctaacactttgtttcccgctaggat

SEQ ID NO: 4892921 - DNA, 25 bp, Homo sapien
gatcctgtaagcacaggacctgatt

SEQ ID NO: 4892922 - DNA, 25 bp, Homo sapien
cccgctaggatttgaaggcttttct

SEQ ID NO: 4892923 - DNA, 25 bp, Homo sapien
caagccctggtgattgatcctgtaa

SEQ ID NO: 4892924 - DNA, 25 bp, Homo sapien
tatacacctagttaaaatgcacagt

SEQ ID NO: 4892925 - DNA, 25 bp, Homo sapien
cctgacttcagtcaagtgtgttggg

SEQ ID NO: 4892926 - DNA, 25 bp, Homo sapien
tgttgtgacaagatcctacttatgg

SEQ ID NO: 4892927 - DNA, 25 bp, Homo sapien
ggacagctcgcagccttgtgaagca

SEQ ID NO: 4892928 - DNA, 25 bp, Homo sapien
agatccactcccatcatatattaag

SEQ ID NO: 4892929 - DNA, 25 bp, Homo sapien
tcagtccaagctttgaacttcttag

SEQ ID NO: 4892930 - DNA, 25 bp, Homo sapien
tcttcaaaatcgtggctgatcagaa

SEQ ID NO: 4892931 - DNA, 25 bp, Homo sapien
caaaatcgtggctgatcagaatttc

SEQ ID NO: 4892932 - DNA, 25 bp, Homo sapien
ctggctttaagattaagatgatcat

SEQ ID NO: 4892933 - DNA, 25 bp, Homo sapien
aatctggctttaagattaagatgat

SEQ ID NO: 4892934 - DNA, 25 bp, Homo sapien
tctggctttaagattaagatgatca

SEQ ID NO: 4892935 - DNA, 25 bp, Homo sapien
atctggctttaagattaagatgatc

SEQ ID NO: 4892936 - DNA, 25 bp, Homo sapien
aatggaattgtgatgtccagtcact

SEQ ID NO: 4892937 - DNA, 25 bp, Homo sapien
tccagtcactagcttgagaaccaca

SEQ ID NO: 4892938 - DNA, 25 bp, Homo sapien
gatactggacttgatggtgtcctag

SEQ ID NO: 4892939 - DNA, 25 bp, Homo sapien
tgtcgtaagaattgagcgaactcct

SEQ ID NO: 4892940 - DNA, 25 bp, Homo sapien
attcccctcactctgagtgggacca

SEQ ID NO: 4892941 - DNA, 25 bp, Homo sapien
cattcccctcactctgagtgggacc

SEQ ID NO: 4892942 - DNA, 25 bp, Homo sapien
gcattcccctcactctgagtgggac

SEQ ID NO: 4892943 - DNA, 25 bp, Homo sapien
ttcccctcactctgagtgggaccat

SEQ ID NO: 4892944 - DNA, 25 bp, Homo sapien
tcaatggggatctctcattacagtt

SEQ ID NO: 4892945 - DNA, 25 bp, Homo sapien
gacagcaaaggtgctaagacactgg

SEQ ID NO: 4892946 - DNA, 25 bp, Homo sapien
ggattttaatttggtcttctggctc

SEQ ID NO: 4892947 - DNA, 25 bp, Homo sapien
ggaatgtctgtcatcaatggggatc

SEQ ID NO: 4892948 - DNA, 25 bp, Homo sapien
gaatacaagggaggcacaaattggg

SEQ ID NO: 4892949 - DNA, 25 bp, Homo sapien
tgctcctcatgtgaatatacttctg

SEQ ID NO: 4892950 - DNA, 25 bp, Homo sapien
ggatagcttctctcccaaggatctt

SEQ ID NO: 4892951 - DNA, 25 bp, Homo sapien
tacttctgatgaaaatatcccatca

SEQ ID NO: 4892952 - DNA, 25 bp, Homo sapien
ccttataaaaccacctggcgcggtg

SEQ ID NO: 4892953 - DNA, 25 bp, Homo sapien
ttataaaaccacctggcgcggtggc

SEQ ID NO: 4892954 - DNA, 25 bp, Homo sapien
cttataaaaccacctggcgcggtgg

SEQ ID NO: 4892955 - DNA, 25 bp, Homo sapien
cagagcgaagttggagaaaagcacc

SEQ ID NO: 4892956 - DNA, 25 bp, Homo sapien
cagtcctcccaggtattaactcatt

SEQ ID NO: 4892957 - DNA, 25 bp, Homo sapien
tccttccttacattgcgacagcaag

SEQ ID NO: 4892958 - DNA, 25 bp, Homo sapien
cctataacacctgaggattatggga

SEQ ID NO: 4892959 - DNA, 25 bp, Homo sapien
gccactaacgagctctgaacaaatt

SEQ ID NO: 4892960 - DNA, 25 bp, Homo sapien
ggagatgatgcatgggctcagaaac

SEQ ID NO: 4892961 - DNA, 25 bp, Homo sapien
aacaaattggctatgatgtcaggaa

SEQ ID NO: 4892962 - DNA, 25 bp, Homo sapien
gacctaagtctatactctgccagca

SEQ ID NO: 4892963 - DNA, 25 bp, Homo sapien
agaagttggttatctccaggtcact

SEQ ID NO: 4892964 - DNA, 25 bp, Homo sapien
acatctcatacacaaccatggtaca

SEQ ID NO: 4892965 - DNA, 25 bp, Homo sapien
ttagttggttcaccaaatgacctag

SEQ ID NO: 4892966 - DNA, 25 bp, Homo sapien
ggtttgtagcatactcagagttatg

SEQ ID NO: 4892967 - DNA, 25 bp, Homo sapien
tccatagtgcaagataagggtccaa

SEQ ID NO: 4892968 - DNA, 25 bp, Homo sapien
tatgtttgtactgaaagccagcttc

SEQ ID NO: 4892969 - DNA, 25 bp, Homo sapien
cctgagcttttggtatggcatccca

SEQ ID NO: 4892970 - DNA, 25 bp, Homo sapien
taattgttgatgaccagcacagaga

SEQ ID NO: 4892971 - DNA, 25 bp, Homo sapien
gcactgaagtacctagtaatcgcaa

SEQ ID NO: 4892972 - DNA, 25 bp, Homo sapien
ttcaaagctgtgctttatgctaata

SEQ ID NO: 4892973 - DNA, 25 bp, Homo sapien
gaaaccttcaattgactggtctcca

SEQ ID NO: 4892974 - DNA, 25 bp, Homo sapien
aacaccatcttagttgtacaagtaa

SEQ ID NO: 4892975 - DNA, 25 bp, Homo sapien
taattaattcatatctgtggcctgc

SEQ ID NO: 4892976 - DNA, 25 bp, Homo sapien
tagttccgccttgcgtaatcaggcc

SEQ ID NO: 4892977 - DNA, 25 bp, Homo sapien
tgttgacagtccactgggaaccagg

SEQ ID NO: 4892978 - DNA, 25 bp, Homo sapien
gggctattccaagactacaagactg

SEQ ID NO: 4892979 - DNA, 25 bp, Homo sapien
cagtgtattggttttcttgggctac

SEQ ID NO: 4892980 - DNA, 25 bp, Homo sapien
acagagtactacacaatgggtggct

SEQ ID NO: 4892981 - DNA, 25 bp, Homo sapien
gtagtcactctacatttcaccccag

SEQ ID NO: 4892982 - DNA, 25 bp, Homo sapien
cagcccttgacatgtgctaatttgc

SEQ ID NO: 4892983 - DNA, 25 bp, Homo sapien
tacaggcggtacaccatagtgccac

SEQ ID NO: 4892984 - DNA, 25 bp, Homo sapien
atcctacaggcggtacaccatagtg

SEQ ID NO: 4892985 - DNA, 25 bp, Homo sapien
ggtacaccatagtgccacctggtgt

SEQ ID NO: 4892986 - DNA, 25 bp, Homo sapien
tctccatccgttcctaaaggcttca

SEQ ID NO: 4892987 - DNA, 25 bp, Homo sapien
tatactcatctcaagttcccacaga

SEQ ID NO: 4892988 - DNA, 25 bp, Homo sapien
gtagaaatcaatgacagatagatag

SEQ ID NO: 4892989 - DNA, 25 bp, Homo sapien
atatgtcttatctcagactacaatg

SEQ ID NO: 4892990 - DNA, 25 bp, Homo sapien
taaaatgaaagctcaagagaaattt

SEQ ID NO: 4892991 - DNA, 25 bp, Homo sapien
cagcattgtcaaataactgatctgt

SEQ ID NO: 4892992 - DNA, 25 bp, Homo sapien
cattgtcaaataactgatctgtaat

SEQ ID NO: 4892993 - DNA, 25 bp, Homo sapien
gtcaaataactgatctgtaatctgt

SEQ ID NO: 4892994 - DNA, 25 bp, Homo sapien
tgtcaaataactgatctgtaatctg

SEQ ID NO: 4892995 - DNA, 25 bp, Homo sapien
ctgaactagagctaacatgtaatat

SEQ ID NO: 4892996 - DNA, 25 bp, Homo sapien
tctgccctgaactagagctaacatg

SEQ ID NO: 4892997 - DNA, 25 bp, Homo sapien
gaactagagctaacatgtaatatgt

SEQ ID NO: 4892998 - DNA, 25 bp, Homo sapien
tgccctgaactagagctaacatgta

SEQ ID NO: 4892999 - DNA, 25 bp, Homo sapien
cagtctcatgattaaccctttctcc

SEQ ID NO: 4893000 - DNA, 25 bp, Homo sapien
gacccagtctcatgattaacccttt

SEQ ID NO: 4893001 - DNA, 25 bp, Homo sapien
tagacccagtctcatgattaaccct

SEQ ID NO: 4893002 - DNA, 25 bp, Homo sapien
cccagtctcatgattaaccctttct

SEQ ID NO: 4893003 - DNA, 25 bp, Homo sapien
ttcttcaatagaaatcctaaactcc

SEQ ID NO: 4893004 - DNA, 25 bp, Homo sapien
gctgatgaccacatcacggtgttct

SEQ ID NO: 4893005 - DNA, 25 bp, Homo sapien
aatcctgacgtccaagctgatgacc

SEQ ID NO: 4893006 - DNA, 25 bp, Homo sapien
cacatcacggtgttctcctgcacag

SEQ ID NO: 4893007 - DNA, 25 bp, Homo sapien
gttcaggctcaagtggacagccagg

SEQ ID NO: 4893008 - DNA, 25 bp, Homo sapien
gacagccagggtcttagaagataaa

SEQ ID NO: 4893009 - DNA, 25 bp, Homo sapien
aaccatagttcaggctcaagtggac

SEQ ID NO: 4893010 - DNA, 25 bp, Homo sapien
catagttcaggctcaagtggacagc

SEQ ID NO: 4893011 - DNA, 25 bp, Homo sapien
gggatataagcttggtggcacttac

SEQ ID NO: 4893012 - DNA, 25 bp, Homo sapien
tatagggttctagggatataagctt

SEQ ID NO: 4893013 - DNA, 25 bp, Homo sapien
ttggtatagggttctagggatataa

SEQ ID NO: 4893014 - DNA, 25 bp, Homo sapien
ggtatagggttctagggatataagc

SEQ ID NO: 4893015 - DNA, 25 bp, Homo sapien
gctaggtttagaatggtatttcaaa

SEQ ID NO: 4893016 - DNA, 25 bp, Homo sapien
tgctacagcattgatgtcttcccca

SEQ ID NO: 4893017 - DNA, 25 bp, Homo sapien
acagcattgatgtcttccccacaaa

SEQ ID NO: 4893018 - DNA, 25 bp, Homo sapien
tgattgctacagcattgatgtcttc

SEQ ID NO: 4893019 - DNA, 25 bp, Homo sapien
catccaagagcagaagagattgatt

SEQ ID NO: 4893020 - DNA, 25 bp, Homo sapien
tgatgttcaaagtccagttgagaca

SEQ ID NO: 4893021 - DNA, 25 bp, Homo sapien
caagccacaggtcagtggaggccac

SEQ ID NO: 4893022 - DNA, 25 bp, Homo sapien
gagattgattaaaacaccaggtgat

SEQ ID NO: 4893023 - DNA, 25 bp, Homo sapien
caccagggtgtatttagacaacccg

SEQ ID NO: 4893024 - DNA, 25 bp, Homo sapien
ttaatcacaataacccaccagggtg

SEQ ID NO: 4893025 - DNA, 25 bp, Homo sapien
taaacatcctaaaactgaagatggg

SEQ ID NO: 4893026 - DNA, 25 bp, Homo sapien
taaaggtttagtgggacatttgcac

SEQ ID NO: 4893027 - DNA, 25 bp, Homo sapien
gaagtcttggtttacgatcgtggtc

SEQ ID NO: 4893028 - DNA, 25 bp, Homo sapien
acgatcgtggtcctcaacagattta

SEQ ID NO: 4893029 - DNA, 25 bp, Homo sapien
tcttggtttacgatcgtggtcctca

SEQ ID NO: 4893030 - DNA, 25 bp, Homo sapien
ggtttacgatcgtggtcctcaacag

SEQ ID NO: 4893031 - DNA, 25 bp, Homo sapien
cctactagagatttcttgcaccatt

SEQ ID NO: 4893032 - DNA, 25 bp, Homo sapien
gggacccaacctctcttactagaga

SEQ ID NO: 4893033 - DNA, 25 bp, Homo sapien
gagttttctgagtctatgggaccca

SEQ ID NO: 4893034 - DNA, 25 bp, Homo sapien
ccccacgagtggaaatttcttgcac

SEQ ID NO: 4893035 - DNA, 25 bp, Homo sapien
ctgcagatgtcctcggtgagaggct

SEQ ID NO: 4893036 - DNA, 25 bp, Homo sapien
ggacttttgctgcagatgtcctcgg

SEQ ID NO: 4893037 - DNA, 25 bp, Homo sapien
cttttgctgcagatgtcctcggtga

SEQ ID NO: 4893038 - DNA, 25 bp, Homo sapien
ttgctgcagatgtcctcggtgagag

SEQ ID NO: 4893039 - DNA, 25 bp, Homo sapien
ttcctgttcgtctgaggagagtaat

SEQ ID NO: 4893040 - DNA, 25 bp, Homo sapien
tctggttcctgttcgtctgaggaga

SEQ ID NO: 4893041 - DNA, 25 bp, Homo sapien
ggttcctgttcgtctgaggagagta

SEQ ID NO: 4893042 - DNA, 25 bp, Homo sapien
tggttcctgttcgtctgaggagagt

SEQ ID NO: 4893043 - DNA, 25 bp, Homo sapien
ggctctgaagaagggaacgtctgat

SEQ ID NO: 4893044 - DNA, 25 bp, Homo sapien
ggacaaatcagtggtacttttggaa

SEQ ID NO: 4893045 - DNA, 25 bp, Homo sapien
ggaacgtctgattgtaagtttcaga

SEQ ID NO: 4893046 - DNA, 25 bp, Homo sapien
catggttccttattccgctctatgg

SEQ ID NO: 4893047 - DNA, 25 bp, Homo sapien
ctttaggggccaggaaatcaatcat

SEQ ID NO: 4893048 - DNA, 25 bp, Homo sapien
ctgtaatgtcaacagttcaccttta

SEQ ID NO: 4893049 - DNA, 25 bp, Homo sapien
cctttaggggccaggaaatcaatca

SEQ ID NO: 4893050 - DNA, 25 bp, Homo sapien
taatgtcaacagttcacctttaggg

SEQ ID NO: 4893051 - DNA, 25 bp, Homo sapien
tgtttacattctgggtatctgtcta

SEQ ID NO: 4893052 - DNA, 25 bp, Homo sapien
tacattctgggtatctgtctaaagt

SEQ ID NO: 4893053 - DNA, 25 bp, Homo sapien
attctgggtatctgtctaaagtttc

SEQ ID NO: 4893054 - DNA, 25 bp, Homo sapien
tttacattctgggtatctgtctaaa

SEQ ID NO: 4893055 - DNA, 25 bp, Homo sapien
gtggggatcggagggctcttgtctt

SEQ ID NO: 4893056 - DNA, 25 bp, Homo sapien
cacaagtgtggggatcggagggctc

SEQ ID NO: 4893057 - DNA, 25 bp, Homo sapien
tcctgagttataggggtcacaagtg

SEQ ID NO: 4893058 - DNA, 25 bp, Homo sapien
tcatggtcctgagttataggggtca

SEQ ID NO: 4893059 - DNA, 25 bp, Homo sapien
catctctgaggtaattccagattca

SEQ ID NO: 4893060 - DNA, 25 bp, Homo sapien
agaggcatctctgaggtaattccag

SEQ ID NO: 4893061 - DNA, 25 bp, Homo sapien
gaggcatctctgaggtaattccaga

SEQ ID NO: 4893062 - DNA, 25 bp, Homo sapien
ggcatctctgaggtaattccagatt

SEQ ID NO: 4893063 - DNA, 25 bp, Homo sapien
gttactgtcacacccctggatgtct

SEQ ID NO: 4893064 - DNA, 25 bp, Homo sapien
tgtttcctgcacgtctcgttactgt

SEQ ID NO: 4893065 - DNA, 25 bp, Homo sapien
tattctgacacatgaagggcagagg

SEQ ID NO: 4893066 - DNA, 25 bp, Homo sapien
tggatgtcttgtctgccttgtcacg

SEQ ID NO: 4893067 - DNA, 25 bp, Homo sapien
gctgaagcagaggacaatggtgctt

SEQ ID NO: 4893068 - DNA, 25 bp, Homo sapien
cagggctgaagcagaggacaatggt

SEQ ID NO: 4893069 - DNA, 25 bp, Homo sapien
gggctgaagcagaggacaatggtgc

SEQ ID NO: 4893070 - DNA, 25 bp, Homo sapien
gaagcagaggacaatggtgcttttt

SEQ ID NO: 4893071 - DNA, 25 bp, Homo sapien
tctcagtcaatgtctgagagataag

SEQ ID NO: 4893072 - DNA, 25 bp, Homo sapien
ctcagtcaatgtctgagagataagc

SEQ ID NO: 4893073 - DNA, 25 bp, Homo sapien
tcagtcaatgtctgagagataagcc

SEQ ID NO: 4893074 - DNA, 25 bp, Homo sapien
ttggtgagactgtacaccagggaat

SEQ ID NO: 4893075 - DNA, 25 bp, Homo sapien
gttggtgagactgtacaccagggaa

SEQ ID NO: 4893076 - DNA, 25 bp, Homo sapien
tggtgagactgtacaccagggaatg

SEQ ID NO: 4893077 - DNA, 25 bp, Homo sapien
gtgagactgtacaccagggaatggg

SEQ ID NO: 4893078 - DNA, 25 bp, Homo sapien
aattcagcaaggatggggaggcctc

SEQ ID NO: 4893079 - DNA, 25 bp, Homo sapien
gaaatgcaccatcatggtggaaggg

SEQ ID NO: 4893080 - DNA, 25 bp, Homo sapien
tcaggaaatgcaccatcatggtgga

SEQ ID NO: 4893081 - DNA, 25 bp, Homo sapien
ggcctcaggaaatgcaccatcatgg

SEQ ID NO: 4893082 - DNA, 25 bp, Homo sapien
ctatccttttcgtcttattggtaca

SEQ ID NO: 4893083 - DNA, 25 bp, Homo sapien
ggatgtttgttgtcattccagaaaa

SEQ ID NO: 4893084 - DNA, 25 bp, Homo sapien
tgtcaaagtaccacctgaaatgcct

SEQ ID NO: 4893085 - DNA, 25 bp, Homo sapien
catatcgccttgttaaagaaccagg

SEQ ID NO: 4893086 - DNA, 25 bp, Homo sapien
gaggacaggcacattaagtggtgct

SEQ ID NO: 4893087 - DNA, 25 bp, Homo sapien
agtggtgctttatggttctcatgca

SEQ ID NO: 4893088 - DNA, 25 bp, Homo sapien
gacaggcacattaagtggtgcttta

SEQ ID NO: 4893089 - DNA, 25 bp, Homo sapien
cacattaagtggtgctttatggttc

SEQ ID NO: 4893090 - DNA, 25 bp, Homo sapien
ggcagcacatgaaggagagacgtac

SEQ ID NO: 4893091 - DNA, 25 bp, Homo sapien
cagcacatgaaggagagacgtacca

SEQ ID NO: 4893092 - DNA, 25 bp, Homo sapien
agcacatgaaggagagacgtaccat

SEQ ID NO: 4893093 - DNA, 25 bp, Homo sapien
gcagcacatgaaggagagacgtacc

SEQ ID NO: 4893094 - DNA, 25 bp, Homo sapien
ttttgttgcttcaattgcactaatg

SEQ ID NO: 4893095 - DNA, 25 bp, Homo sapien
ttgttgcttcaattgcactaatgcc

SEQ ID NO: 4893096 - DNA, 25 bp, Homo sapien
tcttttgttgcttcaattgcactaa

SEQ ID NO: 4893097 - DNA, 25 bp, Homo sapien
gttgcttcaattgcactaatgcctt

SEQ ID NO: 4893098 - DNA, 25 bp, Homo sapien
accacaagccttacaagtcgtggaa

SEQ ID NO: 4893099 - DNA, 25 bp, Homo sapien
agccttacaagtcgtggaaggttca

SEQ ID NO: 4893100 - DNA, 25 bp, Homo sapien
ttctccttcagcatcgttgcatgca

SEQ ID NO: 4893101 - DNA, 25 bp, Homo sapien
tcagcatcgttgcatgcactgtcac

SEQ ID NO: 4893102 - DNA, 25 bp, Homo sapien
tacaagcagtaatgaacggtggagc

SEQ ID NO: 4893103 - DNA, 25 bp, Homo sapien
tggatgtatccctaggcccatgaca

SEQ ID NO: 4893104 - DNA, 25 bp, Homo sapien
gatgctgagcaatcctggcaactct

SEQ ID NO: 4893105 - DNA, 25 bp, Homo sapien
tgtgatacaaaccaggaactagctc

SEQ ID NO: 4893106 - DNA, 25 bp, Homo sapien
gaacagtattgtgcatcaggaagac

SEQ ID NO: 4893107 - DNA, 25 bp, Homo sapien
gattctttgcaaggtcactatccag

SEQ ID NO: 4893108 - DNA, 25 bp, Homo sapien
aaaatgatggcgctttcaatgacct

SEQ ID NO: 4893109 - DNA, 25 bp, Homo sapien
taatggcatccatttgtccgcaggg

SEQ ID NO: 4893110 - DNA, 25 bp, Homo sapien
cattatattggagggtggactcatt

SEQ ID NO: 4893111 - DNA, 25 bp, Homo sapien
tcaagatccattatagattgctgcc

SEQ ID NO: 4893112 - DNA, 25 bp, Homo sapien
gatccattatagattgctgccatca

SEQ ID NO: 4893113 - DNA, 25 bp, Homo sapien
tgccatcattatattggagggtgga

SEQ ID NO: 4893114 - DNA, 25 bp, Homo sapien
actgtttactacaaagcccatattc

SEQ ID NO: 4893115 - DNA, 25 bp, Homo sapien
ctgtttactacaaagcccatattca

SEQ ID NO: 4893116 - DNA, 25 bp, Homo sapien
cttcatctttcacactgtttactac

SEQ ID NO: 4893117 - DNA, 25 bp, Homo sapien
gtctacctcacccttcatatctgct

SEQ ID NO: 4893118 - DNA, 25 bp, Homo sapien
tgtctacctcacccttcatatctgc

SEQ ID NO: 4893119 - DNA, 25 bp, Homo sapien
cacacaggcagttagccaggccgtg

SEQ ID NO: 4893120 - DNA, 25 bp, Homo sapien
tctgatacctgcacacaggcagtta

SEQ ID NO: 4893121 - DNA, 25 bp, Homo sapien
cctaggtggattcccctggacacca

SEQ ID NO: 4893122 - DNA, 25 bp, Homo sapien
tgccctaggtggattcccctggaca

SEQ ID NO: 4893123 - DNA, 25 bp, Homo sapien
tcctttgggcctatactgacttaag

SEQ ID NO: 4893124 - DNA, 25 bp, Homo sapien
gatccttgcctcagacttccagctt

SEQ ID NO: 4893125 - DNA, 25 bp, Homo sapien
ggccccaacattttgcgattctaga

SEQ ID NO: 4893126 - DNA, 25 bp, Homo sapien
cagcgtgctgaaacctgtgatcctt

SEQ ID NO: 4893127 - DNA, 25 bp, Homo sapien
gatctgctgtgccaattacagtgct

SEQ ID NO: 4893128 - DNA, 25 bp, Homo sapien
ggcactcaatcaagtagcaggcaga

SEQ ID NO: 4893129 - DNA, 25 bp, Homo sapien
cctgctgtctgatctgctgtgccaa

SEQ ID NO: 4893130 - DNA, 25 bp, Homo sapien
ttacagtgctctgcaaatttaggca

SEQ ID NO: 4893131 - DNA, 25 bp, Homo sapien
gactcctgtcctcacgttgacttca

SEQ ID NO: 4893132 - DNA, 25 bp, Homo sapien
ctgtcctcacgttgacttcagagtg

SEQ ID NO: 4893133 - DNA, 25 bp, Homo sapien
tcctgtcctcacgttgacttcagag

SEQ ID NO: 4893134 - DNA, 25 bp, Homo sapien
gtcctcacgttgacttcagagtgct

SEQ ID NO: 4893135 - DNA, 25 bp, Homo sapien
agttgccactgtagtgctcaggata

SEQ ID NO: 4893136 - DNA, 25 bp, Homo sapien
cagttgccactgtagtgctcaggat

SEQ ID NO: 4893137 - DNA, 25 bp, Homo sapien
gttaccaggcagaggatgctgacca

SEQ ID NO: 4893138 - DNA, 25 bp, Homo sapien
cccccagaggatgataaagctcctt

SEQ ID NO: 4893139 - DNA, 25 bp, Homo sapien
tcaaacacccccagaggatgataaa

SEQ ID NO: 4893140 - DNA, 25 bp, Homo sapien
tgggttaccaggcagaggatgctga

SEQ ID NO: 4893141 - DNA, 25 bp, Homo sapien
cttcagggccttgggctattaacaa

SEQ ID NO: 4893142 - DNA, 25 bp, Homo sapien
aagagttactgtttcttcagaatcc

SEQ ID NO: 4893143 - DNA, 25 bp, Homo sapien
tcttctgtccttctaacttcagggc

SEQ ID NO: 4893144 - DNA, 25 bp, Homo sapien
aatcctgccgtatttcccaaacctg

SEQ ID NO: 4893145 - DNA, 25 bp, Homo sapien
gctgcaccatggtttagtcaatagt

SEQ ID NO: 4893146 - DNA, 25 bp, Homo sapien
ttgtcagcagcaaggttagtgtcca

SEQ ID NO: 4893147 - DNA, 25 bp, Homo sapien
aggtggggtgttaactttgtcagca

SEQ ID NO: 4893148 - DNA, 25 bp, Homo sapien
cagcaaggttagtgtccactccagg

SEQ ID NO: 4893149 - DNA, 25 bp, Homo sapien
aggtccagtttctcatggagccttt

SEQ ID NO: 4893150 - DNA, 25 bp, Homo sapien
caggtccagtttctcatggagcctt

SEQ ID NO: 4893151 - DNA, 25 bp, Homo sapien
ggtccagtttctcatggagcctttt

SEQ ID NO: 4893152 - DNA, 25 bp, Homo sapien
gtataagggccattcataggtaaat

SEQ ID NO: 4893153 - DNA, 25 bp, Homo sapien
ctgtataagggccattcataggtaa

SEQ ID NO: 4893154 - DNA, 25 bp, Homo sapien
tgtataagggccattcataggtaaa

SEQ ID NO: 4893155 - DNA, 25 bp, Homo sapien
tttcacctctgtttccatgtcatgc

SEQ ID NO: 4893156 - DNA, 25 bp, Homo sapien
acatgctgttcgtggtttgatggca

SEQ ID NO: 4893157 - DNA, 25 bp, Homo sapien
tacattatggtaagccggagggacc

SEQ ID NO: 4893158 - DNA, 25 bp, Homo sapien
tctcatggagacataagtgggaaca

SEQ ID NO: 4893159 - DNA, 25 bp, Homo sapien
gaccacaaactgctgctaacattcc

SEQ ID NO: 4893160 - DNA, 25 bp, Homo sapien
caaactttagaaccggctgcactgg

SEQ ID NO: 4893161 - DNA, 25 bp, Homo sapien
cacagctgaagctacgtccttgtca

SEQ ID NO: 4893162 - DNA, 25 bp, Homo sapien
cccaaaggtgatgaagcaacagtct

SEQ ID NO: 4893163 - DNA, 25 bp, Homo sapien
gggcccagactgtcgcacaaggtag

SEQ ID NO: 4893164 - DNA, 25 bp, Homo sapien
ttctgtctcctttgcctaacacagc

SEQ ID NO: 4893165 - DNA, 25 bp, Homo sapien
taatggcacaattcccttccacact

SEQ ID NO: 4893166 - DNA, 25 bp, Homo sapien
ccctctgtgctttggtaatggcaca

SEQ ID NO: 4893167 - DNA, 25 bp, Homo sapien
ctgtggttgctctgctaccctctgt

SEQ ID NO: 4893168 - DNA, 25 bp, Homo sapien
tcttgtaccacccgccttctttctc

SEQ ID NO: 4893169 - DNA, 25 bp, Homo sapien
cttgtaccacccgccttctttctcg

SEQ ID NO: 4893170 - DNA, 25 bp, Homo sapien
gtgtgtcttgtaccacccgccttct

SEQ ID NO: 4893171 - DNA, 25 bp, Homo sapien
actgtgtgtcttgtaccacccgcct

SEQ ID NO: 4893172 - DNA, 25 bp, Homo sapien
tccatccatgacagcaaagccatgt

SEQ ID NO: 4893173 - DNA, 25 bp, Homo sapien
catccatgacagcaaagccatgtgt

SEQ ID NO: 4893174 - DNA, 25 bp, Homo sapien
ccttccatccatgacagcaaagcca

SEQ ID NO: 4893175 - DNA, 25 bp, Homo sapien
ttccatccatgacagcaaagccatg

SEQ ID NO: 4893176 - DNA, 25 bp, Homo sapien
tgctccagttaacctgatacagcca

SEQ ID NO: 4893177 - DNA, 25 bp, Homo sapien
catgacatttgctccagttaacctg

SEQ ID NO: 4893178 - DNA, 25 bp, Homo sapien
cttttaggctccatgacatttgctc

SEQ ID NO: 4893179 - DNA, 25 bp, Homo sapien
gacatttgctccagttaacctgata

SEQ ID NO: 4893180 - DNA, 25 bp, Homo sapien
tgagattgctaatcaaatgcagggc

SEQ ID NO: 4893181 - DNA, 25 bp, Homo sapien
ctgaaaggggttgggcacactgaat

SEQ ID NO: 4893182 - DNA, 25 bp, Homo sapien
gagtgggatgtagatattgccaaga

SEQ ID NO: 4893183 - DNA, 25 bp, Homo sapien
agatattgccaagaccaagctccag

SEQ ID NO: 4893184 - DNA, 25 bp, Homo sapien
acagacatgtaacaaacaggagtag

SEQ ID NO: 4893185 - DNA, 25 bp, Homo sapien
tgcgatggtgccacgaagtttagtg

SEQ ID NO: 4893186 - DNA, 25 bp, Homo sapien
cagaggtcactatggatatatgcca

SEQ ID NO: 4893187 - DNA, 25 bp, Homo sapien
tgtggtcagatgctaattgtgcttg

SEQ ID NO: 4893188 - DNA, 25 bp, Homo sapien
tttgccaggagacccatgctcagct

SEQ ID NO: 4893189 - DNA, 25 bp, Homo sapien
tcttttgccaggagacccatgctca

SEQ ID NO: 4893190 - DNA, 25 bp, Homo sapien
caggagacccatgctcagctggttg

SEQ ID NO: 4893191 - DNA, 25 bp, Homo sapien
ctcagctggttgggctgtctcaggc

SEQ ID NO: 4893192 - DNA, 25 bp, Homo sapien
tcattgaattagcccaagatggctc

SEQ ID NO: 4893193 - DNA, 25 bp, Homo sapien
ttgaattagcccaagatggctcttc

SEQ ID NO: 4893194 - DNA, 25 bp, Homo sapien
attgaattagcccaagatggctctt

SEQ ID NO: 4893195 - DNA, 25 bp, Homo sapien
cattgaattagcccaagatggctct

SEQ ID NO: 4893196 - DNA, 25 bp, Homo sapien
atctccatattgaggtcagggtgag

SEQ ID NO: 4893197 - DNA, 25 bp, Homo sapien
catattgaggtcagggtgagaatgc

SEQ ID NO: 4893198 - DNA, 25 bp, Homo sapien
gagaatgcagctcaattcttgggct

SEQ ID NO: 4893199 - DNA, 25 bp, Homo sapien
agggtgagaatgcagctcaattctt

SEQ ID NO: 4893200 - DNA, 25 bp, Homo sapien
gatgtgaattagcaggtgaaaagta

SEQ ID NO: 4893201 - DNA, 25 bp, Homo sapien
gcagctgggcagccaaccttggaag

SEQ ID NO: 4893202 - DNA, 25 bp, Homo sapien
gggatggatgtgaattagcaggtga

SEQ ID NO: 4893203 - DNA, 25 bp, Homo sapien
cagctgggcagccaaccttggaagg

SEQ ID NO: 4893204 - DNA, 25 bp, Homo sapien
gtactgttgctgctgcagtttctcc

SEQ ID NO: 4893205 - DNA, 25 bp, Homo sapien
tactgttgctgctgcagtttctcca

SEQ ID NO: 4893206 - DNA, 25 bp, Homo sapien
ttgtactgttgctgctgcagtttct

SEQ ID NO: 4893207 - DNA, 25 bp, Homo sapien
actgttgctgctgcagtttctccat

SEQ ID NO: 4893208 - DNA, 25 bp, Homo sapien
cagtcctccacaggaaacacttctt

SEQ ID NO: 4893209 - DNA, 25 bp, Homo sapien
agtgtatgcattgcccaggacacca

SEQ ID NO: 4893210 - DNA, 25 bp, Homo sapien
gatgtcagtgtatgcattgcccagg

SEQ ID NO: 4893211 - DNA, 25 bp, Homo sapien
ggcagtcctccacaggaaacacttc

SEQ ID NO: 4893212 - DNA, 25 bp, Homo sapien
gacagtatgaagaaagtgcattaac

SEQ ID NO: 4893213 - DNA, 25 bp, Homo sapien
tacggaaaggaacacctggtatcag

SEQ ID NO: 4893214 - DNA, 25 bp, Homo sapien
gctgagagattatatcatcacgagg

SEQ ID NO: 4893215 - DNA, 25 bp, Homo sapien
tatatcatcacgaggcctgccttac

SEQ ID NO: 4893216 - DNA, 25 bp, Homo sapien
agtcactggcatctttcgtgcttgc

SEQ ID NO: 4893217 - DNA, 25 bp, Homo sapien
ctgacagaacatctggatctattcc

SEQ ID NO: 4893218 - DNA, 25 bp, Homo sapien
tcagatctgatttagagtcactggc

SEQ ID NO: 4893219 - DNA, 25 bp, Homo sapien
caggattgctggtccctgacagaac

SEQ ID NO: 4893220 - DNA, 25 bp, Homo sapien
tggcctttcatgggtactgggtaac

SEQ ID NO: 4893221 - DNA, 25 bp, Homo sapien
ctggcctttcatgggtactgggtaa

SEQ ID NO: 4893222 - DNA, 25 bp, Homo sapien
actggcctttcatgggtactgggta

SEQ ID NO: 4893223 - DNA, 25 bp, Homo sapien
caggatctcccattagtatctgttt

SEQ ID NO: 4893224 - DNA, 25 bp, Homo sapien
tcaatgcctttctgtaattccattt

SEQ ID NO: 4893225 - DNA, 25 bp, Homo sapien
gcctttctgtaattccatttctcaa

SEQ ID NO: 4893226 - DNA, 25 bp, Homo sapien
aatttctcagtgcaggatctcccat

SEQ ID NO: 4893227 - DNA, 25 bp, Homo sapien
acctccaagtttggccatggctgct

SEQ ID NO: 4893228 - DNA, 25 bp, Homo sapien
aatgacaggctctggagaagactgc

SEQ ID NO: 4893229 - DNA, 25 bp, Homo sapien
gactgcccttaagttcattgacacc

SEQ ID NO: 4893230 - DNA, 25 bp, Homo sapien
caggctctggagaagactgccctta

SEQ ID NO: 4893231 - DNA, 25 bp, Homo sapien
tgaggcatggcatcctgaccgtgtg

SEQ ID NO: 4893232 - DNA, 25 bp, Homo sapien
aagctgtcccgcaagatccgctgag

SEQ ID NO: 4893233 - DNA, 25 bp, Homo sapien
tgtggttgtaaccaagaaacgagtg

SEQ ID NO: 4893234 - DNA, 25 bp, Homo sapien
gagctaccttatcaagggtggcaaa

SEQ ID NO: 4893235 - DNA, 25 bp, Homo sapien
gggcccgcgagaggcttgagcagca

SEQ ID NO: 4893236 - DNA, 25 bp, Homo sapien
ctgggcccgcgagaggcttgagcag

SEQ ID NO: 4893237 - DNA, 25 bp, Homo sapien
cccgcgagaggcttgagcagcaggt

SEQ ID NO: 4893238 - DNA, 25 bp, Homo sapien
gcccgcgagaggcttgagcagcagg

SEQ ID NO: 4893239 - DNA, 25 bp, Homo sapien
atatcattacccacaaccagatgtg

SEQ ID NO: 4893240 - DNA, 25 bp, Homo sapien
agtcatccatatcattacccacaac

SEQ ID NO: 4893241 - DNA, 25 bp, Homo sapien
cacaagaaggctcatgtgatggaga

SEQ ID NO: 4893242 - DNA, 25 bp, Homo sapien
gaaggctcatgtgatggagatccag

SEQ ID NO: 4893243 - DNA, 25 bp, Homo sapien
gcagcaggaggcatcacaggaaggt

SEQ ID NO: 4893244 - DNA, 25 bp, Homo sapien
tatgtgggaacccctcgaggcctct

SEQ ID NO: 4893245 - DNA, 25 bp, Homo sapien
tgaccattgtggagataaccatggt

SEQ ID NO: 4893246 - DNA, 25 bp, Homo sapien
gataaccatggtggttgcgggcatt

SEQ ID NO: 4893247 - DNA, 25 bp, Homo sapien
cagcatactccatcaagctgggatg

SEQ ID NO: 4893248 - DNA, 25 bp, Homo sapien
tggcagcatactccatcaagctggg

SEQ ID NO: 4893249 - DNA, 25 bp, Homo sapien
ctccatcaagctgggatgactctga

SEQ ID NO: 4893250 - DNA, 25 bp, Homo sapien
catactccatcaagctgggatgact

SEQ ID NO: 4893251 - DNA, 25 bp, Homo sapien
tgtcgtggttctttccagtactgca

SEQ ID NO: 4893252 - DNA, 25 bp, Homo sapien
ggccatgtacttgcattccactggt

SEQ ID NO: 4893253 - DNA, 25 bp, Homo sapien
gaaatattcccacgtgcctttgtcg

SEQ ID NO: 4893254 - DNA, 25 bp, Homo sapien
gtatccgaatccctgaaatattccc

SEQ ID NO: 4893255 - DNA, 25 bp, Homo sapien
gtagttatcactcatgaggtgaagg

SEQ ID NO: 4893256 - DNA, 25 bp, Homo sapien
cactggagtagttatcactcatgag

SEQ ID NO: 4893257 - DNA, 25 bp, Homo sapien
ggagtagttatcactcatgaggtga

SEQ ID NO: 4893258 - DNA, 25 bp, Homo sapien
ctctcactggagtagttatcactca

SEQ ID NO: 4893259 - DNA, 25 bp, Homo sapien
ggaatagggatggtaataatggtcc

SEQ ID NO: 4893260 - DNA, 25 bp, Homo sapien
aatagggatggtaataatggtccac

SEQ ID NO: 4893261 - DNA, 25 bp, Homo sapien
gggaatagggatggtaataatggtc

SEQ ID NO: 4893262 - DNA, 25 bp, Homo sapien
gaatagggatggtaataatggtcca

SEQ ID NO: 4893263 - DNA, 25 bp, Homo sapien
caatggtgctggagtacaaagtacc

SEQ ID NO: 4893264 - DNA, 25 bp, Homo sapien
tcccgcagagtcagaatctccaagc

SEQ ID NO: 4893265 - DNA, 25 bp, Homo sapien
gtaccagaatgcagtttgaaatgga

SEQ ID NO: 4893266 - DNA, 25 bp, Homo sapien
gcattaaatattgatcggccaatgg

SEQ ID NO: 4893267 - DNA, 25 bp, Homo sapien
gaggcaggagcccatgaataattat

SEQ ID NO: 4893268 - DNA, 25 bp, Homo sapien
agcaagaggcaggagcccatgaata

SEQ ID NO: 4893269 - DNA, 25 bp, Homo sapien
gcccatgaataattatcactcagaa

SEQ ID NO: 4893270 - DNA, 25 bp, Homo sapien
gcaggagcccatgaataattatcac

SEQ ID NO: 4893271 - DNA, 25 bp, Homo sapien
ctgagcagtggcgaaggcaaagggt

SEQ ID NO: 4893272 - DNA, 25 bp, Homo sapien
gctacagcagcggagagagcgagag

SEQ ID NO: 4893273 - DNA, 25 bp, Homo sapien
cgaaggcaaagggtccggctacagc

SEQ ID NO: 4893274 - DNA, 25 bp, Homo sapien
caaagggtccggctacagcagcgga

SEQ ID NO: 4893275 - DNA, 25 bp, Homo sapien
gagccgacggagaacgaggcgcagt

SEQ ID NO: 4893276 - DNA, 25 bp, Homo sapien
cggagaacgaggcgcagtgccttac

SEQ ID NO: 4893277 - DNA, 25 bp, Homo sapien
aggtagagccgacggagaacgaggc

SEQ ID NO: 4893278 - DNA, 25 bp, Homo sapien
gacggagaacgaggcgcagtgcctt

SEQ ID NO: 4893279 - DNA, 25 bp, Homo sapien
ctccctgcaccgcaccccaggacta

SEQ ID NO: 4893280 - DNA, 25 bp, Homo sapien
cagcgccttcgaagccgctgtccct

SEQ ID NO: 4893281 - DNA, 25 bp, Homo sapien
tgtccgcattgtgcgcccagcgctg

SEQ ID NO: 4893282 - DNA, 25 bp, Homo sapien
gccctccgcgacttcctctctcctt

SEQ ID NO: 4893283 - DNA, 25 bp, Homo sapien
accgctggtccgcacacaaagaaac

SEQ ID NO: 4893284 - DNA, 25 bp, Homo sapien
tcgaatgaagatgcagcaccgggcg

SEQ ID NO: 4893285 - DNA, 25 bp, Homo sapien
cccctttcgaatgaagatgcagcac

SEQ ID NO: 4893286 - DNA, 25 bp, Homo sapien
cccgaccccctttcgaatgaagatg

SEQ ID NO: 4893287 - DNA, 25 bp, Homo sapien
tttcgaatgaagatgcagcaccggg

SEQ ID NO: 4893288 - DNA, 25 bp, Homo sapien
ccgccagtctcggagcctgaggtct

SEQ ID NO: 4893289 - DNA, 25 bp, Homo sapien
gaccaattgcggatgaaggccctga

SEQ ID NO: 4893290 - DNA, 25 bp, Homo sapien
gagccgcgcagatggagtcctttcg

SEQ ID NO: 4893291 - DNA, 25 bp, Homo sapien
ggttccaggactgcatacagctcaa

SEQ ID NO: 4893292 - DNA, 25 bp, Homo sapien
ccgggcggggctcgagccagctttt

SEQ ID NO: 4893293 - DNA, 25 bp, Homo sapien
gggctcgagccagcttttctgcaga

SEQ ID NO: 4893294 - DNA, 25 bp, Homo sapien
ggcggggctcgagccagcttttctg

SEQ ID NO: 4893295 - DNA, 25 bp, Homo sapien
cggggctcgagccagcttttctgca

SEQ ID NO: 4893296 - DNA, 25 bp, Homo sapien
ctgcggtctcgcgcccgggctgggt

SEQ ID NO: 4893297 - DNA, 25 bp, Homo sapien
gcggtctcgcgcccgggctgggtgg

SEQ ID NO: 4893298 - DNA, 25 bp, Homo sapien
ctctgcggtctcgcgcccgggctgg

SEQ ID NO: 4893299 - DNA, 25 bp, Homo sapien
gcgcccgggctgggtggggccgcgc

SEQ ID NO: 4893300 - DNA, 25 bp, Homo sapien
gaacctttctggacgtgcgagtgaa

SEQ ID NO: 4893301 - DNA, 25 bp, Homo sapien
tgcagaaagcgaggcgagatcgccc

SEQ ID NO: 4893302 - DNA, 25 bp, Homo sapien
tcagaacctttctggacgtgcgagt

SEQ ID NO: 4893303 - DNA, 25 bp, Homo sapien
tctcagaacctttctggacgtgcga

SEQ ID NO: 4893304 - DNA, 25 bp, Homo sapien
taaataataacaacgatttgaaatg

SEQ ID NO: 4893305 - DNA, 25 bp, Homo sapien
agccactagcctgcagcggaaacct

SEQ ID NO: 4893306 - DNA, 25 bp, Homo sapien
tgatgatgacgatgagtttgcagcc

SEQ ID NO: 4893307 - DNA, 25 bp, Homo sapien
cgatgagtttgcagccactagcctg

SEQ ID NO: 4893308 - DNA, 25 bp, Homo sapien
agttccgctacatcttgcaggctct

SEQ ID NO: 4893309 - DNA, 25 bp, Homo sapien
tgtttaatgagagttccgctacatc

SEQ ID NO: 4893310 - DNA, 25 bp, Homo sapien
gagagttccgctacatcttgcaggc

SEQ ID NO: 4893311 - DNA, 25 bp, Homo sapien
agctcctgctgtgtttaatgagagt

SEQ ID NO: 4893312 - DNA, 25 bp, Homo sapien
tagctatggaccctgcagtcctcag

SEQ ID NO: 4893313 - DNA, 25 bp, Homo sapien
ttgcacccgcaattgttaaacactg

SEQ ID NO: 4893314 - DNA, 25 bp, Homo sapien
taaaaaacttgagtcttgcacccgc

SEQ ID NO: 4893315 - DNA, 25 bp, Homo sapien
tttcagaaattaagcccctggtgat

SEQ ID NO: 4893316 - DNA, 25 bp, Homo sapien
ggacggctctgctgacgaggcccag

SEQ ID NO: 4893317 - DNA, 25 bp, Homo sapien
ctctgctgacgaggcccaggatctg

SEQ ID NO: 4893318 - DNA, 25 bp, Homo sapien
caggatctgttagcacactccctct

SEQ ID NO: 4893319 - DNA, 25 bp, Homo sapien
ggcccaggatctgttagcacactcc

SEQ ID NO: 4893320 - DNA, 25 bp, Homo sapien
gccactgccctaattatgcttgaca

SEQ ID NO: 4893321 - DNA, 25 bp, Homo sapien
gaagctagcacatttagagccctat

SEQ ID NO: 4893322 - DNA, 25 bp, Homo sapien
gatgaaagctgtatcggaacgtgaa

SEQ ID NO: 4893323 - DNA, 25 bp, Homo sapien
tacatgccgactttattaagaaggg

SEQ ID NO: 4893324 - DNA, 25 bp, Homo sapien
aaaagctgaagattagtatatttca

SEQ ID NO: 4893325 - DNA, 25 bp, Homo sapien
tgaaatgaaaagctgaagattagta

SEQ ID NO: 4893326 - DNA, 25 bp, Homo sapien
atgaaaagctgaagattagtatatt

SEQ ID NO: 4893327 - DNA, 25 bp, Homo sapien
gaaatgaaaagctgaagattagtat

SEQ ID NO: 4893328 - DNA, 25 bp, Homo sapien
gaggttccgggtaaaagcaagagca

SEQ ID NO: 4893329 - DNA, 25 bp, Homo sapien
ttgatgttgcgaggttccgggtaaa

SEQ ID NO: 4893330 - DNA, 25 bp, Homo sapien
aaagcaagagcagatcagtgacagc

SEQ ID NO: 4893331 - DNA, 25 bp, Homo sapien
cagatcagtgacagcatggacagct

SEQ ID NO: 4893332 - DNA, 25 bp, Homo sapien
ggagatggtggcttcaagatcagct

SEQ ID NO: 4893333 - DNA, 25 bp, Homo sapien
gatggtggcttcaagatcagctcaa

SEQ ID NO: 4893334 - DNA, 25 bp, Homo sapien
ggtggcttcaagatcagctcaaaag

SEQ ID NO: 4893335 - DNA, 25 bp, Homo sapien
gctaaagttcgtggggcttctgaga

SEQ ID NO: 4893336 - DNA, 25 bp, Homo sapien
tccctcttctctgccaattgtttca

SEQ ID NO: 4893337 - DNA, 25 bp, Homo sapien
gctagattagcctcacggttttcct

SEQ ID NO: 4893338 - DNA, 25 bp, Homo sapien
tgaaggacttctcgctcgtgttccc

SEQ ID NO: 4893339 - DNA, 25 bp, Homo sapien
tttcctgcagacgttcaataatagc

SEQ ID NO: 4893340 - DNA, 25 bp, Homo sapien
tctgttgcctcttccaaatcgtgac

SEQ ID NO: 4893341 - DNA, 25 bp, Homo sapien
ggagagagccaaattctgttgcctc

SEQ ID NO: 4893342 - DNA, 25 bp, Homo sapien
caaatcgtgacttgactcacttggg

SEQ ID NO: 4893343 - DNA, 25 bp, Homo sapien
cacttgggtgaaacgcaatgacatt

SEQ ID NO: 4893344 - DNA, 25 bp, Homo sapien
caggtaccgttcctagcaacttcac

SEQ ID NO: 4893345 - DNA, 25 bp, Homo sapien
gttcctagcaacttcacttaattgt

SEQ ID NO: 4893346 - DNA, 25 bp, Homo sapien
gtaccgttcctagcaacttcactta

SEQ ID NO: 4893347 - DNA, 25 bp, Homo sapien
tcagcaggtaccgttcctagcaact

SEQ ID NO: 4893348 - DNA, 25 bp, Homo sapien
taccatgttatgagctcagaagtct

SEQ ID NO: 4893349 - DNA, 25 bp, Homo sapien
tactgtacttcatggttggataggg

SEQ ID NO: 4893350 - DNA, 25 bp, Homo sapien
cctgctgtctgatggttcctaaatg

SEQ ID NO: 4893351 - DNA, 25 bp, Homo sapien
gaaagggctcttccctaatattgcc

SEQ ID NO: 4893352 - DNA, 25 bp, Homo sapien
ttagcatggatgcagctgattcttc

SEQ ID NO: 4893353 - DNA, 25 bp, Homo sapien
gcatgcatagagaaatcaaatcctg

SEQ ID NO: 4893354 - DNA, 25 bp, Homo sapien
tcactatgctaggaaaaagaagcct

SEQ ID NO: 4893355 - DNA, 25 bp, Homo sapien
ttgtatatgttcaaaaaccatgaag

SEQ ID NO: 4893356 - DNA, 25 bp, Homo sapien
tccaagtgacgtttccagtcataac

SEQ ID NO: 4893357 - DNA, 25 bp, Homo sapien
ccaagtgacgtttccagtcataacc

SEQ ID NO: 4893358 - DNA, 25 bp, Homo sapien
gtccaagtgacgtttccagtcataa

SEQ ID NO: 4893359 - DNA, 25 bp, Homo sapien
cagtccaagtgacgtttccagtcat

SEQ ID NO: 4893360 - DNA, 25 bp, Homo sapien
acagttcaacctggagttccttgtt

SEQ ID NO: 4893361 - DNA, 25 bp, Homo sapien
cagttcaacctggagttccttgttc

SEQ ID NO: 4893362 - DNA, 25 bp, Homo sapien
ttcaacctggagttccttgttcctg

SEQ ID NO: 4893363 - DNA, 25 bp, Homo sapien
aacctggagttccttgttcctgcgc

SEQ ID NO: 4893364 - DNA, 25 bp, Homo sapien
tgggtttctagcaccatagactgtc

SEQ ID NO: 4893365 - DNA, 25 bp, Homo sapien
tatgaagagcgatttcacggctgct

SEQ ID NO: 4893366 - DNA, 25 bp, Homo sapien
gaattaagcccactttatgaagagc

SEQ ID NO: 4893367 - DNA, 25 bp, Homo sapien
ggagcttcaaaaagaacagacctag

SEQ ID NO: 4893368 - DNA, 25 bp, Homo sapien
taatgcaacaaccagctcacagttt

SEQ ID NO: 4893369 - DNA, 25 bp, Homo sapien
tagttggcacaaatgccctgcctag

SEQ ID NO: 4893370 - DNA, 25 bp, Homo sapien
gacttcaaaactgcgataggtactt

SEQ ID NO: 4893371 - DNA, 25 bp, Homo sapien
gcttgagtgaaagtccgcagtgttt

SEQ ID NO: 4893372 - DNA, 25 bp, Homo sapien
caatacgcctattagcacttttacc

SEQ ID NO: 4893373 - DNA, 25 bp, Homo sapien
gggtagatgggccacaatacgccta

SEQ ID NO: 4893374 - DNA, 25 bp, Homo sapien
taggaggagggtagatgggccacaa

SEQ ID NO: 4893375 - DNA, 25 bp, Homo sapien
tgggccacaatacgcctattagcac

SEQ ID NO: 4893376 - DNA, 25 bp, Homo sapien
taggtgttcagttccccatgaggca

SEQ ID NO: 4893377 - DNA, 25 bp, Homo sapien
gatctttctcccgtacctcagacaa

SEQ ID NO: 4893378 - DNA, 25 bp, Homo sapien
catccttatctgtaactctagcacc

SEQ ID NO: 4893379 - DNA, 25 bp, Homo sapien
tgtaactctagcaccaacctctagt

SEQ ID NO: 4893380 - DNA, 25 bp, Homo sapien
tccctttacatctcttggatcagag

SEQ ID NO: 4893381 - DNA, 25 bp, Homo sapien
cttcttgtgctgaataaaggtcact

SEQ ID NO: 4893382 - DNA, 25 bp, Homo sapien
aggtcactttaatttgtgttgttga

SEQ ID NO: 4893383 - DNA, 25 bp, Homo sapien
gatgtactgttggtagatgtcctgc

SEQ ID NO: 4893384 - DNA, 25 bp, Homo sapien
cattcattggaaggtactgatgcct

SEQ ID NO: 4893385 - DNA, 25 bp, Homo sapien
ttggaaggtactgatgccttttggc

SEQ ID NO: 4893386 - DNA, 25 bp, Homo sapien
ggaaggtactgatgccttttggccc

SEQ ID NO: 4893387 - DNA, 25 bp, Homo sapien
tcattggaaggtactgatgcctttt

SEQ ID NO: 4893388 - DNA, 25 bp, Homo sapien
ccagttgtgtttggaatcttttcac

SEQ ID NO: 4893389 - DNA, 25 bp, Homo sapien
gactgatcatcaggccctttggtgc

SEQ ID NO: 4893390 - DNA, 25 bp, Homo sapien
gtccaacagggtggcctaaggtggc

SEQ ID NO: 4893391 - DNA, 25 bp, Homo sapien
cacactgaatgcaaggtggggagcc

SEQ ID NO: 4893392 - DNA, 25 bp, Homo sapien
tgtagtggaccctgctttcccattg

SEQ ID NO: 4893393 - DNA, 25 bp, Homo sapien
tgctcctgttgatcagccctgatgg

SEQ ID NO: 4893394 - DNA, 25 bp, Homo sapien
gctattcctatagcgctctatttgc

SEQ ID NO: 4893395 - DNA, 25 bp, Homo sapien
tagcgctctatttgccgagactcag

SEQ ID NO: 4893396 - DNA, 25 bp, Homo sapien
tgacctccagtaatttaaaggctgt

SEQ ID NO: 4893397 - DNA, 25 bp, Homo sapien
gacagctcatcctgcctctagctgg

SEQ ID NO: 4893398 - DNA, 25 bp, Homo sapien
tgttgtttcaaacaggacatgacct

SEQ ID NO: 4893399 - DNA, 25 bp, Homo sapien
tgagacagctcatcctgcctctagc

SEQ ID NO: 4893400 - DNA, 25 bp, Homo sapien
tgagtactgacaacagtgtgctctg

SEQ ID NO: 4893401 - DNA, 25 bp, Homo sapien
ccagacgcttctgagtactgacaac

SEQ ID NO: 4893402 - DNA, 25 bp, Homo sapien
ctgacaacagtgtgctctgctgcca

SEQ ID NO: 4893403 - DNA, 25 bp, Homo sapien
atgagggtggcttccagacgcttct

SEQ ID NO: 4893404 - DNA, 25 bp, Homo sapien
tgtgctggatcagttgtccacccat

SEQ ID NO: 4893405 - DNA, 25 bp, Homo sapien
tctgggtctccctgttccatcccta

SEQ ID NO: 4893406 - DNA, 25 bp, Homo sapien
tccatccctatctggagtgtgctgg

SEQ ID NO: 4893407 - DNA, 25 bp, Homo sapien
tctggagtgtgctggatcagttgtc

SEQ ID NO: 4893408 - DNA, 25 bp, Homo sapien
aggagattacagggtccaggttgtg

SEQ ID NO: 4893409 - DNA, 25 bp, Homo sapien
tgcaggagattacagggtccaggtt

SEQ ID NO: 4893410 - DNA, 25 bp, Homo sapien
gagattacagggtccaggttgtggg

SEQ ID NO: 4893411 - DNA, 25 bp, Homo sapien
gattacagggtccaggttgtgggaa

SEQ ID NO: 4893412 - DNA, 25 bp, Homo sapien
cctggtggttcctctagagaggtgt

SEQ ID NO: 4893413 - DNA, 25 bp, Homo sapien
tagagaggtgtttggtggttcctct

SEQ ID NO: 4893414 - DNA, 25 bp, Homo sapien
ggagaggtgcctggtggttcctcta

SEQ ID NO: 4893415 - DNA, 25 bp, Homo sapien
gtttggtggttcctctggagaggtg

SEQ ID NO: 4893416 - DNA, 25 bp, Homo sapien
ggatgtttagtggatcctcttggag

SEQ ID NO: 4893417 - DNA, 25 bp, Homo sapien
ctcttggaggtgtttggtggtttct

SEQ ID NO: 4893418 - DNA, 25 bp, Homo sapien
tggtggttcctctggagaggttttg

SEQ ID NO: 4893419 - DNA, 25 bp, Homo sapien
ggtatttggtggttcctctggagaa

SEQ ID NO: 4893420 - DNA, 25 bp, Homo sapien
actgccgctgcacttagggcttgcc

SEQ ID NO: 4893421 - DNA, 25 bp, Homo sapien
agagagcatcctgcagttcccacag

SEQ ID NO: 4893422 - DNA, 25 bp, Homo sapien
ccgctgcacttagggcttgccaaca

SEQ ID NO: 4893423 - DNA, 25 bp, Homo sapien
gcagagagcatcctgcagttcccac

SEQ ID NO: 4893424 - DNA, 25 bp, Homo sapien
cctgaagaatagttcctgctgccat

SEQ ID NO: 4893425 - DNA, 25 bp, Homo sapien
tgtttttcatttctcagggtgaggg

SEQ ID NO: 4893426 - DNA, 25 bp, Homo sapien
tcagggtgagggtgccttgcatttc

SEQ ID NO: 4893427 - DNA, 25 bp, Homo sapien
tgaaacctgaaacctctgtggtcct

SEQ ID NO: 4893428 - DNA, 25 bp, Homo sapien
tagatgccgcgttgtctctggataa

SEQ ID NO: 4893429 - DNA, 25 bp, Homo sapien
tagattgaacaatgttccctgcaga

SEQ ID NO: 4893430 - DNA, 25 bp, Homo sapien
tttgctttggactgcgttgtgtctt

SEQ ID NO: 4893431 - DNA, 25 bp, Homo sapien
ctctggataactcctttgaatttgc

SEQ ID NO: 4893432 - DNA, 25 bp, Homo sapien
tcttttagcaggtgtagttaaacga

SEQ ID NO: 4893433 - DNA, 25 bp, Homo sapien
tattcttttagcaggtgtagttaaa

SEQ ID NO: 4893434 - DNA, 25 bp, Homo sapien
ttattcttttagcaggtgtagttaa

SEQ ID NO: 4893435 - DNA, 25 bp, Homo sapien
tgagcaaagcgttgacaaatcagat

SEQ ID NO: 4893436 - DNA, 25 bp, Homo sapien
tgcctcctatagcagaaaggtgaat

SEQ ID NO: 4893437 - DNA, 25 bp, Homo sapien
tacaaactgttggtggccctgaatc

SEQ ID NO: 4893438 - DNA, 25 bp, Homo sapien
tagaatacgcctgcatttaccagcc

SEQ ID NO: 4893439 - DNA, 25 bp, Homo sapien
tctccttgtatagttatggtctgtt

SEQ ID NO: 4893440 - DNA, 25 bp, Homo sapien
tagtgagtataagccaacactttgt

SEQ ID NO: 4893441 - DNA, 25 bp, Homo sapien
catcatgtcatgtattagcagtttt

SEQ ID NO: 4893442 - DNA, 25 bp, Homo sapien
aatgattccgtttttgcctcaaaat

SEQ ID NO: 4893443 - DNA, 25 bp, Homo sapien
gcgcgcggccaggccaatcggggcg

SEQ ID NO: 4893444 - DNA, 25 bp, Homo sapien
ggccaggccaatcggggcgcgcggg

SEQ ID NO: 4893445 - DNA, 25 bp, Homo sapien
gcgcggccaggccaatcggggcgcg

SEQ ID NO: 4893446 - DNA, 25 bp, Homo sapien
gcggccaggccaatcggggcgcgcg

SEQ ID NO: 4893447 - DNA, 25 bp, Homo sapien
tttcccacggcccgcggcgcgtgcg

SEQ ID NO: 4893448 - DNA, 25 bp, Homo sapien
ttcccacggcccgcggcgcgtgcgg

SEQ ID NO: 4893449 - DNA, 25 bp, Homo sapien
ttggaaactggtcttatttcttcaa

SEQ ID NO: 4893450 - DNA, 25 bp, Homo sapien
tttggaaactggtcttatttcttca

SEQ ID NO: 4893451 - DNA, 25 bp, Homo sapien
tggaaactggtcttatttcttcaac

SEQ ID NO: 4893452 - DNA, 25 bp, Homo sapien
tattagagccaggtttctccatcag

SEQ ID NO: 4893453 - DNA, 25 bp, Homo sapien
ccatcagcaaagacaaatggttttc

SEQ ID NO: 4893454 - DNA, 25 bp, Homo sapien
ggttctcaatgtgtggtctctgggc

SEQ ID NO: 4893455 - DNA, 25 bp, Homo sapien
gacaaatggttttctagagcagtgg

SEQ ID NO: 4893456 - DNA, 25 bp, Homo sapien
cgctgggcacaactgcttgcagagt

SEQ ID NO: 4893457 - DNA, 25 bp, Homo sapien
ttgctgaatcactgggttagtcccc

SEQ ID NO: 4893458 - DNA, 25 bp, Homo sapien
cactgacccggtggccttttgtaca

SEQ ID NO: 4893459 - DNA, 25 bp, Homo sapien
agagtgcctcatactccgtcactga

SEQ ID NO: 4893460 - DNA, 25 bp, Homo sapien
gagcaacaggcaaactacaccacct

SEQ ID NO: 4893461 - DNA, 25 bp, Homo sapien
aacatggcccgaactaaactcatca

SEQ ID NO: 4893462 - DNA, 25 bp, Homo sapien
catgctgtggaaacttaactcttgc

SEQ ID NO: 4893463 - DNA, 25 bp, Homo sapien
caaagtggtggtcacacaggtgagc

SEQ ID NO: 4893464 - DNA, 25 bp, Homo sapien
tacttcaccctgaaggtctagctca

SEQ ID NO: 4893465 - DNA, 25 bp, Homo sapien
tgaatacctacttcaccctgaaggt

SEQ ID NO: 4893466 - DNA, 25 bp, Homo sapien
gcatgttgaatacctacttcaccct

SEQ ID NO: 4893467 - DNA, 25 bp, Homo sapien
ccccagcatgttgaatacctacttc

SEQ ID NO: 4893468 - DNA, 25 bp, Homo sapien
cagttggcccaggaacaagcccttg

SEQ ID NO: 4893469 - DNA, 25 bp, Homo sapien
ggcccaggaacaagcccttgattca

SEQ ID NO: 4893470 - DNA, 25 bp, Homo sapien
caggaacaagcccttgattcatcca

SEQ ID NO: 4893471 - DNA, 25 bp, Homo sapien
gcccaggaacaagcccttgattcat

SEQ ID NO: 4893472 - DNA, 25 bp, Homo sapien
cgcacccctcctggattgccttttt

SEQ ID NO: 4893473 - DNA, 25 bp, Homo sapien
gcacccctcctggattgccttttta

SEQ ID NO: 4893474 - DNA, 25 bp, Homo sapien
tcctcttgcaatccctcaaaagact

SEQ ID NO: 4893475 - DNA, 25 bp, Homo sapien
ctcaaaagacttatgagtatgtttg

SEQ ID NO: 4893476 - DNA, 25 bp, Homo sapien
ttcagctcagggaggattaacccct

SEQ ID NO: 4893477 - DNA, 25 bp, Homo sapien
cactgcacatactggagggttgtga

SEQ ID NO: 4893478 - DNA, 25 bp, Homo sapien
cagaaagttgctgggagtgggtcat

SEQ ID NO: 4893479 - DNA, 25 bp, Homo sapien
gaggattaaccccttggctgcagaa

SEQ ID NO: 4893480 - DNA, 25 bp, Homo sapien
gcctcatggcctttgccgcacatgt

SEQ ID NO: 4893481 - DNA, 25 bp, Homo sapien
ggcctttgccgcacatgtggcctgg

SEQ ID NO: 4893482 - DNA, 25 bp, Homo sapien
tctctgcacacctagagcctcatgg

SEQ ID NO: 4893483 - DNA, 25 bp, Homo sapien
ctcatggcctttgccgcacatgtgg

SEQ ID NO: 4893484 - DNA, 25 bp, Homo sapien
acatctttagcacttgttcctgagc

SEQ ID NO: 4893485 - DNA, 25 bp, Homo sapien
tgagcacaccgaaaacatctccagg

SEQ ID NO: 4893486 - DNA, 25 bp, Homo sapien
cacagaacctccttagcttgttgag

SEQ ID NO: 4893487 - DNA, 25 bp, Homo sapien
gagggcttcggagaacacagaacct

SEQ ID NO: 4893488 - DNA, 25 bp, Homo sapien
tcatggtcgaattcactagacttcc

SEQ ID NO: 4893489 - DNA, 25 bp, Homo sapien
cagttgcattggtaagagtgacgat

SEQ ID NO: 4893490 - DNA, 25 bp, Homo sapien
gcaaattgctggcatgccatgagga

SEQ ID NO: 4893491 - DNA, 25 bp, Homo sapien
tttgtgacagagagcttgactagca

SEQ ID NO: 4893492 - DNA, 25 bp, Homo sapien
aatacataatacatccacaaagcac

SEQ ID NO: 4893493 - DNA, 25 bp, Homo sapien
taatacataatacatccacaaagca

SEQ ID NO: 4893494 - DNA, 25 bp, Homo sapien
tcctggcattgtccatgctcatccg

SEQ ID NO: 4893495 - DNA, 25 bp, Homo sapien
ctcatccgtgatgaattctcaatac

SEQ ID NO: 4893496 - DNA, 25 bp, Homo sapien
cattgtccatgctcatccgtgatga

SEQ ID NO: 4893497 - DNA, 25 bp, Homo sapien
tggaccctccgtcctggcattgtcc

SEQ ID NO: 4893498 - DNA, 25 bp, Homo sapien
gatgctttaccagaaatatcaagac

SEQ ID NO: 4893499 - DNA, 25 bp, Homo sapien
gaagtttgaccaagtgcctattgta

SEQ ID NO: 4893500 - DNA, 25 bp, Homo sapien
gaaagccagatcagtctacctccaa

SEQ ID NO: 4893501 - DNA, 25 bp, Homo sapien
caagtgccagagagaaccagcactg

SEQ ID NO: 4893502 - DNA, 25 bp, Homo sapien
agcctggctgcttgactcatgtaac

SEQ ID NO: 4893503 - DNA, 25 bp, Homo sapien
gactcatgtaactcaacgtaaacag

SEQ ID NO: 4893504 - DNA, 25 bp, Homo sapien
cacgagcaggcagggtatgcccaca

SEQ ID NO: 4893505 - DNA, 25 bp, Homo sapien
cgtaaacagtaactgggagaggaca

SEQ ID NO: 4893506 - DNA, 25 bp, Homo sapien
gaatctggatgagatgagaatttag

SEQ ID NO: 4893507 - DNA, 25 bp, Homo sapien
tctggatgagatgagaatttaggtg

SEQ ID NO: 4893508 - DNA, 25 bp, Homo sapien
gatgagatgagaatttaggtgctgt

SEQ ID NO: 4893509 - DNA, 25 bp, Homo sapien
ctagaatctggatgagatgagaatt

SEQ ID NO: 4893510 - DNA, 25 bp, Homo sapien
gggctttctgcatagcgctccgctt

SEQ ID NO: 4893511 - DNA, 25 bp, Homo sapien
cagcttctggagttttgtacaatgc

SEQ ID NO: 4893512 - DNA, 25 bp, Homo sapien
taaaggtcccatgttgtgacgatgc

SEQ ID NO: 4893513 - DNA, 25 bp, Homo sapien
gcctgaggaaacctgccaggatatt

SEQ ID NO: 4893514 - DNA, 25 bp, Homo sapien
tcagtgacccagaataccagctttt

SEQ ID NO: 4893515 - DNA, 25 bp, Homo sapien
taactgtgttcgctgctgctgctag

SEQ ID NO: 4893516 - DNA, 25 bp, Homo sapien
taacctgacgccatttcagtgaccc

SEQ ID NO: 4893517 - DNA, 25 bp, Homo sapien
tattaacatgcaacgcaagctctca

SEQ ID NO: 4893518 - DNA, 25 bp, Homo sapien
gtttgggagtgaggctgcgtgtctc

SEQ ID NO: 4893519 - DNA, 25 bp, Homo sapien
catggtttgggagtgaggctgcgtg

SEQ ID NO: 4893520 - DNA, 25 bp, Homo sapien
tggtttgggagtgaggctgcgtgtc

SEQ ID NO: 4893521 - DNA, 25 bp, Homo sapien
tttgggagtgaggctgcgtgtctct

SEQ ID NO: 4893522 - DNA, 25 bp, Homo sapien
cacacacagccggtctcataggaag

SEQ ID NO: 4893523 - DNA, 25 bp, Homo sapien
ctgaggttggtcacacggagattga

SEQ ID NO: 4893524 - DNA, 25 bp, Homo sapien
aatttcagctgaattagatcagagc

SEQ ID NO: 4893525 - DNA, 25 bp, Homo sapien
gatggtgtaaatgggcagcacacac

SEQ ID NO: 4893526 - DNA, 25 bp, Homo sapien
tggcccgctgacaccgtaagtctat

SEQ ID NO: 4893527 - DNA, 25 bp, Homo sapien
tgagcgtccgggcagcaggcgagcc

SEQ ID NO: 4893528 - DNA, 25 bp, Homo sapien
cgctgacaccgtaagtctataccca

SEQ ID NO: 4893529 - DNA, 25 bp, Homo sapien
tgacaccgtaagtctatacccaggg

SEQ ID NO: 4893530 - DNA, 25 bp, Homo sapien
ttcaggccaccgagtggcaggtata

SEQ ID NO: 4893531 - DNA, 25 bp, Homo sapien
caggccaccgagtggcaggtataga

SEQ ID NO: 4893532 - DNA, 25 bp, Homo sapien
aggccccattcaggccaccgagtgg

SEQ ID NO: 4893533 - DNA, 25 bp, Homo sapien
cccattcaggccaccgagtggcagg

SEQ ID NO: 4893534 - DNA, 25 bp, Homo sapien
gctgaagccacgctgaatttcccgt

SEQ ID NO: 4893535 - DNA, 25 bp, Homo sapien
tggaagactgggatcctttgcattg

SEQ ID NO: 4893536 - DNA, 25 bp, Homo sapien
gaaaatggcttgagtgcccgtgctg

SEQ ID NO: 4893537 - DNA, 25 bp, Homo sapien
ctgaatttcccgtgttcctgcagca

SEQ ID NO: 4893538 - DNA, 25 bp, Homo sapien
ggcatagtcttgtccaatacttagg

SEQ ID NO: 4893539 - DNA, 25 bp, Homo sapien
tcccgttggaaagatgggtgcttga

SEQ ID NO: 4893540 - DNA, 25 bp, Homo sapien
tctcaatggcactgggttttctctg

SEQ ID NO: 4893541 - DNA, 25 bp, Homo sapien
tgtagctgtccaatctcccaggtct

SEQ ID NO: 4893542 - DNA, 25 bp, Homo sapien
gcctaagttgacatatccagcctga

SEQ ID NO: 4893543 - DNA, 25 bp, Homo sapien
gagcctgacagccacgttaattgtt

SEQ ID NO: 4893544 - DNA, 25 bp, Homo sapien
cagctggagtgagatatcctcctgc

SEQ ID NO: 4893545 - DNA, 25 bp, Homo sapien
tgctccaccgtaaaaccttctgctg

SEQ ID NO: 4893546 - DNA, 25 bp, Homo sapien
tgtgtcaaaggctactcccaggtgt

SEQ ID NO: 4893547 - DNA, 25 bp, Homo sapien
tttctgatacaatggcggctcctcg

SEQ ID NO: 4893548 - DNA, 25 bp, Homo sapien
tcacgcaaatgttagaggtgccctt

SEQ ID NO: 4893549 - DNA, 25 bp, Homo sapien
ggatggccatcgagttaacctctag

SEQ ID NO: 4893550 - DNA, 25 bp, Homo sapien
ttttttcactgtgtagatcagtacc

SEQ ID NO: 4893551 - DNA, 25 bp, Homo sapien
tagtttactttttgtgatgtactga

SEQ ID NO: 4893552 - DNA, 25 bp, Homo sapien
tgtagatcagtaccttttgggtggt

SEQ ID NO: 4893553 - DNA, 25 bp, Homo sapien
tgatgtactgagtatttgagggtac

SEQ ID NO: 4893554 - DNA, 25 bp, Homo sapien
tcacctggtcttttgtgtgcataca

SEQ ID NO: 4893555 - DNA, 25 bp, Homo sapien
tctattgcaaactttgtgagagcag

SEQ ID NO: 4893556 - DNA, 25 bp, Homo sapien
tcttttatcctcaactctattgcaa

SEQ ID NO: 4893557 - DNA, 25 bp, Homo sapien
tgagagcagagatagagtcacctgg

SEQ ID NO: 4893558 - DNA, 25 bp, Homo sapien
actgcgtttttactgagcgggaagc

SEQ ID NO: 4893559 - DNA, 25 bp, Homo sapien
actgtgttagttcgtcccttgcaaa

SEQ ID NO: 4893560 - DNA, 25 bp, Homo sapien
gcaaactatctccatctgctccgtg

SEQ ID NO: 4893561 - DNA, 25 bp, Homo sapien
ctttaatcacatgtactgcgttttt

SEQ ID NO: 4893562 - DNA, 25 bp, Homo sapien
gtctgttttggcatcactgtataac

SEQ ID NO: 4893563 - DNA, 25 bp, Homo sapien
tctgttttggcatcactgtataacc

SEQ ID NO: 4893564 - DNA, 25 bp, Homo sapien
gcccgaggttcaagcgtccgtcatt

SEQ ID NO: 4893565 - DNA, 25 bp, Homo sapien
aatagggctcggttttctgtctcgc

SEQ ID NO: 4893566 - DNA, 25 bp, Homo sapien
taaaggcagtctttgaatctctagc

SEQ ID NO: 4893567 - DNA, 25 bp, Homo sapien
tttttaaaagaatgtgccggtggca

SEQ ID NO: 4893568 - DNA, 25 bp, Homo sapien
ttagtaggccgcacagagcgtcttc

SEQ ID NO: 4893569 - DNA, 25 bp, Homo sapien
gaggccctccacttgggagctgagc

SEQ ID NO: 4893570 - DNA, 25 bp, Homo sapien
gatagtcacccaggtctacacgcag

SEQ ID NO: 4893571 - DNA, 25 bp, Homo sapien
cacgcagatcaggaagcgagcactc

SEQ ID NO: 4893572 - DNA, 25 bp, Homo sapien
tcccatggaaagtaccaagtgctgt

SEQ ID NO: 4893573 - DNA, 25 bp, Homo sapien
catctgccacctatgaactgtgagg

SEQ ID NO: 4893574 - DNA, 25 bp, Homo sapien
tgattacccataaaagagaccgttg

SEQ ID NO: 4893575 - DNA, 25 bp, Homo sapien
tagcccgagactgaggagctcttga

SEQ ID NO: 4893576 - DNA, 25 bp, Homo sapien
ctgatgctggtgaaagtatcaaggc

SEQ ID NO: 4893577 - DNA, 25 bp, Homo sapien
tctgcaaactgactttctgaactag

SEQ ID NO: 4893578 - DNA, 25 bp, Homo sapien
gaggaaatccctcagaggtaaaagc

SEQ ID NO: 4893579 - DNA, 25 bp, Homo sapien
gggtccctccagtaagaatgcgaat

SEQ ID NO: 4893580 - DNA, 25 bp, Homo sapien
gagccccattgagagctgatccttt

SEQ ID NO: 4893581 - DNA, 25 bp, Homo sapien
ccttttgaccaaagtatcaaagcaa

SEQ ID NO: 4893582 - DNA, 25 bp, Homo sapien
tgtactggagcttgcctgtgaactg

SEQ ID NO: 4893583 - DNA, 25 bp, Homo sapien
ttcctgggacttgctctcttctcca

SEQ ID NO: 4893584 - DNA, 25 bp, Homo sapien
atgtggtaaagataaaacctattct

SEQ ID NO: 4893585 - DNA, 25 bp, Homo sapien
tgtggtaaagataaaacctattctg

SEQ ID NO: 4893586 - DNA, 25 bp, Homo sapien
tcaagctgcagcatctgacctgttc

SEQ ID NO: 4893587 - DNA, 25 bp, Homo sapien
gctgcagcatctgacctgttctctt

SEQ ID NO: 4893588 - DNA, 25 bp, Homo sapien
tgcagcatctgacctgttctcttgc

SEQ ID NO: 4893589 - DNA, 25 bp, Homo sapien
gcagcatctgacctgttctcttgcc

SEQ ID NO: 4893590 - DNA, 25 bp, Homo sapien
ttctattccagtgccgttttcctcc

SEQ ID NO: 4893591 - DNA, 25 bp, Homo sapien
tgtaagggcctgtttgtcaagttta

SEQ ID NO: 4893592 - DNA, 25 bp, Homo sapien
ctctgtaagggcctgtttgtcaagt

SEQ ID NO: 4893593 - DNA, 25 bp, Homo sapien
tattttctattccagtgccgttttc

SEQ ID NO: 4893594 - DNA, 25 bp, Homo sapien
ccgtcataacaggtttatcatgtct

SEQ ID NO: 4893595 - DNA, 25 bp, Homo sapien
agtggattttcttccgtcataacag

SEQ ID NO: 4893596 - DNA, 25 bp, Homo sapien
tatgaagactactgccattctgatt

SEQ ID NO: 4893597 - DNA, 25 bp, Homo sapien
tctgaacaagaatataagcttgaaa

SEQ ID NO: 4893598 - DNA, 25 bp, Homo sapien
tggcaatttagtatttggactttgc

SEQ ID NO: 4893599 - DNA, 25 bp, Homo sapien
tgattctggcaatttagtatttgga

SEQ ID NO: 4893600 - DNA, 25 bp, Homo sapien
ttctggcaatttagtatttggactt

SEQ ID NO: 4893601 - DNA, 25 bp, Homo sapien
gattctggcaatttagtatttggac

SEQ ID NO: 4893602 - DNA, 25 bp, Homo sapien
tagtggattgactcctttgctgaag

SEQ ID NO: 4893603 - DNA, 25 bp, Homo sapien
ttgctgaagtcagttattcatcaag

SEQ ID NO: 4893604 - DNA, 25 bp, Homo sapien
agtggattgactcctttgctgaagt

SEQ ID NO: 4893605 - DNA, 25 bp, Homo sapien
gtggattgactcctttgctgaagtc

SEQ ID NO: 4893606 - DNA, 25 bp, Homo sapien
gagataccagtctgcacaaaagcaa

SEQ ID NO: 4893607 - DNA, 25 bp, Homo sapien
catcctggtcactgtgtagtcacac

SEQ ID NO: 4893608 - DNA, 25 bp, Homo sapien
tagagataccagtctgcacaaaagc

SEQ ID NO: 4893609 - DNA, 25 bp, Homo sapien
gcaaaaatatcatcagcttgcatcc

SEQ ID NO: 4893610 - DNA, 25 bp, Homo sapien
caaaggagtgttggtcctgctttca

SEQ ID NO: 4893611 - DNA, 25 bp, Homo sapien
tactgcatcatgatgagacttaagg

SEQ ID NO: 4893612 - DNA, 25 bp, Homo sapien
aaggaatccgtgtgctccttggcaa

SEQ ID NO: 4893613 - DNA, 25 bp, Homo sapien
gaatgtgatgtgaccactagagatg

SEQ ID NO: 4893614 - DNA, 25 bp, Homo sapien
gacttggttactgtttatgccaaac

SEQ ID NO: 4893615 - DNA, 25 bp, Homo sapien
accaaagacttggttactgtttatg

SEQ ID NO: 4893616 - DNA, 25 bp, Homo sapien
aaagacttggttactgtttatgcca

SEQ ID NO: 4893617 - DNA, 25 bp, Homo sapien
agagaatgcattgaagaccaaagac

SEQ ID NO: 4893618 - DNA, 25 bp, Homo sapien
tcttactgtattacctacatcattg

SEQ ID NO: 4893619 - DNA, 25 bp, Homo sapien
aaatcttactgtattacctacatca

SEQ ID NO: 4893620 - DNA, 25 bp, Homo sapien
ttaaaatcttactgtattacctaca

SEQ ID NO: 4893621 - DNA, 25 bp, Homo sapien
actgtattacctacatcattgaaag

SEQ ID NO: 4893622 - DNA, 25 bp, Homo sapien
gctcttggatgctttacatgacaca

SEQ ID NO: 4893623 - DNA, 25 bp, Homo sapien
taagtgttactatccagtcttctca

SEQ ID NO: 4893624 - DNA, 25 bp, Homo sapien
tgcagaactaggtagctctcaagag

SEQ ID NO: 4893625 - DNA, 25 bp, Homo sapien
tgaaatttgtgttctttacctgctc

SEQ ID NO: 4893626 - DNA, 25 bp, Homo sapien
taaaatagcagaccagactttgggc

SEQ ID NO: 4893627 - DNA, 25 bp, Homo sapien
tacatgatgtcataaaggtctgacc

SEQ ID NO: 4893628 - DNA, 25 bp, Homo sapien
gccctccagagtcttgctattagta

SEQ ID NO: 4893629 - DNA, 25 bp, Homo sapien
aaaaatgtggcagcatgctacatga

SEQ ID NO: 4893630 - DNA, 25 bp, Homo sapien
caagggacaaagcagccaggcattt

SEQ ID NO: 4893631 - DNA, 25 bp, Homo sapien
gacaaagcagccaggcattttccca

SEQ ID NO: 4893632 - DNA, 25 bp, Homo sapien
agacaagggacaaagcagccaggca

SEQ ID NO: 4893633 - DNA, 25 bp, Homo sapien
ggctgtgcagacaagggacaaagca

SEQ ID NO: 4893634 - DNA, 25 bp, Homo sapien
tcagagtaagcttgggtggttgcac

SEQ ID NO: 4893635 - DNA, 25 bp, Homo sapien
gggctcctgtagcttctggtggtta

SEQ ID NO: 4893636 - DNA, 25 bp, Homo sapien
caaagcatggccattcaggatcacc

SEQ ID NO: 4893637 - DNA, 25 bp, Homo sapien
aggatcacctcttgtatcctcggta

SEQ ID NO: 4893638 - DNA, 25 bp, Homo sapien
gtggctgaggacaaaagctgtatac

SEQ ID NO: 4893639 - DNA, 25 bp, Homo sapien
gctgtatacactgtacaaacagagc

SEQ ID NO: 4893640 - DNA, 25 bp, Homo sapien
tgaacagtggctgaggacaaaagct

SEQ ID NO: 4893641 - DNA, 25 bp, Homo sapien
ccaaagcagcagtacactgagtcat

SEQ ID NO: 4893642 - DNA, 25 bp, Homo sapien
catatggatacaactgctggccaca

SEQ ID NO: 4893643 - DNA, 25 bp, Homo sapien
gacgagtgtggagcattcttccgcc

SEQ ID NO: 4893644 - DNA, 25 bp, Homo sapien
tcacttgacctgtcatgtgcatatg

SEQ ID NO: 4893645 - DNA, 25 bp, Homo sapien
tggagcattcttccgccttcacttc

SEQ ID NO: 4893646 - DNA, 25 bp, Homo sapien
tagacgagaacagacatctgaacaa

SEQ ID NO: 4893647 - DNA, 25 bp, Homo sapien
gctgattagacgagaacagacatct

SEQ ID NO: 4893648 - DNA, 25 bp, Homo sapien
gattagacgagaacagacatctgaa

SEQ ID NO: 4893649 - DNA, 25 bp, Homo sapien
cacagctgattagacgagaacagac

SEQ ID NO: 4893650 - DNA, 25 bp, Homo sapien
aagaggacatctgaagtttgaagca

SEQ ID NO: 4893651 - DNA, 25 bp, Homo sapien
acgatggtgttgatgactggtagca

SEQ ID NO: 4893652 - DNA, 25 bp, Homo sapien
gcattccaaaagtaaagtttagcat

SEQ ID NO: 4893653 - DNA, 25 bp, Homo sapien
aagtttagcatatgttgatttgtga

SEQ ID NO: 4893654 - DNA, 25 bp, Homo sapien
tagctttggctttaaaagtccatac

SEQ ID NO: 4893655 - DNA, 25 bp, Homo sapien
caactgctagcagctttgagctact

SEQ ID NO: 4893656 - DNA, 25 bp, Homo sapien
attcttgtctccttacttatccata

SEQ ID NO: 4893657 - DNA, 25 bp, Homo sapien
tgctctttgctaggcctagtgctag

SEQ ID NO: 4893658 - DNA, 25 bp, Homo sapien
gacatctacctatacttaatctaag

SEQ ID NO: 4893659 - DNA, 25 bp, Homo sapien
aaggcaaaatggagtaaagtggcaa

SEQ ID NO: 4893660 - DNA, 25 bp, Homo sapien
ctctgccccttgaaagaagtattaa

SEQ ID NO: 4893661 - DNA, 25 bp, Homo sapien
tctttagatgagtgaaataccctca

SEQ ID NO: 4893662 - DNA, 25 bp, Homo sapien
catctatcagtagtataggtctcaa

SEQ ID NO: 4893663 - DNA, 25 bp, Homo sapien
gccacaggtgttgattgttataaaa

SEQ ID NO: 4893664 - DNA, 25 bp, Homo sapien
ccaagcttggagtgacctaaagcat

SEQ ID NO: 4893665 - DNA, 25 bp, Homo sapien
aaaagcatggctagatttacttcag

SEQ ID NO: 4893666 - DNA, 25 bp, Homo sapien
tcagggctgagtgaatcaaagtgtc

SEQ ID NO: 4893667 - DNA, 25 bp, Homo sapien
cattctgaatcaagcacactgtatg

SEQ ID NO: 4893668 - DNA, 25 bp, Homo sapien
tagaacctgtctcctactttgaaaa

SEQ ID NO: 4893669 - DNA, 25 bp, Homo sapien
tagacatatttgcatagaggccaag

SEQ ID NO: 4893670 - DNA, 25 bp, Homo sapien
tattttggttgaagacaccagactg

SEQ ID NO: 4893671 - DNA, 25 bp, Homo sapien
tccaaggaaagaactactagctaca

SEQ ID NO: 4893672 - DNA, 25 bp, Homo sapien
gactgaagtaaacagctgtgcatcc

SEQ ID NO: 4893673 - DNA, 25 bp, Homo sapien
ggtgacttgagagtggaacctccta

SEQ ID NO: 4893674 - DNA, 25 bp, Homo sapien
gagcaagagagacatggaccccttc

SEQ ID NO: 4893675 - DNA, 25 bp, Homo sapien
gatagcgtattaaacagatacccca

SEQ ID NO: 4893676 - DNA, 25 bp, Homo sapien
gcaagatgcctagacaattaaatgg

SEQ ID NO: 4893677 - DNA, 25 bp, Homo sapien
ccccaagtatcctaaggaagctgta

SEQ ID NO: 4893678 - DNA, 25 bp, Homo sapien
ctttgggaggtaaccttctgtcttg

SEQ ID NO: 4893679 - DNA, 25 bp, Homo sapien
cttctttgtccactctttctgtgaa

SEQ ID NO: 4893680 - DNA, 25 bp, Homo sapien
tgaagtgaagctttgggaggtaacc

SEQ ID NO: 4893681 - DNA, 25 bp, Homo sapien
ctttgtccactctttctgtgaagtg

SEQ ID NO: 4893682 - DNA, 25 bp, Homo sapien
tacctccttagtagaaccagcagga

SEQ ID NO: 4893683 - DNA, 25 bp, Homo sapien
ctccttagtagaaccagcaggagct

SEQ ID NO: 4893684 - DNA, 25 bp, Homo sapien
ttttacctccttagtagaaccagca

SEQ ID NO: 4893685 - DNA, 25 bp, Homo sapien
ctgaaagcgagtcgcctttattttt

SEQ ID NO: 4893686 - DNA, 25 bp, Homo sapien
tttaattccacattgattaggagcc

SEQ ID NO: 4893687 - DNA, 25 bp, Homo sapien
caggtatccggtagagcgccctgga

SEQ ID NO: 4893688 - DNA, 25 bp, Homo sapien
aggagccaaaccttcagggcaggta

SEQ ID NO: 4893689 - DNA, 25 bp, Homo sapien
cttcagggcaggtatccggtagagc

SEQ ID NO: 4893690 - DNA, 25 bp, Homo sapien
ccagccagtaaatttgaaattgata

SEQ ID NO: 4893691 - DNA, 25 bp, Homo sapien
gatacaagacttttatctaatctga

SEQ ID NO: 4893692 - DNA, 25 bp, Homo sapien
caagacttttatctaatctgaggtc

SEQ ID NO: 4893693 - DNA, 25 bp, Homo sapien
tctaatctgaggtcatattccagtt

SEQ ID NO: 4893694 - DNA, 25 bp, Homo sapien
ctgggaagatgtgaccagcatggga

SEQ ID NO: 4893695 - DNA, 25 bp, Homo sapien
aggtaaaccaactgctgcttcggtg

SEQ ID NO: 4893696 - DNA, 25 bp, Homo sapien
ggcctggagccggtatgtgcctgtg

SEQ ID NO: 4893697 - DNA, 25 bp, Homo sapien
ccagctctcagaaggggcctggagc

SEQ ID NO: 4893698 - DNA, 25 bp, Homo sapien
ttacaactcctgctggggtatcaca

SEQ ID NO: 4893699 - DNA, 25 bp, Homo sapien
agtcctccagttgatctccagcatc

SEQ ID NO: 4893700 - DNA, 25 bp, Homo sapien
taatgcggtcactgtcctttacaac

SEQ ID NO: 4893701 - DNA, 25 bp, Homo sapien
gggtatcacacgttggcttctcatt

SEQ ID NO: 4893702 - DNA, 25 bp, Homo sapien
ccctggtggctctggtatgtaataa

SEQ ID NO: 4893703 - DNA, 25 bp, Homo sapien
gaatactcgaggtgatagatgcccc

SEQ ID NO: 4893704 - DNA, 25 bp, Homo sapien
gaaagcaagagtcttgggctccacc

SEQ ID NO: 4893705 - DNA, 25 bp, Homo sapien
tactcaagctttcatcctcaggcaa

SEQ ID NO: 4893706 - DNA, 25 bp, Homo sapien
tataacacggaatttgtgattttac

SEQ ID NO: 4893707 - DNA, 25 bp, Homo sapien
cgagatctacagtttttagctccac

SEQ ID NO: 4893708 - DNA, 25 bp, Homo sapien
tatggccaagtagtaataaattgtg

SEQ ID NO: 4893709 - DNA, 25 bp, Homo sapien
gacagttgtatttctgttcctagct

SEQ ID NO: 4893710 - DNA, 25 bp, Homo sapien
aaggaaatgtcaactcttggacttc

SEQ ID NO: 4893711 - DNA, 25 bp, Homo sapien
gaaatgtcaactcttggacttctga

SEQ ID NO: 4893712 - DNA, 25 bp, Homo sapien
ggaagtaaggaaatgtcaactcttg

SEQ ID NO: 4893713 - DNA, 25 bp, Homo sapien
gtaaggaaatgtcaactcttggact

SEQ ID NO: 4893714 - DNA, 25 bp, Homo sapien
gggatgtgtttgaaacagacaccgt

SEQ ID NO: 4893715 - DNA, 25 bp, Homo sapien
ggcatcacgttgatagataaagata

SEQ ID NO: 4893716 - DNA, 25 bp, Homo sapien
tattgtggtataggcaaggcagcca

SEQ ID NO: 4893717 - DNA, 25 bp, Homo sapien
cagacaccgtttcagagaccttgga

SEQ ID NO: 4893718 - DNA, 25 bp, Homo sapien
gagatcccatcagtacccaaattat

SEQ ID NO: 4893719 - DNA, 25 bp, Homo sapien
tacaaggtatgtaaacctctgtctg

SEQ ID NO: 4893720 - DNA, 25 bp, Homo sapien
tgagttttttatcccagagagatcc

SEQ ID NO: 4893721 - DNA, 25 bp, Homo sapien
caaattttacatgaacagcaaggta

SEQ ID NO: 4893722 - DNA, 25 bp, Homo sapien
gcctttctgctcagaggacctcagt

SEQ ID NO: 4893723 - DNA, 25 bp, Homo sapien
gaattctcagcctagcagtgaaggt

SEQ ID NO: 4893724 - DNA, 25 bp, Homo sapien
tccttgtctcaagtcagctggtgcc

SEQ ID NO: 4893725 - DNA, 25 bp, Homo sapien
ggcctagaggcagacgtcagaattc

SEQ ID NO: 4893726 - DNA, 25 bp, Homo sapien
tggcagtgctccattaaatggaaac

SEQ ID NO: 4893727 - DNA, 25 bp, Homo sapien
ggcagtgctccattaaatggaaact

SEQ ID NO: 4893728 - DNA, 25 bp, Homo sapien
tattaccagtattagtatctgtctg

SEQ ID NO: 4893729 - DNA, 25 bp, Homo sapien
tcttcaagttagaagacattcaagc

SEQ ID NO: 4893730 - DNA, 25 bp, Homo sapien
ttttgatggaaatggtaatactgtc

SEQ ID NO: 4893731 - DNA, 25 bp, Homo sapien
cattctggtactaatctagcatttc

SEQ ID NO: 4893732 - DNA, 25 bp, Homo sapien
gaacagtatgagaccaaaatgtcct

SEQ ID NO: 4893733 - DNA, 25 bp, Homo sapien
taagaagaacaaagtagtagaacag

SEQ ID NO: 4893734 - DNA, 25 bp, Homo sapien
tactgggttgtggattttgaccaag

SEQ ID NO: 4893735 - DNA, 25 bp, Homo sapien
gtcttcggatatattctccatactg

SEQ ID NO: 4893736 - DNA, 25 bp, Homo sapien
gaagccgtctgatgacaggatgagc

SEQ ID NO: 4893737 - DNA, 25 bp, Homo sapien
aatcaggaagccgtctgatgacagg

SEQ ID NO: 4893738 - DNA, 25 bp, Homo sapien
tcaggaagccgtctgatgacaggat

SEQ ID NO: 4893739 - DNA, 25 bp, Homo sapien
cttgtaaatcaggaagccgtctgat

SEQ ID NO: 4893740 - DNA, 25 bp, Homo sapien
gacttgggccttagtgaggtctcac

SEQ ID NO: 4893741 - DNA, 25 bp, Homo sapien
tttatgcaggcatcgaaccagcgtc

SEQ ID NO: 4893742 - DNA, 25 bp, Homo sapien
tgacatcaggagaacccaggacttg

SEQ ID NO: 4893743 - DNA, 25 bp, Homo sapien
gcttactgctaacatggagcctgct

SEQ ID NO: 4893744 - DNA, 25 bp, Homo sapien
aggtactatcaagggttggcctggc

SEQ ID NO: 4893745 - DNA, 25 bp, Homo sapien
tcaggtactatcaagggttggcctg

SEQ ID NO: 4893746 - DNA, 25 bp, Homo sapien
caggtactatcaagggttggcctgg

SEQ ID NO: 4893747 - DNA, 25 bp, Homo sapien
ggtactatcaagggttggcctggct

SEQ ID NO: 4893748 - DNA, 25 bp, Homo sapien
taatgtagttcgtattttcctgcac

SEQ ID NO: 4893749 - DNA, 25 bp, Homo sapien
ggccccgtgtcttggaagcacctgt

SEQ ID NO: 4893750 - DNA, 25 bp, Homo sapien
tgtggtgccattaacttccttcagt

SEQ ID NO: 4893751 - DNA, 25 bp, Homo sapien
tcagttcctggagcattgcagtcaa

SEQ ID NO: 4893752 - DNA, 25 bp, Homo sapien
tggaaagccgcgtgaagggagcacg

SEQ ID NO: 4893753 - DNA, 25 bp, Homo sapien
cgctttgggtggaaagccgcgtgaa

SEQ ID NO: 4893754 - DNA, 25 bp, Homo sapien
ccgtgatgcgctttgggtggaaagc

SEQ ID NO: 4893755 - DNA, 25 bp, Homo sapien
gtgaagggagcacggcgcagccagc

SEQ ID NO: 4893756 - DNA, 25 bp, Homo sapien
ttaaacttagcacagtcacctgatt

SEQ ID NO: 4893757 - DNA, 25 bp, Homo sapien
aattttgatctggtctatttctagt

SEQ ID NO: 4893758 - DNA, 25 bp, Homo sapien
tgatctggtctatttctagtctgag

SEQ ID NO: 4893759 - DNA, 25 bp, Homo sapien
ttagcacagtcacctgattggcata

SEQ ID NO: 4893760 - DNA, 25 bp, Homo sapien
gctatctccaccctctgtcttgtgg

SEQ ID NO: 4893761 - DNA, 25 bp, Homo sapien
tgaagtatgctgtccttaccatgga

SEQ ID NO: 4893762 - DNA, 25 bp, Homo sapien
tcttgtggcctgatattgacatttt

SEQ ID NO: 4893763 - DNA, 25 bp, Homo sapien
catggaacttatggtcctgaagagg

SEQ ID NO: 4893764 - DNA, 25 bp, Homo sapien
ctgcagccttgacctcttgggttca

SEQ ID NO: 4893765 - DNA, 25 bp, Homo sapien
tacagcggtgctgccagggctcact

SEQ ID NO: 4893766 - DNA, 25 bp, Homo sapien
cagcggtgctgccagggctcactgc

SEQ ID NO: 4893767 - DNA, 25 bp, Homo sapien
gcagccttgacctcttgggttcaag

SEQ ID NO: 4893768 - DNA, 25 bp, Homo sapien
aagaaggccggattcagtagctcac

SEQ ID NO: 4893769 - DNA, 25 bp, Homo sapien
gttactagtaccagtgcctgtggca

SEQ ID NO: 4893770 - DNA, 25 bp, Homo sapien
tctaagatctcttacatagctgggc

SEQ ID NO: 4893771 - DNA, 25 bp, Homo sapien
cagcatgggcgaatggcaaacactt

SEQ ID NO: 4893772 - DNA, 25 bp, Homo sapien
ggtgatgtggccttccctttttcag

SEQ ID NO: 4893773 - DNA, 25 bp, Homo sapien
tgatgtggccttccctttttcagtt

SEQ ID NO: 4893774 - DNA, 25 bp, Homo sapien
gtgatgtggccttccctttttcagt

SEQ ID NO: 4893775 - DNA, 25 bp, Homo sapien
tcaggacctcgggtctcatctcaaa

SEQ ID NO: 4893776 - DNA, 25 bp, Homo sapien
tcatctcctcggatcaccttgaact

SEQ ID NO: 4893777 - DNA, 25 bp, Homo sapien
gacctcgggtctcatctcaaaaact

SEQ ID NO: 4893778 - DNA, 25 bp, Homo sapien
ttcatctcctcggatcaccttgaac

SEQ ID NO: 4893779 - DNA, 25 bp, Homo sapien
agcgactccaaccatcactcccagg

SEQ ID NO: 4893780 - DNA, 25 bp, Homo sapien
aacacctgcacaggagccagcgact

SEQ ID NO: 4893781 - DNA, 25 bp, Homo sapien
gcagagggctgtgaaatcagagccc

SEQ ID NO: 4893782 - DNA, 25 bp, Homo sapien
ccaggcagagggctgtgaaatcaga

SEQ ID NO: 4893783 - DNA, 25 bp, Homo sapien
tttctagtctgccttctggactctt

SEQ ID NO: 4893784 - DNA, 25 bp, Homo sapien
cttttctagtctgccttctggactc

SEQ ID NO: 4893785 - DNA, 25 bp, Homo sapien
caccttttctagtctgccttctgga

SEQ ID NO: 4893786 - DNA, 25 bp, Homo sapien
tctagtctgccttctggactcttca

SEQ ID NO: 4893787 - DNA, 25 bp, Homo sapien
taataaaacactttcgatgctatgc

SEQ ID NO: 4893788 - DNA, 25 bp, Homo sapien
tctgttgctggtttgaccacagctg

SEQ ID NO: 4893789 - DNA, 25 bp, Homo sapien
tatgtgtcggcttgactcgtgcagc

SEQ ID NO: 4893790 - DNA, 25 bp, Homo sapien
tctcaactactcttggaagatgtgc

SEQ ID NO: 4893791 - DNA, 25 bp, Homo sapien
ttgatcctacatagactggtacagg

SEQ ID NO: 4893792 - DNA, 25 bp, Homo sapien
taccagtacactgctgctaatgagg

SEQ ID NO: 4893793 - DNA, 25 bp, Homo sapien
tcagaggaggacattggaaagaact

SEQ ID NO: 4893794 - DNA, 25 bp, Homo sapien
gcagttcagctggtgatctctcagt

SEQ ID NO: 4893795 - DNA, 25 bp, Homo sapien
tgccagggttctctgccaccagtgg

SEQ ID NO: 4893796 - DNA, 25 bp, Homo sapien
ttgatgccagggttctctgccacca

SEQ ID NO: 4893797 - DNA, 25 bp, Homo sapien
ttcccaaagagcttgatgccagggt

SEQ ID NO: 4893798 - DNA, 25 bp, Homo sapien
ccaaagagcttgatgccagggttct

SEQ ID NO: 4893799 - DNA, 25 bp, Homo sapien
tgcaagcaagtgccagatctgcaca

SEQ ID NO: 4893800 - DNA, 25 bp, Homo sapien
ctgcaagcaagtgccagatctgcac

SEQ ID NO: 4893801 - DNA, 25 bp, Homo sapien
gcaagcaagtgccagatctgcacat

SEQ ID NO: 4893802 - DNA, 25 bp, Homo sapien
tggagtaagtgaggcactccacgat

SEQ ID NO: 4893803 - DNA, 25 bp, Homo sapien
catggagtaagtgaggcactccacg

SEQ ID NO: 4893804 - DNA, 25 bp, Homo sapien
agtaagtgaggcactccacgatggg

SEQ ID NO: 4893805 - DNA, 25 bp, Homo sapien
gagtaagtgaggcactccacgatgg

SEQ ID NO: 4893806 - DNA, 25 bp, Homo sapien
gtcgcctgtgagcagctggatgatc

SEQ ID NO: 4893807 - DNA, 25 bp, Homo sapien
tgtcgcctgtgagcagctggatgat

SEQ ID NO: 4893808 - DNA, 25 bp, Homo sapien
ctggatgatctcgaaggcgtgcttg

SEQ ID NO: 4893809 - DNA, 25 bp, Homo sapien
cagctggatgatctcgaaggcgtgc

SEQ ID NO: 4893810 - DNA, 25 bp, Homo sapien
gctcgcccagtgagtgtggagtcct

SEQ ID NO: 4893811 - DNA, 25 bp, Homo sapien
gctcctgtgcactgcggccagatgg

SEQ ID NO: 4893812 - DNA, 25 bp, Homo sapien
tcacacggcttaatggggacacggc

SEQ ID NO: 4893813 - DNA, 25 bp, Homo sapien
acgatcctggctcgcccagtgagtg

SEQ ID NO: 4893814 - DNA, 25 bp, Homo sapien
agcactgatgagctcatctgccagg

SEQ ID NO: 4893815 - DNA, 25 bp, Homo sapien
ttgacagcactgatgagctcatctg

SEQ ID NO: 4893816 - DNA, 25 bp, Homo sapien
cttgacagcactgatgagctcatct

SEQ ID NO: 4893817 - DNA, 25 bp, Homo sapien
actgatgagctcatctgccaggaac

SEQ ID NO: 4893818 - DNA, 25 bp, Homo sapien
tcttcttgctagcataggagttgga

SEQ ID NO: 4893819 - DNA, 25 bp, Homo sapien
ccttcttcttgctagcataggagtt

SEQ ID NO: 4893820 - DNA, 25 bp, Homo sapien
cttcttgctagcataggagttggag

SEQ ID NO: 4893821 - DNA, 25 bp, Homo sapien
taatttgattaactacagtaggcat

SEQ ID NO: 4893822 - DNA, 25 bp, Homo sapien
aacctgcctcgtgcgggtaccctgg

SEQ ID NO: 4893823 - DNA, 25 bp, Homo sapien
tgtctttcttgtccccacgccaagg

SEQ ID NO: 4893824 - DNA, 25 bp, Homo sapien
gtttagaccacaggcaattctgatc

SEQ ID NO: 4893825 - DNA, 25 bp, Homo sapien
caaggggtgctctggcctgaaatcc

SEQ ID NO: 4893826 - DNA, 25 bp, Homo sapien
gacattttcgtgctaaaacagccca

SEQ ID NO: 4893827 - DNA, 25 bp, Homo sapien
tctggataaacacttcttgctgagc

SEQ ID NO: 4893828 - DNA, 25 bp, Homo sapien
tgacaactttgagctgcacgggcac

SEQ ID NO: 4893829 - DNA, 25 bp, Homo sapien
tgtcaatgtgccgtgaaatgcagac

SEQ ID NO: 4893830 - DNA, 25 bp, Homo sapien
gtagtgacagagttcctatatttgg

SEQ ID NO: 4893831 - DNA, 25 bp, Homo sapien
acagagttcctatatttgggctcac

SEQ ID NO: 4893832 - DNA, 25 bp, Homo sapien
gacagagttcctatatttgggctca

SEQ ID NO: 4893833 - DNA, 25 bp, Homo sapien
tgagtagtgacagagttcctatatt

SEQ ID NO: 4893834 - DNA, 25 bp, Homo sapien
tccttacaagtagcaaatacatttc

SEQ ID NO: 4893835 - DNA, 25 bp, Homo sapien
tgaaaccaagtgagcttattttagc

SEQ ID NO: 4893836 - DNA, 25 bp, Homo sapien
gatgccgaattattctcccagatag

SEQ ID NO: 4893837 - DNA, 25 bp, Homo sapien
cccagatagtttctggcaggatgaa

SEQ ID NO: 4893838 - DNA, 25 bp, Homo sapien
gtgtccagtcagtttctcgaacctg

SEQ ID NO: 4893839 - DNA, 25 bp, Homo sapien
tatagcccatatggaaagagtgtcc

SEQ ID NO: 4893840 - DNA, 25 bp, Homo sapien
tgaggcaccacactacagtaagagc

SEQ ID NO: 4893841 - DNA, 25 bp, Homo sapien
aacctggcaggtgaacaaggagcag

SEQ ID NO: 4893842 - DNA, 25 bp, Homo sapien
ggcctcactatggtcatctgtccaa

SEQ ID NO: 4893843 - DNA, 25 bp, Homo sapien
tacagtaagatatgtgcaaggtttc

SEQ ID NO: 4893844 - DNA, 25 bp, Homo sapien
aacgaaatacagtcatacagtaaga

SEQ ID NO: 4893845 - DNA, 25 bp, Homo sapien
cagagactcaaaacgaaatacagtc

SEQ ID NO: 4893846 - DNA, 25 bp, Homo sapien
gtgaagactgttgcaggtgacatca

SEQ ID NO: 4893847 - DNA, 25 bp, Homo sapien
tgaagactgttgcaggtgacatcat

SEQ ID NO: 4893848 - DNA, 25 bp, Homo sapien
agaggtaagcaggatgtgcaaaggc

SEQ ID NO: 4893849 - DNA, 25 bp, Homo sapien
ctagagaggtaagcaggatgtgcaa

SEQ ID NO: 4893850 - DNA, 25 bp, Homo sapien
tagagaggtaagcaggatgtgcaaa

SEQ ID NO: 4893851 - DNA, 25 bp, Homo sapien
ggtaagcaggatgtgcaaaggccat

SEQ ID NO: 4893852 - DNA, 25 bp, Homo sapien
tagagcaacttgtaaacgactgtat

SEQ ID NO: 4893853 - DNA, 25 bp, Homo sapien
tcagaccatttagagcaacttgtaa

SEQ ID NO: 4893854 - DNA, 25 bp, Homo sapien
acttgtaaacgactgtatttattga

SEQ ID NO: 4893855 - DNA, 25 bp, Homo sapien
catttagagcaacttgtaaacgact

SEQ ID NO: 4893856 - DNA, 25 bp, Homo sapien
cacaaggaagaggaatacccgagga

SEQ ID NO: 4893857 - DNA, 25 bp, Homo sapien
tgctgtttgacattcacaaggaaga

SEQ ID NO: 4893858 - DNA, 25 bp, Homo sapien
ggaagaggaatacccgaggattcat

SEQ ID NO: 4893859 - DNA, 25 bp, Homo sapien
agctgctgtttgacattcacaagga

SEQ ID NO: 4893860 - DNA, 25 bp, Homo sapien
tctgtgggccttgagtgtcatacca

SEQ ID NO: 4893861 - DNA, 25 bp, Homo sapien
gagctctaaagggtcagggaagcct

SEQ ID NO: 4893862 - DNA, 25 bp, Homo sapien
caccagcctcgaggtagaccatgga

SEQ ID NO: 4893863 - DNA, 25 bp, Homo sapien
agggaagcctcgtgaccagatcgta

SEQ ID NO: 4893864 - DNA, 25 bp, Homo sapien
gccctgggcatcccgtggaagaaga

SEQ ID NO: 4893865 - DNA, 25 bp, Homo sapien
cctgggcatcccgtggaagaagagc

SEQ ID NO: 4893866 - DNA, 25 bp, Homo sapien
ctgggcatcccgtggaagaagagca

SEQ ID NO: 4893867 - DNA, 25 bp, Homo sapien
tgggcatcccgtggaagaagagcag

SEQ ID NO: 4893868 - DNA, 25 bp, Homo sapien
ctgatgaagttctgctgactctccc

SEQ ID NO: 4893869 - DNA, 25 bp, Homo sapien
actgatgaagttctgctgactctcc

SEQ ID NO: 4893870 - DNA, 25 bp, Homo sapien
gatgaagttctgctgactctccccc

SEQ ID NO: 4893871 - DNA, 25 bp, Homo sapien
tgatgaagttctgctgactctcccc

SEQ ID NO: 4893872 - DNA, 25 bp, Homo sapien
cccaaaccagtcttcctcttgaatt

SEQ ID NO: 4893873 - DNA, 25 bp, Homo sapien
tccccaaaccagtcttcctcttgaa

SEQ ID NO: 4893874 - DNA, 25 bp, Homo sapien
aaccagtcttcctcttgaattctca

SEQ ID NO: 4893875 - DNA, 25 bp, Homo sapien
caaaccagtcttcctcttgaattct

SEQ ID NO: 4893876 - DNA, 25 bp, Homo sapien
cattttgtgcctttcaccggaagct

SEQ ID NO: 4893877 - DNA, 25 bp, Homo sapien
tttcaccggaagctgtgagatctga

SEQ ID NO: 4893878 - DNA, 25 bp, Homo sapien
ccggaagctgtgagatctgacttca

SEQ ID NO: 4893879 - DNA, 25 bp, Homo sapien
tgcctttcaccggaagctgtgagat

SEQ ID NO: 4893880 - DNA, 25 bp, Homo sapien
atttccacaccttctctggatacag

SEQ ID NO: 4893881 - DNA, 25 bp, Homo sapien
tttccacaccttctctggatacagg

SEQ ID NO: 4893882 - DNA, 25 bp, Homo sapien
ttatggtccaaactcgatgctgttc

SEQ ID NO: 4893883 - DNA, 25 bp, Homo sapien
gaacagtactaccttgggaaatcat

SEQ ID NO: 4893884 - DNA, 25 bp, Homo sapien
taaaccagatgagaatcagtaggca

SEQ ID NO: 4893885 - DNA, 25 bp, Homo sapien
tatcgtattcaattcatagctgcct

SEQ ID NO: 4893886 - DNA, 25 bp, Homo sapien
aactgtgagaattgtgtgctagcac

SEQ ID NO: 4893887 - DNA, 25 bp, Homo sapien
tgcactggaacttaaggttatagag

SEQ ID NO: 4893888 - DNA, 25 bp, Homo sapien
gaagctcctttattaaactgtgaga

SEQ ID NO: 4893889 - DNA, 25 bp, Homo sapien
gctagcacaatgcaaagattgttgg

SEQ ID NO: 4893890 - DNA, 25 bp, Homo sapien
tagtgcagcggtgatgcaaacaagg

SEQ ID NO: 4893891 - DNA, 25 bp, Homo sapien
catagtgcagcggtgatgcaaacaa

SEQ ID NO: 4893892 - DNA, 25 bp, Homo sapien
atagtgcagcggtgatgcaaacaag

SEQ ID NO: 4893893 - DNA, 25 bp, Homo sapien
gagggtcaaacttgactgtcgttca

SEQ ID NO: 4893894 - DNA, 25 bp, Homo sapien
tgatctttgagggtcaaacttgact

SEQ ID NO: 4893895 - DNA, 25 bp, Homo sapien
tggtagaggtactttgcctctttag

SEQ ID NO: 4893896 - DNA, 25 bp, Homo sapien
actgtcgttcactgccttggtagag

SEQ ID NO: 4893897 - DNA, 25 bp, Homo sapien
tatgttaaaggcttgaacctcctaa

SEQ ID NO: 4893898 - DNA, 25 bp, Homo sapien
caattggttattcacagttggttgc

SEQ ID NO: 4893899 - DNA, 25 bp, Homo sapien
caagctttggctggtcccaaggtag

SEQ ID NO: 4893900 - DNA, 25 bp, Homo sapien
tacagttatagattaatgggaaggg

SEQ ID NO: 4893901 - DNA, 25 bp, Homo sapien
ttctacggacgttgtgagcggctcc

SEQ ID NO: 4893902 - DNA, 25 bp, Homo sapien
cgtgcgttcactgggaagtattgac

SEQ ID NO: 4893903 - DNA, 25 bp, Homo sapien
gcggctccgaagattgtgtgtttaa

SEQ ID NO: 4893904 - DNA, 25 bp, Homo sapien
catgggtgttacatcaccagcagcc

SEQ ID NO: 4893905 - DNA, 25 bp, Homo sapien
tgcaaataactgtgcggtgggagct

SEQ ID NO: 4893906 - DNA, 25 bp, Homo sapien
cctttgatgcattgtgcgaggcagc

SEQ ID NO: 4893907 - DNA, 25 bp, Homo sapien
tggcggtgcccaaggaagtgaactt

SEQ ID NO: 4893908 - DNA, 25 bp, Homo sapien
tttcacgcgaagaggttacgaccac

SEQ ID NO: 4893909 - DNA, 25 bp, Homo sapien
aacagctggcgagtgtcagggtctg

SEQ ID NO: 4893910 - DNA, 25 bp, Homo sapien
cgagtgtcagggtctggccgcctcc

SEQ ID NO: 4893911 - DNA, 25 bp, Homo sapien
ccgggctacgcggaggacaaacagc

SEQ ID NO: 4893912 - DNA, 25 bp, Homo sapien
cgggctacgcggaggacaaacagct

SEQ ID NO: 4893913 - DNA, 25 bp, Homo sapien
tggcggaggtcgaatggcaaatgaa

SEQ ID NO: 4893914 - DNA, 25 bp, Homo sapien
ctggcggaggtcgaatggcaaatga

SEQ ID NO: 4893915 - DNA, 25 bp, Homo sapien
aggcacgctaaactgctcggctccg

SEQ ID NO: 4893916 - DNA, 25 bp, Homo sapien
cggcggagcgtttccgtccgaccag

SEQ ID NO: 4893917 - DNA, 25 bp, Homo sapien
gccggcttcgcaggcgctgagggtg

SEQ ID NO: 4893918 - DNA, 25 bp, Homo sapien
ggctccgccacataacgaagcgaca

SEQ ID NO: 4893919 - DNA, 25 bp, Homo sapien
ccttcgaagttgagcagcggagtgc

SEQ ID NO: 4893920 - DNA, 25 bp, Homo sapien
cggcggagaggtgaggagcgagcct

SEQ ID NO: 4893921 - DNA, 25 bp, Homo sapien
tcgctcccgggtctgctgcacgcgt

SEQ ID NO: 4893922 - DNA, 25 bp, Homo sapien
tccgggcagcgtcccgcgcggagaa

SEQ ID NO: 4893923 - DNA, 25 bp, Homo sapien
cgttattgttcgtggagccgccgcc

SEQ ID NO: 4893924 - DNA, 25 bp, Homo sapien
aggcctccccgccagcgttattgtt

SEQ ID NO: 4893925 - DNA, 25 bp, Homo sapien
ctcggaacgccagcgtcctgcggtt

SEQ ID NO: 4893926 - DNA, 25 bp, Homo sapien
agcgtcctgcggttcatttcactga

SEQ ID NO: 4893927 - DNA, 25 bp, Homo sapien
cggcccggcggaggcctccaggtct

SEQ ID NO: 4893928 - DNA, 25 bp, Homo sapien
tccaggtcttggggctccaggccct

SEQ ID NO: 4893929 - DNA, 25 bp, Homo sapien
gcggccggcccggcggaggcctcca

SEQ ID NO: 4893930 - DNA, 25 bp, Homo sapien
ggggctccaggccctccaattccac

SEQ ID NO: 4893931 - DNA, 25 bp, Homo sapien
ggcggccgcggctactgccattgtt

SEQ ID NO: 4893932 - DNA, 25 bp, Homo sapien
gctactgccattgttgccgagaccc

SEQ ID NO: 4893933 - DNA, 25 bp, Homo sapien
cagagtccgacggttcctttccgct

SEQ ID NO: 4893934 - DNA, 25 bp, Homo sapien
cgacggttcctttccgctagcaggg

SEQ ID NO: 4893935 - DNA, 25 bp, Homo sapien
ggccctcgcccattgaaatgcctca

SEQ ID NO: 4893936 - DNA, 25 bp, Homo sapien
ccggccctcgcccattgaaatgcct

SEQ ID NO: 4893937 - DNA, 25 bp, Homo sapien
cgcccattgaaatgcctcaagggcc

SEQ ID NO: 4893938 - DNA, 25 bp, Homo sapien
cagtcgccggccctcgcccattgaa

SEQ ID NO: 4893939 - DNA, 25 bp, Homo sapien
accgctgccctccacttcgtccccg

SEQ ID NO: 4893940 - DNA, 25 bp, Homo sapien
ccatcgccgcccgaccgcctgctgc

SEQ ID NO: 4893941 - DNA, 25 bp, Homo sapien
gtcctcggtgctgtcgctcagggac

SEQ ID NO: 4893942 - DNA, 25 bp, Homo sapien
ctcgtcctcggtgctgtcgctcagg

SEQ ID NO: 4893943 - DNA, 25 bp, Homo sapien
gcattggagcttctgcattagagac

SEQ ID NO: 4893944 - DNA, 25 bp, Homo sapien
ccgcgcgagcgggaagtgctggaca

SEQ ID NO: 4893945 - DNA, 25 bp, Homo sapien
cattagagacttgggccgcgcgagc

SEQ ID NO: 4893946 - DNA, 25 bp, Homo sapien
aagtgctggacagtctctccttcgc

SEQ ID NO: 4893947 - DNA, 25 bp, Homo sapien
tggaatagcgcagccagggaaagtc

SEQ ID NO: 4893948 - DNA, 25 bp, Homo sapien
ttggaatagcgcagccagggaaagt

SEQ ID NO: 4893949 - DNA, 25 bp, Homo sapien
cttggaatagcgcagccagggaaag

SEQ ID NO: 4893950 - DNA, 25 bp, Homo sapien
tgctcggtagagacgtggtgcctca

SEQ ID NO: 4893951 - DNA, 25 bp, Homo sapien
cgttggcttcgtggagtttgtgctc

SEQ ID NO: 4893952 - DNA, 25 bp, Homo sapien
tcttttggcaccagccgcaagacat

SEQ ID NO: 4893953 - DNA, 25 bp, Homo sapien
ggtccctcgcgaaagctcatcatgc

SEQ ID NO: 4893954 - DNA, 25 bp, Homo sapien
tattactctgcagcaacccactgga

SEQ ID NO: 4893955 - DNA, 25 bp, Homo sapien
tcctgtgagtgttagggagcagaca

SEQ ID NO: 4893956 - DNA, 25 bp, Homo sapien
gcagacagacgatggttattcaggt

SEQ ID NO: 4893957 - DNA, 25 bp, Homo sapien
aacaaggccatagcaagttttgcca

SEQ ID NO: 4893958 - DNA, 25 bp, Homo sapien
cagaacttgcatgataaaacagatg

SEQ ID NO: 4893959 - DNA, 25 bp, Homo sapien
gaatcatagggtcatcagcattcca

SEQ ID NO: 4893960 - DNA, 25 bp, Homo sapien
gtgagccatgtaccctctggaaagc

SEQ ID NO: 4893961 - DNA, 25 bp, Homo sapien
gctactgttaatagggcaacataca

SEQ ID NO: 4893962 - DNA, 25 bp, Homo sapien
aactgttaagtcacggatagaggaa

SEQ ID NO: 4893963 - DNA, 25 bp, Homo sapien
tcatgagtaatacccttatttttgt

SEQ ID NO: 4893964 - DNA, 25 bp, Homo sapien
aaaagatccaattctgcaaaaactg

SEQ ID NO: 4893965 - DNA, 25 bp, Homo sapien
ctgcaaaaactgttaagtcacggat

SEQ ID NO: 4893966 - DNA, 25 bp, Homo sapien
tagctggccacggtcataacttcaa

SEQ ID NO: 4893967 - DNA, 25 bp, Homo sapien
taaagaaacggctgcctgcaaccag

SEQ ID NO: 4893968 - DNA, 25 bp, Homo sapien
tatagtccacaactacagactctgg

SEQ ID NO: 4893969 - DNA, 25 bp, Homo sapien
cagtctcttgaattccctgggagcc

SEQ ID NO: 4893970 - DNA, 25 bp, Homo sapien
caaaaatggattgtatgcatccggc

SEQ ID NO: 4893971 - DNA, 25 bp, Homo sapien
gaagcatgatagcaactcttggtca

SEQ ID NO: 4893972 - DNA, 25 bp, Homo sapien
cagtgaacagatagtagcaacccct

SEQ ID NO: 4893973 - DNA, 25 bp, Homo sapien
aatgaccagagctaaatgacaagcc

SEQ ID NO: 4893974 - DNA, 25 bp, Homo sapien
cccgagagtagagcaccatctaaat

SEQ ID NO: 4893975 - DNA, 25 bp, Homo sapien
ctatcaccatctggccccgagagta

SEQ ID NO: 4893976 - DNA, 25 bp, Homo sapien
ttgactagtgccagcttcagccaat

SEQ ID NO: 4893977 - DNA, 25 bp, Homo sapien
gcatcacctccatcttgactagtgc

SEQ ID NO: 4893978 - DNA, 25 bp, Homo sapien
cttgaaatcatttgaaggaccaggc

SEQ ID NO: 4893979 - DNA, 25 bp, Homo sapien
tgaaggaccaggcatcaaaccatac

SEQ ID NO: 4893980 - DNA, 25 bp, Homo sapien
aggcatcaaaccatacttgaaatca

SEQ ID NO: 4893981 - DNA, 25 bp, Homo sapien
ttgaaatcatttgaaggaccaggca

SEQ ID NO: 4893982 - DNA, 25 bp, Homo sapien
aatccatacttgaaatcatttgaag

SEQ ID NO: 4893983 - DNA, 25 bp, Homo sapien
ctggtatcaatccatacttgaaatc

SEQ ID NO: 4893984 - DNA, 25 bp, Homo sapien
caatccatacttgaaatcatttgaa

SEQ ID NO: 4893985 - DNA, 25 bp, Homo sapien
tcaatccatacttgaaatcatttga

SEQ ID NO: 4893986 - DNA, 25 bp, Homo sapien
atccatacttgaaatcatttgaagc

SEQ ID NO: 4893987 - DNA, 25 bp, Homo sapien
tgttttggccaagattctggcaata

SEQ ID NO: 4893988 - DNA, 25 bp, Homo sapien
tccatacttgaaatcatttgaagca

SEQ ID NO: 4893989 - DNA, 25 bp, Homo sapien
ttgttttggccaagattctggcaat

SEQ ID NO: 4893990 - DNA, 25 bp, Homo sapien
ttcgtctgtatttggctacatagct

SEQ ID NO: 4893991 - DNA, 25 bp, Homo sapien
ttctcttcgagtaaacagttttcca

SEQ ID NO: 4893992 - DNA, 25 bp, Homo sapien
tgaatgagcaagtgcctttttagtg

SEQ ID NO: 4893993 - DNA, 25 bp, Homo sapien
ttacatgttctcttcgagtaaacag

SEQ ID NO: 4893994 - DNA, 25 bp, Homo sapien
tccaacactggctgctaacatgaag

SEQ ID NO: 4893995 - DNA, 25 bp, Homo sapien
tcatcccgagggaattctgtatcct

SEQ ID NO: 4893996 - DNA, 25 bp, Homo sapien
tctacacaaacaccataacgtcgag

SEQ ID NO: 4893997 - DNA, 25 bp, Homo sapien
taacgtcgagatccatgtcttattc

SEQ ID NO: 4893998 - DNA, 25 bp, Homo sapien
tacctaagactagaagagacttggt

SEQ ID NO: 4893999 - DNA, 25 bp, Homo sapien
tactagtacaaactagcctgagtgg

SEQ ID NO: 4894000 - DNA, 25 bp, Homo sapien
cacatggttgtttgctgtatagtcc

SEQ ID NO: 4894001 - DNA, 25 bp, Homo sapien
gctataaggctttgaccctacagtt

SEQ ID NO: 4894002 - DNA, 25 bp, Homo sapien
tatgtcaccctttgtaccctgaaga

SEQ ID NO: 4894003 - DNA, 25 bp, Homo sapien
tcaaggtgtagtgacttcaaggaca

SEQ ID NO: 4894004 - DNA, 25 bp, Homo sapien
tgttaacaatacgtgaaatgctgct

SEQ ID NO: 4894005 - DNA, 25 bp, Homo sapien
aatcagctaattcatgtcaccaggc

SEQ ID NO: 4894006 - DNA, 25 bp, Homo sapien
ccgaaactattcttatctgtcaggt

SEQ ID NO: 4894007 - DNA, 25 bp, Homo sapien
gatgcatctaaccatgtaactgtaa

SEQ ID NO: 4894008 - DNA, 25 bp, Homo sapien
tagaacattaagaagtactcatctg

SEQ ID NO: 4894009 - DNA, 25 bp, Homo sapien
tctttgatttatccaagcagaaaca

SEQ ID NO: 4894010 - DNA, 25 bp, Homo sapien
tgggcttcagaatcagacgtggtca

SEQ ID NO: 4894011 - DNA, 25 bp, Homo sapien
tggtcaaattcgagctctgtcacag

SEQ ID NO: 4894012 - DNA, 25 bp, Homo sapien
gatctgggtgactgaacggcacaaa

SEQ ID NO: 4894013 - DNA, 25 bp, Homo sapien
aaggcagtccctcgagatcatgaaa

SEQ ID NO: 4894014 - DNA, 25 bp, Homo sapien
ataattcaaacttgtaagccttaag

SEQ ID NO: 4894015 - DNA, 25 bp, Homo sapien
agtacaaagatatctgaattataca

SEQ ID NO: 4894016 - DNA, 25 bp, Homo sapien
tcaaacttgtaagccttaagtacaa

SEQ ID NO: 4894017 - DNA, 25 bp, Homo sapien
aagtacaaagatatctgaattatac

SEQ ID NO: 4894018 - DNA, 25 bp, Homo sapien
caaatttaagactggccgtggtggg

SEQ ID NO: 4894019 - DNA, 25 bp, Homo sapien
taggacctgcgccaagaagactgtc

SEQ ID NO: 4894020 - DNA, 25 bp, Homo sapien
aaatcatctggctgacagtaaggcg

SEQ ID NO: 4894021 - DNA, 25 bp, Homo sapien
tattaatagcaggtaaggcgccatg

SEQ ID NO: 4894022 - DNA, 25 bp, Homo sapien
aaaaggagtatataggcccggcgcg

SEQ ID NO: 4894023 - DNA, 25 bp, Homo sapien
catgagataatgcagcaccttgagc

SEQ ID NO: 4894024 - DNA, 25 bp, Homo sapien
tataagtacctaccacacaaagctg

SEQ ID NO: 4894025 - DNA, 25 bp, Homo sapien
gatattcaataacccttggtggcag

SEQ ID NO: 4894026 - DNA, 25 bp, Homo sapien
tcttacaaacagcttggagattggt

SEQ ID NO: 4894027 - DNA, 25 bp, Homo sapien
tttttggtactgaaatcaaagcaaa

SEQ ID NO: 4894028 - DNA, 25 bp, Homo sapien
agtgggcttaagtttgaacattata

SEQ ID NO: 4894029 - DNA, 25 bp, Homo sapien
gcatattaaatttggatcctctgac

SEQ ID NO: 4894030 - DNA, 25 bp, Homo sapien
gctcatttggtggactataactctc

SEQ ID NO: 4894031 - DNA, 25 bp, Homo sapien
gtacacttcggtcttaatggcttca

SEQ ID NO: 4894032 - DNA, 25 bp, Homo sapien
gataaaatataaccaccagtgcttg

SEQ ID NO: 4894033 - DNA, 25 bp, Homo sapien
tcacaagtgcgcagataggctatgc

SEQ ID NO: 4894034 - DNA, 25 bp, Homo sapien
ccaccaatctggagcgccggagatg

SEQ ID NO: 4894035 - DNA, 25 bp, Homo sapien
caccaatctggagcgccggagatga

SEQ ID NO: 4894036 - DNA, 25 bp, Homo sapien
caatctggagcgccggagatgagct

SEQ ID NO: 4894037 - DNA, 25 bp, Homo sapien
acccaccaatctggagcgccggaga

SEQ ID NO: 4894038 - DNA, 25 bp, Homo sapien
accaactccaccaccttgattctcg

SEQ ID NO: 4894039 - DNA, 25 bp, Homo sapien
tgtgcagggattaacacaccaacac

SEQ ID NO: 4894040 - DNA, 25 bp, Homo sapien
cttgattctcgcctcctttaaccca

SEQ ID NO: 4894041 - DNA, 25 bp, Homo sapien
acaatactgtgcagggattaacaca

SEQ ID NO: 4894042 - DNA, 25 bp, Homo sapien
aacaaaggtatctcgctagtaggtc

SEQ ID NO: 4894043 - DNA, 25 bp, Homo sapien
gacaaggaaccagaccagaaaggta

SEQ ID NO: 4894044 - DNA, 25 bp, Homo sapien
cctggatgacatgcttgcctataaa

SEQ ID NO: 4894045 - DNA, 25 bp, Homo sapien
agtgtactctgaacattcctggatg

SEQ ID NO: 4894046 - DNA, 25 bp, Homo sapien
gctctggacaccgtatctggcaaga

SEQ ID NO: 4894047 - DNA, 25 bp, Homo sapien
tcttgctctggacaccgtatctggc

SEQ ID NO: 4894048 - DNA, 25 bp, Homo sapien
ccgtatctggcaagaggcaattccc

SEQ ID NO: 4894049 - DNA, 25 bp, Homo sapien
gacaccgtatctggcaagaggcaat

SEQ ID NO: 4894050 - DNA, 25 bp, Homo sapien
ctgtaggtagcgtggaaagcgattg

SEQ ID NO: 4894051 - DNA, 25 bp, Homo sapien
cctctgtaggtagcgtggaaagcga

SEQ ID NO: 4894052 - DNA, 25 bp, Homo sapien
gtaggtagcgtggaaagcgattgaa

SEQ ID NO: 4894053 - DNA, 25 bp, Homo sapien
tctgtaggtagcgtggaaagcgatt

SEQ ID NO: 4894054 - DNA, 25 bp, Homo sapien
gaacttaaggacatcctcctccttc

SEQ ID NO: 4894055 - DNA, 25 bp, Homo sapien
ctgcaaggaacttaaggacatcctc

SEQ ID NO: 4894056 - DNA, 25 bp, Homo sapien
ctcctccttcatttgcaggacatca

SEQ ID NO: 4894057 - DNA, 25 bp, Homo sapien
ttgcaggacatcaagggctccggac

SEQ ID NO: 4894058 - DNA, 25 bp, Homo sapien
ccacaagaagtcgtggctcctggaa

SEQ ID NO: 4894059 - DNA, 25 bp, Homo sapien
tgaaagttccaggagtgaagcagcc

SEQ ID NO: 4894060 - DNA, 25 bp, Homo sapien
gtaaccacaagaagtcgtggctcct

SEQ ID NO: 4894061 - DNA, 25 bp, Homo sapien
gcctccgtgaaaggctggtggtcag

SEQ ID NO: 4894062 - DNA, 25 bp, Homo sapien
tagaagcagaaatcaggcatgacct

SEQ ID NO: 4894063 - DNA, 25 bp, Homo sapien
gatggcaatgtgcacatagcgcaga

SEQ ID NO: 4894064 - DNA, 25 bp, Homo sapien
cgcatgcacagaacttcccaagcca

SEQ ID NO: 4894065 - DNA, 25 bp, Homo sapien
atgcacagaacttcccaagccagca

SEQ ID NO: 4894066 - DNA, 25 bp, Homo sapien
ggctgagcgctgcagtcttcagtag

SEQ ID NO: 4894067 - DNA, 25 bp, Homo sapien
cgtggcaggctgagcgctgcagtct

SEQ ID NO: 4894068 - DNA, 25 bp, Homo sapien
caggctgagcgctgcagtcttcagt

SEQ ID NO: 4894069 - DNA, 25 bp, Homo sapien
ctgagcgctgcagtcttcagtaggg

SEQ ID NO: 4894070 - DNA, 25 bp, Homo sapien
agaaactgatgtttattttccatcc

SEQ ID NO: 4894071 - DNA, 25 bp, Homo sapien
ttttccatccaccatttttccatat

SEQ ID NO: 4894072 - DNA, 25 bp, Homo sapien
tgatgtttattttccatccaccatt

SEQ ID NO: 4894073 - DNA, 25 bp, Homo sapien
tccatccaccatttttccatattgc

SEQ ID NO: 4894074 - DNA, 25 bp, Homo sapien
taacttggagagaattcagatttcc

SEQ ID NO: 4894075 - DNA, 25 bp, Homo sapien
acaccacaatgacaccctttgtttg

SEQ ID NO: 4894076 - DNA, 25 bp, Homo sapien
tttaaaattgcaaaagcataagtaa

SEQ ID NO: 4894077 - DNA, 25 bp, Homo sapien
aaagtgtgattttgacatccaagaa

SEQ ID NO: 4894078 - DNA, 25 bp, Homo sapien
atgggtggaacttcagacaggcaaa

SEQ ID NO: 4894079 - DNA, 25 bp, Homo sapien
tgggtggaacttcagacaggcaaac

SEQ ID NO: 4894080 - DNA, 25 bp, Homo sapien
gagaggaaaacgtgccttatccata

SEQ ID NO: 4894081 - DNA, 25 bp, Homo sapien
gaatccaaatggtagcgtcgaagct

SEQ ID NO: 4894082 - DNA, 25 bp, Homo sapien
tatccatattgtttccccagagcta

SEQ ID NO: 4894083 - DNA, 25 bp, Homo sapien
cacagtccgctagcttgaatccaaa

SEQ ID NO: 4894084 - DNA, 25 bp, Homo sapien
tgcctggtaacacagctagcacttc

SEQ ID NO: 4894085 - DNA, 25 bp, Homo sapien
taacacagctagcacttctagcagg

SEQ ID NO: 4894086 - DNA, 25 bp, Homo sapien
catcagcggtgttgcctggtaacac

SEQ ID NO: 4894087 - DNA, 25 bp, Homo sapien
tcacaagccattcttagcatcagcg

SEQ ID NO: 4894088 - DNA, 25 bp, Homo sapien
cctaaatacccgaggtgagagggca

SEQ ID NO: 4894089 - DNA, 25 bp, Homo sapien
gccacctaaatacccgaggtgagag

SEQ ID NO: 4894090 - DNA, 25 bp, Homo sapien
aggccacctaaatacccgaggtgag

SEQ ID NO: 4894091 - DNA, 25 bp, Homo sapien
cacctaaatacccgaggtgagaggg

SEQ ID NO: 4894092 - DNA, 25 bp, Homo sapien
gatgtaaggctcagtcagtgtggct

SEQ ID NO: 4894093 - DNA, 25 bp, Homo sapien
tgaggagagcggcttagtcacacag

SEQ ID NO: 4894094 - DNA, 25 bp, Homo sapien
tctccacgtgcgaggctaatagagt

SEQ ID NO: 4894095 - DNA, 25 bp, Homo sapien
tgtgagctgggttccaccttaggag

SEQ ID NO: 4894096 - DNA, 25 bp, Homo sapien
cactgagtaatgcacaccaatagag

SEQ ID NO: 4894097 - DNA, 25 bp, Homo sapien
aaggtatatctatcgtaggaccagg

SEQ ID NO: 4894098 - DNA, 25 bp, Homo sapien
aacttttgttgtgggtctgagaatc

SEQ ID NO: 4894099 - DNA, 25 bp, Homo sapien
caatggtaatatgtcttggcaaaac

SEQ ID NO: 4894100 - DNA, 25 bp, Homo sapien
gaaagcaagccgtgaacgatgtaca

SEQ ID NO: 4894101 - DNA, 25 bp, Homo sapien
aattgtgaatacaaagccttgctgg

SEQ ID NO: 4894102 - DNA, 25 bp, Homo sapien
gaattgctatcgaccacatcttctg

SEQ ID NO: 4894103 - DNA, 25 bp, Homo sapien
cagaattccgtaggcgaaagcaagc

SEQ ID NO: 4894104 - DNA, 25 bp, Homo sapien
tgtgtgcgcttagctgcaaagtgcc

SEQ ID NO: 4894105 - DNA, 25 bp, Homo sapien
ggctaacatttgaaccacaggtgca

SEQ ID NO: 4894106 - DNA, 25 bp, Homo sapien
aacggtttggagctgacctgtagcc

SEQ ID NO: 4894107 - DNA, 25 bp, Homo sapien
ttctcccttggttggcaaaagccag

SEQ ID NO: 4894108 - DNA, 25 bp, Homo sapien
gaatgacctgaagggaagtacctcc

SEQ ID NO: 4894109 - DNA, 25 bp, Homo sapien
cagaggccaatctacgcaaaaggca

SEQ ID NO: 4894110 - DNA, 25 bp, Homo sapien
cagtggtgttaagccttgggccttc

SEQ ID NO: 4894111 - DNA, 25 bp, Homo sapien
acacacaggtagcaagggagtcagg

SEQ ID NO: 4894112 - DNA, 25 bp, Homo sapien
gctgaatgtagcttccctgggatct

SEQ ID NO: 4894113 - DNA, 25 bp, Homo sapien
tagcccacggctctgtgtactttct

SEQ ID NO: 4894114 - DNA, 25 bp, Homo sapien
agttctgtacctcctacccaagttg

SEQ ID NO: 4894115 - DNA, 25 bp, Homo sapien
tccctggaccaaggcgtggaataac

SEQ ID NO: 4894116 - DNA, 25 bp, Homo sapien
ccctggcccttgatcgttggactgt

SEQ ID NO: 4894117 - DNA, 25 bp, Homo sapien
tgacagggtacagtcctggaccaga

SEQ ID NO: 4894118 - DNA, 25 bp, Homo sapien
tcctggagcaaagccccgtggcttc

SEQ ID NO: 4894119 - DNA, 25 bp, Homo sapien
caccatgtgtttaaatgacagggta

SEQ ID NO: 4894120 - DNA, 25 bp, Homo sapien
ttactccttggaagagatcctggtt

SEQ ID NO: 4894121 - DNA, 25 bp, Homo sapien
catgcagcaccactgatgcgagatg

SEQ ID NO: 4894122 - DNA, 25 bp, Homo sapien
ttttagactgacaaggtcagccagg

SEQ ID NO: 4894123 - DNA, 25 bp, Homo sapien
tcagtactagtcacagcaccagcaa

SEQ ID NO: 4894124 - DNA, 25 bp, Homo sapien
caagacagcgcagcactctgggcat

SEQ ID NO: 4894125 - DNA, 25 bp, Homo sapien
gacttcttggagcagtatatgtcag

SEQ ID NO: 4894126 - DNA, 25 bp, Homo sapien
gaataatcttttccgtatcttccat

SEQ ID NO: 4894127 - DNA, 25 bp, Homo sapien
tcaggatgtgttgcaagacagcgca

SEQ ID NO: 4894128 - DNA, 25 bp, Homo sapien
cgagacatgtggtgtaccgcctgcc

SEQ ID NO: 4894129 - DNA, 25 bp, Homo sapien
accgcctgccgctggaagaaggcct

SEQ ID NO: 4894130 - DNA, 25 bp, Homo sapien
agaggttcctcgactgagagacccc

SEQ ID NO: 4894131 - DNA, 25 bp, Homo sapien
tgtacgggatggagaaccgagacat

SEQ ID NO: 4894132 - DNA, 25 bp, Homo sapien
gtacgacagcttaaaaaactccaca

SEQ ID NO: 4894133 - DNA, 25 bp, Homo sapien
ccagaggcacagtcagcttaaggta

SEQ ID NO: 4894134 - DNA, 25 bp, Homo sapien
cagcttaaggtacgacagcttaaaa

SEQ ID NO: 4894135 - DNA, 25 bp, Homo sapien
agacagcatgcgcacacggtcctgt

SEQ ID NO: 4894136 - DNA, 25 bp, Homo sapien
tccgaggatgtaatatgagggaaca

SEQ ID NO: 4894137 - DNA, 25 bp, Homo sapien
gctcttactatgtattgccagaatg

SEQ ID NO: 4894138 - DNA, 25 bp, Homo sapien
cagaaatcctgggtactaacttagt

SEQ ID NO: 4894139 - DNA, 25 bp, Homo sapien
gctttccagtggtaccaagtacaaa

SEQ ID NO: 4894140 - DNA, 25 bp, Homo sapien
gctgcaaaggcgaaaatctctggga

SEQ ID NO: 4894141 - DNA, 25 bp, Homo sapien
caaacatctgttagctctgcgagga

SEQ ID NO: 4894142 - DNA, 25 bp, Homo sapien
tctcagccaatagacccaaggaagt

SEQ ID NO: 4894143 - DNA, 25 bp, Homo sapien
gagtttgtctggaagctgctatgca

SEQ ID NO: 4894144 - DNA, 25 bp, Homo sapien
cagagagcctcagcggatcctggaa

SEQ ID NO: 4894145 - DNA, 25 bp, Homo sapien
ggtggtcagccacgcggtcttctgc

SEQ ID NO: 4894146 - DNA, 25 bp, Homo sapien
tcactggtgtagaaccaaggctccc

SEQ ID NO: 4894147 - DNA, 25 bp, Homo sapien
gcagccagacgacggcatcgacgag

SEQ ID NO: 4894148 - DNA, 25 bp, Homo sapien
ctttggttcgaagtcctcccgtgcg

SEQ ID NO: 4894149 - DNA, 25 bp, Homo sapien
tactaaccagcttgtcgactagccc

SEQ ID NO: 4894150 - DNA, 25 bp, Homo sapien
tcttcagaggaactagacatggaca

SEQ ID NO: 4894151 - DNA, 25 bp, Homo sapien
cggccgaacggtaagcccaggatat

SEQ ID NO: 4894152 - DNA, 25 bp, Homo sapien
ggtcagaagtactagcctctaactg

SEQ ID NO: 4894153 - DNA, 25 bp, Homo sapien
aaaggagaaatccagagactggctg

SEQ ID NO: 4894154 - DNA, 25 bp, Homo sapien
gaaatccagagactggctgtctctg

SEQ ID NO: 4894155 - DNA, 25 bp, Homo sapien
ctctaactgcctaggaggaaaggag

SEQ ID NO: 4894156 - DNA, 25 bp, Homo sapien
gatgcgtgccgaggatgggcccggc

SEQ ID NO: 4894157 - DNA, 25 bp, Homo sapien
gccaagtgcaggtaggatgcgtgcc

SEQ ID NO: 4894158 - DNA, 25 bp, Homo sapien
tagaagcgggcagttgtggtgagcg

SEQ ID NO: 4894159 - DNA, 25 bp, Homo sapien
agagtcattcgctgtttcccatcag

SEQ ID NO: 4894160 - DNA, 25 bp, Homo sapien
caagctcatatttagtgggtgcaaa

SEQ ID NO: 4894161 - DNA, 25 bp, Homo sapien
tttctttggccatgactgagtagca

SEQ ID NO: 4894162 - DNA, 25 bp, Homo sapien
tcccagagagctagaagaaagaggc

SEQ ID NO: 4894163 - DNA, 25 bp, Homo sapien
cagacagcagtccagctaaatgcag

SEQ ID NO: 4894164 - DNA, 25 bp, Homo sapien
tcccaaatgacacagggtacttcaa

SEQ ID NO: 4894165 - DNA, 25 bp, Homo sapien
aaccccattagcctgggccatgccg

SEQ ID NO: 4894166 - DNA, 25 bp, Homo sapien
gacacagggtacttcaaccccatta

SEQ ID NO: 4894167 - DNA, 25 bp, Homo sapien
tgcagacttcccaaatgacacaggg

SEQ ID NO: 4894168 - DNA, 25 bp, Homo sapien
agtggaggtatcagccctgtcccag

SEQ ID NO: 4894169 - DNA, 25 bp, Homo sapien
cagtgtaagacagtggaggtatcag

SEQ ID NO: 4894170 - DNA, 25 bp, Homo sapien
tcatcggtttgtcccgctcttcaca

SEQ ID NO: 4894171 - DNA, 25 bp, Homo sapien
ccaggtgtatccagaagtggctgaa

SEQ ID NO: 4894172 - DNA, 25 bp, Homo sapien
cactattgactcctgttgccactgc

SEQ ID NO: 4894173 - DNA, 25 bp, Homo sapien
tccatgagaccgctgccatttgcca

SEQ ID NO: 4894174 - DNA, 25 bp, Homo sapien
gccactattgactcctgttgccact

SEQ ID NO: 4894175 - DNA, 25 bp, Homo sapien
ccaatatccatgagaccgctgccat

SEQ ID NO: 4894176 - DNA, 25 bp, Homo sapien
tccatggttttgacagctcttgctg

SEQ ID NO: 4894177 - DNA, 25 bp, Homo sapien
gaggagatttctgttggtttcctgt

SEQ ID NO: 4894178 - DNA, 25 bp, Homo sapien
ggctttggtccgcttctgagttttc

SEQ ID NO: 4894179 - DNA, 25 bp, Homo sapien
tctttaccctcgtggggaatgagag

SEQ ID NO: 4894180 - DNA, 25 bp, Homo sapien
aaccacccaggctggccgaattaag

SEQ ID NO: 4894181 - DNA, 25 bp, Homo sapien
ctaagtcacctctggtaaagaggga

SEQ ID NO: 4894182 - DNA, 25 bp, Homo sapien
gaattaagcctaagtcacctctggt

SEQ ID NO: 4894183 - DNA, 25 bp, Homo sapien
ggctggccgaattaagcctaagtca

SEQ ID NO: 4894184 - DNA, 25 bp, Homo sapien
ggaaatacttccgatgacagtgaag

SEQ ID NO: 4894185 - DNA, 25 bp, Homo sapien
tctgctccgcttgccggttcctgtg

SEQ ID NO: 4894186 - DNA, 25 bp, Homo sapien
gataatttggtgactagctgagcct

SEQ ID NO: 4894187 - DNA, 25 bp, Homo sapien
cctttatacttgagactggaaatac

SEQ ID NO: 4894188 - DNA, 25 bp, Homo sapien
aataagggtgacacttgacaaaggc

SEQ ID NO: 4894189 - DNA, 25 bp, Homo sapien
tagtaattcaacaggttgagagcca

SEQ ID NO: 4894190 - DNA, 25 bp, Homo sapien
gaataaaggcccaaattatgcttag

SEQ ID NO: 4894191 - DNA, 25 bp, Homo sapien
catcagtctcttaagtgaaggtaga

SEQ ID NO: 4894192 - DNA, 25 bp, Homo sapien
tagacaccaggaaatagcagcaatg

SEQ ID NO: 4894193 - DNA, 25 bp, Homo sapien
tgactggaaggaaccagattgcccc

SEQ ID NO: 4894194 - DNA, 25 bp, Homo sapien
gcccctttctgggtgttcgtatcat

SEQ ID NO: 4894195 - DNA, 25 bp, Homo sapien
cattattcccatctgaagaatgact

SEQ ID NO: 4894196 - DNA, 25 bp, Homo sapien
ttttcttgctccagtttgttctcca

SEQ ID NO: 4894197 - DNA, 25 bp, Homo sapien
tttcttgctccagtttgttctccat

SEQ ID NO: 4894198 - DNA, 25 bp, Homo sapien
aaaaacaggaattttcttgctccag

SEQ ID NO: 4894199 - DNA, 25 bp, Homo sapien
gaattttcttgctccagtttgttct

SEQ ID NO: 4894200 - DNA, 25 bp, Homo sapien
agtgctgtttgaagacactgatgat

SEQ ID NO: 4894201 - DNA, 25 bp, Homo sapien
ccagtgtggtgcattgctgtctgca

SEQ ID NO: 4894202 - DNA, 25 bp, Homo sapien
cgcttgtttttgcaggcagaacaca

SEQ ID NO: 4894203 - DNA, 25 bp, Homo sapien
gagagatcaatgcaaccagtgtggt

SEQ ID NO: 4894204 - DNA, 25 bp, Homo sapien
gctatctctttgcatcacaatttcc

SEQ ID NO: 4894205 - DNA, 25 bp, Homo sapien
agaaatacaccctctaggccgggtg

SEQ ID NO: 4894206 - DNA, 25 bp, Homo sapien
cttagaaatacaccctctaggccgg

SEQ ID NO: 4894207 - DNA, 25 bp, Homo sapien
gttcttagaaatacaccctctaggc

SEQ ID NO: 4894208 - DNA, 25 bp, Homo sapien
tggtgtgccattgctgaacacttcc

SEQ ID NO: 4894209 - DNA, 25 bp, Homo sapien
ggaaatggtatctggcttgcaggct

SEQ ID NO: 4894210 - DNA, 25 bp, Homo sapien
gatccaagcatggatccctttggtt

SEQ ID NO: 4894211 - DNA, 25 bp, Homo sapien
ttgcaggcttgtcccctgtgaagaa

SEQ ID NO: 4894212 - DNA, 25 bp, Homo sapien
gaagcaatacttgtagaacatttta

SEQ ID NO: 4894213 - DNA, 25 bp, Homo sapien
aagcaatacttgtagaacattttaa

SEQ ID NO: 4894214 - DNA, 25 bp, Homo sapien
cagtgacttccaggccatcagcatt

SEQ ID NO: 4894215 - DNA, 25 bp, Homo sapien
cccagtgacttccaggccatcagca

SEQ ID NO: 4894216 - DNA, 25 bp, Homo sapien
tcttgtttcccagtgacttccaggc

SEQ ID NO: 4894217 - DNA, 25 bp, Homo sapien
tgacttccaggccatcagcattgcc

SEQ ID NO: 4894218 - DNA, 25 bp, Homo sapien
tgtgtcgcttttctgttcaggctca

SEQ ID NO: 4894219 - DNA, 25 bp, Homo sapien
ggagtcgctgctgacttatccccga

SEQ ID NO: 4894220 - DNA, 25 bp, Homo sapien
tctgtggagtgaaagtctgcttgtc

SEQ ID NO: 4894221 - DNA, 25 bp, Homo sapien
aaggaggcacagtcaaagtcattct

SEQ ID NO: 4894222 - DNA, 25 bp, Homo sapien
tcatatgttgtccatcaaattttcc

SEQ ID NO: 4894223 - DNA, 25 bp, Homo sapien
tctctgttagctccctaggctctgt

SEQ ID NO: 4894224 - DNA, 25 bp, Homo sapien
ctgttatcactactgcagcagaaga

SEQ ID NO: 4894225 - DNA, 25 bp, Homo sapien
cctaggctctgttatcactactgca

SEQ ID NO: 4894226 - DNA, 25 bp, Homo sapien
tatgtgctagcagctattctagaac

SEQ ID NO: 4894227 - DNA, 25 bp, Homo sapien
tctagaacatagcagtggacacctt

SEQ ID NO: 4894228 - DNA, 25 bp, Homo sapien
gaaatttacacagaatgttggagtc

SEQ ID NO: 4894229 - DNA, 25 bp, Homo sapien
tcacatctagtgagaggcatcatag

SEQ ID NO: 4894230 - DNA, 25 bp, Homo sapien
caagaacaattgtcgatgagtttcc

SEQ ID NO: 4894231 - DNA, 25 bp, Homo sapien
tgagtttccatcacaggcgcttgtg

SEQ ID NO: 4894232 - DNA, 25 bp, Homo sapien
tattgaaaccagaaagcggtgtttc

SEQ ID NO: 4894233 - DNA, 25 bp, Homo sapien
ctcaaaggccgtgtcgggtttgttg

SEQ ID NO: 4894234 - DNA, 25 bp, Homo sapien
gcgggcggccgcgcggggcagcgcg

SEQ ID NO: 4894235 - DNA, 25 bp, Homo sapien
gcggccgcgcggggcagcgcgagga

SEQ ID NO: 4894236 - DNA, 25 bp, Homo sapien
gggcggccgcgcggggcagcgcgag

SEQ ID NO: 4894237 - DNA, 25 bp, Homo sapien
cggccgcgcggggcagcgcgaggaa

SEQ ID NO: 4894238 - DNA, 25 bp, Homo sapien
cttcgaagcgccagactttcggaga

SEQ ID NO: 4894239 - DNA, 25 bp, Homo sapien
tggtgtcagggccaactgcttcgaa

SEQ ID NO: 4894240 - DNA, 25 bp, Homo sapien
gccaactgcttcgaagcgccagact

SEQ ID NO: 4894241 - DNA, 25 bp, Homo sapien
taagcgtttgccctggtgtcagggc

SEQ ID NO: 4894242 - DNA, 25 bp, Homo sapien
tctgccactcaacaggtagactgaa

SEQ ID NO: 4894243 - DNA, 25 bp, Homo sapien
gagtcttttacatcaggtctctgcc

SEQ ID NO: 4894244 - DNA, 25 bp, Homo sapien
gcctgtatatgatgttgcctctgga

SEQ ID NO: 4894245 - DNA, 25 bp, Homo sapien
tattcacctccagataagctgtttg

SEQ ID NO: 4894246 - DNA, 25 bp, Homo sapien
gctgtggcgccaaaatctcgttgca

SEQ ID NO: 4894247 - DNA, 25 bp, Homo sapien
gcgtgcgcccttgcagaaaagtgaa

SEQ ID NO: 4894248 - DNA, 25 bp, Homo sapien
cgttgcactgttcgagtaactgaca

SEQ ID NO: 4894249 - DNA, 25 bp, Homo sapien
aaaaccaggacgtggagttcgctcg

SEQ ID NO: 4894250 - DNA, 25 bp, Homo sapien
cgcgacgcgggctcctttatgcctg

SEQ ID NO: 4894251 - DNA, 25 bp, Homo sapien
ttcgcggctcgacaaggatctttgc

SEQ ID NO: 4894252 - DNA, 25 bp, Homo sapien
cattgtctccatgtgatcgtttgga

SEQ ID NO: 4894253 - DNA, 25 bp, Homo sapien
gccactcaggcgcttgtttttgtta

SEQ ID NO: 4894254 - DNA, 25 bp, Homo sapien
gggtgtctctggttcacaaagctgc

SEQ ID NO: 4894255 - DNA, 25 bp, Homo sapien
ggccactccacagggcggctgatga

SEQ ID NO: 4894256 - DNA, 25 bp, Homo sapien
cagctccctcccgtggttgttggca

SEQ ID NO: 4894257 - DNA, 25 bp, Homo sapien
gctgggactggtggagaatccactt

SEQ ID NO: 4894258 - DNA, 25 bp, Homo sapien
tccagctctttgatcatagttggca

SEQ ID NO: 4894259 - DNA, 25 bp, Homo sapien
gcttcttgctcaagcaagacttcag

SEQ ID NO: 4894260 - DNA, 25 bp, Homo sapien
ttcctgctcaggcaaggcttcttgc

SEQ ID NO: 4894261 - DNA, 25 bp, Homo sapien
atggcactggcaacgaataccctgg

SEQ ID NO: 4894262 - DNA, 25 bp, Homo sapien
ctgcttctgcgaagccctcatattg

SEQ ID NO: 4894263 - DNA, 25 bp, Homo sapien
cttctgcgaagccctcatattgctc

SEQ ID NO: 4894264 - DNA, 25 bp, Homo sapien
ctgcgaagccctcatattgctccat

SEQ ID NO: 4894265 - DNA, 25 bp, Homo sapien
tctgcgaagccctcatattgctcca

SEQ ID NO: 4894266 - DNA, 25 bp, Homo sapien
acctctggactgctgataggcatct

SEQ ID NO: 4894267 - DNA, 25 bp, Homo sapien
cacaaggtgctctgagctttgagga

SEQ ID NO: 4894268 - DNA, 25 bp, Homo sapien
ggtcaggacttctagacctctggac

SEQ ID NO: 4894269 - DNA, 25 bp, Homo sapien
gctttgaggaattagacgatctggt

SEQ ID NO: 4894270 - DNA, 25 bp, Homo sapien
aaggcacctctcagtcagtggacag

SEQ ID NO: 4894271 - DNA, 25 bp, Homo sapien
gagaaagatccaggctcaatgagat

SEQ ID NO: 4894272 - DNA, 25 bp, Homo sapien
ggcctggtccccatgcactggtagt

SEQ ID NO: 4894273 - DNA, 25 bp, Homo sapien
ctggtagttgaatctcatggacagt

SEQ ID NO: 4894274 - DNA, 25 bp, Homo sapien
accagggagcctctcgtagcatgct

SEQ ID NO: 4894275 - DNA, 25 bp, Homo sapien
ctgtgtttggtccaatattgaagca

SEQ ID NO: 4894276 - DNA, 25 bp, Homo sapien
ggtgtgatagttaagctctttgcat

SEQ ID NO: 4894277 - DNA, 25 bp, Homo sapien
acatctgtctgtgtttggtccaata

SEQ ID NO: 4894278 - DNA, 25 bp, Homo sapien
acctcttcgatgtccactacacaat

SEQ ID NO: 4894279 - DNA, 25 bp, Homo sapien
ttccacaccacctcttcgatgtcca

SEQ ID NO: 4894280 - DNA, 25 bp, Homo sapien
gatgtccactacacaattcctgcac

SEQ ID NO: 4894281 - DNA, 25 bp, Homo sapien
ttcgatgtccactacacaattcctg

SEQ ID NO: 4894282 - DNA, 25 bp, Homo sapien
ccctttttgcgatatagatcaccat

SEQ ID NO: 4894283 - DNA, 25 bp, Homo sapien
cccctttttgcgatatagatcacca

SEQ ID NO: 4894284 - DNA, 25 bp, Homo sapien
gaactctcacctcatttgtaagcag

SEQ ID NO: 4894285 - DNA, 25 bp, Homo sapien
gaacagaggctcaaataatctcatt

SEQ ID NO: 4894286 - DNA, 25 bp, Homo sapien
catggtgaatagattaaatgaactc

SEQ ID NO: 4894287 - DNA, 25 bp, Homo sapien
aaagtgatgattttaccagaacaga

SEQ ID NO: 4894288 - DNA, 25 bp, Homo sapien
aagcctggtcagaaataagcctcct

SEQ ID NO: 4894289 - DNA, 25 bp, Homo sapien
ctgatccagggtaaatgccacaggg

SEQ ID NO: 4894290 - DNA, 25 bp, Homo sapien
tagaatacatccatcacaagcctgg

SEQ ID NO: 4894291 - DNA, 25 bp, Homo sapien
cacaggggcaggcaaaagtcttccc

SEQ ID NO: 4894292 - DNA, 25 bp, Homo sapien
agaagagggtgttcacaaataccaa

SEQ ID NO: 4894293 - DNA, 25 bp, Homo sapien
gtcatcctcagctatcatggccaca

SEQ ID NO: 4894294 - DNA, 25 bp, Homo sapien
tcctcagctatcatggccacaggaa

SEQ ID NO: 4894295 - DNA, 25 bp, Homo sapien
ggcacagagcgagtggaagaagagg

SEQ ID NO: 4894296 - DNA, 25 bp, Homo sapien
gctcagccccttcgggttttgtgcc

SEQ ID NO: 4894297 - DNA, 25 bp, Homo sapien
aggaggagtcaggtatgtttcctgc

SEQ ID NO: 4894298 - DNA, 25 bp, Homo sapien
gaaggaggagtcaggtatgtttcct

SEQ ID NO: 4894299 - DNA, 25 bp, Homo sapien
cctgctcagccccttcgggttttgt

SEQ ID NO: 4894300 - DNA, 25 bp, Homo sapien
ggacagagacaaaatgccaccaatc

SEQ ID NO: 4894301 - DNA, 25 bp, Homo sapien
tctgagttctcgaaactgttccagc

SEQ ID NO: 4894302 - DNA, 25 bp, Homo sapien
tctactccattatcaggcggcaaat

SEQ ID NO: 4894303 - DNA, 25 bp, Homo sapien
actccattatcaggcggcaaatttt

SEQ ID NO: 4894304 - DNA, 25 bp, Homo sapien
gcatcttagggacaaccatagaact

SEQ ID NO: 4894305 - DNA, 25 bp, Homo sapien
gggacaaccatagaactggagctct

SEQ ID NO: 4894306 - DNA, 25 bp, Homo sapien
gcttctgtgcaaccagcatcttagg

SEQ ID NO: 4894307 - DNA, 25 bp, Homo sapien
aaagtggttgttctatctgcttctg

SEQ ID NO: 4894308 - DNA, 25 bp, Homo sapien
tatttggcttgctggcaacaccacg

SEQ ID NO: 4894309 - DNA, 25 bp, Homo sapien
caacaccacgcttcatgagtgacca

SEQ ID NO: 4894310 - DNA, 25 bp, Homo sapien
cacaataagatgtccaatgggaaac

SEQ ID NO: 4894311 - DNA, 25 bp, Homo sapien
tgaacagctgctacccataaatggc

SEQ ID NO: 4894312 - DNA, 25 bp, Homo sapien
gatctgcactgttcagtaaggtagc

SEQ ID NO: 4894313 - DNA, 25 bp, Homo sapien
ttagccacatatgaacactgagtac

SEQ ID NO: 4894314 - DNA, 25 bp, Homo sapien
aatgttctataagtgggccaggcac

SEQ ID NO: 4894315 - DNA, 25 bp, Homo sapien
tattaaactcctactgtatgccaag

SEQ ID NO: 4894316 - DNA, 25 bp, Homo sapien
tctttcctcttctacgataacccat

SEQ ID NO: 4894317 - DNA, 25 bp, Homo sapien
tttcttcttagctccggcagctgtt

SEQ ID NO: 4894318 - DNA, 25 bp, Homo sapien
tcttagctccggcagctgttctctt

SEQ ID NO: 4894319 - DNA, 25 bp, Homo sapien
tcttctacgataacccatactgcac

SEQ ID NO: 4894320 - DNA, 25 bp, Homo sapien
aacctgatgtggtgttcatgaccca

SEQ ID NO: 4894321 - DNA, 25 bp, Homo sapien
catgtcttgaggagaagcaatgtga

SEQ ID NO: 4894322 - DNA, 25 bp, Homo sapien
gacccatcccttaagcatgcttgct

SEQ ID NO: 4894323 - DNA, 25 bp, Homo sapien
gatttaattcctatgtgccactacc

SEQ ID NO: 4894324 - DNA, 25 bp, Homo sapien
taaaaagcgttcaattcagtaatca

SEQ ID NO: 4894325 - DNA, 25 bp, Homo sapien
gatgtctgtatgttacattggcagc

SEQ ID NO: 4894326 - DNA, 25 bp, Homo sapien
ttgggttgtctcatatcaccttgcg

SEQ ID NO: 4894327 - DNA, 25 bp, Homo sapien
gcttgccagttatatactgtgggta

SEQ ID NO: 4894328 - DNA, 25 bp, Homo sapien
caatatcctgtctgtatcctaggca

SEQ ID NO: 4894329 - DNA, 25 bp, Homo sapien
tgcatccgtaattctcttggctgaa

SEQ ID NO: 4894330 - DNA, 25 bp, Homo sapien
cttggctctgacacaactctggtgc

SEQ ID NO: 4894331 - DNA, 25 bp, Homo sapien
catgtgacttacttttgactcagcc

SEQ ID NO: 4894332 - DNA, 25 bp, Homo sapien
tcacagcagaatacccttggattag

SEQ ID NO: 4894333 - DNA, 25 bp, Homo sapien
gactttgtgactgctctacactgca

SEQ ID NO: 4894334 - DNA, 25 bp, Homo sapien
aaattgtagagaccagctcactgga

SEQ ID NO: 4894335 - DNA, 25 bp, Homo sapien
tctcccatgaagatgtcgtgtgcat

SEQ ID NO: 4894336 - DNA, 25 bp, Homo sapien
gcatttttgcaaaagctatataaga

SEQ ID NO: 4894337 - DNA, 25 bp, Homo sapien
agacattaagaatccatccaggcca

SEQ ID NO: 4894338 - DNA, 25 bp, Homo sapien
tttaatgaacctaaatgagcatgga

SEQ ID NO: 4894339 - DNA, 25 bp, Homo sapien
tgctatggagtacttgaaatcttta

SEQ ID NO: 4894340 - DNA, 25 bp, Homo sapien
tattccacagcttgtaataatcccc

SEQ ID NO: 4894341 - DNA, 25 bp, Homo sapien
ttctccctgcactgtactaataggc

SEQ ID NO: 4894342 - DNA, 25 bp, Homo sapien
atcatattctactgacctccttcta

SEQ ID NO: 4894343 - DNA, 25 bp, Homo sapien
cctccttctattaggagagaggaga

SEQ ID NO: 4894344 - DNA, 25 bp, Homo sapien
gcagagcagcacttagagggtccaa

SEQ ID NO: 4894345 - DNA, 25 bp, Homo sapien
ccaaggacgtctgctgtaaggatca

SEQ ID NO: 4894346 - DNA, 25 bp, Homo sapien
tatgttagtctagatcccctcagcc

SEQ ID NO: 4894347 - DNA, 25 bp, Homo sapien
tctccaaaatgggaaccgtccacca

SEQ ID NO: 4894348 - DNA, 25 bp, Homo sapien
ggccagacgcctggaggttgtgaat

SEQ ID NO: 4894349 - DNA, 25 bp, Homo sapien
ccagacgcctggaggttgtgaatac

SEQ ID NO: 4894350 - DNA, 25 bp, Homo sapien
gacgcctggaggttgtgaatacctg

SEQ ID NO: 4894351 - DNA, 25 bp, Homo sapien
cagacgcctggaggttgtgaatacc

SEQ ID NO: 4894352 - DNA, 25 bp, Homo sapien
tggttctgtcttcgcattttgttga

SEQ ID NO: 4894353 - DNA, 25 bp, Homo sapien
tctgtcttcgcattttgttgaaagg

SEQ ID NO: 4894354 - DNA, 25 bp, Homo sapien
tcttcgcattttgttgaaaggctac

SEQ ID NO: 4894355 - DNA, 25 bp, Homo sapien
tttggttctgtcttcgcattttgtt

SEQ ID NO: 4894356 - DNA, 25 bp, Homo sapien
ggccactgccacggctatttagtgc

SEQ ID NO: 4894357 - DNA, 25 bp, Homo sapien
tgccacggctatttagtgcaaacct

SEQ ID NO: 4894358 - DNA, 25 bp, Homo sapien
cacggctatttagtgcaaacctcat

SEQ ID NO: 4894359 - DNA, 25 bp, Homo sapien
actgccacggctatttagtgcaaac

SEQ ID NO: 4894360 - DNA, 25 bp, Homo sapien
ttacttcatcagtaggttcagctgc

SEQ ID NO: 4894361 - DNA, 25 bp, Homo sapien
ttatgacattacttcatcagtaggt

SEQ ID NO: 4894362 - DNA, 25 bp, Homo sapien
acttcatcagtaggttcagctgcta

SEQ ID NO: 4894363 - DNA, 25 bp, Homo sapien
gacattacttcatcagtaggttcag

SEQ ID NO: 4894364 - DNA, 25 bp, Homo sapien
cacaccactgaagaggatttgcaga

SEQ ID NO: 4894365 - DNA, 25 bp, Homo sapien
agaaaattatggtcctcttggaaag

SEQ ID NO: 4894366 - DNA, 25 bp, Homo sapien
tatcttcagcttcctagaattcaag

SEQ ID NO: 4894367 - DNA, 25 bp, Homo sapien
catacttataatctttttgaggcct

SEQ ID NO: 4894368 - DNA, 25 bp, Homo sapien
tcccagcgtcggcagggccgtgttc

SEQ ID NO: 4894369 - DNA, 25 bp, Homo sapien
ttcaggcttcacatgagattctccc

SEQ ID NO: 4894370 - DNA, 25 bp, Homo sapien
ttgccttatggcagcataccttcag

SEQ ID NO: 4894371 - DNA, 25 bp, Homo sapien
gcaagtctgagatcccagcgtcggc

SEQ ID NO: 4894372 - DNA, 25 bp, Homo sapien
tctgcagtagtaaagtccaaatttc

SEQ ID NO: 4894373 - DNA, 25 bp, Homo sapien
ggtctgcagtagtaaagtccaaatt

SEQ ID NO: 4894374 - DNA, 25 bp, Homo sapien
tcacatctcatttaaaatgccatta

SEQ ID NO: 4894375 - DNA, 25 bp, Homo sapien
tccaaatttcacatctcatttaaaa

SEQ ID NO: 4894376 - DNA, 25 bp, Homo sapien
ttggaaattagattagggcatatat

SEQ ID NO: 4894377 - DNA, 25 bp, Homo sapien
atgaagaaaatctatcggtatatgc

SEQ ID NO: 4894378 - DNA, 25 bp, Homo sapien
tgatgaagaaaatctatcggtatat

SEQ ID NO: 4894379 - DNA, 25 bp, Homo sapien
gattagggcatatatcacattaaat

SEQ ID NO: 4894380 - DNA, 25 bp, Homo sapien
ctttaaaagatcttgctctggtgcc

SEQ ID NO: 4894381 - DNA, 25 bp, Homo sapien
ccagctttaaaagatcttgctctgg

SEQ ID NO: 4894382 - DNA, 25 bp, Homo sapien
ctggcctgaatttctaacaccagct

SEQ ID NO: 4894383 - DNA, 25 bp, Homo sapien
taacaccagctttaaaagatcttgc

SEQ ID NO: 4894384 - DNA, 25 bp, Homo sapien
aggtgctgtctcttcggatctctgc

SEQ ID NO: 4894385 - DNA, 25 bp, Homo sapien
aggatgcccagatcccttgccagag

SEQ ID NO: 4894386 - DNA, 25 bp, Homo sapien
tgatagctacattgggagcctcttc

SEQ ID NO: 4894387 - DNA, 25 bp, Homo sapien
cttaaaggtgctgtctcttcggatc

SEQ ID NO: 4894388 - DNA, 25 bp, Homo sapien
tttggctcacaaagacgaggttaat

SEQ ID NO: 4894389 - DNA, 25 bp, Homo sapien
ccgcagggcttgtcagaacttttaa

SEQ ID NO: 4894390 - DNA, 25 bp, Homo sapien
taatagcagcctgcttatgccctga

SEQ ID NO: 4894391 - DNA, 25 bp, Homo sapien
gctgaggaaatgatgactctagcca

SEQ ID NO: 4894392 - DNA, 25 bp, Homo sapien
tacaaacctcaagtgttatggcctg

SEQ ID NO: 4894393 - DNA, 25 bp, Homo sapien
gaatcctggacttcgaagcactatg

SEQ ID NO: 4894394 - DNA, 25 bp, Homo sapien
tatggcctgcccgactcatattcat

SEQ ID NO: 4894395 - DNA, 25 bp, Homo sapien
ccaatgcctgtatggcctggaaagg

SEQ ID NO: 4894396 - DNA, 25 bp, Homo sapien
acttgggctcctgaactgggccttg

SEQ ID NO: 4894397 - DNA, 25 bp, Homo sapien
ttgtaacttgggctcctgaactggg

SEQ ID NO: 4894398 - DNA, 25 bp, Homo sapien
tgtaacttgggctcctgaactgggc

SEQ ID NO: 4894399 - DNA, 25 bp, Homo sapien
taacttgggctcctgaactgggcct

SEQ ID NO: 4894400 - DNA, 25 bp, Homo sapien
ggttgcctgcaaattgagccagcat

SEQ ID NO: 4894401 - DNA, 25 bp, Homo sapien
caaacgagagtggagataggtacct

SEQ ID NO: 4894402 - DNA, 25 bp, Homo sapien
tctctggcaaacgagagtggagata

SEQ ID NO: 4894403 - DNA, 25 bp, Homo sapien
agataggtacctggttgcaggaagt

SEQ ID NO: 4894404 - DNA, 25 bp, Homo sapien
ttctctctggcaaacgagagtggag

SEQ ID NO: 4894405 - DNA, 25 bp, Homo sapien
ccaagaaggctgtatgctgtcagca

SEQ ID NO: 4894406 - DNA, 25 bp, Homo sapien
caagaaggctgtatgctgtcagcat

SEQ ID NO: 4894407 - DNA, 25 bp, Homo sapien
tgccaagaaggctgtatgctgtcag

SEQ ID NO: 4894408 - DNA, 25 bp, Homo sapien
gccaagaaggctgtatgctgtcagc

SEQ ID NO: 4894409 - DNA, 25 bp, Homo sapien
ctaagtgaaagaggaacctcagaga

SEQ ID NO: 4894410 - DNA, 25 bp, Homo sapien
agtgaaagaggaacctcagagacaa

SEQ ID NO: 4894411 - DNA, 25 bp, Homo sapien
catgatcatgttgtaaaggcaacgt

SEQ ID NO: 4894412 - DNA, 25 bp, Homo sapien
gggtatggcatacaagacatgatca

SEQ ID NO: 4894413 - DNA, 25 bp, Homo sapien
ccagagagggtgatttcttgtcaca

SEQ ID NO: 4894414 - DNA, 25 bp, Homo sapien
catttatggtgtaaggtgggctcag

SEQ ID NO: 4894415 - DNA, 25 bp, Homo sapien
taagaggaatatttggagtattggg

SEQ ID NO: 4894416 - DNA, 25 bp, Homo sapien
tgtgactgttacacagcgaatatta

SEQ ID NO: 4894417 - DNA, 25 bp, Homo sapien
actttgaagtaccatgcagtactgc

SEQ ID NO: 4894418 - DNA, 25 bp, Homo sapien
gggtatagatgtcattagtttaaca

SEQ ID NO: 4894419 - DNA, 25 bp, Homo sapien
gcgcatcggtttttctcctggcagg

SEQ ID NO: 4894420 - DNA, 25 bp, Homo sapien
cgctgagtcgtgtgccctggcgaat

SEQ ID NO: 4894421 - DNA, 25 bp, Homo sapien
gccgggtgcagtagcctcagtccca

SEQ ID NO: 4894422 - DNA, 25 bp, Homo sapien
aattgagccgtgattcccttggagc

SEQ ID NO: 4894423 - DNA, 25 bp, Homo sapien
tgccaagtgtatgaaaactctgggg

SEQ ID NO: 4894424 - DNA, 25 bp, Homo sapien
caagtgtatgaaaactctggggagc

SEQ ID NO: 4894425 - DNA, 25 bp, Homo sapien
agtgtatgaaaactctggggagcct

SEQ ID NO: 4894426 - DNA, 25 bp, Homo sapien
gccaagtgtatgaaaactctgggga

SEQ ID NO: 4894427 - DNA, 25 bp, Homo sapien
tgttcagaaccacaggtttgaccat

SEQ ID NO: 4894428 - DNA, 25 bp, Homo sapien
cttcatcttgagatgttgatgccat

SEQ ID NO: 4894429 - DNA, 25 bp, Homo sapien
tcttcttcatcttgagatgttgatg

SEQ ID NO: 4894430 - DNA, 25 bp, Homo sapien
tgatataattgctctcttcttcatc

SEQ ID NO: 4894431 - DNA, 25 bp, Homo sapien
ctgatataattgctctcttcttcat

SEQ ID NO: 4894432 - DNA, 25 bp, Homo sapien
ggacaaacggcctgaaggagcagag

SEQ ID NO: 4894433 - DNA, 25 bp, Homo sapien
ttcctgggacaaacggcctgaagga

SEQ ID NO: 4894434 - DNA, 25 bp, Homo sapien
ctgggacaaacggcctgaaggagca

SEQ ID NO: 4894435 - DNA, 25 bp, Homo sapien
tcctgggacaaacggcctgaaggag

SEQ ID NO: 4894436 - DNA, 25 bp, Homo sapien
gacaacacatctgtgggcaagccgg

SEQ ID NO: 4894437 - DNA, 25 bp, Homo sapien
ccaataaagatgttacggtaggatg

SEQ ID NO: 4894438 - DNA, 25 bp, Homo sapien
cagcacagcaccatagagataggct

SEQ ID NO: 4894439 - DNA, 25 bp, Homo sapien
taggccacagtatagcatttatcac

SEQ ID NO: 4894440 - DNA, 25 bp, Homo sapien
tccgtctccaattatcctgcttcat

SEQ ID NO: 4894441 - DNA, 25 bp, Homo sapien
ggctccgtctccaattatcctgctt

SEQ ID NO: 4894442 - DNA, 25 bp, Homo sapien
ctccgtctccaattatcctgcttca

SEQ ID NO: 4894443 - DNA, 25 bp, Homo sapien
gctccgtctccaattatcctgcttc

SEQ ID NO: 4894444 - DNA, 25 bp, Homo sapien
gcccaataattccaaggatggcatg

SEQ ID NO: 4894445 - DNA, 25 bp, Homo sapien
ccaaggatggcatgatcggctgcat

SEQ ID NO: 4894446 - DNA, 25 bp, Homo sapien
tgatggtgtgcccaataattccaag

SEQ ID NO: 4894447 - DNA, 25 bp, Homo sapien
caagagatgatggtgtgcccaataa

SEQ ID NO: 4894448 - DNA, 25 bp, Homo sapien
gccagacacttgtataattctttcc

SEQ ID NO: 4894449 - DNA, 25 bp, Homo sapien
ggcagccagacacttgtataattct

SEQ ID NO: 4894450 - DNA, 25 bp, Homo sapien
tattggcagccagacacttgtataa

SEQ ID NO: 4894451 - DNA, 25 bp, Homo sapien
tctttattggcagccagacacttgt

SEQ ID NO: 4894452 - DNA, 25 bp, Homo sapien
gtaaatggtgataagaacggtcata

SEQ ID NO: 4894453 - DNA, 25 bp, Homo sapien
taaatggtgataagaacggtcataa

SEQ ID NO: 4894454 - DNA, 25 bp, Homo sapien
agtaaatggtgataagaacggtcat

SEQ ID NO: 4894455 - DNA, 25 bp, Homo sapien
ttcacagggttatcttaagtactgt

SEQ ID NO: 4894456 - DNA, 25 bp, Homo sapien
cacagggttatcttaagtactgtac

SEQ ID NO: 4894457 - DNA, 25 bp, Homo sapien
caggctccaagatcagttgtgaatt

SEQ ID NO: 4894458 - DNA, 25 bp, Homo sapien
ccaagatcagttgtgaatttcaaat

SEQ ID NO: 4894459 - DNA, 25 bp, Homo sapien
agaataaatctgcaataggccaggt

SEQ ID NO: 4894460 - DNA, 25 bp, Homo sapien
taggccaggtcaactgagttccttt

SEQ ID NO: 4894461 - DNA, 25 bp, Homo sapien
caagatgtatgtaaggaagttatta

SEQ ID NO: 4894462 - DNA, 25 bp, Homo sapien
taaggaagttattaaaagattcatg

SEQ ID NO: 4894463 - DNA, 25 bp, Homo sapien
ctagcgacttcagttccatcacatc

SEQ ID NO: 4894464 - DNA, 25 bp, Homo sapien
ttcatttgactcagtgctcctctat

SEQ ID NO: 4894465 - DNA, 25 bp, Homo sapien
tgtcagtctcatgttccaggtagca

SEQ ID NO: 4894466 - DNA, 25 bp, Homo sapien
ggtagcatgaacctagcgacttcag

SEQ ID NO: 4894467 - DNA, 25 bp, Homo sapien
aagtcacctggcaacagtatgaaag

SEQ ID NO: 4894468 - DNA, 25 bp, Homo sapien
tatccaaatgtagtgccctttcagg

SEQ ID NO: 4894469 - DNA, 25 bp, Homo sapien
tttctcattaagagcctttggctgc

SEQ ID NO: 4894470 - DNA, 25 bp, Homo sapien
gactgtcaattgtacatttgggaac

SEQ ID NO: 4894471 - DNA, 25 bp, Homo sapien
caactagttgcttggcgttcccttt

SEQ ID NO: 4894472 - DNA, 25 bp, Homo sapien
gcagcctgagccacctagtacccct

SEQ ID NO: 4894473 - DNA, 25 bp, Homo sapien
ggtactttggtcttatgcttcacgg

SEQ ID NO: 4894474 - DNA, 25 bp, Homo sapien
agtacccctcccaactagttgcttg

SEQ ID NO: 4894475 - DNA, 25 bp, Homo sapien
ttagaatccactttgcgtatatctt

SEQ ID NO: 4894476 - DNA, 25 bp, Homo sapien
attagaatccactttgcgtatatct

SEQ ID NO: 4894477 - DNA, 25 bp, Homo sapien
agaatccactttgcgtatatctttt

SEQ ID NO: 4894478 - DNA, 25 bp, Homo sapien
tagaatccactttgcgtatatcttt

SEQ ID NO: 4894479 - DNA, 25 bp, Homo sapien
tttcagcagggcacggctgctcaca

SEQ ID NO: 4894480 - DNA, 25 bp, Homo sapien
agtttcagcagggcacggctgctca

SEQ ID NO: 4894481 - DNA, 25 bp, Homo sapien
cagcagggcacggctgctcacacct

SEQ ID NO: 4894482 - DNA, 25 bp, Homo sapien
agcagggcacggctgctcacacctg

SEQ ID NO: 4894483 - DNA, 25 bp, Homo sapien
cttcttgtccggcttaaatgcaaac

SEQ ID NO: 4894484 - DNA, 25 bp, Homo sapien
ctcaaaatccttcttgtccggctta

SEQ ID NO: 4894485 - DNA, 25 bp, Homo sapien
taaatgcaaacttccgccacaaaac

SEQ ID NO: 4894486 - DNA, 25 bp, Homo sapien
tgtccggcttaaatgcaaacttccg

SEQ ID NO: 4894487 - DNA, 25 bp, Homo sapien
tttactcaaggatgagtcaagaagc

SEQ ID NO: 4894488 - DNA, 25 bp, Homo sapien
aaggatgagtcaagaagccattccg

SEQ ID NO: 4894489 - DNA, 25 bp, Homo sapien
tactcaaggatgagtcaagaagcca

SEQ ID NO: 4894490 - DNA, 25 bp, Homo sapien
gatgagtcaagaagccattccgtca

SEQ ID NO: 4894491 - DNA, 25 bp, Homo sapien
tatcgaacacggacagtagaaacta

SEQ ID NO: 4894492 - DNA, 25 bp, Homo sapien
cattggaagggactgtatcgaacac

SEQ ID NO: 4894493 - DNA, 25 bp, Homo sapien
ggtggcagtcattttgaacctatag

SEQ ID NO: 4894494 - DNA, 25 bp, Homo sapien
gaacctatagctgtttcggcattgg

SEQ ID NO: 4894495 - DNA, 25 bp, Homo sapien
ttcctgacgcgtcgtcagtgttggg

SEQ ID NO: 4894496 - DNA, 25 bp, Homo sapien
cacagttcctgacgcgtcgtcagtg

SEQ ID NO: 4894497 - DNA, 25 bp, Homo sapien
cctgacgcgtcgtcagtgttgggat

SEQ ID NO: 4894498 - DNA, 25 bp, Homo sapien
agttcctgacgcgtcgtcagtgttg

SEQ ID NO: 4894499 - DNA, 25 bp, Homo sapien
tatattggtaagatcatagagagct

SEQ ID NO: 4894500 - DNA, 25 bp, Homo sapien
aatattatagtctgcttctcatggt

SEQ ID NO: 4894501 - DNA, 25 bp, Homo sapien
tgaatattatagtctgcttctcatg

SEQ ID NO: 4894502 - DNA, 25 bp, Homo sapien
tattatagtctgcttctcatggtta

SEQ ID NO: 4894503 - DNA, 25 bp, Homo sapien
attatagtctgcttctcatggttag

SEQ ID NO: 4894504 - DNA, 25 bp, Homo sapien
tcatttgttcggtagtcttgacctc

SEQ ID NO: 4894505 - DNA, 25 bp, Homo sapien
tctctctcctttgaacccctctata

SEQ ID NO: 4894506 - DNA, 25 bp, Homo sapien
tttgaacccctctatagtacaaata

SEQ ID NO: 4894507 - DNA, 25 bp, Homo sapien
catttgttcggtagtcttgacctct

SEQ ID NO: 4894508 - DNA, 25 bp, Homo sapien
caggggatggtactgtcatgattct

SEQ ID NO: 4894509 - DNA, 25 bp, Homo sapien
ctgtcatgattctgatgggttcttc

SEQ ID NO: 4894510 - DNA, 25 bp, Homo sapien
tggtactgtcatgattctgatgggt

SEQ ID NO: 4894511 - DNA, 25 bp, Homo sapien
gggatggtactgtcatgattctgat

SEQ ID NO: 4894512 - DNA, 25 bp, Homo sapien
gggaagagctaccctataactcctc

SEQ ID NO: 4894513 - DNA, 25 bp, Homo sapien
gaagagctaccctataactcctcag

SEQ ID NO: 4894514 - DNA, 25 bp, Homo sapien
aagatgctttcttgatcctatctct

SEQ ID NO: 4894515 - DNA, 25 bp, Homo sapien
ggaagagctaccctataactcctca

SEQ ID NO: 4894516 - DNA, 25 bp, Homo sapien
cttgccagggtacgcgacggcctct

SEQ ID NO: 4894517 - DNA, 25 bp, Homo sapien
gtacgcgacggcctctcgggcgcct

SEQ ID NO: 4894518 - DNA, 25 bp, Homo sapien
ctcctcttgccagggtacgcgacgg

SEQ ID NO: 4894519 - DNA, 25 bp, Homo sapien
tgcaagcagggactcgcccggcgcg

SEQ ID NO: 4894520 - DNA, 25 bp, Homo sapien
tggcagcgtgctgtgaggcacccgg

SEQ ID NO: 4894521 - DNA, 25 bp, Homo sapien
gcgccggcggctgctttataacggc

SEQ ID NO: 4894522 - DNA, 25 bp, Homo sapien
ggcggctgctttataacggcggccc

SEQ ID NO: 4894523 - DNA, 25 bp, Homo sapien
gctgctttataacggcggcccgcgc

SEQ ID NO: 4894524 - DNA, 25 bp, Homo sapien
ctagctccttcatgtattcatcaaa

SEQ ID NO: 4894525 - DNA, 25 bp, Homo sapien
caggcgccatcttccttccagctgc

SEQ ID NO: 4894526 - DNA, 25 bp, Homo sapien
tcatgtattcatcaaagcctttgct

SEQ ID NO: 4894527 - DNA, 25 bp, Homo sapien
ctttgctgtccaccaggcgccatct

SEQ ID NO: 4894528 - DNA, 25 bp, Homo sapien
ccatgaagaaaacggagggtgacct

SEQ ID NO: 4894529 - DNA, 25 bp, Homo sapien
tccacaggatttctgcgggaaactg

SEQ ID NO: 4894530 - DNA, 25 bp, Homo sapien
ggtggaccacctccggaatcttgcg

SEQ ID NO: 4894531 - DNA, 25 bp, Homo sapien
gcaagctgaagctgtagcgccactc

SEQ ID NO: 4894532 - DNA, 25 bp, Homo sapien
tgttccatggggtaccaatccaaag

SEQ ID NO: 4894533 - DNA, 25 bp, Homo sapien
aggccaggatggcaacacacggcca

SEQ ID NO: 4894534 - DNA, 25 bp, Homo sapien
gcagcaggtcggcaccgccagcgcc

SEQ ID NO: 4894535 - DNA, 25 bp, Homo sapien
aggcctcattgcgctcctcccacag

SEQ ID NO: 4894536 - DNA, 25 bp, Homo sapien
gaaagcgaggcacggaagtaacttg

SEQ ID NO: 4894537 - DNA, 25 bp, Homo sapien
atatatcccacggtatgagccagca

SEQ ID NO: 4894538 - DNA, 25 bp, Homo sapien
gagactacaacctacgcagcatgat

SEQ ID NO: 4894539 - DNA, 25 bp, Homo sapien
gattgtcttgatgaagaacacccag

SEQ ID NO: 4894540 - DNA, 25 bp, Homo sapien
acaatctggcttggccattgcgccc

SEQ ID NO: 4894541 - DNA, 25 bp, Homo sapien
tttatggtgaggtttttaccatcac

SEQ ID NO: 4894542 - DNA, 25 bp, Homo sapien
agtgctctcagtttttatggtgagg

SEQ ID NO: 4894543 - DNA, 25 bp, Homo sapien
ttaccatcacaagtgatgatacaat

SEQ ID NO: 4894544 - DNA, 25 bp, Homo sapien
ttctgccatcagctgtggtttcttc

SEQ ID NO: 4894545 - DNA, 25 bp, Homo sapien
tgccatcagctgtggtttcttcaaa

SEQ ID NO: 4894546 - DNA, 25 bp, Homo sapien
agtttttctgccatcagctgtggtt

SEQ ID NO: 4894547 - DNA, 25 bp, Homo sapien
gagtttttctgccatcagctgtggt

SEQ ID NO: 4894548 - DNA, 25 bp, Homo sapien
gctaataaaagatgccaattctatg

SEQ ID NO: 4894549 - DNA, 25 bp, Homo sapien
gatacagcctatcattctagaagct

SEQ ID NO: 4894550 - DNA, 25 bp, Homo sapien
gagtctacttcattaacccatattg

SEQ ID NO: 4894551 - DNA, 25 bp, Homo sapien
tggttttcaacctagtagctaataa

SEQ ID NO: 4894552 - DNA, 25 bp, Homo sapien
accaatgcaccatctgtaaagttgc

SEQ ID NO: 4894553 - DNA, 25 bp, Homo sapien
tgcaccatctgtaaagttgcagaca

SEQ ID NO: 4894554 - DNA, 25 bp, Homo sapien
caatgcaccatctgtaaagttgcag

SEQ ID NO: 4894555 - DNA, 25 bp, Homo sapien
gatgctgaaccaatgcaccatctgt

SEQ ID NO: 4894556 - DNA, 25 bp, Homo sapien
ggttagccttagattccagagcagt

SEQ ID NO: 4894557 - DNA, 25 bp, Homo sapien
gaatgcacacaagaagctgactgag

SEQ ID NO: 4894558 - DNA, 25 bp, Homo sapien
cagaattcacgggtttgagagaagc

SEQ ID NO: 4894559 - DNA, 25 bp, Homo sapien
tcactgtgacgtggcagcaaagcaa

SEQ ID NO: 4894560 - DNA, 25 bp, Homo sapien
ttcatagatccgagtacaggtgaca

SEQ ID NO: 4894561 - DNA, 25 bp, Homo sapien
ctttttcatagatccgagtacaggt

SEQ ID NO: 4894562 - DNA, 25 bp, Homo sapien
acaggtgacattgttcatgacacac

SEQ ID NO: 4894563 - DNA, 25 bp, Homo sapien
aggtgacattgttcatgacacactc

SEQ ID NO: 4894564 - DNA, 25 bp, Homo sapien
gatttgctcattgaactgagcttgg

SEQ ID NO: 4894565 - DNA, 25 bp, Homo sapien
gctcattgaactgagcttggtcatt

SEQ ID NO: 4894566 - DNA, 25 bp, Homo sapien
tttgctcattgaactgagcttggtc

SEQ ID NO: 4894567 - DNA, 25 bp, Homo sapien
tgctcattgaactgagcttggtcat

SEQ ID NO: 4894568 - DNA, 25 bp, Homo sapien
aaagttcaaatagtatagggcaagc

SEQ ID NO: 4894569 - DNA, 25 bp, Homo sapien
tgtagtcaccttttattgagaatgg

SEQ ID NO: 4894570 - DNA, 25 bp, Homo sapien
tataaattgctagagtgtcatctca

SEQ ID NO: 4894571 - DNA, 25 bp, Homo sapien
aatatagtaccctcaagactgcccc

SEQ ID NO: 4894572 - DNA, 25 bp, Homo sapien
aaatccctcactaggagctacaagg

SEQ ID NO: 4894573 - DNA, 25 bp, Homo sapien
tcagggcttctgcagcggctagtcc

SEQ ID NO: 4894574 - DNA, 25 bp, Homo sapien
ggttctgtcggtctccacctcaggg

SEQ ID NO: 4894575 - DNA, 25 bp, Homo sapien
cctgaccgtcccatataaagtatta

SEQ ID NO: 4894576 - DNA, 25 bp, Homo sapien
ttcccagaaataggccacataattc

SEQ ID NO: 4894577 - DNA, 25 bp, Homo sapien
cagaaataggccacataattcctca

SEQ ID NO: 4894578 - DNA, 25 bp, Homo sapien
gattcccagaaataggccacataat

SEQ ID NO: 4894579 - DNA, 25 bp, Homo sapien
cccagaaataggccacataattcct

SEQ ID NO: 4894580 - DNA, 25 bp, Homo sapien
ccattggattcccatttgtacttag

SEQ ID NO: 4894581 - DNA, 25 bp, Homo sapien
ggtgagcaaggtcactcctattcct

SEQ ID NO: 4894582 - DNA, 25 bp, Homo sapien
ggttcctgagcctgtagatcgctcc

SEQ ID NO: 4894583 - DNA, 25 bp, Homo sapien
tcccatttgtacttagactctagag

SEQ ID NO: 4894584 - DNA, 25 bp, Homo sapien
caaagagccttagctgctggctgct

SEQ ID NO: 4894585 - DNA, 25 bp, Homo sapien
tggctgctgaaagtacaccaaagcc

SEQ ID NO: 4894586 - DNA, 25 bp, Homo sapien
agggctctagtagtccaaggacaga

SEQ ID NO: 4894587 - DNA, 25 bp, Homo sapien
aaacgtattcaaagggacaagcagg

SEQ ID NO: 4894588 - DNA, 25 bp, Homo sapien
tggtgaggatcatgaagtataggga

SEQ ID NO: 4894589 - DNA, 25 bp, Homo sapien
ctggtgaggatcatgaagtataggg

SEQ ID NO: 4894590 - DNA, 25 bp, Homo sapien
ggtgaggatcatgaagtatagggag

SEQ ID NO: 4894591 - DNA, 25 bp, Homo sapien
gtgaggatcatgaagtatagggagg

SEQ ID NO: 4894592 - DNA, 25 bp, Homo sapien
tgcccagcctccccttccttattat

SEQ ID NO: 4894593 - DNA, 25 bp, Homo sapien
attataaataaatagtcaaatgctg

SEQ ID NO: 4894594 - DNA, 25 bp, Homo sapien
cagcctccccttccttattataaat

SEQ ID NO: 4894595 - DNA, 25 bp, Homo sapien
ataaataaatagtcaaatgctggga

SEQ ID NO: 4894596 - DNA, 25 bp, Homo sapien
ccattcgtatctgaagtatgctcca

SEQ ID NO: 4894597 - DNA, 25 bp, Homo sapien
gctgttatcagcattcctcctatac

SEQ ID NO: 4894598 - DNA, 25 bp, Homo sapien
tattccattattgcttagaccattc

SEQ ID NO: 4894599 - DNA, 25 bp, Homo sapien
tattgcttagaccattcgtatctga

SEQ ID NO: 4894600 - DNA, 25 bp, Homo sapien
gatttggctttatagctctcaagtc

SEQ ID NO: 4894601 - DNA, 25 bp, Homo sapien
aaacaaataagattataggattgca

SEQ ID NO: 4894602 - DNA, 25 bp, Homo sapien
agtctatccaaaacctgctaaaggc

SEQ ID NO: 4894603 - DNA, 25 bp, Homo sapien
agattataggattgcaaatgatttg

SEQ ID NO: 4894604 - DNA, 25 bp, Homo sapien
acttctactatctgacacggcaggc

SEQ ID NO: 4894605 - DNA, 25 bp, Homo sapien
cacttctactatctgacacggcagg

SEQ ID NO: 4894606 - DNA, 25 bp, Homo sapien
ccacttctactatctgacacggcag

SEQ ID NO: 4894607 - DNA, 25 bp, Homo sapien
ttcaccatccaacttggtcatcatc

SEQ ID NO: 4894608 - DNA, 25 bp, Homo sapien
gatatatctggcctttacacttcct

SEQ ID NO: 4894609 - DNA, 25 bp, Homo sapien
tttgatatatctggcctttacactt

SEQ ID NO: 4894610 - DNA, 25 bp, Homo sapien
ctttgatatatctggcctttacact

SEQ ID NO: 4894611 - DNA, 25 bp, Homo sapien
tatatctggcctttacacttccttc

SEQ ID NO: 4894612 - DNA, 25 bp, Homo sapien
ttaacgtagtgtccttcccatgaga

SEQ ID NO: 4894613 - DNA, 25 bp, Homo sapien
gagaggtatctgtggtgagcggact

SEQ ID NO: 4894614 - DNA, 25 bp, Homo sapien
tatctgtggtgagcggacttggccc

SEQ ID NO: 4894615 - DNA, 25 bp, Homo sapien
acgtagtgtccttcccatgagaggt

SEQ ID NO: 4894616 - DNA, 25 bp, Homo sapien
ccacaaaccaatcctgtggtcttaa

SEQ ID NO: 4894617 - DNA, 25 bp, Homo sapien
gggatataatcctcttccggatcat

SEQ ID NO: 4894618 - DNA, 25 bp, Homo sapien
attttaattcctattaacttctgag

SEQ ID NO: 4894619 - DNA, 25 bp, Homo sapien
gagccagcagctcaactctgtcatc

SEQ ID NO: 4894620 - DNA, 25 bp, Homo sapien
ctctggatgaacttttcaggcagaa

SEQ ID NO: 4894621 - DNA, 25 bp, Homo sapien
gatgactctctggatgaacttttca

SEQ ID NO: 4894622 - DNA, 25 bp, Homo sapien
tctttgcttagcacgctgatcaggg

SEQ ID NO: 4894623 - DNA, 25 bp, Homo sapien
tcagtcaccaggctgagtcacagct

SEQ ID NO: 4894624 - DNA, 25 bp, Homo sapien
ctgttctgaagaagcccctggattt

SEQ ID NO: 4894625 - DNA, 25 bp, Homo sapien
gaagaagcccctggatttccccaca

SEQ ID NO: 4894626 - DNA, 25 bp, Homo sapien
tttgctgttctgaagaagcccctgg

SEQ ID NO: 4894627 - DNA, 25 bp, Homo sapien
ccgaaagagctttgctgttctgaag

SEQ ID NO: 4894628 - DNA, 25 bp, Homo sapien
aagggacaatactctgtgcttcacc

SEQ ID NO: 4894629 - DNA, 25 bp, Homo sapien
ggaagggacaatactctgtgcttca

SEQ ID NO: 4894630 - DNA, 25 bp, Homo sapien
gggacaatactctgtgcttcaccat

SEQ ID NO: 4894631 - DNA, 25 bp, Homo sapien
gaagggacaatactctgtgcttcac

SEQ ID NO: 4894632 - DNA, 25 bp, Homo sapien
gttgccttgacccttacctcctgaa

SEQ ID NO: 4894633 - DNA, 25 bp, Homo sapien
tcaacctgataattcagggaaatag

SEQ ID NO: 4894634 - DNA, 25 bp, Homo sapien
gatcttaatctcattatcacttaag

SEQ ID NO: 4894635 - DNA, 25 bp, Homo sapien
acagcaacgctttcctccccaagtg

SEQ ID NO: 4894636 - DNA, 25 bp, Homo sapien
aagacattgactccaagatttgctc

SEQ ID NO: 4894637 - DNA, 25 bp, Homo sapien
tcttgggaaactaagacattgactc

SEQ ID NO: 4894638 - DNA, 25 bp, Homo sapien
tttcaatagcttcaaggattagtct

SEQ ID NO: 4894639 - DNA, 25 bp, Homo sapien
taaacatatctatggcctgatcttc

SEQ ID NO: 4894640 - DNA, 25 bp, Homo sapien
ctgataacatgcaggaagaaagctg

SEQ ID NO: 4894641 - DNA, 25 bp, Homo sapien
tgataacatgcaggaagaaagctgt

SEQ ID NO: 4894642 - DNA, 25 bp, Homo sapien
gtgcagctgactccactacattaat

SEQ ID NO: 4894643 - DNA, 25 bp, Homo sapien
gagggagttttatgtcttggctcca

SEQ ID NO: 4894644 - DNA, 25 bp, Homo sapien
cactacattaattccaccagaggga

SEQ ID NO: 4894645 - DNA, 25 bp, Homo sapien
cagagggagttttatgtcttggctc

SEQ ID NO: 4894646 - DNA, 25 bp, Homo sapien
taagaaccagctgagagtgtcatgc

SEQ ID NO: 4894647 - DNA, 25 bp, Homo sapien
agtgtcatgcccttttccaatcctg

SEQ ID NO: 4894648 - DNA, 25 bp, Homo sapien
ttggctgtcagcaaattcactgccg

SEQ ID NO: 4894649 - DNA, 25 bp, Homo sapien
gtcaacactagccaacacactggct

SEQ ID NO: 4894650 - DNA, 25 bp, Homo sapien
aagtcttaggcaggtcatcacgaaa

SEQ ID NO: 4894651 - DNA, 25 bp, Homo sapien
ggtcatcacgaaagggcaaaaagag

SEQ ID NO: 4894652 - DNA, 25 bp, Homo sapien
ttccattccaaactgtatgcaagtc

SEQ ID NO: 4894653 - DNA, 25 bp, Homo sapien
gggctgtagcctttgagcccaggca

SEQ ID NO: 4894654 - DNA, 25 bp, Homo sapien
tagtggaagacatgaattgagagag

SEQ ID NO: 4894655 - DNA, 25 bp, Homo sapien
gaagacatgaattgagagagtctgt

SEQ ID NO: 4894656 - DNA, 25 bp, Homo sapien
agacatgaattgagagagtctgtaa

SEQ ID NO: 4894657 - DNA, 25 bp, Homo sapien
gtggaagacatgaattgagagagtc

SEQ ID NO: 4894658 - DNA, 25 bp, Homo sapien
aatgtgttaaaagaggacatccggc

SEQ ID NO: 4894659 - DNA, 25 bp, Homo sapien
ctatacaaggtacgtgagaaaatct

SEQ ID NO: 4894660 - DNA, 25 bp, Homo sapien
tacttttgtctggaaagccatgtaa

SEQ ID NO: 4894661 - DNA, 25 bp, Homo sapien
gacatccggcagttctcattttgtg

SEQ ID NO: 4894662 - DNA, 25 bp, Homo sapien
ctatcctgatgaaaggttctcctcc

SEQ ID NO: 4894663 - DNA, 25 bp, Homo sapien
gcctggtggtacagagtgaatttcc

SEQ ID NO: 4894664 - DNA, 25 bp, Homo sapien
ttttggcagtctttttggagcatga

SEQ ID NO: 4894665 - DNA, 25 bp, Homo sapien
cctgcagctaactgctgtgcagctg

SEQ ID NO: 4894666 - DNA, 25 bp, Homo sapien
caggtcccagttatctgggttggaa

SEQ ID NO: 4894667 - DNA, 25 bp, Homo sapien
ggaaatacactcagtgctgttggag

SEQ ID NO: 4894668 - DNA, 25 bp, Homo sapien
tggaaatacactcagtgctgttgga

SEQ ID NO: 4894669 - DNA, 25 bp, Homo sapien
aatggggcggctcgtggtctggggc

SEQ ID NO: 4894670 - DNA, 25 bp, Homo sapien
caatggggcggctcgtggtctgggg

SEQ ID NO: 4894671 - DNA, 25 bp, Homo sapien
caaggtgtggcagattcaatttcta

SEQ ID NO: 4894672 - DNA, 25 bp, Homo sapien
caatttctagtgacgactggtttcc

SEQ ID NO: 4894673 - DNA, 25 bp, Homo sapien
tcctggtccataaatggcatgttct

SEQ ID NO: 4894674 - DNA, 25 bp, Homo sapien
tagtgacgactggtttcctggtcca

SEQ ID NO: 4894675 - DNA, 25 bp, Homo sapien
gagagctacgttcatagcaactgaa

SEQ ID NO: 4894676 - DNA, 25 bp, Homo sapien
tggaatgcccactgatttcaagggc

SEQ ID NO: 4894677 - DNA, 25 bp, Homo sapien
ttgacgattacatgaaagctctggg

SEQ ID NO: 4894678 - DNA, 25 bp, Homo sapien
agctgcttaaatgcatggaatgccc

SEQ ID NO: 4894679 - DNA, 25 bp, Homo sapien
ttgaactctacaacattctgtggga

SEQ ID NO: 4894680 - DNA, 25 bp, Homo sapien
gacctggactgaagttcgcattgaa

SEQ ID NO: 4894681 - DNA, 25 bp, Homo sapien
tccacgagagtttatgagagagcat

SEQ ID NO: 4894682 - DNA, 25 bp, Homo sapien
gagcataagccaagggacgttgacc

SEQ ID NO: 4894683 - DNA, 25 bp, Homo sapien
cctttccccaatttgatttcagctc

SEQ ID NO: 4894684 - DNA, 25 bp, Homo sapien
ccctttccccaatttgatttcagct

SEQ ID NO: 4894685 - DNA, 25 bp, Homo sapien
cagtccttgctctcacgatggcagt

SEQ ID NO: 4894686 - DNA, 25 bp, Homo sapien
agtccttgctctcacgatggcagtc

SEQ ID NO: 4894687 - DNA, 25 bp, Homo sapien
ccttgttttcatgcttgatattata

SEQ ID NO: 4894688 - DNA, 25 bp, Homo sapien
agaagttctggcttgctggctatct

SEQ ID NO: 4894689 - DNA, 25 bp, Homo sapien
tcagggcaccttgagaagttctggc

SEQ ID NO: 4894690 - DNA, 25 bp, Homo sapien
ggctatctccttgttttcatgcttg

SEQ ID NO: 4894691 - DNA, 25 bp, Homo sapien
ggctcggcagaatatctcttcgaca

SEQ ID NO: 4894692 - DNA, 25 bp, Homo sapien
tctggctcggcagaatatctcttcg

SEQ ID NO: 4894693 - DNA, 25 bp, Homo sapien
tcggcagaatatctcttcgacaagc

SEQ ID NO: 4894694 - DNA, 25 bp, Homo sapien
ctggctcggcagaatatctcttcga

SEQ ID NO: 4894695 - DNA, 25 bp, Homo sapien
tcttaaaatgtgtagcaggatgcca

SEQ ID NO: 4894696 - DNA, 25 bp, Homo sapien
tcgaggcagacgctgaaagagcagt

SEQ ID NO: 4894697 - DNA, 25 bp, Homo sapien
caggcccgagacagttaattgtaca

SEQ ID NO: 4894698 - DNA, 25 bp, Homo sapien
ccctattggaaaggagcccagcact

SEQ ID NO: 4894699 - DNA, 25 bp, Homo sapien
ttccttgccttcaagatgtagaaag

SEQ ID NO: 4894700 - DNA, 25 bp, Homo sapien
gagagaattaagtatcatcatgtgt

SEQ ID NO: 4894701 - DNA, 25 bp, Homo sapien
tgtagaaagtgtctttgccaaaggt

SEQ ID NO: 4894702 - DNA, 25 bp, Homo sapien
ccttgccttcaagatgtagaaagtg

SEQ ID NO: 4894703 - DNA, 25 bp, Homo sapien
tctccagagtagaagaatgtgtgtt

SEQ ID NO: 4894704 - DNA, 25 bp, Homo sapien
tatagaatccatcctgctccctttc

SEQ ID NO: 4894705 - DNA, 25 bp, Homo sapien
tatattttatagaatccatcctgct

SEQ ID NO: 4894706 - DNA, 25 bp, Homo sapien
tggtactgggaggagcatcaggttg

SEQ ID NO: 4894707 - DNA, 25 bp, Homo sapien
tgtgcatccgacatatgtggcagca

SEQ ID NO: 4894708 - DNA, 25 bp, Homo sapien
gaaaaacaccgctcccaatacgaca

SEQ ID NO: 4894709 - DNA, 25 bp, Homo sapien
ttttccttgtgggaggggatccatg

SEQ ID NO: 4894710 - DNA, 25 bp, Homo sapien
gaggtgatcttcaatcgtgattttc

SEQ ID NO: 4894711 - DNA, 25 bp, Homo sapien
tcagtactgacgcctgtgcaagtct

SEQ ID NO: 4894712 - DNA, 25 bp, Homo sapien
agtactgacgcctgtgcaagtctaa

SEQ ID NO: 4894713 - DNA, 25 bp, Homo sapien
cagtactgacgcctgtgcaagtcta

SEQ ID NO: 4894714 - DNA, 25 bp, Homo sapien
gtactgacgcctgtgcaagtctaac

SEQ ID NO: 4894715 - DNA, 25 bp, Homo sapien
gactaggccagttgacattaggcag

SEQ ID NO: 4894716 - DNA, 25 bp, Homo sapien
gaaagcatcaatcacagaagaggca

SEQ ID NO: 4894717 - DNA, 25 bp, Homo sapien
gactgacacatgaacggagcagcca

SEQ ID NO: 4894718 - DNA, 25 bp, Homo sapien
gaagccatacatgggctccgtctca

SEQ ID NO: 4894719 - DNA, 25 bp, Homo sapien
tcttgttgggttgttagagttcagc

SEQ ID NO: 4894720 - DNA, 25 bp, Homo sapien
agtttcagtggttgctcttgttggg

SEQ ID NO: 4894721 - DNA, 25 bp, Homo sapien
gctcattggtagcaatgggaatgaa

SEQ ID NO: 4894722 - DNA, 25 bp, Homo sapien
ttaagagtttcagtggttgctcttg

SEQ ID NO: 4894723 - DNA, 25 bp, Homo sapien
ccaagtatcgtcagcatgggagaca

SEQ ID NO: 4894724 - DNA, 25 bp, Homo sapien
catggtcggatctgacaagtaaagc

SEQ ID NO: 4894725 - DNA, 25 bp, Homo sapien
aacacaagatatggtctgagcctca

SEQ ID NO: 4894726 - DNA, 25 bp, Homo sapien
tgactgtcagcaagagggaagcctt

SEQ ID NO: 4894727 - DNA, 25 bp, Homo sapien
gtcaatgcctaaagatgctatactg

SEQ ID NO: 4894728 - DNA, 25 bp, Homo sapien
tgctatactgtgagtagggcaggat

SEQ ID NO: 4894729 - DNA, 25 bp, Homo sapien
tgagttggttactgtcgcagctcct

SEQ ID NO: 4894730 - DNA, 25 bp, Homo sapien
gctcctacacaagtagaatgtggtt

SEQ ID NO: 4894731 - DNA, 25 bp, Homo sapien
gattctggccctagcaaacccaatg

SEQ ID NO: 4894732 - DNA, 25 bp, Homo sapien
gacacaacacattcctgccggcttt

SEQ ID NO: 4894733 - DNA, 25 bp, Homo sapien
tgaaaaagccaccatggtaatgagt

SEQ ID NO: 4894734 - DNA, 25 bp, Homo sapien
tccctgtaggcagacaagtatgtcc

SEQ ID NO: 4894735 - DNA, 25 bp, Homo sapien
gccaagagtatctcggctatgtgac

SEQ ID NO: 4894736 - DNA, 25 bp, Homo sapien
caacttctatgcacttaaatgccaa

SEQ ID NO: 4894737 - DNA, 25 bp, Homo sapien
tgtgacccctgagggcacatgggtt

SEQ ID NO: 4894738 - DNA, 25 bp, Homo sapien
gccatggctgccttcacgtggagca

SEQ ID NO: 4894739 - DNA, 25 bp, Homo sapien
tgtggttgttagtcgtttcagtgaa

SEQ ID NO: 4894740 - DNA, 25 bp, Homo sapien
ggttgttagtcgtttcagtgaatgc

SEQ ID NO: 4894741 - DNA, 25 bp, Homo sapien
ttccttgtggttgttagtcgtttca

SEQ ID NO: 4894742 - DNA, 25 bp, Homo sapien
gttagtcgtttcagtgaatgcaaag

SEQ ID NO: 4894743 - DNA, 25 bp, Homo sapien
tgcccttgtcttggagacttgctcc

SEQ ID NO: 4894744 - DNA, 25 bp, Homo sapien
tagtcatgggtagggaattccttcc

SEQ ID NO: 4894745 - DNA, 25 bp, Homo sapien
tccccttcctgagggtcaaaccaga

SEQ ID NO: 4894746 - DNA, 25 bp, Homo sapien
cttgtgattgggtagcattggcccc

SEQ ID NO: 4894747 - DNA, 25 bp, Homo sapien
gtatctccagggcatggaaccgtgc

SEQ ID NO: 4894748 - DNA, 25 bp, Homo sapien
taagtcagtgtttcccaagctcaga

SEQ ID NO: 4894749 - DNA, 25 bp, Homo sapien
ggaaccgtgcctgacacatcgcagg

SEQ ID NO: 4894750 - DNA, 25 bp, Homo sapien
catctttatccactagagggaggct

SEQ ID NO: 4894751 - DNA, 25 bp, Homo sapien
tatactcaggtttgagggccataat

SEQ ID NO: 4894752 - DNA, 25 bp, Homo sapien
gccataattttatgcgcacctgcaa

SEQ ID NO: 4894753 - DNA, 25 bp, Homo sapien
ttcagatcaaactgacagatatgag

SEQ ID NO: 4894754 - DNA, 25 bp, Homo sapien
ttttcacataaaggaccagctcata

SEQ ID NO: 4894755 - DNA, 25 bp, Homo sapien
gagaaagtcttactcgtatgggaaa

SEQ ID NO: 4894756 - DNA, 25 bp, Homo sapien
caaggttaggcattaccgtatttgc

SEQ ID NO: 4894757 - DNA, 25 bp, Homo sapien
aaggctgggtaactaaggagacaag

SEQ ID NO: 4894758 - DNA, 25 bp, Homo sapien
gcatatagtctataggtatcctcct

SEQ ID NO: 4894759 - DNA, 25 bp, Homo sapien
taggtgccctgtacacactatggcc

SEQ ID NO: 4894760 - DNA, 25 bp, Homo sapien
catttgggagcttgtatctccaggg

SEQ ID NO: 4894761 - DNA, 25 bp, Homo sapien
tactctgggtcgtgagttaactcac

SEQ ID NO: 4894762 - DNA, 25 bp, Homo sapien
ttccaggttcagctgttaaaagatg

SEQ ID NO: 4894763 - DNA, 25 bp, Homo sapien
tcttgcctgccacgttatctggagc

SEQ ID NO: 4894764 - DNA, 25 bp, Homo sapien
tcccgatgttggagtagcggttcgc

SEQ ID NO: 4894765 - DNA, 25 bp, Homo sapien
ggtgaccaggaacactcccgatgtt

SEQ ID NO: 4894766 - DNA, 25 bp, Homo sapien
cgaaggccgcatctgggtgactctt

SEQ ID NO: 4894767 - DNA, 25 bp, Homo sapien
cacggcagacgttcttaggattagg

SEQ ID NO: 4894768 - DNA, 25 bp, Homo sapien
gaaaggataccaaaggcctccaaga

SEQ ID NO: 4894769 - DNA, 25 bp, Homo sapien
ctctttcattctgaggttcagcgta

SEQ ID NO: 4894770 - DNA, 25 bp, Homo sapien
caacctctctcacagatgggagtca

SEQ ID NO: 4894771 - DNA, 25 bp, Homo sapien
gaggtgtcaggggcattggatctca

SEQ ID NO: 4894772 - DNA, 25 bp, Homo sapien
ggaggtgtcaggggcattggatctc

SEQ ID NO: 4894773 - DNA, 25 bp, Homo sapien
aggtgtcaggggcattggatctcac

SEQ ID NO: 4894774 - DNA, 25 bp, Homo sapien
catgaaggggaaacgccaggagaaa

SEQ ID NO: 4894775 - DNA, 25 bp, Homo sapien
gcatttgttgagtgcactgtaccat

SEQ ID NO: 4894776 - DNA, 25 bp, Homo sapien
tgttcatttcttaggtagtttcttc

SEQ ID NO: 4894777 - DNA, 25 bp, Homo sapien
tatttcataggtaatatgttctaat

SEQ ID NO: 4894778 - DNA, 25 bp, Homo sapien
cactgtaccatgtgttgtgttaagc

SEQ ID NO: 4894779 - DNA, 25 bp, Homo sapien
gaggatatctgactcaacaagacaa

SEQ ID NO: 4894780 - DNA, 25 bp, Homo sapien
taattggaaatcactttaggtcagc

SEQ ID NO: 4894781 - DNA, 25 bp, Homo sapien
ggtcagcactggataagaagtaaca

SEQ ID NO: 4894782 - DNA, 25 bp, Homo sapien
ccatgtctgtagttggtgtgactct

SEQ ID NO: 4894783 - DNA, 25 bp, Homo sapien
tattttaataagacgatcatgaata

SEQ ID NO: 4894784 - DNA, 25 bp, Homo sapien
caccgagccaggccatgatatttac

SEQ ID NO: 4894785 - DNA, 25 bp, Homo sapien
tatcccttggcacgtaaacagacta

SEQ ID NO: 4894786 - DNA, 25 bp, Homo sapien
gacttattgtaggttcgtttgagct

SEQ ID NO: 4894787 - DNA, 25 bp, Homo sapien
tattgttcagccttatcccttggca

SEQ ID NO: 4894788 - DNA, 25 bp, Homo sapien
gactactagacttattgtaggttcg

SEQ ID NO: 4894789 - DNA, 25 bp, Homo sapien
tatttcacgttaccatgccatttca

SEQ ID NO: 4894790 - DNA, 25 bp, Homo sapien
gcacctggcccattacatatctagg

SEQ ID NO: 4894791 - DNA, 25 bp, Homo sapien
catcagatagcatggcttattgtgg

SEQ ID NO: 4894792 - DNA, 25 bp, Homo sapien
ttcacattaccataccatcagatag

SEQ ID NO: 4894793 - DNA, 25 bp, Homo sapien
gcagtaactttagctgcccttccta

SEQ ID NO: 4894794 - DNA, 25 bp, Homo sapien
tttatacttaagtcagcattcagca

SEQ ID NO: 4894795 - DNA, 25 bp, Homo sapien
tgcccataatgagttaatcttcagt

SEQ ID NO: 4894796 - DNA, 25 bp, Homo sapien
ttcatcttgaataggaggttcttcc

SEQ ID NO: 4894797 - DNA, 25 bp, Homo sapien
aggtctctggtaataaactctatga

SEQ ID NO: 4894798 - DNA, 25 bp, Homo sapien
tcatctattattggaggaacatctg

SEQ ID NO: 4894799 - DNA, 25 bp, Homo sapien
ctgtgtcagtcttactctatgagta

SEQ ID NO: 4894800 - DNA, 25 bp, Homo sapien
tacttttagctggattgcctattaa

SEQ ID NO: 4894801 - DNA, 25 bp, Homo sapien
tactgtgaatttgtataagtagcct

SEQ ID NO: 4894802 - DNA, 25 bp, Homo sapien
gctaggaatttacactatgaatgga

SEQ ID NO: 4894803 - DNA, 25 bp, Homo sapien
tatgggcaatagaaggaatcttaat

SEQ ID NO: 4894804 - DNA, 25 bp, Homo sapien
tcagtttttctgtcgttagatcatc

SEQ ID NO: 4894805 - DNA, 25 bp, Homo sapien
caggtgactgtaatcaatgagagac

SEQ ID NO: 4894806 - DNA, 25 bp, Homo sapien
aattaggttgacttgccatttgagg

SEQ ID NO: 4894807 - DNA, 25 bp, Homo sapien
tgtatgagactgttacaaagcaggt

SEQ ID NO: 4894808 - DNA, 25 bp, Homo sapien
cctgtagtggagtatttgctggtaa

SEQ ID NO: 4894809 - DNA, 25 bp, Homo sapien
gaggtgatccgggagcttccagccc

SEQ ID NO: 4894810 - DNA, 25 bp, Homo sapien
gccaggtggagcattgccggcagcg

SEQ ID NO: 4894811 - DNA, 25 bp, Homo sapien
gttggacatcgggcagcactgccag

SEQ ID NO: 4894812 - DNA, 25 bp, Homo sapien
agatggcggagttggacatcgggca

SEQ ID NO: 4894813 - DNA, 25 bp, Homo sapien
gcgccgcgcgcgctcattgccccgc

SEQ ID NO: 4894814 - DNA, 25 bp, Homo sapien
tctgggtccgccactctcccgtcag

SEQ ID NO: 4894815 - DNA, 25 bp, Homo sapien
ctgtagactccgcctctgggtccgc

SEQ ID NO: 4894816 - DNA, 25 bp, Homo sapien
gggtccgccactctcccgtcaggcg

SEQ ID NO: 4894817 - DNA, 25 bp, Homo sapien
gtagttgtgctaaatgagtctgggt

SEQ ID NO: 4894818 - DNA, 25 bp, Homo sapien
tcaggtagttgtgctaaatgagtct

SEQ ID NO: 4894819 - DNA, 25 bp, Homo sapien
tgtgctaaatgagtctgggttctct

SEQ ID NO: 4894820 - DNA, 25 bp, Homo sapien
gttgtgctaaatgagtctgggttct

SEQ ID NO: 4894821 - DNA, 25 bp, Homo sapien
tcacttgcatgaggatgtaaattga

SEQ ID NO: 4894822 - DNA, 25 bp, Homo sapien
tgataaatggaccaaagacataaac

SEQ ID NO: 4894823 - DNA, 25 bp, Homo sapien
caaagacataaacatagtgaaatag

SEQ ID NO: 4894824 - DNA, 25 bp, Homo sapien
gccatgggaatttcacttgcatgag

SEQ ID NO: 4894825 - DNA, 25 bp, Homo sapien
tggacaggtgacacacactccaggg

SEQ ID NO: 4894826 - DNA, 25 bp, Homo sapien
gacacacactccagggcatttcctg

SEQ ID NO: 4894827 - DNA, 25 bp, Homo sapien
ggtgacacacactccagggcatttc

SEQ ID NO: 4894828 - DNA, 25 bp, Homo sapien
ctggacaggtgacacacactccagg

SEQ ID NO: 4894829 - DNA, 25 bp, Homo sapien
cagaccggaaaggcggccctcctgg

SEQ ID NO: 4894830 - DNA, 25 bp, Homo sapien
agcaaggcagtcctctcggggaccc

SEQ ID NO: 4894831 - DNA, 25 bp, Homo sapien
ggaaaggcggccctcctgggaatca

SEQ ID NO: 4894832 - DNA, 25 bp, Homo sapien
aggcggccctcctgggaatcaacaa

SEQ ID NO: 4894833 - DNA, 25 bp, Homo sapien
actgggagcggctcggctcttagaa

SEQ ID NO: 4894834 - DNA, 25 bp, Homo sapien
cagggcgatttctctctggattcga

SEQ ID NO: 4894835 - DNA, 25 bp, Homo sapien
cttattctgcgtgccgtgcttcttg

SEQ ID NO: 4894836 - DNA, 25 bp, Homo sapien
tcagtctcccgaagtcggaccaggg

SEQ ID NO: 4894837 - DNA, 25 bp, Homo sapien
caacacctcagtgttggtgtgtgag

SEQ ID NO: 4894838 - DNA, 25 bp, Homo sapien
gaaagtgtgccatcaatctgagtga

SEQ ID NO: 4894839 - DNA, 25 bp, Homo sapien
cagatttcatcgcttttgctgcaaa

SEQ ID NO: 4894840 - DNA, 25 bp, Homo sapien
atctgagtgagctgtttctcgaacc

SEQ ID NO: 4894841 - DNA, 25 bp, Homo sapien
gatataagagaactgacaatgtccc

SEQ ID NO: 4894842 - DNA, 25 bp, Homo sapien
aaaatgtatggctcaactttgggcc

SEQ ID NO: 4894843 - DNA, 25 bp, Homo sapien
taaacacccgcctaagcatgtcggt

SEQ ID NO: 4894844 - DNA, 25 bp, Homo sapien
caactctgaaactaggccaaactga

SEQ ID NO: 4894845 - DNA, 25 bp, Homo sapien
caaagccaacccgttgagaaaatgc

SEQ ID NO: 4894846 - DNA, 25 bp, Homo sapien
gatctcttgcatcaaatcatctatt

SEQ ID NO: 4894847 - DNA, 25 bp, Homo sapien
atcctgttgctctgtgatctcttgc

SEQ ID NO: 4894848 - DNA, 25 bp, Homo sapien
tcaccaaagccaacccgttgagaaa

SEQ ID NO: 4894849 - DNA, 25 bp, Homo sapien
cagtggacgacatgcctggttttct

SEQ ID NO: 4894850 - DNA, 25 bp, Homo sapien
tcttcaagttctgccatcaactcat

SEQ ID NO: 4894851 - DNA, 25 bp, Homo sapien
gaaggcacatttggaaggcggatat

SEQ ID NO: 4894852 - DNA, 25 bp, Homo sapien
tcctcctgttccaattcttcaagtt

SEQ ID NO: 4894853 - DNA, 25 bp, Homo sapien
gctgccaattgtttgatatcatcat

SEQ ID NO: 4894854 - DNA, 25 bp, Homo sapien
ccaagctgccaattgtttgatatca

SEQ ID NO: 4894855 - DNA, 25 bp, Homo sapien
aagctgccaattgtttgatatcatc

SEQ ID NO: 4894856 - DNA, 25 bp, Homo sapien
gccaattgtttgatatcatcatcct

SEQ ID NO: 4894857 - DNA, 25 bp, Homo sapien
tagtgctttcacacgttttgggaaa

SEQ ID NO: 4894858 - DNA, 25 bp, Homo sapien
ggctaaattacacccaggagattct

SEQ ID NO: 4894859 - DNA, 25 bp, Homo sapien
tgtaacagcatcataatggcctggg

SEQ ID NO: 4894860 - DNA, 25 bp, Homo sapien
tgttcacgcagttccctaagtggct

SEQ ID NO: 4894861 - DNA, 25 bp, Homo sapien
tctgtatacttgctggtagccagga

SEQ ID NO: 4894862 - DNA, 25 bp, Homo sapien
gaagtaggacccattgttagcaaac

SEQ ID NO: 4894863 - DNA, 25 bp, Homo sapien
aaactgaggtctaccactgaggtgt

SEQ ID NO: 4894864 - DNA, 25 bp, Homo sapien
aattcttccttactgtcgacagagg

SEQ ID NO: 4894865 - DNA, 25 bp, Homo sapien
tcttttcatattccatctctctcat

SEQ ID NO: 4894866 - DNA, 25 bp, Homo sapien
caaaattgaggaatgtgcttttaaa

SEQ ID NO: 4894867 - DNA, 25 bp, Homo sapien
gaggtttgctttcggtctttgcaaa

SEQ ID NO: 4894868 - DNA, 25 bp, Homo sapien
gttgaggtttgctttcggtctttgc

SEQ ID NO: 4894869 - DNA, 25 bp, Homo sapien
tgctttcggtctttgcaaaattgag

SEQ ID NO: 4894870 - DNA, 25 bp, Homo sapien
tccatggtactctttacccaaggct

SEQ ID NO: 4894871 - DNA, 25 bp, Homo sapien
cctattctgtgtggactgttgtcca

SEQ ID NO: 4894872 - DNA, 25 bp, Homo sapien
tttggggcacattcagtgactgacc

SEQ ID NO: 4894873 - DNA, 25 bp, Homo sapien
ggctatgtcctttggggcacattca

SEQ ID NO: 4894874 - DNA, 25 bp, Homo sapien
cattgacgatgagcttagagtgccg

SEQ ID NO: 4894875 - DNA, 25 bp, Homo sapien
aattttgcacaacggagatgcctgc

SEQ ID NO: 4894876 - DNA, 25 bp, Homo sapien
tgccgcagattttagcaggtgctcg

SEQ ID NO: 4894877 - DNA, 25 bp, Homo sapien
tagagtgccgcctagtgggaacaac

SEQ ID NO: 4894878 - DNA, 25 bp, Homo sapien
aatgtgtattggtaatgcttagatc

SEQ ID NO: 4894879 - DNA, 25 bp, Homo sapien
tgggattcagttaactacttcttaa

SEQ ID NO: 4894880 - DNA, 25 bp, Homo sapien
caaagttggccatcattattatttc

SEQ ID NO: 4894881 - DNA, 25 bp, Homo sapien
gagtgtagaattctaccttgatagt

SEQ ID NO: 4894882 - DNA, 25 bp, Homo sapien
aaactcaaccttccagtgaaaagct

SEQ ID NO: 4894883 - DNA, 25 bp, Homo sapien
caaccttccagtgaaaagcttcctc

SEQ ID NO: 4894884 - DNA, 25 bp, Homo sapien
ttaccgcacagttcgtgagggttcc

SEQ ID NO: 4894885 - DNA, 25 bp, Homo sapien
tgtttcaaaactcaaccttccagtg

SEQ ID NO: 4894886 - DNA, 25 bp, Homo sapien
gtgtcttctttaatgccaccaataa

SEQ ID NO: 4894887 - DNA, 25 bp, Homo sapien
cagtgtcttctttaatgccaccaat

SEQ ID NO: 4894888 - DNA, 25 bp, Homo sapien
cttctttaatgccaccaataaatat

SEQ ID NO: 4894889 - DNA, 25 bp, Homo sapien
gtcttctttaatgccaccaataaat

SEQ ID NO: 4894890 - DNA, 25 bp, Homo sapien
ggtatagtgtttctgaatgaccgtc

SEQ ID NO: 4894891 - DNA, 25 bp, Homo sapien
tggtatagtgtttctgaatgaccgt

SEQ ID NO: 4894892 - DNA, 25 bp, Homo sapien
tgctttgacaggtcttcctaacttc

SEQ ID NO: 4894893 - DNA, 25 bp, Homo sapien
ctttgacaggtcttcctaacttcac

SEQ ID NO: 4894894 - DNA, 25 bp, Homo sapien
ctcttgctttgacaggtcttcctaa

SEQ ID NO: 4894895 - DNA, 25 bp, Homo sapien
cttgctttgacaggtcttcctaact

SEQ ID NO: 4894896 - DNA, 25 bp, Homo sapien
agtttcccatcttcatgggtccaaa

SEQ ID NO: 4894897 - DNA, 25 bp, Homo sapien
gcctccaaagtttcccatcttcatg

SEQ ID NO: 4894898 - DNA, 25 bp, Homo sapien
cagctgtcagcaaagccaccatgac

SEQ ID NO: 4894899 - DNA, 25 bp, Homo sapien
ccccaccaccacagctgtcagcaaa

SEQ ID NO: 4894900 - DNA, 25 bp, Homo sapien
ttattcagtatcacaatcagactat

SEQ ID NO: 4894901 - DNA, 25 bp, Homo sapien
catttattcagtatcacaatcagac

SEQ ID NO: 4894902 - DNA, 25 bp, Homo sapien
ttcagtatcacaatcagactattac

SEQ ID NO: 4894903 - DNA, 25 bp, Homo sapien
agacatttattcagtatcacaatca

SEQ ID NO: 4894904 - DNA, 25 bp, Homo sapien
tttgtttggatgatccaccgggtcc

SEQ ID NO: 4894905 - DNA, 25 bp, Homo sapien
caccgggtccatttgatagcctaga

SEQ ID NO: 4894906 - DNA, 25 bp, Homo sapien
tcttggatggaatagcaaacagcaa

SEQ ID NO: 4894907 - DNA, 25 bp, Homo sapien
tagcttgtgcctgatgcttctcaaa

SEQ ID NO: 4894908 - DNA, 25 bp, Homo sapien
agttgggcagttattgttgtgtgta

SEQ ID NO: 4894909 - DNA, 25 bp, Homo sapien
cgtatgaaaagttgggcagttattg

SEQ ID NO: 4894910 - DNA, 25 bp, Homo sapien
tagagtttcgtatgaaaagttgggc

SEQ ID NO: 4894911 - DNA, 25 bp, Homo sapien
ccaccagtagagtttcgtatgaaaa

SEQ ID NO: 4894912 - DNA, 25 bp, Homo sapien
aggttttccagagtgagaatgaact

SEQ ID NO: 4894913 - DNA, 25 bp, Homo sapien
gaggttttccagagtgagaatgaac

SEQ ID NO: 4894914 - DNA, 25 bp, Homo sapien
cttaccttccgagggtcgaactgtg

SEQ ID NO: 4894915 - DNA, 25 bp, Homo sapien
gtcgaactgtgcctggtatttgcct

SEQ ID NO: 4894916 - DNA, 25 bp, Homo sapien
ctgcagtgcggaagacccgtgaccg

SEQ ID NO: 4894917 - DNA, 25 bp, Homo sapien
gggttgctcagagtcgggccacctc

SEQ ID NO: 4894918 - DNA, 25 bp, Homo sapien
gcgcaccggtcagcggaggcgggag

SEQ ID NO: 4894919 - DNA, 25 bp, Homo sapien
gggcgcgcaccggtcagcggaggcg

SEQ ID NO: 4894920 - DNA, 25 bp, Homo sapien
ccggtcagcggaggcgggagagtct

SEQ ID NO: 4894921 - DNA, 25 bp, Homo sapien
cggaggcgggagagtctgtgatccc

SEQ ID NO: 4894922 - DNA, 25 bp, Homo sapien
aaccttgatgtctggcgggcggcaa

SEQ ID NO: 4894923 - DNA, 25 bp, Homo sapien
aagcgcgctcgttcgggatcgccga

SEQ ID NO: 4894924 - DNA, 25 bp, Homo sapien
taaagactgggtcattacctcagga

SEQ ID NO: 4894925 - DNA, 25 bp, Homo sapien
tacgggtgacacctgcaaccttgat

SEQ ID NO: 4894926 - DNA, 25 bp, Homo sapien
caatgttggtcgcagttccttctgg

SEQ ID NO: 4894927 - DNA, 25 bp, Homo sapien
tacaagtcccatgatgcaaagtatg

SEQ ID NO: 4894928 - DNA, 25 bp, Homo sapien
gcaaagtatgagcacggaccaatgt

SEQ ID NO: 4894929 - DNA, 25 bp, Homo sapien
cagcgcaagctggtgatgactacaa

SEQ ID NO: 4894930 - DNA, 25 bp, Homo sapien
taggtatacatgtgcagcgttggtt

SEQ ID NO: 4894931 - DNA, 25 bp, Homo sapien
gggtacatgggcacacatgcaggtt

SEQ ID NO: 4894932 - DNA, 25 bp, Homo sapien
gttctagggtacatgggcacacatg

SEQ ID NO: 4894933 - DNA, 25 bp, Homo sapien
tatacatgtgcagcgttggtttgct

SEQ ID NO: 4894934 - DNA, 25 bp, Homo sapien
aaacagaggtcaaaatctgagaata

SEQ ID NO: 4894935 - DNA, 25 bp, Homo sapien
acagaggtcaaaatctgagaataca

SEQ ID NO: 4894936 - DNA, 25 bp, Homo sapien
tttatcctcagtgtataaaacagag

SEQ ID NO: 4894937 - DNA, 25 bp, Homo sapien
tgctcctttatcctcagtgtataaa

SEQ ID NO: 4894938 - DNA, 25 bp, Homo sapien
tttttcatttggtggtaaccacagc

SEQ ID NO: 4894939 - DNA, 25 bp, Homo sapien
tcttcaaggacagtgccatatacac

SEQ ID NO: 4894940 - DNA, 25 bp, Homo sapien
tcaaatggttgatctatagcagact

SEQ ID NO: 4894941 - DNA, 25 bp, Homo sapien
ggataatcaccgtaagaaatgtggg

SEQ ID NO: 4894942 - DNA, 25 bp, Homo sapien
tggatggcctacttttattccctta

SEQ ID NO: 4894943 - DNA, 25 bp, Homo sapien
ctttagctagaaaaaagagcgctgg

SEQ ID NO: 4894944 - DNA, 25 bp, Homo sapien
gaaaaaagagcgctggttggtgcat

SEQ ID NO: 4894945 - DNA, 25 bp, Homo sapien
tgctggcttggatggcctactttta

SEQ ID NO: 4894946 - DNA, 25 bp, Homo sapien
tgaggacgtcttcagatcctttctg

SEQ ID NO: 4894947 - DNA, 25 bp, Homo sapien
agatatattgaagcaatggttgaca

SEQ ID NO: 4894948 - DNA, 25 bp, Homo sapien
gcttgacttgaggacgtcttcagat

SEQ ID NO: 4894949 - DNA, 25 bp, Homo sapien
tggttgacaagtgcttgacttgagg

SEQ ID NO: 4894950 - DNA, 25 bp, Homo sapien
tttcacagcatataccccatgtgcg

SEQ ID NO: 4894951 - DNA, 25 bp, Homo sapien
tgtcttctattgtggctacttccgg

SEQ ID NO: 4894952 - DNA, 25 bp, Homo sapien
cccatgtgcgttaacagacccctga

SEQ ID NO: 4894953 - DNA, 25 bp, Homo sapien
gctattggctgtcaaaggtgaccag

SEQ ID NO: 4894954 - DNA, 25 bp, Homo sapien
tttccaatactacattctgtcttcc

SEQ ID NO: 4894955 - DNA, 25 bp, Homo sapien
actgtcactggcgagttcaagattg

SEQ ID NO: 4894956 - DNA, 25 bp, Homo sapien
gcaaggacttgacccattgattctg

SEQ ID NO: 4894957 - DNA, 25 bp, Homo sapien
tggcgagttcaagattggcaaggac

SEQ ID NO: 4894958 - DNA, 25 bp, Homo sapien
gctgcttgttacaacatctaatcca

SEQ ID NO: 4894959 - DNA, 25 bp, Homo sapien
caattaatcaggtatgtgatcttca

SEQ ID NO: 4894960 - DNA, 25 bp, Homo sapien
gccaatgctgcttgttacaacatct

SEQ ID NO: 4894961 - DNA, 25 bp, Homo sapien
tcttcaagatcaagccaatgctgct

SEQ ID NO: 4894962 - DNA, 25 bp, Homo sapien
cacctaaaggatagcaggcaattgc

SEQ ID NO: 4894963 - DNA, 25 bp, Homo sapien
gatcccagttctgctaatggagata

SEQ ID NO: 4894964 - DNA, 25 bp, Homo sapien
tattaaagttaagcacgcaagtgca

SEQ ID NO: 4894965 - DNA, 25 bp, Homo sapien
gatgcccctattttgcatgcagtat

SEQ ID NO: 4894966 - DNA, 25 bp, Homo sapien
agttaactatcacagccagcctctc

SEQ ID NO: 4894967 - DNA, 25 bp, Homo sapien
tatgcagttaactatcacagccagc

SEQ ID NO: 4894968 - DNA, 25 bp, Homo sapien
tttgttgttaagagatcctatgcag

SEQ ID NO: 4894969 - DNA, 25 bp, Homo sapien
ttaagagatcctatgcagttaacta

SEQ ID NO: 4894970 - DNA, 25 bp, Homo sapien
cttctctatatttatcggaggacaa

SEQ ID NO: 4894971 - DNA, 25 bp, Homo sapien
ctatatttatcggaggacaatgttt

SEQ ID NO: 4894972 - DNA, 25 bp, Homo sapien
aaaccgtcagggtcattgatttcaa

SEQ ID NO: 4894973 - DNA, 25 bp, Homo sapien
taccacaaaaccgtcagggtcattg

SEQ ID NO: 4894974 - DNA, 25 bp, Homo sapien
ggtctcaagttgaacccgtcaacca

SEQ ID NO: 4894975 - DNA, 25 bp, Homo sapien
tctcaagttgaacccgtcaaccaca

SEQ ID NO: 4894976 - DNA, 25 bp, Homo sapien
caagttgaacccgtcaaccacaaat

SEQ ID NO: 4894977 - DNA, 25 bp, Homo sapien
caaccacaaattctcctgtagtaat

SEQ ID NO: 4894978 - DNA, 25 bp, Homo sapien
cagtgggaatgactccaaacaggac

SEQ ID NO: 4894979 - DNA, 25 bp, Homo sapien
tcagcaaggaacagcaccgaggtaa

SEQ ID NO: 4894980 - DNA, 25 bp, Homo sapien
ggtaaacaggctcaaagtagggctg

SEQ ID NO: 4894981 - DNA, 25 bp, Homo sapien
agactccagggagtagcttcagtgg

SEQ ID NO: 4894982 - DNA, 25 bp, Homo sapien
ggatgcagttgcagtgtgagagcag

SEQ ID NO: 4894983 - DNA, 25 bp, Homo sapien
gcaaactggatgcagttgcagtgtg

SEQ ID NO: 4894984 - DNA, 25 bp, Homo sapien
gaagcaaactggatgcagttgcagt

SEQ ID NO: 4894985 - DNA, 25 bp, Homo sapien
aagcaaactggatgcagttgcagtg

SEQ ID NO: 4894986 - DNA, 25 bp, Homo sapien
atccctcctaatggactatccctgt

SEQ ID NO: 4894987 - DNA, 25 bp, Homo sapien
cctcctaatggactatccctgttct

SEQ ID NO: 4894988 - DNA, 25 bp, Homo sapien
ctaatggactatccctgttcttcat

SEQ ID NO: 4894989 - DNA, 25 bp, Homo sapien
tcctaatggactatccctgttcttc

SEQ ID NO: 4894990 - DNA, 25 bp, Homo sapien
ttcatatagtttaatgaaagcacaa

SEQ ID NO: 4894991 - DNA, 25 bp, Homo sapien
catatagtttaatgaaagcacaagt

SEQ ID NO: 4894992 - DNA, 25 bp, Homo sapien
tatagtttaatgaaagcacaagtgg

SEQ ID NO: 4894993 - DNA, 25 bp, Homo sapien
tagtttaatgaaagcacaagtggtc

SEQ ID NO: 4894994 - DNA, 25 bp, Homo sapien
ggaaatgctctaaagttgtccttgc

SEQ ID NO: 4894995 - DNA, 25 bp, Homo sapien
cttgtggaaatgctctaaagttgtc

SEQ ID NO: 4894996 - DNA, 25 bp, Homo sapien
ttctcatactcttgtggaaatgctc

SEQ ID NO: 4894997 - DNA, 25 bp, Homo sapien
catactcttgtggaaatgctctaaa

SEQ ID NO: 4894998 - DNA, 25 bp, Homo sapien
taactggatgtagccagctgtgtct

SEQ ID NO: 4894999 - DNA, 25 bp, Homo sapien
tgaagcccagggaaactcgaagtct

SEQ ID NO: 4895000 - DNA, 25 bp, Homo sapien
agggaaactcgaagtctgtccagag

SEQ ID NO: 4895001 - DNA, 25 bp, Homo sapien
ttccctttaactggatgtagccagc

SEQ ID NO: 4895002 - DNA, 25 bp, Homo sapien
ctccccgcactgctccactcctcat

SEQ ID NO: 4895003 - DNA, 25 bp, Homo sapien
ttctcctccccgcactgctccactc

SEQ ID NO: 4895004 - DNA, 25 bp, Homo sapien
agagcttctcctccccgcactgctc

SEQ ID NO: 4895005 - DNA, 25 bp, Homo sapien
ggagagcttctcctccccgcactgc

SEQ ID NO: 4895006 - DNA, 25 bp, Homo sapien
tttaagtaccagtgtgaaatcaata

SEQ ID NO: 4895007 - DNA, 25 bp, Homo sapien
ctttaagtaccagtgtgaaatcaat

SEQ ID NO: 4895008 - DNA, 25 bp, Homo sapien
cctttaagtaccagtgtgaaatcaa

SEQ ID NO: 4895009 - DNA, 25 bp, Homo sapien
cttttcatagcagtacttctgtgtc

SEQ ID NO: 4895010 - DNA, 25 bp, Homo sapien
cactcacatggaagtgtaattcctc

SEQ ID NO: 4895011 - DNA, 25 bp, Homo sapien
gaatgttagtactcccagaatgccc

SEQ ID NO: 4895012 - DNA, 25 bp, Homo sapien
taatactgacggtcttaatccagaa

SEQ ID NO: 4895013 - DNA, 25 bp, Homo sapien
ctgctggagtgctcactttgagagg

SEQ ID NO: 4895014 - DNA, 25 bp, Homo sapien
ctggagtgctcactttgagaggcct

SEQ ID NO: 4895015 - DNA, 25 bp, Homo sapien
tgctggagtgctcactttgagaggc

SEQ ID NO: 4895016 - DNA, 25 bp, Homo sapien
gctggagtgctcactttgagaggcc

SEQ ID NO: 4895017 - DNA, 25 bp, Homo sapien
cctacctcttcttcatatatatatg

SEQ ID NO: 4895018 - DNA, 25 bp, Homo sapien
cctcttcttcatatatatatgcacc

SEQ ID NO: 4895019 - DNA, 25 bp, Homo sapien
ctcctacctcttcttcatatatata

SEQ ID NO: 4895020 - DNA, 25 bp, Homo sapien
tacctcttcttcatatatatatgca

SEQ ID NO: 4895021 - DNA, 25 bp, Homo sapien
agtatttgcagatttactgcgttca

SEQ ID NO: 4895022 - DNA, 25 bp, Homo sapien
gtatttgcagatttactgcgttcat

SEQ ID NO: 4895023 - DNA, 25 bp, Homo sapien
gacttggtgttaaagattcttgtaa

SEQ ID NO: 4895024 - DNA, 25 bp, Homo sapien
tgtgacttggtgttaaagattcttg

SEQ ID NO: 4895025 - DNA, 25 bp, Homo sapien
cgagtcttgtgacttggtgttaaag

SEQ ID NO: 4895026 - DNA, 25 bp, Homo sapien
tcttgtgacttggtgttaaagattc

SEQ ID NO: 4895027 - DNA, 25 bp, Homo sapien
tgatgtcaaaaaccatgtaagccgc

SEQ ID NO: 4895028 - DNA, 25 bp, Homo sapien
taagccgcttccattgactggtaca

SEQ ID NO: 4895029 - DNA, 25 bp, Homo sapien
caccacaaagacacaatagggttcc

SEQ ID NO: 4895030 - DNA, 25 bp, Homo sapien
tcccagtattccctctgatgtcaaa

SEQ ID NO: 4895031 - DNA, 25 bp, Homo sapien
agacggagtctcatgatcttggctc

SEQ ID NO: 4895032 - DNA, 25 bp, Homo sapien
aataggctctacaggttctccaatc

SEQ ID NO: 4895033 - DNA, 25 bp, Homo sapien
actgtctcttagaatgagcttctcc

SEQ ID NO: 4895034 - DNA, 25 bp, Homo sapien
gtctcttagaatgagcttctccttg

SEQ ID NO: 4895035 - DNA, 25 bp, Homo sapien
ggaagtctccttgatactcatgtga

SEQ ID NO: 4895036 - DNA, 25 bp, Homo sapien
attgcttggcacgatgaaatctgac

SEQ ID NO: 4895037 - DNA, 25 bp, Homo sapien
agccattgcttggcacgatgaaatc

SEQ ID NO: 4895038 - DNA, 25 bp, Homo sapien
cattgcttggcacgatgaaatctga

SEQ ID NO: 4895039 - DNA, 25 bp, Homo sapien
ccattgcttggcacgatgaaatctg

SEQ ID NO: 4895040 - DNA, 25 bp, Homo sapien
ttcccacagtgcgataatctccaca

SEQ ID NO: 4895041 - DNA, 25 bp, Homo sapien
tctttcccacagtgcgataatctcc

SEQ ID NO: 4895042 - DNA, 25 bp, Homo sapien
caaatctttcccacagtgcgataat

SEQ ID NO: 4895043 - DNA, 25 bp, Homo sapien
cacagtgcgataatctccacaaatg

SEQ ID NO: 4895044 - DNA, 25 bp, Homo sapien
gccagagaagtaacagggaagctac

SEQ ID NO: 4895045 - DNA, 25 bp, Homo sapien
ccaaggtggctatggcggttccagc

SEQ ID NO: 4895046 - DNA, 25 bp, Homo sapien
taattaggaaacaaagctcagcagg

SEQ ID NO: 4895047 - DNA, 25 bp, Homo sapien
ggtggaggccagtactttgcaaaac

SEQ ID NO: 4895048 - DNA, 25 bp, Homo sapien
tattcacgttttcagctgttgaacg

SEQ ID NO: 4895049 - DNA, 25 bp, Homo sapien
agcaaaggaatggttttctctgaat

SEQ ID NO: 4895050 - DNA, 25 bp, Homo sapien
ttttcagctgttgaacgggccacag

SEQ ID NO: 4895051 - DNA, 25 bp, Homo sapien
tgaacgggccacagcaaaggaatgg

SEQ ID NO: 4895052 - DNA, 25 bp, Homo sapien
tgatgatagccctgtggagatttca

SEQ ID NO: 4895053 - DNA, 25 bp, Homo sapien
gaaggcattgatgatagccctgtgg

SEQ ID NO: 4895054 - DNA, 25 bp, Homo sapien
cctgtggagatttcataattgtaga

SEQ ID NO: 4895055 - DNA, 25 bp, Homo sapien
tagccctgtggagatttcataattg

SEQ ID NO: 4895056 - DNA, 25 bp, Homo sapien
catttctgttatcccgaatatgtaa

SEQ ID NO: 4895057 - DNA, 25 bp, Homo sapien
gttatcccgaatatgtaactggatg

SEQ ID NO: 4895058 - DNA, 25 bp, Homo sapien
gtccctcatttctgttatcccgaat

SEQ ID NO: 4895059 - DNA, 25 bp, Homo sapien
cgaatatgtaactggatgtaatacc

SEQ ID NO: 4895060 - DNA, 25 bp, Homo sapien
tcagcaagtcttggtggtacaccag

SEQ ID NO: 4895061 - DNA, 25 bp, Homo sapien
tgaacagcctctcagcaagtcttgg

SEQ ID NO: 4895062 - DNA, 25 bp, Homo sapien
tctccagtgaacagcctctcagcaa

SEQ ID NO: 4895063 - DNA, 25 bp, Homo sapien
ttggtggtacaccagcagaaggcat

SEQ ID NO: 4895064 - DNA, 25 bp, Homo sapien
atttcaaagatccagcagtggaagt

SEQ ID NO: 4895065 - DNA, 25 bp, Homo sapien
cccgtgagatcaagcaccagataag

SEQ ID NO: 4895066 - DNA, 25 bp, Homo sapien
aagacttcccgtgagatcaagcacc

SEQ ID NO: 4895067 - DNA, 25 bp, Homo sapien
agcaccagataagcttgttccctag

SEQ ID NO: 4895068 - DNA, 25 bp, Homo sapien
ctttagccaactgtctggagatgca

SEQ ID NO: 4895069 - DNA, 25 bp, Homo sapien
tccatttaatcttgatacttttctg

SEQ ID NO: 4895070 - DNA, 25 bp, Homo sapien
tgatacttttctgccagtatgtagt

SEQ ID NO: 4895071 - DNA, 25 bp, Homo sapien
cttgatacttttctgccagtatgta

SEQ ID NO: 4895072 - DNA, 25 bp, Homo sapien
gtccatttaatcttgatacttttct

SEQ ID NO: 4895073 - DNA, 25 bp, Homo sapien
tgttttggatcaagacttcagagct

SEQ ID NO: 4895074 - DNA, 25 bp, Homo sapien
ttttggatcaagacttcagagcttg

SEQ ID NO: 4895075 - DNA, 25 bp, Homo sapien
ctgttttggatcaagacttcagagc

SEQ ID NO: 4895076 - DNA, 25 bp, Homo sapien
tggatcaagacttcagagcttgttc

SEQ ID NO: 4895077 - DNA, 25 bp, Homo sapien
cactgatgcactctgtcttacgata

SEQ ID NO: 4895078 - DNA, 25 bp, Homo sapien
cattataagatcagttggtcagccg

SEQ ID NO: 4895079 - DNA, 25 bp, Homo sapien
taccctatgaataaagactccatgg

SEQ ID NO: 4895080 - DNA, 25 bp, Homo sapien
taaattacaggcgttacaatagcca

SEQ ID NO: 4895081 - DNA, 25 bp, Homo sapien
cactagctttttgtcctatcagtag

SEQ ID NO: 4895082 - DNA, 25 bp, Homo sapien
tactttcttggacaaagaccattcc

SEQ ID NO: 4895083 - DNA, 25 bp, Homo sapien
gaccattccatcttgaggataaata

SEQ ID NO: 4895084 - DNA, 25 bp, Homo sapien
taatctatacttagacaattatcag

SEQ ID NO: 4895085 - DNA, 25 bp, Homo sapien
tgctaactcttcctatcaaactaaa

SEQ ID NO: 4895086 - DNA, 25 bp, Homo sapien
gaaaaagtggcatttgaccaaacac

SEQ ID NO: 4895087 - DNA, 25 bp, Homo sapien
tacctaaaatgttatctgggaagat

SEQ ID NO: 4895088 - DNA, 25 bp, Homo sapien
acacctgggtggatctgtcgggtct

SEQ ID NO: 4895089 - DNA, 25 bp, Homo sapien
gaattattaattacacagcgtcttt

SEQ ID NO: 4895090 - DNA, 25 bp, Homo sapien
tggaactcatcgtggaaacaactgt

SEQ ID NO: 4895091 - DNA, 25 bp, Homo sapien
tatgaactgcctcaaagtctttccg

SEQ ID NO: 4895092 - DNA, 25 bp, Homo sapien
ctagtgaatcttcttatggattgct

SEQ ID NO: 4895093 - DNA, 25 bp, Homo sapien
tgagagagcctactccttagagaat

SEQ ID NO: 4895094 - DNA, 25 bp, Homo sapien
taacctaccatttcaatgagagagc

SEQ ID NO: 4895095 - DNA, 25 bp, Homo sapien
tgttgacataaacaaacagcttctg

SEQ ID NO: 4895096 - DNA, 25 bp, Homo sapien
gacattcctaagaacggtctagaga

SEQ ID NO: 4895097 - DNA, 25 bp, Homo sapien
cacagttggagtgtctgccagccct

SEQ ID NO: 4895098 - DNA, 25 bp, Homo sapien
tagtccatgttgattgagggcaaat

SEQ ID NO: 4895099 - DNA, 25 bp, Homo sapien
tcatctttgcgtagacacagttgga

SEQ ID NO: 4895100 - DNA, 25 bp, Homo sapien
tgcttaagaggccataggaagccac

SEQ ID NO: 4895101 - DNA, 25 bp, Homo sapien
taacagatggattctctaagggaag

SEQ ID NO: 4895102 - DNA, 25 bp, Homo sapien
cagtgacccagagtaacagatggat

SEQ ID NO: 4895103 - DNA, 25 bp, Homo sapien
gacccagagtaacagatggattctc

SEQ ID NO: 4895104 - DNA, 25 bp, Homo sapien
tggattctctaagggaagttttgga

SEQ ID NO: 4895105 - DNA, 25 bp, Homo sapien
ggaagaagaacacgccaaaggtcta

SEQ ID NO: 4895106 - DNA, 25 bp, Homo sapien
gttctgcatagataagcactgtgtc

SEQ ID NO: 4895107 - DNA, 25 bp, Homo sapien
tgtcataagctccagtattaacaga

SEQ ID NO: 4895108 - DNA, 25 bp, Homo sapien
caaaggagtacatagaagtatgaga

SEQ ID NO: 4895109 - DNA, 25 bp, Homo sapien
ggtaggatgtaatcggctgaattgt

SEQ ID NO: 4895110 - DNA, 25 bp, Homo sapien
aagctgtgccactttagcgtaagag

SEQ ID NO: 4895111 - DNA, 25 bp, Homo sapien
gaggtagtcggatcttgtattagca

SEQ ID NO: 4895112 - DNA, 25 bp, Homo sapien
ggtgggataatcacccatgggaaag

SEQ ID NO: 4895113 - DNA, 25 bp, Homo sapien
tacttgccgtcataacagatggtgg

SEQ ID NO: 4895114 - DNA, 25 bp, Homo sapien
tatgtacttgccgtcataacagatg

SEQ ID NO: 4895115 - DNA, 25 bp, Homo sapien
ggagaatgatcccagatttcaacgc

SEQ ID NO: 4895116 - DNA, 25 bp, Homo sapien
caacgctagtgctctgagacagcca

SEQ ID NO: 4895117 - DNA, 25 bp, Homo sapien
agatcccctcaagtctgcgttacct

SEQ ID NO: 4895118 - DNA, 25 bp, Homo sapien
catagatcccctcaagtctgcgtta

SEQ ID NO: 4895119 - DNA, 25 bp, Homo sapien
ccatagatcccctcaagtctgcgtt

SEQ ID NO: 4895120 - DNA, 25 bp, Homo sapien
tcaagtctgcgttacctcccacagg

SEQ ID NO: 4895121 - DNA, 25 bp, Homo sapien
ttgagtcatgcatctctgagtgatg

SEQ ID NO: 4895122 - DNA, 25 bp, Homo sapien
tattctttcgggatgtaatctcttg

SEQ ID NO: 4895123 - DNA, 25 bp, Homo sapien
gaaaagtcgatcaaatgtgtagtct

SEQ ID NO: 4895124 - DNA, 25 bp, Homo sapien
tttttgacactgaggcatgatttta

SEQ ID NO: 4895125 - DNA, 25 bp, Homo sapien
atttcaaccatctcagcccagttcg

SEQ ID NO: 4895126 - DNA, 25 bp, Homo sapien
ttagcttcattggattggtttttaa

SEQ ID NO: 4895127 - DNA, 25 bp, Homo sapien
tcaaccatctcagcccagttcggaa

SEQ ID NO: 4895128 - DNA, 25 bp, Homo sapien
gatctttgttcctattactatttga

SEQ ID NO: 4895129 - DNA, 25 bp, Homo sapien
tgggaaacagtaatgctgtctgcct

SEQ ID NO: 4895130 - DNA, 25 bp, Homo sapien
ttcatccattttactagccaacagg

SEQ ID NO: 4895131 - DNA, 25 bp, Homo sapien
cattttactagccaacaggaaagtt

SEQ ID NO: 4895132 - DNA, 25 bp, Homo sapien
cctctctgaaatcaacgatgggaaa

SEQ ID NO: 4895133 - DNA, 25 bp, Homo sapien
tgctcaccgattggaagctctacta

SEQ ID NO: 4895134 - DNA, 25 bp, Homo sapien
agcagtccctgctcaccgattggaa

SEQ ID NO: 4895135 - DNA, 25 bp, Homo sapien
tccctgctcaccgattggaagctct

SEQ ID NO: 4895136 - DNA, 25 bp, Homo sapien
ttgaagcagtccctgctcaccgatt

SEQ ID NO: 4895137 - DNA, 25 bp, Homo sapien
cctaaaacaaatcttatgaacatcg

SEQ ID NO: 4895138 - DNA, 25 bp, Homo sapien
aacaaatcttatgaacatcgtccat

SEQ ID NO: 4895139 - DNA, 25 bp, Homo sapien
taaaacaaatcttatgaacatcgtc

SEQ ID NO: 4895140 - DNA, 25 bp, Homo sapien
aaacaaatcttatgaacatcgtcca

SEQ ID NO: 4895141 - DNA, 25 bp, Homo sapien
cttggctattgcgactaacgttgta

SEQ ID NO: 4895142 - DNA, 25 bp, Homo sapien
tgtattctacaacagtggcactagt

SEQ ID NO: 4895143 - DNA, 25 bp, Homo sapien
caatggttccgtttatgccacatcc

SEQ ID NO: 4895144 - DNA, 25 bp, Homo sapien
gattagtgacggtgaacataaaccc

SEQ ID NO: 4895145 - DNA, 25 bp, Homo sapien
caacgtatttggttcgtattgaaag

SEQ ID NO: 4895146 - DNA, 25 bp, Homo sapien
aagagttgctgtggatttagctttt

SEQ ID NO: 4895147 - DNA, 25 bp, Homo sapien
acgtatttggttcgtattgaaagca

SEQ ID NO: 4895148 - DNA, 25 bp, Homo sapien
caatggatacttgtaggccaacatt

SEQ ID NO: 4895149 - DNA, 25 bp, Homo sapien
ttgaataaatcaggagctaccaagg

SEQ ID NO: 4895150 - DNA, 25 bp, Homo sapien
ctacagtttctgaatagtcaaaatt

SEQ ID NO: 4895151 - DNA, 25 bp, Homo sapien
aatcaggagctaccaaggcaatgga

SEQ ID NO: 4895152 - DNA, 25 bp, Homo sapien
ctttgaggttggtttggcagtctag

SEQ ID NO: 4895153 - DNA, 25 bp, Homo sapien
ggcagtctaggaaatttgacaaagc

SEQ ID NO: 4895154 - DNA, 25 bp, Homo sapien
ggtaatagtcaaccaacctcaggtc

SEQ ID NO: 4895155 - DNA, 25 bp, Homo sapien
catagcagactaagccaaggcatac

SEQ ID NO: 4895156 - DNA, 25 bp, Homo sapien
cttggcatttctcagcgcagcagaa

SEQ ID NO: 4895157 - DNA, 25 bp, Homo sapien
tggtctgggagttgtctggctttcc

SEQ ID NO: 4895158 - DNA, 25 bp, Homo sapien
aatgatgtcatctggaccatgtacg

SEQ ID NO: 4895159 - DNA, 25 bp, Homo sapien
tgtacgtggcacactttatttgcca

SEQ ID NO: 4895160 - DNA, 25 bp, Homo sapien
ttgggcaagatactctcagaataca

SEQ ID NO: 4895161 - DNA, 25 bp, Homo sapien
tgggcaagatactctcagaatacat

SEQ ID NO: 4895162 - DNA, 25 bp, Homo sapien
cacctgcgtccttacaatctgcatc

SEQ ID NO: 4895163 - DNA, 25 bp, Homo sapien
cagctccttgcagggaaacacagca

SEQ ID NO: 4895164 - DNA, 25 bp, Homo sapien
aggaggcttcagagcgtgcagctcc

SEQ ID NO: 4895165 - DNA, 25 bp, Homo sapien
aggcttcagagcgtgcagctccttg

SEQ ID NO: 4895166 - DNA, 25 bp, Homo sapien
gaagatacagacacaactctcagct

SEQ ID NO: 4895167 - DNA, 25 bp, Homo sapien
attgctgctgtctaggacttcgcac

SEQ ID NO: 4895168 - DNA, 25 bp, Homo sapien
gacttcgcacaccatcactacatga

SEQ ID NO: 4895169 - DNA, 25 bp, Homo sapien
tcctcatatagccaagtaactcagc

SEQ ID NO: 4895170 - DNA, 25 bp, Homo sapien
gtaactgttttgagtgtcctgcaat

SEQ ID NO: 4895171 - DNA, 25 bp, Homo sapien
ggttaatggattctcacactcttca

SEQ ID NO: 4895172 - DNA, 25 bp, Homo sapien
cacttgatgccccaaaggttgtttt

SEQ ID NO: 4895173 - DNA, 25 bp, Homo sapien
gcaggaaaccgcaggatttaatgta

SEQ ID NO: 4895174 - DNA, 25 bp, Homo sapien
tgacatcacaaactccgtttcacta

SEQ ID NO: 4895175 - DNA, 25 bp, Homo sapien
tcactatatcacttgaattttgtct

SEQ ID NO: 4895176 - DNA, 25 bp, Homo sapien
aactccgtttcactatatcacttga

SEQ ID NO: 4895177 - DNA, 25 bp, Homo sapien
tcacaaactccgtttcactatatca

SEQ ID NO: 4895178 - DNA, 25 bp, Homo sapien
gaatgcaacaatctggcttcttcat

SEQ ID NO: 4895179 - DNA, 25 bp, Homo sapien
tttgcttgaatgcaacaatctggct

SEQ ID NO: 4895180 - DNA, 25 bp, Homo sapien
ttcaatgattatgagtacggagctg

SEQ ID NO: 4895181 - DNA, 25 bp, Homo sapien
aatctgttttgctctaatgtggccc

SEQ ID NO: 4895182 - DNA, 25 bp, Homo sapien
ttatcttgacaaaacattagtcagg

SEQ ID NO: 4895183 - DNA, 25 bp, Homo sapien
ctcttgtcagcttatcttgtgtgct

SEQ ID NO: 4895184 - DNA, 25 bp, Homo sapien
aactttagcttgctcctcttgtcag

SEQ ID NO: 4895185 - DNA, 25 bp, Homo sapien
acaggcccttgaactttagcttgct

SEQ ID NO: 4895186 - DNA, 25 bp, Homo sapien
tctttattcccaggttactgacaga

SEQ ID NO: 4895187 - DNA, 25 bp, Homo sapien
gagaaactccactctttattcccag

SEQ ID NO: 4895188 - DNA, 25 bp, Homo sapien
agtagatgcaaccatgactttaaaa

SEQ ID NO: 4895189 - DNA, 25 bp, Homo sapien
cacaataagttcttatgaaagtaga

SEQ ID NO: 4895190 - DNA, 25 bp, Homo sapien
gttgttcagaacaagtacttgcaca

SEQ ID NO: 4895191 - DNA, 25 bp, Homo sapien
ttggagtctcatttgttaggaagtc

SEQ ID NO: 4895192 - DNA, 25 bp, Homo sapien
tttggagtctcatttgttaggaagt

SEQ ID NO: 4895193 - DNA, 25 bp, Homo sapien
aagacagaatcaattcccttggttt

SEQ ID NO: 4895194 - DNA, 25 bp, Homo sapien
atcaattcccttggtttttcttgct

SEQ ID NO: 4895195 - DNA, 25 bp, Homo sapien
agacagaatcaattcccttggtttt

SEQ ID NO: 4895196 - DNA, 25 bp, Homo sapien
tgagactggggcccagtatgcacaa

SEQ ID NO: 4895197 - DNA, 25 bp, Homo sapien
tactagggaagagggcagcacagga

SEQ ID NO: 4895198 - DNA, 25 bp, Homo sapien
gaagagggcagcacaggaatcagaa

SEQ ID NO: 4895199 - DNA, 25 bp, Homo sapien
tagggaagagggcagcacaggaatc

SEQ ID NO: 4895200 - DNA, 25 bp, Homo sapien
taatataatgaagtgttggagttac

SEQ ID NO: 4895201 - DNA, 25 bp, Homo sapien
cagtagttaatataatgaagtgttg

SEQ ID NO: 4895202 - DNA, 25 bp, Homo sapien
tagttaatataatgaagtgttggag

SEQ ID NO: 4895203 - DNA, 25 bp, Homo sapien
agacagtagttaatataatgaagtg

SEQ ID NO: 4895204 - DNA, 25 bp, Homo sapien
caggatggatagaagggccaacgat

SEQ ID NO: 4895205 - DNA, 25 bp, Homo sapien
ttggaggcacggtgcagaacgggac

SEQ ID NO: 4895206 - DNA, 25 bp, Homo sapien
tagaagggccaacgattggaggcac

SEQ ID NO: 4895207 - DNA, 25 bp, Homo sapien
ggacagatacaggttggtcagcctt

SEQ ID NO: 4895208 - DNA, 25 bp, Homo sapien
tatggcctgtgaggaataaagtcct

SEQ ID NO: 4895209 - DNA, 25 bp, Homo sapien
tgtatcagtactccctgagaggtca

SEQ ID NO: 4895210 - DNA, 25 bp, Homo sapien
caaacgggatgctagtatggcctgt

SEQ ID NO: 4895211 - DNA, 25 bp, Homo sapien
taaagtcctcatcctaattggaatc

SEQ ID NO: 4895212 - DNA, 25 bp, Homo sapien
aaattccaagtgcatagtggagtac

SEQ ID NO: 4895213 - DNA, 25 bp, Homo sapien
gagtacctctaggttctcatcattc

SEQ ID NO: 4895214 - DNA, 25 bp, Homo sapien
ccattcaaaggatgtttggtcaatc

SEQ ID NO: 4895215 - DNA, 25 bp, Homo sapien
aactgctgcctcaaaccattcaaag

SEQ ID NO: 4895216 - DNA, 25 bp, Homo sapien
aggagtctggcaggtacttagtaca

SEQ ID NO: 4895217 - DNA, 25 bp, Homo sapien
tctggcaggtacttagtacagtcct

SEQ ID NO: 4895218 - DNA, 25 bp, Homo sapien
gtcaattctccggtgccaggggttg

SEQ ID NO: 4895219 - DNA, 25 bp, Homo sapien
ttctccggtgccaggggttgtaatg

SEQ ID NO: 4895220 - DNA, 25 bp, Homo sapien
tgtggcattccttttgaggcctctg

SEQ ID NO: 4895221 - DNA, 25 bp, Homo sapien
tagatgtgtggcattccttttgagg

SEQ ID NO: 4895222 - DNA, 25 bp, Homo sapien
tggctacaggggctctttttggtcc

SEQ ID NO: 4895223 - DNA, 25 bp, Homo sapien
ggcattccttttgaggcctctgttc

SEQ ID NO: 4895224 - DNA, 25 bp, Homo sapien
tgggcagaacttgctggaaccatcc

SEQ ID NO: 4895225 - DNA, 25 bp, Homo sapien
gccgtcatgtctagttgtcttccca

SEQ ID NO: 4895226 - DNA, 25 bp, Homo sapien
cacatagtccccatcaaaatcaggt

SEQ ID NO: 4895227 - DNA, 25 bp, Homo sapien
gcatggtagcctccattgttaccca

SEQ ID NO: 4895228 - DNA, 25 bp, Homo sapien
tctgagggcaaacaaggcagtgagc

SEQ ID NO: 4895229 - DNA, 25 bp, Homo sapien
tctgggtgtgactggccataggccc

SEQ ID NO: 4895230 - DNA, 25 bp, Homo sapien
cataggccccgagacttgtggaaga

SEQ ID NO: 4895231 - DNA, 25 bp, Homo sapien
actctgtgccaggatgactgcggca

SEQ ID NO: 4895232 - DNA, 25 bp, Homo sapien
catatgcttctttctccgatattgt

SEQ ID NO: 4895233 - DNA, 25 bp, Homo sapien
caaggaacatatgcttctttctccg

SEQ ID NO: 4895234 - DNA, 25 bp, Homo sapien
ggaacatatgcttctttctccgata

SEQ ID NO: 4895235 - DNA, 25 bp, Homo sapien
tcaaggaacatatgcttctttctcc

SEQ ID NO: 4895236 - DNA, 25 bp, Homo sapien
acatcaccaaaggagatggacagga

SEQ ID NO: 4895237 - DNA, 25 bp, Homo sapien
atacatcaccaaaggagatggacag

SEQ ID NO: 4895238 - DNA, 25 bp, Homo sapien
agatgcacccaaattcagagtccat

SEQ ID NO: 4895239 - DNA, 25 bp, Homo sapien
tacatcaccaaaggagatggacagg

SEQ ID NO: 4895240 - DNA, 25 bp, Homo sapien
tattaagcacatctgcgcattccat

SEQ ID NO: 4895241 - DNA, 25 bp, Homo sapien
atcagctacaaagagttctggttct

SEQ ID NO: 4895242 - DNA, 25 bp, Homo sapien
tattaataactatggtagctacatt

SEQ ID NO: 4895243 - DNA, 25 bp, Homo sapien
aataactatggtagctacatttatc

SEQ ID NO: 4895244 - DNA, 25 bp, Homo sapien
ctgcttattaataactatggtagct

SEQ ID NO: 4895245 - DNA, 25 bp, Homo sapien
taactatggtagctacatttatcat

SEQ ID NO: 4895246 - DNA, 25 bp, Homo sapien
tcataattgagttcccgtttgacgt

SEQ ID NO: 4895247 - DNA, 25 bp, Homo sapien
ccgtttgacgtgcataaaaaacttg

SEQ ID NO: 4895248 - DNA, 25 bp, Homo sapien
gacgtgcataaaaaacttgccctaa

SEQ ID NO: 4895249 - DNA, 25 bp, Homo sapien
tgagttcccgtttgacgtgcataaa

SEQ ID NO: 4895250 - DNA, 25 bp, Homo sapien
tcttgagatggcagtctacatttct

SEQ ID NO: 4895251 - DNA, 25 bp, Homo sapien
cttgagatggcagtctacatttctc

SEQ ID NO: 4895252 - DNA, 25 bp, Homo sapien
agaaggaattttcttgaacagcaga

SEQ ID NO: 4895253 - DNA, 25 bp, Homo sapien
gaaggaattttcttgaacagcagat

SEQ ID NO: 4895254 - DNA, 25 bp, Homo sapien
ggaattttcttgaacagcagataca

SEQ ID NO: 4895255 - DNA, 25 bp, Homo sapien
aggaattttcttgaacagcagatac

SEQ ID NO: 4895256 - DNA, 25 bp, Homo sapien
tagaggtaccattgggtcagcagct

SEQ ID NO: 4895257 - DNA, 25 bp, Homo sapien
aattacatcaaacccaacccagtct

SEQ ID NO: 4895258 - DNA, 25 bp, Homo sapien
tggacccaagcaccttttgcctgca

SEQ ID NO: 4895259 - DNA, 25 bp, Homo sapien
cctctccagctgcttatggaaaatt

SEQ ID NO: 4895260 - DNA, 25 bp, Homo sapien
gagtcaccaagcatatacgctaagg

SEQ ID NO: 4895261 - DNA, 25 bp, Homo sapien
agcagccctgacactgggatgtggg

SEQ ID NO: 4895262 - DNA, 25 bp, Homo sapien
tcaggagtcaccaagcatatacgct

SEQ ID NO: 4895263 - DNA, 25 bp, Homo sapien
agccctgacactgggatgtgggtga

SEQ ID NO: 4895264 - DNA, 25 bp, Homo sapien
ccagtatgcaggcacagcattggag

SEQ ID NO: 4895265 - DNA, 25 bp, Homo sapien
ctctgcctccagtatgcaggcacag

SEQ ID NO: 4895266 - DNA, 25 bp, Homo sapien
cctccagtatgcaggcacagcattg

SEQ ID NO: 4895267 - DNA, 25 bp, Homo sapien
agtatgcaggcacagcattggagag

SEQ ID NO: 4895268 - DNA, 25 bp, Homo sapien
gtctaggataaacgacatccacata

SEQ ID NO: 4895269 - DNA, 25 bp, Homo sapien
cagctgattaaagggtctaggataa

SEQ ID NO: 4895270 - DNA, 25 bp, Homo sapien
taggataaacgacatccacataaaa

SEQ ID NO: 4895271 - DNA, 25 bp, Homo sapien
agggtctaggataaacgacatccac

SEQ ID NO: 4895272 - DNA, 25 bp, Homo sapien
tacagagatttcttacagagcataa

SEQ ID NO: 4895273 - DNA, 25 bp, Homo sapien
cataaagtacagagatgtagagcct

SEQ ID NO: 4895274 - DNA, 25 bp, Homo sapien
gtttacattatggttcactcctaag

SEQ ID NO: 4895275 - DNA, 25 bp, Homo sapien
tactatcaatatcccccatcagagg

SEQ ID NO: 4895276 - DNA, 25 bp, Homo sapien
ttcttctcatgtcgcactcctccca

SEQ ID NO: 4895277 - DNA, 25 bp, Homo sapien
tttcttctcatgtcgcactcctccc

SEQ ID NO: 4895278 - DNA, 25 bp, Homo sapien
tcttctcatgtcgcactcctcccat

SEQ ID NO: 4895279 - DNA, 25 bp, Homo sapien
gcacagagaagttagggaccaccac

SEQ ID NO: 4895280 - DNA, 25 bp, Homo sapien
catatatgagtgcttggtagaaggc

SEQ ID NO: 4895281 - DNA, 25 bp, Homo sapien
aggtaagacatatatgagtgcttgg

SEQ ID NO: 4895282 - DNA, 25 bp, Homo sapien
accacagacactggctggagagtca

SEQ ID NO: 4895283 - DNA, 25 bp, Homo sapien
tgatacaagccactgtcacacgctg

SEQ ID NO: 4895284 - DNA, 25 bp, Homo sapien
cagcagctcctttcgaattatccag

SEQ ID NO: 4895285 - DNA, 25 bp, Homo sapien
tctgacatcttcatgggtgatacaa

SEQ ID NO: 4895286 - DNA, 25 bp, Homo sapien
gggttgcttccaggtatctgacatc

SEQ ID NO: 4895287 - DNA, 25 bp, Homo sapien
cagtggaaccttcaagacgaggaca

SEQ ID NO: 4895288 - DNA, 25 bp, Homo sapien
ccttcaagacgaggacatgctgctg

SEQ ID NO: 4895289 - DNA, 25 bp, Homo sapien
gaaccttcaagacgaggacatgctg

SEQ ID NO: 4895290 - DNA, 25 bp, Homo sapien
gcagagccagtggaaccttcaagac

SEQ ID NO: 4895291 - DNA, 25 bp, Homo sapien
taaaggtacctgtgccaacatcaaa

SEQ ID NO: 4895292 - DNA, 25 bp, Homo sapien
cctaaagggctaatagcccaactgt

SEQ ID NO: 4895293 - DNA, 25 bp, Homo sapien
aaatgtgataaattccctgcttggg

SEQ ID NO: 4895294 - DNA, 25 bp, Homo sapien
aaattccctgcttgggtctagcata

SEQ ID NO: 4895295 - DNA, 25 bp, Homo sapien
tcacgactctccttcctcccctaaa

SEQ ID NO: 4895296 - DNA, 25 bp, Homo sapien
gaagtatgggttttccctcagttga

SEQ ID NO: 4895297 - DNA, 25 bp, Homo sapien
ccctcagttgattagaaaaagccat

SEQ ID NO: 4895298 - DNA, 25 bp, Homo sapien
caaaggaggagcagaagtatgggtt

SEQ ID NO: 4895299 - DNA, 25 bp, Homo sapien
ttccctcagttgattagaaaaagcc

SEQ ID NO: 4895300 - DNA, 25 bp, Homo sapien
tatctccgtgaaaatatctcatata

SEQ ID NO: 4895301 - DNA, 25 bp, Homo sapien
gtatctccgtgaaaatatctcatat

SEQ ID NO: 4895302 - DNA, 25 bp, Homo sapien
cgtatctccgtgaaaatatctcata

SEQ ID NO: 4895303 - DNA, 25 bp, Homo sapien
acaatgaaatgaagcactggtatcc

SEQ ID NO: 4895304 - DNA, 25 bp, Homo sapien
catcccattgtgtatgaattcttga

SEQ ID NO: 4895305 - DNA, 25 bp, Homo sapien
cccattgtgtatgaattcttgactc

SEQ ID NO: 4895306 - DNA, 25 bp, Homo sapien
gaagcactggtatcctgatatttaa

SEQ ID NO: 4895307 - DNA, 25 bp, Homo sapien
cagttccacaaaggctcctattgac

SEQ ID NO: 4895308 - DNA, 25 bp, Homo sapien
tgttgtgatgaccagttccacaaag

SEQ ID NO: 4895309 - DNA, 25 bp, Homo sapien
ccacaaaggctcctattgacttcat

SEQ ID NO: 4895310 - DNA, 25 bp, Homo sapien
gttccacaaaggctcctattgactt

SEQ ID NO: 4895311 - DNA, 25 bp, Homo sapien
ttaatcatcccctggcaactctttg

SEQ ID NO: 4895312 - DNA, 25 bp, Homo sapien
tcttctttgtcagtgtcatacttgc

SEQ ID NO: 4895313 - DNA, 25 bp, Homo sapien
ccctggcaactctttgcttgtttct

SEQ ID NO: 4895314 - DNA, 25 bp, Homo sapien
tgtcagtgtcatacttgcctagcct

SEQ ID NO: 4895315 - DNA, 25 bp, Homo sapien
atttcacaaaacggccaggcaaaat

SEQ ID NO: 4895316 - DNA, 25 bp, Homo sapien
cacaaaacggccaggcaaaattcca

SEQ ID NO: 4895317 - DNA, 25 bp, Homo sapien
catttcacaaaacggccaggcaaaa

SEQ ID NO: 4895318 - DNA, 25 bp, Homo sapien
ttcacaaaacggccaggcaaaattc

SEQ ID NO: 4895319 - DNA, 25 bp, Homo sapien
ctgagagccaagaaattgtgtccgg

SEQ ID NO: 4895320 - DNA, 25 bp, Homo sapien
cactgagagccaagaaattgtgtcc

SEQ ID NO: 4895321 - DNA, 25 bp, Homo sapien
actgagagccaagaaattgtgtccg

SEQ ID NO: 4895322 - DNA, 25 bp, Homo sapien
cagagcttacggctgcatggaacac

SEQ ID NO: 4895323 - DNA, 25 bp, Homo sapien
gcttacggctgcatggaacacagct

SEQ ID NO: 4895324 - DNA, 25 bp, Homo sapien
cttgcagagcttacggctgcatgga

SEQ ID NO: 4895325 - DNA, 25 bp, Homo sapien
agacttgcagagcttacggctgcat

SEQ ID NO: 4895326 - DNA, 25 bp, Homo sapien
aatattagtaggttaatcctcctgg

SEQ ID NO: 4895327 - DNA, 25 bp, Homo sapien
tcaaaaagttttagctcgtacaagc

SEQ ID NO: 4895328 - DNA, 25 bp, Homo sapien
gcaaaacatgtagatgcgcacacac

SEQ ID NO: 4895329 - DNA, 25 bp, Homo sapien
cactatttctcctaagtatggtcaa

SEQ ID NO: 4895330 - DNA, 25 bp, Homo sapien
cctgtgacacctatacatttgggag

SEQ ID NO: 4895331 - DNA, 25 bp, Homo sapien
tgtgagagccaaatagcagagaaag

SEQ ID NO: 4895332 - DNA, 25 bp, Homo sapien
tggttgattgcagaacttccatgga

SEQ ID NO: 4895333 - DNA, 25 bp, Homo sapien
ctgcacggtaaagagtgtgagagcc

SEQ ID NO: 4895334 - DNA, 25 bp, Homo sapien
tttggttgtatctctgcccggcttt

SEQ ID NO: 4895335 - DNA, 25 bp, Homo sapien
ttttttggttgtatctctgcccggc

SEQ ID NO: 4895336 - DNA, 25 bp, Homo sapien
tcttttttggttgtatctctgcccg

SEQ ID NO: 4895337 - DNA, 25 bp, Homo sapien
tttttggttgtatctctgcccggct

SEQ ID NO: 4895338 - DNA, 25 bp, Homo sapien
tcagatagttgtaggtatgcggtgt

SEQ ID NO: 4895339 - DNA, 25 bp, Homo sapien
tagttgtaggtatgcggtgttattt

SEQ ID NO: 4895340 - DNA, 25 bp, Homo sapien
gatcagatagttgtaggtatgcggt

SEQ ID NO: 4895341 - DNA, 25 bp, Homo sapien
agatagttgtaggtatgcggtgtta

SEQ ID NO: 4895342 - DNA, 25 bp, Homo sapien
tactttcacatcaataacatggatt

SEQ ID NO: 4895343 - DNA, 25 bp, Homo sapien
gtcaatatgcccagcctcagtgaat

SEQ ID NO: 4895344 - DNA, 25 bp, Homo sapien
gaatattcccaccagtctacaaatg

SEQ ID NO: 4895345 - DNA, 25 bp, Homo sapien
caataaactagctaaggccagtcct

SEQ ID NO: 4895346 - DNA, 25 bp, Homo sapien
ggccagtccttacacttgagattca

SEQ ID NO: 4895347 - DNA, 25 bp, Homo sapien
agttttcttcactaatgtttccttg

SEQ ID NO: 4895348 - DNA, 25 bp, Homo sapien
ccttaagaacctgcagttttcttca

SEQ ID NO: 4895349 - DNA, 25 bp, Homo sapien
cagttttcttcactaatgtttcctt

SEQ ID NO: 4895350 - DNA, 25 bp, Homo sapien
tttcttcactaatgtttccttgtct

SEQ ID NO: 4895351 - DNA, 25 bp, Homo sapien
tccatcagttaggtccactacagct

SEQ ID NO: 4895352 - DNA, 25 bp, Homo sapien
ttaggtccactacagctaataaatc

SEQ ID NO: 4895353 - DNA, 25 bp, Homo sapien
aagcctccatcagttaggtccacta

SEQ ID NO: 4895354 - DNA, 25 bp, Homo sapien
cagttaggtccactacagctaataa

SEQ ID NO: 4895355 - DNA, 25 bp, Homo sapien
agtactgaagactagctgtgccatt

SEQ ID NO: 4895356 - DNA, 25 bp, Homo sapien
cagtactgaagactagctgtgccat

SEQ ID NO: 4895357 - DNA, 25 bp, Homo sapien
tgtgccattgatgttcttaatcaca

SEQ ID NO: 4895358 - DNA, 25 bp, Homo sapien
tagctgtgccattgatgttcttaat

SEQ ID NO: 4895359 - DNA, 25 bp, Homo sapien
atatagtgaacattcccctaaattt

SEQ ID NO: 4895360 - DNA, 25 bp, Homo sapien
tcttgttttccattagatggaaaca

SEQ ID NO: 4895361 - DNA, 25 bp, Homo sapien
ccattagatggaaacattagaatat

SEQ ID NO: 4895362 - DNA, 25 bp, Homo sapien
ttgttttccattagatggaaacatt

SEQ ID NO: 4895363 - DNA, 25 bp, Homo sapien
gtcctacatctcaaattgtcatatg

SEQ ID NO: 4895364 - DNA, 25 bp, Homo sapien
tccattctctaaaaaagccctgcct

SEQ ID NO: 4895365 - DNA, 25 bp, Homo sapien
gctcagcttcaaatcgttaaaatgt

SEQ ID NO: 4895366 - DNA, 25 bp, Homo sapien
gcttaaggctagatatagtcaatac

SEQ ID NO: 4895367 - DNA, 25 bp, Homo sapien
catctcatatgaaccctgaaagtca

SEQ ID NO: 4895368 - DNA, 25 bp, Homo sapien
gaaagtgcttcatctcatatgaacc

SEQ ID NO: 4895369 - DNA, 25 bp, Homo sapien
ttgaaagtgcttcatctcatatgaa

SEQ ID NO: 4895370 - DNA, 25 bp, Homo sapien
gtgcttcatctcatatgaaccctga

SEQ ID NO: 4895371 - DNA, 25 bp, Homo sapien
ctgtgcctgagagactggtggtcca

SEQ ID NO: 4895372 - DNA, 25 bp, Homo sapien
tgcctgagagactggtggtccagac

SEQ ID NO: 4895373 - DNA, 25 bp, Homo sapien
ctggatgactgtgcctgagagactg

SEQ ID NO: 4895374 - DNA, 25 bp, Homo sapien
cctgagagactggtggtccagacat

SEQ ID NO: 4895375 - DNA, 25 bp, Homo sapien
gtctttacgagactcaaataatttc

SEQ ID NO: 4895376 - DNA, 25 bp, Homo sapien
tcaatgggcagagatgcagcctctt

SEQ ID NO: 4895377 - DNA, 25 bp, Homo sapien
ttgcggccactgaagaagtgggaga

SEQ ID NO: 4895378 - DNA, 25 bp, Homo sapien
ctggtgggtgctcaatgggcagaga

SEQ ID NO: 4895379 - DNA, 25 bp, Homo sapien
tggggttgcggccactgaagaagtg

SEQ ID NO: 4895380 - DNA, 25 bp, Homo sapien
cactgaggcgaaaccttttgtgtca

SEQ ID NO: 4895381 - DNA, 25 bp, Homo sapien
ctgaggcgaaaccttttgtgtcatc

SEQ ID NO: 4895382 - DNA, 25 bp, Homo sapien
cacactgaggcgaaaccttttgtgt

SEQ ID NO: 4895383 - DNA, 25 bp, Homo sapien
tcacactgaggcgaaaccttttgtg

SEQ ID NO: 4895384 - DNA, 25 bp, Homo sapien
tcttccaatcgtagcacaatgtcat

SEQ ID NO: 4895385 - DNA, 25 bp, Homo sapien
tatcagtatcttccaatcgtagcac

SEQ ID NO: 4895386 - DNA, 25 bp, Homo sapien
cgtagcacaatgtcataaaagtacc

SEQ ID NO: 4895387 - DNA, 25 bp, Homo sapien
gcacaatgtcataaaagtaccaagt

SEQ ID NO: 4895388 - DNA, 25 bp, Homo sapien
cagagatgtttggatggcctgtctg

SEQ ID NO: 4895389 - DNA, 25 bp, Homo sapien
agataagaattacccactctgggtc

SEQ ID NO: 4895390 - DNA, 25 bp, Homo sapien
gtgaataggagcaacccactccagg

SEQ ID NO: 4895391 - DNA, 25 bp, Homo sapien
acctgcctgcagataagaattaccc

SEQ ID NO: 4895392 - DNA, 25 bp, Homo sapien
cattgtgtgagtcttcatgggacga

SEQ ID NO: 4895393 - DNA, 25 bp, Homo sapien
gatggatgattcactaaaataatgc

SEQ ID NO: 4895394 - DNA, 25 bp, Homo sapien
tatttcagaacactggcagctagtg

SEQ ID NO: 4895395 - DNA, 25 bp, Homo sapien
catgggacgatatgggaaaaggcta

SEQ ID NO: 4895396 - DNA, 25 bp, Homo sapien
tggggagtggagcaggttctcttcc

SEQ ID NO: 4895397 - DNA, 25 bp, Homo sapien
tgttggggagtggagcaggttctct

SEQ ID NO: 4895398 - DNA, 25 bp, Homo sapien
gggagtggagcaggttctcttcctc

SEQ ID NO: 4895399 - DNA, 25 bp, Homo sapien
ttggggagtggagcaggttctcttc

SEQ ID NO: 4895400 - DNA, 25 bp, Homo sapien
gctgagcgtcggctgagatggccat

SEQ ID NO: 4895401 - DNA, 25 bp, Homo sapien
ttttcagagtttgcggagaggctga

SEQ ID NO: 4895402 - DNA, 25 bp, Homo sapien
tacattttcagagtttgcggagagg

SEQ ID NO: 4895403 - DNA, 25 bp, Homo sapien
agtttgcggagaggctgagcgtcgg

SEQ ID NO: 4895404 - DNA, 25 bp, Homo sapien
cctcagaaaattcaggccgttgttt

SEQ ID NO: 4895405 - DNA, 25 bp, Homo sapien
tgggccctgacacttgctgcttctt

SEQ ID NO: 4895406 - DNA, 25 bp, Homo sapien
cttggcagttccttgcttgggtgaa

SEQ ID NO: 4895407 - DNA, 25 bp, Homo sapien
tgaatctcttgctgggagaagtcct

SEQ ID NO: 4895408 - DNA, 25 bp, Homo sapien
gtaactatggagttcctttactgaa

SEQ ID NO: 4895409 - DNA, 25 bp, Homo sapien
agtaactatggagttcctttactga

SEQ ID NO: 4895410 - DNA, 25 bp, Homo sapien
tacatcaccttcaacaccatatatt

SEQ ID NO: 4895411 - DNA, 25 bp, Homo sapien
gcatgtttttacatcaccttcaaca

SEQ ID NO: 4895412 - DNA, 25 bp, Homo sapien
ttttacatcaccttcaacaccatat

SEQ ID NO: 4895413 - DNA, 25 bp, Homo sapien
tgtttttacatcaccttcaacacca

SEQ ID NO: 4895414 - DNA, 25 bp, Homo sapien
aggagaagatgactcctcaccaatg

SEQ ID NO: 4895415 - DNA, 25 bp, Homo sapien
gagaagatgactcctcaccaatgcc

SEQ ID NO: 4895416 - DNA, 25 bp, Homo sapien
agaagatgactcctcaccaatgcca

SEQ ID NO: 4895417 - DNA, 25 bp, Homo sapien
gaagatgactcctcaccaatgccat

SEQ ID NO: 4895418 - DNA, 25 bp, Homo sapien
ttctgacagttgcaatagctttcca

SEQ ID NO: 4895419 - DNA, 25 bp, Homo sapien
caatagctttccatccacacttctt

SEQ ID NO: 4895420 - DNA, 25 bp, Homo sapien
acacttctttcaaatggagtaagac

SEQ ID NO: 4895421 - DNA, 25 bp, Homo sapien
gactatagctcagaacaaagaagcc

SEQ ID NO: 4895422 - DNA, 25 bp, Homo sapien
aagcagctttaggacgggaggtcac

SEQ ID NO: 4895423 - DNA, 25 bp, Homo sapien
ggaaagataacccaagagctgagac

SEQ ID NO: 4895424 - DNA, 25 bp, Homo sapien
ggtcctggagaatgccaacattagg

SEQ ID NO: 4895425 - DNA, 25 bp, Homo sapien
gacatgttcagtttgagatatccaa

SEQ ID NO: 4895426 - DNA, 25 bp, Homo sapien
tgtatatccattgaggcccagttca

SEQ ID NO: 4895427 - DNA, 25 bp, Homo sapien
aactaagacaggtggatttgtctgt

SEQ ID NO: 4895428 - DNA, 25 bp, Homo sapien
caggtggatttgtctgtatcagagg

SEQ ID NO: 4895429 - DNA, 25 bp, Homo sapien
ctaggtgttactggtttgttgtata

SEQ ID NO: 4895430 - DNA, 25 bp, Homo sapien
tggccagacccaaaaccaggttgtg

SEQ ID NO: 4895431 - DNA, 25 bp, Homo sapien
ttaatgttggggtggccagacccaa

SEQ ID NO: 4895432 - DNA, 25 bp, Homo sapien
gcggagtcaaaggattgaggaaagg

SEQ ID NO: 4895433 - DNA, 25 bp, Homo sapien
caaaggattgaggaaaggacagttt

SEQ ID NO: 4895434 - DNA, 25 bp, Homo sapien
gaagaagctgcttagttcagatgca

SEQ ID NO: 4895435 - DNA, 25 bp, Homo sapien
aaataatgctgcttagatgcacact

SEQ ID NO: 4895436 - DNA, 25 bp, Homo sapien
cacagcctgagtgcatgtttgctac

SEQ ID NO: 4895437 - DNA, 25 bp, Homo sapien
gtttttgcaagaatgactgactggc

SEQ ID NO: 4895438 - DNA, 25 bp, Homo sapien
tatggatatctagcataatgccaag

SEQ ID NO: 4895439 - DNA, 25 bp, Homo sapien
caaaggcattattagtctcattacg

SEQ ID NO: 4895440 - DNA, 25 bp, Homo sapien
gaatttgattcatgcagttaccact

SEQ ID NO: 4895441 - DNA, 25 bp, Homo sapien
tatttaacttcagtctgcaaaggca

SEQ ID NO: 4895442 - DNA, 25 bp, Homo sapien
taggcccaagtttctggatagttac

SEQ ID NO: 4895443 - DNA, 25 bp, Homo sapien
ggctgtcccgttttagatatttcta

SEQ ID NO: 4895444 - DNA, 25 bp, Homo sapien
ccaagggctgtcccgttttagatat

SEQ ID NO: 4895445 - DNA, 25 bp, Homo sapien
aaccatcgttaggcccaagtttctg

SEQ ID NO: 4895446 - DNA, 25 bp, Homo sapien
ccaggatcgtgaatatcattgtctt

SEQ ID NO: 4895447 - DNA, 25 bp, Homo sapien
ggccaggatcgtgaatatcattgtc

SEQ ID NO: 4895448 - DNA, 25 bp, Homo sapien
ccagggccaggatcgtgaatatcat

SEQ ID NO: 4895449 - DNA, 25 bp, Homo sapien
cagggccaggatcgtgaatatcatt

SEQ ID NO: 4895450 - DNA, 25 bp, Homo sapien
cacaggcatcttcaatagtcccttg

SEQ ID NO: 4895451 - DNA, 25 bp, Homo sapien
acaggcatcttcaatagtcccttgg

SEQ ID NO: 4895452 - DNA, 25 bp, Homo sapien
caggcatcttcaatagtcccttggg

SEQ ID NO: 4895453 - DNA, 25 bp, Homo sapien
ggcatcttcaatagtcccttgggga

SEQ ID NO: 4895454 - DNA, 25 bp, Homo sapien
tcacatgaacacttgtatattttcc

SEQ ID NO: 4895455 - DNA, 25 bp, Homo sapien
gatcctggtattgcttctaggccag

SEQ ID NO: 4895456 - DNA, 25 bp, Homo sapien
tattttcagtgattcagtacctctc

SEQ ID NO: 4895457 - DNA, 25 bp, Homo sapien
attcagtacctctcatcacatgaac

SEQ ID NO: 4895458 - DNA, 25 bp, Homo sapien
tcataccaatcatcagtgtgagcaa

SEQ ID NO: 4895459 - DNA, 25 bp, Homo sapien
tttatagatgtaagtcaagcatttg

SEQ ID NO: 4895460 - DNA, 25 bp, Homo sapien
cagtgtgagcaatctaacaacccca

SEQ ID NO: 4895461 - DNA, 25 bp, Homo sapien
cactgtcacctctagttcagtttgt

SEQ ID NO: 4895462 - DNA, 25 bp, Homo sapien
gcccttgctgaaaagcgcaagaatt

SEQ ID NO: 4895463 - DNA, 25 bp, Homo sapien
tgctgaaaagcgcaagaattgcctt

SEQ ID NO: 4895464 - DNA, 25 bp, Homo sapien
gaaaagcgcaagaattgccttgatt

SEQ ID NO: 4895465 - DNA, 25 bp, Homo sapien
ccttgctgaaaagcgcaagaattgc

SEQ ID NO: 4895466 - DNA, 25 bp, Homo sapien
aatatgttgttcagaaggtttgtga

SEQ ID NO: 4895467 - DNA, 25 bp, Homo sapien
ttctttaaaagagaggtgcgtgctg

SEQ ID NO: 4895468 - DNA, 25 bp, Homo sapien
gagaggtgcgtgctgtcaatatcct

SEQ ID NO: 4895469 - DNA, 25 bp, Homo sapien
cagaaggtttgtgattatgtacaga

SEQ ID NO: 4895470 - DNA, 25 bp, Homo sapien
gaccacatgtgcataaacttaaaaa

SEQ ID NO: 4895471 - DNA, 25 bp, Homo sapien
gtaaccactattctcacataaaatg

SEQ ID NO: 4895472 - DNA, 25 bp, Homo sapien
aaaacacagcatttaggccgggcat

SEQ ID NO: 4895473 - DNA, 25 bp, Homo sapien
aatgtgaccacatgtgcataaactt

SEQ ID NO: 4895474 - DNA, 25 bp, Homo sapien
cagcagtttgtcacttgattttcca

SEQ ID NO: 4895475 - DNA, 25 bp, Homo sapien
ccctattcctatgatcagcagtttg

SEQ ID NO: 4895476 - DNA, 25 bp, Homo sapien
tgtcacttgattttccaagctccca

SEQ ID NO: 4895477 - DNA, 25 bp, Homo sapien
cctatgatcagcagtttgtcacttg

SEQ ID NO: 4895478 - DNA, 25 bp, Homo sapien
caggcacacgaatgttaatatttga

SEQ ID NO: 4895479 - DNA, 25 bp, Homo sapien
cctgtggcactcctcctagcttcca

SEQ ID NO: 4895480 - DNA, 25 bp, Homo sapien
ctatgacaggcacacgaatgttaat

SEQ ID NO: 4895481 - DNA, 25 bp, Homo sapien
taatatttgaggattcatgggtgtt

SEQ ID NO: 4895482 - DNA, 25 bp, Homo sapien
agcctggcgcctgagagcggcaaca

SEQ ID NO: 4895483 - DNA, 25 bp, Homo sapien
taaaatacagtatggcggtggaaga

SEQ ID NO: 4895484 - DNA, 25 bp, Homo sapien
agcggcaacaccagtggcggcagca

SEQ ID NO: 4895485 - DNA, 25 bp, Homo sapien
tctgcctcaggcactgacacgtgac

SEQ ID NO: 4895486 - DNA, 25 bp, Homo sapien
aaaaagaataggacaagaatgccac

SEQ ID NO: 4895487 - DNA, 25 bp, Homo sapien
aaaagaataggacaagaatgccact

SEQ ID NO: 4895488 - DNA, 25 bp, Homo sapien
cgatcgcatgctagaaaaacttgga

SEQ ID NO: 4895489 - DNA, 25 bp, Homo sapien
gccttgtctacagaacgatcgcatg

SEQ ID NO: 4895490 - DNA, 25 bp, Homo sapien
tcaccggcttccaaaaagggcacaa

SEQ ID NO: 4895491 - DNA, 25 bp, Homo sapien
ttttgctggacttgggagacgctcc

SEQ ID NO: 4895492 - DNA, 25 bp, Homo sapien
tcctgaagcagggaacggactttgg

SEQ ID NO: 4895493 - DNA, 25 bp, Homo sapien
ttctttgctaggaccagtgttgcca

SEQ ID NO: 4895494 - DNA, 25 bp, Homo sapien
gcacatctagaaaacgatcctgaag

SEQ ID NO: 4895495 - DNA, 25 bp, Homo sapien
gggactgtattttgcgcacatctag

SEQ ID NO: 4895496 - DNA, 25 bp, Homo sapien
tccggctcgcgtggcctggagccag

SEQ ID NO: 4895497 - DNA, 25 bp, Homo sapien
agcaggagttgagcgtgcgagggcc

SEQ ID NO: 4895498 - DNA, 25 bp, Homo sapien
tactcattgcgaagaggaggagcag

SEQ ID NO: 4895499 - DNA, 25 bp, Homo sapien
tgcgtcgtttactcattgcgaagag

SEQ ID NO: 4895500 - DNA, 25 bp, Homo sapien
caaagacagcatccctaagaaagca

SEQ ID NO: 4895501 - DNA, 25 bp, Homo sapien
acttaaaaccaacgcaacacaacag

SEQ ID NO: 4895502 - DNA, 25 bp, Homo sapien
cccaagtgatcatcttataagaaac

SEQ ID NO: 4895503 - DNA, 25 bp, Homo sapien
atcccctggaagacgacaccagcag

SEQ ID NO: 4895504 - DNA, 25 bp, Homo sapien
cctttagagccagtatcaggtggtt

SEQ ID NO: 4895505 - DNA, 25 bp, Homo sapien
aaatttccagcagattcggtcacag

SEQ ID NO: 4895506 - DNA, 25 bp, Homo sapien
caacattgaatacgtcagtgctacc

SEQ ID NO: 4895507 - DNA, 25 bp, Homo sapien
tgccaactggtacgtctctgaaaag

SEQ ID NO: 4895508 - DNA, 25 bp, Homo sapien
aaaatcacagaatgttgcaagtggc

SEQ ID NO: 4895509 - DNA, 25 bp, Homo sapien
gatatcaaatatggtgtccacagac

SEQ ID NO: 4895510 - DNA, 25 bp, Homo sapien
caggcttagtgccatcatattggct

SEQ ID NO: 4895511 - DNA, 25 bp, Homo sapien
gctactcggagaacaaaataactca

SEQ ID NO: 4895512 - DNA, 25 bp, Homo sapien
taaatgagcatttctatgtacatac

SEQ ID NO: 4895513 - DNA, 25 bp, Homo sapien
ttaataaatgagcatttctatgtac

SEQ ID NO: 4895514 - DNA, 25 bp, Homo sapien
tatattatacacataaattgtcttg

SEQ ID NO: 4895515 - DNA, 25 bp, Homo sapien
acacataaattgtcttgcattttaa

SEQ ID NO: 4895516 - DNA, 25 bp, Homo sapien
taagaagccatgctttgtgcactag

SEQ ID NO: 4895517 - DNA, 25 bp, Homo sapien
cacacgacacatacaatcctgggaa

SEQ ID NO: 4895518 - DNA, 25 bp, Homo sapien
taaattgcacaactggaaggccctt

SEQ ID NO: 4895519 - DNA, 25 bp, Homo sapien
tgcccagacttagaatcagccaatt

SEQ ID NO: 4895520 - DNA, 25 bp, Homo sapien
catgctaaatactaaataagtgttg

SEQ ID NO: 4895521 - DNA, 25 bp, Homo sapien
tttggaggacaacacctgatacatg

SEQ ID NO: 4895522 - DNA, 25 bp, Homo sapien
agtttcatacttagatagtctcatc

SEQ ID NO: 4895523 - DNA, 25 bp, Homo sapien
tggagctcaatggatggagatcaag

SEQ ID NO: 4895524 - DNA, 25 bp, Homo sapien
caaaaagtgtatggaaatactcatt

SEQ ID NO: 4895525 - DNA, 25 bp, Homo sapien
aatgctgtataaccattaaaatcct

SEQ ID NO: 4895526 - DNA, 25 bp, Homo sapien
ataaccattaaaatcctaacacctg

SEQ ID NO: 4895527 - DNA, 25 bp, Homo sapien
acaatggggcatgacaaagtacatt

SEQ ID NO: 4895528 - DNA, 25 bp, Homo sapien
cacacgctgggcactatcgtacaat

SEQ ID NO: 4895529 - DNA, 25 bp, Homo sapien
aaagggttatcatatgccctcaggg

SEQ ID NO: 4895530 - DNA, 25 bp, Homo sapien
catcagcaccccttctgtgtattat

SEQ ID NO: 4895531 - DNA, 25 bp, Homo sapien
ttcatgggagtcattcagcaccaac

SEQ ID NO: 4895532 - DNA, 25 bp, Homo sapien
tgttctctgtgcacagagaacactg

SEQ ID NO: 4895533 - DNA, 25 bp, Homo sapien
ctgtgttctctgtgcacagagaaca

SEQ ID NO: 4895534 - DNA, 25 bp, Homo sapien
tatttttcataccttgctatatcct

SEQ ID NO: 4895535 - DNA, 25 bp, Homo sapien
gttctctgtgcacagagaacactgg

SEQ ID NO: 4895536 - DNA, 25 bp, Homo sapien
taccctctgggcattagcacttgct

SEQ ID NO: 4895537 - DNA, 25 bp, Homo sapien
gcctgagtatggcaatggtgcagaa

SEQ ID NO: 4895538 - DNA, 25 bp, Homo sapien
tatgtatgcacgtatgaatgaatgg

SEQ ID NO: 4895539 - DNA, 25 bp, Homo sapien
gcagaagtgcttacatgcatcttga

SEQ ID NO: 4895540 - DNA, 25 bp, Homo sapien
gctttacgttcagagtgaacacaga

SEQ ID NO: 4895541 - DNA, 25 bp, Homo sapien
ccagtgtggcccctttcatggcatt

SEQ ID NO: 4895542 - DNA, 25 bp, Homo sapien
catggcattgcgctttacgttcaga

SEQ ID NO: 4895543 - DNA, 25 bp, Homo sapien
ccctttcatggcattgcgctttacg

SEQ ID NO: 4895544 - DNA, 25 bp, Homo sapien
caaaaatggttgcactttccagaga

SEQ ID NO: 4895545 - DNA, 25 bp, Homo sapien
tatcctggtcatcagtttaagctca

SEQ ID NO: 4895546 - DNA, 25 bp, Homo sapien
ccaagtcacccagctgaatcagtta

SEQ ID NO: 4895547 - DNA, 25 bp, Homo sapien
ggaaaggacattccgatgaaggaaa

SEQ ID NO: 4895548 - DNA, 25 bp, Homo sapien
tactagagacataaggtggcaaccc

SEQ ID NO: 4895549 - DNA, 25 bp, Homo sapien
cacctcacgacgatattgattggaa

SEQ ID NO: 4895550 - DNA, 25 bp, Homo sapien
taaaaaaggtgcctatcatatgggc

SEQ ID NO: 4895551 - DNA, 25 bp, Homo sapien
tactcaagcaagcaccactgaatgg

SEQ ID NO: 4895552 - DNA, 25 bp, Homo sapien
gtcaattaagattcctcccaggctg

SEQ ID NO: 4895553 - DNA, 25 bp, Homo sapien
tctttgtagtgagggtaaatcagcc

SEQ ID NO: 4895554 - DNA, 25 bp, Homo sapien
catttggaccaccaatctaaggagt

SEQ ID NO: 4895555 - DNA, 25 bp, Homo sapien
ggcttctgaataccaacacatgata

SEQ ID NO: 4895556 - DNA, 25 bp, Homo sapien
gaattcagtttagtcttccataaag

SEQ ID NO: 4895557 - DNA, 25 bp, Homo sapien
agttgctggactatcttaaaggaga

SEQ ID NO: 4895558 - DNA, 25 bp, Homo sapien
gcttgaaaacaatctagaggcatct

SEQ ID NO: 4895559 - DNA, 25 bp, Homo sapien
taagacatcaagatgcccatgtggt

SEQ ID NO: 4895560 - DNA, 25 bp, Homo sapien
tgtcccagtgtcaaaggcacaaggg

SEQ ID NO: 4895561 - DNA, 25 bp, Homo sapien
cacaagggtttcactgatcacaggg

SEQ ID NO: 4895562 - DNA, 25 bp, Homo sapien
tatagaacagctagccaaggagaca

SEQ ID NO: 4895563 - DNA, 25 bp, Homo sapien
gccaaaggcaattggagccctcagg

SEQ ID NO: 4895564 - DNA, 25 bp, Homo sapien
ggtaaatcaatacatgagtcccagg

SEQ ID NO: 4895565 - DNA, 25 bp, Homo sapien
tcaacacattaactcttacacatgg

SEQ ID NO: 4895566 - DNA, 25 bp, Homo sapien
cagacaactgttctatggttatgag

SEQ ID NO: 4895567 - DNA, 25 bp, Homo sapien
tgcattcagaatgagggaatttgca

SEQ ID NO: 4895568 - DNA, 25 bp, Homo sapien
gttttaagcacgagctcccagattc

SEQ ID NO: 4895569 - DNA, 25 bp, Homo sapien
ctcttgctgcaatcctcatgtgaat

SEQ ID NO: 4895570 - DNA, 25 bp, Homo sapien
tgcgaggtgctctgcaataaatgtc

SEQ ID NO: 4895571 - DNA, 25 bp, Homo sapien
gaatgtttagctttgctgcaccaga

SEQ ID NO: 4895572 - DNA, 25 bp, Homo sapien
caaggtctgattgagtggcctctat

SEQ ID NO: 4895573 - DNA, 25 bp, Homo sapien
cgaccttccttgctttctatgagag

SEQ ID NO: 4895574 - DNA, 25 bp, Homo sapien
tatgagagccagcttttgacaggac

SEQ ID NO: 4895575 - DNA, 25 bp, Homo sapien
gaaactgaagataccaataagcaag

SEQ ID NO: 4895576 - DNA, 25 bp, Homo sapien
tacaaagaacttgtgacaaaccagc

SEQ ID NO: 4895577 - DNA, 25 bp, Homo sapien
caaatttaccgttaagtgcagcatc

SEQ ID NO: 4895578 - DNA, 25 bp, Homo sapien
gatcagctttcattactgcacagtt

SEQ ID NO: 4895579 - DNA, 25 bp, Homo sapien
taaggacatgtcattaatgatcagc

SEQ ID NO: 4895580 - DNA, 25 bp, Homo sapien
tgtaagattgactttttaaaggatc

SEQ ID NO: 4895581 - DNA, 25 bp, Homo sapien
ttcattgactggtttctcgttttct

SEQ ID NO: 4895582 - DNA, 25 bp, Homo sapien
tctgtaagattgactttttaaagga

SEQ ID NO: 4895583 - DNA, 25 bp, Homo sapien
gactggtttctcgttttctgtaaga

SEQ ID NO: 4895584 - DNA, 25 bp, Homo sapien
tggcagcaggcaataaaaggaaaat

SEQ ID NO: 4895585 - DNA, 25 bp, Homo sapien
atataaatggagataagatttctct

SEQ ID NO: 4895586 - DNA, 25 bp, Homo sapien
tggagataagatttctctttattac

SEQ ID NO: 4895587 - DNA, 25 bp, Homo sapien
tattattaataatggtcttcacaaa

SEQ ID NO: 4895588 - DNA, 25 bp, Homo sapien
ccattagtctttctctgctcatgga

SEQ ID NO: 4895589 - DNA, 25 bp, Homo sapien
tatctgggcatacttccattagtct

SEQ ID NO: 4895590 - DNA, 25 bp, Homo sapien
atctttgctgccactatctgggcat

SEQ ID NO: 4895591 - DNA, 25 bp, Homo sapien
caaagaatggcctccagaggctcat

SEQ ID NO: 4895592 - DNA, 25 bp, Homo sapien
tggaaattctcttcgttagcgtagg

SEQ ID NO: 4895593 - DNA, 25 bp, Homo sapien
tgtactagagtaaggcctgctttcc

SEQ ID NO: 4895594 - DNA, 25 bp, Homo sapien
cttaagtggcttgaaataacagcgc

SEQ ID NO: 4895595 - DNA, 25 bp, Homo sapien
tttagggaaatcacccagggatcac

SEQ ID NO: 4895596 - DNA, 25 bp, Homo sapien
ttcctcttcctttaccatgataggc

SEQ ID NO: 4895597 - DNA, 25 bp, Homo sapien
tcctcttcctttaccatgataggca

SEQ ID NO: 4895598 - DNA, 25 bp, Homo sapien
cctcttcctttaccatgataggcat

SEQ ID NO: 4895599 - DNA, 25 bp, Homo sapien
ccgagtgaatactggccatgcagta

SEQ ID NO: 4895600 - DNA, 25 bp, Homo sapien
tgtttcccatggaccgagtgaatac

SEQ ID NO: 4895601 - DNA, 25 bp, Homo sapien
gccatgcagtatgctgatggactga

SEQ ID NO: 4895602 - DNA, 25 bp, Homo sapien
tactggccatgcagtatgctgatgg

SEQ ID NO: 4895603 - DNA, 25 bp, Homo sapien
caattctgaattaagtgttccttta

SEQ ID NO: 4895604 - DNA, 25 bp, Homo sapien
cattcaatgtactgaaaagttataa

SEQ ID NO: 4895605 - DNA, 25 bp, Homo sapien
tactgtagccatgtatagacattaa

SEQ ID NO: 4895606 - DNA, 25 bp, Homo sapien
cacaaatccattatccaccacaata

SEQ ID NO: 4895607 - DNA, 25 bp, Homo sapien
tctgcgccaccctgacttttggtga

SEQ ID NO: 4895608 - DNA, 25 bp, Homo sapien
catcgtcagatcatgtctgcgccac

SEQ ID NO: 4895609 - DNA, 25 bp, Homo sapien
caaatgggacatcacaaacctctgg

SEQ ID NO: 4895610 - DNA, 25 bp, Homo sapien
tagctctagttaaccccatcgtcag

SEQ ID NO: 4895611 - DNA, 25 bp, Homo sapien
ccaggcacctcgccaagggctatat

SEQ ID NO: 4895612 - DNA, 25 bp, Homo sapien
agccaggcacctcgccaagggctat

SEQ ID NO: 4895613 - DNA, 25 bp, Homo sapien
tggagccaggcacctcgccaagggc

SEQ ID NO: 4895614 - DNA, 25 bp, Homo sapien
tatggagccaggcacctcgccaagg

SEQ ID NO: 4895615 - DNA, 25 bp, Homo sapien
cagccaagggcttgaatattggagt

SEQ ID NO: 4895616 - DNA, 25 bp, Homo sapien
agcacagccaagggcttgaatattg

SEQ ID NO: 4895617 - DNA, 25 bp, Homo sapien
agccaagggcttgaatattggagtg

SEQ ID NO: 4895618 - DNA, 25 bp, Homo sapien
cacagccaagggcttgaatattgga

SEQ ID NO: 4895619 - DNA, 25 bp, Homo sapien
tccagtgagtgcatttgggccactt

SEQ ID NO: 4895620 - DNA, 25 bp, Homo sapien
tctctgtacaatttcttccaatgcc

SEQ ID NO: 4895621 - DNA, 25 bp, Homo sapien
cacagcagcatgctcaggtctgttg

SEQ ID NO: 4895622 - DNA, 25 bp, Homo sapien
aaatccctggttgcctgcagctctg

SEQ ID NO: 4895623 - DNA, 25 bp, Homo sapien
ttacattgccattcacttgctgcac

SEQ ID NO: 4895624 - DNA, 25 bp, Homo sapien
cctgcttccacaaagtgaataaatt

SEQ ID NO: 4895625 - DNA, 25 bp, Homo sapien
ctcctgcttccacaaagtgaataaa

SEQ ID NO: 4895626 - DNA, 25 bp, Homo sapien
tgcttccacaaagtgaataaattga

SEQ ID NO: 4895627 - DNA, 25 bp, Homo sapien
ttccacaaagtgaataaattgaaat

SEQ ID NO: 4895628 - DNA, 25 bp, Homo sapien
taaaagctacactggcatttgacaa

SEQ ID NO: 4895629 - DNA, 25 bp, Homo sapien
tcttctgctaatcacaactgagtgt

SEQ ID NO: 4895630 - DNA, 25 bp, Homo sapien
gaaactttatactctggtcagctct

SEQ ID NO: 4895631 - DNA, 25 bp, Homo sapien
gagtgttttattagcgggctgcaca

SEQ ID NO: 4895632 - DNA, 25 bp, Homo sapien
gtattttaacacacatgagacccag

SEQ ID NO: 4895633 - DNA, 25 bp, Homo sapien
cctttgccggagtgaatgatgtgga

SEQ ID NO: 4895634 - DNA, 25 bp, Homo sapien
tgtggaactgcagaatccagctgac

SEQ ID NO: 4895635 - DNA, 25 bp, Homo sapien
cccagagttgtatatagtattccag

SEQ ID NO: 4895636 - DNA, 25 bp, Homo sapien
caggaacagacatgtggttaactac

SEQ ID NO: 4895637 - DNA, 25 bp, Homo sapien
caccactgatgctggcctattttaa

SEQ ID NO: 4895638 - DNA, 25 bp, Homo sapien
gaatttatcttacatcatttggcca

SEQ ID NO: 4895639 - DNA, 25 bp, Homo sapien
cctttcggtgcttaaacattttctg

SEQ ID NO: 4895640 - DNA, 25 bp, Homo sapien
gacactcattctcagttacggagcc

SEQ ID NO: 4895641 - DNA, 25 bp, Homo sapien
gggaagacactcattctcagttacg

SEQ ID NO: 4895642 - DNA, 25 bp, Homo sapien
actcattctcagttacggagccctt

SEQ ID NO: 4895643 - DNA, 25 bp, Homo sapien
ctgtgggggaagacactcattctca

SEQ ID NO: 4895644 - DNA, 25 bp, Homo sapien
tacctggtcactgagagtttccctg

SEQ ID NO: 4895645 - DNA, 25 bp, Homo sapien
cctggcttctcttactgggattgta

SEQ ID NO: 4895646 - DNA, 25 bp, Homo sapien
cttgactcttggtgcactggtggac

SEQ ID NO: 4895647 - DNA, 25 bp, Homo sapien
ttctgtctgagctgccagacctcag

SEQ ID NO: 4895648 - DNA, 25 bp, Homo sapien
ggaaatagagggaacataagcccat

SEQ ID NO: 4895649 - DNA, 25 bp, Homo sapien
gaaatggtaaaatcagatcctgact

SEQ ID NO: 4895650 - DNA, 25 bp, Homo sapien
cctttttctctgagataagaaggaa

SEQ ID NO: 4895651 - DNA, 25 bp, Homo sapien
aataggttaagtaatggagtaggat

SEQ ID NO: 4895652 - DNA, 25 bp, Homo sapien
cgtgggagcggatcctttaccagtc

SEQ ID NO: 4895653 - DNA, 25 bp, Homo sapien
aaggagtcacatggagagggtcacc

SEQ ID NO: 4895654 - DNA, 25 bp, Homo sapien
tctgccaacgactatgtaagtgagc

SEQ ID NO: 4895655 - DNA, 25 bp, Homo sapien
gattgcagtcttgtgagatacccca

SEQ ID NO: 4895656 - DNA, 25 bp, Homo sapien
caagagaagtctgattataaagcca

SEQ ID NO: 4895657 - DNA, 25 bp, Homo sapien
taataaattcccagatatatggcta

SEQ ID NO: 4895658 - DNA, 25 bp, Homo sapien
tggctaataagggttagcgacaact

SEQ ID NO: 4895659 - DNA, 25 bp, Homo sapien
gccaccactcttatacactattctg

SEQ ID NO: 4895660 - DNA, 25 bp, Homo sapien
gttataatgcaacaaatgtggtcag

SEQ ID NO: 4895661 - DNA, 25 bp, Homo sapien
tctgtagaaacagtggaagactgga

SEQ ID NO: 4895662 - DNA, 25 bp, Homo sapien
tggtcagaaggaagtgaacgacact

SEQ ID NO: 4895663 - DNA, 25 bp, Homo sapien
tctggatggaagtacgcaaagtgtt

SEQ ID NO: 4895664 - DNA, 25 bp, Homo sapien
tgttgacattacaccacacttggaa

SEQ ID NO: 4895665 - DNA, 25 bp, Homo sapien
tgtataagattaccctcagactctg

SEQ ID NO: 4895666 - DNA, 25 bp, Homo sapien
tacactatggctggcacaatcacct

SEQ ID NO: 4895667 - DNA, 25 bp, Homo sapien
gcaataagacactgagcactacagg

SEQ ID NO: 4895668 - DNA, 25 bp, Homo sapien
aaataaactaatggtgcctacacag

SEQ ID NO: 4895669 - DNA, 25 bp, Homo sapien
gatgcctgccataactaagttgatg

SEQ ID NO: 4895670 - DNA, 25 bp, Homo sapien
gatgagtcattggacattttgagaa

SEQ ID NO: 4895671 - DNA, 25 bp, Homo sapien
ggaataccaattaaacacgccaaga

SEQ ID NO: 4895672 - DNA, 25 bp, Homo sapien
cataatggtgagtaaaccttcccca

SEQ ID NO: 4895673 - DNA, 25 bp, Homo sapien
cccttgacataactgactgttgagc

SEQ ID NO: 4895674 - DNA, 25 bp, Homo sapien
gatcagataatggacacccttgaca

SEQ ID NO: 4895675 - DNA, 25 bp, Homo sapien
ccccacactgaaacattgagttaag

SEQ ID NO: 4895676 - DNA, 25 bp, Homo sapien
ctagaggtaaggattggaaatggtc

SEQ ID NO: 4895677 - DNA, 25 bp, Homo sapien
aacagcatgtaatttctagaggtaa

SEQ ID NO: 4895678 - DNA, 25 bp, Homo sapien
actactgacatatggcaggagtcaa

SEQ ID NO: 4895679 - DNA, 25 bp, Homo sapien
gtaactcaagggaaatatgaatctc

SEQ ID NO: 4895680 - DNA, 25 bp, Homo sapien
ccacctgggttcttgaatgactaca

SEQ ID NO: 4895681 - DNA, 25 bp, Homo sapien
tgaactgatgaacaagcgtccatgg

SEQ ID NO: 4895682 - DNA, 25 bp, Homo sapien
actacatagagagcgtccatggaca

SEQ ID NO: 4895683 - DNA, 25 bp, Homo sapien
gaacccagctgttgaagatggaaga

SEQ ID NO: 4895684 - DNA, 25 bp, Homo sapien
taactactacatacccattgcctgg

SEQ ID NO: 4895685 - DNA, 25 bp, Homo sapien
gaccttcaggaaaacaactcttaca

SEQ ID NO: 4895686 - DNA, 25 bp, Homo sapien
gggctggacctgttgttaatactga

SEQ ID NO: 4895687 - DNA, 25 bp, Homo sapien
tggcactgcaccatgcataaggtag

SEQ ID NO: 4895688 - DNA, 25 bp, Homo sapien
ttatggctaaggtataactggcacg

SEQ ID NO: 4895689 - DNA, 25 bp, Homo sapien
tgctttgtgctgaattgcgtctccc

SEQ ID NO: 4895690 - DNA, 25 bp, Homo sapien
gaaaaacgttatctatccacatgaa

SEQ ID NO: 4895691 - DNA, 25 bp, Homo sapien
gcagcatgttctggtacctgtatac

SEQ ID NO: 4895692 - DNA, 25 bp, Homo sapien
caacaaccatatttctagagaagaa

SEQ ID NO: 4895693 - DNA, 25 bp, Homo sapien
tctatccaatcctgcatctccatca

SEQ ID NO: 4895694 - DNA, 25 bp, Homo sapien
tccacaacaaccatatttctagaga

SEQ ID NO: 4895695 - DNA, 25 bp, Homo sapien
tgcatctccatcaggggacagctct

SEQ ID NO: 4895696 - DNA, 25 bp, Homo sapien
tcggtaagtggcaggtagattggta

SEQ ID NO: 4895697 - DNA, 25 bp, Homo sapien
taagtggcaggtagattggtacgtc

SEQ ID NO: 4895698 - DNA, 25 bp, Homo sapien
tggcaggtagattggtacgtctgta

SEQ ID NO: 4895699 - DNA, 25 bp, Homo sapien
caggtagattggtacgtctgtagca

SEQ ID NO: 4895700 - DNA, 25 bp, Homo sapien
cagctgcttcacttagcgccctcat

SEQ ID NO: 4895701 - DNA, 25 bp, Homo sapien
ccagctgcttcacttagcgccctca

SEQ ID NO: 4895702 - DNA, 25 bp, Homo sapien
ggccagctgcttcacttagcgccct

SEQ ID NO: 4895703 - DNA, 25 bp, Homo sapien
gccagctgcttcacttagcgccctc

SEQ ID NO: 4895704 - DNA, 25 bp, Homo sapien
ggtagacaaatggatctgctagaat

SEQ ID NO: 4895705 - DNA, 25 bp, Homo sapien
ccacctctagagtgataaaacaggt

SEQ ID NO: 4895706 - DNA, 25 bp, Homo sapien
gaatgatgtatctagcgtgcatacc

SEQ ID NO: 4895707 - DNA, 25 bp, Homo sapien
tcttccatagtttcagtaccacctc

SEQ ID NO: 4895708 - DNA, 25 bp, Homo sapien
tgaacgccttctatgcgttcagaca

SEQ ID NO: 4895709 - DNA, 25 bp, Homo sapien
cgccttctatgcgttcagacatgag

SEQ ID NO: 4895710 - DNA, 25 bp, Homo sapien
ttttctgaacgccttctatgcgttc

SEQ ID NO: 4895711 - DNA, 25 bp, Homo sapien
cttctatgcgttcagacatgagcct

SEQ ID NO: 4895712 - DNA, 25 bp, Homo sapien
cttgctgatgcccacgtggcacaca

SEQ ID NO: 4895713 - DNA, 25 bp, Homo sapien
ccttgctgatgcccacgtggcacac

SEQ ID NO: 4895714 - DNA, 25 bp, Homo sapien
ccagtttcacaaagtaactcagagc

SEQ ID NO: 4895715 - DNA, 25 bp, Homo sapien
ttcgataaactcttatattgattcc

SEQ ID NO: 4895716 - DNA, 25 bp, Homo sapien
tcttatattgattccagtttcacaa

SEQ ID NO: 4895717 - DNA, 25 bp, Homo sapien
agtttcacaaagtaactcagagcca

SEQ ID NO: 4895718 - DNA, 25 bp, Homo sapien
tttctcttaatagcaataactttgc

SEQ ID NO: 4895719 - DNA, 25 bp, Homo sapien
tgcatttctcttaatagcaataact

SEQ ID NO: 4895720 - DNA, 25 bp, Homo sapien
ccagacatggtgtgatttgactttc

SEQ ID NO: 4895721 - DNA, 25 bp, Homo sapien
attttctaccagacatggtgtgatt

SEQ ID NO: 4895722 - DNA, 25 bp, Homo sapien
caagatgaaaagatgtgtggttacc

SEQ ID NO: 4895723 - DNA, 25 bp, Homo sapien
gagagaacacgagctttgagaccat

SEQ ID NO: 4895724 - DNA, 25 bp, Homo sapien
ggttaccctatgtggaatactcact

SEQ ID NO: 4895725 - DNA, 25 bp, Homo sapien
gattagaggagcagtatcgataccc

SEQ ID NO: 4895726 - DNA, 25 bp, Homo sapien
cataacctttgtgaacggaacatcc

SEQ ID NO: 4895727 - DNA, 25 bp, Homo sapien
gttggccggcgatgactctggcatt

SEQ ID NO: 4895728 - DNA, 25 bp, Homo sapien
gcagctcttgcatgtcgctcactca

SEQ ID NO: 4895729 - DNA, 25 bp, Homo sapien
gattgccgatgaaaacacgggagtt

SEQ ID NO: 4895730 - DNA, 25 bp, Homo sapien
ttaggatatatgctctaaagattta

SEQ ID NO: 4895731 - DNA, 25 bp, Homo sapien
taggatatatgctctaaagatttac

SEQ ID NO: 4895732 - DNA, 25 bp, Homo sapien
catcatttctagtggcgattagaca

SEQ ID NO: 4895733 - DNA, 25 bp, Homo sapien
cgattagacatgtttgaatggaggg

SEQ ID NO: 4895734 - DNA, 25 bp, Homo sapien
tgaagatcgtcctgagcctctgagt

SEQ ID NO: 4895735 - DNA, 25 bp, Homo sapien
gcctctgagtaatcttggtactccg

SEQ ID NO: 4895736 - DNA, 25 bp, Homo sapien
tgcgcccggcccgtgaatagagttt

SEQ ID NO: 4895737 - DNA, 25 bp, Homo sapien
tatagtagccatctctacatagcat

SEQ ID NO: 4895738 - DNA, 25 bp, Homo sapien
tgcacgtatacaccctgaatagagt

SEQ ID NO: 4895739 - DNA, 25 bp, Homo sapien
gcattctgcaattgatgaactactt

SEQ ID NO: 4895740 - DNA, 25 bp, Homo sapien
tagatttacactaagggattacagc

SEQ ID NO: 4895741 - DNA, 25 bp, Homo sapien
gattttgtaaagtgatacaccacca

SEQ ID NO: 4895742 - DNA, 25 bp, Homo sapien
cttaagggacgtgtcaatgaatctc

SEQ ID NO: 4895743 - DNA, 25 bp, Homo sapien
tccaggaagtacaagaaacacagag

SEQ ID NO: 4895744 - DNA, 25 bp, Homo sapien
ggaaataggatgtgttgtggctaaa

SEQ ID NO: 4895745 - DNA, 25 bp, Homo sapien
gcactgttgaatgtgaggacctgct

SEQ ID NO: 4895746 - DNA, 25 bp, Homo sapien
ctgaaatgggaattcgaatgattgg

SEQ ID NO: 4895747 - DNA, 25 bp, Homo sapien
tgttgtggctaaaaggattcttctg

SEQ ID NO: 4895748 - DNA, 25 bp, Homo sapien
ccaccctggtgtataaagcagaggt

SEQ ID NO: 4895749 - DNA, 25 bp, Homo sapien
aggtttcccatattgtcatggaaat

SEQ ID NO: 4895750 - DNA, 25 bp, Homo sapien
tcccatattgtcatggaaattactg

SEQ ID NO: 4895751 - DNA, 25 bp, Homo sapien
caccctggtgtataaagcagaggtt

SEQ ID NO: 4895752 - DNA, 25 bp, Homo sapien
gcttcaggttctgtagacttctaca

SEQ ID NO: 4895753 - DNA, 25 bp, Homo sapien
tgtatgcttcaggttctgtagactt

SEQ ID NO: 4895754 - DNA, 25 bp, Homo sapien
tatgcttcaggttctgtagacttct

SEQ ID NO: 4895755 - DNA, 25 bp, Homo sapien
tcaggttctgtagacttctacattg

SEQ ID NO: 4895756 - DNA, 25 bp, Homo sapien
actactgtcatattctcggagccag

SEQ ID NO: 4895757 - DNA, 25 bp, Homo sapien
tcatattctcggagccagaagagat

SEQ ID NO: 4895758 - DNA, 25 bp, Homo sapien
cactactgtcatattctcggagcca

SEQ ID NO: 4895759 - DNA, 25 bp, Homo sapien
gtcatattctcggagccagaagaga

SEQ ID NO: 4895760 - DNA, 25 bp, Homo sapien
tcataaaagtgtgactggaagatca

SEQ ID NO: 4895761 - DNA, 25 bp, Homo sapien
cattcaggttgaaaccccaacttga

SEQ ID NO: 4895762 - DNA, 25 bp, Homo sapien
cagatctaggatcaataggctgcaa

SEQ ID NO: 4895763 - DNA, 25 bp, Homo sapien
tatgctagccacaagtacgttcagt

SEQ ID NO: 4895764 - DNA, 25 bp, Homo sapien
ccatgagcgtgtggttttcttccat

SEQ ID NO: 4895765 - DNA, 25 bp, Homo sapien
gttcccatgagcgtgtggttttctt

SEQ ID NO: 4895766 - DNA, 25 bp, Homo sapien
tcccatgagcgtgtggttttcttcc

SEQ ID NO: 4895767 - DNA, 25 bp, Homo sapien
cttgccctctggaagggcttactct

SEQ ID NO: 4895768 - DNA, 25 bp, Homo sapien
actgatggttcctgtccagtatttc

SEQ ID NO: 4895769 - DNA, 25 bp, Homo sapien
tatttgctggacaagatggtttctc

SEQ ID NO: 4895770 - DNA, 25 bp, Homo sapien
tctcttaaccctgaaaaactgatgg

SEQ ID NO: 4895771 - DNA, 25 bp, Homo sapien
gctggacaagatggtttctcttaac

SEQ ID NO: 4895772 - DNA, 25 bp, Homo sapien
tctgttgtctggaaagtgcttgcca

SEQ ID NO: 4895773 - DNA, 25 bp, Homo sapien
tattttacttggataagtgcccctg

SEQ ID NO: 4895774 - DNA, 25 bp, Homo sapien
tcttctgtttaaccccatcaaggga

SEQ ID NO: 4895775 - DNA, 25 bp, Homo sapien
tcctgagagcttgtatggtgtaaca

SEQ ID NO: 4895776 - DNA, 25 bp, Homo sapien
tcttaacacaatcttctgatgtctg

SEQ ID NO: 4895777 - DNA, 25 bp, Homo sapien
cataagaagcagtcacattgcaggt

SEQ ID NO: 4895778 - DNA, 25 bp, Homo sapien
gcctttctgataactcgcttaagag

SEQ ID NO: 4895779 - DNA, 25 bp, Homo sapien
catctatgtaacctcctgtattgcc

SEQ ID NO: 4895780 - DNA, 25 bp, Homo sapien
gagtaatattgctacactttccctg

SEQ ID NO: 4895781 - DNA, 25 bp, Homo sapien
tattagaatgtcagtccacgaggat

SEQ ID NO: 4895782 - DNA, 25 bp, Homo sapien
gcctagctcatacaagatgttcaat

SEQ ID NO: 4895783 - DNA, 25 bp, Homo sapien
tagaatttaagccagaaacatgaca

SEQ ID NO: 4895784 - DNA, 25 bp, Homo sapien
ctgagaaagcagctgaaataactgc

SEQ ID NO: 4895785 - DNA, 25 bp, Homo sapien
gagaaagcagctgaaataactgcat

SEQ ID NO: 4895786 - DNA, 25 bp, Homo sapien
tgagaaagcagctgaaataactgca

SEQ ID NO: 4895787 - DNA, 25 bp, Homo sapien
gcgtttcttgttctggccattggga

SEQ ID NO: 4895788 - DNA, 25 bp, Homo sapien
tcttgttctggccattgggaagagc

SEQ ID NO: 4895789 - DNA, 25 bp, Homo sapien
gtttcttgttctggccattgggaag

SEQ ID NO: 4895790 - DNA, 25 bp, Homo sapien
caggcgtttcttgttctggccattg

SEQ ID NO: 4895791 - DNA, 25 bp, Homo sapien
cagtgctgaatccaaagtatcaggt

SEQ ID NO: 4895792 - DNA, 25 bp, Homo sapien
tccctggcttcatcagtgctgaatc

SEQ ID NO: 4895793 - DNA, 25 bp, Homo sapien
caatctttctatccaatttccctgg

SEQ ID NO: 4895794 - DNA, 25 bp, Homo sapien
cctctagatcaggtaaactaaattc

SEQ ID NO: 4895795 - DNA, 25 bp, Homo sapien
ttctccactagaatgtgcaaatgtc

SEQ ID NO: 4895796 - DNA, 25 bp, Homo sapien
tcatcctgttcatagcagatttgtg

SEQ ID NO: 4895797 - DNA, 25 bp, Homo sapien
tggtcctttgacagtgtattgaaaa

SEQ ID NO: 4895798 - DNA, 25 bp, Homo sapien
tgacaatgactggtccactcttctc

SEQ ID NO: 4895799 - DNA, 25 bp, Homo sapien
atgactggtccactcttctctgagg

SEQ ID NO: 4895800 - DNA, 25 bp, Homo sapien
ttgctgtcttgacaactgtctggag

SEQ ID NO: 4895801 - DNA, 25 bp, Homo sapien
tgtctggagatctggacccacatcc

SEQ ID NO: 4895802 - DNA, 25 bp, Homo sapien
cattcgccccaagtcaagtgctgtc

SEQ ID NO: 4895803 - DNA, 25 bp, Homo sapien
tccattcgccccaagtcaagtgctg

SEQ ID NO: 4895804 - DNA, 25 bp, Homo sapien
gggcctagtggcttgaatcttggag

SEQ ID NO: 4895805 - DNA, 25 bp, Homo sapien
tcttggagggattggggaccttaca

SEQ ID NO: 4895806 - DNA, 25 bp, Homo sapien
catatacccggtgaatacaagccaa

SEQ ID NO: 4895807 - DNA, 25 bp, Homo sapien
ggaccttacatatacccggtgaata

SEQ ID NO: 4895808 - DNA, 25 bp, Homo sapien
tgctttgcagtaagactgttgctca

SEQ ID NO: 4895809 - DNA, 25 bp, Homo sapien
ttgatttgaccacggagacaaagag

SEQ ID NO: 4895810 - DNA, 25 bp, Homo sapien
acaaagagacgggttgtgctcctgc

SEQ ID NO: 4895811 - DNA, 25 bp, Homo sapien
tctaagaagtaattgatttgaccac

SEQ ID NO: 4895812 - DNA, 25 bp, Homo sapien
ctctgatgtctgcgtttgctcttgt

SEQ ID NO: 4895813 - DNA, 25 bp, Homo sapien
tctctgatgtctgcgtttgctcttg

SEQ ID NO: 4895814 - DNA, 25 bp, Homo sapien
atctctgatgtctgcgtttgctctt

SEQ ID NO: 4895815 - DNA, 25 bp, Homo sapien
ccactgttgtgttgggactaggtcc

SEQ ID NO: 4895816 - DNA, 25 bp, Homo sapien
ttctttaaagaatgtctgggcatag

SEQ ID NO: 4895817 - DNA, 25 bp, Homo sapien
ctttcatccactgttgtgttgggac

SEQ ID NO: 4895818 - DNA, 25 bp, Homo sapien
tgtgttgggactaggtccttcttta

SEQ ID NO: 4895819 - DNA, 25 bp, Homo sapien
gactatgataaacagcaggttgata

SEQ ID NO: 4895820 - DNA, 25 bp, Homo sapien
tcagactatgataaacagcaggttg

SEQ ID NO: 4895821 - DNA, 25 bp, Homo sapien
gataaacagcaggttgatagcacat

SEQ ID NO: 4895822 - DNA, 25 bp, Homo sapien
gattcagactatgataaacagcagg

SEQ ID NO: 4895823 - DNA, 25 bp, Homo sapien
ctttaaatgactgacttttcacagc

SEQ ID NO: 4895824 - DNA, 25 bp, Homo sapien
ttaaatgactgacttttcacagctt

SEQ ID NO: 4895825 - DNA, 25 bp, Homo sapien
tttaaatgactgacttttcacagct

SEQ ID NO: 4895826 - DNA, 25 bp, Homo sapien
tgtactgggctactccaaatttctt

SEQ ID NO: 4895827 - DNA, 25 bp, Homo sapien
gagtgtactgggctactccaaattt

SEQ ID NO: 4895828 - DNA, 25 bp, Homo sapien
aagaaattagactctgagtgtactg

SEQ ID NO: 4895829 - DNA, 25 bp, Homo sapien
gaaattagactctgagtgtactggg

SEQ ID NO: 4895830 - DNA, 25 bp, Homo sapien
tatatgcttgtattcatatactctc

SEQ ID NO: 4895831 - DNA, 25 bp, Homo sapien
aatatatgcttgtattcatatactc

SEQ ID NO: 4895832 - DNA, 25 bp, Homo sapien
atatatgcttgtattcatatactct

SEQ ID NO: 4895833 - DNA, 25 bp, Homo sapien
ggtgaagcaaaggagaccccaagat

SEQ ID NO: 4895834 - DNA, 25 bp, Homo sapien
tgaagcaaaggagaccccaagattt

SEQ ID NO: 4895835 - DNA, 25 bp, Homo sapien
agcaaaggagaccccaagattttgg

SEQ ID NO: 4895836 - DNA, 25 bp, Homo sapien
cttggtgaagcaaaggagaccccaa

SEQ ID NO: 4895837 - DNA, 25 bp, Homo sapien
ggtctgtatggtttgggctctcctg

SEQ ID NO: 4895838 - DNA, 25 bp, Homo sapien
tttggtctgtatggtttgggctctc

SEQ ID NO: 4895839 - DNA, 25 bp, Homo sapien
gttttggtctgtatggtttgggctc

SEQ ID NO: 4895840 - DNA, 25 bp, Homo sapien
tctgtatggtttgggctctcctgcc

SEQ ID NO: 4895841 - DNA, 25 bp, Homo sapien
ggaaattttatatcttcctttatgc

SEQ ID NO: 4895842 - DNA, 25 bp, Homo sapien
ttatatcttcctttatgcagcccaa

SEQ ID NO: 4895843 - DNA, 25 bp, Homo sapien
attttatatcttcctttatgcagcc

SEQ ID NO: 4895844 - DNA, 25 bp, Homo sapien
atatcttcctttatgcagcccaaaa

SEQ ID NO: 4895845 - DNA, 25 bp, Homo sapien
cagtctcatacccatcaggtcccag

SEQ ID NO: 4895846 - DNA, 25 bp, Homo sapien
tgccccacagtctcatacccatcag

SEQ ID NO: 4895847 - DNA, 25 bp, Homo sapien
cccacagtctcatacccatcaggtc

SEQ ID NO: 4895848 - DNA, 25 bp, Homo sapien
gtctcatacccatcaggtcccagct

SEQ ID NO: 4895849 - DNA, 25 bp, Homo sapien
ttgcagaatgccgatgccatttatc

SEQ ID NO: 4895850 - DNA, 25 bp, Homo sapien
gccgatgccatttatcttttactcc

SEQ ID NO: 4895851 - DNA, 25 bp, Homo sapien
ctctttgcagaatgccgatgccatt

SEQ ID NO: 4895852 - DNA, 25 bp, Homo sapien
gaatgccgatgccatttatctttta

SEQ ID NO: 4895853 - DNA, 25 bp, Homo sapien
gctgcagggctcatctccctcggat

SEQ ID NO: 4895854 - DNA, 25 bp, Homo sapien
ttaatggatggctgtggtatcaacc

SEQ ID NO: 4895855 - DNA, 25 bp, Homo sapien
tccctcggatggactgtaatgttct

SEQ ID NO: 4895856 - DNA, 25 bp, Homo sapien
gctgctaactccagggacaggttaa

SEQ ID NO: 4895857 - DNA, 25 bp, Homo sapien
caagccccttggtaagtttcatttg

SEQ ID NO: 4895858 - DNA, 25 bp, Homo sapien
ccccttggtaagtttcatttgcagt

SEQ ID NO: 4895859 - DNA, 25 bp, Homo sapien
cttggtaagtttcatttgcagttac

SEQ ID NO: 4895860 - DNA, 25 bp, Homo sapien
agccccttggtaagtttcatttgca

SEQ ID NO: 4895861 - DNA, 25 bp, Homo sapien
gcttcggcatatgtgtgtttttgca

SEQ ID NO: 4895862 - DNA, 25 bp, Homo sapien
ggcattttgctttcccgcatcctgc

SEQ ID NO: 4895863 - DNA, 25 bp, Homo sapien
gcattttgctttcccgcatcctgct

SEQ ID NO: 4895864 - DNA, 25 bp, Homo sapien
tttctcttgtgcttcggcatatgtg

SEQ ID NO: 4895865 - DNA, 25 bp, Homo sapien
caaggtaccaggactcccaagtgtc

SEQ ID NO: 4895866 - DNA, 25 bp, Homo sapien
cttctgtggtgaaataatagggcag

SEQ ID NO: 4895867 - DNA, 25 bp, Homo sapien
tcaggccactctaccttttgtctca

SEQ ID NO: 4895868 - DNA, 25 bp, Homo sapien
catagatgataaggccaaggtacca

SEQ ID NO: 4895869 - DNA, 25 bp, Homo sapien
caggaaaggttcctttgattcaagt

SEQ ID NO: 4895870 - DNA, 25 bp, Homo sapien
gacaggaaaggttcctttgattcaa

SEQ ID NO: 4895871 - DNA, 25 bp, Homo sapien
ccaacagacaggaaaggttcctttg

SEQ ID NO: 4895872 - DNA, 25 bp, Homo sapien
cagacaggaaaggttcctttgattc

SEQ ID NO: 4895873 - DNA, 25 bp, Homo sapien
cattaggccccacttctcaattttt

SEQ ID NO: 4895874 - DNA, 25 bp, Homo sapien
ttcattaggccccacttctcaattt

SEQ ID NO: 4895875 - DNA, 25 bp, Homo sapien
aattctttccgaaggctgatgtcca

SEQ ID NO: 4895876 - DNA, 25 bp, Homo sapien
agccatgaattctttccgaaggctg

SEQ ID NO: 4895877 - DNA, 25 bp, Homo sapien
acttgggtgcattgtatgatgatga

SEQ ID NO: 4895878 - DNA, 25 bp, Homo sapien
tgttacttgggtgcattgtatgatg

SEQ ID NO: 4895879 - DNA, 25 bp, Homo sapien
tagctccttgttatgagtaagaaca

SEQ ID NO: 4895880 - DNA, 25 bp, Homo sapien
tccccctctagtagttcctagattc

SEQ ID NO: 4895881 - DNA, 25 bp, Homo sapien
tggtacatgatacatcataattttc

SEQ ID NO: 4895882 - DNA, 25 bp, Homo sapien
gtacatgatacatcataattttctg

SEQ ID NO: 4895883 - DNA, 25 bp, Homo sapien
catgatacatcataattttctgttg

SEQ ID NO: 4895884 - DNA, 25 bp, Homo sapien
ggattggtacatgatacatcataat

SEQ ID NO: 4895885 - DNA, 25 bp, Homo sapien
gaaatcatctctgtagtaatcatag

SEQ ID NO: 4895886 - DNA, 25 bp, Homo sapien
aatcatctctgtagtaatcatagtc

SEQ ID NO: 4895887 - DNA, 25 bp, Homo sapien
aaatcatctctgtagtaatcatagt

SEQ ID NO: 4895888 - DNA, 25 bp, Homo sapien
tagaaatcatctctgtagtaatcat

SEQ ID NO: 4895889 - DNA, 25 bp, Homo sapien
gcacacgcccgtggtaatcaaataa

SEQ ID NO: 4895890 - DNA, 25 bp, Homo sapien
cacacgcccgtggtaatcaaataac

SEQ ID NO: 4895891 - DNA, 25 bp, Homo sapien
actctgggacgcttcagcggaatta

SEQ ID NO: 4895892 - DNA, 25 bp, Homo sapien
ctgccactctgggacgcttcagcgg

SEQ ID NO: 4895893 - DNA, 25 bp, Homo sapien
tcctttccccctgcgagtcgttgtg

SEQ ID NO: 4895894 - DNA, 25 bp, Homo sapien
tgcgagtcgttgtgactgccactct

SEQ ID NO: 4895895 - DNA, 25 bp, Homo sapien
tgttgacccactggcagtagatctc

SEQ ID NO: 4895896 - DNA, 25 bp, Homo sapien
tagaacctgttgacccactggcagt

SEQ ID NO: 4895897 - DNA, 25 bp, Homo sapien
cctgttgacccactggcagtagatc

SEQ ID NO: 4895898 - DNA, 25 bp, Homo sapien
aacctgttgacccactggcagtaga

SEQ ID NO: 4895899 - DNA, 25 bp, Homo sapien
tatatcacaagctaagccaagagca

SEQ ID NO: 4895900 - DNA, 25 bp, Homo sapien
gtttgtctcccctactgcaacacag

SEQ ID NO: 4895901 - DNA, 25 bp, Homo sapien
gcaggtccttcataactatctggtt

SEQ ID NO: 4895902 - DNA, 25 bp, Homo sapien
cattcgtgcaatgatagttaatcac

SEQ ID NO: 4895903 - DNA, 25 bp, Homo sapien
caagtctgtgtcaaatcacatagga

SEQ ID NO: 4895904 - DNA, 25 bp, Homo sapien
tcacctaggaccgaactcacaggga

SEQ ID NO: 4895905 - DNA, 25 bp, Homo sapien
cacagggaccccgtattttctcaag

SEQ ID NO: 4895906 - DNA, 25 bp, Homo sapien
caaatgcaccataactcacctagga

SEQ ID NO: 4895907 - DNA, 25 bp, Homo sapien
ttgatctgggttaattctttcttga

SEQ ID NO: 4895908 - DNA, 25 bp, Homo sapien
ctagcaaggagtcaattttagtttt

SEQ ID NO: 4895909 - DNA, 25 bp, Homo sapien
tttgatctgggttaattctttcttg

SEQ ID NO: 4895910 - DNA, 25 bp, Homo sapien
tgatctgggttaattctttcttgat

SEQ ID NO: 4895911 - DNA, 25 bp, Homo sapien
actagactctcttccaattgcttct

SEQ ID NO: 4895912 - DNA, 25 bp, Homo sapien
tccatcggcatctggccctccttca

SEQ ID NO: 4895913 - DNA, 25 bp, Homo sapien
ctcctctgtagagtgatctgcaatc

SEQ ID NO: 4895914 - DNA, 25 bp, Homo sapien
tcctcttggatcagcactagactct

SEQ ID NO: 4895915 - DNA, 25 bp, Homo sapien
agggtgtgaataccaaatgtttctt

SEQ ID NO: 4895916 - DNA, 25 bp, Homo sapien
tctggcacaatgagacctgaaggga

SEQ ID NO: 4895917 - DNA, 25 bp, Homo sapien
aatgtggaacctgatgtggcttctc

SEQ ID NO: 4895918 - DNA, 25 bp, Homo sapien
gagagagtcatactggttctcacaa

SEQ ID NO: 4895919 - DNA, 25 bp, Homo sapien
accaagtgcaccttgtgggtcctgc

SEQ ID NO: 4895920 - DNA, 25 bp, Homo sapien
gaaatgggtgtttaggatctggaac

SEQ ID NO: 4895921 - DNA, 25 bp, Homo sapien
gactatgcagtctctatcattagag

SEQ ID NO: 4895922 - DNA, 25 bp, Homo sapien
aattccctccagatagactatgcag

SEQ ID NO: 4895923 - DNA, 25 bp, Homo sapien
tgtgggcatgggtgacaatcatcat

SEQ ID NO: 4895924 - DNA, 25 bp, Homo sapien
tggaataactaccaatggaggaaac

SEQ ID NO: 4895925 - DNA, 25 bp, Homo sapien
gtaacacagactaattctcagcacc

SEQ ID NO: 4895926 - DNA, 25 bp, Homo sapien
cattaggtagttcttggaggctgaa

SEQ ID NO: 4895927 - DNA, 25 bp, Homo sapien
gatggccatttagagtataggacag

SEQ ID NO: 4895928 - DNA, 25 bp, Homo sapien
taatgtaaaactaattgtgctctct

SEQ ID NO: 4895929 - DNA, 25 bp, Homo sapien
ttttaaactctcaatctctcccatt

SEQ ID NO: 4895930 - DNA, 25 bp, Homo sapien
tagtcacttatggagctgattgttt

SEQ ID NO: 4895931 - DNA, 25 bp, Homo sapien
aatagtgggtaatttatctactggc

SEQ ID NO: 4895932 - DNA, 25 bp, Homo sapien
catattcacaaagctttccataaaa

SEQ ID NO: 4895933 - DNA, 25 bp, Homo sapien
aaacatattcacaaagctttccata

SEQ ID NO: 4895934 - DNA, 25 bp, Homo sapien
acttctagtatgagaaaaggcttgc

SEQ ID NO: 4895935 - DNA, 25 bp, Homo sapien
ccataaaacttctagtatgagaaaa

SEQ ID NO: 4895936 - DNA, 25 bp, Homo sapien
catggttacaagtcatgaatatatt

SEQ ID NO: 4895937 - DNA, 25 bp, Homo sapien
gcatgtgtcaaaagaggtaatgact

SEQ ID NO: 4895938 - DNA, 25 bp, Homo sapien
tgtgcataattcattacccccagta

SEQ ID NO: 4895939 - DNA, 25 bp, Homo sapien
gactgtttagcaactatgtattttg

SEQ ID NO: 4895940 - DNA, 25 bp, Homo sapien
tctgaagcattatgtaagagcccaa

SEQ ID NO: 4895941 - DNA, 25 bp, Homo sapien
aataatgcaagactcaatcagtggg

SEQ ID NO: 4895942 - DNA, 25 bp, Homo sapien
tggtgcaaccatgagtctgaagcat

SEQ ID NO: 4895943 - DNA, 25 bp, Homo sapien
caaatcaaggtatcagatgggatgg

SEQ ID NO: 4895944 - DNA, 25 bp, Homo sapien
tggaatctcatacccagactgaagt

SEQ ID NO: 4895945 - DNA, 25 bp, Homo sapien
taaaaagggtgcttatacagggcag

SEQ ID NO: 4895946 - DNA, 25 bp, Homo sapien
tttagttcagtagagcggagcatgc

SEQ ID NO: 4895947 - DNA, 25 bp, Homo sapien
tggatccaagggcaagacagtcttt

SEQ ID NO: 4895948 - DNA, 25 bp, Homo sapien
ttatcagtgccagaatacaggtcac

SEQ ID NO: 4895949 - DNA, 25 bp, Homo sapien
gaacctatgatgcacgctttggtaa

SEQ ID NO: 4895950 - DNA, 25 bp, Homo sapien
agtctggcagaacgtaaatacctcc

SEQ ID NO: 4895951 - DNA, 25 bp, Homo sapien
gagtgtgggcatgtagaacctatga

SEQ ID NO: 4895952 - DNA, 25 bp, Homo sapien
cagtgcatcatggtatggtttttgc

SEQ ID NO: 4895953 - DNA, 25 bp, Homo sapien
tatggtcatcaaaaataacagtgca

SEQ ID NO: 4895954 - DNA, 25 bp, Homo sapien
cagagtctaatctggcagtcacaaa

SEQ ID NO: 4895955 - DNA, 25 bp, Homo sapien
gattttatatagaaccatatacagg

SEQ ID NO: 4895956 - DNA, 25 bp, Homo sapien
ggcagatgtgaaccagtggcaaagc

SEQ ID NO: 4895957 - DNA, 25 bp, Homo sapien
agatgtgaaccagtggcaaagcagt

SEQ ID NO: 4895958 - DNA, 25 bp, Homo sapien
cagggcagatgtgaaccagtggcaa

SEQ ID NO: 4895959 - DNA, 25 bp, Homo sapien
ctcagggcagatgtgaaccagtggc

SEQ ID NO: 4895960 - DNA, 25 bp, Homo sapien
ccaacaagtgcagaggtatcatcat

SEQ ID NO: 4895961 - DNA, 25 bp, Homo sapien
cagttgccaacaagtgcagaggtat

SEQ ID NO: 4895962 - DNA, 25 bp, Homo sapien
aacaagtgcagaggtatcatcatcc

SEQ ID NO: 4895963 - DNA, 25 bp, Homo sapien
caagtgcagaggtatcatcatccat

SEQ ID NO: 4895964 - DNA, 25 bp, Homo sapien
tatgcccatcatcaaactctggtcc

SEQ ID NO: 4895965 - DNA, 25 bp, Homo sapien
cctatgcccatcatcaaactctggt

SEQ ID NO: 4895966 - DNA, 25 bp, Homo sapien
tggacctcattcctcacatagcagt

SEQ ID NO: 4895967 - DNA, 25 bp, Homo sapien
cattcctcacatagcagtccttctg

SEQ ID NO: 4895968 - DNA, 25 bp, Homo sapien
ctagacggacagcatgacccagatg

SEQ ID NO: 4895969 - DNA, 25 bp, Homo sapien
gacggacagcatgacccagatggcc

SEQ ID NO: 4895970 - DNA, 25 bp, Homo sapien
gcatgacccagatggccatgtacat

SEQ ID NO: 4895971 - DNA, 25 bp, Homo sapien
agcatgacccagatggccatgtaca

SEQ ID NO: 4895972 - DNA, 25 bp, Homo sapien
catagagaagggcatagtcctcgga

SEQ ID NO: 4895973 - DNA, 25 bp, Homo sapien
tagtcctcggagatgagcacactgt

SEQ ID NO: 4895974 - DNA, 25 bp, Homo sapien
actgtaggtgaacctgccactggaa

SEQ ID NO: 4895975 - DNA, 25 bp, Homo sapien
gataggtcccggcaagccaggtctg

SEQ ID NO: 4895976 - DNA, 25 bp, Homo sapien
tgtcctggatgctcgggtacatggt

SEQ ID NO: 4895977 - DNA, 25 bp, Homo sapien
ataattttgatcttattgtgctggg

SEQ ID NO: 4895978 - DNA, 25 bp, Homo sapien
agtacaggttcttgtgcatgttcac

SEQ ID NO: 4895979 - DNA, 25 bp, Homo sapien
ttccatatgcaggaaagaagtgtgg

SEQ ID NO: 4895980 - DNA, 25 bp, Homo sapien
ctgatccaaatccactagaaggtga

SEQ ID NO: 4895981 - DNA, 25 bp, Homo sapien
aatccactagaaggtgaacagggag

SEQ ID NO: 4895982 - DNA, 25 bp, Homo sapien
aagccgctgattcacacagagaatg

SEQ ID NO: 4895983 - DNA, 25 bp, Homo sapien
atgaagccgctgattcacacagaga

SEQ ID NO: 4895984 - DNA, 25 bp, Homo sapien
ttcaagctccttatatagtctgatt

SEQ ID NO: 4895985 - DNA, 25 bp, Homo sapien
gttcaagctccttatatagtctgat

SEQ ID NO: 4895986 - DNA, 25 bp, Homo sapien
tgttcaagctccttatatagtctga

SEQ ID NO: 4895987 - DNA, 25 bp, Homo sapien
gaggatcattcttgttgatgacaaa

SEQ ID NO: 4895988 - DNA, 25 bp, Homo sapien
agaacctaatgacggcattgtggag

SEQ ID NO: 4895989 - DNA, 25 bp, Homo sapien
ggctgttcttgtgacaccaagatga

SEQ ID NO: 4895990 - DNA, 25 bp, Homo sapien
gatgacaaatataagtgggcccagg

SEQ ID NO: 4895991 - DNA, 25 bp, Homo sapien
catctgcggtgcgactcttgaactt

SEQ ID NO: 4895992 - DNA, 25 bp, Homo sapien
cgtttttacagcatctgcggtgcga

SEQ ID NO: 4895993 - DNA, 25 bp, Homo sapien
tggaatcctcgtcccaactgtgggc

SEQ ID NO: 4895994 - DNA, 25 bp, Homo sapien
actttcccgccttgacggtgacgca

SEQ ID NO: 4895995 - DNA, 25 bp, Homo sapien
cgaggggtccgtgagcttgggacaa

SEQ ID NO: 4895996 - DNA, 25 bp, Homo sapien
tgagcttgggacaagcctcccggaa

SEQ ID NO: 4895997 - DNA, 25 bp, Homo sapien
cttgggacaagcctcccggaagcgc

SEQ ID NO: 4895998 - DNA, 25 bp, Homo sapien
acccagcgaggggtccgtgagcttg

SEQ ID NO: 4895999 - DNA, 25 bp, Homo sapien
tgtcgccgtcttcgttttccacttc

SEQ ID NO: 4896000 - DNA, 25 bp, Homo sapien
atgaagcatacatccccgcagctgc

SEQ ID NO: 4896001 - DNA, 25 bp, Homo sapien
tgctgtcgccgtcttcgttttccac

SEQ ID NO: 4896002 - DNA, 25 bp, Homo sapien
tttgtccatgaagcatacatccccg

SEQ ID NO: 4896003 - DNA, 25 bp, Homo sapien
gaggccgaaagccagactgcgttca

SEQ ID NO: 4896004 - DNA, 25 bp, Homo sapien
cagaaggaaagagtggtcagaagct

SEQ ID NO: 4896005 - DNA, 25 bp, Homo sapien
gtcttggtaaagcagtgccgcgcct

SEQ ID NO: 4896006 - DNA, 25 bp, Homo sapien
taagcagagtcgtgtgaaacgctgg

SEQ ID NO: 4896007 - DNA, 25 bp, Homo sapien
tcacgggcatctgctgtaggttgag

SEQ ID NO: 4896008 - DNA, 25 bp, Homo sapien
gagttgctagatgggagatacaccc

SEQ ID NO: 4896009 - DNA, 25 bp, Homo sapien
gttgaaagttaatggatctccccta

SEQ ID NO: 4896010 - DNA, 25 bp, Homo sapien
tatacaaacaagaaaccgctcaagg

SEQ ID NO: 4896011 - DNA, 25 bp, Homo sapien
gacggcatgaagagttgaatctaaa

SEQ ID NO: 4896012 - DNA, 25 bp, Homo sapien
tattgcaatgaagattgacggcatg

SEQ ID NO: 4896013 - DNA, 25 bp, Homo sapien
tcaatggcttcgatcttggagatgt

SEQ ID NO: 4896014 - DNA, 25 bp, Homo sapien
taatgtgcacagttttgtcagtgtg

SEQ ID NO: 4896015 - DNA, 25 bp, Homo sapien
atctatgtggttataagatacattt

SEQ ID NO: 4896016 - DNA, 25 bp, Homo sapien
tataagatacatttagtctagtcag

SEQ ID NO: 4896017 - DNA, 25 bp, Homo sapien
tagtctagtcagattaattagttct

SEQ ID NO: 4896018 - DNA, 25 bp, Homo sapien
gatacatttagtctagtcagattaa

SEQ ID NO: 4896019 - DNA, 25 bp, Homo sapien
gatggatactatctatacgattact

SEQ ID NO: 4896020 - DNA, 25 bp, Homo sapien
agtttatgcttaattccatgaaggg

SEQ ID NO: 4896021 - DNA, 25 bp, Homo sapien
ctccaaaataagattggtcaggaag

SEQ ID NO: 4896022 - DNA, 25 bp, Homo sapien
agtgcaatcctaccatacactgaag

SEQ ID NO: 4896023 - DNA, 25 bp, Homo sapien
gcagtcgacagacaggattatcgtc

SEQ ID NO: 4896024 - DNA, 25 bp, Homo sapien
ctggcagtcgacagacaggattatc

SEQ ID NO: 4896025 - DNA, 25 bp, Homo sapien
agtcgacagacaggattatcgtctc

SEQ ID NO: 4896026 - DNA, 25 bp, Homo sapien
cgacagacaggattatcgtctccat

SEQ ID NO: 4896027 - DNA, 25 bp, Homo sapien
acttgttacttattcaacttctgca

SEQ ID NO: 4896028 - DNA, 25 bp, Homo sapien
tcagctaccagatacatcacccgga

SEQ ID NO: 4896029 - DNA, 25 bp, Homo sapien
cacccggaatagttccagaaagcaa

SEQ ID NO: 4896030 - DNA, 25 bp, Homo sapien
taaactaaatttatcagctaccaga

SEQ ID NO: 4896031 - DNA, 25 bp, Homo sapien
tccaaaagaccttctaggcactgca

SEQ ID NO: 4896032 - DNA, 25 bp, Homo sapien
caatctaggattctaagctgtggca

SEQ ID NO: 4896033 - DNA, 25 bp, Homo sapien
ctgtcaaatttactggttcaccaaa

SEQ ID NO: 4896034 - DNA, 25 bp, Homo sapien
ctggttcaccaaatatgttcttgca

SEQ ID NO: 4896035 - DNA, 25 bp, Homo sapien
agcatcacttggtgtacttgcaaac

SEQ ID NO: 4896036 - DNA, 25 bp, Homo sapien
tggctcagaagattgacacacagac

SEQ ID NO: 4896037 - DNA, 25 bp, Homo sapien
tatctcattctgcaaatcgttttca

SEQ ID NO: 4896038 - DNA, 25 bp, Homo sapien
cagacataaaagacgtcaacacagc

SEQ ID NO: 4896039 - DNA, 25 bp, Homo sapien
cataagggatttttgatcttcgagg

SEQ ID NO: 4896040 - DNA, 25 bp, Homo sapien
tttgatcttcgaggaacttttctat

SEQ ID NO: 4896041 - DNA, 25 bp, Homo sapien
tagtttttattgtggtgcttaatag

SEQ ID NO: 4896042 - DNA, 25 bp, Homo sapien
tagtcactttcagaagttatatctg

SEQ ID NO: 4896043 - DNA, 25 bp, Homo sapien
tggtaagtgttgtcttctgagtgac

SEQ ID NO: 4896044 - DNA, 25 bp, Homo sapien
gagtgactttggtctactttaatta

SEQ ID NO: 4896045 - DNA, 25 bp, Homo sapien
tcttgtaacataggacagtttgcta

SEQ ID NO: 4896046 - DNA, 25 bp, Homo sapien
catataattctttaaggtaaggtgg

SEQ ID NO: 4896047 - DNA, 25 bp, Homo sapien
gcagctcatcaatataatccatgag

SEQ ID NO: 4896048 - DNA, 25 bp, Homo sapien
aatccatgagtttattttcggcttg

SEQ ID NO: 4896049 - DNA, 25 bp, Homo sapien
ctatctgtggtaagtagagccagac

SEQ ID NO: 4896050 - DNA, 25 bp, Homo sapien
tctctcttggtctagctgttcaaca

SEQ ID NO: 4896051 - DNA, 25 bp, Homo sapien
ttcttaagtgtttaaggtgatcctc

SEQ ID NO: 4896052 - DNA, 25 bp, Homo sapien
gtttgtgaaccataacttcgagttg

SEQ ID NO: 4896053 - DNA, 25 bp, Homo sapien
cataacttcgagttgtcctttggaa

SEQ ID NO: 4896054 - DNA, 25 bp, Homo sapien
taagtgtttaaggtgatcctcttgt

SEQ ID NO: 4896055 - DNA, 25 bp, Homo sapien
tctaagtaagtatatttctctatcg

SEQ ID NO: 4896056 - DNA, 25 bp, Homo sapien
ctttcaatgcaagaagttgatgaag

SEQ ID NO: 4896057 - DNA, 25 bp, Homo sapien
gaagttgttgcgcttgttctctttc

SEQ ID NO: 4896058 - DNA, 25 bp, Homo sapien
agtatatttctctatcggcagctga

SEQ ID NO: 4896059 - DNA, 25 bp, Homo sapien
gcttaacacgtcaattttctcttgg

SEQ ID NO: 4896060 - DNA, 25 bp, Homo sapien
atccatatactgctggcttaacacg

SEQ ID NO: 4896061 - DNA, 25 bp, Homo sapien
taaggcatcctggaagtcagcatca

SEQ ID NO: 4896062 - DNA, 25 bp, Homo sapien
cagttaaagcaatacggaattcatt

SEQ ID NO: 4896063 - DNA, 25 bp, Homo sapien
gcatgtttgctctttgctaactcag

SEQ ID NO: 4896064 - DNA, 25 bp, Homo sapien
tgttcctttaccatacaggtcagat

SEQ ID NO: 4896065 - DNA, 25 bp, Homo sapien
caggtcagatctttaattaaagagg

SEQ ID NO: 4896066 - DNA, 25 bp, Homo sapien
tgagcccaaataagagcatgtttgc

SEQ ID NO: 4896067 - DNA, 25 bp, Homo sapien
taaatttgctgctgtttcttgtttc

SEQ ID NO: 4896068 - DNA, 25 bp, Homo sapien
tgctgctgtttcttgtttcaattta

SEQ ID NO: 4896069 - DNA, 25 bp, Homo sapien
ctgctgtttcttgtttcaatttaga

SEQ ID NO: 4896070 - DNA, 25 bp, Homo sapien
tgtaaatttgctgctgtttcttgtt

SEQ ID NO: 4896071 - DNA, 25 bp, Homo sapien
tttgaatactcttctgcttgtcatc

SEQ ID NO: 4896072 - DNA, 25 bp, Homo sapien
gctagctcagaaataagctggactt

SEQ ID NO: 4896073 - DNA, 25 bp, Homo sapien
caaatattagtgattccttggctgc

SEQ ID NO: 4896074 - DNA, 25 bp, Homo sapien
tgttgtgccagctcatgtccccata

SEQ ID NO: 4896075 - DNA, 25 bp, Homo sapien
ttccacgattttgggctagagaaga

SEQ ID NO: 4896076 - DNA, 25 bp, Homo sapien
cagtttggtcgtctatgattttgca

SEQ ID NO: 4896077 - DNA, 25 bp, Homo sapien
tctagataaactctcaatttgagcc

SEQ ID NO: 4896078 - DNA, 25 bp, Homo sapien
aatttgagcctccaattttccacga

SEQ ID NO: 4896079 - DNA, 25 bp, Homo sapien
tttcatcaagttgttcttgagtgca

SEQ ID NO: 4896080 - DNA, 25 bp, Homo sapien
attgtgcctttccaacttctcaagt

SEQ ID NO: 4896081 - DNA, 25 bp, Homo sapien
agaagttctcctttatcatgccact

SEQ ID NO: 4896082 - DNA, 25 bp, Homo sapien
gtgtttcaagatgacatagaagttc

SEQ ID NO: 4896083 - DNA, 25 bp, Homo sapien
tagaagttctcctttatcatgccac

SEQ ID NO: 4896084 - DNA, 25 bp, Homo sapien
gaagttctcctttatcatgccactt

SEQ ID NO: 4896085 - DNA, 25 bp, Homo sapien
cagcttgatgagcttcaacaattgc

SEQ ID NO: 4896086 - DNA, 25 bp, Homo sapien
ttttaaaggcatcatccatactatg

SEQ ID NO: 4896087 - DNA, 25 bp, Homo sapien
ctgcttttcattggccagctgtgct

SEQ ID NO: 4896088 - DNA, 25 bp, Homo sapien
ttgcatcaacttgtcttttaaaggc

SEQ ID NO: 4896089 - DNA, 25 bp, Homo sapien
caaaagttcacgcatttctttttca

SEQ ID NO: 4896090 - DNA, 25 bp, Homo sapien
tttttgttcttgcatgtttcttcca

SEQ ID NO: 4896091 - DNA, 25 bp, Homo sapien
taatgagtgatgtggagatggctac

SEQ ID NO: 4896092 - DNA, 25 bp, Homo sapien
gatggctacatatactttcttaaga

SEQ ID NO: 4896093 - DNA, 25 bp, Homo sapien
catttttacaataggtctgctggtc

SEQ ID NO: 4896094 - DNA, 25 bp, Homo sapien
gctttttggctacataagtacttta

SEQ ID NO: 4896095 - DNA, 25 bp, Homo sapien
taaaatgtgtctcttataggcaaaa

SEQ ID NO: 4896096 - DNA, 25 bp, Homo sapien
ttctcatcttttggctatcaactga

SEQ ID NO: 4896097 - DNA, 25 bp, Homo sapien
ccagcggccaccattatgttctctg

SEQ ID NO: 4896098 - DNA, 25 bp, Homo sapien
gcagataactctttgagatactagt

SEQ ID NO: 4896099 - DNA, 25 bp, Homo sapien
tgggtgagagattttggtaaagcgc

SEQ ID NO: 4896100 - DNA, 25 bp, Homo sapien
tgttttgcattgtaggtggtatccc

SEQ ID NO: 4896101 - DNA, 25 bp, Homo sapien
tgtatgcctgaaccagcaggtcttt

SEQ ID NO: 4896102 - DNA, 25 bp, Homo sapien
taggtggtatccctgtatgcctgaa

SEQ ID NO: 4896103 - DNA, 25 bp, Homo sapien
aaaatctgacgatcaaagaagcccc

SEQ ID NO: 4896104 - DNA, 25 bp, Homo sapien
cacacagatttggtaagttcagtaa

SEQ ID NO: 4896105 - DNA, 25 bp, Homo sapien
caatgagacatagcctaagaaaacg

SEQ ID NO: 4896106 - DNA, 25 bp, Homo sapien
tatagacagatcctcaaagcctctc

SEQ ID NO: 4896107 - DNA, 25 bp, Homo sapien
ctttttgcaaaactttatgaagatt

SEQ ID NO: 4896108 - DNA, 25 bp, Homo sapien
tgcaaaactttatgaagattgcatc

SEQ ID NO: 4896109 - DNA, 25 bp, Homo sapien
tttgcaaaactttatgaagattgca

SEQ ID NO: 4896110 - DNA, 25 bp, Homo sapien
gcaaaactttatgaagattgcatca

SEQ ID NO: 4896111 - DNA, 25 bp, Homo sapien
ttcaagttttatttagcaacttgta

SEQ ID NO: 4896112 - DNA, 25 bp, Homo sapien
caagttttatttagcaacttgtact

SEQ ID NO: 4896113 - DNA, 25 bp, Homo sapien
ttttatttagcaacttgtactctac

SEQ ID NO: 4896114 - DNA, 25 bp, Homo sapien
agttttatttagcaacttgtactct

SEQ ID NO: 4896115 - DNA, 25 bp, Homo sapien
aaaatctagatgcttggatccaaac

SEQ ID NO: 4896116 - DNA, 25 bp, Homo sapien
tagcatttgatatgagaatatgacc

SEQ ID NO: 4896117 - DNA, 25 bp, Homo sapien
tagatgcttggatccaaaccccagg

SEQ ID NO: 4896118 - DNA, 25 bp, Homo sapien
aaaccccagggatcaaattagcatt

SEQ ID NO: 4896119 - DNA, 25 bp, Homo sapien
gctatctttgctcttttcgagctct

SEQ ID NO: 4896120 - DNA, 25 bp, Homo sapien
ttctgctatctttgctcttttcgag

SEQ ID NO: 4896121 - DNA, 25 bp, Homo sapien
gacggtttctgctatctttgctctt

SEQ ID NO: 4896122 - DNA, 25 bp, Homo sapien
tggacggtttctgctatctttgctc

SEQ ID NO: 4896123 - DNA, 25 bp, Homo sapien
gcggtagtgcgggtcgctggctgct

SEQ ID NO: 4896124 - DNA, 25 bp, Homo sapien
ggaagcgtgaatgaggcccacgacc

SEQ ID NO: 4896125 - DNA, 25 bp, Homo sapien
gctggctgctgcaaacaacaggtgt

SEQ ID NO: 4896126 - DNA, 25 bp, Homo sapien
ttaaatggcaggaagtgacgccgcc

SEQ ID NO: 4896127 - DNA, 25 bp, Homo sapien
cccgcgcactttcgctcgccggccc

SEQ ID NO: 4896128 - DNA, 25 bp, Homo sapien
gggcccccgcgcactttcgctcgcc

SEQ ID NO: 4896129 - DNA, 25 bp, Homo sapien
cgcgcactttcgctcgccggccccg

SEQ ID NO: 4896130 - DNA, 25 bp, Homo sapien
cgcggtggtcgggcccccgcgcact

SEQ ID NO: 4896131 - DNA, 25 bp, Homo sapien
ctgcggggcttgcgcctgcggaggc

SEQ ID NO: 4896132 - DNA, 25 bp, Homo sapien
ccgagctcgcgggctctgccgccgc

SEQ ID NO: 4896133 - DNA, 25 bp, Homo sapien
gcggggcttgcgcctgcggaggctg

SEQ ID NO: 4896134 - DNA, 25 bp, Homo sapien
ggcccgagctcgcgggctctgccgc

SEQ ID NO: 4896135 - DNA, 25 bp, Homo sapien
cagcgacacgaacttggtagtgagc

SEQ ID NO: 4896136 - DNA, 25 bp, Homo sapien
tttgagatccagaacgccgtccttg

SEQ ID NO: 4896137 - DNA, 25 bp, Homo sapien
ctgcagcagcgacacgaacttggta

SEQ ID NO: 4896138 - DNA, 25 bp, Homo sapien
gcagccccaggctcttctcgtgcct

SEQ ID NO: 4896139 - DNA, 25 bp, Homo sapien
gacccacgcggcgaggggctgggct

SEQ ID NO: 4896140 - DNA, 25 bp, Homo sapien
tagacccacgcggcgaggggctggg

SEQ ID NO: 4896141 - DNA, 25 bp, Homo sapien
agacccacgcggcgaggggctgggc

SEQ ID NO: 4896142 - DNA, 25 bp, Homo sapien
ctagacccacgcggcgaggggctgg

SEQ ID NO: 4896143 - DNA, 25 bp, Homo sapien
cgcaaggcgcgtctacaccacgccg

SEQ ID NO: 4896144 - DNA, 25 bp, Homo sapien
cgggtccccgcaaggcgcgtctaca

SEQ ID NO: 4896145 - DNA, 25 bp, Homo sapien
atggtcctcggattgcccggtcccg

SEQ ID NO: 4896146 - DNA, 25 bp, Homo sapien
ggccacatggtcctcggattgcccg

SEQ ID NO: 4896147 - DNA, 25 bp, Homo sapien
cattggttacgcgtccgctcggtgc

SEQ ID NO: 4896148 - DNA, 25 bp, Homo sapien
gcaacagacactcggttaccctcag

SEQ ID NO: 4896149 - DNA, 25 bp, Homo sapien
ctctttgtcgagagcccagcgtggc

SEQ ID NO: 4896150 - DNA, 25 bp, Homo sapien
tgcgcccggagacagaagccacgcg

SEQ ID NO: 4896151 - DNA, 25 bp, Homo sapien
ccattcttaacagcaaaatcgatat

SEQ ID NO: 4896152 - DNA, 25 bp, Homo sapien
cagcaaaatcgatatccacggtgtc

SEQ ID NO: 4896153 - DNA, 25 bp, Homo sapien
gtgtctccgggcaaagcgcccgtta

SEQ ID NO: 4896154 - DNA, 25 bp, Homo sapien
atccacggtgtctccgggcaaagcg

SEQ ID NO: 4896155 - DNA, 25 bp, Homo sapien
ctgaacgtaagtggattaagttctc

SEQ ID NO: 4896156 - DNA, 25 bp, Homo sapien
gataaccctgaacgtaagtggatta

SEQ ID NO: 4896157 - DNA, 25 bp, Homo sapien
cctgaacgtaagtggattaagttct

SEQ ID NO: 4896158 - DNA, 25 bp, Homo sapien
ttaaagacgcaaagcgctccctcca

SEQ ID NO: 4896159 - DNA, 25 bp, Homo sapien
aaagacgcaaagcgctccctccagg

SEQ ID NO: 4896160 - DNA, 25 bp, Homo sapien
agacgcaaagcgctccctccaggag

SEQ ID NO: 4896161 - DNA, 25 bp, Homo sapien
tttaaagacgcaaagcgctccctcc

SEQ ID NO: 4896162 - DNA, 25 bp, Homo sapien
catgtgagtatgctgataggaatga

SEQ ID NO: 4896163 - DNA, 25 bp, Homo sapien
ccagcagagtacctgggtacagata

SEQ ID NO: 4896164 - DNA, 25 bp, Homo sapien
ggtacattagtagaccaggtaggga

SEQ ID NO: 4896165 - DNA, 25 bp, Homo sapien
cagggcatattaataactgaagtcc

SEQ ID NO: 4896166 - DNA, 25 bp, Homo sapien
atcaagtcaattccctctaagacat

SEQ ID NO: 4896167 - DNA, 25 bp, Homo sapien
gcctcacagccaaagtatcagcagc

SEQ ID NO: 4896168 - DNA, 25 bp, Homo sapien
ttccactggatactgttttttgact

SEQ ID NO: 4896169 - DNA, 25 bp, Homo sapien
gaatcgtccatcacatttttgatgc

SEQ ID NO: 4896170 - DNA, 25 bp, Homo sapien
acttctgctgatcaagttctctttc

SEQ ID NO: 4896171 - DNA, 25 bp, Homo sapien
tattaatggaatcgtccatcacatt

SEQ ID NO: 4896172 - DNA, 25 bp, Homo sapien
ctattattaatggaatcgtccatca

SEQ ID NO: 4896173 - DNA, 25 bp, Homo sapien
ctgtcataggagttaaggaacgaca

SEQ ID NO: 4896174 - DNA, 25 bp, Homo sapien
tgtcataggagttaaggaacgacat

SEQ ID NO: 4896175 - DNA, 25 bp, Homo sapien
tgtcttcatgagttacataggaaaa

SEQ ID NO: 4896176 - DNA, 25 bp, Homo sapien
tctggaatgggtacctccagttgtg

SEQ ID NO: 4896177 - DNA, 25 bp, Homo sapien
catttctggaatgggtacctccagt

SEQ ID NO: 4896178 - DNA, 25 bp, Homo sapien
tacctccagttgtgtaccagaaggt

SEQ ID NO: 4896179 - DNA, 25 bp, Homo sapien
gaatgggtacctccagttgtgtacc

SEQ ID NO: 4896180 - DNA, 25 bp, Homo sapien
acaggaaaaaccacgggcttagatg

SEQ ID NO: 4896181 - DNA, 25 bp, Homo sapien
ttataagcagcacatggataggtcc

SEQ ID NO: 4896182 - DNA, 25 bp, Homo sapien
cgggcttagatgaactcgactcttt

SEQ ID NO: 4896183 - DNA, 25 bp, Homo sapien
catggataggtcctgaatgactctt

SEQ ID NO: 4896184 - DNA, 25 bp, Homo sapien
tggatttctgtggagtcactggagt

SEQ ID NO: 4896185 - DNA, 25 bp, Homo sapien
gctggatttctgtggagtcactgga

SEQ ID NO: 4896186 - DNA, 25 bp, Homo sapien
ttctgtggagtcactggagtcaagg

SEQ ID NO: 4896187 - DNA, 25 bp, Homo sapien
gatttctgtggagtcactggagtca

SEQ ID NO: 4896188 - DNA, 25 bp, Homo sapien
gttgctcaggcagattttgagttgc

SEQ ID NO: 4896189 - DNA, 25 bp, Homo sapien
tgctcaggcagattttgagttgcca

SEQ ID NO: 4896190 - DNA, 25 bp, Homo sapien
ttgctcaggcagattttgagttgcc

SEQ ID NO: 4896191 - DNA, 25 bp, Homo sapien
tatatctgtagctgatgtctgctgc

SEQ ID NO: 4896192 - DNA, 25 bp, Homo sapien
gatatatctgtagctgatgtctgct

SEQ ID NO: 4896193 - DNA, 25 bp, Homo sapien
gaagatatatctgtagctgatgtct

SEQ ID NO: 4896194 - DNA, 25 bp, Homo sapien
ctgaagatatatctgtagctgatgt

SEQ ID NO: 4896195 - DNA, 25 bp, Homo sapien
cctaatggtctgtagtatagacata

SEQ ID NO: 4896196 - DNA, 25 bp, Homo sapien
ccttttctattgtgcatcctaatgg

SEQ ID NO: 4896197 - DNA, 25 bp, Homo sapien
tattgtgcatcctaatggtctgtag

SEQ ID NO: 4896198 - DNA, 25 bp, Homo sapien
actaccttttctattgtgcatccta

SEQ ID NO: 4896199 - DNA, 25 bp, Homo sapien
aatcatattactcctgtgtgcacca

SEQ ID NO: 4896200 - DNA, 25 bp, Homo sapien
cactggtttattggataaatgtcct

SEQ ID NO: 4896201 - DNA, 25 bp, Homo sapien
ctctgaaattcaaggcctgctctaa

SEQ ID NO: 4896202 - DNA, 25 bp, Homo sapien
catctacagtttccatcgcttctga

SEQ ID NO: 4896203 - DNA, 25 bp, Homo sapien
cagaagacattaactcatcaatgat

SEQ ID NO: 4896204 - DNA, 25 bp, Homo sapien
cgtcagaagacattaactcatcaat

SEQ ID NO: 4896205 - DNA, 25 bp, Homo sapien
agaagacattaactcatcaatgata

SEQ ID NO: 4896206 - DNA, 25 bp, Homo sapien
gtcagaagacattaactcatcaatg

SEQ ID NO: 4896207 - DNA, 25 bp, Homo sapien
catttgctaacttaactgctaccac

SEQ ID NO: 4896208 - DNA, 25 bp, Homo sapien
catacatgtttagtacatctctagt

SEQ ID NO: 4896209 - DNA, 25 bp, Homo sapien
taggtagtaggactctgatccaaga

SEQ ID NO: 4896210 - DNA, 25 bp, Homo sapien
tgctaccacttcgtaggtttctact

SEQ ID NO: 4896211 - DNA, 25 bp, Homo sapien
ggtaggagaaagccttaagagagga

SEQ ID NO: 4896212 - DNA, 25 bp, Homo sapien
gtaggagaaagccttaagagaggaa

SEQ ID NO: 4896213 - DNA, 25 bp, Homo sapien
taggagaaagccttaagagaggaaa

SEQ ID NO: 4896214 - DNA, 25 bp, Homo sapien
ggagaaagccttaagagaggaaaca

SEQ ID NO: 4896215 - DNA, 25 bp, Homo sapien
gacatcaaacagatcacaaactcct

SEQ ID NO: 4896216 - DNA, 25 bp, Homo sapien
acaaactccttcgttatcatctaaa

SEQ ID NO: 4896217 - DNA, 25 bp, Homo sapien
caaactccttcgttatcatctaaat

SEQ ID NO: 4896218 - DNA, 25 bp, Homo sapien
ataatttagtatctggacatcaaac

SEQ ID NO: 4896219 - DNA, 25 bp, Homo sapien
acagttagaggtagataacagtccc

SEQ ID NO: 4896220 - DNA, 25 bp, Homo sapien
gggaagaacacttcagaatcagtga

SEQ ID NO: 4896221 - DNA, 25 bp, Homo sapien
gtggatattaaatcacttatcccct

SEQ ID NO: 4896222 - DNA, 25 bp, Homo sapien
ctaaaaaaggtgttacattcattat

SEQ ID NO: 4896223 - DNA, 25 bp, Homo sapien
cacttatcccctaaagcaatcagag

SEQ ID NO: 4896224 - DNA, 25 bp, Homo sapien
tacaggcagtttagtggcagtaaaa

SEQ ID NO: 4896225 - DNA, 25 bp, Homo sapien
taagacaagtaatgagtccttggcc

SEQ ID NO: 4896226 - DNA, 25 bp, Homo sapien
gaacgtctgtttggatagaaggaca

SEQ ID NO: 4896227 - DNA, 25 bp, Homo sapien
tcttgttaatgtacaggcattggca

SEQ ID NO: 4896228 - DNA, 25 bp, Homo sapien
tcatacggtcactcaacacttccaa

SEQ ID NO: 4896229 - DNA, 25 bp, Homo sapien
cagtgacaatcacaagtcccagatg

SEQ ID NO: 4896230 - DNA, 25 bp, Homo sapien
tgtgcttctcaccaaccagttataa

SEQ ID NO: 4896231 - DNA, 25 bp, Homo sapien
gattccacaggttgagagttgagtc

SEQ ID NO: 4896232 - DNA, 25 bp, Homo sapien
gtatagatgcgggatgacagcactg

SEQ ID NO: 4896233 - DNA, 25 bp, Homo sapien
tatttgatccaggtttcttgtatag

SEQ ID NO: 4896234 - DNA, 25 bp, Homo sapien
caggaaggattcagagacgtattgt

SEQ ID NO: 4896235 - DNA, 25 bp, Homo sapien
ggtcttccattaagacaagaaggtc

SEQ ID NO: 4896236 - DNA, 25 bp, Homo sapien
taatagttttactgaaccatagaac

SEQ ID NO: 4896237 - DNA, 25 bp, Homo sapien
aagaatgtattaatagaggcaagac

SEQ ID NO: 4896238 - DNA, 25 bp, Homo sapien
ggaaacagttcttatctctaaactc

SEQ ID NO: 4896239 - DNA, 25 bp, Homo sapien
gggatgtcagtgagcacccattctt

SEQ ID NO: 4896240 - DNA, 25 bp, Homo sapien
tgtatttcacatagccagccaaaaa

SEQ ID NO: 4896241 - DNA, 25 bp, Homo sapien
taaggatggtttcaagcatttgtct

SEQ ID NO: 4896242 - DNA, 25 bp, Homo sapien
tgagtattagttaagcactctgact

SEQ ID NO: 4896243 - DNA, 25 bp, Homo sapien
cattgtaagctactgaacagctgta

SEQ ID NO: 4896244 - DNA, 25 bp, Homo sapien
ggcttaatgcatctctagctacgga

SEQ ID NO: 4896245 - DNA, 25 bp, Homo sapien
tagctacggaggaaagacagtatcc

SEQ ID NO: 4896246 - DNA, 25 bp, Homo sapien
gcaagggccgttcacatagaggtaa

SEQ ID NO: 4896247 - DNA, 25 bp, Homo sapien
taaactttactacaaggacaggtgc

SEQ ID NO: 4896248 - DNA, 25 bp, Homo sapien
gccctactgggtagcaggcccgaaa

SEQ ID NO: 4896249 - DNA, 25 bp, Homo sapien
cctcaggcagccctactgggtagca

SEQ ID NO: 4896250 - DNA, 25 bp, Homo sapien
agcaggcccgaaaccccggtgcttg

SEQ ID NO: 4896251 - DNA, 25 bp, Homo sapien
tgtaggctcggttccgtcgcgctct

SEQ ID NO: 4896252 - DNA, 25 bp, Homo sapien
ctggagggctggcgtgaagtttgca

SEQ ID NO: 4896253 - DNA, 25 bp, Homo sapien
tggcgtgaagtttgcaggggtcggg

SEQ ID NO: 4896254 - DNA, 25 bp, Homo sapien
gagggctggcgtgaagtttgcaggg

SEQ ID NO: 4896255 - DNA, 25 bp, Homo sapien
tgcaggggtcggggttggattgggc

SEQ ID NO: 4896256 - DNA, 25 bp, Homo sapien
gaagcacctcgggaagtttctgcac

SEQ ID NO: 4896257 - DNA, 25 bp, Homo sapien
ggagacttggctggctccataacgc

SEQ ID NO: 4896258 - DNA, 25 bp, Homo sapien
taacgccccaaactcgcttgagctg

SEQ ID NO: 4896259 - DNA, 25 bp, Homo sapien
gtttctgcacaagtacccacgccag

SEQ ID NO: 4896260 - DNA, 25 bp, Homo sapien
ccaacctcaaggctccctctaccgc

SEQ ID NO: 4896261 - DNA, 25 bp, Homo sapien
ctcaaggctccctctaccgccagcc

SEQ ID NO: 4896262 - DNA, 25 bp, Homo sapien
ctagatcttttccaacctcaaggct

SEQ ID NO: 4896263 - DNA, 25 bp, Homo sapien
aacctcaaggctccctctaccgcca

SEQ ID NO: 4896264 - DNA, 25 bp, Homo sapien
taactcgcagtgcattacaaatctt

SEQ ID NO: 4896265 - DNA, 25 bp, Homo sapien
tatactgtgcctggtttcttgtgcc

SEQ ID NO: 4896266 - DNA, 25 bp, Homo sapien
ctagacgacgttatgggttgaatgt

SEQ ID NO: 4896267 - DNA, 25 bp, Homo sapien
aaaacatttctaactcgcagtgcat

SEQ ID NO: 4896268 - DNA, 25 bp, Homo sapien
tctcttggaagaattgagtcaattt

SEQ ID NO: 4896269 - DNA, 25 bp, Homo sapien
ttaatagggttattctcttggaaga

SEQ ID NO: 4896270 - DNA, 25 bp, Homo sapien
gggttattctcttggaagaattgag

SEQ ID NO: 4896271 - DNA, 25 bp, Homo sapien
tattctcttggaagaattgagtcaa

SEQ ID NO: 4896272 - DNA, 25 bp, Homo sapien
tgagatgctcaatgccaaagtccac

SEQ ID NO: 4896273 - DNA, 25 bp, Homo sapien
ggtgccacagggatagtctcaagca

SEQ ID NO: 4896274 - DNA, 25 bp, Homo sapien
cactttctaagacggatccagatgg

SEQ ID NO: 4896275 - DNA, 25 bp, Homo sapien
gaaatatcttctacataactgggag

SEQ ID NO: 4896276 - DNA, 25 bp, Homo sapien
gagagaaaggtggtggatcctgttt

SEQ ID NO: 4896277 - DNA, 25 bp, Homo sapien
gagaaaggtggtggatcctgtttat

SEQ ID NO: 4896278 - DNA, 25 bp, Homo sapien
gaaaggtggtggatcctgtttattc

SEQ ID NO: 4896279 - DNA, 25 bp, Homo sapien
agagaaaggtggtggatcctgttta

SEQ ID NO: 4896280 - DNA, 25 bp, Homo sapien
cctccagatatttccaggaatttga

SEQ ID NO: 4896281 - DNA, 25 bp, Homo sapien
ctccagatatttccaggaatttgac

SEQ ID NO: 4896282 - DNA, 25 bp, Homo sapien
ttccttcactgcaaagcattaacca

SEQ ID NO: 4896283 - DNA, 25 bp, Homo sapien
tactgatgcgagtcacttttccttc

SEQ ID NO: 4896284 - DNA, 25 bp, Homo sapien
ctcttgcagcttcatagtaatctac

SEQ ID NO: 4896285 - DNA, 25 bp, Homo sapien
gcattaaccatctcttttcattcac

SEQ ID NO: 4896286 - DNA, 25 bp, Homo sapien
tcaagatccctaggcatttggccag

SEQ ID NO: 4896287 - DNA, 25 bp, Homo sapien
tatcttggccatgctaacagtgaca

SEQ ID NO: 4896288 - DNA, 25 bp, Homo sapien
tagtgtatggctacaaacccttgcc

SEQ ID NO: 4896289 - DNA, 25 bp, Homo sapien
tataattagttcaggttcaagatcc

SEQ ID NO: 4896290 - DNA, 25 bp, Homo sapien
aactttgagctgtaaccaaaccagc

SEQ ID NO: 4896291 - DNA, 25 bp, Homo sapien
gaatgttggccaatcaaaggcagcc

SEQ ID NO: 4896292 - DNA, 25 bp, Homo sapien
gtgtaaatagactgtagcccactct

SEQ ID NO: 4896293 - DNA, 25 bp, Homo sapien
tgttcaaaccctgttcaactgaggt

SEQ ID NO: 4896294 - DNA, 25 bp, Homo sapien
gcttgttaccctaggactggagtca

SEQ ID NO: 4896295 - DNA, 25 bp, Homo sapien
gagtcagaactagctgcagagtctt

SEQ ID NO: 4896296 - DNA, 25 bp, Homo sapien
tgagtgaggaaaccaaaaccagttg

SEQ ID NO: 4896297 - DNA, 25 bp, Homo sapien
tgaatttctggcctggagtcgtgaa

SEQ ID NO: 4896298 - DNA, 25 bp, Homo sapien
gagtgcgagaccgtgaacccggtcc

SEQ ID NO: 4896299 - DNA, 25 bp, Homo sapien
ttagtttggactcgggaatgagaga

SEQ ID NO: 4896300 - DNA, 25 bp, Homo sapien
gggcgcgagtctctcttagtttgga

SEQ ID NO: 4896301 - DNA, 25 bp, Homo sapien
ggaaggagcctgctagggcgggacc

SEQ ID NO: 4896302 - DNA, 25 bp, Homo sapien
tcggggtggaaggaagagaaagatg

SEQ ID NO: 4896303 - DNA, 25 bp, Homo sapien
ctcggggtggaaggaagagaaagat

SEQ ID NO: 4896304 - DNA, 25 bp, Homo sapien
cggggtggaaggaagagaaagatgt

SEQ ID NO: 4896305 - DNA, 25 bp, Homo sapien
gggtggaaggaagagaaagatgtga

SEQ ID NO: 4896306 - DNA, 25 bp, Homo sapien
cgttgtgctcgcggtatccccagct

SEQ ID NO: 4896307 - DNA, 25 bp, Homo sapien
ttgtgctcgcggtatccccagctga

SEQ ID NO: 4896308 - DNA, 25 bp, Homo sapien
gagaagtaacccacaatgtaactta

SEQ ID NO: 4896309 - DNA, 25 bp, Homo sapien
tactaaagtccccagtagtagtcag

SEQ ID NO: 4896310 - DNA, 25 bp, Homo sapien
gagaagaagagtggagaagtaaccc

SEQ ID NO: 4896311 - DNA, 25 bp, Homo sapien
acttaatttcccagcgagaacctga

SEQ ID NO: 4896312 - DNA, 25 bp, Homo sapien
cattgaaggaatggccgctgttgct

SEQ ID NO: 4896313 - DNA, 25 bp, Homo sapien
tctcaattggagattgctgatcacc

SEQ ID NO: 4896314 - DNA, 25 bp, Homo sapien
catacttgatactaagtggtcggag

SEQ ID NO: 4896315 - DNA, 25 bp, Homo sapien
tgttctctgtgtcatcaaagtcaac

SEQ ID NO: 4896316 - DNA, 25 bp, Homo sapien
tagcttccagtgagaggaccaccac

SEQ ID NO: 4896317 - DNA, 25 bp, Homo sapien
tagctcactccatctactatgtgct

SEQ ID NO: 4896318 - DNA, 25 bp, Homo sapien
ctcggagccgtggtcatcagcggac

SEQ ID NO: 4896319 - DNA, 25 bp, Homo sapien
ccccagtgaaggtgaacctgccgta

SEQ ID NO: 4896320 - DNA, 25 bp, Homo sapien
ctgaattccagtgaacaacatggag

SEQ ID NO: 4896321 - DNA, 25 bp, Homo sapien
tccatctggttcatgagctgcctca

SEQ ID NO: 4896322 - DNA, 25 bp, Homo sapien
gctgcctcaacaaagctggggtatt

SEQ ID NO: 4896323 - DNA, 25 bp, Homo sapien
aagctggggtatttgtctgaattcc

SEQ ID NO: 4896324 - DNA, 25 bp, Homo sapien
cctacttggtgtccaaaggcaagga

SEQ ID NO: 4896325 - DNA, 25 bp, Homo sapien
ttaaagcacccggatcctgccgcaa

SEQ ID NO: 4896326 - DNA, 25 bp, Homo sapien
aaggcaaggaattgttgccatccgt

SEQ ID NO: 4896327 - DNA, 25 bp, Homo sapien
aattgttgccatccgtgaagcattc

SEQ ID NO: 4896328 - DNA, 25 bp, Homo sapien
tggaatccaaagtgtcagtaatctt

SEQ ID NO: 4896329 - DNA, 25 bp, Homo sapien
tgcagttgggaattaggttcaccaa

SEQ ID NO: 4896330 - DNA, 25 bp, Homo sapien
ctttaatggaatccaaagtgtcagt

SEQ ID NO: 4896331 - DNA, 25 bp, Homo sapien
ttgcagttgggaattaggttcacca

SEQ ID NO: 4896332 - DNA, 25 bp, Homo sapien
cagtagtcccaggatggtggaagca

SEQ ID NO: 4896333 - DNA, 25 bp, Homo sapien
cagagacaataggtcaaaatttgtg

SEQ ID NO: 4896334 - DNA, 25 bp, Homo sapien
agagaaccaggatatgtccagtagt

SEQ ID NO: 4896335 - DNA, 25 bp, Homo sapien
gaagaggtggaactgtaagagaacc

SEQ ID NO: 4896336 - DNA, 25 bp, Homo sapien
gtgcacaggagactgcgaaatttgg

SEQ ID NO: 4896337 - DNA, 25 bp, Homo sapien
ctgcttcaccctccgctgtgcacag

SEQ ID NO: 4896338 - DNA, 25 bp, Homo sapien
acaggagactgcgaaatttggccag

SEQ ID NO: 4896339 - DNA, 25 bp, Homo sapien
tgctgcttcaccctccgctgtgcac

SEQ ID NO: 4896340 - DNA, 25 bp, Homo sapien
tttgcggccctttagaggctgtggt

SEQ ID NO: 4896341 - DNA, 25 bp, Homo sapien
ttgcggccctttagaggctgtggtg

SEQ ID NO: 4896342 - DNA, 25 bp, Homo sapien
agaattagcttcactcttcaggagc

SEQ ID NO: 4896343 - DNA, 25 bp, Homo sapien
tgggcttgatgacccatgcctgaaa

SEQ ID NO: 4896344 - DNA, 25 bp, Homo sapien
tcacagacagtaattagaacccctg

SEQ ID NO: 4896345 - DNA, 25 bp, Homo sapien
gggaattcctcaccaagactatatg

SEQ ID NO: 4896346 - DNA, 25 bp, Homo sapien
tttattgtggttgaatccaatttaa

SEQ ID NO: 4896347 - DNA, 25 bp, Homo sapien
atcagtatttgctgtggtaaacaaa

SEQ ID NO: 4896348 - DNA, 25 bp, Homo sapien
aaatcagtatttgctgtggtaaaca

SEQ ID NO: 4896349 - DNA, 25 bp, Homo sapien
aatcagtatttgctgtggtaaacaa

SEQ ID NO: 4896350 - DNA, 25 bp, Homo sapien
taatgcgcatacatggccctgacac

SEQ ID NO: 4896351 - DNA, 25 bp, Homo sapien
tgaggaatcagactggcaaattact

SEQ ID NO: 4896352 - DNA, 25 bp, Homo sapien
caatgtcccagcttgtaggaaatac

SEQ ID NO: 4896353 - DNA, 25 bp, Homo sapien
gcaatctcattgtgcgtaatgcgca

SEQ ID NO: 4896354 - DNA, 25 bp, Homo sapien
tctagccacaccagagaaattgcca

SEQ ID NO: 4896355 - DNA, 25 bp, Homo sapien
tatctgagggcctggatgccttccc

SEQ ID NO: 4896356 - DNA, 25 bp, Homo sapien
taaagatcagttacactcaagtgca

SEQ ID NO: 4896357 - DNA, 25 bp, Homo sapien
tcatggtgcaaggtgttagggtaca

SEQ ID NO: 4896358 - DNA, 25 bp, Homo sapien
tttcaacaaatacttcttgaaccac

SEQ ID NO: 4896359 - DNA, 25 bp, Homo sapien
cagggttttcaacaaatacttcttg

SEQ ID NO: 4896360 - DNA, 25 bp, Homo sapien
tcattcctcagggttttcaacaaat

SEQ ID NO: 4896361 - DNA, 25 bp, Homo sapien
ctcagggttttcaacaaatacttct

SEQ ID NO: 4896362 - DNA, 25 bp, Homo sapien
aaatccactggctgatcaaaactgc

SEQ ID NO: 4896363 - DNA, 25 bp, Homo sapien
tgacccagcagaaaacctggagttg

SEQ ID NO: 4896364 - DNA, 25 bp, Homo sapien
gagtaatccaacgttcaagcagcct

SEQ ID NO: 4896365 - DNA, 25 bp, Homo sapien
aatctcgacaagaatggagcgtgcc

SEQ ID NO: 4896366 - DNA, 25 bp, Homo sapien
caatgcgcctattactcttctctgc

SEQ ID NO: 4896367 - DNA, 25 bp, Homo sapien
tatctttactgtcattacccaggtc

SEQ ID NO: 4896368 - DNA, 25 bp, Homo sapien
ccaggtcaacttctatagacttgta

SEQ ID NO: 4896369 - DNA, 25 bp, Homo sapien
aacagactaatttttcaatgcgcct

SEQ ID NO: 4896370 - DNA, 25 bp, Homo sapien
tgctttgctgctatcatttcctcca

SEQ ID NO: 4896371 - DNA, 25 bp, Homo sapien
gctttgctgctatcatttcctccat

SEQ ID NO: 4896372 - DNA, 25 bp, Homo sapien
ctgctttgctgctatcatttcctcc

SEQ ID NO: 4896373 - DNA, 25 bp, Homo sapien
taattatgtctgatctactgtggca

SEQ ID NO: 4896374 - DNA, 25 bp, Homo sapien
ggccaatgtactgtgtaattatgtc

SEQ ID NO: 4896375 - DNA, 25 bp, Homo sapien
cactgggccaatgtactgtgtaatt

SEQ ID NO: 4896376 - DNA, 25 bp, Homo sapien
cagggttgcaggagctacctctctg

SEQ ID NO: 4896377 - DNA, 25 bp, Homo sapien
gcaaatggcagtatgactattcaca

SEQ ID NO: 4896378 - DNA, 25 bp, Homo sapien
gaaaagagttaacccatacagagca

SEQ ID NO: 4896379 - DNA, 25 bp, Homo sapien
tctacactggcatggtcagaggaaa

SEQ ID NO: 4896380 - DNA, 25 bp, Homo sapien
taacatttccgtagagacacaagca

SEQ ID NO: 4896381 - DNA, 25 bp, Homo sapien
gactactgctgacaagattctggtg

SEQ ID NO: 4896382 - DNA, 25 bp, Homo sapien
actactgctgacaagattctggtgc

SEQ ID NO: 4896383 - DNA, 25 bp, Homo sapien
ctgactactgctgacaagattctgg

SEQ ID NO: 4896384 - DNA, 25 bp, Homo sapien
actgctgacaagattctggtgcacc

SEQ ID NO: 4896385 - DNA, 25 bp, Homo sapien
ggcatatggtccatcgtccatgatt

SEQ ID NO: 4896386 - DNA, 25 bp, Homo sapien
tgtgctcgcgtctgaactttagttc

SEQ ID NO: 4896387 - DNA, 25 bp, Homo sapien
tgtgaaaccattagcacgtagtctg

SEQ ID NO: 4896388 - DNA, 25 bp, Homo sapien
cgtctgatgagtacaaagtgcattc

SEQ ID NO: 4896389 - DNA, 25 bp, Homo sapien
cataggctgctactgaccttctgta

SEQ ID NO: 4896390 - DNA, 25 bp, Homo sapien
tcagtgtaaccagccctttgcggcg

SEQ ID NO: 4896391 - DNA, 25 bp, Homo sapien
tgaagtcttcgcagatgctcagtgc

SEQ ID NO: 4896392 - DNA, 25 bp, Homo sapien
gagttgcaacaccaacactagcacg

SEQ ID NO: 4896393 - DNA, 25 bp, Homo sapien
ggacttgctgcgatggccacaagga

SEQ ID NO: 4896394 - DNA, 25 bp, Homo sapien
tgctctgggacttgctgcgatggcc

SEQ ID NO: 4896395 - DNA, 25 bp, Homo sapien
acttgctgcgatggccacaaggacc

SEQ ID NO: 4896396 - DNA, 25 bp, Homo sapien
tctgggacttgctgcgatggccaca

SEQ ID NO: 4896397 - DNA, 25 bp, Homo sapien
catcaccccccagaaaggccccagt

SEQ ID NO: 4896398 - DNA, 25 bp, Homo sapien
cccctgccatcaccccccagaaagg

SEQ ID NO: 4896399 - DNA, 25 bp, Homo sapien
gttctgggacacaggcgcaggacat

SEQ ID NO: 4896400 - DNA, 25 bp, Homo sapien
ggacacaggcgcaggacatgcaggt

SEQ ID NO: 4896401 - DNA, 25 bp, Homo sapien
aacctgacaccctattaaccatatg

SEQ ID NO: 4896402 - DNA, 25 bp, Homo sapien
caacctgacaccctattaaccatat

SEQ ID NO: 4896403 - DNA, 25 bp, Homo sapien
tattaaccatatgcactcaaatcag

SEQ ID NO: 4896404 - DNA, 25 bp, Homo sapien
aaccatatgcactcaaatcaggcca

SEQ ID NO: 4896405 - DNA, 25 bp, Homo sapien
ggcttactcattggctccagaccca

SEQ ID NO: 4896406 - DNA, 25 bp, Homo sapien
ccatgattgtggactcttgggtagc

SEQ ID NO: 4896407 - DNA, 25 bp, Homo sapien
cacaactagggatgtaactgctgcc

SEQ ID NO: 4896408 - DNA, 25 bp, Homo sapien
aactgctgcctgttggtgagctgca

SEQ ID NO: 4896409 - DNA, 25 bp, Homo sapien
gacaggtgtcataaatgggccatcc

SEQ ID NO: 4896410 - DNA, 25 bp, Homo sapien
tgtcattacccctaacaagtgcagt

SEQ ID NO: 4896411 - DNA, 25 bp, Homo sapien
caagtgcagttgtctatggctctca

SEQ ID NO: 4896412 - DNA, 25 bp, Homo sapien
tattgcccaggtcaaattctctcag

SEQ ID NO: 4896413 - DNA, 25 bp, Homo sapien
tgattcaccttcatgtatcgagcac

SEQ ID NO: 4896414 - DNA, 25 bp, Homo sapien
gaggaccaactcagggtctgattca

SEQ ID NO: 4896415 - DNA, 25 bp, Homo sapien
gagcacttggacctgagtgtctcag

SEQ ID NO: 4896416 - DNA, 25 bp, Homo sapien
tctctagagcagagctccacaataa

SEQ ID NO: 4896417 - DNA, 25 bp, Homo sapien
cgtgggtggctctggaacctgtcca

SEQ ID NO: 4896418 - DNA, 25 bp, Homo sapien
tgtggaatgcccaatacaggttttg

SEQ ID NO: 4896419 - DNA, 25 bp, Homo sapien
tacaaatctgatttctcgaatctct

SEQ ID NO: 4896420 - DNA, 25 bp, Homo sapien
gaatctctatgataccccatgcggg

SEQ ID NO: 4896421 - DNA, 25 bp, Homo sapien
tccaaaacaaggttgccaatttcta

SEQ ID NO: 4896422 - DNA, 25 bp, Homo sapien
ttttccctttgggacgtgctctcca

SEQ ID NO: 4896423 - DNA, 25 bp, Homo sapien
cgtgctctccaagttcgcctttcta

SEQ ID NO: 4896424 - DNA, 25 bp, Homo sapien
ccaagttcgcctttctacatcttct

SEQ ID NO: 4896425 - DNA, 25 bp, Homo sapien
agaaattacattgactctttagatt

SEQ ID NO: 4896426 - DNA, 25 bp, Homo sapien
gtcatatatgatttccctcagcaat

SEQ ID NO: 4896427 - DNA, 25 bp, Homo sapien
cccaccatccacattagacagatca

SEQ ID NO: 4896428 - DNA, 25 bp, Homo sapien
gacatccacattaactctccacctc

SEQ ID NO: 4896429 - DNA, 25 bp, Homo sapien
ccatagtcggaaggaaagcactcct

SEQ ID NO: 4896430 - DNA, 25 bp, Homo sapien
gaacacaaattacaacaaatggtct

SEQ ID NO: 4896431 - DNA, 25 bp, Homo sapien
gcacagtcttggttcaccacaacct

SEQ ID NO: 4896432 - DNA, 25 bp, Homo sapien
gacctcaggttatctgtccccctca

SEQ ID NO: 4896433 - DNA, 25 bp, Homo sapien
acctcaggttatctgtccccctcag

SEQ ID NO: 4896434 - DNA, 25 bp, Homo sapien
atggcacagtcttggttcaccacaa

SEQ ID NO: 4896435 - DNA, 25 bp, Homo sapien
gagacggtatcttattgttgtttta

SEQ ID NO: 4896436 - DNA, 25 bp, Homo sapien
aacatttataccaagaacgatctag

SEQ ID NO: 4896437 - DNA, 25 bp, Homo sapien
tagatgtgcagcctttaaaattacg

SEQ ID NO: 4896438 - DNA, 25 bp, Homo sapien
ttttaaatgcgcacaatagcacata

SEQ ID NO: 4896439 - DNA, 25 bp, Homo sapien
acctcatcggcaaatttactatctg

SEQ ID NO: 4896440 - DNA, 25 bp, Homo sapien
taaaagttgcttcaagcgcaggctg

SEQ ID NO: 4896441 - DNA, 25 bp, Homo sapien
aactaaaatctacatcccggcggct

SEQ ID NO: 4896442 - DNA, 25 bp, Homo sapien
tctagcgatccggttacagaggctg

SEQ ID NO: 4896443 - DNA, 25 bp, Homo sapien
tctggctacgatctctggacacttg

SEQ ID NO: 4896444 - DNA, 25 bp, Homo sapien
ccgacgtgcagaaatgcaggcggcc

SEQ ID NO: 4896445 - DNA, 25 bp, Homo sapien
gtgcagaaatgcaggcggccctcac

SEQ ID NO: 4896446 - DNA, 25 bp, Homo sapien
gacgtgcagaaatgcaggcggccct

SEQ ID NO: 4896447 - DNA, 25 bp, Homo sapien
cggcgccgacgtgcagaaatgcagg

SEQ ID NO: 4896448 - DNA, 25 bp, Homo sapien
catggccttattaggtcagcgaggg

SEQ ID NO: 4896449 - DNA, 25 bp, Homo sapien
cgcgagcccgcgcttttatgtagct

SEQ ID NO: 4896450 - DNA, 25 bp, Homo sapien
ttccaagagcgggacagctgtcgag

SEQ ID NO: 4896451 - DNA, 25 bp, Homo sapien
gccgggtagaggaagccaatgaatt

SEQ ID NO: 4896452 - DNA, 25 bp, Homo sapien
ctccgtgctggacggctcctgcttt

SEQ ID NO: 4896453 - DNA, 25 bp, Homo sapien
cgtgctggacggctcctgctttctc

SEQ ID NO: 4896454 - DNA, 25 bp, Homo sapien
cttcctccgtgctggacggctcctg

SEQ ID NO: 4896455 - DNA, 25 bp, Homo sapien
tcctccgtgctggacggctcctgct

SEQ ID NO: 4896456 - DNA, 25 bp, Homo sapien
ttgtgactggcgtagccccactcct

SEQ ID NO: 4896457 - DNA, 25 bp, Homo sapien
cgttgtgactggcgtagccccactc

SEQ ID NO: 4896458 - DNA, 25 bp, Homo sapien
tgactggcgtagccccactccttgg

SEQ ID NO: 4896459 - DNA, 25 bp, Homo sapien
gtgactggcgtagccccactccttg

SEQ ID NO: 4896460 - DNA, 25 bp, Homo sapien
gaaaagttcatgccagtggtcagga

SEQ ID NO: 4896461 - DNA, 25 bp, Homo sapien
aaaagttcatgccagtggtcaggac

SEQ ID NO: 4896462 - DNA, 25 bp, Homo sapien
taagacacagaccatggctgcagag

SEQ ID NO: 4896463 - DNA, 25 bp, Homo sapien
gcagagaagggtcatgcctgatgtc

SEQ ID NO: 4896464 - DNA, 25 bp, Homo sapien
tatgcagctcaacgggcgactggtt

SEQ ID NO: 4896465 - DNA, 25 bp, Homo sapien
tcatcaaatacaactcggcaggtct

SEQ ID NO: 4896466 - DNA, 25 bp, Homo sapien
agtgaagatgaaactggcgaagtcg

SEQ ID NO: 4896467 - DNA, 25 bp, Homo sapien
gcgaagtcggtagggtccagggaga

SEQ ID NO: 4896468 - DNA, 25 bp, Homo sapien
tgatcatccgaagagccccagtgaa

SEQ ID NO: 4896469 - DNA, 25 bp, Homo sapien
gcatacttgactccatccacggtgt

SEQ ID NO: 4896470 - DNA, 25 bp, Homo sapien
ctgtctagcctagaatgttcagcag

SEQ ID NO: 4896471 - DNA, 25 bp, Homo sapien
tcagttcagctaaaactagtacagc

SEQ ID NO: 4896472 - DNA, 25 bp, Homo sapien
cagttttcactgtatgagaccgaga

SEQ ID NO: 4896473 - DNA, 25 bp, Homo sapien
ccgagaatggattatggcagttcct

SEQ ID NO: 4896474 - DNA, 25 bp, Homo sapien
aatgccaatcacagcgatcccatcg

SEQ ID NO: 4896475 - DNA, 25 bp, Homo sapien
tatacttcgggttccagtgaaccaa

SEQ ID NO: 4896476 - DNA, 25 bp, Homo sapien
cagaaaaatgccaatcacagcgatc

SEQ ID NO: 4896477 - DNA, 25 bp, Homo sapien
gatcccatcgcgctgcttcagggct

SEQ ID NO: 4896478 - DNA, 25 bp, Homo sapien
ttgtcttaatcttgtccaatgcatc

SEQ ID NO: 4896479 - DNA, 25 bp, Homo sapien
ctttgtcttaatcttgtccaatgca

SEQ ID NO: 4896480 - DNA, 25 bp, Homo sapien
caatgcatcaaggaaaatctggaac

SEQ ID NO: 4896481 - DNA, 25 bp, Homo sapien
ggaactcgccattctcatgtcctat

SEQ ID NO: 4896482 - DNA, 25 bp, Homo sapien
ggtcagagctcacggtcatgggctc

SEQ ID NO: 4896483 - DNA, 25 bp, Homo sapien
acacaatgcattcctcgcagggcgg

SEQ ID NO: 4896484 - DNA, 25 bp, Homo sapien
gaacaggcaggatgggtcaaacttt

SEQ ID NO: 4896485 - DNA, 25 bp, Homo sapien
ctggtaggtccagtagtcccggcat

SEQ ID NO: 4896486 - DNA, 25 bp, Homo sapien
cagacagcaacataagcccacgtgt

SEQ ID NO: 4896487 - DNA, 25 bp, Homo sapien
acagcaacataagcccacgtgttca

SEQ ID NO: 4896488 - DNA, 25 bp, Homo sapien
ataggcagacagcaacataagccca

SEQ ID NO: 4896489 - DNA, 25 bp, Homo sapien
ggcagacagcaacataagcccacgt

SEQ ID NO: 4896490 - DNA, 25 bp, Homo sapien
agaggaggctccgcagcttggccat

SEQ ID NO: 4896491 - DNA, 25 bp, Homo sapien
ccagttgctcacaagaggcactggg

SEQ ID NO: 4896492 - DNA, 25 bp, Homo sapien
tgtggaggtcgccagttgctcacaa

SEQ ID NO: 4896493 - DNA, 25 bp, Homo sapien
taggctgtggaggtcgccagttgct

SEQ ID NO: 4896494 - DNA, 25 bp, Homo sapien
gaggtcgccagttgctcacaagagg

SEQ ID NO: 4896495 - DNA, 25 bp, Homo sapien
ctgaagagggcaagatccagcagcc

SEQ ID NO: 4896496 - DNA, 25 bp, Homo sapien
agtgatcattcattccagcctccag

SEQ ID NO: 4896497 - DNA, 25 bp, Homo sapien
ataaatggccctccttcaggtaaag

SEQ ID NO: 4896498 - DNA, 25 bp, Homo sapien
ggaaccaagctctccaatggtaggt

SEQ ID NO: 4896499 - DNA, 25 bp, Homo sapien
aaaactggtgcccaatagctagcca

SEQ ID NO: 4896500 - DNA, 25 bp, Homo sapien
gctccacacctcctaatttcgaggg

SEQ ID NO: 4896501 - DNA, 25 bp, Homo sapien
taacacttccagttcacactgacca

SEQ ID NO: 4896502 - DNA, 25 bp, Homo sapien
taagtaagtaccttgagagaatcag

SEQ ID NO: 4896503 - DNA, 25 bp, Homo sapien
ttttcactaatgatcaaagctccac

SEQ ID NO: 4896504 - DNA, 25 bp, Homo sapien
caggtgacccagagccgtgttttgc

SEQ ID NO: 4896505 - DNA, 25 bp, Homo sapien
tatggcactgatatcactgttcgac

SEQ ID NO: 4896506 - DNA, 25 bp, Homo sapien
cattcaaaaagcgtctggagtccat

SEQ ID NO: 4896507 - DNA, 25 bp, Homo sapien
cactgtgcttgtgcccgataagccc

SEQ ID NO: 4896508 - DNA, 25 bp, Homo sapien
gaaaattgccactggctgtgaaccc

SEQ ID NO: 4896509 - DNA, 25 bp, Homo sapien
aatctatatgcatgaaaagatgtct

SEQ ID NO: 4896510 - DNA, 25 bp, Homo sapien
tttgcttctcgttagattgtatgtg

SEQ ID NO: 4896511 - DNA, 25 bp, Homo sapien
tgaactactcaaagttaagatttgg

SEQ ID NO: 4896512 - DNA, 25 bp, Homo sapien
gagatatggcgttgataggtgccaa

SEQ ID NO: 4896513 - DNA, 25 bp, Homo sapien
ttggccctggagatatggcgttgat

SEQ ID NO: 4896514 - DNA, 25 bp, Homo sapien
ttgtgaatgtagagtggcttcccgg

SEQ ID NO: 4896515 - DNA, 25 bp, Homo sapien
tttgtgaatgtagagtggcttcccg

SEQ ID NO: 4896516 - DNA, 25 bp, Homo sapien
ttacagggcctactgggtaagtgag

SEQ ID NO: 4896517 - DNA, 25 bp, Homo sapien
tctctgcaatctctgagggcaatag

SEQ ID NO: 4896518 - DNA, 25 bp, Homo sapien
ttaatgtgattgtgtcggccttgac

SEQ ID NO: 4896519 - DNA, 25 bp, Homo sapien
taaaagtattgtggacctgagacac

SEQ ID NO: 4896520 - DNA, 25 bp, Homo sapien
cagcgaagctcggagctctgggcgt

SEQ ID NO: 4896521 - DNA, 25 bp, Homo sapien
cgcggagcctctacgcgcaccccat

SEQ ID NO: 4896522 - DNA, 25 bp, Homo sapien
aagctcggagctctgggcgtgcggc

SEQ ID NO: 4896523 - DNA, 25 bp, Homo sapien
ccggctgcggagtctggcggcggcg

SEQ ID NO: 4896524 - DNA, 25 bp, Homo sapien
taggcgacaaggggaggtggtgacg

SEQ ID NO: 4896525 - DNA, 25 bp, Homo sapien
ctaggcgacaaggggaggtggtgac

SEQ ID NO: 4896526 - DNA, 25 bp, Homo sapien
cttttataggctcccgccaacttcg

SEQ ID NO: 4896527 - DNA, 25 bp, Homo sapien
caggaatcggcaccgatctggcggc

SEQ ID NO: 4896528 - DNA, 25 bp, Homo sapien
cgcctgcactgtgtgtccgcgggtc

SEQ ID NO: 4896529 - DNA, 25 bp, Homo sapien
tcgcgccggcaccagcttttatagg

SEQ ID NO: 4896530 - DNA, 25 bp, Homo sapien
ttgtgtttgccgtacccccagtgat

SEQ ID NO: 4896531 - DNA, 25 bp, Homo sapien
ttgccgtacccccagtgatgggaca

SEQ ID NO: 4896532 - DNA, 25 bp, Homo sapien
cgttgtgtttgccgtacccccagtg

SEQ ID NO: 4896533 - DNA, 25 bp, Homo sapien
gtgtttgccgtacccccagtgatgg

SEQ ID NO: 4896534 - DNA, 25 bp, Homo sapien
cgggccggcatccgggctcggggat

SEQ ID NO: 4896535 - DNA, 25 bp, Homo sapien
ccccgcgctggccgtcgccggcact

SEQ ID NO: 4896536 - DNA, 25 bp, Homo sapien
cgcgctggccgtcgccggcactcac

SEQ ID NO: 4896537 - DNA, 25 bp, Homo sapien
gccggcatccgggctcggggatcgg

SEQ ID NO: 4896538 - DNA, 25 bp, Homo sapien
gatgcgctaggtgcgccagacgcat

SEQ ID NO: 4896539 - DNA, 25 bp, Homo sapien
caaagatgcgctaggtgcgccagac

SEQ ID NO: 4896540 - DNA, 25 bp, Homo sapien
aggtgcgccagacgcatgctcctct

SEQ ID NO: 4896541 - DNA, 25 bp, Homo sapien
cacaccctccaaagatgcgctaggt

SEQ ID NO: 4896542 - DNA, 25 bp, Homo sapien
ctcagggaagttgcttgatcatagg

SEQ ID NO: 4896543 - DNA, 25 bp, Homo sapien
tccacgttgaaagcatgaccattgt

SEQ ID NO: 4896544 - DNA, 25 bp, Homo sapien
tgtatgagtgtcgatgtcaacaggg

SEQ ID NO: 4896545 - DNA, 25 bp, Homo sapien
tgagagtcatcaaactccacgttga

SEQ ID NO: 4896546 - DNA, 25 bp, Homo sapien
catagaagccaagggttttacaggg

SEQ ID NO: 4896547 - DNA, 25 bp, Homo sapien
tcacaggcatatcgcagttattcaa

SEQ ID NO: 4896548 - DNA, 25 bp, Homo sapien
caaagaaggcagctactatgtgtga

SEQ ID NO: 4896549 - DNA, 25 bp, Homo sapien
caattggtgcaaatctcatcgtgac

SEQ ID NO: 4896550 - DNA, 25 bp, Homo sapien
aatctttcatatgcaaaggagggca

SEQ ID NO: 4896551 - DNA, 25 bp, Homo sapien
ggactctcgtccaagacatcaaaat

SEQ ID NO: 4896552 - DNA, 25 bp, Homo sapien
gggcaagtcctttctgaccttgctt

SEQ ID NO: 4896553 - DNA, 25 bp, Homo sapien
tgaccttgcttttagtataccttct

SEQ ID NO: 4896554 - DNA, 25 bp, Homo sapien
ccaactggctgataataagaagcaa

SEQ ID NO: 4896555 - DNA, 25 bp, Homo sapien
tctttaaagctagcaaccaactggc

SEQ ID NO: 4896556 - DNA, 25 bp, Homo sapien
cccagtgaagaatcatagcaggatc

SEQ ID NO: 4896557 - DNA, 25 bp, Homo sapien
catactaagaatctgagataaccaa

SEQ ID NO: 4896558 - DNA, 25 bp, Homo sapien
tcctcacatgcgttgtctggagaat

SEQ ID NO: 4896559 - DNA, 25 bp, Homo sapien
cacatgcgttgtctggagaatggat

SEQ ID NO: 4896560 - DNA, 25 bp, Homo sapien
catgcgttgtctggagaatggatgt

SEQ ID NO: 4896561 - DNA, 25 bp, Homo sapien
ttattcctcacatgcgttgtctgga

SEQ ID NO: 4896562 - DNA, 25 bp, Homo sapien
ttttatccacagtatgctctgaacc

SEQ ID NO: 4896563 - DNA, 25 bp, Homo sapien
gtgaaccccagtgaaagtgaaactg

SEQ ID NO: 4896564 - DNA, 25 bp, Homo sapien
gaaccttgtccatcaagtgaacccc

SEQ ID NO: 4896565 - DNA, 25 bp, Homo sapien
aatcaatctgtaagtgccatccagg

SEQ ID NO: 4896566 - DNA, 25 bp, Homo sapien
gaacggccagtccatcaggttgctg

SEQ ID NO: 4896567 - DNA, 25 bp, Homo sapien
aaaatacctagaacggccagtccat

SEQ ID NO: 4896568 - DNA, 25 bp, Homo sapien
cagtccatcaggttgctgcacagct

SEQ ID NO: 4896569 - DNA, 25 bp, Homo sapien
ttgctgcacagctttcccaaaatcc

SEQ ID NO: 4896570 - DNA, 25 bp, Homo sapien
gggacaaaggcatttcctaagctct

SEQ ID NO: 4896571 - DNA, 25 bp, Homo sapien
tagagggcagctcaaccggttctgt

SEQ ID NO: 4896572 - DNA, 25 bp, Homo sapien
gcagtttctcaggattgctccctgg

SEQ ID NO: 4896573 - DNA, 25 bp, Homo sapien
ggttctgtcccactgttgcctgaaa

SEQ ID NO: 4896574 - DNA, 25 bp, Homo sapien
tccttgtaggactttacactatggt

SEQ ID NO: 4896575 - DNA, 25 bp, Homo sapien
agtgacctctaactgccaaaggata

SEQ ID NO: 4896576 - DNA, 25 bp, Homo sapien
taggactttacactatggtcttccc

SEQ ID NO: 4896577 - DNA, 25 bp, Homo sapien
tcctcaagggcttgccttgatttcc

SEQ ID NO: 4896578 - DNA, 25 bp, Homo sapien
tgaaggcccggtttagcgctgccaa

SEQ ID NO: 4896579 - DNA, 25 bp, Homo sapien
ttttaatggaatccagcacatcaac

SEQ ID NO: 4896580 - DNA, 25 bp, Homo sapien
gcacatcaacaactttctgaaggcc

SEQ ID NO: 4896581 - DNA, 25 bp, Homo sapien
tgttttaatggaatccagcacatca

SEQ ID NO: 4896582 - DNA, 25 bp, Homo sapien
catttcagaggatagatgctgcttc

SEQ ID NO: 4896583 - DNA, 25 bp, Homo sapien
ggctgcccctggtgataagttcccc

SEQ ID NO: 4896584 - DNA, 25 bp, Homo sapien
caagcaaacaggaatgatttactgg

SEQ ID NO: 4896585 - DNA, 25 bp, Homo sapien
gccactaaaatgaggtgacttcaag

SEQ ID NO: 4896586 - DNA, 25 bp, Homo sapien
gaagacattcaacttgaaaatatgt

SEQ ID NO: 4896587 - DNA, 25 bp, Homo sapien
aagaggttctatattcactggcaaa

SEQ ID NO: 4896588 - DNA, 25 bp, Homo sapien
aaaagaggttctatattcactggca

SEQ ID NO: 4896589 - DNA, 25 bp, Homo sapien
gaggttctatattcactggcaaaca

SEQ ID NO: 4896590 - DNA, 25 bp, Homo sapien
gaacaaggcaaatacgcagcttcaa

SEQ ID NO: 4896591 - DNA, 25 bp, Homo sapien
ggcaaatacgcagcttcaaactatc

SEQ ID NO: 4896592 - DNA, 25 bp, Homo sapien
gcttcaaactatcacattgacagag

SEQ ID NO: 4896593 - DNA, 25 bp, Homo sapien
tatcacattgacagagtaggaggaa

SEQ ID NO: 4896594 - DNA, 25 bp, Homo sapien
gacgctgatgggttccttgagcaca

SEQ ID NO: 4896595 - DNA, 25 bp, Homo sapien
ggccacgaggatcgaagttagtgaa

SEQ ID NO: 4896596 - DNA, 25 bp, Homo sapien
gcacaatccaggtcacacattccag

SEQ ID NO: 4896597 - DNA, 25 bp, Homo sapien
taggtccagtaatccaaggattcag

SEQ ID NO: 4896598 - DNA, 25 bp, Homo sapien
gatgaagtcaccaattggcaaggcc

SEQ ID NO: 4896599 - DNA, 25 bp, Homo sapien
aactcagggtacagggattaatgca

SEQ ID NO: 4896600 - DNA, 25 bp, Homo sapien
ctcagatagaggaggacctgcagcc

SEQ ID NO: 4896601 - DNA, 25 bp, Homo sapien
cattcccgggctagggactgagcaa

SEQ ID NO: 4896602 - DNA, 25 bp, Homo sapien
ttaaatacattccccggccaggcgc

SEQ ID NO: 4896603 - DNA, 25 bp, Homo sapien
tcttcgggttcaccctccccattga

SEQ ID NO: 4896604 - DNA, 25 bp, Homo sapien
tgagctgggcgccagttgtccacca

SEQ ID NO: 4896605 - DNA, 25 bp, Homo sapien
gcgccagttgtccaccatcagttct

SEQ ID NO: 4896606 - DNA, 25 bp, Homo sapien
agttgtccaccatcagttcttcggg

SEQ ID NO: 4896607 - DNA, 25 bp, Homo sapien
gaaaactagacacaaagcaaccagg

SEQ ID NO: 4896608 - DNA, 25 bp, Homo sapien
ctatcaagtaagagatgaagggtct

SEQ ID NO: 4896609 - DNA, 25 bp, Homo sapien
caaatcaccaaggtagatctgtgct

SEQ ID NO: 4896610 - DNA, 25 bp, Homo sapien
tgagtgctcatcaccctacatgctg

SEQ ID NO: 4896611 - DNA, 25 bp, Homo sapien
gttatgatatattgtctgaatggaa

SEQ ID NO: 4896612 - DNA, 25 bp, Homo sapien
catttatatctctgtaattcaaaag

SEQ ID NO: 4896613 - DNA, 25 bp, Homo sapien
ctctgtatcacaactctaattataa

SEQ ID NO: 4896614 - DNA, 25 bp, Homo sapien
tctgaatggaaatatactctgtatc

SEQ ID NO: 4896615 - DNA, 25 bp, Homo sapien
ttctgaattttattagagaatatat

SEQ ID NO: 4896616 - DNA, 25 bp, Homo sapien
tgcccattgcctaagaagcctgaat

SEQ ID NO: 4896617 - DNA, 25 bp, Homo sapien
tctcttgggaatgctacggccctgc

SEQ ID NO: 4896618 - DNA, 25 bp, Homo sapien
tgtccccagggcgagtttgcagcat

SEQ ID NO: 4896619 - DNA, 25 bp, Homo sapien
tgtacccaccctgttaactgaagac

SEQ ID NO: 4896620 - DNA, 25 bp, Homo sapien
tctgggcatctctacttgaaaaaca

SEQ ID NO: 4896621 - DNA, 25 bp, Homo sapien
agttgagattctcccacaagtccca

SEQ ID NO: 4896622 - DNA, 25 bp, Homo sapien
gtccagtcgcaagccaacagttgag

SEQ ID NO: 4896623 - DNA, 25 bp, Homo sapien
gcaggctcctgttagctgaggactc

SEQ ID NO: 4896624 - DNA, 25 bp, Homo sapien
ctgccagaactttccaagcatgcag

SEQ ID NO: 4896625 - DNA, 25 bp, Homo sapien
agaactttccaagcatgcagacttg

SEQ ID NO: 4896626 - DNA, 25 bp, Homo sapien
ccagaactttccaagcatgcagact

SEQ ID NO: 4896627 - DNA, 25 bp, Homo sapien
ctttccaagcatgcagacttgaatt

SEQ ID NO: 4896628 - DNA, 25 bp, Homo sapien
gaagagatgaatcagtaaatcctgc

SEQ ID NO: 4896629 - DNA, 25 bp, Homo sapien
tgttggaagagatgaatcagtaaat

SEQ ID NO: 4896630 - DNA, 25 bp, Homo sapien
gctatatggttagaaggtgatgttg

SEQ ID NO: 4896631 - DNA, 25 bp, Homo sapien
gagatgaatcagtaaatcctgcttc

SEQ ID NO: 4896632 - DNA, 25 bp, Homo sapien
aagactttactgcaactggctcccg

SEQ ID NO: 4896633 - DNA, 25 bp, Homo sapien
gaagctactaagtgagccagagccc

SEQ ID NO: 4896634 - DNA, 25 bp, Homo sapien
aaaggctgctgctcggtgacatctc

SEQ ID NO: 4896635 - DNA, 25 bp, Homo sapien
tgtgagagtccaacggcaaagaagc

SEQ ID NO: 4896636 - DNA, 25 bp, Homo sapien
ccagacataatattcgtggaccaca

SEQ ID NO: 4896637 - DNA, 25 bp, Homo sapien
agacataatattcgtggaccacaac

SEQ ID NO: 4896638 - DNA, 25 bp, Homo sapien
cagacataatattcgtggaccacaa

SEQ ID NO: 4896639 - DNA, 25 bp, Homo sapien
gacaacgtttccaaactcgcttgaa

SEQ ID NO: 4896640 - DNA, 25 bp, Homo sapien
cactttctcgtgttccttcagctgt

SEQ ID NO: 4896641 - DNA, 25 bp, Homo sapien
tttctgttgtgggtctctgacaacg

SEQ ID NO: 4896642 - DNA, 25 bp, Homo sapien
gactttgtctttagatggaactccc

SEQ ID NO: 4896643 - DNA, 25 bp, Homo sapien
cagaagagattagcacaagggaggc

SEQ ID NO: 4896644 - DNA, 25 bp, Homo sapien
gtcagaagagattagcacaagggag

SEQ ID NO: 4896645 - DNA, 25 bp, Homo sapien
ttctaagaggaatctcaaagggctc

SEQ ID NO: 4896646 - DNA, 25 bp, Homo sapien
tggcagtgtggttctaagaggaatc

SEQ ID NO: 4896647 - DNA, 25 bp, Homo sapien
cgtcgctcagttcaaaatattgctt

SEQ ID NO: 4896648 - DNA, 25 bp, Homo sapien
ccccagaagaatatttaggagtcat

SEQ ID NO: 4896649 - DNA, 25 bp, Homo sapien
tcaaaatattgcttttccccagaag

SEQ ID NO: 4896650 - DNA, 25 bp, Homo sapien
tgcttttccccagaagaatatttag

SEQ ID NO: 4896651 - DNA, 25 bp, Homo sapien
cagagttgacattccatgagactga

SEQ ID NO: 4896652 - DNA, 25 bp, Homo sapien
tcatctacccaagtcaggatttacg

SEQ ID NO: 4896653 - DNA, 25 bp, Homo sapien
tgagactgagtataacacatcccgt

SEQ ID NO: 4896654 - DNA, 25 bp, Homo sapien
tacaagtaactcagatgtgttccgt

SEQ ID NO: 4896655 - DNA, 25 bp, Homo sapien
ggaagagaacagatggaccattact

SEQ ID NO: 4896656 - DNA, 25 bp, Homo sapien
tcagcctgcttccatagtagaaaac

SEQ ID NO: 4896657 - DNA, 25 bp, Homo sapien
attcagcatctaccagggcagccgt

SEQ ID NO: 4896658 - DNA, 25 bp, Homo sapien
attactggccacaggagggtgatca

SEQ ID NO: 4896659 - DNA, 25 bp, Homo sapien
tgagctcaggttccaatccagattt

SEQ ID NO: 4896660 - DNA, 25 bp, Homo sapien
tccttcactggccagtaggggcaca

SEQ ID NO: 4896661 - DNA, 25 bp, Homo sapien
cagttcagttgagtaacttgttcaa

SEQ ID NO: 4896662 - DNA, 25 bp, Homo sapien
cactggccagtaggggcacatctcc

SEQ ID NO: 4896663 - DNA, 25 bp, Homo sapien
gcaccaccatagtggatattgggtt

SEQ ID NO: 4896664 - DNA, 25 bp, Homo sapien
tagacatcaataagcatctgtaatg

SEQ ID NO: 4896665 - DNA, 25 bp, Homo sapien
tctgtaatgtcacaatgctgtcatt

SEQ ID NO: 4896666 - DNA, 25 bp, Homo sapien
gaacaatagtgtttgctctctcatc

SEQ ID NO: 4896667 - DNA, 25 bp, Homo sapien
taacatgagtcacttccgaggctct

SEQ ID NO: 4896668 - DNA, 25 bp, Homo sapien
cactggcaaaccctaggtggatctt

SEQ ID NO: 4896669 - DNA, 25 bp, Homo sapien
tcagctgtcgcagcatttctagagc

SEQ ID NO: 4896670 - DNA, 25 bp, Homo sapien
tgcagagtggagctccgtctttctc

SEQ ID NO: 4896671 - DNA, 25 bp, Homo sapien
ctcctcctgtgttaatggaaacttc

SEQ ID NO: 4896672 - DNA, 25 bp, Homo sapien
tcctcctgtgttaatggaaacttct

SEQ ID NO: 4896673 - DNA, 25 bp, Homo sapien
ttctcctcctgtgttaatggaaact

SEQ ID NO: 4896674 - DNA, 25 bp, Homo sapien
tctcctcctgtgttaatggaaactt

SEQ ID NO: 4896675 - DNA, 25 bp, Homo sapien
tggcagacctagttatataagaaag

SEQ ID NO: 4896676 - DNA, 25 bp, Homo sapien
tcgctagaatggcagacctagttat

SEQ ID NO: 4896677 - DNA, 25 bp, Homo sapien
tatccccactcgctagaatggcaga

SEQ ID NO: 4896678 - DNA, 25 bp, Homo sapien
ttaatatcagagccatctgctccaa

SEQ ID NO: 4896679 - DNA, 25 bp, Homo sapien
cggttttaattgctgagtacggtag

SEQ ID NO: 4896680 - DNA, 25 bp, Homo sapien
tgttcggttttaattgctgagtacg

SEQ ID NO: 4896681 - DNA, 25 bp, Homo sapien
ctgagtacggtagcctccggtaata

SEQ ID NO: 4896682 - DNA, 25 bp, Homo sapien
taattgctgagtacggtagcctccg

SEQ ID NO: 4896683 - DNA, 25 bp, Homo sapien
ttcaatctccccaacaatatactca

SEQ ID NO: 4896684 - DNA, 25 bp, Homo sapien
atactcatacaaagtaggaatctgc

SEQ ID NO: 4896685 - DNA, 25 bp, Homo sapien
tcatacaaagtaggaatctgctctt

SEQ ID NO: 4896686 - DNA, 25 bp, Homo sapien
tccccaacaatatactcatacaaag

SEQ ID NO: 4896687 - DNA, 25 bp, Homo sapien
cagtaggaatacatttctggcaaga

SEQ ID NO: 4896688 - DNA, 25 bp, Homo sapien
tctcttatggagacgggagtttctg

SEQ ID NO: 4896689 - DNA, 25 bp, Homo sapien
catggacggcaactatataaactgt

SEQ ID NO: 4896690 - DNA, 25 bp, Homo sapien
tctggcaagatgtttctgggacata

SEQ ID NO: 4896691 - DNA, 25 bp, Homo sapien
gatgtcttattgctgcatggattct

SEQ ID NO: 4896692 - DNA, 25 bp, Homo sapien
gcagctgctgtcagatgtcttattg

SEQ ID NO: 4896693 - DNA, 25 bp, Homo sapien
tgtcagatgtcttattgctgcatgg

SEQ ID NO: 4896694 - DNA, 25 bp, Homo sapien
ctttgtatgtgggtggatagagggc

SEQ ID NO: 4896695 - DNA, 25 bp, Homo sapien
cctgtatgggtgaaggttgtatagt

SEQ ID NO: 4896696 - DNA, 25 bp, Homo sapien
ccctgtatgggtgaaggttgtatag

SEQ ID NO: 4896697 - DNA, 25 bp, Homo sapien
taccacctccacttgccttatattt

SEQ ID NO: 4896698 - DNA, 25 bp, Homo sapien
gcccataccacctccacttgcctta

SEQ ID NO: 4896699 - DNA, 25 bp, Homo sapien
ggccgtgctcttcccgcactacctg

SEQ ID NO: 4896700 - DNA, 25 bp, Homo sapien
ctggagagcgacctgctggccctga

SEQ ID NO: 4896701 - DNA, 25 bp, Homo sapien
ctcatccacagcaccgtggtggaca

SEQ ID NO: 4896702 - DNA, 25 bp, Homo sapien
agcctggagagcgacctgctggccc

SEQ ID NO: 4896703 - DNA, 25 bp, Homo sapien
tactttgcagctaaaacagaacgaa

SEQ ID NO: 4896704 - DNA, 25 bp, Homo sapien
tatagtacgttcatccttacggaag

SEQ ID NO: 4896705 - DNA, 25 bp, Homo sapien
ttaactgggaatgacgttcaagact

SEQ ID NO: 4896706 - DNA, 25 bp, Homo sapien
tagaggcatgtaccggcatgtccgg

SEQ ID NO: 4896707 - DNA, 25 bp, Homo sapien
gtgtaccatcctctaggctcattcg

SEQ ID NO: 4896708 - DNA, 25 bp, Homo sapien
gctttctttcactcagtgtaccatc

SEQ ID NO: 4896709 - DNA, 25 bp, Homo sapien
taaggctgaattgtgttctattggg

SEQ ID NO: 4896710 - DNA, 25 bp, Homo sapien
tcgtgttgccaatgagatgatttct

SEQ ID NO: 4896711 - DNA, 25 bp, Homo sapien
tccaactaacaagggatgcgatgtg

SEQ ID NO: 4896712 - DNA, 25 bp, Homo sapien
tgcgatgtgcgaaggacctcttcaa

SEQ ID NO: 4896713 - DNA, 25 bp, Homo sapien
aagggcccccactgccaagataatc

SEQ ID NO: 4896714 - DNA, 25 bp, Homo sapien
caaacagcatgctgttggttgcctt

SEQ ID NO: 4896715 - DNA, 25 bp, Homo sapien
agcatcacgttgccccaagtccaag

SEQ ID NO: 4896716 - DNA, 25 bp, Homo sapien
tgcgcgccaggatgtggactactga

SEQ ID NO: 4896717 - DNA, 25 bp, Homo sapien
taagctgctgaacaagtagggctgc

SEQ ID NO: 4896718 - DNA, 25 bp, Homo sapien
gaagacatgctcaccggacaagggt

SEQ ID NO: 4896719 - DNA, 25 bp, Homo sapien
gctgccagaaatgtcccactaggga

SEQ ID NO: 4896720 - DNA, 25 bp, Homo sapien
agcatcacgttgccccaagtccaag

SEQ ID NO: 4896721 - DNA, 25 bp, Homo sapien
tgtccaaacaaggcaaggagacttt

SEQ ID NO: 4896722 - DNA, 25 bp, Homo sapien
gtccaaacaaggcaaggagactttc

SEQ ID NO: 4896723 - DNA, 25 bp, Homo sapien
gtctgtccggcacagcagctccctc

SEQ ID NO: 4896724 - DNA, 25 bp, Homo sapien
ttaaacgagtctaccagtgtctaga

SEQ ID NO: 4896725 - DNA, 25 bp, Homo sapien
tttcagagacgccatagctgttttt

SEQ ID NO: 4896726 - DNA, 25 bp, Homo sapien
tgtgcttttcagagacgccatagct

SEQ ID NO: 4896727 - DNA, 25 bp, Homo sapien
cacgttgtgcttttcagagacgcca

SEQ ID NO: 4896728 - DNA, 25 bp, Homo sapien
tagcacgttgtgcttttcagagacg

SEQ ID NO: 4896729 - DNA, 25 bp, Homo sapien
tgaaacctttgagtgcccgtagcgg

SEQ ID NO: 4896730 - DNA, 25 bp, Homo sapien
catatatactctctgtgcctaccgc

SEQ ID NO: 4896731 - DNA, 25 bp, Homo sapien
cagggaaggaggatgtaattccatc

SEQ ID NO: 4896732 - DNA, 25 bp, Homo sapien
gcatttggaaccatgcgagtgatac

SEQ ID NO: 4896733 - DNA, 25 bp, Homo sapien
gctttctttcactcagtgtaccatc

SEQ ID NO: 4896734 - DNA, 25 bp, Homo sapien
taaggctgaattgtgttctattggg

SEQ ID NO: 4896735 - DNA, 25 bp, Homo sapien
gtgtaccatcctctaggctcattcg

SEQ ID NO: 4896736 - DNA, 25 bp, Homo sapien
tcgtgttgccaatgagatgatttct

SEQ ID NO: 4896737 - DNA, 25 bp, Homo sapien
agcatcacgttgccccaagtccaag

SEQ ID NO: 4896738 - DNA, 25 bp, Homo sapien
ttaactgggaatgacgttcaagact

SEQ ID NO: 4896739 - DNA, 25 bp, Homo sapien
tatagtacgttcatccttacggaag

SEQ ID NO: 4896740 - DNA, 25 bp, Homo sapien
tactttgcagctaaaacagaacgaa

SEQ ID NO: 4896741 - DNA, 25 bp, Homo sapien
tagaggcatgtaccggcatgtccgg

SEQ ID NO: 4896742 - DNA, 25 bp, Homo sapien
gtgtaccatcctctaggctcattcg

SEQ ID NO: 4896743 - DNA, 25 bp, Homo sapien
gctttctttcactcagtgtaccatc

SEQ ID NO: 4896744 - DNA, 25 bp, Homo sapien
taaggctgaattgtgttctattggg

SEQ ID NO: 4896745 - DNA, 25 bp, Homo sapien
tcgtgttgccaatgagatgatttct

SEQ ID NO: 4896746 - DNA, 25 bp, Homo sapien
agcatcacgttgccccaagtccaag

SEQ ID NO: 4896747 - DNA, 25 bp, Homo sapien
tgcgcgccaggatgtggactactga

SEQ ID NO: 4896748 - DNA, 25 bp, Homo sapien
gaagacatgctcaccggacaagggt

SEQ ID NO: 4896749 - DNA, 25 bp, Homo sapien
taagctgctgaacaagtagggctgc

SEQ ID NO: 4896750 - DNA, 25 bp, Homo sapien
gctgccagaaatgtcccactaggga

SEQ ID NO: 4896751 - DNA, 25 bp, Homo sapien
gctttctttcactcagtgtaccatc

SEQ ID NO: 4896752 - DNA, 25 bp, Homo sapien
tcgtgttgccaatgagatgatttct

SEQ ID NO: 4896753 - DNA, 25 bp, Homo sapien
taaggctgaattgtgttctattggg

SEQ ID NO: 4896754 - DNA, 25 bp, Homo sapien
gtgtaccatcctctaggctcattcg

SEQ ID NO: 4896755 - DNA, 25 bp, Homo sapien
agcatcacgttgccccaagtccaag

SEQ ID NO: 4896756 - DNA, 25 bp, Homo sapien
ttaactgggaatgacgttcaagact

SEQ ID NO: 4896757 - DNA, 25 bp, Homo sapien
tactttgcagctaaaacagaacgaa

SEQ ID NO: 4896758 - DNA, 25 bp, Homo sapien
tatagtacgttcatccttacggaag

SEQ ID NO: 4896759 - DNA, 25 bp, Homo sapien
tagaggcatgtaccggcatgtccgg

SEQ ID NO: 4896760 - DNA, 25 bp, Homo sapien
gtgtaccatcctctaggctcattcg

SEQ ID NO: 4896761 - DNA, 25 bp, Homo sapien
tcgtgttgccaatgagatgatttct

SEQ ID NO: 4896762 - DNA, 25 bp, Homo sapien
gctttctttcactcagtgtaccatc

SEQ ID NO: 4896763 - DNA, 25 bp, Homo sapien
taaggctgaattgtgttctattggg

SEQ ID NO: 4896764 - DNA, 25 bp, Homo sapien
agcatcacgttgccccaagtccaag

SEQ ID NO: 4896765 - DNA, 25 bp, Homo sapien
ttaactgggaatgacgttcaagact

SEQ ID NO: 4896766 - DNA, 25 bp, Homo sapien
tactttgcagctaaaacagaacgaa

SEQ ID NO: 4896767 - DNA, 25 bp, Homo sapien
tagaggcatgtaccggcatgtccgg

SEQ ID NO: 4896768 - DNA, 25 bp, Homo sapien
tatagtacgttcatccttacggaag

SEQ ID NO: 4896769 - DNA, 25 bp, Homo sapien
tcgtgttgccaatgagatgatttct

SEQ ID NO: 4896770 - DNA, 25 bp, Homo sapien
taaggctgaattgtgttctattggg

SEQ ID NO: 4896771 - DNA, 25 bp, Homo sapien
gctttctttcactcagtgtaccatc

SEQ ID NO: 4896772 - DNA, 25 bp, Homo sapien
gtgtaccatcctctaggctcattcg

SEQ ID NO: 4896773 - DNA, 25 bp, Homo sapien
ctggagagcgacctgctggccctga

SEQ ID NO: 4896774 - DNA, 25 bp, Homo sapien
ctcatccacagcaccgtggtggaca

SEQ ID NO: 4896775 - DNA, 25 bp, Homo sapien
ggccgtgctcttcccgcactacctg

SEQ ID NO: 4896776 - DNA, 25 bp, Homo sapien
agcctggagagcgacctgctggccc

SEQ ID NO: 4896777 - DNA, 25 bp, Homo sapien
tgttacagagcttcccaatacagga

SEQ ID NO: 4896778 - DNA, 25 bp, Homo sapien
tgtgtaacctctaacaaccccatcg

SEQ ID NO: 4896779 - DNA, 25 bp, Homo sapien
ggcccagtgatttatctgccactcg

SEQ ID NO: 4896780 - DNA, 25 bp, Homo sapien
tcagagatgataaaatctggcccag

SEQ ID NO: 4896781 - DNA, 25 bp, Homo sapien
gcagctgggggcacattccaatttt

SEQ ID NO: 4896782 - DNA, 25 bp, Homo sapien
agctgggggcacattccaatttttt

SEQ ID NO: 4896783 - DNA, 25 bp, Homo sapien
cagctgggggcacattccaattttt

SEQ ID NO: 4896784 - DNA, 25 bp, Homo sapien
cttgaaataccacaagaaaacatga

SEQ ID NO: 4896785 - DNA, 25 bp, Homo sapien
gaacacatagttcagtttctcaact

SEQ ID NO: 4896786 - DNA, 25 bp, Homo sapien
tgaacacatagttcagtttctcaac

SEQ ID NO: 4896787 - DNA, 25 bp, Homo sapien
ggaggataatctgactctcaggacc

SEQ ID NO: 4896788 - DNA, 25 bp, Homo sapien
ggaagaaatcacaccccagacaaca

SEQ ID NO: 4896789 - DNA, 25 bp, Homo sapien
tgcaccatgataagaggagaggatc

SEQ ID NO: 4896790 - DNA, 25 bp, Homo sapien
ccagacaacagccttgaggtgggaa

SEQ ID NO: 4896791 - DNA, 25 bp, Homo sapien
ccatattggttcctttgataaacag

SEQ ID NO: 4896792 - DNA, 25 bp, Homo sapien
gaactttaggaaattgcacctcaag

SEQ ID NO: 4896793 - DNA, 25 bp, Homo sapien
catcttcccttcaaagcaatgtttt

SEQ ID NO: 4896794 - DNA, 25 bp, Homo sapien
tgtagtttactaggggatccatcca

SEQ ID NO: 4896795 - DNA, 25 bp, Homo sapien
ctctataattgagatcaaagctagc

SEQ ID NO: 4896796 - DNA, 25 bp, Homo sapien
tctagaagcttttgatcctaattta

SEQ ID NO: 4896797 - DNA, 25 bp, Homo sapien
cataaataactctataattgagatc

SEQ ID NO: 4896798 - DNA, 25 bp, Homo sapien
gatcaaagctagcattgaagctgtc

SEQ ID NO: 4896799 - DNA, 25 bp, Homo sapien
tatgaggataagctggccctttgaa

SEQ ID NO: 4896800 - DNA, 25 bp, Homo sapien
catatattctttccggcttgggagc

SEQ ID NO: 4896801 - DNA, 25 bp, Homo sapien
gttcaataatgcttggacccaggta

SEQ ID NO: 4896802 - DNA, 25 bp, Homo sapien
tgttatagagaatttgaccaagccc

SEQ ID NO: 4896803 - DNA, 25 bp, Homo sapien
agtaactgacttcaatttctgcata

SEQ ID NO: 4896804 - DNA, 25 bp, Homo sapien
aagtaactgacttcaatttctgcat

SEQ ID NO: 4896805 - DNA, 25 bp, Homo sapien
acataccacgagttctaaatggctg

SEQ ID NO: 4896806 - DNA, 25 bp, Homo sapien
cccacatggacataccacgagttct

SEQ ID NO: 4896807 - DNA, 25 bp, Homo sapien
tggacataccacgagttctaaatgg

SEQ ID NO: 4896808 - DNA, 25 bp, Homo sapien
cacatggacataccacgagttctaa

SEQ ID NO: 4896809 - DNA, 25 bp, Homo sapien
ccagctgtgagtagactaccctgat

SEQ ID NO: 4896810 - DNA, 25 bp, Homo sapien
tgtcactacttaggctgagtccagc

SEQ ID NO: 4896811 - DNA, 25 bp, Homo sapien
gagtagactaccctgatgctgtctg

SEQ ID NO: 4896812 - DNA, 25 bp, Homo sapien
ctcttgtcactacttaggctgagtc

SEQ ID NO: 4896813 - DNA, 25 bp, Homo sapien
tctcaacaagcaggcaagtattccc

SEQ ID NO: 4896814 - DNA, 25 bp, Homo sapien
caacaccagctgaactcaatgtgat

SEQ ID NO: 4896815 - DNA, 25 bp, Homo sapien
aagtattccctgtagtttgatgacc

SEQ ID NO: 4896816 - DNA, 25 bp, Homo sapien
caatgtgatgatctcaacaagcagg

SEQ ID NO: 4896817 - DNA, 25 bp, Homo sapien
tctcctgagtgtggaatggctctgt

SEQ ID NO: 4896818 - DNA, 25 bp, Homo sapien
catgagaacacccatggtggctcta

SEQ ID NO: 4896819 - DNA, 25 bp, Homo sapien
gtcagcaccgtcatccttgagaatg

SEQ ID NO: 4896820 - DNA, 25 bp, Homo sapien
tgataattggtgaatgctctcctga

SEQ ID NO: 4896821 - DNA, 25 bp, Homo sapien
tggacacgctgtcaaattgttaaga

SEQ ID NO: 4896822 - DNA, 25 bp, Homo sapien
tcaacttacctcttgttagattcat

SEQ ID NO: 4896823 - DNA, 25 bp, Homo sapien
ttaagggcctaattctattgaagac

SEQ ID NO: 4896824 - DNA, 25 bp, Homo sapien
tttaggcgcaatgttctggacacgc

SEQ ID NO: 4896825 - DNA, 25 bp, Homo sapien
tgctgggtgcagaactatagtaggt

SEQ ID NO: 4896826 - DNA, 25 bp, Homo sapien
tacaaagcagcctaagcagaagcac

SEQ ID NO: 4896827 - DNA, 25 bp, Homo sapien
tcacattatcgaaggtttgctgggt

SEQ ID NO: 4896828 - DNA, 25 bp, Homo sapien
gaaatgctggtatggtgaacccatg

SEQ ID NO: 4896829 - DNA, 25 bp, Homo sapien
tgtgctctgcgcttctcatctccac

SEQ ID NO: 4896830 - DNA, 25 bp, Homo sapien
ctccactgtgctctgcgcttctcat

SEQ ID NO: 4896831 - DNA, 25 bp, Homo sapien
aggccaagcttcatcagtttcccat

SEQ ID NO: 4896832 - DNA, 25 bp, Homo sapien
tctgcgcttctcatctccaccgttt

SEQ ID NO: 4896833 - DNA, 25 bp, Homo sapien
ccatgggactgtcaattctatctat

SEQ ID NO: 4896834 - DNA, 25 bp, Homo sapien
gttgagtcataagtaggctccagtg

SEQ ID NO: 4896835 - DNA, 25 bp, Homo sapien
cagtggcccatgttgaccctttgaa

SEQ ID NO: 4896836 - DNA, 25 bp, Homo sapien
gctccagtggcccatgttgaccctt

SEQ ID NO: 4896837 - DNA, 25 bp, Homo sapien
tctgtataatcaagtcccctagctg

SEQ ID NO: 4896838 - DNA, 25 bp, Homo sapien
tgatagtgaataccctcaagtaaac

SEQ ID NO: 4896839 - DNA, 25 bp, Homo sapien
tcagtcgttctattcaattgtgtac

SEQ ID NO: 4896840 - DNA, 25 bp, Homo sapien
catcagaaaatctataactctcatt

SEQ ID NO: 4896841 - DNA, 25 bp, Homo sapien
tttttcacctgcagccaataccatg

SEQ ID NO: 4896842 - DNA, 25 bp, Homo sapien
acagtcttctttgtatcttgctgtt

SEQ ID NO: 4896843 - DNA, 25 bp, Homo sapien
gccaataccatgttgccacacacag

SEQ ID NO: 4896844 - DNA, 25 bp, Homo sapien
gtatcttgctgtttgattatgtcaa

SEQ ID NO: 4896845 - DNA, 25 bp, Homo sapien
ctggcccactgatctagctctttca

SEQ ID NO: 4896846 - DNA, 25 bp, Homo sapien
tggcccactgatctagctctttcac

SEQ ID NO: 4896847 - DNA, 25 bp, Homo sapien
cactgacaggtgatctggtcctcct

SEQ ID NO: 4896848 - DNA, 25 bp, Homo sapien
taagtcagcagggttacagcctcca

SEQ ID NO: 4896849 - DNA, 25 bp, Homo sapien
catctcaagagtgaccaaggagcac

SEQ ID NO: 4896850 - DNA, 25 bp, Homo sapien
gcaggattattctttatgaggccac

SEQ ID NO: 4896851 - DNA, 25 bp, Homo sapien
ctatcaccacggaaagaaagaggcc

SEQ ID NO: 4896852 - DNA, 25 bp, Homo sapien
tatcaccacggaaagaaagaggccg

SEQ ID NO: 4896853 - DNA, 25 bp, Homo sapien
acagaagtatatagcacctttttac

SEQ ID NO: 4896854 - DNA, 25 bp, Homo sapien
agaggccgggccagaaacagaagta

SEQ ID NO: 4896855 - DNA, 25 bp, Homo sapien
ttggcctttttcgggataatcagct

SEQ ID NO: 4896856 - DNA, 25 bp, Homo sapien
ggcctttttcgggataatcagctta

SEQ ID NO: 4896857 - DNA, 25 bp, Homo sapien
tggcctttttcgggataatcagctt

SEQ ID NO: 4896858 - DNA, 25 bp, Homo sapien
agccttagacgtgcagttgggctca

SEQ ID NO: 4896859 - DNA, 25 bp, Homo sapien
tatctactcccagttcaaaacgcat

SEQ ID NO: 4896860 - DNA, 25 bp, Homo sapien
tctgttaatagccttagacgtgcag

SEQ ID NO: 4896861 - DNA, 25 bp, Homo sapien
ttcaaaacgcatctgttaatagcct

SEQ ID NO: 4896862 - DNA, 25 bp, Homo sapien
ccacaatgcctctccacaatgtctc

SEQ ID NO: 4896863 - DNA, 25 bp, Homo sapien
agccctgtcctctacctccacaatg

SEQ ID NO: 4896864 - DNA, 25 bp, Homo sapien
gcttcaatttcatcaccaagccctg

SEQ ID NO: 4896865 - DNA, 25 bp, Homo sapien
atgtcccgtctgtccctttctgctt

SEQ ID NO: 4896866 - DNA, 25 bp, Homo sapien
cacattgtcacttgttaaagggtct

SEQ ID NO: 4896867 - DNA, 25 bp, Homo sapien
tgtaggactttttccgttcatataa

SEQ ID NO: 4896868 - DNA, 25 bp, Homo sapien
cccatgtcctctagggttctaagga

SEQ ID NO: 4896869 - DNA, 25 bp, Homo sapien
taagctatgagtggaggtggcacat

SEQ ID NO: 4896870 - DNA, 25 bp, Homo sapien
caaggcagaggacccgggactggga

SEQ ID NO: 4896871 - DNA, 25 bp, Homo sapien
aagcgggagacactaacagctgagg

SEQ ID NO: 4896872 - DNA, 25 bp, Homo sapien
tctccattggcactcgcagacaaag

SEQ ID NO: 4896873 - DNA, 25 bp, Homo sapien
tgggactggcatatttccaagagat

SEQ ID NO: 4896874 - DNA, 25 bp, Homo sapien
ggctgggctgacaacctgtgccaca

SEQ ID NO: 4896875 - DNA, 25 bp, Homo sapien
gccacacacacgctggacagaagct

SEQ ID NO: 4896876 - DNA, 25 bp, Homo sapien
gcatatccttggatgccaccaggat

SEQ ID NO: 4896877 - DNA, 25 bp, Homo sapien
ctgtgccacacacacgctggacaga

SEQ ID NO: 4896878 - DNA, 25 bp, Homo sapien
tgattccaggtcctacacgtgacat

SEQ ID NO: 4896879 - DNA, 25 bp, Homo sapien
cagcagtgattccaggtcctacacg

SEQ ID NO: 4896880 - DNA, 25 bp, Homo sapien
ttccaggtcctacacgtgacattac

SEQ ID NO: 4896881 - DNA, 25 bp, Homo sapien
tgcacagcagtgattccaggtccta

SEQ ID NO: 4896882 - DNA, 25 bp, Homo sapien
ggatggagctccatgtttgtctgga

SEQ ID NO: 4896883 - DNA, 25 bp, Homo sapien
taatgtccctcaatgtcggccagtg

SEQ ID NO: 4896884 - DNA, 25 bp, Homo sapien
tcccagggaggatgtacaatgtaat

SEQ ID NO: 4896885 - DNA, 25 bp, Homo sapien
gcaatcagcaacatcctcgtagtaa

SEQ ID NO: 4896886 - DNA, 25 bp, Homo sapien
tgagaacggccatgatgccatggag

SEQ ID NO: 4896887 - DNA, 25 bp, Homo sapien
gggatctgagaacggccatgatgcc

SEQ ID NO: 4896888 - DNA, 25 bp, Homo sapien
tcatgagggatctgagaacggccat

SEQ ID NO: 4896889 - DNA, 25 bp, Homo sapien
tttctacgaaccatgttgtcaatat

SEQ ID NO: 4896890 - DNA, 25 bp, Homo sapien
agctgggtggccctttccatgtggc

SEQ ID NO: 4896891 - DNA, 25 bp, Homo sapien
tccatgtggctttgcggttctggaa

SEQ ID NO: 4896892 - DNA, 25 bp, Homo sapien
ctggaaggaaacattgtgagtgatc

SEQ ID NO: 4896893 - DNA, 25 bp, Homo sapien
tttgctgcacaacctggcattgtgg

SEQ ID NO: 4896894 - DNA, 25 bp, Homo sapien
accgctgcgtgtcaccatgctaagc

SEQ ID NO: 4896895 - DNA, 25 bp, Homo sapien
ccgctgcgtgtcaccatgctaagct

SEQ ID NO: 4896896 - DNA, 25 bp, Homo sapien
taccgctgcgtgtcaccatgctaag

SEQ ID NO: 4896897 - DNA, 25 bp, Homo sapien
actaccgctgcgtgtcaccatgcta

SEQ ID NO: 4896898 - DNA, 25 bp, Homo sapien
cagggtaggcataggagttcctttt

SEQ ID NO: 4896899 - DNA, 25 bp, Homo sapien
catctactgtattcactgggttttg

SEQ ID NO: 4896900 - DNA, 25 bp, Homo sapien
tagttgctgagtttattaggtccat

SEQ ID NO: 4896901 - DNA, 25 bp, Homo sapien
tccattctggaataggtaggtggtc

SEQ ID NO: 4896902 - DNA, 25 bp, Homo sapien
ttatttcacactctgtatatgtttt

SEQ ID NO: 4896903 - DNA, 25 bp, Homo sapien
tatttcacactctgtatatgttttc

SEQ ID NO: 4896904 - DNA, 25 bp, Homo sapien
gttatttcacactctgtatatgttt

SEQ ID NO: 4896905 - DNA, 25 bp, Homo sapien
ggaaaagtgcgagtaattatcaggc

SEQ ID NO: 4896906 - DNA, 25 bp, Homo sapien
gcacaagcaatctatcaggtgatag

SEQ ID NO: 4896907 - DNA, 25 bp, Homo sapien
taattatcaggcagcacaagcaatc

SEQ ID NO: 4896908 - DNA, 25 bp, Homo sapien
tgcgagtaattatcaggcagcacaa

SEQ ID NO: 4896909 - DNA, 25 bp, Homo sapien
tgtagtcctggacggcccctgaaga

SEQ ID NO: 4896910 - DNA, 25 bp, Homo sapien
tctgtagtcctggacggcccctgaa

SEQ ID NO: 4896911 - DNA, 25 bp, Homo sapien
cctggacggcccctgaagatttgca

SEQ ID NO: 4896912 - DNA, 25 bp, Homo sapien
agctctgtagtcctggacggcccct

SEQ ID NO: 4896913 - DNA, 25 bp, Homo sapien
agtacagctccgcaccttcgagcat

SEQ ID NO: 4896914 - DNA, 25 bp, Homo sapien
ttgaagtacagctccgcaccttcga

SEQ ID NO: 4896915 - DNA, 25 bp, Homo sapien
ctggccttgcatcctcgaaccaggc

SEQ ID NO: 4896916 - DNA, 25 bp, Homo sapien
gcatcctcgaaccaggccctccagg

SEQ ID NO: 4896917 - DNA, 25 bp, Homo sapien
cttctagggtctcacactggaccag

SEQ ID NO: 4896918 - DNA, 25 bp, Homo sapien
ataaatattttcaaaactggtgctc

SEQ ID NO: 4896919 - DNA, 25 bp, Homo sapien
taaatattttcaaaactggtgctct

SEQ ID NO: 4896920 - DNA, 25 bp, Homo sapien
aataaatattttcaaaactggtgct

SEQ ID NO: 4896921 - DNA, 25 bp, Homo sapien
aaacagtaagaggatttgtgtgatt

SEQ ID NO: 4896922 - DNA, 25 bp, Homo sapien
ggaatgattccggaaatactcaaat

SEQ ID NO: 4896923 - DNA, 25 bp, Homo sapien
ccataatcagtagtctggagatgaa

SEQ ID NO: 4896924 - DNA, 25 bp, Homo sapien
tgtgtgattagccaaaaagttacca

SEQ ID NO: 4896925 - DNA, 25 bp, Homo sapien
gaatggcattaaagagatctgaagg

SEQ ID NO: 4896926 - DNA, 25 bp, Homo sapien
cacattgtctatcatataactgcac

SEQ ID NO: 4896927 - DNA, 25 bp, Homo sapien
ccatttctgtgaaacggcccaaggg

SEQ ID NO: 4896928 - DNA, 25 bp, Homo sapien
tttttctgcaatgcaccattcatca

SEQ ID NO: 4896929 - DNA, 25 bp, Homo sapien
gcaattcaatattcagttcatctag

SEQ ID NO: 4896930 - DNA, 25 bp, Homo sapien
attcagttcatctagagcattttca

SEQ ID NO: 4896931 - DNA, 25 bp, Homo sapien
cagacatgcagtcttggaagaatgg

SEQ ID NO: 4896932 - DNA, 25 bp, Homo sapien
cttgtatagtttattgcgtagcaat

SEQ ID NO: 4896933 - DNA, 25 bp, Homo sapien
caagaatgggacacataacttctgc

SEQ ID NO: 4896934 - DNA, 25 bp, Homo sapien
ctcaagaatgggacacataacttct

SEQ ID NO: 4896935 - DNA, 25 bp, Homo sapien
gaatgggacacataacttctgctgt

SEQ ID NO: 4896936 - DNA, 25 bp, Homo sapien
tgggacacataacttctgctgtgac

SEQ ID NO: 4896937 - DNA, 25 bp, Homo sapien
tttgctcaattcagtgccaaaggag

SEQ ID NO: 4896938 - DNA, 25 bp, Homo sapien
ccctcaggatagagtttgccgaagg

SEQ ID NO: 4896939 - DNA, 25 bp, Homo sapien
agtcttctgcttgagccaacagccg

SEQ ID NO: 4896940 - DNA, 25 bp, Homo sapien
tgatgataaaagcacgtctgtcggc

SEQ ID NO: 4896941 - DNA, 25 bp, Homo sapien
taaaacacgtcctccaatgtctttc

SEQ ID NO: 4896942 - DNA, 25 bp, Homo sapien
ctcacgctcgtaaaacacgtcctcc

SEQ ID NO: 4896943 - DNA, 25 bp, Homo sapien
tcgtaaaacacgtcctccaatgtct

SEQ ID NO: 4896944 - DNA, 25 bp, Homo sapien
tgccacctacagcttcaaataaagg

SEQ ID NO: 4896945 - DNA, 25 bp, Homo sapien
tgtctgttgaatgccagcacattca

SEQ ID NO: 4896946 - DNA, 25 bp, Homo sapien
actgtctgttgaatgccagcacatt

SEQ ID NO: 4896947 - DNA, 25 bp, Homo sapien
tctgttgaatgccagcacattcatt

SEQ ID NO: 4896948 - DNA, 25 bp, Homo sapien
tgttgaatgccagcacattcatttg

SEQ ID NO: 4896949 - DNA, 25 bp, Homo sapien
tataaaattggaatgtaactgttga

SEQ ID NO: 4896950 - DNA, 25 bp, Homo sapien
ctgtgaaatacattctgctatccac

SEQ ID NO: 4896951 - DNA, 25 bp, Homo sapien
tacattctgctatccacacaatatt

SEQ ID NO: 4896952 - DNA, 25 bp, Homo sapien
ttgattttagttcgatgcctctgtg

SEQ ID NO: 4896953 - DNA, 25 bp, Homo sapien
taattttctacatttgagaacctta

SEQ ID NO: 4896954 - DNA, 25 bp, Homo sapien
tttgcaactcatgaagatatagtgt

SEQ ID NO: 4896955 - DNA, 25 bp, Homo sapien
ctcatgaagatatagtgtggcttac

SEQ ID NO: 4896956 - DNA, 25 bp, Homo sapien
gatatagtgtggcttacttttgtgt

SEQ ID NO: 4896957 - DNA, 25 bp, Homo sapien
gtggcttacttttgtgtagtctaga

SEQ ID NO: 4896958 - DNA, 25 bp, Homo sapien
gacatgtggaaacaagatctaatac

SEQ ID NO: 4896959 - DNA, 25 bp, Homo sapien
catgtggaaacaagatctaatacca

SEQ ID NO: 4896960 - DNA, 25 bp, Homo sapien
acatgtggaaacaagatctaatacc

SEQ ID NO: 4896961 - DNA, 25 bp, Homo sapien
ggtccaatttttaacatgatcaaac

SEQ ID NO: 4896962 - DNA, 25 bp, Homo sapien
ccaatttttaacatgatcaaacaag

SEQ ID NO: 4896963 - DNA, 25 bp, Homo sapien
ttattaggtccaatttttaacatga

SEQ ID NO: 4896964 - DNA, 25 bp, Homo sapien
ataagaaaaataccatagagttaat

SEQ ID NO: 4896965 - DNA, 25 bp, Homo sapien
ttcagtatttggacctgtagagaag

SEQ ID NO: 4896966 - DNA, 25 bp, Homo sapien
cacttgtgaaccatgttgactacat

SEQ ID NO: 4896967 - DNA, 25 bp, Homo sapien
tgaatctaggcaaggaacagacagt

SEQ ID NO: 4896968 - DNA, 25 bp, Homo sapien
ggggtgtacacttgtagtgccagct

SEQ ID NO: 4896969 - DNA, 25 bp, Homo sapien
taacactgcttgcatctagaagata

SEQ ID NO: 4896970 - DNA, 25 bp, Homo sapien
gttgctttctcaagctgattacatc

SEQ ID NO: 4896971 - DNA, 25 bp, Homo sapien
tttaacactgcttgcatctagaaga

SEQ ID NO: 4896972 - DNA, 25 bp, Homo sapien
ttgtgttgctttctcaagctgatta

SEQ ID NO: 4896973 - DNA, 25 bp, Homo sapien
actgaacctgcgatttttgaatgag

SEQ ID NO: 4896974 - DNA, 25 bp, Homo sapien
gctctatgcaccatttctactgaga

SEQ ID NO: 4896975 - DNA, 25 bp, Homo sapien
tttgaatgagtaaactacaattaag

SEQ ID NO: 4896976 - DNA, 25 bp, Homo sapien
ttttttcctggtagctctatgcacc

SEQ ID NO: 4896977 - DNA, 25 bp, Homo sapien
gaggagaaagggggagtcagtggaa

SEQ ID NO: 4896978 - DNA, 25 bp, Homo sapien
ctgaggagaaagggggagtcagtgg

SEQ ID NO: 4896979 - DNA, 25 bp, Homo sapien
tgaggagaaagggggagtcagtgga

SEQ ID NO: 4896980 - DNA, 25 bp, Homo sapien
aagctgaaaactgcagcacgaatga

SEQ ID NO: 4896981 - DNA, 25 bp, Homo sapien
tactgaccaaacgttcagcaagtgg

SEQ ID NO: 4896982 - DNA, 25 bp, Homo sapien
gagttggatttcaattactgaccaa

SEQ ID NO: 4896983 - DNA, 25 bp, Homo sapien
tgttgagtagggctgtgatgagttg

SEQ ID NO: 4896984 - DNA, 25 bp, Homo sapien
attgggcaggtagggagcccttctc

SEQ ID NO: 4896985 - DNA, 25 bp, Homo sapien
tcacctactgttcttgcaaaaacca

SEQ ID NO: 4896986 - DNA, 25 bp, Homo sapien
tccatcctgaagctacttgctcagc

SEQ ID NO: 4896987 - DNA, 25 bp, Homo sapien
tacttgtgaccttggtctcttcacc

SEQ ID NO: 4896988 - DNA, 25 bp, Homo sapien
gttgctgcttcttcagtatctcgta

SEQ ID NO: 4896989 - DNA, 25 bp, Homo sapien
gctgcttcttcagtatctcgtataa

SEQ ID NO: 4896990 - DNA, 25 bp, Homo sapien
gcttcttcagtatctcgtataagaa

SEQ ID NO: 4896991 - DNA, 25 bp, Homo sapien
ctgagttgctgcttcttcagtatct

SEQ ID NO: 4896992 - DNA, 25 bp, Homo sapien
aagtgggtgccaaagtggaacagca

SEQ ID NO: 4896993 - DNA, 25 bp, Homo sapien
gaccccttgtctgcaatgacagcac

SEQ ID NO: 4896994 - DNA, 25 bp, Homo sapien
agaccccttgtctgcaatgacagca

SEQ ID NO: 4896995 - DNA, 25 bp, Homo sapien
ctccagacaagtactccctggacac

SEQ ID NO: 4896996 - DNA, 25 bp, Homo sapien
gctcagtgctgaaagtgtccatact

SEQ ID NO: 4896997 - DNA, 25 bp, Homo sapien
cagtgctgaaagtgtccatacttag

SEQ ID NO: 4896998 - DNA, 25 bp, Homo sapien
agtgtccatacttagcttcatttcc

SEQ ID NO: 4896999 - DNA, 25 bp, Homo sapien
gctgaaagtgtccatacttagcttc

SEQ ID NO: 4897000 - DNA, 25 bp, Homo sapien
catgggtctatttcaactgtgtgga

SEQ ID NO: 4897001 - DNA, 25 bp, Homo sapien
atcatggtgcctgcatagagtcctg

SEQ ID NO: 4897002 - DNA, 25 bp, Homo sapien
ctaaataatctcaatcatggtgcct

SEQ ID NO: 4897003 - DNA, 25 bp, Homo sapien
ctgtgaggtccatgaatttctctga

SEQ ID NO: 4897004 - DNA, 25 bp, Homo sapien
gatggaatcactctctctatcaaac

SEQ ID NO: 4897005 - DNA, 25 bp, Homo sapien
catactcctcaagttgtatcggata

SEQ ID NO: 4897006 - DNA, 25 bp, Homo sapien
tcctcaagttgtatcggatagttct

SEQ ID NO: 4897007 - DNA, 25 bp, Homo sapien
tctccagtatatcaggtttgtcctg

SEQ ID NO: 4897008 - DNA, 25 bp, Homo sapien
ttttctccagtatatcaggtttgtc

SEQ ID NO: 4897009 - DNA, 25 bp, Homo sapien
ccagggatagggttatagaaccctg

SEQ ID NO: 4897010 - DNA, 25 bp, Homo sapien
gatagggttatagaaccctgtagcg

SEQ ID NO: 4897011 - DNA, 25 bp, Homo sapien
ggaccatccataccaaggcaacaga

SEQ ID NO: 4897012 - DNA, 25 bp, Homo sapien
gggtctgcaaagtggaccatccata

SEQ ID NO: 4897013 - DNA, 25 bp, Homo sapien
ctctatgggatacttgtttttcttg

SEQ ID NO: 4897014 - DNA, 25 bp, Homo sapien
tgaacaccactgatttgggaggacc

SEQ ID NO: 4897015 - DNA, 25 bp, Homo sapien
gtgcttctttccctgacatattttg

SEQ ID NO: 4897016 - DNA, 25 bp, Homo sapien
tattttgtaaatagccagcagggta

SEQ ID NO: 4897017 - DNA, 25 bp, Homo sapien
actacatgaatttgctgcttcgtca

SEQ ID NO: 4897018 - DNA, 25 bp, Homo sapien
tcctcgccctctactacatgaattt

SEQ ID NO: 4897019 - DNA, 25 bp, Homo sapien
ggcttcctcgccctctactacatga

SEQ ID NO: 4897020 - DNA, 25 bp, Homo sapien
gccctctactacatgaatttgctgc

SEQ ID NO: 4897021 - DNA, 25 bp, Homo sapien
catttttggtgcttccagattctac

SEQ ID NO: 4897022 - DNA, 25 bp, Homo sapien
tataagacactgttgtaaaggagtc

SEQ ID NO: 4897023 - DNA, 25 bp, Homo sapien
cagattctacgtatgatgagatgga

SEQ ID NO: 4897024 - DNA, 25 bp, Homo sapien
cagttttgtttcaggagtactacta

SEQ ID NO: 4897025 - DNA, 25 bp, Homo sapien
tgagaaccttgaacacccaaggtgg

SEQ ID NO: 4897026 - DNA, 25 bp, Homo sapien
ttgagaaccttgaacacccaaggtg

SEQ ID NO: 4897027 - DNA, 25 bp, Homo sapien
atgttccatctctcttaatgcaacg

SEQ ID NO: 4897028 - DNA, 25 bp, Homo sapien
atgcaacgctctccagatacactca

SEQ ID NO: 4897029 - DNA, 25 bp, Homo sapien
tccatctctcttaatgcaacgctct

SEQ ID NO: 4897030 - DNA, 25 bp, Homo sapien
aatgcaacgctctccagatacactc

SEQ ID NO: 4897031 - DNA, 25 bp, Homo sapien
agcgcgccgcgtggccgcgtcgccg

SEQ ID NO: 4897032 - DNA, 25 bp, Homo sapien
ccgcgtggccgcgtcgccggcgccg

SEQ ID NO: 4897033 - DNA, 25 bp, Homo sapien
cggcaccgcgcgctacgccgcggcc

SEQ ID NO: 4897034 - DNA, 25 bp, Homo sapien
gcgccgcgccctaagcgcgcgcctc

SEQ ID NO: 4897035 - DNA, 25 bp, Homo sapien
agatcgccatctcgcagcaggcgcg

SEQ ID NO: 4897036 - DNA, 25 bp, Homo sapien
agccactcggaacccgcacgcggag

SEQ ID NO: 4897037 - DNA, 25 bp, Homo sapien
ttccgcgcccaagatcgccatctcg

SEQ ID NO: 4897038 - DNA, 25 bp, Homo sapien
gcccaagatcgccatctcgcagcag

SEQ ID NO: 4897039 - DNA, 25 bp, Homo sapien
gcgcgaagctgtcggctcccggcag

SEQ ID NO: 4897040 - DNA, 25 bp, Homo sapien
ccggcgcgaagctgtcggctcccgg

SEQ ID NO: 4897041 - DNA, 25 bp, Homo sapien
cgcgaagctgtcggctcccggcagc

SEQ ID NO: 4897042 - DNA, 25 bp, Homo sapien
ggcgcgaagctgtcggctcccggca

SEQ ID NO: 4897043 - DNA, 25 bp, Homo sapien
ctttgccagggcgaactccgggcaa

SEQ ID NO: 4897044 - DNA, 25 bp, Homo sapien
ggaaacacttcgctccgctccagga

SEQ ID NO: 4897045 - DNA, 25 bp, Homo sapien
gaaacacttcgctccgctccaggat

SEQ ID NO: 4897046 - DNA, 25 bp, Homo sapien
gcgaactccgggcaagacccgtgac

SEQ ID NO: 4897047 - DNA, 25 bp, Homo sapien
caggtcacaaaaggtggaggtgggg

SEQ ID NO: 4897048 - DNA, 25 bp, Homo sapien
aatcctttctactcaaattgagaaa

SEQ ID NO: 4897049 - DNA, 25 bp, Homo sapien
cagcaggtgtcacgtacctataatc

SEQ ID NO: 4897050 - DNA, 25 bp, Homo sapien
aaattagccagcaggtgtcacgtac

SEQ ID NO: 4897051 - DNA, 25 bp, Homo sapien
caataggctcctcaaaaagaaatgc

SEQ ID NO: 4897052 - DNA, 25 bp, Homo sapien
caatggagtaggtaagctgttagag

SEQ ID NO: 4897053 - DNA, 25 bp, Homo sapien
cacataatttccacgtattctggga

SEQ ID NO: 4897054 - DNA, 25 bp, Homo sapien
cttgaaatacacatacttgctgcat

SEQ ID NO: 4897055 - DNA, 25 bp, Homo sapien
gacattctcactctatgaagatcaa

SEQ ID NO: 4897056 - DNA, 25 bp, Homo sapien
ccattcactagctcatatggcccca

SEQ ID NO: 4897057 - DNA, 25 bp, Homo sapien
cattcactagctcatatggccccat

SEQ ID NO: 4897058 - DNA, 25 bp, Homo sapien
tccattcactagctcatatggcccc

SEQ ID NO: 4897059 - DNA, 25 bp, Homo sapien
gtatcaggaactgctagacactggg

SEQ ID NO: 4897060 - DNA, 25 bp, Homo sapien
gatgagtaagacacgattccctctt

SEQ ID NO: 4897061 - DNA, 25 bp, Homo sapien
acgattccctctttcaaggagctca

SEQ ID NO: 4897062 - DNA, 25 bp, Homo sapien
gctcatagtctgtgaggagacaacc

SEQ ID NO: 4897063 - DNA, 25 bp, Homo sapien
catgttctggtaagcagtaactgca

SEQ ID NO: 4897064 - DNA, 25 bp, Homo sapien
gccttaaaagtgaagagatacagca

SEQ ID NO: 4897065 - DNA, 25 bp, Homo sapien
taaaaaatgataccatcttgcctta

SEQ ID NO: 4897066 - DNA, 25 bp, Homo sapien
caacaattattctccgcacttcatt

SEQ ID NO: 4897067 - DNA, 25 bp, Homo sapien
gtccaaaaataagtctccacaatta

SEQ ID NO: 4897068 - DNA, 25 bp, Homo sapien
gaatttgcctactgagatatttctg

SEQ ID NO: 4897069 - DNA, 25 bp, Homo sapien
gatacagcaataactacagagtcca

SEQ ID NO: 4897070 - DNA, 25 bp, Homo sapien
tgtttacttgtctatgatacagcaa

SEQ ID NO: 4897071 - DNA, 25 bp, Homo sapien
tattactagtatcagaccttggtga

SEQ ID NO: 4897072 - DNA, 25 bp, Homo sapien
tgtggttattactagtatcagacct

SEQ ID NO: 4897073 - DNA, 25 bp, Homo sapien
ggttattactagtatcagaccttgg

SEQ ID NO: 4897074 - DNA, 25 bp, Homo sapien
ttattactagtatcagaccttggtg

SEQ ID NO: 4897075 - DNA, 25 bp, Homo sapien
acagtaagtcaattaatttctccat

SEQ ID NO: 4897076 - DNA, 25 bp, Homo sapien
gtaacatgcaccagtactccactcc

SEQ ID NO: 4897077 - DNA, 25 bp, Homo sapien
taacatgcaccagtactccactcct

SEQ ID NO: 4897078 - DNA, 25 bp, Homo sapien
tgtaacatgcaccagtactccactc

SEQ ID NO: 4897079 - DNA, 25 bp, Homo sapien
ctaggcagccactaacctactctct

SEQ ID NO: 4897080 - DNA, 25 bp, Homo sapien
gaactcttctcgttggcagaatgaa

SEQ ID NO: 4897081 - DNA, 25 bp, Homo sapien
gaatggaattgtgcttcttgtgcaa

SEQ ID NO: 4897082 - DNA, 25 bp, Homo sapien
ggtttcactatattcagagtggcac

SEQ ID NO: 4897083 - DNA, 25 bp, Homo sapien
caaaagggctactgataatgcttga

SEQ ID NO: 4897084 - DNA, 25 bp, Homo sapien
ttgctgttttcgtaatttctccatc

SEQ ID NO: 4897085 - DNA, 25 bp, Homo sapien
gcttgtttcaaatctatcgttgctt

SEQ ID NO: 4897086 - DNA, 25 bp, Homo sapien
tcaaatctatcgttgcttttcctaa

SEQ ID NO: 4897087 - DNA, 25 bp, Homo sapien
ttttaaagtgcgatggctccaaact

SEQ ID NO: 4897088 - DNA, 25 bp, Homo sapien
tgaaattccaatgtagtctgtggcg

SEQ ID NO: 4897089 - DNA, 25 bp, Homo sapien
taagtgtcagacaacgggaaactaa

SEQ ID NO: 4897090 - DNA, 25 bp, Homo sapien
aagctatgaaccctctccccagaat

SEQ ID NO: 4897091 - DNA, 25 bp, Homo sapien
tgtggtgtgagaaatcattacatgg

SEQ ID NO: 4897092 - DNA, 25 bp, Homo sapien
tgaactgttacaagctacttaagtg

SEQ ID NO: 4897093 - DNA, 25 bp, Homo sapien
acttgagtgagtgggtgtgcccttt

SEQ ID NO: 4897094 - DNA, 25 bp, Homo sapien
tggatcctctccaaactcgaacctg

SEQ ID NO: 4897095 - DNA, 25 bp, Homo sapien
tccaaactcgaacctgctggcatct

SEQ ID NO: 4897096 - DNA, 25 bp, Homo sapien
tggaaacaggaactggatcctctcc

SEQ ID NO: 4897097 - DNA, 25 bp, Homo sapien
gatttcccatggtgagtactccaag

SEQ ID NO: 4897098 - DNA, 25 bp, Homo sapien
ctcacacagttaagtagctagggtt

SEQ ID NO: 4897099 - DNA, 25 bp, Homo sapien
cagataatctctgacgcagtgtggg

SEQ ID NO: 4897100 - DNA, 25 bp, Homo sapien
cattattgccgagaactcaagaggg

SEQ ID NO: 4897101 - DNA, 25 bp, Homo sapien
ttgactagcctaaaggagacctcct

SEQ ID NO: 4897102 - DNA, 25 bp, Homo sapien
cagtataaacaaaccaactccgatg

SEQ ID NO: 4897103 - DNA, 25 bp, Homo sapien
gatttgttcaatccaggacctaggt

SEQ ID NO: 4897104 - DNA, 25 bp, Homo sapien
tcataaaactggaaggacaatcaca

SEQ ID NO: 4897105 - DNA, 25 bp, Homo sapien
aacagaaaccatatgcggcctttat

SEQ ID NO: 4897106 - DNA, 25 bp, Homo sapien
tggacaacctctgcttatggtggct

SEQ ID NO: 4897107 - DNA, 25 bp, Homo sapien
tggtcaccaggcatgacttttctct

SEQ ID NO: 4897108 - DNA, 25 bp, Homo sapien
caatggcgagttaataacagaaacc

SEQ ID NO: 4897109 - DNA, 25 bp, Homo sapien
atccatcaagcacaactgtcaattc

SEQ ID NO: 4897110 - DNA, 25 bp, Homo sapien
acaactgtcaattcaccagtttgtg

SEQ ID NO: 4897111 - DNA, 25 bp, Homo sapien
aatccatcaagcacaactgtcaatt

SEQ ID NO: 4897112 - DNA, 25 bp, Homo sapien
tattttcttgctcaatcaccaatcc

SEQ ID NO: 4897113 - DNA, 25 bp, Homo sapien
ttacaaacatataaagttagcttac

SEQ ID NO: 4897114 - DNA, 25 bp, Homo sapien
cttgaaattttacaaacatataaag

SEQ ID NO: 4897115 - DNA, 25 bp, Homo sapien
ttccttgaaattttacaaacatata

SEQ ID NO: 4897116 - DNA, 25 bp, Homo sapien
attttacaaacatataaagttagct

SEQ ID NO: 4897117 - DNA, 25 bp, Homo sapien
gcagttgtccttgctgaaggctctc

SEQ ID NO: 4897118 - DNA, 25 bp, Homo sapien
gttgtccttgctgaaggctctccat

SEQ ID NO: 4897119 - DNA, 25 bp, Homo sapien
aggctctccattttcatgtaaggca

SEQ ID NO: 4897120 - DNA, 25 bp, Homo sapien
gctgaaggctctccattttcatgta

SEQ ID NO: 4897121 - DNA, 25 bp, Homo sapien
agcagcatgagttttggactagagt

SEQ ID NO: 4897122 - DNA, 25 bp, Homo sapien
catgagttttggactagagtgcttg

SEQ ID NO: 4897123 - DNA, 25 bp, Homo sapien
gattatctattccattcgtgccttc

SEQ ID NO: 4897124 - DNA, 25 bp, Homo sapien
gactagagtgcttgtaggtacatga

SEQ ID NO: 4897125 - DNA, 25 bp, Homo sapien
acggagatgaaggtgtgttgtctcc

SEQ ID NO: 4897126 - DNA, 25 bp, Homo sapien
agacggagatgaaggtgtgttgtct

SEQ ID NO: 4897127 - DNA, 25 bp, Homo sapien
gatgaaggtgtgttgtctccattaa

SEQ ID NO: 4897128 - DNA, 25 bp, Homo sapien
ggagatgaaggtgtgttgtctccat

SEQ ID NO: 4897129 - DNA, 25 bp, Homo sapien
aggctcagatgcgagtggttttgga

SEQ ID NO: 4897130 - DNA, 25 bp, Homo sapien
ctcagatgcgagtggttttggagct

SEQ ID NO: 4897131 - DNA, 25 bp, Homo sapien
tgcgagtggttttggagctggtgta

SEQ ID NO: 4897132 - DNA, 25 bp, Homo sapien
cgagtggttttggagctggtgtatt

SEQ ID NO: 4897133 - DNA, 25 bp, Homo sapien
caaacacagggaggaacatacgctc

SEQ ID NO: 4897134 - DNA, 25 bp, Homo sapien
gagtccactaaggattatagaggac

SEQ ID NO: 4897135 - DNA, 25 bp, Homo sapien
cctgaaagagttaatatacaatgac

SEQ ID NO: 4897136 - DNA, 25 bp, Homo sapien
cccaacatgtgtgctaataatctta

SEQ ID NO: 4897137 - DNA, 25 bp, Homo sapien
gtcagttctcaatgtttacaaaaac

SEQ ID NO: 4897138 - DNA, 25 bp, Homo sapien
tacacaattaagacttattactgtc

SEQ ID NO: 4897139 - DNA, 25 bp, Homo sapien
catgtgtcagttctcaatgtttaca

SEQ ID NO: 4897140 - DNA, 25 bp, Homo sapien
acttattactgtccaggcacggtgg

SEQ ID NO: 4897141 - DNA, 25 bp, Homo sapien
tgaattcatcctttattaagtgatg

SEQ ID NO: 4897142 - DNA, 25 bp, Homo sapien
ctgaattcatcctttattaagtgat

SEQ ID NO: 4897143 - DNA, 25 bp, Homo sapien
actggagtacccgtgacagacgcat

SEQ ID NO: 4897144 - DNA, 25 bp, Homo sapien
cactactggagtacccgtgacagac

SEQ ID NO: 4897145 - DNA, 25 bp, Homo sapien
tggagtacccgtgacagacgcatta

SEQ ID NO: 4897146 - DNA, 25 bp, Homo sapien
gtacccgtgacagacgcattatcag

SEQ ID NO: 4897147 - DNA, 25 bp, Homo sapien
gactgctgccgtacaggatccatac

SEQ ID NO: 4897148 - DNA, 25 bp, Homo sapien
tgctgccgtacaggatccatacacc

SEQ ID NO: 4897149 - DNA, 25 bp, Homo sapien
cagactgctgccgtacaggatccat

SEQ ID NO: 4897150 - DNA, 25 bp, Homo sapien
tcccagactgctgccgtacaggatc

SEQ ID NO: 4897151 - DNA, 25 bp, Homo sapien
tcagacattaaaaagcttaacatac

SEQ ID NO: 4897152 - DNA, 25 bp, Homo sapien
tttcaaagttctgaacaatgaaaac

SEQ ID NO: 4897153 - DNA, 25 bp, Homo sapien
cacacattcaataatcgtatgttaa

SEQ ID NO: 4897154 - DNA, 25 bp, Homo sapien
tcgtatgttaacagagttgctactt

SEQ ID NO: 4897155 - DNA, 25 bp, Homo sapien
gatcccaacttagatttcaaagttc

SEQ ID NO: 4897156 - DNA, 25 bp, Homo sapien
gattaagaattactaaccagcaatg

SEQ ID NO: 4897157 - DNA, 25 bp, Homo sapien
catggtcactcttacgaaaagtaga

SEQ ID NO: 4897158 - DNA, 25 bp, Homo sapien
aaacagatcaccaaggatgccagag

SEQ ID NO: 4897159 - DNA, 25 bp, Homo sapien
ccagcactcaatattagctgaggaa

SEQ ID NO: 4897160 - DNA, 25 bp, Homo sapien
gagtattatgatccacataataggt

SEQ ID NO: 4897161 - DNA, 25 bp, Homo sapien
gatccacataataggttctaccatg

SEQ ID NO: 4897162 - DNA, 25 bp, Homo sapien
tatgatccacataataggttctacc

SEQ ID NO: 4897163 - DNA, 25 bp, Homo sapien
cacataataggttctaccatgagga

SEQ ID NO: 4897164 - DNA, 25 bp, Homo sapien
caggtggactccatgtcattccacc

SEQ ID NO: 4897165 - DNA, 25 bp, Homo sapien
aaacacaggtggactccatgtcatt

SEQ ID NO: 4897166 - DNA, 25 bp, Homo sapien
cacaggtggactccatgtcattcca

SEQ ID NO: 4897167 - DNA, 25 bp, Homo sapien
acacaggtggactccatgtcattcc

SEQ ID NO: 4897168 - DNA, 25 bp, Homo sapien
cttcctgccattatattgctgccaa

SEQ ID NO: 4897169 - DNA, 25 bp, Homo sapien
ttcctgccattatattgctgccaat

SEQ ID NO: 4897170 - DNA, 25 bp, Homo sapien
tcctgccattatattgctgccaatt

SEQ ID NO: 4897171 - DNA, 25 bp, Homo sapien
aattggttccgctgagattgccact

SEQ ID NO: 4897172 - DNA, 25 bp, Homo sapien
tgttcaaaatttcggacagattcca

SEQ ID NO: 4897173 - DNA, 25 bp, Homo sapien
aaaatttcggacagattccatggta

SEQ ID NO: 4897174 - DNA, 25 bp, Homo sapien
ttgcatagctccctgcaattggttc

SEQ ID NO: 4897175 - DNA, 25 bp, Homo sapien
tggcaaaggtccataagggtcattt

SEQ ID NO: 4897176 - DNA, 25 bp, Homo sapien
cctggtggcaaaggtccataagggt

SEQ ID NO: 4897177 - DNA, 25 bp, Homo sapien
ccagcctggtggcaaaggtccataa

SEQ ID NO: 4897178 - DNA, 25 bp, Homo sapien
caaaggtccataagggtcattttct

SEQ ID NO: 4897179 - DNA, 25 bp, Homo sapien
aagtaaaccctgtctgttgaatcca

SEQ ID NO: 4897180 - DNA, 25 bp, Homo sapien
tatgattcacaaagtaaaccctgtc

SEQ ID NO: 4897181 - DNA, 25 bp, Homo sapien
cttgagttcttggatcttcccactg

SEQ ID NO: 4897182 - DNA, 25 bp, Homo sapien
ccactgggttgtttttgtgttatga

SEQ ID NO: 4897183 - DNA, 25 bp, Homo sapien
ctgatatatgcaagacgacttaagg

SEQ ID NO: 4897184 - DNA, 25 bp, Homo sapien
acttaaggctgctgtatatacatac

SEQ ID NO: 4897185 - DNA, 25 bp, Homo sapien
tatatgcaagacgacttaaggctgc

SEQ ID NO: 4897186 - DNA, 25 bp, Homo sapien
caagacgacttaaggctgctgtata

SEQ ID NO: 4897187 - DNA, 25 bp, Homo sapien
caaagtaccttacaccttcacgagt

SEQ ID NO: 4897188 - DNA, 25 bp, Homo sapien
aagtaccttacaccttcacgagtat

SEQ ID NO: 4897189 - DNA, 25 bp, Homo sapien
acaaagtaccttacaccttcacgag

SEQ ID NO: 4897190 - DNA, 25 bp, Homo sapien
taccttacaccttcacgagtatatc

SEQ ID NO: 4897191 - DNA, 25 bp, Homo sapien
ccagcagagggacgagactttgata

SEQ ID NO: 4897192 - DNA, 25 bp, Homo sapien
tatgcaaagacatgacaccttagag

SEQ ID NO: 4897193 - DNA, 25 bp, Homo sapien
taagagcacagagtctagacagaga

SEQ ID NO: 4897194 - DNA, 25 bp, Homo sapien
taggaatcgaatgtaccagcagagg

SEQ ID NO: 4897195 - DNA, 25 bp, Homo sapien
tgctaccaagccaggcaacagataa

SEQ ID NO: 4897196 - DNA, 25 bp, Homo sapien
caacagataatggtagcttggacca

SEQ ID NO: 4897197 - DNA, 25 bp, Homo sapien
aattcagtctctgtgctgtatggag

SEQ ID NO: 4897198 - DNA, 25 bp, Homo sapien
acaacattgtacaaggtgtgggaag

SEQ ID NO: 4897199 - DNA, 25 bp, Homo sapien
taaagccgcgttcataagcaatttg

SEQ ID NO: 4897200 - DNA, 25 bp, Homo sapien
acctaaagccgcgttcataagcaat

SEQ ID NO: 4897201 - DNA, 25 bp, Homo sapien
gagcaagcttccacctaaagccgcg

SEQ ID NO: 4897202 - DNA, 25 bp, Homo sapien
gcttccacctaaagccgcgttcata

SEQ ID NO: 4897203 - DNA, 25 bp, Homo sapien
ggaatcttcaaacaatgtctgccgg

SEQ ID NO: 4897204 - DNA, 25 bp, Homo sapien
tcaaacaatgtctgccgggacacat

SEQ ID NO: 4897205 - DNA, 25 bp, Homo sapien
tgccgggacacattgatctttacat

SEQ ID NO: 4897206 - DNA, 25 bp, Homo sapien
gtctgccgggacacattgatcttta

SEQ ID NO: 4897207 - DNA, 25 bp, Homo sapien
aaatgggcactcaggccagatgcag

SEQ ID NO: 4897208 - DNA, 25 bp, Homo sapien
aataagtgctatctcaaagggatgc

SEQ ID NO: 4897209 - DNA, 25 bp, Homo sapien
ggcactattctacgtactaggcaga

SEQ ID NO: 4897210 - DNA, 25 bp, Homo sapien
gaataccctctatgtgcaaaggcac

SEQ ID NO: 4897211 - DNA, 25 bp, Homo sapien
ctaggccaccataatcaagtccttc

SEQ ID NO: 4897212 - DNA, 25 bp, Homo sapien
aggccaccataatcaagtccttctt

SEQ ID NO: 4897213 - DNA, 25 bp, Homo sapien
gctaggccaccataatcaagtcctt

SEQ ID NO: 4897214 - DNA, 25 bp, Homo sapien
taggccaccataatcaagtccttct

SEQ ID NO: 4897215 - DNA, 25 bp, Homo sapien
gtattggaaaaacaagtgtgcgaga

SEQ ID NO: 4897216 - DNA, 25 bp, Homo sapien
aggttcttacaaggggctggcctca

SEQ ID NO: 4897217 - DNA, 25 bp, Homo sapien
cagtaaagcaatgtctgagtattgg

SEQ ID NO: 4897218 - DNA, 25 bp, Homo sapien
tgtgcgagaaatttatatctagtga

SEQ ID NO: 4897219 - DNA, 25 bp, Homo sapien
tagaagaaaacttccctgacattaa

SEQ ID NO: 4897220 - DNA, 25 bp, Homo sapien
agaagaaaacttccctgacattaag

SEQ ID NO: 4897221 - DNA, 25 bp, Homo sapien
atattcaaagacataatagaagaaa

SEQ ID NO: 4897222 - DNA, 25 bp, Homo sapien
aaatattcaaagacataatagaaga

SEQ ID NO: 4897223 - DNA, 25 bp, Homo sapien
cagtgacatgaggataggcttgaga

SEQ ID NO: 4897224 - DNA, 25 bp, Homo sapien
gaagcagcaaaacgtagggcagtac

SEQ ID NO: 4897225 - DNA, 25 bp, Homo sapien
gacagacatgtaagactgacaaagg

SEQ ID NO: 4897226 - DNA, 25 bp, Homo sapien
caacagatgagctagcagagcctaa

SEQ ID NO: 4897227 - DNA, 25 bp, Homo sapien
tacctgctagtttcgatgtggccaa

SEQ ID NO: 4897228 - DNA, 25 bp, Homo sapien
gctctccatttaagttacctgctag

SEQ ID NO: 4897229 - DNA, 25 bp, Homo sapien
tatacatcatacctctgctcaacag

SEQ ID NO: 4897230 - DNA, 25 bp, Homo sapien
tttgtatgccacacttttgcttggg

SEQ ID NO: 4897231 - DNA, 25 bp, Homo sapien
catggcaataaaacgaccaatgaaa

SEQ ID NO: 4897232 - DNA, 25 bp, Homo sapien
tggcaataaaacgaccaatgaaaca

SEQ ID NO: 4897233 - DNA, 25 bp, Homo sapien
atggcaataaaacgaccaatgaaac

SEQ ID NO: 4897234 - DNA, 25 bp, Homo sapien
cacctctgccagtgtatttctagca

SEQ ID NO: 4897235 - DNA, 25 bp, Homo sapien
gaccgacagttgtatttcatcactg

SEQ ID NO: 4897236 - DNA, 25 bp, Homo sapien
caagctgactgctctatgaccgaca

SEQ ID NO: 4897237 - DNA, 25 bp, Homo sapien
tgtacctaggcaatggaacatgcta

SEQ ID NO: 4897238 - DNA, 25 bp, Homo sapien
cttatccagataagggagttataaa

SEQ ID NO: 4897239 - DNA, 25 bp, Homo sapien
caacttcaggtcatgtgaagtaact

SEQ ID NO: 4897240 - DNA, 25 bp, Homo sapien
gctacggagtaatgtgtataatcca

SEQ ID NO: 4897241 - DNA, 25 bp, Homo sapien
caccacaatgtacctagctattaaa

SEQ ID NO: 4897242 - DNA, 25 bp, Homo sapien
gacagctagcatctaagagggtgaa

SEQ ID NO: 4897243 - DNA, 25 bp, Homo sapien
aaaaagtaagctacggagtaatgtg

SEQ ID NO: 4897244 - DNA, 25 bp, Homo sapien
catcgaagtactgtagccactgaag

SEQ ID NO: 4897245 - DNA, 25 bp, Homo sapien
tttggtctgttcttgtactcctcga

SEQ ID NO: 4897246 - DNA, 25 bp, Homo sapien
ctttttcatcgaagtactgtagcca

SEQ ID NO: 4897247 - DNA, 25 bp, Homo sapien
gagaaaaacgccattctgtcattaa

SEQ ID NO: 4897248 - DNA, 25 bp, Homo sapien
tttctctgccaatctgccaagtcaa

SEQ ID NO: 4897249 - DNA, 25 bp, Homo sapien
tatttctctgccaatctgccaagtc

SEQ ID NO: 4897250 - DNA, 25 bp, Homo sapien
ttctctgccaatctgccaagtcaac

SEQ ID NO: 4897251 - DNA, 25 bp, Homo sapien
gtatttctctgccaatctgccaagt

SEQ ID NO: 4897252 - DNA, 25 bp, Homo sapien
ggttccagtgacgaactgcaatagt

SEQ ID NO: 4897253 - DNA, 25 bp, Homo sapien
aacggcaggttccagtgacgaactg

SEQ ID NO: 4897254 - DNA, 25 bp, Homo sapien
taaacggcaggttccagtgacgaac

SEQ ID NO: 4897255 - DNA, 25 bp, Homo sapien
ggcaggttccagtgacgaactgcaa

SEQ ID NO: 4897256 - DNA, 25 bp, Homo sapien
tgcaaaacttttgaggcccattact

SEQ ID NO: 4897257 - DNA, 25 bp, Homo sapien
catgtatggcttcttggtaaccaag

SEQ ID NO: 4897258 - DNA, 25 bp, Homo sapien
atgcaaaacttttgaggcccattac

SEQ ID NO: 4897259 - DNA, 25 bp, Homo sapien
gaagcttatgctctttgctgtcaac

SEQ ID NO: 4897260 - DNA, 25 bp, Homo sapien
tgtttcatgctctaatccaagtgag

SEQ ID NO: 4897261 - DNA, 25 bp, Homo sapien
tccaagtgagcaatccaattttgcc

SEQ ID NO: 4897262 - DNA, 25 bp, Homo sapien
gcctagcaatcttagccgtgttcct

SEQ ID NO: 4897263 - DNA, 25 bp, Homo sapien
cagtttatgccactcttcaaaaact

SEQ ID NO: 4897264 - DNA, 25 bp, Homo sapien
catccctttgtatatgcttccccat

SEQ ID NO: 4897265 - DNA, 25 bp, Homo sapien
tccctttgtatatgcttccccatca

SEQ ID NO: 4897266 - DNA, 25 bp, Homo sapien
ccctttgtatatgcttccccatcat

SEQ ID NO: 4897267 - DNA, 25 bp, Homo sapien
atccctttgtatatgcttccccatc

SEQ ID NO: 4897268 - DNA, 25 bp, Homo sapien
ttcataactcttatatggtggtaga

SEQ ID NO: 4897269 - DNA, 25 bp, Homo sapien
cataactcttatatggtggtagatc

SEQ ID NO: 4897270 - DNA, 25 bp, Homo sapien
aactcttatatggtggtagatccaa

SEQ ID NO: 4897271 - DNA, 25 bp, Homo sapien
tgttcataactcttatatggtggta

SEQ ID NO: 4897272 - DNA, 25 bp, Homo sapien
gaaaacatactttgagaggttcgga

SEQ ID NO: 4897273 - DNA, 25 bp, Homo sapien
gagctcctccaaaataagaagccac

SEQ ID NO: 4897274 - DNA, 25 bp, Homo sapien
gaggttcggaaaattcactgtacag

SEQ ID NO: 4897275 - DNA, 25 bp, Homo sapien
gggtatttaaatgcaagagctcctc

SEQ ID NO: 4897276 - DNA, 25 bp, Homo sapien
cctggtcagtcatttcaagggaaca

SEQ ID NO: 4897277 - DNA, 25 bp, Homo sapien
ttcctggtcagtcatttcaagggaa

SEQ ID NO: 4897278 - DNA, 25 bp, Homo sapien
tggtcagtcatttcaagggaacaat

SEQ ID NO: 4897279 - DNA, 25 bp, Homo sapien
tagaaaaggatgaactgttttgcat

SEQ ID NO: 4897280 - DNA, 25 bp, Homo sapien
aactgacaagttcaagcacctgtct

SEQ ID NO: 4897281 - DNA, 25 bp, Homo sapien
aatacctttctgaacagccatgcaa

SEQ ID NO: 4897282 - DNA, 25 bp, Homo sapien
actcaaagtaagatttggcctaagc

SEQ ID NO: 4897283 - DNA, 25 bp, Homo sapien
taatacctttctgaacagccatgca

SEQ ID NO: 4897284 - DNA, 25 bp, Homo sapien
catgtgtaagttatggttctatcca

SEQ ID NO: 4897285 - DNA, 25 bp, Homo sapien
tacctagcatctcaaagtaacatgt

SEQ ID NO: 4897286 - DNA, 25 bp, Homo sapien
tgctcaatgaatccttccaatttcg

SEQ ID NO: 4897287 - DNA, 25 bp, Homo sapien
aaacaaacttctatgctgctcaatg

SEQ ID NO: 4897288 - DNA, 25 bp, Homo sapien
tgaaaagcatcacagatttaaaaac

SEQ ID NO: 4897289 - DNA, 25 bp, Homo sapien
atttgaaaagcatcacagatttaaa

SEQ ID NO: 4897290 - DNA, 25 bp, Homo sapien
tgaaattgcatcaatttattatgaa

SEQ ID NO: 4897291 - DNA, 25 bp, Homo sapien
gaaaagcatcacagatttaaaaaca

SEQ ID NO: 4897292 - DNA, 25 bp, Homo sapien
aaaagtggcagagtttacattacct

SEQ ID NO: 4897293 - DNA, 25 bp, Homo sapien
gagcattcaaatgcttatgtaactc

SEQ ID NO: 4897294 - DNA, 25 bp, Homo sapien
tatgtaactcttcaatccatctggc

SEQ ID NO: 4897295 - DNA, 25 bp, Homo sapien
aaaatcattagccttatattagagc

SEQ ID NO: 4897296 - DNA, 25 bp, Homo sapien
aaaaggagtctattcaaccaagcag

SEQ ID NO: 4897297 - DNA, 25 bp, Homo sapien
gcaaaggcccctatgatgaaaaaca

SEQ ID NO: 4897298 - DNA, 25 bp, Homo sapien
tatggtatacgcagtcctttttgaa

SEQ ID NO: 4897299 - DNA, 25 bp, Homo sapien
taagaagtcagttccatggctatta

SEQ ID NO: 4897300 - DNA, 25 bp, Homo sapien
tattccctgggccatttactggtgg

SEQ ID NO: 4897301 - DNA, 25 bp, Homo sapien
tgtgtagcctcacctagtgcatcgt

SEQ ID NO: 4897302 - DNA, 25 bp, Homo sapien
ccctgaaaacgaactggaaagctgc

SEQ ID NO: 4897303 - DNA, 25 bp, Homo sapien
gataaatcaagagctctgcctgtag

SEQ ID NO: 4897304 - DNA, 25 bp, Homo sapien
acaaaaaaaacactggtaagctgct

SEQ ID NO: 4897305 - DNA, 25 bp, Homo sapien
actggtaagctgctttccctggaag

SEQ ID NO: 4897306 - DNA, 25 bp, Homo sapien
aaaacactggtaagctgctttccct

SEQ ID NO: 4897307 - DNA, 25 bp, Homo sapien
caaaaaaaacactggtaagctgctt

SEQ ID NO: 4897308 - DNA, 25 bp, Homo sapien
taaggccaactgagtgttacaggag

SEQ ID NO: 4897309 - DNA, 25 bp, Homo sapien
tggagatttcccagtccagatgcaa

SEQ ID NO: 4897310 - DNA, 25 bp, Homo sapien
ccactcaggtatgcccaaagctgtg

SEQ ID NO: 4897311 - DNA, 25 bp, Homo sapien
tcctcagttgacctaaagcttggct

SEQ ID NO: 4897312 - DNA, 25 bp, Homo sapien
aaaatatgacataactcgcacagga

SEQ ID NO: 4897313 - DNA, 25 bp, Homo sapien
aatatgacacaccactgatacagtg

SEQ ID NO: 4897314 - DNA, 25 bp, Homo sapien
gcattgagaccaagtttgcatacct

SEQ ID NO: 4897315 - DNA, 25 bp, Homo sapien
gacataactcgcacaggaacaagga

SEQ ID NO: 4897316 - DNA, 25 bp, Homo sapien
gctgagagtctcatctggtcactgt

SEQ ID NO: 4897317 - DNA, 25 bp, Homo sapien
gaaataaatctccatggctcaggca

SEQ ID NO: 4897318 - DNA, 25 bp, Homo sapien
caggactatgctactcacttgaggc

SEQ ID NO: 4897319 - DNA, 25 bp, Homo sapien
tcacattgggatgggagatcaagca

SEQ ID NO: 4897320 - DNA, 25 bp, Homo sapien
tctttcttatgtgcagtggatccaa

SEQ ID NO: 4897321 - DNA, 25 bp, Homo sapien
aaagccaaggactatccagcacaca

SEQ ID NO: 4897322 - DNA, 25 bp, Homo sapien
tgaaactacacaacaaaaagcttgc

SEQ ID NO: 4897323 - DNA, 25 bp, Homo sapien
aaaacatctcccataaagtaaggca

SEQ ID NO: 4897324 - DNA, 25 bp, Homo sapien
tcatggagctaaaataatccctggt

SEQ ID NO: 4897325 - DNA, 25 bp, Homo sapien
tggcctatattcagttcagaggctc

SEQ ID NO: 4897326 - DNA, 25 bp, Homo sapien
gagaaaaacatggtcctaccctcat

SEQ ID NO: 4897327 - DNA, 25 bp, Homo sapien
tgagatcccacacataatggacttg

SEQ ID NO: 4897328 - DNA, 25 bp, Homo sapien
gcaaccaagttattaccagaagtag

SEQ ID NO: 4897329 - DNA, 25 bp, Homo sapien
gtacaagttctaaacagcaaccaag

SEQ ID NO: 4897330 - DNA, 25 bp, Homo sapien
cgttcactttgggtgttaactctca

SEQ ID NO: 4897331 - DNA, 25 bp, Homo sapien
caaaaacagtagcttaagtaggaca

SEQ ID NO: 4897332 - DNA, 25 bp, Homo sapien
tacttagttgtattctttacacaca

SEQ ID NO: 4897333 - DNA, 25 bp, Homo sapien
ctttctgggaagctatagtgtagaa

SEQ ID NO: 4897334 - DNA, 25 bp, Homo sapien
agaaaacaggcaatcgaaaaagctg

SEQ ID NO: 4897335 - DNA, 25 bp, Homo sapien
ggcaatcgaaaaagctgtacttgta

SEQ ID NO: 4897336 - DNA, 25 bp, Homo sapien
gcaatttctgccttaaggacttcag

SEQ ID NO: 4897337 - DNA, 25 bp, Homo sapien
gggcagtcactaagtcagatgctag

SEQ ID NO: 4897338 - DNA, 25 bp, Homo sapien
catctaagaagggtaccagtgtaaa

SEQ ID NO: 4897339 - DNA, 25 bp, Homo sapien
cactcttttgagtatagcctgcaga

SEQ ID NO: 4897340 - DNA, 25 bp, Homo sapien
gtattcatctacagtttgccaagaa

SEQ ID NO: 4897341 - DNA, 25 bp, Homo sapien
gccaagaaagtacttccttatccat

SEQ ID NO: 4897342 - DNA, 25 bp, Homo sapien
tcttgttagaaagcaattgaactga

SEQ ID NO: 4897343 - DNA, 25 bp, Homo sapien
tataatgggagaactgaaacacaca

SEQ ID NO: 4897344 - DNA, 25 bp, Homo sapien
agaggagcagctgcgtgccgcgtga

SEQ ID NO: 4897345 - DNA, 25 bp, Homo sapien
aagatcgaggtccagaggagcagct

SEQ ID NO: 4897346 - DNA, 25 bp, Homo sapien
tcaagatcgaggtccagaggagcag

SEQ ID NO: 4897347 - DNA, 25 bp, Homo sapien
ccagaggagcagctgcgtgccgcgt

SEQ ID NO: 4897348 - DNA, 25 bp, Homo sapien
tgatggaaccgacaccaaagctggg

SEQ ID NO: 4897349 - DNA, 25 bp, Homo sapien
tccgactgcgctcaatgtggaagcc

SEQ ID NO: 4897350 - DNA, 25 bp, Homo sapien
gaagcctggaagtatacctcgtggg

SEQ ID NO: 4897351 - DNA, 25 bp, Homo sapien
tgttgcacacaggttatggcgccac

SEQ ID NO: 4897352 - DNA, 25 bp, Homo sapien
gcgtggtccagtgtaacagtcttta

SEQ ID NO: 4897353 - DNA, 25 bp, Homo sapien
tcctgaatatggaaagcgtggtcca

SEQ ID NO: 4897354 - DNA, 25 bp, Homo sapien
gggagcattgacacaagttcctgaa

SEQ ID NO: 4897355 - DNA, 25 bp, Homo sapien
taagctgttaggtgcaaagaattgc

SEQ ID NO: 4897356 - DNA, 25 bp, Homo sapien
gccttaatgatatgtgtagcactgt

SEQ ID NO: 4897357 - DNA, 25 bp, Homo sapien
tacattctgttgttcttgggtaggg

SEQ ID NO: 4897358 - DNA, 25 bp, Homo sapien
tattaatccgcgtgctccaatgcta

SEQ ID NO: 4897359 - DNA, 25 bp, Homo sapien
caagcatgtggcctatcttagagtg

SEQ ID NO: 4897360 - DNA, 25 bp, Homo sapien
caattgtagcaactgtaatggcaac

SEQ ID NO: 4897361 - DNA, 25 bp, Homo sapien
tcccgtgttgtagccaacttggaaa

SEQ ID NO: 4897362 - DNA, 25 bp, Homo sapien
actgtaatggcaacgatcagagctg

SEQ ID NO: 4897363 - DNA, 25 bp, Homo sapien
ccaacttggaaagagccaattgtag

SEQ ID NO: 4897364 - DNA, 25 bp, Homo sapien
gatatttgcctggtcactcaaagtg

SEQ ID NO: 4897365 - DNA, 25 bp, Homo sapien
gggatatttgcctggtcactcaaag

SEQ ID NO: 4897366 - DNA, 25 bp, Homo sapien
cactcaaagtgttattgataaattc

SEQ ID NO: 4897367 - DNA, 25 bp, Homo sapien
tatttgcctggtcactcaaagtgtt

SEQ ID NO: 4897368 - DNA, 25 bp, Homo sapien
caacaatggagaatatggccacaga

SEQ ID NO: 4897369 - DNA, 25 bp, Homo sapien
caatggagaatatggccacagacaa

SEQ ID NO: 4897370 - DNA, 25 bp, Homo sapien
aatggagaatatggccacagacaag

SEQ ID NO: 4897371 - DNA, 25 bp, Homo sapien
ggagaatatggccacagacaaggac

SEQ ID NO: 4897372 - DNA, 25 bp, Homo sapien
ctgtcaaaaagtggttgataaagag

SEQ ID NO: 4897373 - DNA, 25 bp, Homo sapien
tgtcaaaaagtggttgataaagagt

SEQ ID NO: 4897374 - DNA, 25 bp, Homo sapien
gttgacgataagcattgaattgcac

SEQ ID NO: 4897375 - DNA, 25 bp, Homo sapien
ggttgacgataagcattgaattgca

SEQ ID NO: 4897376 - DNA, 25 bp, Homo sapien
agggtcagcatttcaaccaactcag

SEQ ID NO: 4897377 - DNA, 25 bp, Homo sapien
gaagaggccaataaccaagcagccc

SEQ ID NO: 4897378 - DNA, 25 bp, Homo sapien
cagcccagggtcagcatttcaacca

SEQ ID NO: 4897379 - DNA, 25 bp, Homo sapien
ctgtgcacagtccacagaagaggcc

SEQ ID NO: 4897380 - DNA, 25 bp, Homo sapien
gaattctgacaatgatgcccagctg

SEQ ID NO: 4897381 - DNA, 25 bp, Homo sapien
tctccaatgtacatgggcataaaac

SEQ ID NO: 4897382 - DNA, 25 bp, Homo sapien
ttgagagtgccaaaggtaccctgca

SEQ ID NO: 4897383 - DNA, 25 bp, Homo sapien
agggcagtagctgagatctctccaa

SEQ ID NO: 4897384 - DNA, 25 bp, Homo sapien
gctcttcagacccaaggatgaattt

SEQ ID NO: 4897385 - DNA, 25 bp, Homo sapien
cggccatagctcttcagacccaagg

SEQ ID NO: 4897386 - DNA, 25 bp, Homo sapien
caaggatgaatttgaattccagacc

SEQ ID NO: 4897387 - DNA, 25 bp, Homo sapien
cagacccaaggatgaatttgaattc

SEQ ID NO: 4897388 - DNA, 25 bp, Homo sapien
ctgggactttcagggcaaaatggaa

SEQ ID NO: 4897389 - DNA, 25 bp, Homo sapien
taatgagcaaaaacctgggactttc

SEQ ID NO: 4897390 - DNA, 25 bp, Homo sapien
aagggctgcactttgtaggatagca

SEQ ID NO: 4897391 - DNA, 25 bp, Homo sapien
gaaggatggtaaagcccaataatac

SEQ ID NO: 4897392 - DNA, 25 bp, Homo sapien
gggatacatcctgggtgccccacaa

SEQ ID NO: 4897393 - DNA, 25 bp, Homo sapien
taaacacacgtgcaccaatggtggc

SEQ ID NO: 4897394 - DNA, 25 bp, Homo sapien
cacgtgcaccaatggtggcatagat

SEQ ID NO: 4897395 - DNA, 25 bp, Homo sapien
gaagatagtattaaacacacgtgca

SEQ ID NO: 4897396 - DNA, 25 bp, Homo sapien
gtattaaacacacgtgcaccaatgg

SEQ ID NO: 4897397 - DNA, 25 bp, Homo sapien
ctttgcagcagaaatagggaaacta

SEQ ID NO: 4897398 - DNA, 25 bp, Homo sapien
tttgcagcagaaatagggaaactac

SEQ ID NO: 4897399 - DNA, 25 bp, Homo sapien
gcctatcatatgcagggtccgcctt

SEQ ID NO: 4897400 - DNA, 25 bp, Homo sapien
tcatatgcagggtccgccttcctgc

SEQ ID NO: 4897401 - DNA, 25 bp, Homo sapien
ctatcatatgcagggtccgccttcc

SEQ ID NO: 4897402 - DNA, 25 bp, Homo sapien
atcatatgcagggtccgccttcctg

SEQ ID NO: 4897403 - DNA, 25 bp, Homo sapien
ggagcagccggccattgcagtcgca

SEQ ID NO: 4897404 - DNA, 25 bp, Homo sapien
tggagcagccggccattgcagtcgc

SEQ ID NO: 4897405 - DNA, 25 bp, Homo sapien
cagcagaggggaagagcagtccgac

SEQ ID NO: 4897406 - DNA, 25 bp, Homo sapien
ctaaataataagcagcagaggggaa

SEQ ID NO: 4897407 - DNA, 25 bp, Homo sapien
gcagcagaggggaagagcagtccga

SEQ ID NO: 4897408 - DNA, 25 bp, Homo sapien
ctcctaaataataagcagcagaggg

SEQ ID NO: 4897409 - DNA, 25 bp, Homo sapien
ggaagctggcgaagataataaaaat

SEQ ID NO: 4897410 - DNA, 25 bp, Homo sapien
tgcctgccttttaaaggcccatgtg

SEQ ID NO: 4897411 - DNA, 25 bp, Homo sapien
ctgccttttaaaggcccatgtgata

SEQ ID NO: 4897412 - DNA, 25 bp, Homo sapien
cttttaaaggcccatgtgatatcct

SEQ ID NO: 4897413 - DNA, 25 bp, Homo sapien
cacaaaagaattccactcgagcaag

SEQ ID NO: 4897414 - DNA, 25 bp, Homo sapien
gatcaggcctcaagtaggatccaaa

SEQ ID NO: 4897415 - DNA, 25 bp, Homo sapien
gacgaatccttgtgcccaaaccatg

SEQ ID NO: 4897416 - DNA, 25 bp, Homo sapien
gggcatcagtatcctttccagaggc

SEQ ID NO: 4897417 - DNA, 25 bp, Homo sapien
agtcgagcgacggtggagaacaggt

SEQ ID NO: 4897418 - DNA, 25 bp, Homo sapien
gcgtccggagcgacgctgggaccgc

SEQ ID NO: 4897419 - DNA, 25 bp, Homo sapien
gggaccgcaggattcaggagaacct

SEQ ID NO: 4897420 - DNA, 25 bp, Homo sapien
tcttagaggtggaagtcgagcgacg

SEQ ID NO: 4897421 - DNA, 25 bp, Homo sapien
tttgatgaattattcaacctgagtt

SEQ ID NO: 4897422 - DNA, 25 bp, Homo sapien
tgatgaattattcaacctgagtttc

SEQ ID NO: 4897423 - DNA, 25 bp, Homo sapien
aatttgatgaattattcaacctgag

SEQ ID NO: 4897424 - DNA, 25 bp, Homo sapien
gtgtaatttgatgaattattcaacc

SEQ ID NO: 4897425 - DNA, 25 bp, Homo sapien
cacagtaagctatgcactgcagcct

SEQ ID NO: 4897426 - DNA, 25 bp, Homo sapien
ccacagtaagctatgcactgcagcc

SEQ ID NO: 4897427 - DNA, 25 bp, Homo sapien
gaggtttcggtcagtgagatcacgc

SEQ ID NO: 4897428 - DNA, 25 bp, Homo sapien
ggcggaggtttcggtcagtgagatc

SEQ ID NO: 4897429 - DNA, 25 bp, Homo sapien
cacataaagggtctgactttgaccc

SEQ ID NO: 4897430 - DNA, 25 bp, Homo sapien
taccactgttgaccacttgtattca

SEQ ID NO: 4897431 - DNA, 25 bp, Homo sapien
aacattcagcgccacctttgtgaca

SEQ ID NO: 4897432 - DNA, 25 bp, Homo sapien
tatccaaaagattggcacaggaaac

SEQ ID NO: 4897433 - DNA, 25 bp, Homo sapien
cttggaaaattggggattcaagcaa

SEQ ID NO: 4897434 - DNA, 25 bp, Homo sapien
tcaagcaattcttaatcctttctgt

SEQ ID NO: 4897435 - DNA, 25 bp, Homo sapien
ttggaaaattggggattcaagcaat

SEQ ID NO: 4897436 - DNA, 25 bp, Homo sapien
tcttaatcctttctgtgcgctcaac

SEQ ID NO: 4897437 - DNA, 25 bp, Homo sapien
ctcaatagttttgttgtcgatgtca

SEQ ID NO: 4897438 - DNA, 25 bp, Homo sapien
ttgttgtcgatgtcataaaccccaa

SEQ ID NO: 4897439 - DNA, 25 bp, Homo sapien
tgtccaagggtacattcacattccc

SEQ ID NO: 4897440 - DNA, 25 bp, Homo sapien
atcactcagctcaatagttttgttg

SEQ ID NO: 4897441 - DNA, 25 bp, Homo sapien
catcaccagtggtcgagttagcttc

SEQ ID NO: 4897442 - DNA, 25 bp, Homo sapien
tggtcgagttagcttcttgctggaa

SEQ ID NO: 4897443 - DNA, 25 bp, Homo sapien
ttttcatcaccagtggtcgagttag

SEQ ID NO: 4897444 - DNA, 25 bp, Homo sapien
accagtggtcgagttagcttcttgc

SEQ ID NO: 4897445 - DNA, 25 bp, Homo sapien
tttcaaacaagaccactctattatc

SEQ ID NO: 4897446 - DNA, 25 bp, Homo sapien
caagaccactctattatcttttatt

SEQ ID NO: 4897447 - DNA, 25 bp, Homo sapien
caaacaagaccactctattatcttt

SEQ ID NO: 4897448 - DNA, 25 bp, Homo sapien
ccatttcaaacaagaccactctatt

SEQ ID NO: 4897449 - DNA, 25 bp, Homo sapien
tcagatgtctgcttgtggaattcca

SEQ ID NO: 4897450 - DNA, 25 bp, Homo sapien
tatgggtctgactttccaaatagat

SEQ ID NO: 4897451 - DNA, 25 bp, Homo sapien
tggaattccaggtatgggtctgact

SEQ ID NO: 4897452 - DNA, 25 bp, Homo sapien
tgtccgatgaaccattagccagttt

SEQ ID NO: 4897453 - DNA, 25 bp, Homo sapien
ttgaaaggcctccaaacaggattca

SEQ ID NO: 4897454 - DNA, 25 bp, Homo sapien
gagagatcttgaaaggcctccaaac

SEQ ID NO: 4897455 - DNA, 25 bp, Homo sapien
gtaacacagtgagttaagagagatc

SEQ ID NO: 4897456 - DNA, 25 bp, Homo sapien
cttaatggttttgtccatatctccg

SEQ ID NO: 4897457 - DNA, 25 bp, Homo sapien
gttcttacggtaacatctgcttcta

SEQ ID NO: 4897458 - DNA, 25 bp, Homo sapien
ccctcccttgctaagggcagaagca

SEQ ID NO: 4897459 - DNA, 25 bp, Homo sapien
gaagcaagctctgagttcttacggt

SEQ ID NO: 4897460 - DNA, 25 bp, Homo sapien
caaaggcaaataatgtagttcgagg

SEQ ID NO: 4897461 - DNA, 25 bp, Homo sapien
aaatgttccaatgagatcatgtgac

SEQ ID NO: 4897462 - DNA, 25 bp, Homo sapien
ttctggaggcttctttcagttttgt

SEQ ID NO: 4897463 - DNA, 25 bp, Homo sapien
ggtgagcttctggaggcttctttca

SEQ ID NO: 4897464 - DNA, 25 bp, Homo sapien
gcttctggaggcttctttcagtttt

SEQ ID NO: 4897465 - DNA, 25 bp, Homo sapien
tgagcttctggaggcttctttcagt

SEQ ID NO: 4897466 - DNA, 25 bp, Homo sapien
agtgtggttccctctagtgcttgcc

SEQ ID NO: 4897467 - DNA, 25 bp, Homo sapien
ggagtcctcatctggcattagtaac

SEQ ID NO: 4897468 - DNA, 25 bp, Homo sapien
ccctgcattggttgctggatggaac

SEQ ID NO: 4897469 - DNA, 25 bp, Homo sapien
aactgttacgtggtgttctgctcaa

SEQ ID NO: 4897470 - DNA, 25 bp, Homo sapien
taacacctgaattcttgtagctttt

SEQ ID NO: 4897471 - DNA, 25 bp, Homo sapien
aacacctgaattcttgtagcttttt

SEQ ID NO: 4897472 - DNA, 25 bp, Homo sapien
gataacacctgaattcttgtagctt

SEQ ID NO: 4897473 - DNA, 25 bp, Homo sapien
ctcacactgtttcacactgataaca

SEQ ID NO: 4897474 - DNA, 25 bp, Homo sapien
cccctatgtgccatgaatctgtaaa

SEQ ID NO: 4897475 - DNA, 25 bp, Homo sapien
taatgaatccaatatgttgagggct

SEQ ID NO: 4897476 - DNA, 25 bp, Homo sapien
taatggcgaaagatgaaatacactc

SEQ ID NO: 4897477 - DNA, 25 bp, Homo sapien
tggaaattacccctgcattcaggtt

SEQ ID NO: 4897478 - DNA, 25 bp, Homo sapien
ctgacatcctcccattatatagtca

SEQ ID NO: 4897479 - DNA, 25 bp, Homo sapien
gacatcctcccattatatagtcaag

SEQ ID NO: 4897480 - DNA, 25 bp, Homo sapien
catcctcccattatatagtcaagga

SEQ ID NO: 4897481 - DNA, 25 bp, Homo sapien
agctgacatcctcccattatatagt

SEQ ID NO: 4897482 - DNA, 25 bp, Homo sapien
cagggacacctgtgcttgatgtcca

SEQ ID NO: 4897483 - DNA, 25 bp, Homo sapien
tgccaaataacaattgcagccctta

SEQ ID NO: 4897484 - DNA, 25 bp, Homo sapien
gcagggacacctgtgcttgatgtcc

SEQ ID NO: 4897485 - DNA, 25 bp, Homo sapien
acaattgcagcccttagtaaggaga

SEQ ID NO: 4897486 - DNA, 25 bp, Homo sapien
ttgaatgaccagtcccacagaccag

SEQ ID NO: 4897487 - DNA, 25 bp, Homo sapien
ggagtctggagaccttgggtcacca

SEQ ID NO: 4897488 - DNA, 25 bp, Homo sapien
gaccttgggtcaccattggagccag

SEQ ID NO: 4897489 - DNA, 25 bp, Homo sapien
tcaaatactcattaacgccattggg

SEQ ID NO: 4897490 - DNA, 25 bp, Homo sapien
tgaggaggtatctgagcgccaaaac

SEQ ID NO: 4897491 - DNA, 25 bp, Homo sapien
gtatctgagcgccaaaaccaaaagc

SEQ ID NO: 4897492 - DNA, 25 bp, Homo sapien
ggaggtatctgagcgccaaaaccaa

SEQ ID NO: 4897493 - DNA, 25 bp, Homo sapien
tgccactgaggaggtatctgagcgc

SEQ ID NO: 4897494 - DNA, 25 bp, Homo sapien
tagggattggatgggttgaagttca

SEQ ID NO: 4897495 - DNA, 25 bp, Homo sapien
tgcagtagggattggatgggttgaa

SEQ ID NO: 4897496 - DNA, 25 bp, Homo sapien
cattgcagtagggattggatgggtt

SEQ ID NO: 4897497 - DNA, 25 bp, Homo sapien
cagtagggattggatgggttgaagt

SEQ ID NO: 4897498 - DNA, 25 bp, Homo sapien
ataacaaagactagtgagcctttcc

SEQ ID NO: 4897499 - DNA, 25 bp, Homo sapien
tgatttgccccgtaattaccattac

SEQ ID NO: 4897500 - DNA, 25 bp, Homo sapien
tcatcataatactgatttgccccgt

SEQ ID NO: 4897501 - DNA, 25 bp, Homo sapien
caccaacctggtgcaattcttctac

SEQ ID NO: 4897502 - DNA, 25 bp, Homo sapien
tcacagagtgactgaacttctaaaa

SEQ ID NO: 4897503 - DNA, 25 bp, Homo sapien
tttccagagtgtaaaccacttggtg

SEQ ID NO: 4897504 - DNA, 25 bp, Homo sapien
caaggatgggcttacattactcaca

SEQ ID NO: 4897505 - DNA, 25 bp, Homo sapien
cacttggtgaacagcccaaggatgg

SEQ ID NO: 4897506 - DNA, 25 bp, Homo sapien
cctggccacgtgatttatgattgga

SEQ ID NO: 4897507 - DNA, 25 bp, Homo sapien
agaaaaattagttggtccatagagt

SEQ ID NO: 4897508 - DNA, 25 bp, Homo sapien
ctgtctgctgttgcgtggctgcagc

SEQ ID NO: 4897509 - DNA, 25 bp, Homo sapien
catagagttttatctgaggaagaca

SEQ ID NO: 4897510 - DNA, 25 bp, Homo sapien
cattccctggccatagagcacttac

SEQ ID NO: 4897511 - DNA, 25 bp, Homo sapien
cccattccctggccatagagcactt

SEQ ID NO: 4897512 - DNA, 25 bp, Homo sapien
ttcccattccctggccatagagcac

SEQ ID NO: 4897513 - DNA, 25 bp, Homo sapien
ccattccctggccatagagcactta

SEQ ID NO: 4897514 - DNA, 25 bp, Homo sapien
ctgccagaaaaagaaaacatgtccc

SEQ ID NO: 4897515 - DNA, 25 bp, Homo sapien
catccagaaactccatggcgctgaa

SEQ ID NO: 4897516 - DNA, 25 bp, Homo sapien
gggagcggagacttccaccatcacc

SEQ ID NO: 4897517 - DNA, 25 bp, Homo sapien
gcctggaggcattaactatagcttg

SEQ ID NO: 4897518 - DNA, 25 bp, Homo sapien
tctgatggccacttcgcccaatggg

SEQ ID NO: 4897519 - DNA, 25 bp, Homo sapien
tttgagtagggaggagtggtactca

SEQ ID NO: 4897520 - DNA, 25 bp, Homo sapien
tttagtgtttgagtagggaggagtg

SEQ ID NO: 4897521 - DNA, 25 bp, Homo sapien
ttgagtagggaggagtggtactcac

SEQ ID NO: 4897522 - DNA, 25 bp, Homo sapien
agtgtttgagtagggaggagtggta

SEQ ID NO: 4897523 - DNA, 25 bp, Homo sapien
ctaatcaactgcctggttgtagatg

SEQ ID NO: 4897524 - DNA, 25 bp, Homo sapien
aatcaactgcctggttgtagatggg

SEQ ID NO: 4897525 - DNA, 25 bp, Homo sapien
tgtagatgggcaaaggtctgtgttc

SEQ ID NO: 4897526 - DNA, 25 bp, Homo sapien
tgggcaaaggtctgtgttcagtcac

SEQ ID NO: 4897527 - DNA, 25 bp, Homo sapien
tgtatgtattgaagtagcccaccac

SEQ ID NO: 4897528 - DNA, 25 bp, Homo sapien
cacactgagcaagtgcttcttttgg

SEQ ID NO: 4897529 - DNA, 25 bp, Homo sapien
gctggggaatctctgccaagacaca

SEQ ID NO: 4897530 - DNA, 25 bp, Homo sapien
tctgttgtttcgtggctgggttctt

SEQ ID NO: 4897531 - DNA, 25 bp, Homo sapien
gctactagttagatgccttccccag

SEQ ID NO: 4897532 - DNA, 25 bp, Homo sapien
tatccaaaggacagctagccaagtg

SEQ ID NO: 4897533 - DNA, 25 bp, Homo sapien
gaacatctgagacaactatggctcc

SEQ ID NO: 4897534 - DNA, 25 bp, Homo sapien
catagtttttagcacataggccctc

SEQ ID NO: 4897535 - DNA, 25 bp, Homo sapien
gaaaaccaggaatgctcataaccag

SEQ ID NO: 4897536 - DNA, 25 bp, Homo sapien
tgggcaccgtcactccgatatatat

SEQ ID NO: 4897537 - DNA, 25 bp, Homo sapien
tacttagtgaagacagctttccagg

SEQ ID NO: 4897538 - DNA, 25 bp, Homo sapien
gaaatattacatctatcctgggcac

SEQ ID NO: 4897539 - DNA, 25 bp, Homo sapien
atgaaaacacactactctgtcacat

SEQ ID NO: 4897540 - DNA, 25 bp, Homo sapien
tgaaaacacactactctgtcacatc

SEQ ID NO: 4897541 - DNA, 25 bp, Homo sapien
gaaaacacactactctgtcacatca

SEQ ID NO: 4897542 - DNA, 25 bp, Homo sapien
aaacacactactctgtcacatcaag

SEQ ID NO: 4897543 - DNA, 25 bp, Homo sapien
gggctcattgataagtactgccctg

SEQ ID NO: 4897544 - DNA, 25 bp, Homo sapien
attgataagtactgccctggcatcc

SEQ ID NO: 4897545 - DNA, 25 bp, Homo sapien
acaagctgcggccctactaccaggg

SEQ ID NO: 4897546 - DNA, 25 bp, Homo sapien
ctaccaggggctcattgataagtac

SEQ ID NO: 4897547 - DNA, 25 bp, Homo sapien
ccctggcacacaggcggtgactacc

SEQ ID NO: 4897548 - DNA, 25 bp, Homo sapien
gtgactaccagcagtggtgcagcaa

SEQ ID NO: 4897549 - DNA, 25 bp, Homo sapien
acaggcggtgactaccagcagtggt

SEQ ID NO: 4897550 - DNA, 25 bp, Homo sapien
ggcacacaggcggtgactaccagca

SEQ ID NO: 4897551 - DNA, 25 bp, Homo sapien
tcccattgatccgacttccttcact

SEQ ID NO: 4897552 - DNA, 25 bp, Homo sapien
gtttcccattgatccgacttccttc

SEQ ID NO: 4897553 - DNA, 25 bp, Homo sapien
cccattgatccgacttccttcactg

SEQ ID NO: 4897554 - DNA, 25 bp, Homo sapien
tttcccattgatccgacttccttca

SEQ ID NO: 4897555 - DNA, 25 bp, Homo sapien
ggcttgtctcctaggttggtctcac

SEQ ID NO: 4897556 - DNA, 25 bp, Homo sapien
ttcaggcttgtctcctaggttggtc

SEQ ID NO: 4897557 - DNA, 25 bp, Homo sapien
ctatgttcaggcttgtctcctaggt

SEQ ID NO: 4897558 - DNA, 25 bp, Homo sapien
tgttcaggcttgtctcctaggttgg

SEQ ID NO: 4897559 - DNA, 25 bp, Homo sapien
gagaaaatccaagccgtcagctgaa

SEQ ID NO: 4897560 - DNA, 25 bp, Homo sapien
agccgtcagctgaaagctatcgatg

SEQ ID NO: 4897561 - DNA, 25 bp, Homo sapien
agctatcgatgtaagtgcttgtgtg

SEQ ID NO: 4897562 - DNA, 25 bp, Homo sapien
tctgagaaaatccaagccgtcagct

SEQ ID NO: 4897563 - DNA, 25 bp, Homo sapien
tgtggtactgtgatctcttacttcc

SEQ ID NO: 4897564 - DNA, 25 bp, Homo sapien
gatctcttacttccaatgtcaccat

SEQ ID NO: 4897565 - DNA, 25 bp, Homo sapien
tccagctgtggtactgtgatctctt

SEQ ID NO: 4897566 - DNA, 25 bp, Homo sapien
actgtgatctcttacttccaatgtc

SEQ ID NO: 4897567 - DNA, 25 bp, Homo sapien
ggatataactcaggctataactcct

SEQ ID NO: 4897568 - DNA, 25 bp, Homo sapien
tgctatatgtaaaccacctgcagct

SEQ ID NO: 4897569 - DNA, 25 bp, Homo sapien
aaagcctgtgctgctatatgtaaac

SEQ ID NO: 4897570 - DNA, 25 bp, Homo sapien
tgtctcactgccgacctaaggccaa

SEQ ID NO: 4897571 - DNA, 25 bp, Homo sapien
cagcagcagcaaaaagtttctgtct

SEQ ID NO: 4897572 - DNA, 25 bp, Homo sapien
gttatccaggtgttaacagcagcag

SEQ ID NO: 4897573 - DNA, 25 bp, Homo sapien
atgaccaggtgaaaagttatccagg

SEQ ID NO: 4897574 - DNA, 25 bp, Homo sapien
tcactgtcagtgtagggcctcagta

SEQ ID NO: 4897575 - DNA, 25 bp, Homo sapien
caatccaaaagcaaattctgtcggc

SEQ ID NO: 4897576 - DNA, 25 bp, Homo sapien
gatcctgttgaagggcagatcatcc

SEQ ID NO: 4897577 - DNA, 25 bp, Homo sapien
cccatctcagtacaaggaatcttca

SEQ ID NO: 4897578 - DNA, 25 bp, Homo sapien
ttcaccggagtagcctggatgatcc

SEQ ID NO: 4897579 - DNA, 25 bp, Homo sapien
tttgtaagacattgacagacaatag

SEQ ID NO: 4897580 - DNA, 25 bp, Homo sapien
taagacattgacagacaatagagaa

SEQ ID NO: 4897581 - DNA, 25 bp, Homo sapien
gggtttgtaagacattgacagacaa

SEQ ID NO: 4897582 - DNA, 25 bp, Homo sapien
ctggggtttgtaagacattgacaga

SEQ ID NO: 4897583 - DNA, 25 bp, Homo sapien
aacagggctgtttgagctcagccaa

SEQ ID NO: 4897584 - DNA, 25 bp, Homo sapien
aatgctctttatgtgggcagcaggc

SEQ ID NO: 4897585 - DNA, 25 bp, Homo sapien
tgttcatattgcaactgttcaccaa

SEQ ID NO: 4897586 - DNA, 25 bp, Homo sapien
gaaacagggctgtttgagctcagcc

SEQ ID NO: 4897587 - DNA, 25 bp, Homo sapien
cctcttggactagtccttctaccat

SEQ ID NO: 4897588 - DNA, 25 bp, Homo sapien
ctcttggactagtccttctaccatt

SEQ ID NO: 4897589 - DNA, 25 bp, Homo sapien
tcctcttggactagtccttctacca

SEQ ID NO: 4897590 - DNA, 25 bp, Homo sapien
cacgcccagtctaaagtcccccact

SEQ ID NO: 4897591 - DNA, 25 bp, Homo sapien
gaagtcccactgatgccatttgtcc

SEQ ID NO: 4897592 - DNA, 25 bp, Homo sapien
tctgaaagacacagggttcacccct

SEQ ID NO: 4897593 - DNA, 25 bp, Homo sapien
ctgaaagacacagggttcacccctg

SEQ ID NO: 4897594 - DNA, 25 bp, Homo sapien
tgaaagacacagggttcacccctgt

SEQ ID NO: 4897595 - DNA, 25 bp, Homo sapien
catgggtgacaacagttaccatatc

SEQ ID NO: 4897596 - DNA, 25 bp, Homo sapien
gacaacagttaccatatctagaatc

SEQ ID NO: 4897597 - DNA, 25 bp, Homo sapien
ccatgtagaactgaccaaagctttc

SEQ ID NO: 4897598 - DNA, 25 bp, Homo sapien
ttctgttccaatctcatgggtgaca

SEQ ID NO: 4897599 - DNA, 25 bp, Homo sapien
tcaattcatcatcacatgggccttt

SEQ ID NO: 4897600 - DNA, 25 bp, Homo sapien
tcatcatcacatgggcctttcaagg

SEQ ID NO: 4897601 - DNA, 25 bp, Homo sapien
aggaggtttcaattcatcatcacat

SEQ ID NO: 4897602 - DNA, 25 bp, Homo sapien
aggtttcaattcatcatcacatggg

SEQ ID NO: 4897603 - DNA, 25 bp, Homo sapien
cacccacagatgatcaccttcattc

SEQ ID NO: 4897604 - DNA, 25 bp, Homo sapien
catagcttttgtgctagtgtcagac

SEQ ID NO: 4897605 - DNA, 25 bp, Homo sapien
gtttctcctgatcacccacagatga

SEQ ID NO: 4897606 - DNA, 25 bp, Homo sapien
cagacagagcatcttgcacagagca

SEQ ID NO: 4897607 - DNA, 25 bp, Homo sapien
gaggctcacgagttcctcatgtgca

SEQ ID NO: 4897608 - DNA, 25 bp, Homo sapien
catgtaagccatcattgaatgctgc

SEQ ID NO: 4897609 - DNA, 25 bp, Homo sapien
ccatagcatggcagttagaaactta

SEQ ID NO: 4897610 - DNA, 25 bp, Homo sapien
tagaaacttagattctggagccaca

SEQ ID NO: 4897611 - DNA, 25 bp, Homo sapien
ttttatggacaacttggtgggcaag

SEQ ID NO: 4897612 - DNA, 25 bp, Homo sapien
catgagtccagtggggtcagtctga

SEQ ID NO: 4897613 - DNA, 25 bp, Homo sapien
accagctgagtccatgagtcatgag

SEQ ID NO: 4897614 - DNA, 25 bp, Homo sapien
aaagggattatgaaaactatgccca

SEQ ID NO: 4897615 - DNA, 25 bp, Homo sapien
tgctggttggaggtccatactttga

SEQ ID NO: 4897616 - DNA, 25 bp, Homo sapien
ttctagcaagtatccagatgctgct

SEQ ID NO: 4897617 - DNA, 25 bp, Homo sapien
ctgctggttggaggtccatactttg

SEQ ID NO: 4897618 - DNA, 25 bp, Homo sapien
gagtcttgtccaagcacagatgaga

SEQ ID NO: 4897619 - DNA, 25 bp, Homo sapien
tacacagttggtatgtttcagagtc

SEQ ID NO: 4897620 - DNA, 25 bp, Homo sapien
aagtccgtgacaaaagtcctcagag

SEQ ID NO: 4897621 - DNA, 25 bp, Homo sapien
tagctccagatttaccaaaggcagg

SEQ ID NO: 4897622 - DNA, 25 bp, Homo sapien
atgttccagttacttggaaattggg

SEQ ID NO: 4897623 - DNA, 25 bp, Homo sapien
aatgttccagttacttggaaattgg

SEQ ID NO: 4897624 - DNA, 25 bp, Homo sapien
gaatgttccagttacttggaaattg

SEQ ID NO: 4897625 - DNA, 25 bp, Homo sapien
tgtacagaaatcaacaaaggcatct

SEQ ID NO: 4897626 - DNA, 25 bp, Homo sapien
aaggcatctgccacgctgtctggga

SEQ ID NO: 4897627 - DNA, 25 bp, Homo sapien
tcaacaaaggcatctgccacgctgt

SEQ ID NO: 4897628 - DNA, 25 bp, Homo sapien
gaaatcaacaaaggcatctgccacg

SEQ ID NO: 4897629 - DNA, 25 bp, Homo sapien
acagttgccctccaaatgcacaaaa

SEQ ID NO: 4897630 - DNA, 25 bp, Homo sapien
cacagttgccctccaaatgcacaaa

SEQ ID NO: 4897631 - DNA, 25 bp, Homo sapien
tcacagttgccctccaaatgcacaa

SEQ ID NO: 4897632 - DNA, 25 bp, Homo sapien
cagttgccctccaaatgcacaaaac

SEQ ID NO: 4897633 - DNA, 25 bp, Homo sapien
tctgtttgtgttcctgatcaaattt

SEQ ID NO: 4897634 - DNA, 25 bp, Homo sapien
ggtctgtttgtgttcctgatcaaat

SEQ ID NO: 4897635 - DNA, 25 bp, Homo sapien
tgtttgtgttcctgatcaaattttg

SEQ ID NO: 4897636 - DNA, 25 bp, Homo sapien
gtttgtgttcctgatcaaattttgg

SEQ ID NO: 4897637 - DNA, 25 bp, Homo sapien
tagtttcttatgattccagagactt

SEQ ID NO: 4897638 - DNA, 25 bp, Homo sapien
aatagtttcttatgattccagagac

SEQ ID NO: 4897639 - DNA, 25 bp, Homo sapien
ccaatagtttcttatgattccagag

SEQ ID NO: 4897640 - DNA, 25 bp, Homo sapien
aaccaatagtttcttatgattccag

SEQ ID NO: 4897641 - DNA, 25 bp, Homo sapien
gtttttcgagaatcacctagctcag

SEQ ID NO: 4897642 - DNA, 25 bp, Homo sapien
tcacaaacttgtgggcttcagcaaa

SEQ ID NO: 4897643 - DNA, 25 bp, Homo sapien
tcagggttccaggttagaatgtgcc

SEQ ID NO: 4897644 - DNA, 25 bp, Homo sapien
ccagaggcgcttgcatgaagtttga

SEQ ID NO: 4897645 - DNA, 25 bp, Homo sapien
gattttgcccttcttgatatccagt

SEQ ID NO: 4897646 - DNA, 25 bp, Homo sapien
tgctaataataatccactggggtct

SEQ ID NO: 4897647 - DNA, 25 bp, Homo sapien
ttcatttgctaataataatccactg

SEQ ID NO: 4897648 - DNA, 25 bp, Homo sapien
gctgataaggttgaagattttgccc

SEQ ID NO: 4897649 - DNA, 25 bp, Homo sapien
gttattctatgtggtatatttttac

SEQ ID NO: 4897650 - DNA, 25 bp, Homo sapien
gagctcagataaggtatcacttgct

SEQ ID NO: 4897651 - DNA, 25 bp, Homo sapien
ttttgagctcagataaggtatcact

SEQ ID NO: 4897652 - DNA, 25 bp, Homo sapien
atattttgagctcagataaggtatc

SEQ ID NO: 4897653 - DNA, 25 bp, Homo sapien
tgggtagttagaaacataaagtctc

SEQ ID NO: 4897654 - DNA, 25 bp, Homo sapien
cataggaatgaactagatgatgctg

SEQ ID NO: 4897655 - DNA, 25 bp, Homo sapien
atgctgggatgggtagttagaaaca

SEQ ID NO: 4897656 - DNA, 25 bp, Homo sapien
tgttaggggctgttcagcataggaa

SEQ ID NO: 4897657 - DNA, 25 bp, Homo sapien
ttaaagaggatcagaataggcctga

SEQ ID NO: 4897658 - DNA, 25 bp, Homo sapien
ctacattttagtccagtggaaatca

SEQ ID NO: 4897659 - DNA, 25 bp, Homo sapien
ccagtggaaatcataaggaggactt

SEQ ID NO: 4897660 - DNA, 25 bp, Homo sapien
atttccaagagtgtcatctagacca

SEQ ID NO: 4897661 - DNA, 25 bp, Homo sapien
gaccaggaagaactatgctacattt

SEQ ID NO: 4897662 - DNA, 25 bp, Homo sapien
ggttgaatcctacggaatcttcttg

SEQ ID NO: 4897663 - DNA, 25 bp, Homo sapien
gctcataaagcagaacttcaaggtc

SEQ ID NO: 4897664 - DNA, 25 bp, Homo sapien
gaggcaaatgatcactctttgcctg

SEQ ID NO: 4897665 - DNA, 25 bp, Homo sapien
aaggtcctctctgataggttgaatc

SEQ ID NO: 4897666 - DNA, 25 bp, Homo sapien
tgtcatgtgagacaaaatagctgct

SEQ ID NO: 4897667 - DNA, 25 bp, Homo sapien
ctgtcatgtgagacaaaatagctgc

SEQ ID NO: 4897668 - DNA, 25 bp, Homo sapien
ctgctggaagagaagacatcggcat

SEQ ID NO: 4897669 - DNA, 25 bp, Homo sapien
tggtatactgtgaagtggaggagga

SEQ ID NO: 4897670 - DNA, 25 bp, Homo sapien
actgtgaagtggaggaggaggcaca

SEQ ID NO: 4897671 - DNA, 25 bp, Homo sapien
ttggtatactgtgaagtggaggagg

SEQ ID NO: 4897672 - DNA, 25 bp, Homo sapien
gtgaagtggaggaggaggcacattg

SEQ ID NO: 4897673 - DNA, 25 bp, Homo sapien
ttaatgtgcttagactttttcaagt

SEQ ID NO: 4897674 - DNA, 25 bp, Homo sapien
attaatgtgcttagactttttcaag

SEQ ID NO: 4897675 - DNA, 25 bp, Homo sapien
ctgtgttgtcctctaatgtggcata

SEQ ID NO: 4897676 - DNA, 25 bp, Homo sapien
tgtgttgtcctctaatgtggcataa

SEQ ID NO: 4897677 - DNA, 25 bp, Homo sapien
tgtcctctaatgtggcataatgcat

SEQ ID NO: 4897678 - DNA, 25 bp, Homo sapien
gttgtcctctaatgtggcataatgc

SEQ ID NO: 4897679 - DNA, 25 bp, Homo sapien
ttactccatgtcgaaaggcactggg

SEQ ID NO: 4897680 - DNA, 25 bp, Homo sapien
gcaatatcaaagttgcatgccttct

SEQ ID NO: 4897681 - DNA, 25 bp, Homo sapien
tccatgtcgaaaggcactgggtgca

SEQ ID NO: 4897682 - DNA, 25 bp, Homo sapien
aatatcaaagttgcatgccttcttc

SEQ ID NO: 4897683 - DNA, 25 bp, Homo sapien
gcaggaatactttaggatattgctt

SEQ ID NO: 4897684 - DNA, 25 bp, Homo sapien
tttttggtgcaggaatactttagga

SEQ ID NO: 4897685 - DNA, 25 bp, Homo sapien
tgataagatattgctcatactccgg

SEQ ID NO: 4897686 - DNA, 25 bp, Homo sapien
tattgcttcataaatgtatcgtgag

SEQ ID NO: 4897687 - DNA, 25 bp, Homo sapien
gagagggcagttacaccttccgcaa

SEQ ID NO: 4897688 - DNA, 25 bp, Homo sapien
ccgcaacacccttaagtaatctcat

SEQ ID NO: 4897689 - DNA, 25 bp, Homo sapien
gagggcagttacaccttccgcaaca

SEQ ID NO: 4897690 - DNA, 25 bp, Homo sapien
ttccgcaacacccttaagtaatctc

SEQ ID NO: 4897691 - DNA, 25 bp, Homo sapien
tttgagaggagctgcatcacaatgt

SEQ ID NO: 4897692 - DNA, 25 bp, Homo sapien
aatttgagaggagctgcatcacaat

SEQ ID NO: 4897693 - DNA, 25 bp, Homo sapien
ttgagaggagctgcatcacaatgtg

SEQ ID NO: 4897694 - DNA, 25 bp, Homo sapien
atttgagaggagctgcatcacaatg

SEQ ID NO: 4897695 - DNA, 25 bp, Homo sapien
tgtgtaatatgaaccagtgaggaaa

SEQ ID NO: 4897696 - DNA, 25 bp, Homo sapien
gtgtaatatgaaccagtgaggaaag

SEQ ID NO: 4897697 - DNA, 25 bp, Homo sapien
tgtaatatgaaccagtgaggaaaga

SEQ ID NO: 4897698 - DNA, 25 bp, Homo sapien
ctgtgtaatatgaaccagtgaggaa

SEQ ID NO: 4897699 - DNA, 25 bp, Homo sapien
cttcactcctggttgctccgtgact

SEQ ID NO: 4897700 - DNA, 25 bp, Homo sapien
tctttaagatagctaggaattcttc

SEQ ID NO: 4897701 - DNA, 25 bp, Homo sapien
tctctgtggctctttttggtctata

SEQ ID NO: 4897702 - DNA, 25 bp, Homo sapien
cagctatattgttagaatcatcagg

SEQ ID NO: 4897703 - DNA, 25 bp, Homo sapien
accatgtgctctctgaacatggaca

SEQ ID NO: 4897704 - DNA, 25 bp, Homo sapien
tgtcacagcccacccattgacagca

SEQ ID NO: 4897705 - DNA, 25 bp, Homo sapien
ctactgtaatttggtggctgtcaca

SEQ ID NO: 4897706 - DNA, 25 bp, Homo sapien
gcccacccattgacagcagtgagtt

SEQ ID NO: 4897707 - DNA, 25 bp, Homo sapien
ctgtaatttggtggctgtcacagcc

SEQ ID NO: 4897708 - DNA, 25 bp, Homo sapien
gaattatggtacactgtgtgacttc

SEQ ID NO: 4897709 - DNA, 25 bp, Homo sapien
aattatggtacactgtgtgacttcc

SEQ ID NO: 4897710 - DNA, 25 bp, Homo sapien
gcttggctggatagtactcttgctc

SEQ ID NO: 4897711 - DNA, 25 bp, Homo sapien
tgtcagagagggcataagcttggct

SEQ ID NO: 4897712 - DNA, 25 bp, Homo sapien
ggatagtactcttgctcagagctgg

SEQ ID NO: 4897713 - DNA, 25 bp, Homo sapien
tcattagatgtcagagagggcataa

SEQ ID NO: 4897714 - DNA, 25 bp, Homo sapien
gaggttcccagtagggaaatatctg

SEQ ID NO: 4897715 - DNA, 25 bp, Homo sapien
gttcccagtagggaaatatctgaga

SEQ ID NO: 4897716 - DNA, 25 bp, Homo sapien
taactgtgcatggaggttcccagta

SEQ ID NO: 4897717 - DNA, 25 bp, Homo sapien
tgcatggaggttcccagtagggaaa

SEQ ID NO: 4897718 - DNA, 25 bp, Homo sapien
ttagctctactgattataaggtagc

SEQ ID NO: 4897719 - DNA, 25 bp, Homo sapien
taaagacagaatttggtcctcccat

SEQ ID NO: 4897720 - DNA, 25 bp, Homo sapien
gaaaaactcttcagtcacaaccatt

SEQ ID NO: 4897721 - DNA, 25 bp, Homo sapien
tataaggtagctatcagtataaaga

SEQ ID NO: 4897722 - DNA, 25 bp, Homo sapien
tttgtattcttagcaataggaaaga

SEQ ID NO: 4897723 - DNA, 25 bp, Homo sapien
ttgtattcttagcaataggaaagaa

SEQ ID NO: 4897724 - DNA, 25 bp, Homo sapien
ccttttcaattgtagatgacaccaa

SEQ ID NO: 4897725 - DNA, 25 bp, Homo sapien
ttttcaattgtagatgacaccaaga

SEQ ID NO: 4897726 - DNA, 25 bp, Homo sapien
ctccttttcaattgtagatgacacc

SEQ ID NO: 4897727 - DNA, 25 bp, Homo sapien
tccttttcaattgtagatgacacca

SEQ ID NO: 4897728 - DNA, 25 bp, Homo sapien
ggaaccagagttccaggggactgac

SEQ ID NO: 4897729 - DNA, 25 bp, Homo sapien
ctgagggaaccagagttccagggga

SEQ ID NO: 4897730 - DNA, 25 bp, Homo sapien
agggaaccagagttccaggggactg

SEQ ID NO: 4897731 - DNA, 25 bp, Homo sapien
tgagggaaccagagttccaggggac

SEQ ID NO: 4897732 - DNA, 25 bp, Homo sapien
ttagctacagctcctatgtgatgag

SEQ ID NO: 4897733 - DNA, 25 bp, Homo sapien
ctgattctggatactgctggttagc

SEQ ID NO: 4897734 - DNA, 25 bp, Homo sapien
taaggaatgattgggcagagacagt

SEQ ID NO: 4897735 - DNA, 25 bp, Homo sapien
gaatgcaaacaactgggttatctgg

SEQ ID NO: 4897736 - DNA, 25 bp, Homo sapien
caaaggtggccgaaaaattagctct

SEQ ID NO: 4897737 - DNA, 25 bp, Homo sapien
caacaacccaagtttcccacgaatg

SEQ ID NO: 4897738 - DNA, 25 bp, Homo sapien
attctcatctgtccgttgccgcaca

SEQ ID NO: 4897739 - DNA, 25 bp, Homo sapien
catctcctcctagcaggtaatgttc

SEQ ID NO: 4897740 - DNA, 25 bp, Homo sapien
cttcaaactgtctgtgacttcaggg

SEQ ID NO: 4897741 - DNA, 25 bp, Homo sapien
caccactggacaaagtgtcatctga

SEQ ID NO: 4897742 - DNA, 25 bp, Homo sapien
atgcaataaagtccccaccactgga

SEQ ID NO: 4897743 - DNA, 25 bp, Homo sapien
gatagtccctggcatgatgaagcag

SEQ ID NO: 4897744 - DNA, 25 bp, Homo sapien
agatgcaataaagtccccaccactg

SEQ ID NO: 4897745 - DNA, 25 bp, Homo sapien
caggcaaatgactccagtgacttca

SEQ ID NO: 4897746 - DNA, 25 bp, Homo sapien
tagctaaggctaaaacaccaatcag

SEQ ID NO: 4897747 - DNA, 25 bp, Homo sapien
gaaactaagatgtcacagatgctgg

SEQ ID NO: 4897748 - DNA, 25 bp, Homo sapien
aacccaggagagtggcccatgcttt

SEQ ID NO: 4897749 - DNA, 25 bp, Homo sapien
ggctattaatcagtgcaagcacccc

SEQ ID NO: 4897750 - DNA, 25 bp, Homo sapien
ccttcggcttggttgtgctatcatt

SEQ ID NO: 4897751 - DNA, 25 bp, Homo sapien
gacccctagtctttgctggcatcaa

SEQ ID NO: 4897752 - DNA, 25 bp, Homo sapien
tggaggaggcctttgacccctagtc

SEQ ID NO: 4897753 - DNA, 25 bp, Homo sapien
cttccggtccttcggcttggttgtg

SEQ ID NO: 4897754 - DNA, 25 bp, Homo sapien
cacaccagcagtccaactatagcag

SEQ ID NO: 4897755 - DNA, 25 bp, Homo sapien
ccaaaagagcaatttccacaccagc

SEQ ID NO: 4897756 - DNA, 25 bp, Homo sapien
aactgagtccaaaagagcaatttcc

SEQ ID NO: 4897757 - DNA, 25 bp, Homo sapien
cagatgtgatactggtcatccagca

SEQ ID NO: 4897758 - DNA, 25 bp, Homo sapien
acttgctagtaagttcctccacatt

SEQ ID NO: 4897759 - DNA, 25 bp, Homo sapien
ttttcttaagatagttccacttgct

SEQ ID NO: 4897760 - DNA, 25 bp, Homo sapien
taagatagttccacttgctagtaag

SEQ ID NO: 4897761 - DNA, 25 bp, Homo sapien
cttaagatagttccacttgctagta

SEQ ID NO: 4897762 - DNA, 25 bp, Homo sapien
caagtggtatctggcttctgatcat

SEQ ID NO: 4897763 - DNA, 25 bp, Homo sapien
caaacctaggggcttatagtcatac

SEQ ID NO: 4897764 - DNA, 25 bp, Homo sapien
gggcttatagtcataccaagtggta

SEQ ID NO: 4897765 - DNA, 25 bp, Homo sapien
tagtcataccaagtggtatctggct

SEQ ID NO: 4897766 - DNA, 25 bp, Homo sapien
tttctacatgagtatccaagaacgt

SEQ ID NO: 4897767 - DNA, 25 bp, Homo sapien
agaaacagaagtgctagaaacaccc

SEQ ID NO: 4897768 - DNA, 25 bp, Homo sapien
caagaacgtatttagaatgcctgat

SEQ ID NO: 4897769 - DNA, 25 bp, Homo sapien
atggagaaacagaagtgctagaaac

SEQ ID NO: 4897770 - DNA, 25 bp, Homo sapien
gacagtcttactaagtgttttcaga

SEQ ID NO: 4897771 - DNA, 25 bp, Homo sapien
tctggaattgttttcaggaacttcc

SEQ ID NO: 4897772 - DNA, 25 bp, Homo sapien
tcagatgcttatcatttagctgaaa

SEQ ID NO: 4897773 - DNA, 25 bp, Homo sapien
gctgcctttcaaccaggtttcggaa

SEQ ID NO: 4897774 - DNA, 25 bp, Homo sapien
tacacgtttgtttgaggtcgagcta

SEQ ID NO: 4897775 - DNA, 25 bp, Homo sapien
gatatgaacgagtctggtgaatcac

SEQ ID NO: 4897776 - DNA, 25 bp, Homo sapien
cgagctaggcctttcagtattacat

SEQ ID NO: 4897777 - DNA, 25 bp, Homo sapien
catatgaaggtaggtacatctcagc

SEQ ID NO: 4897778 - DNA, 25 bp, Homo sapien
tgtctggaagagataaagttttaca

SEQ ID NO: 4897779 - DNA, 25 bp, Homo sapien
gcccgttaccttgttgcttgtggaa

SEQ ID NO: 4897780 - DNA, 25 bp, Homo sapien
aaggctatattatcgtaaatatttc

SEQ ID NO: 4897781 - DNA, 25 bp, Homo sapien
ttcaggactctaaagatattggatc

SEQ ID NO: 4897782 - DNA, 25 bp, Homo sapien
ttggtagagttgcacagatggaaca

SEQ ID NO: 4897783 - DNA, 25 bp, Homo sapien
atatcatctattaaggctacataga

SEQ ID NO: 4897784 - DNA, 25 bp, Homo sapien
ggctacatagataatcctcttctgg

SEQ ID NO: 4897785 - DNA, 25 bp, Homo sapien
ggaacagtttctcatacttgtaaat

SEQ ID NO: 4897786 - DNA, 25 bp, Homo sapien
tcccaaaggtactccatttgctaag

SEQ ID NO: 4897787 - DNA, 25 bp, Homo sapien
tccagagtcccaaaggtactccatt

SEQ ID NO: 4897788 - DNA, 25 bp, Homo sapien
tgtcaccaccgagaacatctgtgtt

SEQ ID NO: 4897789 - DNA, 25 bp, Homo sapien
tgtgtttccgattcattctgaggca

SEQ ID NO: 4897790 - DNA, 25 bp, Homo sapien
tgcatatccctttgctgggatttta

SEQ ID NO: 4897791 - DNA, 25 bp, Homo sapien
tttgcatatccctttgctgggattt

SEQ ID NO: 4897792 - DNA, 25 bp, Homo sapien
tcatatatggataaagtaggccatt

SEQ ID NO: 4897793 - DNA, 25 bp, Homo sapien
attagctcatatatggataaagtag

SEQ ID NO: 4897794 - DNA, 25 bp, Homo sapien
gctcatatatggataaagtaggcca

SEQ ID NO: 4897795 - DNA, 25 bp, Homo sapien
catttaaggagtgcaattagctcat

SEQ ID NO: 4897796 - DNA, 25 bp, Homo sapien
atctaagttctggctccttcactgg

SEQ ID NO: 4897797 - DNA, 25 bp, Homo sapien
tataatctaagttctggctccttca

SEQ ID NO: 4897798 - DNA, 25 bp, Homo sapien
ttataatctaagttctggctccttc

SEQ ID NO: 4897799 - DNA, 25 bp, Homo sapien
taatctaagttctggctccttcact

SEQ ID NO: 4897800 - DNA, 25 bp, Homo sapien
tcacgtgtgaaacaggggatgaact

SEQ ID NO: 4897801 - DNA, 25 bp, Homo sapien
catcaccatggttgcaaggagagct

SEQ ID NO: 4897802 - DNA, 25 bp, Homo sapien
aaggagagctgctcctgacttcttc

SEQ ID NO: 4897803 - DNA, 25 bp, Homo sapien
caggggatgaactttagaaccacca

SEQ ID NO: 4897804 - DNA, 25 bp, Homo sapien
aatcctataatacttctataaatgt

SEQ ID NO: 4897805 - DNA, 25 bp, Homo sapien
catccagagttaatataacccacaa

SEQ ID NO: 4897806 - DNA, 25 bp, Homo sapien
gatcgtagtttcacaaatcctataa

SEQ ID NO: 4897807 - DNA, 25 bp, Homo sapien
cactttatttgatcgtagtttcaca

SEQ ID NO: 4897808 - DNA, 25 bp, Homo sapien
caaataggtccttatcttcaatgat

SEQ ID NO: 4897809 - DNA, 25 bp, Homo sapien
ggaacttgaagaaggacgctaatct

SEQ ID NO: 4897810 - DNA, 25 bp, Homo sapien
gattgtgcacgtgaaaggaacttga

SEQ ID NO: 4897811 - DNA, 25 bp, Homo sapien
gacgctaatctcaccaaaggactcc

SEQ ID NO: 4897812 - DNA, 25 bp, Homo sapien
ggctggttgccctgggttctccaac

SEQ ID NO: 4897813 - DNA, 25 bp, Homo sapien
tccagcaagttgcaggaaggacagg

SEQ ID NO: 4897814 - DNA, 25 bp, Homo sapien
tctccaacttcagttcagggtggtc

SEQ ID NO: 4897815 - DNA, 25 bp, Homo sapien
tgtgaggtccagcaagttgcaggaa

SEQ ID NO: 4897816 - DNA, 25 bp, Homo sapien
ccaggatatgtagtcacaatagacc

SEQ ID NO: 4897817 - DNA, 25 bp, Homo sapien
tttgatagtattccagaatgcaatt

SEQ ID NO: 4897818 - DNA, 25 bp, Homo sapien
ttgaaaggcaattcgaaagtgggac

SEQ ID NO: 4897819 - DNA, 25 bp, Homo sapien
tcttaattaatgttcactgaggttg

SEQ ID NO: 4897820 - DNA, 25 bp, Homo sapien
gctgacataaaaacttccatctgag

SEQ ID NO: 4897821 - DNA, 25 bp, Homo sapien
tctgctggattcctcaacaggatgc

SEQ ID NO: 4897822 - DNA, 25 bp, Homo sapien
cgttggatctcttatacttgctgac

SEQ ID NO: 4897823 - DNA, 25 bp, Homo sapien
gatctaataccttccctgaatatgg

SEQ ID NO: 4897824 - DNA, 25 bp, Homo sapien
atcttgctgccagaagaaacatatc

SEQ ID NO: 4897825 - DNA, 25 bp, Homo sapien
agcatccagccacccatttctctca

SEQ ID NO: 4897826 - DNA, 25 bp, Homo sapien
tctgcagcatccagccacccatttc

SEQ ID NO: 4897827 - DNA, 25 bp, Homo sapien
tttggctatcttgctgccagaagaa

SEQ ID NO: 4897828 - DNA, 25 bp, Homo sapien
atttcttgccatctgcagaaatggc

SEQ ID NO: 4897829 - DNA, 25 bp, Homo sapien
gccatctgcagaaatggcactgagc

SEQ ID NO: 4897830 - DNA, 25 bp, Homo sapien
cagaaatggcactgagcaggtcccc

SEQ ID NO: 4897831 - DNA, 25 bp, Homo sapien
tggcactgagcaggtcccccttcat

SEQ ID NO: 4897832 - DNA, 25 bp, Homo sapien
ttggtttagctgtttggagcataag

SEQ ID NO: 4897833 - DNA, 25 bp, Homo sapien
tggagcataagttgcttggtcactg

SEQ ID NO: 4897834 - DNA, 25 bp, Homo sapien
gctgtttggagcataagttgcttgg

SEQ ID NO: 4897835 - DNA, 25 bp, Homo sapien
tttagctgtttggagcataagttgc

SEQ ID NO: 4897836 - DNA, 25 bp, Homo sapien
catcacaatcctcattatgcctgga

SEQ ID NO: 4897837 - DNA, 25 bp, Homo sapien
cacaatcctcattatgcctggaccc

SEQ ID NO: 4897838 - DNA, 25 bp, Homo sapien
ttttccactgcctttcaaatgtctg

SEQ ID NO: 4897839 - DNA, 25 bp, Homo sapien
tcacaatcctcattatgcctggacc

SEQ ID NO: 4897840 - DNA, 25 bp, Homo sapien
gggagcctgtcatgtattccatatt

SEQ ID NO: 4897841 - DNA, 25 bp, Homo sapien
gagggtcgtgggagaacaaatataa

SEQ ID NO: 4897842 - DNA, 25 bp, Homo sapien
gaaatatcctgggttagaaacttca

SEQ ID NO: 4897843 - DNA, 25 bp, Homo sapien
caaatataacctcagaaagccccag

SEQ ID NO: 4897844 - DNA, 25 bp, Homo sapien
tcaaatattcatttttgacatcctc

SEQ ID NO: 4897845 - DNA, 25 bp, Homo sapien
tgaaatctttccattctttttgttg

SEQ ID NO: 4897846 - DNA, 25 bp, Homo sapien
cttgaaatctttccattctttttgt

SEQ ID NO: 4897847 - DNA, 25 bp, Homo sapien
ttgttgttcctttttcaaatattca

SEQ ID NO: 4897848 - DNA, 25 bp, Homo sapien
taatacaaggagtttttcacagtct

SEQ ID NO: 4897849 - DNA, 25 bp, Homo sapien
tgcagtaatggtcccattttccaaa

SEQ ID NO: 4897850 - DNA, 25 bp, Homo sapien
tccttgaggttcctaggaatgctgg

SEQ ID NO: 4897851 - DNA, 25 bp, Homo sapien
taatttactagagtgtccttgaggt

SEQ ID NO: 4897852 - DNA, 25 bp, Homo sapien
tagtagatttgctagtcatgtctaa

SEQ ID NO: 4897853 - DNA, 25 bp, Homo sapien
gatgtttttcagagtgaatggttaa

SEQ ID NO: 4897854 - DNA, 25 bp, Homo sapien
gaacaaacaatacaaccaggaatct

SEQ ID NO: 4897855 - DNA, 25 bp, Homo sapien
ggtcctaccatatcacggaatacta

SEQ ID NO: 4897856 - DNA, 25 bp, Homo sapien
gaaattagtaacgtctttcaatgca

SEQ ID NO: 4897857 - DNA, 25 bp, Homo sapien
cagttggatgaaattagtaacgtct

SEQ ID NO: 4897858 - DNA, 25 bp, Homo sapien
ggatgaaattagtaacgtctttcaa

SEQ ID NO: 4897859 - DNA, 25 bp, Homo sapien
taacgtctttcaatgcagaaagttc

SEQ ID NO: 4897860 - DNA, 25 bp, Homo sapien
tgaagagaatactcagagtgaagcg

SEQ ID NO: 4897861 - DNA, 25 bp, Homo sapien
gaatactcagagtgaagcgtaaccc

SEQ ID NO: 4897862 - DNA, 25 bp, Homo sapien
gaagcgtaacccataaggcgagaaa

SEQ ID NO: 4897863 - DNA, 25 bp, Homo sapien
agagtgaagcgtaacccataaggcg

SEQ ID NO: 4897864 - DNA, 25 bp, Homo sapien
tgaaaaccctgttaccagacacaaa

SEQ ID NO: 4897865 - DNA, 25 bp, Homo sapien
caggactagtctatgtggttcagta

SEQ ID NO: 4897866 - DNA, 25 bp, Homo sapien
gagttcttattcttgacacccgtgg

SEQ ID NO: 4897867 - DNA, 25 bp, Homo sapien
ggagttgaacacattagtgacaaag

SEQ ID NO: 4897868 - DNA, 25 bp, Homo sapien
ctattctggaacaacagtgtggtcc

SEQ ID NO: 4897869 - DNA, 25 bp, Homo sapien
cagtgtggtcctttccgttatcttt

SEQ ID NO: 4897870 - DNA, 25 bp, Homo sapien
tcctccatcattttgtaggcagcat

SEQ ID NO: 4897871 - DNA, 25 bp, Homo sapien
tggaacaacagtgtggtcctttccg

SEQ ID NO: 4897872 - DNA, 25 bp, Homo sapien
gttgccctgggagtataaaagccca

SEQ ID NO: 4897873 - DNA, 25 bp, Homo sapien
gccctgggagtataaaagcccagcc

SEQ ID NO: 4897874 - DNA, 25 bp, Homo sapien
gattggttgccctgggagtataaaa

SEQ ID NO: 4897875 - DNA, 25 bp, Homo sapien
tgatgattggttgccctgggagtat

SEQ ID NO: 4897876 - DNA, 25 bp, Homo sapien
ctgttgatgtgaagaagtaagctct

SEQ ID NO: 4897877 - DNA, 25 bp, Homo sapien
tttctgttgatgtgaagaagtaagc

SEQ ID NO: 4897878 - DNA, 25 bp, Homo sapien
gcctataaaacttcctagcaccaat

SEQ ID NO: 4897879 - DNA, 25 bp, Homo sapien
ccactctcatgattctttgcctata

SEQ ID NO: 4897880 - DNA, 25 bp, Homo sapien
gttttgccacgcctcttccttgttc

SEQ ID NO: 4897881 - DNA, 25 bp, Homo sapien
tggcataatttatatcaaattcctt

SEQ ID NO: 4897882 - DNA, 25 bp, Homo sapien
tcaaattccttgcagcagttttgcc

SEQ ID NO: 4897883 - DNA, 25 bp, Homo sapien
agcagttttgccacgcctcttcctt

SEQ ID NO: 4897884 - DNA, 25 bp, Homo sapien
ttttgtgaactatgtagcttccaaa

SEQ ID NO: 4897885 - DNA, 25 bp, Homo sapien
tttgggtcttgagttaggtgtagct

SEQ ID NO: 4897886 - DNA, 25 bp, Homo sapien
catgatttgggtcttgagttaggtg

SEQ ID NO: 4897887 - DNA, 25 bp, Homo sapien
tgaactatgtagcttccaaagacag

SEQ ID NO: 4897888 - DNA, 25 bp, Homo sapien
agccaagttggagcctccactccac

SEQ ID NO: 4897889 - DNA, 25 bp, Homo sapien
tctctaggtttccagccaagttgga

SEQ ID NO: 4897890 - DNA, 25 bp, Homo sapien
tgttctctaggtttccagccaagtt

SEQ ID NO: 4897891 - DNA, 25 bp, Homo sapien
ctccactgacacttcaatcaccagc

SEQ ID NO: 4897892 - DNA, 25 bp, Homo sapien
tggcagccctgatccctgagcttgt

SEQ ID NO: 4897893 - DNA, 25 bp, Homo sapien
gaaagcagtaatcctcctggcacat

SEQ ID NO: 4897894 - DNA, 25 bp, Homo sapien
ctggcacattcgtcctttttcttga

SEQ ID NO: 4897895 - DNA, 25 bp, Homo sapien
gggctaagtagttctattggtccat

SEQ ID NO: 4897896 - DNA, 25 bp, Homo sapien
taggctttactctgcaaacaaacag

SEQ ID NO: 4897897 - DNA, 25 bp, Homo sapien
tgttccaaaggtgcttccttaggct

SEQ ID NO: 4897898 - DNA, 25 bp, Homo sapien
gaagccttgacatgtgacactccat

SEQ ID NO: 4897899 - DNA, 25 bp, Homo sapien
aaacaggtcaggctctctccaagca

SEQ ID NO: 4897900 - DNA, 25 bp, Homo sapien
ctgtatgataaagttgtatttatga

SEQ ID NO: 4897901 - DNA, 25 bp, Homo sapien
gattaagtaattttctgcatttgct

SEQ ID NO: 4897902 - DNA, 25 bp, Homo sapien
gataaagttgtatttatgattaagt

SEQ ID NO: 4897903 - DNA, 25 bp, Homo sapien
atgattaagtaattttctgcatttg

SEQ ID NO: 4897904 - DNA, 25 bp, Homo sapien
tagagatatggttagagaattcccc

SEQ ID NO: 4897905 - DNA, 25 bp, Homo sapien
tcccacagttgtttggcgtataagg

SEQ ID NO: 4897906 - DNA, 25 bp, Homo sapien
gaagcactggctaaggaaattccca

SEQ ID NO: 4897907 - DNA, 25 bp, Homo sapien
gatatctcccatttgctacactcga

SEQ ID NO: 4897908 - DNA, 25 bp, Homo sapien
tacctacccgtgcatgtgaacgaag

SEQ ID NO: 4897909 - DNA, 25 bp, Homo sapien
tcggagaacgacattcccagtgtgg

SEQ ID NO: 4897910 - DNA, 25 bp, Homo sapien
cagcccggaggaacgtggatttgac

SEQ ID NO: 4897911 - DNA, 25 bp, Homo sapien
ggccaggactgctacacgagaatct

SEQ ID NO: 4897912 - DNA, 25 bp, Homo sapien
taaatcatgcatttcttgtttctgc

SEQ ID NO: 4897913 - DNA, 25 bp, Homo sapien
tcatcaatttttaaatcatgcattt

SEQ ID NO: 4897914 - DNA, 25 bp, Homo sapien
caatttttaaatcatgcatttcttg

SEQ ID NO: 4897915 - DNA, 25 bp, Homo sapien
ctcaagttcatcaatttttaaatca

SEQ ID NO: 4897916 - DNA, 25 bp, Homo sapien
ttgattcttccatcaacattgggaa

SEQ ID NO: 4897917 - DNA, 25 bp, Homo sapien
caacattgggaactgccagaaaaat

SEQ ID NO: 4897918 - DNA, 25 bp, Homo sapien
gaggttctaatgaatccattgtcag

SEQ ID NO: 4897919 - DNA, 25 bp, Homo sapien
cctgttggcagtaggagagaggttc

SEQ ID NO: 4897920 - DNA, 25 bp, Homo sapien
catacagcacgctgaaacttgccaa

SEQ ID NO: 4897921 - DNA, 25 bp, Homo sapien
acttcatacagcacgctgaaacttg

SEQ ID NO: 4897922 - DNA, 25 bp, Homo sapien
cttcatacagcacgctgaaacttgc

SEQ ID NO: 4897923 - DNA, 25 bp, Homo sapien
tcatacagcacgctgaaacttgcca

SEQ ID NO: 4897924 - DNA, 25 bp, Homo sapien
atgagatctacatcctggctgattg

SEQ ID NO: 4897925 - DNA, 25 bp, Homo sapien
ccaaatgagatctacatcctggctg

SEQ ID NO: 4897926 - DNA, 25 bp, Homo sapien
aaatgagatctacatcctggctgat

SEQ ID NO: 4897927 - DNA, 25 bp, Homo sapien
tgagatctacatcctggctgattgc

SEQ ID NO: 4897928 - DNA, 25 bp, Homo sapien
ggcaaaagagttatcctgaaggagc

SEQ ID NO: 4897929 - DNA, 25 bp, Homo sapien
gaaggccgattccagtactgaagca

SEQ ID NO: 4897930 - DNA, 25 bp, Homo sapien
tttgatcaatgacctactagtagca

SEQ ID NO: 4897931 - DNA, 25 bp, Homo sapien
cacacttatagttgggtgctagcca

SEQ ID NO: 4897932 - DNA, 25 bp, Homo sapien
aatgttgcgtcattaaaggtcaagg

SEQ ID NO: 4897933 - DNA, 25 bp, Homo sapien
tatgactgtcagataaaatcaggca

SEQ ID NO: 4897934 - DNA, 25 bp, Homo sapien
tatgtaacagctcaccaagctacta

SEQ ID NO: 4897935 - DNA, 25 bp, Homo sapien
tcaaggcctcatagcacattgttaa

SEQ ID NO: 4897936 - DNA, 25 bp, Homo sapien
tgtacatcagagatggtacccagga

SEQ ID NO: 4897937 - DNA, 25 bp, Homo sapien
tgctgagtatgatgggtattgcctg

SEQ ID NO: 4897938 - DNA, 25 bp, Homo sapien
gagctattcccctgagaaaagtgaa

SEQ ID NO: 4897939 - DNA, 25 bp, Homo sapien
tccatgcaaagacagtcccagcaaa

SEQ ID NO: 4897940 - DNA, 25 bp, Homo sapien
caatatcctgattcgtcataaggct

SEQ ID NO: 4897941 - DNA, 25 bp, Homo sapien
tattgtacaccagctactttgtggg

SEQ ID NO: 4897942 - DNA, 25 bp, Homo sapien
gaaactgaataagcaatctgttgcc

SEQ ID NO: 4897943 - DNA, 25 bp, Homo sapien
cataaggctatcagtatataagggc

SEQ ID NO: 4897944 - DNA, 25 bp, Homo sapien
cagatctgcagatggacactttgct

SEQ ID NO: 4897945 - DNA, 25 bp, Homo sapien
caaactggcacaaactgaaggaaat

SEQ ID NO: 4897946 - DNA, 25 bp, Homo sapien
cagaatgaatgcaccccatgagtca

SEQ ID NO: 4897947 - DNA, 25 bp, Homo sapien
gatcactgacagagccaagagacca

SEQ ID NO: 4897948 - DNA, 25 bp, Homo sapien
gggacgatggaagggatgatataaa

SEQ ID NO: 4897949 - DNA, 25 bp, Homo sapien
ctttagaagggacgatggaagggat

SEQ ID NO: 4897950 - DNA, 25 bp, Homo sapien
tggaagggatgatataaaggaccat

SEQ ID NO: 4897951 - DNA, 25 bp, Homo sapien
tagaagggacgatggaagggatgat

SEQ ID NO: 4897952 - DNA, 25 bp, Homo sapien
caattttgcatagtaagataagcac

SEQ ID NO: 4897953 - DNA, 25 bp, Homo sapien
aatcaagaggcctggaccgcagtaa

SEQ ID NO: 4897954 - DNA, 25 bp, Homo sapien
agagtgtgaacttgttctgttctga

SEQ ID NO: 4897955 - DNA, 25 bp, Homo sapien
aaaaacccattagcacctggcggtg

SEQ ID NO: 4897956 - DNA, 25 bp, Homo sapien
aaagtgcaaatctgccccaatgatc

SEQ ID NO: 4897957 - DNA, 25 bp, Homo sapien
atttacgaagatgcctatcagtcag

SEQ ID NO: 4897958 - DNA, 25 bp, Homo sapien
agatcagataccaactggatattta

SEQ ID NO: 4897959 - DNA, 25 bp, Homo sapien
taccaccaactgtgggaatactgtc

SEQ ID NO: 4897960 - DNA, 25 bp, Homo sapien
tgttcagcagtcaactgtagttacc

SEQ ID NO: 4897961 - DNA, 25 bp, Homo sapien
gaagcaataatgtggagtcactatt

SEQ ID NO: 4897962 - DNA, 25 bp, Homo sapien
tcaaattgttgaagctttccccaaa

SEQ ID NO: 4897963 - DNA, 25 bp, Homo sapien
tctcaactaggaataacaccgtata

SEQ ID NO: 4897964 - DNA, 25 bp, Homo sapien
cctggtgcatcaacattctgaggag

SEQ ID NO: 4897965 - DNA, 25 bp, Homo sapien
ggactactgtccctatcattgcaaa

SEQ ID NO: 4897966 - DNA, 25 bp, Homo sapien
tctcaagaatgaccgggactactgt

SEQ ID NO: 4897967 - DNA, 25 bp, Homo sapien
caggagctggcgttgcctggtgcat

SEQ ID NO: 4897968 - DNA, 25 bp, Homo sapien
tgatgctgttgaatgccgcttctgc

SEQ ID NO: 4897969 - DNA, 25 bp, Homo sapien
tttgcagccacttgggcctgtagtg

SEQ ID NO: 4897970 - DNA, 25 bp, Homo sapien
aatttgcagccacttgggcctgtag

SEQ ID NO: 4897971 - DNA, 25 bp, Homo sapien
atgctgttgaatgccgcttctgctg

SEQ ID NO: 4897972 - DNA, 25 bp, Homo sapien
tgggaatgtgcatcacttttctcca

SEQ ID NO: 4897973 - DNA, 25 bp, Homo sapien
cttgggaatgtgcatcacttttctc

SEQ ID NO: 4897974 - DNA, 25 bp, Homo sapien
gcatcacttttctccaaaggcacac

SEQ ID NO: 4897975 - DNA, 25 bp, Homo sapien
ggaatgtgcatcacttttctccaaa

SEQ ID NO: 4897976 - DNA, 25 bp, Homo sapien
ttccctgtgaatcctctagtctgtc

SEQ ID NO: 4897977 - DNA, 25 bp, Homo sapien
gttcttgttaagaaccacaacagtg

SEQ ID NO: 4897978 - DNA, 25 bp, Homo sapien
ttgtgcatattttcctggattggca

SEQ ID NO: 4897979 - DNA, 25 bp, Homo sapien
aacagtgaaccctcgagcctcattc

SEQ ID NO: 4897980 - DNA, 25 bp, Homo sapien
gaagcagctgcattaaaggaagata

SEQ ID NO: 4897981 - DNA, 25 bp, Homo sapien
tttgcttatgtaacctgattcttaa

SEQ ID NO: 4897982 - DNA, 25 bp, Homo sapien
atgtaacctgattcttaatgtttgc

SEQ ID NO: 4897983 - DNA, 25 bp, Homo sapien
ttagaagcagctgcattaaaggaag

SEQ ID NO: 4897984 - DNA, 25 bp, Homo sapien
cagtactttcagagtggaaggcaac

SEQ ID NO: 4897985 - DNA, 25 bp, Homo sapien
tgcctagatcctccatcccaaggtg

SEQ ID NO: 4897986 - DNA, 25 bp, Homo sapien
cccaaggtgctgtgagaaactcatc

SEQ ID NO: 4897987 - DNA, 25 bp, Homo sapien
gggatgtatcaaagaaccatggctg

SEQ ID NO: 4897988 - DNA, 25 bp, Homo sapien
gaaggctgctgcatattagagttcc

SEQ ID NO: 4897989 - DNA, 25 bp, Homo sapien
ctgaaggctgctgcatattagagtt

SEQ ID NO: 4897990 - DNA, 25 bp, Homo sapien
ggctgctgcatattagagttccttt

SEQ ID NO: 4897991 - DNA, 25 bp, Homo sapien
agagttccttttagatggatgatac

SEQ ID NO: 4897992 - DNA, 25 bp, Homo sapien
cgtgtcagtccaggcagtgtcatgg

SEQ ID NO: 4897993 - DNA, 25 bp, Homo sapien
ggcagtgtcatggttcttacatagt

SEQ ID NO: 4897994 - DNA, 25 bp, Homo sapien
tcatggttcttacatagtttcttac

SEQ ID NO: 4897995 - DNA, 25 bp, Homo sapien
ttaaaacgtgtcagtccaggcagtg

SEQ ID NO: 4897996 - DNA, 25 bp, Homo sapien
tctttcacctttttaatgtgtatgt

SEQ ID NO: 4897997 - DNA, 25 bp, Homo sapien
tctagcctgtattcccatcgtctgc

SEQ ID NO: 4897998 - DNA, 25 bp, Homo sapien
catcgtctgcttatccatcttactg

SEQ ID NO: 4897999 - DNA, 25 bp, Homo sapien
ctgtgtacaatgacagatgttctga

SEQ ID NO: 4898000 - DNA, 25 bp, Homo sapien
tctcttctcagctctagcctgtatt

SEQ ID NO: 4898001 - DNA, 25 bp, Homo sapien
ttctcaaggatagtcttaaaataaa

SEQ ID NO: 4898002 - DNA, 25 bp, Homo sapien
aaacatacacactgggaatgtttta

SEQ ID NO: 4898003 - DNA, 25 bp, Homo sapien
tcaaggatagtcttaaaataaacag

SEQ ID NO: 4898004 - DNA, 25 bp, Homo sapien
gcaaaacatacacactgggaatgtt

SEQ ID NO: 4898005 - DNA, 25 bp, Homo sapien
gccggtgaacttaggcgccacgttc

SEQ ID NO: 4898006 - DNA, 25 bp, Homo sapien
ccccggaggatggtgaacaggaact

SEQ ID NO: 4898007 - DNA, 25 bp, Homo sapien
tcccggtgactgaccccggaggatg

SEQ ID NO: 4898008 - DNA, 25 bp, Homo sapien
tgaacaggaactactgctgaccctg

SEQ ID NO: 4898009 - DNA, 25 bp, Homo sapien
cagcgcccctattcttccagggccg

SEQ ID NO: 4898010 - DNA, 25 bp, Homo sapien
tcaggaatgccgaccgctctccagg

SEQ ID NO: 4898011 - DNA, 25 bp, Homo sapien
acccaggggcgctcagtgaccaggc

SEQ ID NO: 4898012 - DNA, 25 bp, Homo sapien
gcgctcctctgattcccagcgcccc

SEQ ID NO: 4898013 - DNA, 25 bp, Homo sapien
ttattcttaacctcgcctgcttttc

SEQ ID NO: 4898014 - DNA, 25 bp, Homo sapien
tattcttaacctcgcctgcttttct

SEQ ID NO: 4898015 - DNA, 25 bp, Homo sapien
taccacataggacctcttgtagtcc

SEQ ID NO: 4898016 - DNA, 25 bp, Homo sapien
ctgcttaccacataggacctcttgt

SEQ ID NO: 4898017 - DNA, 25 bp, Homo sapien
cacctcaccgaggtagctgtcatac

SEQ ID NO: 4898018 - DNA, 25 bp, Homo sapien
taggacctcttgtagtcctgcttct

SEQ ID NO: 4898019 - DNA, 25 bp, Homo sapien
cttggagctccaaacttcaggtact

SEQ ID NO: 4898020 - DNA, 25 bp, Homo sapien
tcccagtcatcttggagctccaaac

SEQ ID NO: 4898021 - DNA, 25 bp, Homo sapien
tcataattcccagtcatcttggagc

SEQ ID NO: 4898022 - DNA, 25 bp, Homo sapien
tgatctggtgggtttctcataattc

SEQ ID NO: 4898023 - DNA, 25 bp, Homo sapien
gcaaacctttagattttcatcttaa

SEQ ID NO: 4898024 - DNA, 25 bp, Homo sapien
aaaaagataattctgctaccgtggg

SEQ ID NO: 4898025 - DNA, 25 bp, Homo sapien
tgctaccgtggggaagtgactaata

SEQ ID NO: 4898026 - DNA, 25 bp, Homo sapien
ccacgcccagcaaacctttagattt

SEQ ID NO: 4898027 - DNA, 25 bp, Homo sapien
ccataggaaatgatgatagaagtca

SEQ ID NO: 4898028 - DNA, 25 bp, Homo sapien
tcagtcactgttgttccctatacaa

SEQ ID NO: 4898029 - DNA, 25 bp, Homo sapien
tctgtatcccaggtaccatccacat

SEQ ID NO: 4898030 - DNA, 25 bp, Homo sapien
gcaatgaggatgttagctactgctg

SEQ ID NO: 4898031 - DNA, 25 bp, Homo sapien
tattactgggcttataggacaggac

SEQ ID NO: 4898032 - DNA, 25 bp, Homo sapien
tcttggccctagatccaccatgggt

SEQ ID NO: 4898033 - DNA, 25 bp, Homo sapien
caacatagttggacctgatatcaaa

SEQ ID NO: 4898034 - DNA, 25 bp, Homo sapien
agcttaaggataggcataactgcag

SEQ ID NO: 4898035 - DNA, 25 bp, Homo sapien
gttagacctatggtggcaacacaag

SEQ ID NO: 4898036 - DNA, 25 bp, Homo sapien
tatggtggcaacacaagtagacatg

SEQ ID NO: 4898037 - DNA, 25 bp, Homo sapien
cctatggtggcaacacaagtagaca

SEQ ID NO: 4898038 - DNA, 25 bp, Homo sapien
gacctatggtggcaacacaagtaga

SEQ ID NO: 4898039 - DNA, 25 bp, Homo sapien
tattgcatgcaaacggtgcacagct

SEQ ID NO: 4898040 - DNA, 25 bp, Homo sapien
taaaacttacctcttagctatggaa

SEQ ID NO: 4898041 - DNA, 25 bp, Homo sapien
gagcaaatgtctagggtgatcacat

SEQ ID NO: 4898042 - DNA, 25 bp, Homo sapien
cacatatccagggtggaggttcttg

SEQ ID NO: 4898043 - DNA, 25 bp, Homo sapien
ctttgttgaacatagcattcttggc

SEQ ID NO: 4898044 - DNA, 25 bp, Homo sapien
gtctactgacgatgaattccctccg

SEQ ID NO: 4898045 - DNA, 25 bp, Homo sapien
tttctcctgagaaacttgttagtct

SEQ ID NO: 4898046 - DNA, 25 bp, Homo sapien
taaggctttcttgtaggtggagtct

SEQ ID NO: 4898047 - DNA, 25 bp, Homo sapien
acggcattttccactgcacagagct

SEQ ID NO: 4898048 - DNA, 25 bp, Homo sapien
acaaacacacggcattttccactgc

SEQ ID NO: 4898049 - DNA, 25 bp, Homo sapien
cgccgtcacaaacacacggcatttt

SEQ ID NO: 4898050 - DNA, 25 bp, Homo sapien
actgcacagagctcaagcgcttcat

SEQ ID NO: 4898051 - DNA, 25 bp, Homo sapien
agatgtaatggatgtttcttgctcc

SEQ ID NO: 4898052 - DNA, 25 bp, Homo sapien
agaagatgtaatggatgtttcttgc

SEQ ID NO: 4898053 - DNA, 25 bp, Homo sapien
taatggatgtttcttgctccctaac

SEQ ID NO: 4898054 - DNA, 25 bp, Homo sapien
gctccatgtggtataagaagatgta

SEQ ID NO: 4898055 - DNA, 25 bp, Homo sapien
cttggattgatatagggttaggtac

SEQ ID NO: 4898056 - DNA, 25 bp, Homo sapien
ttggattgatatagggttaggtaca

SEQ ID NO: 4898057 - DNA, 25 bp, Homo sapien
gttaaatccttttgtcctccataca

SEQ ID NO: 4898058 - DNA, 25 bp, Homo sapien
aaatccttttgtcctccatacattt

SEQ ID NO: 4898059 - DNA, 25 bp, Homo sapien
ttaaatccttttgtcctccatacat

SEQ ID NO: 4898060 - DNA, 25 bp, Homo sapien
taaatccttttgtcctccatacatt

SEQ ID NO: 4898061 - DNA, 25 bp, Homo sapien
tttaattcttcacatttaactgatt

SEQ ID NO: 4898062 - DNA, 25 bp, Homo sapien
gtagacattcttttttaattcttca

SEQ ID NO: 4898063 - DNA, 25 bp, Homo sapien
tttttaattcttcacatttaactga

SEQ ID NO: 4898064 - DNA, 25 bp, Homo sapien
cattcttttttaattcttcacattt

SEQ ID NO: 4898065 - DNA, 25 bp, Homo sapien
ctaggatgtaggatgaaatgccacc

SEQ ID NO: 4898066 - DNA, 25 bp, Homo sapien
ttcaggctaaacagatggagggtcc

SEQ ID NO: 4898067 - DNA, 25 bp, Homo sapien
cacataagcaactgcagggttgttc

SEQ ID NO: 4898068 - DNA, 25 bp, Homo sapien
tcctgtcaggaacagattgtggtag

SEQ ID NO: 4898069 - DNA, 25 bp, Homo sapien
tcgggtcggctctgaatctaggtct

SEQ ID NO: 4898070 - DNA, 25 bp, Homo sapien
tctaggtctgtttagacttaaagtc

SEQ ID NO: 4898071 - DNA, 25 bp, Homo sapien
agcagcatcgggtcggctctgaatc

SEQ ID NO: 4898072 - DNA, 25 bp, Homo sapien
gccttcttcaagcagcatcgggtcg

SEQ ID NO: 4898073 - DNA, 25 bp, Homo sapien
aatgcttgacacatgttccgtacat

SEQ ID NO: 4898074 - DNA, 25 bp, Homo sapien
acttgtaaacgttgtgcaatgtcca

SEQ ID NO: 4898075 - DNA, 25 bp, Homo sapien
gcaatgtccaatatagcttgtaggg

SEQ ID NO: 4898076 - DNA, 25 bp, Homo sapien
caatatagcttgtagggtgtcttga

SEQ ID NO: 4898077 - DNA, 25 bp, Homo sapien
actgcaggtttggttatacatgctg

SEQ ID NO: 4898078 - DNA, 25 bp, Homo sapien
gcaaagggcactgcaggtttggtta

SEQ ID NO: 4898079 - DNA, 25 bp, Homo sapien
caggtttggttatacatgctggaaa

SEQ ID NO: 4898080 - DNA, 25 bp, Homo sapien
agggcactgcaggtttggttataca

SEQ ID NO: 4898081 - DNA, 25 bp, Homo sapien
cctaagcaaggaatacactggtctc

SEQ ID NO: 4898082 - DNA, 25 bp, Homo sapien
cacagctgggctcaacaacatctat

SEQ ID NO: 4898083 - DNA, 25 bp, Homo sapien
cactggtctccggaatgaacctgaa

SEQ ID NO: 4898084 - DNA, 25 bp, Homo sapien
gcctacacatctacacacagctggg

SEQ ID NO: 4898085 - DNA, 25 bp, Homo sapien
agaagtcaggcatagacatgcaaag

SEQ ID NO: 4898086 - DNA, 25 bp, Homo sapien
aagacaataatacaagagttattaa

SEQ ID NO: 4898087 - DNA, 25 bp, Homo sapien
aaaaagacaataatacaagagttat

SEQ ID NO: 4898088 - DNA, 25 bp, Homo sapien
gagaagtcaggcatagacatgcaaa

SEQ ID NO: 4898089 - DNA, 25 bp, Homo sapien
taggtgctatttcccttgaagaacc

SEQ ID NO: 4898090 - DNA, 25 bp, Homo sapien
gaacaatatatccagcataggtgct

SEQ ID NO: 4898091 - DNA, 25 bp, Homo sapien
gcttggatgagctccacacccgtaa

SEQ ID NO: 4898092 - DNA, 25 bp, Homo sapien
gtaactgtcaacaaccacccatgca

SEQ ID NO: 4898093 - DNA, 25 bp, Homo sapien
taattacgtgagaacatgacttcca

SEQ ID NO: 4898094 - DNA, 25 bp, Homo sapien
tattgactgatgtggatcactgcac

SEQ ID NO: 4898095 - DNA, 25 bp, Homo sapien
taaaatctggctgggacacacaaat

SEQ ID NO: 4898096 - DNA, 25 bp, Homo sapien
cacaatcaatatggctagggcaaca

SEQ ID NO: 4898097 - DNA, 25 bp, Homo sapien
taggcatctcctgactgtgactgtt

SEQ ID NO: 4898098 - DNA, 25 bp, Homo sapien
actagaagagtttacccaagccctg

SEQ ID NO: 4898099 - DNA, 25 bp, Homo sapien
gtgactgtttctcggacttcccttg

SEQ ID NO: 4898100 - DNA, 25 bp, Homo sapien
tttagttgtcatgcttccataggca

SEQ ID NO: 4898101 - DNA, 25 bp, Homo sapien
atgcacaaagacatagtgatattat

SEQ ID NO: 4898102 - DNA, 25 bp, Homo sapien
gaaatacttgcatgcaagattactt

SEQ ID NO: 4898103 - DNA, 25 bp, Homo sapien
tacttgcatgcaagattacttataa

SEQ ID NO: 4898104 - DNA, 25 bp, Homo sapien
catagtgatattataaggatattga

SEQ ID NO: 4898105 - DNA, 25 bp, Homo sapien
taaaaataacatttgacaacaccac

SEQ ID NO: 4898106 - DNA, 25 bp, Homo sapien
aaataacatttgacaacaccaccat

SEQ ID NO: 4898107 - DNA, 25 bp, Homo sapien
ttaaaaataacatttgacaacacca

SEQ ID NO: 4898108 - DNA, 25 bp, Homo sapien
aaaataacatttgacaacaccacca

SEQ ID NO: 4898109 - DNA, 25 bp, Homo sapien
tgggataactcgacacccctgaggt

SEQ ID NO: 4898110 - DNA, 25 bp, Homo sapien
cctttatcaggtttgcgctttgggc

SEQ ID NO: 4898111 - DNA, 25 bp, Homo sapien
taatgtccttggaagtcggtgcaat

SEQ ID NO: 4898112 - DNA, 25 bp, Homo sapien
tattctgtaaagtatctgccccaca

SEQ ID NO: 4898113 - DNA, 25 bp, Homo sapien
tatacatcaggatatggtagccacc

SEQ ID NO: 4898114 - DNA, 25 bp, Homo sapien
ccttatacatcaggatatggtagcc

SEQ ID NO: 4898115 - DNA, 25 bp, Homo sapien
aacatgtagaaaggccttatacatc

SEQ ID NO: 4898116 - DNA, 25 bp, Homo sapien
acaacatgtagaaaggccttataca

SEQ ID NO: 4898117 - DNA, 25 bp, Homo sapien
gtttcataggaactctccaactctg

SEQ ID NO: 4898118 - DNA, 25 bp, Homo sapien
acactaccattccacgtggcattcc

SEQ ID NO: 4898119 - DNA, 25 bp, Homo sapien
ttccacgtggcattccactgattca

SEQ ID NO: 4898120 - DNA, 25 bp, Homo sapien
ggtttcataggaactctccaactct

SEQ ID NO: 4898121 - DNA, 25 bp, Homo sapien
cgttctaatgctactgaaataacca

SEQ ID NO: 4898122 - DNA, 25 bp, Homo sapien
ctagggattgaacactaaactatcc

SEQ ID NO: 4898123 - DNA, 25 bp, Homo sapien
aaactatccgttctaatgctactga

SEQ ID NO: 4898124 - DNA, 25 bp, Homo sapien
gaacactaaactatccgttctaatg

SEQ ID NO: 4898125 - DNA, 25 bp, Homo sapien
gtggtaaatccccatagcttttgct

SEQ ID NO: 4898126 - DNA, 25 bp, Homo sapien
ttttccagtggtaatctacacacac

SEQ ID NO: 4898127 - DNA, 25 bp, Homo sapien
tcatttcctcctgttagaagtttaa

SEQ ID NO: 4898128 - DNA, 25 bp, Homo sapien
cattgttgatgatagtttagctaac

SEQ ID NO: 4898129 - DNA, 25 bp, Homo sapien
tgtggtgttttcaggagcctaacat

SEQ ID NO: 4898130 - DNA, 25 bp, Homo sapien
tgttgggcataacggagacagtgca

SEQ ID NO: 4898131 - DNA, 25 bp, Homo sapien
aaatgttgggcataacggagacagt

SEQ ID NO: 4898132 - DNA, 25 bp, Homo sapien
ttttcaggagcctaacatgaataac

SEQ ID NO: 4898133 - DNA, 25 bp, Homo sapien
caaatttgacaagcgtggagtcctg

SEQ ID NO: 4898134 - DNA, 25 bp, Homo sapien
catataaaggcttggctaggatggc

SEQ ID NO: 4898135 - DNA, 25 bp, Homo sapien
gctcagtcagtaccttcagaaggat

SEQ ID NO: 4898136 - DNA, 25 bp, Homo sapien
tagtgctccgagatgctttatggcc

SEQ ID NO: 4898137 - DNA, 25 bp, Homo sapien
gggaaatttgtccattcaataacat

SEQ ID NO: 4898138 - DNA, 25 bp, Homo sapien
ctagaaagggtccagtaccatttct

SEQ ID NO: 4898139 - DNA, 25 bp, Homo sapien
agaaagggtccagtaccatttctgt

SEQ ID NO: 4898140 - DNA, 25 bp, Homo sapien
tagaaagggtccagtaccatttctg

SEQ ID NO: 4898141 - DNA, 25 bp, Homo sapien
gaagttttacaaacgagaagctgtg

SEQ ID NO: 4898142 - DNA, 25 bp, Homo sapien
caagagaggatttatgccagcctta

SEQ ID NO: 4898143 - DNA, 25 bp, Homo sapien
agccgggagaaaagacttctataag

SEQ ID NO: 4898144 - DNA, 25 bp, Homo sapien
tcttgtttctgggagtaaagccact

SEQ ID NO: 4898145 - DNA, 25 bp, Homo sapien
ggcaagcccacaccatagtctctgg

SEQ ID NO: 4898146 - DNA, 25 bp, Homo sapien
ctatgtatgcccacatctgacagga

SEQ ID NO: 4898147 - DNA, 25 bp, Homo sapien
gagcaccacaggtggcaagcccaca

SEQ ID NO: 4898148 - DNA, 25 bp, Homo sapien
tctatgtatgcccacatctgacagg

SEQ ID NO: 4898149 - DNA, 25 bp, Homo sapien
tgtgcggtgctctgctatctatggg

SEQ ID NO: 4898150 - DNA, 25 bp, Homo sapien
gagtgttcatctgcctgtgcggtgc

SEQ ID NO: 4898151 - DNA, 25 bp, Homo sapien
cacatttccaggaattctgacaaac

SEQ ID NO: 4898152 - DNA, 25 bp, Homo sapien
tatggggtacttctcattgacagac

SEQ ID NO: 4898153 - DNA, 25 bp, Homo sapien
tgcagtttcctaccataagcgctaa

SEQ ID NO: 4898154 - DNA, 25 bp, Homo sapien
tcttagatggaaatcttggcactca

SEQ ID NO: 4898155 - DNA, 25 bp, Homo sapien
ctataaactgtcatatctgcctgga

SEQ ID NO: 4898156 - DNA, 25 bp, Homo sapien
cttggtgcccggatttagaaatact

SEQ ID NO: 4898157 - DNA, 25 bp, Homo sapien
aagtcttcctgtcaaaattctggtc

SEQ ID NO: 4898158 - DNA, 25 bp, Homo sapien
tccaagtcttcctgtcaaaattctg

SEQ ID NO: 4898159 - DNA, 25 bp, Homo sapien
caagtcttcctgtcaaaattctggt

SEQ ID NO: 4898160 - DNA, 25 bp, Homo sapien
cctccaagtcttcctgtcaaaattc

SEQ ID NO: 4898161 - DNA, 25 bp, Homo sapien
gcactaattccatctcatctgaagg

SEQ ID NO: 4898162 - DNA, 25 bp, Homo sapien
gaatctgctattgtttgaatgggac

SEQ ID NO: 4898163 - DNA, 25 bp, Homo sapien
taatcctttggaggtatcactatac

SEQ ID NO: 4898164 - DNA, 25 bp, Homo sapien
gattaagagtcattactagagagct

SEQ ID NO: 4898165 - DNA, 25 bp, Homo sapien
aatttcttgaatctggatatccacc

SEQ ID NO: 4898166 - DNA, 25 bp, Homo sapien
gaatttcttgaatctggatatccac

SEQ ID NO: 4898167 - DNA, 25 bp, Homo sapien
agagaccttcaggcagtagcctctg

SEQ ID NO: 4898168 - DNA, 25 bp, Homo sapien
gcagcattctgagcacactgatttc

SEQ ID NO: 4898169 - DNA, 25 bp, Homo sapien
agaggtatgtacctttcctgcctgg

SEQ ID NO: 4898170 - DNA, 25 bp, Homo sapien
tactcgtttgttcctggcagctctg

SEQ ID NO: 4898171 - DNA, 25 bp, Homo sapien
ctttaaaacagtactgtgaagttga

SEQ ID NO: 4898172 - DNA, 25 bp, Homo sapien
gcaagaagatgtcattagacagacc

SEQ ID NO: 4898173 - DNA, 25 bp, Homo sapien
aagaagatgtcattagacagaccag

SEQ ID NO: 4898174 - DNA, 25 bp, Homo sapien
cagtgcagatgatggtaacccatct

SEQ ID NO: 4898175 - DNA, 25 bp, Homo sapien
gatggtaacccatctgcaagaagat

SEQ ID NO: 4898176 - DNA, 25 bp, Homo sapien
gaaaaccaactcttggtacagcctg

SEQ ID NO: 4898177 - DNA, 25 bp, Homo sapien
tgagagaaaaccaactcttggtaca

SEQ ID NO: 4898178 - DNA, 25 bp, Homo sapien
aactcttggtacagcctgtcctaca

SEQ ID NO: 4898179 - DNA, 25 bp, Homo sapien
aaccaactcttggtacagcctgtcc

SEQ ID NO: 4898180 - DNA, 25 bp, Homo sapien
ggatcaagctggtaatcccacgatt

SEQ ID NO: 4898181 - DNA, 25 bp, Homo sapien
ctgtaagacaatggttaggacttct

SEQ ID NO: 4898182 - DNA, 25 bp, Homo sapien
cacgattcaaattcgctgcccttca

SEQ ID NO: 4898183 - DNA, 25 bp, Homo sapien
taagacaatggttaggacttctgga

SEQ ID NO: 4898184 - DNA, 25 bp, Homo sapien
tggaacaatgtcacacaatcgtggc

SEQ ID NO: 4898185 - DNA, 25 bp, Homo sapien
tctgtatccccaggtaagtgtgagc

SEQ ID NO: 4898186 - DNA, 25 bp, Homo sapien
caatcgtggcctctaaagtgtttac

SEQ ID NO: 4898187 - DNA, 25 bp, Homo sapien
taaacagaggtacaggtctccatgg

SEQ ID NO: 4898188 - DNA, 25 bp, Homo sapien
ctctacatagttccaaacactactg

SEQ ID NO: 4898189 - DNA, 25 bp, Homo sapien
tacatagttccaaacactactggta

SEQ ID NO: 4898190 - DNA, 25 bp, Homo sapien
ctctctctacatagttccaaacact

SEQ ID NO: 4898191 - DNA, 25 bp, Homo sapien
atagttccaaacactactggtattc

SEQ ID NO: 4898192 - DNA, 25 bp, Homo sapien
tttgtactgcttagctatgcagtct

SEQ ID NO: 4898193 - DNA, 25 bp, Homo sapien
tactgcttagctatgcagtctcttt

SEQ ID NO: 4898194 - DNA, 25 bp, Homo sapien
tttttgtactgcttagctatgcagt

SEQ ID NO: 4898195 - DNA, 25 bp, Homo sapien
tgtactgcttagctatgcagtctct

SEQ ID NO: 4898196 - DNA, 25 bp, Homo sapien
gctgctagcattttggtaatggtga

SEQ ID NO: 4898197 - DNA, 25 bp, Homo sapien
tgctgtctggctgctagcattttgg

SEQ ID NO: 4898198 - DNA, 25 bp, Homo sapien
gactgagactgctgtctggctgcta

SEQ ID NO: 4898199 - DNA, 25 bp, Homo sapien
tgagactgctgtctggctgctagca

SEQ ID NO: 4898200 - DNA, 25 bp, Homo sapien
gattatccattggacaaagacagat

SEQ ID NO: 4898201 - DNA, 25 bp, Homo sapien
attatccattggacaaagacagata

SEQ ID NO: 4898202 - DNA, 25 bp, Homo sapien
ttatccattggacaaagacagataa

SEQ ID NO: 4898203 - DNA, 25 bp, Homo sapien
tatccattggacaaagacagataat

SEQ ID NO: 4898204 - DNA, 25 bp, Homo sapien
ctgggtctcaaagggccttttagtg

SEQ ID NO: 4898205 - DNA, 25 bp, Homo sapien
tcgtccataactggcctgggtctca

SEQ ID NO: 4898206 - DNA, 25 bp, Homo sapien
tctcaaagggccttttagtgagaag

SEQ ID NO: 4898207 - DNA, 25 bp, Homo sapien
agcagtgcctcgtccataactggcc

SEQ ID NO: 4898208 - DNA, 25 bp, Homo sapien
tagctagtttcatgagagcaacttt

SEQ ID NO: 4898209 - DNA, 25 bp, Homo sapien
tcatgagagcaactttaggtacaaa

SEQ ID NO: 4898210 - DNA, 25 bp, Homo sapien
tatgattccattagctagtttcatg

SEQ ID NO: 4898211 - DNA, 25 bp, Homo sapien
taggtacaaatgaggcagagtgtga

SEQ ID NO: 4898212 - DNA, 25 bp, Homo sapien
tcttgtcaggttgcgttatagagcc

SEQ ID NO: 4898213 - DNA, 25 bp, Homo sapien
gtcttccgacaggagagatgagtgt

SEQ ID NO: 4898214 - DNA, 25 bp, Homo sapien
tccagaattaaactctggttttctc

SEQ ID NO: 4898215 - DNA, 25 bp, Homo sapien
tagagcctggtcttccgacaggaga

SEQ ID NO: 4898216 - DNA, 25 bp, Homo sapien
aagccgcgctaagaattgctgacat

SEQ ID NO: 4898217 - DNA, 25 bp, Homo sapien
cctatgtataggacagtactcttgt

SEQ ID NO: 4898218 - DNA, 25 bp, Homo sapien
tactcttgtcttcggtaacttgcac

SEQ ID NO: 4898219 - DNA, 25 bp, Homo sapien
actccagtgaataatccttgagagc

SEQ ID NO: 4898220 - DNA, 25 bp, Homo sapien
ccttgagagccctatgtataggaca

SEQ ID NO: 4898221 - DNA, 25 bp, Homo sapien
tcttagactacttataaccaaagga

SEQ ID NO: 4898222 - DNA, 25 bp, Homo sapien
gactacttataaccaaaggatcaga

SEQ ID NO: 4898223 - DNA, 25 bp, Homo sapien
ttagactacttataaccaaaggatc

SEQ ID NO: 4898224 - DNA, 25 bp, Homo sapien
acttataaccaaaggatcagacttc

SEQ ID NO: 4898225 - DNA, 25 bp, Homo sapien
agctttgactgggaaccacctctct

SEQ ID NO: 4898226 - DNA, 25 bp, Homo sapien
cattcttgacagctttgactgggaa

SEQ ID NO: 4898227 - DNA, 25 bp, Homo sapien
gacagattctatgctacatgctttg

SEQ ID NO: 4898228 - DNA, 25 bp, Homo sapien
tgctttgataaagtagggattcaag

SEQ ID NO: 4898229 - DNA, 25 bp, Homo sapien
aacatttaaataagcctgatgccct

SEQ ID NO: 4898230 - DNA, 25 bp, Homo sapien
gcttgtaaagtcaacaatcacctta

SEQ ID NO: 4898231 - DNA, 25 bp, Homo sapien
cactgagaatcagataaagtaggcc

SEQ ID NO: 4898232 - DNA, 25 bp, Homo sapien
aagtaggccgatatttaatctaggg

SEQ ID NO: 4898233 - DNA, 25 bp, Homo sapien
ggtcatttttggctaatgtcatgga

SEQ ID NO: 4898234 - DNA, 25 bp, Homo sapien
cagatttgaccaccaaatttagaac

SEQ ID NO: 4898235 - DNA, 25 bp, Homo sapien
caagggcagatttgaccaccaaatt

SEQ ID NO: 4898236 - DNA, 25 bp, Homo sapien
cagtagcattgcaaggatactttgg

SEQ ID NO: 4898237 - DNA, 25 bp, Homo sapien
ctacaggcctgtgccacaatgcctg

SEQ ID NO: 4898238 - DNA, 25 bp, Homo sapien
cacctcagcctctcaaagtgctggg

SEQ ID NO: 4898239 - DNA, 25 bp, Homo sapien
actacaggcctgtgccacaatgcct

SEQ ID NO: 4898240 - DNA, 25 bp, Homo sapien
acctcagcctctcaaagtgctggga

SEQ ID NO: 4898241 - DNA, 25 bp, Homo sapien
ctgctgttcatgtgcattctttatg

SEQ ID NO: 4898242 - DNA, 25 bp, Homo sapien
tattgcaataataaggtattgacaa

SEQ ID NO: 4898243 - DNA, 25 bp, Homo sapien
aataaggtattgacaattttgcttt

SEQ ID NO: 4898244 - DNA, 25 bp, Homo sapien
ttattgcaataataaggtattgaca

SEQ ID NO: 4898245 - DNA, 25 bp, Homo sapien
aataataaggtattgacaattttgc

SEQ ID NO: 4898246 - DNA, 25 bp, Homo sapien
ttgaaaattagcaaacatttcaata

SEQ ID NO: 4898247 - DNA, 25 bp, Homo sapien
gaaaattagcaaacatttcaataat

SEQ ID NO: 4898248 - DNA, 25 bp, Homo sapien
aaattagcaaacatttcaataatgc

SEQ ID NO: 4898249 - DNA, 25 bp, Homo sapien
ttagcaaacatttcaataatgcagt

SEQ ID NO: 4898250 - DNA, 25 bp, Homo sapien
cctttgagaagtgcattggattatt

SEQ ID NO: 4898251 - DNA, 25 bp, Homo sapien
tttgagaagtgcattggattatttt

SEQ ID NO: 4898252 - DNA, 25 bp, Homo sapien
tcctttgagaagtgcattggattat

SEQ ID NO: 4898253 - DNA, 25 bp, Homo sapien
ttcctttgagaagtgcattggatta

SEQ ID NO: 4898254 - DNA, 25 bp, Homo sapien
tctgtattttcgtggctgacagcca

SEQ ID NO: 4898255 - DNA, 25 bp, Homo sapien
tttctgtattttcgtggctgacagc

SEQ ID NO: 4898256 - DNA, 25 bp, Homo sapien
tattttcgtggctgacagccagact

SEQ ID NO: 4898257 - DNA, 25 bp, Homo sapien
ctgtattttcgtggctgacagccag

SEQ ID NO: 4898258 - DNA, 25 bp, Homo sapien
tctgagacaagatatttgtgtctgg

SEQ ID NO: 4898259 - DNA, 25 bp, Homo sapien
ttttgccacttaagatgaacagttg

SEQ ID NO: 4898260 - DNA, 25 bp, Homo sapien
tgaacagttgtgtactaagaaggcc

SEQ ID NO: 4898261 - DNA, 25 bp, Homo sapien
gttgtgtactaagaaggccttccat

SEQ ID NO: 4898262 - DNA, 25 bp, Homo sapien
gaggtgccttaatgcgttgcacaaa

SEQ ID NO: 4898263 - DNA, 25 bp, Homo sapien
ctagttggtgactagtgactgagct

SEQ ID NO: 4898264 - DNA, 25 bp, Homo sapien
tactgcatggtggtgtgagtatgga

SEQ ID NO: 4898265 - DNA, 25 bp, Homo sapien
actcttggaggaattgaggtgcctt

SEQ ID NO: 4898266 - DNA, 25 bp, Homo sapien
accttaaggaagatgtatcaacctg

SEQ ID NO: 4898267 - DNA, 25 bp, Homo sapien
ggaaccttaaggaagatgtatcaac

SEQ ID NO: 4898268 - DNA, 25 bp, Homo sapien
gaaccttaaggaagatgtatcaacc

SEQ ID NO: 4898269 - DNA, 25 bp, Homo sapien
aaggaaccttaaggaagatgtatca

SEQ ID NO: 4898270 - DNA, 25 bp, Homo sapien
acttggggccaatgggagccttctg

SEQ ID NO: 4898271 - DNA, 25 bp, Homo sapien
agccacttggggccaatgggagcct

SEQ ID NO: 4898272 - DNA, 25 bp, Homo sapien
agccttctgtttcgcttcatggtta

SEQ ID NO: 4898273 - DNA, 25 bp, Homo sapien
aatgggagccttctgtttcgcttca

SEQ ID NO: 4898274 - DNA, 25 bp, Homo sapien
aatacaattgtccatcaggctactt

SEQ ID NO: 4898275 - DNA, 25 bp, Homo sapien
aggctacttatctggaagtcctcag

SEQ ID NO: 4898276 - DNA, 25 bp, Homo sapien
tcagatagatataaagccaatacaa

SEQ ID NO: 4898277 - DNA, 25 bp, Homo sapien
gatataaagccaatacaattgtcca

SEQ ID NO: 4898278 - DNA, 25 bp, Homo sapien
gatatagcaaaggttatggatatac

SEQ ID NO: 4898279 - DNA, 25 bp, Homo sapien
tctctttgtccagatatagcaaagg

SEQ ID NO: 4898280 - DNA, 25 bp, Homo sapien
tctctctttgtccagatatagcaaa

SEQ ID NO: 4898281 - DNA, 25 bp, Homo sapien
ctctttgtccagatatagcaaaggt

SEQ ID NO: 4898282 - DNA, 25 bp, Homo sapien
gcagcctgaagtagtacagcttgga

SEQ ID NO: 4898283 - DNA, 25 bp, Homo sapien
gtacagcttggataaaagaaaatgt

SEQ ID NO: 4898284 - DNA, 25 bp, Homo sapien
gaagtagtacagcttggataaaaga

SEQ ID NO: 4898285 - DNA, 25 bp, Homo sapien
ggttcccatggcagcctgaagtagt

SEQ ID NO: 4898286 - DNA, 25 bp, Homo sapien
ttatgctgaccctatcatgaagaca

SEQ ID NO: 4898287 - DNA, 25 bp, Homo sapien
tcttttgtaagccaactcaactctt

SEQ ID NO: 4898288 - DNA, 25 bp, Homo sapien
ctgtgtgtcacttatgctgacccta

SEQ ID NO: 4898289 - DNA, 25 bp, Homo sapien
gacagtcttttgtaagccaactcaa

SEQ ID NO: 4898290 - DNA, 25 bp, Homo sapien
tctctttctataatggcaagttcca

SEQ ID NO: 4898291 - DNA, 25 bp, Homo sapien
gactgtgtatcatgcatttctcttt

SEQ ID NO: 4898292 - DNA, 25 bp, Homo sapien
ccaagtccatcagaagtgactgtgt

SEQ ID NO: 4898293 - DNA, 25 bp, Homo sapien
ttatattttgggcttcccaagtcca

SEQ ID NO: 4898294 - DNA, 25 bp, Homo sapien
ccaggtgccatatcaagcaatggta

SEQ ID NO: 4898295 - DNA, 25 bp, Homo sapien
aaatcttatatttgaccaggtgcca

SEQ ID NO: 4898296 - DNA, 25 bp, Homo sapien
tatatttgaccaggtgccatatcaa

SEQ ID NO: 4898297 - DNA, 25 bp, Homo sapien
ccatatcaagcaatggtatatttca

SEQ ID NO: 4898298 - DNA, 25 bp, Homo sapien
tctctaaagtaggaaatgtgcctgg

SEQ ID NO: 4898299 - DNA, 25 bp, Homo sapien
aagtggaatccagcctctagcaaaa

SEQ ID NO: 4898300 - DNA, 25 bp, Homo sapien
gaatatcctgtttgcagcacctagt

SEQ ID NO: 4898301 - DNA, 25 bp, Homo sapien
caaaaagactgggtgctaaacatca

SEQ ID NO: 4898302 - DNA, 25 bp, Homo sapien
tgctctcatagcaactatgaagacc

SEQ ID NO: 4898303 - DNA, 25 bp, Homo sapien
gacaatgctctcatagcaactatga

SEQ ID NO: 4898304 - DNA, 25 bp, Homo sapien
tctcatagcaactatgaagaccttc

SEQ ID NO: 4898305 - DNA, 25 bp, Homo sapien
ccacacagacaatgctctcatagca

SEQ ID NO: 4898306 - DNA, 25 bp, Homo sapien
ccattgatataactaggtcttccct

SEQ ID NO: 4898307 - DNA, 25 bp, Homo sapien
ataccattgatataactaggtcttc

SEQ ID NO: 4898308 - DNA, 25 bp, Homo sapien
ttgatataactaggtcttccctgac

SEQ ID NO: 4898309 - DNA, 25 bp, Homo sapien
tgatataactaggtcttccctgacc

SEQ ID NO: 4898310 - DNA, 25 bp, Homo sapien
gatgttactagaccatggccctaga

SEQ ID NO: 4898311 - DNA, 25 bp, Homo sapien
aagatggcattgatgttactagacc

SEQ ID NO: 4898312 - DNA, 25 bp, Homo sapien
ccatggccctagaaatccctgaatc

SEQ ID NO: 4898313 - DNA, 25 bp, Homo sapien
ggatgtggttccattaaagatggca

SEQ ID NO: 4898314 - DNA, 25 bp, Homo sapien
catgatgtctatttggtctgaatca

SEQ ID NO: 4898315 - DNA, 25 bp, Homo sapien
ttcctccaaggaaggtccatgcttc

SEQ ID NO: 4898316 - DNA, 25 bp, Homo sapien
ggaaggtccatgcttccccatgatg

SEQ ID NO: 4898317 - DNA, 25 bp, Homo sapien
tccaaggaaggtccatgcttcccca

SEQ ID NO: 4898318 - DNA, 25 bp, Homo sapien
tcatgagagcttaagagaggaagag

SEQ ID NO: 4898319 - DNA, 25 bp, Homo sapien
catgagagcttaagagaggaagagc

SEQ ID NO: 4898320 - DNA, 25 bp, Homo sapien
tgatgtacatctacaagggctattt

SEQ ID NO: 4898321 - DNA, 25 bp, Homo sapien
ttctcattttgttcagcatatttca

SEQ ID NO: 4898322 - DNA, 25 bp, Homo sapien
tcattttgttcagcatatttcaggg

SEQ ID NO: 4898323 - DNA, 25 bp, Homo sapien
atgtacatctacaagggctattttg

SEQ ID NO: 4898324 - DNA, 25 bp, Homo sapien
tttgtgttaccactgatggttctga

SEQ ID NO: 4898325 - DNA, 25 bp, Homo sapien
gaaagagttgtcaggaagcatggtt

SEQ ID NO: 4898326 - DNA, 25 bp, Homo sapien
tactatccaagtgaagagcattgcc

SEQ ID NO: 4898327 - DNA, 25 bp, Homo sapien
tgtagagattccaatcttactgcct

SEQ ID NO: 4898328 - DNA, 25 bp, Homo sapien
tccagttaaggagttctatttctct

SEQ ID NO: 4898329 - DNA, 25 bp, Homo sapien
ccagttaaggagttctatttctctt

SEQ ID NO: 4898330 - DNA, 25 bp, Homo sapien
tcatgggccagtggtaacaggcctt

SEQ ID NO: 4898331 - DNA, 25 bp, Homo sapien
tgggccagtggtaacaggccttaac

SEQ ID NO: 4898332 - DNA, 25 bp, Homo sapien
agaggctctctaccaggaggaccat

SEQ ID NO: 4898333 - DNA, 25 bp, Homo sapien
taccaggaggaccatcctccaggct

SEQ ID NO: 4898334 - DNA, 25 bp, Homo sapien
cagccagtacttataatctcttgca

SEQ ID NO: 4898335 - DNA, 25 bp, Homo sapien
gagggcggtaaacagccagtactta

SEQ ID NO: 4898336 - DNA, 25 bp, Homo sapien
catcctggatgtaggaatgggcaaa

SEQ ID NO: 4898337 - DNA, 25 bp, Homo sapien
gagccctgaaataatgccgcacatc

SEQ ID NO: 4898338 - DNA, 25 bp, Homo sapien
ccttgcaaaacaacctagtcaatac

SEQ ID NO: 4898339 - DNA, 25 bp, Homo sapien
tgcagaagattgaagttggacactt

SEQ ID NO: 4898340 - DNA, 25 bp, Homo sapien
ctgttgggtcagtggtaccattcct

SEQ ID NO: 4898341 - DNA, 25 bp, Homo sapien
tcttttgtcttattagcctagctag

SEQ ID NO: 4898342 - DNA, 25 bp, Homo sapien
tagcctagctagtggcatatctatt

SEQ ID NO: 4898343 - DNA, 25 bp, Homo sapien
cctggatttgttgagatctctacaa

SEQ ID NO: 4898344 - DNA, 25 bp, Homo sapien
gggaacttgacacctaatgttgctc

SEQ ID NO: 4898345 - DNA, 25 bp, Homo sapien
ttagttcatgtccatgacatccctg

SEQ ID NO: 4898346 - DNA, 25 bp, Homo sapien
tctggacacaataggccacatttcc

SEQ ID NO: 4898347 - DNA, 25 bp, Homo sapien
gtgactcccattttcctatcacact

SEQ ID NO: 4898348 - DNA, 25 bp, Homo sapien
catctatggttcttcattgttcagg

SEQ ID NO: 4898349 - DNA, 25 bp, Homo sapien
gcactactgttcactaattgtgtga

SEQ ID NO: 4898350 - DNA, 25 bp, Homo sapien
taccccagatcttgacatctatggt

SEQ ID NO: 4898351 - DNA, 25 bp, Homo sapien
gaagtattacctttcccaagagatc

SEQ ID NO: 4898352 - DNA, 25 bp, Homo sapien
ggtgctgtgttacctattggtcaca

SEQ ID NO: 4898353 - DNA, 25 bp, Homo sapien
tgggtgctgtgttacctattggtca

SEQ ID NO: 4898354 - DNA, 25 bp, Homo sapien
tgtgttacctattggtcacagtttg

SEQ ID NO: 4898355 - DNA, 25 bp, Homo sapien
ttacctattggtcacagtttgtcat

SEQ ID NO: 4898356 - DNA, 25 bp, Homo sapien
gtccagcattcttaaggcaacactg

SEQ ID NO: 4898357 - DNA, 25 bp, Homo sapien
tgtattctgaggcacatctttccag

SEQ ID NO: 4898358 - DNA, 25 bp, Homo sapien
aacagagaaaacagtgacttgctgc

SEQ ID NO: 4898359 - DNA, 25 bp, Homo sapien
tgaagtcaggcacctctgagagatg

SEQ ID NO: 4898360 - DNA, 25 bp, Homo sapien
gacaacacatcaggctgcagatcat

SEQ ID NO: 4898361 - DNA, 25 bp, Homo sapien
aacttgacccagttggctgccaaag

SEQ ID NO: 4898362 - DNA, 25 bp, Homo sapien
caaacagggttctgagctgcatccc

SEQ ID NO: 4898363 - DNA, 25 bp, Homo sapien
cagatcatcaaacagggttctgagc

SEQ ID NO: 4898364 - DNA, 25 bp, Homo sapien
gagagagcgagttaccatcgtgcat

SEQ ID NO: 4898365 - DNA, 25 bp, Homo sapien
cacagatggggatgcaaatagcagt

SEQ ID NO: 4898366 - DNA, 25 bp, Homo sapien
caaatgactttaccactgtgcccat

SEQ ID NO: 4898367 - DNA, 25 bp, Homo sapien
gggatgcaaatagcagtatgagaga

SEQ ID NO: 4898368 - DNA, 25 bp, Homo sapien
ttgagaatcacactgtgaggctgcc

SEQ ID NO: 4898369 - DNA, 25 bp, Homo sapien
tgtttgagaatcacactgtgaggct

SEQ ID NO: 4898370 - DNA, 25 bp, Homo sapien
ttctgtttgagaatcacactgtgag

SEQ ID NO: 4898371 - DNA, 25 bp, Homo sapien
tctgtttgagaatcacactgtgagg

SEQ ID NO: 4898372 - DNA, 25 bp, Homo sapien
tctggactgtggtaagatcttcacc

SEQ ID NO: 4898373 - DNA, 25 bp, Homo sapien
tatccccagtcagtatatactgcca

SEQ ID NO: 4898374 - DNA, 25 bp, Homo sapien
cattcagcacgacccttctggactg

SEQ ID NO: 4898375 - DNA, 25 bp, Homo sapien
tattcttagacacttgaactcatga

SEQ ID NO: 4898376 - DNA, 25 bp, Homo sapien
tgtgcaactctaggcagaagtccaa

SEQ ID NO: 4898377 - DNA, 25 bp, Homo sapien
aaacgtctggcaagttaatgtggat

SEQ ID NO: 4898378 - DNA, 25 bp, Homo sapien
gagaaatctgcaatcttggatactt

SEQ ID NO: 4898379 - DNA, 25 bp, Homo sapien
aaactgtgcaactctaggcagaagt

SEQ ID NO: 4898380 - DNA, 25 bp, Homo sapien
ctggcatcgtaactaccagctgttg

SEQ ID NO: 4898381 - DNA, 25 bp, Homo sapien
tcgctggctgttgtcgtggtcctct

SEQ ID NO: 4898382 - DNA, 25 bp, Homo sapien
tctgacctacagtatccacatgctg

SEQ ID NO: 4898383 - DNA, 25 bp, Homo sapien
ggctgttgtcgtggtcctctcttgg

SEQ ID NO: 4898384 - DNA, 25 bp, Homo sapien
ggatggtctttgcagtaggtgcaaa

SEQ ID NO: 4898385 - DNA, 25 bp, Homo sapien
taggtgcaaaaggtactggaacaat

SEQ ID NO: 4898386 - DNA, 25 bp, Homo sapien
tctgggccttaacccttaccataca

SEQ ID NO: 4898387 - DNA, 25 bp, Homo sapien
taagtcccagaatagatagatacac

SEQ ID NO: 4898388 - DNA, 25 bp, Homo sapien
tggtgtggcatcatcaaatccctgt

SEQ ID NO: 4898389 - DNA, 25 bp, Homo sapien
cactgattgagggtcttcctggtgt

SEQ ID NO: 4898390 - DNA, 25 bp, Homo sapien
taatacttgctcgtgtccttttgaa

SEQ ID NO: 4898391 - DNA, 25 bp, Homo sapien
gaagtacccactattcactgaacac

SEQ ID NO: 4898392 - DNA, 25 bp, Homo sapien
tacttggtgattgaaatacacagcc

SEQ ID NO: 4898393 - DNA, 25 bp, Homo sapien
taaatctaattgataaaatcctggg

SEQ ID NO: 4898394 - DNA, 25 bp, Homo sapien
tgaaacacgttttgactctacttgg

SEQ ID NO: 4898395 - DNA, 25 bp, Homo sapien
cattttagtgatctcttgaaacacg

SEQ ID NO: 4898396 - DNA, 25 bp, Homo sapien
gaatataggctttagcaacagggct

SEQ ID NO: 4898397 - DNA, 25 bp, Homo sapien
caattagctaatgttactttcccaa

SEQ ID NO: 4898398 - DNA, 25 bp, Homo sapien
tgaacagtgccttagtaattaacaa

SEQ ID NO: 4898399 - DNA, 25 bp, Homo sapien
tctcatagggacttttgaggagtaa

SEQ ID NO: 4898400 - DNA, 25 bp, Homo sapien
gttaatttcaagaccttgtctttga

SEQ ID NO: 4898401 - DNA, 25 bp, Homo sapien
ccaaagtttcctgaatttttgattg

SEQ ID NO: 4898402 - DNA, 25 bp, Homo sapien
tgcatttctaaaagtgtttccaaag

SEQ ID NO: 4898403 - DNA, 25 bp, Homo sapien
taatttcaagaccttgtctttgagc

SEQ ID NO: 4898404 - DNA, 25 bp, Homo sapien
ggtgtgttcagtgctaaagacagta

SEQ ID NO: 4898405 - DNA, 25 bp, Homo sapien
taaatgctttacctggcactctgat

SEQ ID NO: 4898406 - DNA, 25 bp, Homo sapien
catctggagatatagttgccacttc

SEQ ID NO: 4898407 - DNA, 25 bp, Homo sapien
tatatgttgggtagcgtcttttggc

SEQ ID NO: 4898408 - DNA, 25 bp, Homo sapien
ggatagtacgttgttggtctgctga

SEQ ID NO: 4898409 - DNA, 25 bp, Homo sapien
ttaaagatggatagtacgttgttgg

SEQ ID NO: 4898410 - DNA, 25 bp, Homo sapien
aagtgttcggtgcttctaaattcat

SEQ ID NO: 4898411 - DNA, 25 bp, Homo sapien
ttggtctgctgattcctgaagtgtt

SEQ ID NO: 4898412 - DNA, 25 bp, Homo sapien
aggactgagaggtggatgataaacc

SEQ ID NO: 4898413 - DNA, 25 bp, Homo sapien
gaggactgagaggtggatgataaac

SEQ ID NO: 4898414 - DNA, 25 bp, Homo sapien
tgaggactgagaggtggatgataaa

SEQ ID NO: 4898415 - DNA, 25 bp, Homo sapien
gcttctccgaaccagagctgacttc

SEQ ID NO: 4898416 - DNA, 25 bp, Homo sapien
caaacttcgcaggttacgtcagcgg

SEQ ID NO: 4898417 - DNA, 25 bp, Homo sapien
gccacaggtcttccggaagttgcca

SEQ ID NO: 4898418 - DNA, 25 bp, Homo sapien
gtagcgccgcgaaagagcttcctct

SEQ ID NO: 4898419 - DNA, 25 bp, Homo sapien
gctcaggcgcccagatacgcccctg

SEQ ID NO: 4898420 - DNA, 25 bp, Homo sapien
gctcaggccggttccgggtgtgccc

SEQ ID NO: 4898421 - DNA, 25 bp, Homo sapien
gcaagaccctttttgccccgcaaca

SEQ ID NO: 4898422 - DNA, 25 bp, Homo sapien
ccctgcacgagcgaggccggcaaga

SEQ ID NO: 4898423 - DNA, 25 bp, Homo sapien
caggtcggcgagtttgtggtaggga

SEQ ID NO: 4898424 - DNA, 25 bp, Homo sapien
tggtagggaatggtgggcagggcgc

SEQ ID NO: 4898425 - DNA, 25 bp, Homo sapien
tcgagcagcggagtgtggatgtgca

SEQ ID NO: 4898426 - DNA, 25 bp, Homo sapien
acctggacgcgccagtctgcgtggc

SEQ ID NO: 4898427 - DNA, 25 bp, Homo sapien
tcaggctcattgcaaattcccaaaa

SEQ ID NO: 4898428 - DNA, 25 bp, Homo sapien
gaatgtaactaaatctagctttgtg

SEQ ID NO: 4898429 - DNA, 25 bp, Homo sapien
ccatttggcatgtattcagtaacta

SEQ ID NO: 4898430 - DNA, 25 bp, Homo sapien
catttaatgatccatttggcatgta

SEQ ID NO: 4898431 - DNA, 25 bp, Homo sapien
aatttcatgcaggatgcgaaatctc

SEQ ID NO: 4898432 - DNA, 25 bp, Homo sapien
gcaggtaatttacaccaagggcaat

SEQ ID NO: 4898433 - DNA, 25 bp, Homo sapien
tgtgcaggtaatttacaccaagggc

SEQ ID NO: 4898434 - DNA, 25 bp, Homo sapien
gatgcgaaatctcaatggccaagca

SEQ ID NO: 4898435 - DNA, 25 bp, Homo sapien
gtccaataagatattctgagtcttc

SEQ ID NO: 4898436 - DNA, 25 bp, Homo sapien
tgtccaataagatattctgagtctt

SEQ ID NO: 4898437 - DNA, 25 bp, Homo sapien
atgaaattcattgtccaataagata

SEQ ID NO: 4898438 - DNA, 25 bp, Homo sapien
catgcgccactttgataaaccaaaa

SEQ ID NO: 4898439 - DNA, 25 bp, Homo sapien
tatatatcgtgcttgatactggccc

SEQ ID NO: 4898440 - DNA, 25 bp, Homo sapien
cttctggtgcagatttgctacttcg

SEQ ID NO: 4898441 - DNA, 25 bp, Homo sapien
tgctacttcgtgactgtgagaggga

SEQ ID NO: 4898442 - DNA, 25 bp, Homo sapien
gataacacttcccatgtgataactg

SEQ ID NO: 4898443 - DNA, 25 bp, Homo sapien
acacttcccatgtgataactgcata

SEQ ID NO: 4898444 - DNA, 25 bp, Homo sapien
taacacttcccatgtgataactgca

SEQ ID NO: 4898445 - DNA, 25 bp, Homo sapien
tctggataacacttcccatgtgata

SEQ ID NO: 4898446 - DNA, 25 bp, Homo sapien
cggtgaggtatatcatatggcaaac

SEQ ID NO: 4898447 - DNA, 25 bp, Homo sapien
tgtgacacactatacattatctgca

SEQ ID NO: 4898448 - DNA, 25 bp, Homo sapien
tcattaataacaggtcgatgtcctt

SEQ ID NO: 4898449 - DNA, 25 bp, Homo sapien
gagatcatacgtgctcggtgaggta

SEQ ID NO: 4898450 - DNA, 25 bp, Homo sapien
tataggccatttcagttaagacagt

SEQ ID NO: 4898451 - DNA, 25 bp, Homo sapien
tgacttcaccctgtactgatcagtg

SEQ ID NO: 4898452 - DNA, 25 bp, Homo sapien
caatgtcctatgaagtctgtctgcc

SEQ ID NO: 4898453 - DNA, 25 bp, Homo sapien
gagaggaaccctctgaaatctctgg

SEQ ID NO: 4898454 - DNA, 25 bp, Homo sapien
aactggttcaagttctattaaacat

SEQ ID NO: 4898455 - DNA, 25 bp, Homo sapien
tgttttctttagctgaataacagct

SEQ ID NO: 4898456 - DNA, 25 bp, Homo sapien
tctttagctgaataacagcttcaag

SEQ ID NO: 4898457 - DNA, 25 bp, Homo sapien
gctgaataacagcttcaagaaaagt

SEQ ID NO: 4898458 - DNA, 25 bp, Homo sapien
gaattagtgaatctgtccctaagaa

SEQ ID NO: 4898459 - DNA, 25 bp, Homo sapien
tattgttatatgaccctttaaaatg

SEQ ID NO: 4898460 - DNA, 25 bp, Homo sapien
gaagccaattacctaggaaaacata

SEQ ID NO: 4898461 - DNA, 25 bp, Homo sapien
tgtgaggttttcctctgcttataaa

SEQ ID NO: 4898462 - DNA, 25 bp, Homo sapien
taacaattacctacatgcaggatgg

SEQ ID NO: 4898463 - DNA, 25 bp, Homo sapien
caggatggttctagagattgagctt

SEQ ID NO: 4898464 - DNA, 25 bp, Homo sapien
cctggctcatattaattggttacct

SEQ ID NO: 4898465 - DNA, 25 bp, Homo sapien
cagtgtctcagagcttcatcctcga

SEQ ID NO: 4898466 - DNA, 25 bp, Homo sapien
tcttcttgtcacataggtgaatggc

SEQ ID NO: 4898467 - DNA, 25 bp, Homo sapien
catgatttacaggtatgttcagaga

SEQ ID NO: 4898468 - DNA, 25 bp, Homo sapien
ggtgaatggcacttgaaacactctg

SEQ ID NO: 4898469 - DNA, 25 bp, Homo sapien
gaccatgatttacaggtatgttcag

SEQ ID NO: 4898470 - DNA, 25 bp, Homo sapien
agtttcaggagaaccactattttca

SEQ ID NO: 4898471 - DNA, 25 bp, Homo sapien
caggagaaccactattttcatggag

SEQ ID NO: 4898472 - DNA, 25 bp, Homo sapien
accactattttcatggagctgagag

SEQ ID NO: 4898473 - DNA, 25 bp, Homo sapien
gagaaccactattttcatggagctg

SEQ ID NO: 4898474 - DNA, 25 bp, Homo sapien
gttgaatatcacactactattttcc

SEQ ID NO: 4898475 - DNA, 25 bp, Homo sapien
tttcctatctttagactctgtcgct

SEQ ID NO: 4898476 - DNA, 25 bp, Homo sapien
agactctgtcgctttacaaaatgag

SEQ ID NO: 4898477 - DNA, 25 bp, Homo sapien
aaagttccatagaaatcatgactgc

SEQ ID NO: 4898478 - DNA, 25 bp, Homo sapien
tcataaaataacagtcttgagcttt

SEQ ID NO: 4898479 - DNA, 25 bp, Homo sapien
ttcataaaataacagtcttgagctt

SEQ ID NO: 4898480 - DNA, 25 bp, Homo sapien
cttcataaaataacagtcttgagct

SEQ ID NO: 4898481 - DNA, 25 bp, Homo sapien
ataaaataacagtcttgagcttttc

SEQ ID NO: 4898482 - DNA, 25 bp, Homo sapien
agcatggagtggtcttgtgatcaca

SEQ ID NO: 4898483 - DNA, 25 bp, Homo sapien
gagagtggatttattattgctgaag

SEQ ID NO: 4898484 - DNA, 25 bp, Homo sapien
gaaatggtgctatcccaactgtgat

SEQ ID NO: 4898485 - DNA, 25 bp, Homo sapien
gtggatttattattgctgaagagca

SEQ ID NO: 4898486 - DNA, 25 bp, Homo sapien
gactggttaaggcaggcttctgtca

SEQ ID NO: 4898487 - DNA, 25 bp, Homo sapien
cagaagggcatctagcgactggtta

SEQ ID NO: 4898488 - DNA, 25 bp, Homo sapien
tgctctggatccactgctgggctat

SEQ ID NO: 4898489 - DNA, 25 bp, Homo sapien
tgggctataccaggctgcagacgtt

SEQ ID NO: 4898490 - DNA, 25 bp, Homo sapien
tcatggagggagactaatatttacc

SEQ ID NO: 4898491 - DNA, 25 bp, Homo sapien
ccttaaggcactgttataaacaaga

SEQ ID NO: 4898492 - DNA, 25 bp, Homo sapien
ttagacaagtaacaaataatccatg

SEQ ID NO: 4898493 - DNA, 25 bp, Homo sapien
actgtctctggtgggtaaagggtat

SEQ ID NO: 4898494 - DNA, 25 bp, Homo sapien
tttatttagcttggttgttggtgac

SEQ ID NO: 4898495 - DNA, 25 bp, Homo sapien
ttagcttggttgttggtgacagtag

SEQ ID NO: 4898496 - DNA, 25 bp, Homo sapien
gacagtagggaaggctgaggttaaa

SEQ ID NO: 4898497 - DNA, 25 bp, Homo sapien
catcaggctgttgactttatttagc

SEQ ID NO: 4898498 - DNA, 25 bp, Homo sapien
ttcgctacgcagtttcagaaaaggg

SEQ ID NO: 4898499 - DNA, 25 bp, Homo sapien
tagagccatatctgatctggaaggc

SEQ ID NO: 4898500 - DNA, 25 bp, Homo sapien
taaccaaaaaagtgctcacaccgta

SEQ ID NO: 4898501 - DNA, 25 bp, Homo sapien
tctggaaggctgtactattaaatgc

SEQ ID NO: 4898502 - DNA, 25 bp, Homo sapien
cacttttccctattaatttccatat

SEQ ID NO: 4898503 - DNA, 25 bp, Homo sapien
tcacttttccctattaatttccata

SEQ ID NO: 4898504 - DNA, 25 bp, Homo sapien
cggctcagctctactgctgtcataa

SEQ ID NO: 4898505 - DNA, 25 bp, Homo sapien
aaacacatctgtgaacctagagaga

SEQ ID NO: 4898506 - DNA, 25 bp, Homo sapien
tgtaatcaaacgtcagttcagagag

SEQ ID NO: 4898507 - DNA, 25 bp, Homo sapien
gtattgatcctcatatcggctcagc

SEQ ID NO: 4898508 - DNA, 25 bp, Homo sapien
cctggtgccctttagtaatatataa

SEQ ID NO: 4898509 - DNA, 25 bp, Homo sapien
caatgtgataaccataaagcctttt

SEQ ID NO: 4898510 - DNA, 25 bp, Homo sapien
ctctgaagttaaaggttcttatata

SEQ ID NO: 4898511 - DNA, 25 bp, Homo sapien
agttaaaggttcttatatagacaga

SEQ ID NO: 4898512 - DNA, 25 bp, Homo sapien
tcaccacggcattatagaaaaagga

SEQ ID NO: 4898513 - DNA, 25 bp, Homo sapien
tggatttagcacattcaccacggca

SEQ ID NO: 4898514 - DNA, 25 bp, Homo sapien
ccagccgtcttgtgttgaaatcaca

SEQ ID NO: 4898515 - DNA, 25 bp, Homo sapien
cattatagaaaaaggaccagccgtc

SEQ ID NO: 4898516 - DNA, 25 bp, Homo sapien
gggacttgggtacatggagctcatc

SEQ ID NO: 4898517 - DNA, 25 bp, Homo sapien
agctcatcgtgggaccctgaatcat

SEQ ID NO: 4898518 - DNA, 25 bp, Homo sapien
tcctcggtcctaagtccttctccca

SEQ ID NO: 4898519 - DNA, 25 bp, Homo sapien
cttgggtacatggagctcatcgtgg

SEQ ID NO: 4898520 - DNA, 25 bp, Homo sapien
gaactgctggcagaactacccagat

SEQ ID NO: 4898521 - DNA, 25 bp, Homo sapien
gagacccatgtcaagaactacagaa

SEQ ID NO: 4898522 - DNA, 25 bp, Homo sapien
gcaacatagcagaatatatcgagac

SEQ ID NO: 4898523 - DNA, 25 bp, Homo sapien
ttccccaaccagagccagttcagga

SEQ ID NO: 4898524 - DNA, 25 bp, Homo sapien
tctgctttcattgacacgctcaacc

SEQ ID NO: 4898525 - DNA, 25 bp, Homo sapien
cctcaatcaactgtatctgctcttt

SEQ ID NO: 4898526 - DNA, 25 bp, Homo sapien
aactgtatctgctctttattcccac

SEQ ID NO: 4898527 - DNA, 25 bp, Homo sapien
tgacacgctcaacctcaatcaactg

SEQ ID NO: 4898528 - DNA, 25 bp, Homo sapien
ccatgtttggggtgtcttgaggctc

SEQ ID NO: 4898529 - DNA, 25 bp, Homo sapien
tcaggccttgcccatagccatgttt

SEQ ID NO: 4898530 - DNA, 25 bp, Homo sapien
ggtgtcttgaggctcgtatttactg

SEQ ID NO: 4898531 - DNA, 25 bp, Homo sapien
gaggctcgtatttactggctcttgt

SEQ ID NO: 4898532 - DNA, 25 bp, Homo sapien
cttcccacatgtagttctcttccat

SEQ ID NO: 4898533 - DNA, 25 bp, Homo sapien
ccttcccacatgtagttctcttcca

SEQ ID NO: 4898534 - DNA, 25 bp, Homo sapien
cccttcccacatgtagttctcttcc

SEQ ID NO: 4898535 - DNA, 25 bp, Homo sapien
gcacagaagatctggggctgccacc

SEQ ID NO: 4898536 - DNA, 25 bp, Homo sapien
ctgcacagaagatctggggctgcca

SEQ ID NO: 4898537 - DNA, 25 bp, Homo sapien
cacagaagatctggggctgccacca

SEQ ID NO: 4898538 - DNA, 25 bp, Homo sapien
acagaagatctggggctgccaccat

SEQ ID NO: 4898539 - DNA, 25 bp, Homo sapien
gacaaagaattgttggcatcatcag

SEQ ID NO: 4898540 - DNA, 25 bp, Homo sapien
aattgttggcatcatcagttccctg

SEQ ID NO: 4898541 - DNA, 25 bp, Homo sapien
cattccattccagggtggaccgagt

SEQ ID NO: 4898542 - DNA, 25 bp, Homo sapien
gttccctgaacaagcaacaagtggg

SEQ ID NO: 4898543 - DNA, 25 bp, Homo sapien
tttgtagttttggagttccagatgg

SEQ ID NO: 4898544 - DNA, 25 bp, Homo sapien
ttccagatggtgacaactcgagcag

SEQ ID NO: 4898545 - DNA, 25 bp, Homo sapien
ttttggagttccagatggtgacaac

SEQ ID NO: 4898546 - DNA, 25 bp, Homo sapien
caactcgagcagcaagcctgatgag

SEQ ID NO: 4898547 - DNA, 25 bp, Homo sapien
tcaaacacccacaagtgtaggaatt

SEQ ID NO: 4898548 - DNA, 25 bp, Homo sapien
gaattaccagcacgccgggtgaaaa

SEQ ID NO: 4898549 - DNA, 25 bp, Homo sapien
cacgccgggtgaaaatccaggtgct

SEQ ID NO: 4898550 - DNA, 25 bp, Homo sapien
cccacaagtgtaggaattaccagca

SEQ ID NO: 4898551 - DNA, 25 bp, Homo sapien
atggaagtcccgcttccgggaagag

SEQ ID NO: 4898552 - DNA, 25 bp, Homo sapien
gcttcttttatggaagtcccgcttc

SEQ ID NO: 4898553 - DNA, 25 bp, Homo sapien
caccacgcttcttttatggaagtcc

SEQ ID NO: 4898554 - DNA, 25 bp, Homo sapien
acccgcccaccacgcttcttttatg

SEQ ID NO: 4898555 - DNA, 25 bp, Homo sapien
ttccgggtgcctctcccgctgaccc

SEQ ID NO: 4898556 - DNA, 25 bp, Homo sapien
cgctgccggggtgcagacgccggga

SEQ ID NO: 4898557 - DNA, 25 bp, Homo sapien
ttgggcatttcctcgcgctgccggg

SEQ ID NO: 4898558 - DNA, 25 bp, Homo sapien
ctttgggcatttcctcgcgctgccg

SEQ ID NO: 4898559 - DNA, 25 bp, Homo sapien
tgcctcgcgcctcgccgttgccgcg

SEQ ID NO: 4898560 - DNA, 25 bp, Homo sapien
tgccccggctctgtggcgccggagt

SEQ ID NO: 4898561 - DNA, 25 bp, Homo sapien
agatagcggcttccgctcctcgcct

SEQ ID NO: 4898562 - DNA, 25 bp, Homo sapien
ggagtccgcctccagatagcggctt

SEQ ID NO: 4898563 - DNA, 25 bp, Homo sapien
agggagcagcggcagcaccacacgg

SEQ ID NO: 4898564 - DNA, 25 bp, Homo sapien
ggagcagcggcagcaccacacgggc

SEQ ID NO: 4898565 - DNA, 25 bp, Homo sapien
gccagggagcagcggcagcaccaca

SEQ ID NO: 4898566 - DNA, 25 bp, Homo sapien
agcagcggcagcaccacacgggcat

SEQ ID NO: 4898567 - DNA, 25 bp, Homo sapien
tccaaatttctgtgcacggcaggaa

SEQ ID NO: 4898568 - DNA, 25 bp, Homo sapien
caaaccgctgtctcagtagtcaaca

SEQ ID NO: 4898569 - DNA, 25 bp, Homo sapien
tgaatctgataccttcaaaccgctg

SEQ ID NO: 4898570 - DNA, 25 bp, Homo sapien
tactataggatgacgcttcttaacc

SEQ ID NO: 4898571 - DNA, 25 bp, Homo sapien
aaaaatctctccttcagtttcagtg

SEQ ID NO: 4898572 - DNA, 25 bp, Homo sapien
aatctctccttcagtttcagtgtca

SEQ ID NO: 4898573 - DNA, 25 bp, Homo sapien
taaggaattaaaaatctctccttca

SEQ ID NO: 4898574 - DNA, 25 bp, Homo sapien
taaaaatctctccttcagtttcagt

SEQ ID NO: 4898575 - DNA, 25 bp, Homo sapien
ttcgccccaagttgtcaccaaagta

SEQ ID NO: 4898576 - DNA, 25 bp, Homo sapien
gccccaagttgtcaccaaagtattg

SEQ ID NO: 4898577 - DNA, 25 bp, Homo sapien
cccaagttgtcaccaaagtattgca

SEQ ID NO: 4898578 - DNA, 25 bp, Homo sapien
tcgccccaagttgtcaccaaagtat

SEQ ID NO: 4898579 - DNA, 25 bp, Homo sapien
gtcactgacgaatcttccagtaaag

SEQ ID NO: 4898580 - DNA, 25 bp, Homo sapien
actgacgaatcttccagtaaagaag

SEQ ID NO: 4898581 - DNA, 25 bp, Homo sapien
ggaaaagtcactgacgaatcttcca

SEQ ID NO: 4898582 - DNA, 25 bp, Homo sapien
atcttccagtaaagaagtttcttca

SEQ ID NO: 4898583 - DNA, 25 bp, Homo sapien
agaaaggcatattcctgagggtcca

SEQ ID NO: 4898584 - DNA, 25 bp, Homo sapien
ataagaaaggcatattcctgagggt

SEQ ID NO: 4898585 - DNA, 25 bp, Homo sapien
catataagaaaggcatattcctgag

SEQ ID NO: 4898586 - DNA, 25 bp, Homo sapien
taagaaaggcatattcctgagggtc

SEQ ID NO: 4898587 - DNA, 25 bp, Homo sapien
tattgcttctgatgataaatacggt

SEQ ID NO: 4898588 - DNA, 25 bp, Homo sapien
tctgatgataaatacggtctgtagc

SEQ ID NO: 4898589 - DNA, 25 bp, Homo sapien
gatgtcttgcttcttctaatttact

SEQ ID NO: 4898590 - DNA, 25 bp, Homo sapien
caatggaaagatgtcttgcttcttc

SEQ ID NO: 4898591 - DNA, 25 bp, Homo sapien
gaagtgtatcgaaaagtactgcaac

SEQ ID NO: 4898592 - DNA, 25 bp, Homo sapien
caaggccctcagacaagtattctaa

SEQ ID NO: 4898593 - DNA, 25 bp, Homo sapien
aactggattggatgatcggccctca

SEQ ID NO: 4898594 - DNA, 25 bp, Homo sapien
taccaagaactacgtgagggatata

SEQ ID NO: 4898595 - DNA, 25 bp, Homo sapien
caaagctgattgtcaacatggagcc

SEQ ID NO: 4898596 - DNA, 25 bp, Homo sapien
tgattgtcaacatggagccttccat

SEQ ID NO: 4898597 - DNA, 25 bp, Homo sapien
gctgattgtcaacatggagccttcc

SEQ ID NO: 4898598 - DNA, 25 bp, Homo sapien
aacttccaaagctgattgtcaacat

SEQ ID NO: 4898599 - DNA, 25 bp, Homo sapien
tatttgaaagacgtacatttatatt

SEQ ID NO: 4898600 - DNA, 25 bp, Homo sapien
tgaaagacgtacatttatattcttc

SEQ ID NO: 4898601 - DNA, 25 bp, Homo sapien
tcttcagccatgacaaaatcacaaa

SEQ ID NO: 4898602 - DNA, 25 bp, Homo sapien
tttgaaagacgtacatttatattct

SEQ ID NO: 4898603 - DNA, 25 bp, Homo sapien
cactagaagtcataagtcggaactc

SEQ ID NO: 4898604 - DNA, 25 bp, Homo sapien
tgttcaggatcacaacactagaagt

SEQ ID NO: 4898605 - DNA, 25 bp, Homo sapien
gatgatgtaaatttgctctccctga

SEQ ID NO: 4898606 - DNA, 25 bp, Homo sapien
ttccaaggtgagatttcttccgtcc

SEQ ID NO: 4898607 - DNA, 25 bp, Homo sapien
gaagggaacatgagaaccatcagct

SEQ ID NO: 4898608 - DNA, 25 bp, Homo sapien
tacccttacatgtgattggctggct

SEQ ID NO: 4898609 - DNA, 25 bp, Homo sapien
tgacttatggcctaggtaacaccct

SEQ ID NO: 4898610 - DNA, 25 bp, Homo sapien
cacggtgctcgggaaagctggtata

SEQ ID NO: 4898611 - DNA, 25 bp, Homo sapien
tcctcctcctctttcaacaaacaaa

SEQ ID NO: 4898612 - DNA, 25 bp, Homo sapien
ctcctcctctttcaacaaacaaatg

SEQ ID NO: 4898613 - DNA, 25 bp, Homo sapien
ttaagctatcccatctcctcctcct

SEQ ID NO: 4898614 - DNA, 25 bp, Homo sapien
tttttcttctgtcttgtagctaaac

SEQ ID NO: 4898615 - DNA, 25 bp, Homo sapien
tgcaggaccttgcaccaccctttga

SEQ ID NO: 4898616 - DNA, 25 bp, Homo sapien
gcttaagttacaccaagttggcagt

SEQ ID NO: 4898617 - DNA, 25 bp, Homo sapien
gaaaattcaagccagtacactgcaa

SEQ ID NO: 4898618 - DNA, 25 bp, Homo sapien
ccctttgaacagcaaggtgacccat

SEQ ID NO: 4898619 - DNA, 25 bp, Homo sapien
caaccatgatatgagctgctatgtc

SEQ ID NO: 4898620 - DNA, 25 bp, Homo sapien
aagtaattcaatgttcacacaggga

SEQ ID NO: 4898621 - DNA, 25 bp, Homo sapien
taacgagttcaatgaagacattcca

SEQ ID NO: 4898622 - DNA, 25 bp, Homo sapien
caatttgccatggagaacttcagat

SEQ ID NO: 4898623 - DNA, 25 bp, Homo sapien
gaagcaattatttgatcgacgcaaa

SEQ ID NO: 4898624 - DNA, 25 bp, Homo sapien
actcatgcagaggtcaaaaacaggc

SEQ ID NO: 4898625 - DNA, 25 bp, Homo sapien
gcaagtgcagtcagagaatgttatt

SEQ ID NO: 4898626 - DNA, 25 bp, Homo sapien
gcaagagagtactgaagcaagtgca

SEQ ID NO: 4898627 - DNA, 25 bp, Homo sapien
gacagcttggattgaggaagaactc

SEQ ID NO: 4898628 - DNA, 25 bp, Homo sapien
gttatatactacacaggacagcttg

SEQ ID NO: 4898629 - DNA, 25 bp, Homo sapien
ccaagccaggcatcgagggataagg

SEQ ID NO: 4898630 - DNA, 25 bp, Homo sapien
gatgctcacatcatgctataactag

SEQ ID NO: 4898631 - DNA, 25 bp, Homo sapien
ggtatcatgtaccttcaatgtgaag

SEQ ID NO: 4898632 - DNA, 25 bp, Homo sapien
aacacattctcaacagtcaattgga

SEQ ID NO: 4898633 - DNA, 25 bp, Homo sapien
tgagctcagcttaagatcaccctgg

SEQ ID NO: 4898634 - DNA, 25 bp, Homo sapien
taaaagtatacttctgccacgcaca

SEQ ID NO: 4898635 - DNA, 25 bp, Homo sapien
taatcactgcgtcagttcctgaagt

SEQ ID NO: 4898636 - DNA, 25 bp, Homo sapien
gtaaatgttctgtactgccatctca

SEQ ID NO: 4898637 - DNA, 25 bp, Homo sapien
gcttttgctgcatggctactgctta

SEQ ID NO: 4898638 - DNA, 25 bp, Homo sapien
tctcagacctctgaaaaatgccagt

SEQ ID NO: 4898639 - DNA, 25 bp, Homo sapien
tggcacatggcatatcccatctagt

SEQ ID NO: 4898640 - DNA, 25 bp, Homo sapien
acccgggagttaagagtagcctgca

SEQ ID NO: 4898641 - DNA, 25 bp, Homo sapien
catgcagggattacattcagaagcc

SEQ ID NO: 4898642 - DNA, 25 bp, Homo sapien
taaagaacagaattccctcatgcct

SEQ ID NO: 4898643 - DNA, 25 bp, Homo sapien
taattgcacgtataactgaatccta

SEQ ID NO: 4898644 - DNA, 25 bp, Homo sapien
cacattaagcatttcaaaaagacct

SEQ ID NO: 4898645 - DNA, 25 bp, Homo sapien
gaatcctatttaagtaagctcagta

SEQ ID NO: 4898646 - DNA, 25 bp, Homo sapien
caggtaggtatatgtgatcacttga

SEQ ID NO: 4898647 - DNA, 25 bp, Homo sapien
gctggaaacgctgcctaggccgccg

SEQ ID NO: 4898648 - DNA, 25 bp, Homo sapien
aagttctcggggctggaaacgctgc

SEQ ID NO: 4898649 - DNA, 25 bp, Homo sapien
gaactcgggccggaaggcggcgcag

SEQ ID NO: 4898650 - DNA, 25 bp, Homo sapien
aggcggcgcaggcggttgggcgcag

SEQ ID NO: 4898651 - DNA, 25 bp, Homo sapien
gcagccgggaccccagagtaaagaa

SEQ ID NO: 4898652 - DNA, 25 bp, Homo sapien
ctccgaggagcgaggccacagggca

SEQ ID NO: 4898653 - DNA, 25 bp, Homo sapien
aggccacagggcagccgggacccca

SEQ ID NO: 4898654 - DNA, 25 bp, Homo sapien
agaaaaccctggccggtagcttcat

SEQ ID NO: 4898655 - DNA, 25 bp, Homo sapien
cccaggatgccttgtcctcgctccc

SEQ ID NO: 4898656 - DNA, 25 bp, Homo sapien
cctctctctttgagccccgggacac

SEQ ID NO: 4898657 - DNA, 25 bp, Homo sapien
tcctctctctttgcgccccaggatg

SEQ ID NO: 4898658 - DNA, 25 bp, Homo sapien
tcctctctctttgcgcgtcgagacg

SEQ ID NO: 4898659 - DNA, 25 bp, Homo sapien
ggaagccagtgtgagacggacctct

SEQ ID NO: 4898660 - DNA, 25 bp, Homo sapien
gctatttccactatgggtgcaatgg

SEQ ID NO: 4898661 - DNA, 25 bp, Homo sapien
caaaggacgtcaaaggtcagtgctc

SEQ ID NO: 4898662 - DNA, 25 bp, Homo sapien
tgaaaaacaacaccatggctgtcta

SEQ ID NO: 4898663 - DNA, 25 bp, Homo sapien
caaacttgaggctacatgtgctagg

SEQ ID NO: 4898664 - DNA, 25 bp, Homo sapien
tgtcagaagagcttggataaggtct

SEQ ID NO: 4898665 - DNA, 25 bp, Homo sapien
taacccagttttcacagggagagaa

SEQ ID NO: 4898666 - DNA, 25 bp, Homo sapien
gaaatgaggcctattagccagcagc

SEQ ID NO: 4898667 - DNA, 25 bp, Homo sapien
caaagtgctgttttgctccactaaa

SEQ ID NO: 4898668 - DNA, 25 bp, Homo sapien
gatttcaaggcctactcattggtta

SEQ ID NO: 4898669 - DNA, 25 bp, Homo sapien
actctatcgccaggttggactacag

SEQ ID NO: 4898670 - DNA, 25 bp, Homo sapien
taaattttgagtcccagggcatagc

SEQ ID NO: 4898671 - DNA, 25 bp, Homo sapien
ttggactctatgcttcttgacagca

SEQ ID NO: 4898672 - DNA, 25 bp, Homo sapien
tgccattggactctatgcttcttga

SEQ ID NO: 4898673 - DNA, 25 bp, Homo sapien
gccattggactctatgcttcttgac

SEQ ID NO: 4898674 - DNA, 25 bp, Homo sapien
ccattggactctatgcttcttgaca

SEQ ID NO: 4898675 - DNA, 25 bp, Homo sapien
gatcgttgggtatgaacagttctcc

SEQ ID NO: 4898676 - DNA, 25 bp, Homo sapien
ttcgggagatccagctgataggccc

SEQ ID NO: 4898677 - DNA, 25 bp, Homo sapien
gcaacacagactgaggtacaatctg

SEQ ID NO: 4898678 - DNA, 25 bp, Homo sapien
tgtaagtccgcctacttcgggagat

SEQ ID NO: 4898679 - DNA, 25 bp, Homo sapien
gcccagtcttgaacttgtccaggca

SEQ ID NO: 4898680 - DNA, 25 bp, Homo sapien
ttctgccacaagtgcaagcagcctt

SEQ ID NO: 4898681 - DNA, 25 bp, Homo sapien
gccttaggccgtcaccagatgcaga

SEQ ID NO: 4898682 - DNA, 25 bp, Homo sapien
cccagtcttgaacttgtccaggcat

SEQ ID NO: 4898683 - DNA, 25 bp, Homo sapien
ccatcatgaatgtcgtagtaccatc

SEQ ID NO: 4898684 - DNA, 25 bp, Homo sapien
ttcaggtagtacaactccaggcttc

SEQ ID NO: 4898685 - DNA, 25 bp, Homo sapien
agtcctgacatctccctactgtgag

SEQ ID NO: 4898686 - DNA, 25 bp, Homo sapien
ccccatgagcaggagatgcttcttc

SEQ ID NO: 4898687 - DNA, 25 bp, Homo sapien
tcttcacctgatacatcccatccgt

SEQ ID NO: 4898688 - DNA, 25 bp, Homo sapien
cctgatacatcccatccgtctataa

SEQ ID NO: 4898689 - DNA, 25 bp, Homo sapien
tcctcttcacctgatacatcccatc

SEQ ID NO: 4898690 - DNA, 25 bp, Homo sapien
gatacatcccatccgtctataagcc

SEQ ID NO: 4898691 - DNA, 25 bp, Homo sapien
caagaagtacgtagaggaaaacaga

SEQ ID NO: 4898692 - DNA, 25 bp, Homo sapien
taggcaagcacacaatacaagaagt

SEQ ID NO: 4898693 - DNA, 25 bp, Homo sapien
taacaggctccccttcatgtggttt

SEQ ID NO: 4898694 - DNA, 25 bp, Homo sapien
gataccaacaatgtgagacactatg

SEQ ID NO: 4898695 - DNA, 25 bp, Homo sapien
cagcagaattggccttcaaaaccag

SEQ ID NO: 4898696 - DNA, 25 bp, Homo sapien
aagccctcacaattccaaaaacttg

SEQ ID NO: 4898697 - DNA, 25 bp, Homo sapien
gacaacattgtcaatatctctgtca

SEQ ID NO: 4898698 - DNA, 25 bp, Homo sapien
tttctcattggcctgaaccacccac

SEQ ID NO: 4898699 - DNA, 25 bp, Homo sapien
ccttaagacccattgagatgatcag

SEQ ID NO: 4898700 - DNA, 25 bp, Homo sapien
gatcagatctcacaggatcacatca

SEQ ID NO: 4898701 - DNA, 25 bp, Homo sapien
tctcttgagatctttagtgacctaa

SEQ ID NO: 4898702 - DNA, 25 bp, Homo sapien
taacacctttcgtatcaagattgat

SEQ ID NO: 4898703 - DNA, 25 bp, Homo sapien
aatcttgttatgctccatgccagtc

SEQ ID NO: 4898704 - DNA, 25 bp, Homo sapien
gaatcaagaagttcactcaagtaga

SEQ ID NO: 4898705 - DNA, 25 bp, Homo sapien
tcatatccttttgccaaagcacagt

SEQ ID NO: 4898706 - DNA, 25 bp, Homo sapien
ttttctacataagtggcagttttcc

SEQ ID NO: 4898707 - DNA, 25 bp, Homo sapien
aagcttcagtgttttgatataatat

SEQ ID NO: 4898708 - DNA, 25 bp, Homo sapien
agcttcagtgttttgatataatatt

SEQ ID NO: 4898709 - DNA, 25 bp, Homo sapien
ccttgaaaactattaggtggtagca

SEQ ID NO: 4898710 - DNA, 25 bp, Homo sapien
gtacctcccccagtaatgaatgcca

SEQ ID NO: 4898711 - DNA, 25 bp, Homo sapien
ctaggctggacagaagagttgtcat

SEQ ID NO: 4898712 - DNA, 25 bp, Homo sapien
cattcctttaccaaggccagtacct

SEQ ID NO: 4898713 - DNA, 25 bp, Homo sapien
cggctggctatcacgcactgagcac

SEQ ID NO: 4898714 - DNA, 25 bp, Homo sapien
gcgtcgccaataggcttgatgtaag

SEQ ID NO: 4898715 - DNA, 25 bp, Homo sapien
gaacagtttcttcaaaagcgtcgcc

SEQ ID NO: 4898716 - DNA, 25 bp, Homo sapien
cctggctccatgtcgtactttttaa

SEQ ID NO: 4898717 - DNA, 25 bp, Homo sapien
taatcaaacaactctggcgaacagt

SEQ ID NO: 4898718 - DNA, 25 bp, Homo sapien
cagtttactttaacattatctactc

SEQ ID NO: 4898719 - DNA, 25 bp, Homo sapien
tatttccttgataagccaggtttac

SEQ ID NO: 4898720 - DNA, 25 bp, Homo sapien
tataatgttagtaggttttgtacta

SEQ ID NO: 4898721 - DNA, 25 bp, Homo sapien
gatactaacttattgaattagtcac

SEQ ID NO: 4898722 - DNA, 25 bp, Homo sapien
aaacaccttgtatgacttcatatta

SEQ ID NO: 4898723 - DNA, 25 bp, Homo sapien
caccttgtatgacttcatattatat

SEQ ID NO: 4898724 - DNA, 25 bp, Homo sapien
gtatgacttcatattatatttttca

SEQ ID NO: 4898725 - DNA, 25 bp, Homo sapien
taaacaccttgtatgacttcatatt

SEQ ID NO: 4898726 - DNA, 25 bp, Homo sapien
aagaaatttgttctgcggtagcttt

SEQ ID NO: 4898727 - DNA, 25 bp, Homo sapien
tcacatcacactgaattgcatgaac

SEQ ID NO: 4898728 - DNA, 25 bp, Homo sapien
ctttgatcagttctgacacagtgtt

SEQ ID NO: 4898729 - DNA, 25 bp, Homo sapien
tatcaggatccctcacatcacactg

SEQ ID NO: 4898730 - DNA, 25 bp, Homo sapien
taggatgtcctgcaactttgatcag

SEQ ID NO: 4898731 - DNA, 25 bp, Homo sapien
tatggttttccaagcattaggagaa

SEQ ID NO: 4898732 - DNA, 25 bp, Homo sapien
ttatggttttccaagcattaggaga

SEQ ID NO: 4898733 - DNA, 25 bp, Homo sapien
tatggttcaagcttccttgggttgc

SEQ ID NO: 4898734 - DNA, 25 bp, Homo sapien
ccaacacaagctccatatggttcaa

SEQ ID NO: 4898735 - DNA, 25 bp, Homo sapien
caaggctgctggtaagattattcac

SEQ ID NO: 4898736 - DNA, 25 bp, Homo sapien
tgttagctaggctatcggatgtcca

SEQ ID NO: 4898737 - DNA, 25 bp, Homo sapien
ttttgcaggtctccaaaatgtttca

SEQ ID NO: 4898738 - DNA, 25 bp, Homo sapien
ccttttgcaggtctccaaaatgttt

SEQ ID NO: 4898739 - DNA, 25 bp, Homo sapien
tccttttgcaggtctccaaaatgtt

SEQ ID NO: 4898740 - DNA, 25 bp, Homo sapien
cttccttttgcaggtctccaaaatg

SEQ ID NO: 4898741 - DNA, 25 bp, Homo sapien
tgcaaaaggatcaaaataagtttac

SEQ ID NO: 4898742 - DNA, 25 bp, Homo sapien
ctctcagcatgttccagagtagaaa

SEQ ID NO: 4898743 - DNA, 25 bp, Homo sapien
ctcagcacatcctgggaaacacggg

SEQ ID NO: 4898744 - DNA, 25 bp, Homo sapien
caggagtaccattttgaggatagga

SEQ ID NO: 4898745 - DNA, 25 bp, Homo sapien
tacagtggtcaatagtgtctaggac

SEQ ID NO: 4898746 - DNA, 25 bp, Homo sapien
agtgtctaggacacagcaggttctc

SEQ ID NO: 4898747 - DNA, 25 bp, Homo sapien
tacaaagtgatactgcatatacagt

SEQ ID NO: 4898748 - DNA, 25 bp, Homo sapien
taaattaactgaataaggccaggca

SEQ ID NO: 4898749 - DNA, 25 bp, Homo sapien
cacctgctttggcagaagcacttgg

SEQ ID NO: 4898750 - DNA, 25 bp, Homo sapien
ccagtctcagcatagatagtagtaa

SEQ ID NO: 4898751 - DNA, 25 bp, Homo sapien
gcagaagcacttggtactacaaaac

SEQ ID NO: 4898752 - DNA, 25 bp, Homo sapien
tggtactacaaaacctgaaccagtc

SEQ ID NO: 4898753 - DNA, 25 bp, Homo sapien
tattagttatgttcagcaacaggat

SEQ ID NO: 4898754 - DNA, 25 bp, Homo sapien
tcagcaacaggattgacaaggaagt

SEQ ID NO: 4898755 - DNA, 25 bp, Homo sapien
tgtattagttatgttcagcaacagg

SEQ ID NO: 4898756 - DNA, 25 bp, Homo sapien
acaggattgacaaggaagtacttac

SEQ ID NO: 4898757 - DNA, 25 bp, Homo sapien
cctgttaagaaaatctgcctagagg

SEQ ID NO: 4898758 - DNA, 25 bp, Homo sapien
tagaggaaaagccatcctctctgtg

SEQ ID NO: 4898759 - DNA, 25 bp, Homo sapien
gctcagaggtgtgccagatacattt

SEQ ID NO: 4898760 - DNA, 25 bp, Homo sapien
cctctcaagagaggtgagcctggtt

SEQ ID NO: 4898761 - DNA, 25 bp, Homo sapien
gacactgtatccttgcaatagataa

SEQ ID NO: 4898762 - DNA, 25 bp, Homo sapien
tacacaatccacagtacccataaag

SEQ ID NO: 4898763 - DNA, 25 bp, Homo sapien
ttacgcagccagcaaactatgaaaa

SEQ ID NO: 4898764 - DNA, 25 bp, Homo sapien
gaaaaagcaagctaattgctcagga

SEQ ID NO: 4898765 - DNA, 25 bp, Homo sapien
ctctatgtcatatggccaatttgtc

SEQ ID NO: 4898766 - DNA, 25 bp, Homo sapien
attacagataatgtaactaaggcac

SEQ ID NO: 4898767 - DNA, 25 bp, Homo sapien
tagatgcttactacatgccagagat

SEQ ID NO: 4898768 - DNA, 25 bp, Homo sapien
gccagagattacaaccccaacaggt

SEQ ID NO: 4898769 - DNA, 25 bp, Homo sapien
tttttataggccctggttgaatcac

SEQ ID NO: 4898770 - DNA, 25 bp, Homo sapien
ataggccctggttgaatcacattga

SEQ ID NO: 4898771 - DNA, 25 bp, Homo sapien
tttataggccctggttgaatcacat

SEQ ID NO: 4898772 - DNA, 25 bp, Homo sapien
attgaatcgcattccatatttaccc

SEQ ID NO: 4898773 - DNA, 25 bp, Homo sapien
ttgcgagttcttctacagtccccag

SEQ ID NO: 4898774 - DNA, 25 bp, Homo sapien
tttctcaaatgttccagttgggtcc

SEQ ID NO: 4898775 - DNA, 25 bp, Homo sapien
gttgggtccagacggctaaaggcac

SEQ ID NO: 4898776 - DNA, 25 bp, Homo sapien
cagggaattctgccaatcatttctt

SEQ ID NO: 4898777 - DNA, 25 bp, Homo sapien
attggttccacaacagacctccctg

SEQ ID NO: 4898778 - DNA, 25 bp, Homo sapien
gattggttccacaacagacctccct

SEQ ID NO: 4898779 - DNA, 25 bp, Homo sapien
tgccaccatgttaagttatgactct

SEQ ID NO: 4898780 - DNA, 25 bp, Homo sapien
tttatctctattgcctgccaccatg

SEQ ID NO: 4898781 - DNA, 25 bp, Homo sapien
gccattttcccatactaattggatg

SEQ ID NO: 4898782 - DNA, 25 bp, Homo sapien
tctttggcactttaaatcaagccca

SEQ ID NO: 4898783 - DNA, 25 bp, Homo sapien
tctcaggtcgttgaattcccctgaa

SEQ ID NO: 4898784 - DNA, 25 bp, Homo sapien
caggtcgttgaattcccctgaaata

SEQ ID NO: 4898785 - DNA, 25 bp, Homo sapien
ctttctcaggtcgttgaattcccct

SEQ ID NO: 4898786 - DNA, 25 bp, Homo sapien
ctgaaataagtacttcctctccacc

SEQ ID NO: 4898787 - DNA, 25 bp, Homo sapien
ttagtatcctagctgctgatattac

SEQ ID NO: 4898788 - DNA, 25 bp, Homo sapien
aagcttagtatcctagctgctgata

SEQ ID NO: 4898789 - DNA, 25 bp, Homo sapien
ttaaagcttagtatcctagctgctg

SEQ ID NO: 4898790 - DNA, 25 bp, Homo sapien
gcttagtatcctagctgctgatatt

SEQ ID NO: 4898791 - DNA, 25 bp, Homo sapien
tgtcttcctgatgagttcttctatg

SEQ ID NO: 4898792 - DNA, 25 bp, Homo sapien
gagttcttctatggtgtcccactgc

SEQ ID NO: 4898793 - DNA, 25 bp, Homo sapien
ctgatgagttcttctatggtgtccc

SEQ ID NO: 4898794 - DNA, 25 bp, Homo sapien
tcttctatggtgtcccactgctcct

SEQ ID NO: 4898795 - DNA, 25 bp, Homo sapien
ataatttgtttcatttctattccct

SEQ ID NO: 4898796 - DNA, 25 bp, Homo sapien
tctattcccttttctgtaaccaaga

SEQ ID NO: 4898797 - DNA, 25 bp, Homo sapien
agataatttgtttcatttctattcc

SEQ ID NO: 4898798 - DNA, 25 bp, Homo sapien
attcccttttctgtaaccaagatga

SEQ ID NO: 4898799 - DNA, 25 bp, Homo sapien
ttagacttgaaatagtcaaaagatg

SEQ ID NO: 4898800 - DNA, 25 bp, Homo sapien
tttattagacttgaaatagtcaaaa

SEQ ID NO: 4898801 - DNA, 25 bp, Homo sapien
agaatttattagacttgaaatagtc

SEQ ID NO: 4898802 - DNA, 25 bp, Homo sapien
tattagacttgaaatagtcaaaaga

SEQ ID NO: 4898803 - DNA, 25 bp, Homo sapien
tgaatatacaatggctatcactggc

SEQ ID NO: 4898804 - DNA, 25 bp, Homo sapien
caatggctatcactggcctggcaca

SEQ ID NO: 4898805 - DNA, 25 bp, Homo sapien
ggctatcactggcctggcacataat

SEQ ID NO: 4898806 - DNA, 25 bp, Homo sapien
atatacaatggctatcactggcctg

SEQ ID NO: 4898807 - DNA, 25 bp, Homo sapien
aatgcctggctacaaataggtccta

SEQ ID NO: 4898808 - DNA, 25 bp, Homo sapien
gggcaacggctatagcttattcagt

SEQ ID NO: 4898809 - DNA, 25 bp, Homo sapien
taggcatcacattctccaaactctg

SEQ ID NO: 4898810 - DNA, 25 bp, Homo sapien
gagttaatactgagttacccaaaga

SEQ ID NO: 4898811 - DNA, 25 bp, Homo sapien
agtctagtgaacatgttgtaactga

SEQ ID NO: 4898812 - DNA, 25 bp, Homo sapien
ctagtgaacatgttgtaactgactc

SEQ ID NO: 4898813 - DNA, 25 bp, Homo sapien
tcagtctagtgaacatgttgtaact

SEQ ID NO: 4898814 - DNA, 25 bp, Homo sapien
tctagtgaacatgttgtaactgact

SEQ ID NO: 4898815 - DNA, 25 bp, Homo sapien
gaaatgttgggccacttattccaaa

SEQ ID NO: 4898816 - DNA, 25 bp, Homo sapien
tgaggtaagatggaagctggtttcc

SEQ ID NO: 4898817 - DNA, 25 bp, Homo sapien
aatggagactaggtacctgtctgcg

SEQ ID NO: 4898818 - DNA, 25 bp, Homo sapien
ccatgggcttgtggcagatttattc

SEQ ID NO: 4898819 - DNA, 25 bp, Homo sapien
ttggaaatggagtgagtgataaacc

SEQ ID NO: 4898820 - DNA, 25 bp, Homo sapien
tcaacacaatagtgtgatagtgaat

SEQ ID NO: 4898821 - DNA, 25 bp, Homo sapien
tggctatactggtggaatcagtgga

SEQ ID NO: 4898822 - DNA, 25 bp, Homo sapien
tggtgtgtgaacacaatatcaacac

SEQ ID NO: 4898823 - DNA, 25 bp, Homo sapien
cgttctgggtcagcttgaatgtccc

SEQ ID NO: 4898824 - DNA, 25 bp, Homo sapien
gaaatttacagttactgcctaggag

SEQ ID NO: 4898825 - DNA, 25 bp, Homo sapien
ttagcgtgtaaatggaagcactgcc

SEQ ID NO: 4898826 - DNA, 25 bp, Homo sapien
tccctcaagaacaaacagaaacgag

SEQ ID NO: 4898827 - DNA, 25 bp, Homo sapien
tatttcatattgagatcagcattca

SEQ ID NO: 4898828 - DNA, 25 bp, Homo sapien
aatgtaaaattcatagcatcctgat

SEQ ID NO: 4898829 - DNA, 25 bp, Homo sapien
tttctagctataacaactctatttt

SEQ ID NO: 4898830 - DNA, 25 bp, Homo sapien
catttccaccaagggtatctgctgc

SEQ ID NO: 4898831 - DNA, 25 bp, Homo sapien
tgttgatgtagttggggagatgaga

SEQ ID NO: 4898832 - DNA, 25 bp, Homo sapien
tgatgtagttggggagatgagaaaa

SEQ ID NO: 4898833 - DNA, 25 bp, Homo sapien
atgttgatgtagttggggagatgag

SEQ ID NO: 4898834 - DNA, 25 bp, Homo sapien
gttgatgtagttggggagatgagaa

SEQ ID NO: 4898835 - DNA, 25 bp, Homo sapien
tgagatatctgacacctgggtgcct

SEQ ID NO: 4898836 - DNA, 25 bp, Homo sapien
taatcaacgtccaggcaagagagag

SEQ ID NO: 4898837 - DNA, 25 bp, Homo sapien
tcgggtcgccagaaagataactgtc

SEQ ID NO: 4898838 - DNA, 25 bp, Homo sapien
tcttggaaagtgaacgggaaagaca

SEQ ID NO: 4898839 - DNA, 25 bp, Homo sapien
atagtagtaacttcaatgtggaggg

SEQ ID NO: 4898840 - DNA, 25 bp, Homo sapien
tagtaacttcaatgtggagggtaac

SEQ ID NO: 4898841 - DNA, 25 bp, Homo sapien
tgtggagggtaaccctggcattctt

SEQ ID NO: 4898842 - DNA, 25 bp, Homo sapien
aacttcaatgtggagggtaaccctg

SEQ ID NO: 4898843 - DNA, 25 bp, Homo sapien
ttgacatctgcctggagtcccatca

SEQ ID NO: 4898844 - DNA, 25 bp, Homo sapien
cttgagaagcagagaaagggaaata

SEQ ID NO: 4898845 - DNA, 25 bp, Homo sapien
agggaaatagcacattcattgacat

SEQ ID NO: 4898846 - DNA, 25 bp, Homo sapien
gcagagaaagggaaatagcacattc

SEQ ID NO: 4898847 - DNA, 25 bp, Homo sapien
agcagggcacaaggtggccggcatt

SEQ ID NO: 4898848 - DNA, 25 bp, Homo sapien
gccggcattggactcctgcttggaa

SEQ ID NO: 4898849 - DNA, 25 bp, Homo sapien
tcagaagcagcgatgggctccctgg

SEQ ID NO: 4898850 - DNA, 25 bp, Homo sapien
ggactcctgcttggaaattctcaga

SEQ ID NO: 4898851 - DNA, 25 bp, Homo sapien
gaagagttctaaaagataggtctca

SEQ ID NO: 4898852 - DNA, 25 bp, Homo sapien
cactgggcagcaacatacagtagaa

SEQ ID NO: 4898853 - DNA, 25 bp, Homo sapien
ggctgctccactacaagcctagtga

SEQ ID NO: 4898854 - DNA, 25 bp, Homo sapien
caaagacatatagcagcgtgcagag

SEQ ID NO: 4898855 - DNA, 25 bp, Homo sapien
ggtctatgaagcgaaagacttttat

SEQ ID NO: 4898856 - DNA, 25 bp, Homo sapien
gatttgatctgcaaatgcagttggt

SEQ ID NO: 4898857 - DNA, 25 bp, Homo sapien
aatgcagttggtctatgaagcgaaa

SEQ ID NO: 4898858 - DNA, 25 bp, Homo sapien
acagccaggatttgatctgcaaatg

SEQ ID NO: 4898859 - DNA, 25 bp, Homo sapien
gttttggcagaatagaggactgtcc

SEQ ID NO: 4898860 - DNA, 25 bp, Homo sapien
ccaatggagcactggattcactaca

SEQ ID NO: 4898861 - DNA, 25 bp, Homo sapien
tctatgcgacagtagggatctgcgc

SEQ ID NO: 4898862 - DNA, 25 bp, Homo sapien
gatctgcgcatgtagttaaaatcgc

SEQ ID NO: 4898863 - DNA, 25 bp, Homo sapien
ctgggagggagaagagtgtctgagt

SEQ ID NO: 4898864 - DNA, 25 bp, Homo sapien
gagggagaagagtgtctgagtaggg

SEQ ID NO: 4898865 - DNA, 25 bp, Homo sapien
tgggagggagaagagtgtctgagta

SEQ ID NO: 4898866 - DNA, 25 bp, Homo sapien
agtgtctgagtagggggtttaggtg

SEQ ID NO: 4898867 - DNA, 25 bp, Homo sapien
ccttgtcctagcttcactgacccca

SEQ ID NO: 4898868 - DNA, 25 bp, Homo sapien
gaagttattgctaatggcccttgtc

SEQ ID NO: 4898869 - DNA, 25 bp, Homo sapien
agttattgctaatggcccttgtcct

SEQ ID NO: 4898870 - DNA, 25 bp, Homo sapien
tattgctaatggcccttgtcctagc

SEQ ID NO: 4898871 - DNA, 25 bp, Homo sapien
ccactgctaaactatgtaggaactc

SEQ ID NO: 4898872 - DNA, 25 bp, Homo sapien
ggctcccactgctaaactatgtagg

SEQ ID NO: 4898873 - DNA, 25 bp, Homo sapien
tcccactgctaaactatgtaggaac

SEQ ID NO: 4898874 - DNA, 25 bp, Homo sapien
acaggctcccactgctaaactatgt

SEQ ID NO: 4898875 - DNA, 25 bp, Homo sapien
agaatctcaggattgaacttcttgt

SEQ ID NO: 4898876 - DNA, 25 bp, Homo sapien
gaatctcaggattgaacttcttgtt

SEQ ID NO: 4898877 - DNA, 25 bp, Homo sapien
tctcaggattgaacttcttgtttat

SEQ ID NO: 4898878 - DNA, 25 bp, Homo sapien
aatctcaggattgaacttcttgttt

SEQ ID NO: 4898879 - DNA, 25 bp, Homo sapien
tgccacaaattgcttgcaaatgcca

SEQ ID NO: 4898880 - DNA, 25 bp, Homo sapien
ctgccacaaattgcttgcaaatgcc

SEQ ID NO: 4898881 - DNA, 25 bp, Homo sapien
gccacaaattgcttgcaaatgccat

SEQ ID NO: 4898882 - DNA, 25 bp, Homo sapien
agaagaattaacatccatagggagc

SEQ ID NO: 4898883 - DNA, 25 bp, Homo sapien
gtcatagccacactgtttcccaggg

SEQ ID NO: 4898884 - DNA, 25 bp, Homo sapien
gaatgactggaactggtgagcagct

SEQ ID NO: 4898885 - DNA, 25 bp, Homo sapien
aagaactgagagacccagttgctca

SEQ ID NO: 4898886 - DNA, 25 bp, Homo sapien
gctggctttcacctgcgactctttg

SEQ ID NO: 4898887 - DNA, 25 bp, Homo sapien
aacctctaactgctggctttcacct

SEQ ID NO: 4898888 - DNA, 25 bp, Homo sapien
ttcacctgcgactctttgcctgagg

SEQ ID NO: 4898889 - DNA, 25 bp, Homo sapien
gtggccagagctaatggggcccaca

SEQ ID NO: 4898890 - DNA, 25 bp, Homo sapien
tagctcctggctgtaaaagatttct

SEQ ID NO: 4898891 - DNA, 25 bp, Homo sapien
catggtgtacaggtagactagctcc

SEQ ID NO: 4898892 - DNA, 25 bp, Homo sapien
ttgaactcatgctctcgtctaagat

SEQ ID NO: 4898893 - DNA, 25 bp, Homo sapien
aaataagtgcattgccttgtcatga

SEQ ID NO: 4898894 - DNA, 25 bp, Homo sapien
ttgggggtggccactgccagatgca

SEQ ID NO: 4898895 - DNA, 25 bp, Homo sapien
tatgtttatttgggggtggccactg

SEQ ID NO: 4898896 - DNA, 25 bp, Homo sapien
ctgccagatgcagaatggtctttct

SEQ ID NO: 4898897 - DNA, 25 bp, Homo sapien
cactgccagatgcagaatggtcttt

SEQ ID NO: 4898898 - DNA, 25 bp, Homo sapien
gttgtcctgccagctgcatgaggtg

SEQ ID NO: 4898899 - DNA, 25 bp, Homo sapien
agtaaattggatgagttgtcctgcc

SEQ ID NO: 4898900 - DNA, 25 bp, Homo sapien
tatatctgtggagtaaattggatga

SEQ ID NO: 4898901 - DNA, 25 bp, Homo sapien
tggtgctaagtgtaattttaccctg

SEQ ID NO: 4898902 - DNA, 25 bp, Homo sapien
aatatttcacagcaagaggcaatgg

SEQ ID NO: 4898903 - DNA, 25 bp, Homo sapien
aggcaatggctctccaactgaagat

SEQ ID NO: 4898904 - DNA, 25 bp, Homo sapien
gcaatggctctccaactgaagatgc

SEQ ID NO: 4898905 - DNA, 25 bp, Homo sapien
tttcacagcaagaggcaatggctct

SEQ ID NO: 4898906 - DNA, 25 bp, Homo sapien
aattccttcccagttcagtcttggg

SEQ ID NO: 4898907 - DNA, 25 bp, Homo sapien
tgtcctacctaataaataaatcctg

SEQ ID NO: 4898908 - DNA, 25 bp, Homo sapien
ttgagggattcaattccttcccagt

SEQ ID NO: 4898909 - DNA, 25 bp, Homo sapien
taaatcctggcctaatacaaagtcc

SEQ ID NO: 4898910 - DNA, 25 bp, Homo sapien
ttttgactctcttccgcatccagca

SEQ ID NO: 4898911 - DNA, 25 bp, Homo sapien
tctggaatacacctatgccccaggt

SEQ ID NO: 4898912 - DNA, 25 bp, Homo sapien
gacaataattctgaacgctgttaaa

SEQ ID NO: 4898913 - DNA, 25 bp, Homo sapien
tgaacgctgttaaaggacacttagc

SEQ ID NO: 4898914 - DNA, 25 bp, Homo sapien
tatttctgttttaagagggctccca

SEQ ID NO: 4898915 - DNA, 25 bp, Homo sapien
ttcatcagcttggtcacatctgcag

SEQ ID NO: 4898916 - DNA, 25 bp, Homo sapien
cagcttggtcacatctgcagagagt

SEQ ID NO: 4898917 - DNA, 25 bp, Homo sapien
tctgttttaagagggctcccaagta

SEQ ID NO: 4898918 - DNA, 25 bp, Homo sapien
cttccttgaaggcatcctcattcat

SEQ ID NO: 4898919 - DNA, 25 bp, Homo sapien
tgcttcaagaaacatatcaagcaca

SEQ ID NO: 4898920 - DNA, 25 bp, Homo sapien
cttgaagagacacgaaaaaagacac

SEQ ID NO: 4898921 - DNA, 25 bp, Homo sapien
ccagttaggcgtgtcaatgtgaaag

SEQ ID NO: 4898922 - DNA, 25 bp, Homo sapien
tattcctccgcaggtatgacattcc

SEQ ID NO: 4898923 - DNA, 25 bp, Homo sapien
tgggcagacccctcaaattgtcaca

SEQ ID NO: 4898924 - DNA, 25 bp, Homo sapien
tatttgtctcaggagacctgggcag

SEQ ID NO: 4898925 - DNA, 25 bp, Homo sapien
tgtgaagaggtttatcatgcttgga

SEQ ID NO: 4898926 - DNA, 25 bp, Homo sapien
tttatcatgcttggatatctaccac

SEQ ID NO: 4898927 - DNA, 25 bp, Homo sapien
cacttgtgaagaggtttatcatgct

SEQ ID NO: 4898928 - DNA, 25 bp, Homo sapien
gaggtttatcatgcttggatatcta

SEQ ID NO: 4898929 - DNA, 25 bp, Homo sapien
tctgggtaagagagtttttgaatct

SEQ ID NO: 4898930 - DNA, 25 bp, Homo sapien
ctctgggtaagagagtttttgaatc

SEQ ID NO: 4898931 - DNA, 25 bp, Homo sapien
ctgggtaagagagtttttgaatctt

SEQ ID NO: 4898932 - DNA, 25 bp, Homo sapien
tgctgtaacgcctcttagttttccc

SEQ ID NO: 4898933 - DNA, 25 bp, Homo sapien
tctttgctgtaacgcctcttagttt

SEQ ID NO: 4898934 - DNA, 25 bp, Homo sapien
tttgctgtaacgcctcttagttttc

SEQ ID NO: 4898935 - DNA, 25 bp, Homo sapien
catctttgctgtaacgcctcttagt

SEQ ID NO: 4898936 - DNA, 25 bp, Homo sapien
agagtctttcctgtggtcttgctgc

SEQ ID NO: 4898937 - DNA, 25 bp, Homo sapien
catgtgcagagtctttcctgtggtc

SEQ ID NO: 4898938 - DNA, 25 bp, Homo sapien
tctttcctgtggtcttgctgctcac

SEQ ID NO: 4898939 - DNA, 25 bp, Homo sapien
cttgcatgtgcagagtctttcctgt

SEQ ID NO: 4898940 - DNA, 25 bp, Homo sapien
tgtccactggaatacgcaacgatgt

SEQ ID NO: 4898941 - DNA, 25 bp, Homo sapien
gaaattcttgggagaactagcgctg

SEQ ID NO: 4898942 - DNA, 25 bp, Homo sapien
tgttctctggcgtctttgtctggaa

SEQ ID NO: 4898943 - DNA, 25 bp, Homo sapien
tgtctggaagagaattggtactacc

SEQ ID NO: 4898944 - DNA, 25 bp, Homo sapien
cagaaactgaactgcccagatgtgg

SEQ ID NO: 4898945 - DNA, 25 bp, Homo sapien
acaagatctattggccctgtgaggc

SEQ ID NO: 4898946 - DNA, 25 bp, Homo sapien
actttttacaagatctattggccct

SEQ ID NO: 4898947 - DNA, 25 bp, Homo sapien
gcagaaactgaactgcccagatgtg

SEQ ID NO: 4898948 - DNA, 25 bp, Homo sapien
ggatgaagccaatgatataagtatg

SEQ ID NO: 4898949 - DNA, 25 bp, Homo sapien
gaagccaatgatataagtatgtgca

SEQ ID NO: 4898950 - DNA, 25 bp, Homo sapien
tgaagccaatgatataagtatgtgc

SEQ ID NO: 4898951 - DNA, 25 bp, Homo sapien
gccaatgatataagtatgtgcaaga

SEQ ID NO: 4898952 - DNA, 25 bp, Homo sapien
gggagctaggatgtcggtgaagttt

SEQ ID NO: 4898953 - DNA, 25 bp, Homo sapien
taggatgtcggtgaagtttcccttg

SEQ ID NO: 4898954 - DNA, 25 bp, Homo sapien
gctaggatgtcggtgaagtttccct

SEQ ID NO: 4898955 - DNA, 25 bp, Homo sapien
gatgtcggtgaagtttcccttgtag

SEQ ID NO: 4898956 - DNA, 25 bp, Homo sapien
aaaaggatataccaagagctcccac

SEQ ID NO: 4898957 - DNA, 25 bp, Homo sapien
taaaaggatataccaagagctccca

SEQ ID NO: 4898958 - DNA, 25 bp, Homo sapien
ctaaaaggatataccaagagctccc

SEQ ID NO: 4898959 - DNA, 25 bp, Homo sapien
aaaggatataccaagagctcccact

SEQ ID NO: 4898960 - DNA, 25 bp, Homo sapien
tgttggtgcttttgcacaggaccta

SEQ ID NO: 4898961 - DNA, 25 bp, Homo sapien
gcacgttgttgtctagcagttaaca

SEQ ID NO: 4898962 - DNA, 25 bp, Homo sapien
caggacctaaatctcccttctgagg

SEQ ID NO: 4898963 - DNA, 25 bp, Homo sapien
ccttctgaggattgtacactgtaac

SEQ ID NO: 4898964 - DNA, 25 bp, Homo sapien
aaaccaactttccatatagaatagg

SEQ ID NO: 4898965 - DNA, 25 bp, Homo sapien
cataagttatatccaggcagagtcc

SEQ ID NO: 4898966 - DNA, 25 bp, Homo sapien
gaataggccataagttatatccagg

SEQ ID NO: 4898967 - DNA, 25 bp, Homo sapien
taggagggccatttgctgatatctg

SEQ ID NO: 4898968 - DNA, 25 bp, Homo sapien
tgagtccttcccgagtacacttgac

SEQ ID NO: 4898969 - DNA, 25 bp, Homo sapien
cataaagctgcatagttaggaaggt

SEQ ID NO: 4898970 - DNA, 25 bp, Homo sapien
gagctactgcaagtgaaagcaccca

SEQ ID NO: 4898971 - DNA, 25 bp, Homo sapien
acttctgcgtgtcggagagctactg

SEQ ID NO: 4898972 - DNA, 25 bp, Homo sapien
cagaggtgggccaaatagttttggc

SEQ ID NO: 4898973 - DNA, 25 bp, Homo sapien
gaaagtctgtattggtgcaggcact

SEQ ID NO: 4898974 - DNA, 25 bp, Homo sapien
caaataagtaatgtcatgtgcctaa

SEQ ID NO: 4898975 - DNA, 25 bp, Homo sapien
tgtggccgcaagaggctcctgatct

SEQ ID NO: 4898976 - DNA, 25 bp, Homo sapien
ggtgagaagattgtttgacctcagg

SEQ ID NO: 4898977 - DNA, 25 bp, Homo sapien
taacaagactgcgtctccacaaaag

SEQ ID NO: 4898978 - DNA, 25 bp, Homo sapien
gaagtcaaaccagcaaagctatata

SEQ ID NO: 4898979 - DNA, 25 bp, Homo sapien
caagataacaagactgcgtctccac

SEQ ID NO: 4898980 - DNA, 25 bp, Homo sapien
tgacagctcatttggactacctgag

SEQ ID NO: 4898981 - DNA, 25 bp, Homo sapien
cgataatttgtctgcaatgttggct

SEQ ID NO: 4898982 - DNA, 25 bp, Homo sapien
gactacctgagcctaccgataattt

SEQ ID NO: 4898983 - DNA, 25 bp, Homo sapien
ttctgacagctcatttggactacct

SEQ ID NO: 4898984 - DNA, 25 bp, Homo sapien
tccattcactgcaacctatgcatcc

SEQ ID NO: 4898985 - DNA, 25 bp, Homo sapien
aacctatgcatccctggttcaagca

SEQ ID NO: 4898986 - DNA, 25 bp, Homo sapien
ctcctaggctgtaatgcagtggtgc

SEQ ID NO: 4898987 - DNA, 25 bp, Homo sapien
atctccattcactgcaacctatgca

SEQ ID NO: 4898988 - DNA, 25 bp, Homo sapien
tgaccttctatcctgatcacgtgga

SEQ ID NO: 4898989 - DNA, 25 bp, Homo sapien
caacgcacctgactcgctatgggag

SEQ ID NO: 4898990 - DNA, 25 bp, Homo sapien
gacccaggtttcagctcatggtggc

SEQ ID NO: 4898991 - DNA, 25 bp, Homo sapien
gcaacttccctatcagcacttatgg

SEQ ID NO: 4898992 - DNA, 25 bp, Homo sapien
ggtactcatttaatcgtatatggat

SEQ ID NO: 4898993 - DNA, 25 bp, Homo sapien
gtaacaaaatgaggtgatcgatatg

SEQ ID NO: 4898994 - DNA, 25 bp, Homo sapien
atacacacaccacatacggtaacaa

SEQ ID NO: 4898995 - DNA, 25 bp, Homo sapien
gggaataattgttcccattctgcag

SEQ ID NO: 4898996 - DNA, 25 bp, Homo sapien
gtgttctgtggaaccctggaactcc

SEQ ID NO: 4898997 - DNA, 25 bp, Homo sapien
agtattttctgagcctccttcaatg

SEQ ID NO: 4898998 - DNA, 25 bp, Homo sapien
ttttctgagcctccttcaatgtctc

SEQ ID NO: 4898999 - DNA, 25 bp, Homo sapien
tctgagcctccttcaatgtctccat

SEQ ID NO: 4899000 - DNA, 25 bp, Homo sapien
tattttctgagcctccttcaatgtc

SEQ ID NO: 4899001 - DNA, 25 bp, Homo sapien
gcttccacattcagacaagatcagg

SEQ ID NO: 4899002 - DNA, 25 bp, Homo sapien
ccctgcttagcttccacattcagac

SEQ ID NO: 4899003 - DNA, 25 bp, Homo sapien
aagatcaggcctgttcagggtgttc

SEQ ID NO: 4899004 - DNA, 25 bp, Homo sapien
caagatcaggcctgttcagggtgtt

SEQ ID NO: 4899005 - DNA, 25 bp, Homo sapien
tccggagtaggaatgggtgcaatgt

SEQ ID NO: 4899006 - DNA, 25 bp, Homo sapien
gtaggaatgggtgcaatgtatacat

SEQ ID NO: 4899007 - DNA, 25 bp, Homo sapien
tttcaccgtaatgatccggagtagg

SEQ ID NO: 4899008 - DNA, 25 bp, Homo sapien
ttcaccgtaatgatccggagtagga

SEQ ID NO: 4899009 - DNA, 25 bp, Homo sapien
tgcttctcttttctgctgaaattca

SEQ ID NO: 4899010 - DNA, 25 bp, Homo sapien
gcttctcttttctgctgaaattcat

SEQ ID NO: 4899011 - DNA, 25 bp, Homo sapien
ctgcttctcttttctgctgaaattc

SEQ ID NO: 4899012 - DNA, 25 bp, Homo sapien
ttttaggttttcatggagaggaagc

SEQ ID NO: 4899013 - DNA, 25 bp, Homo sapien
atagcagcttttaggttttcatgga

SEQ ID NO: 4899014 - DNA, 25 bp, Homo sapien
gaagcctgatgactgctgggtcagt

SEQ ID NO: 4899015 - DNA, 25 bp, Homo sapien
cctcttcaaattctgctcaatagca

SEQ ID NO: 4899016 - DNA, 25 bp, Homo sapien
ttttgagaaactcttattggctgct

SEQ ID NO: 4899017 - DNA, 25 bp, Homo sapien
ctctcttggattaggtgtactcctc

SEQ ID NO: 4899018 - DNA, 25 bp, Homo sapien
aaactcttattggctgctggacagt

SEQ ID NO: 4899019 - DNA, 25 bp, Homo sapien
aggtgtactcctctggtgcaatcag

SEQ ID NO: 4899020 - DNA, 25 bp, Homo sapien
gtggcagcaggatgcctcttaaatc

SEQ ID NO: 4899021 - DNA, 25 bp, Homo sapien
tgtccttaaagcaccaagcactgtg

SEQ ID NO: 4899022 - DNA, 25 bp, Homo sapien
caatatatcccttgtcctcactgtg

SEQ ID NO: 4899023 - DNA, 25 bp, Homo sapien
cagccgtaagggacatatcactcag

SEQ ID NO: 4899024 - DNA, 25 bp, Homo sapien
tttttgcagatgggcctgtctggac

SEQ ID NO: 4899025 - DNA, 25 bp, Homo sapien
gcagatgggcctgtctggactcaat

SEQ ID NO: 4899026 - DNA, 25 bp, Homo sapien
ttgcagatgggcctgtctggactca

SEQ ID NO: 4899027 - DNA, 25 bp, Homo sapien
agatgggcctgtctggactcaattc

SEQ ID NO: 4899028 - DNA, 25 bp, Homo sapien
ttagacaatgtcagcaggactctct

SEQ ID NO: 4899029 - DNA, 25 bp, Homo sapien
ggcttcttttcaagcaagctctctc

SEQ ID NO: 4899030 - DNA, 25 bp, Homo sapien
cagctctggtgatctaggtactggc

SEQ ID NO: 4899031 - DNA, 25 bp, Homo sapien
ctctggtgatctaggtactggcttc

SEQ ID NO: 4899032 - DNA, 25 bp, Homo sapien
tgaaaagccattagaagggagagga

SEQ ID NO: 4899033 - DNA, 25 bp, Homo sapien
tagattggtcgatttctgttgtaat

SEQ ID NO: 4899034 - DNA, 25 bp, Homo sapien
ataacactatctgatttttagattg

SEQ ID NO: 4899035 - DNA, 25 bp, Homo sapien
gtcattgctttaatctgaaaagcca

SEQ ID NO: 4899036 - DNA, 25 bp, Homo sapien
ccagctacacatgcttttaggtggc

SEQ ID NO: 4899037 - DNA, 25 bp, Homo sapien
cccttgttgtaactaagtggtgcag

SEQ ID NO: 4899038 - DNA, 25 bp, Homo sapien
tcccttgatgcactttgtaaccagc

SEQ ID NO: 4899039 - DNA, 25 bp, Homo sapien
ggtggcttttccctgatagggtcaa

SEQ ID NO: 4899040 - DNA, 25 bp, Homo sapien
ggtctacaggacataattggcatct

SEQ ID NO: 4899041 - DNA, 25 bp, Homo sapien
tgtccatacctagaagaccagtgca

SEQ ID NO: 4899042 - DNA, 25 bp, Homo sapien
caaatactttgagagcacctgggtc

SEQ ID NO: 4899043 - DNA, 25 bp, Homo sapien
tttcattacggtgaaagctttgccc

SEQ ID NO: 4899044 - DNA, 25 bp, Homo sapien
cctcccgggcctcgccgagctgccg

SEQ ID NO: 4899045 - DNA, 25 bp, Homo sapien
gaggcatgcggagcccgggcgggat

SEQ ID NO: 4899046 - DNA, 25 bp, Homo sapien
gcagggagtcgatgccgggcgaacc

SEQ ID NO: 4899047 - DNA, 25 bp, Homo sapien
agctgcctaacgggcgccgcggcgg

SEQ ID NO: 4899048 - DNA, 25 bp, Homo sapien
caagtctgagacaagaatagggtca

SEQ ID NO: 4899049 - DNA, 25 bp, Homo sapien
cacagctgcccgctctgataagagg

SEQ ID NO: 4899050 - DNA, 25 bp, Homo sapien
ggtcaaggaccatagccaaaccctc

SEQ ID NO: 4899051 - DNA, 25 bp, Homo sapien
tactgcggaaacgaccaggagggaa

SEQ ID NO: 4899052 - DNA, 25 bp, Homo sapien
caagccatatgaaacccacagggag

SEQ ID NO: 4899053 - DNA, 25 bp, Homo sapien
aaatgcccctagaccaatgcctggc

SEQ ID NO: 4899054 - DNA, 25 bp, Homo sapien
gccctctgagaaagcgaactcttaa

SEQ ID NO: 4899055 - DNA, 25 bp, Homo sapien
cgataaaggacctctggagtcagaa

SEQ ID NO: 4899056 - DNA, 25 bp, Homo sapien
taccaaggctgatcgtgcatatgct

SEQ ID NO: 4899057 - DNA, 25 bp, Homo sapien
tctcaggcacattatccaggatgac

SEQ ID NO: 4899058 - DNA, 25 bp, Homo sapien
gatgtgactgggactctgttccgca

SEQ ID NO: 4899059 - DNA, 25 bp, Homo sapien
caaaggagtctaacaagcacattgg

SEQ ID NO: 4899060 - DNA, 25 bp, Homo sapien
caagccagcgaagggtagacactga

SEQ ID NO: 4899061 - DNA, 25 bp, Homo sapien
gccaagggcagagtgttcaaacaag

SEQ ID NO: 4899062 - DNA, 25 bp, Homo sapien
tataattgacacctgaagagctgag

SEQ ID NO: 4899063 - DNA, 25 bp, Homo sapien
tgcattgctgtaccagaggtcccat

SEQ ID NO: 4899064 - DNA, 25 bp, Homo sapien
caaagtaccacatctaagtcagaag

SEQ ID NO: 4899065 - DNA, 25 bp, Homo sapien
tagtggcaagtgtataacagggagc

SEQ ID NO: 4899066 - DNA, 25 bp, Homo sapien
tctcttcgatctcattttcagtcct

SEQ ID NO: 4899067 - DNA, 25 bp, Homo sapien
gaattcgttaatagtatcttcccat

SEQ ID NO: 4899068 - DNA, 25 bp, Homo sapien
aacacatttaatgttatgggtgcac

SEQ ID NO: 4899069 - DNA, 25 bp, Homo sapien
caggtagcttcaacaaccacatatc

SEQ ID NO: 4899070 - DNA, 25 bp, Homo sapien
tgttatgggtgcacttaaaattaac

SEQ ID NO: 4899071 - DNA, 25 bp, Homo sapien
taactgaagctaatattgtacagta

SEQ ID NO: 4899072 - DNA, 25 bp, Homo sapien
ctcctcagggcggtgcgtacttggt

SEQ ID NO: 4899073 - DNA, 25 bp, Homo sapien
ttctttgggtcaaatatgtagtgag

SEQ ID NO: 4899074 - DNA, 25 bp, Homo sapien
agagactcctcagggcggtgcgtac

SEQ ID NO: 4899075 - DNA, 25 bp, Homo sapien
aaatatgtagtgaggagcagtgtga

SEQ ID NO: 4899076 - DNA, 25 bp, Homo sapien
taagaacatcgtataattcaagaag

SEQ ID NO: 4899077 - DNA, 25 bp, Homo sapien
gccccgcaagagataagaacatcgt

SEQ ID NO: 4899078 - DNA, 25 bp, Homo sapien
ttatttcaacagccccgcaagagat

SEQ ID NO: 4899079 - DNA, 25 bp, Homo sapien
gaacatcgtataattcaagaagagt

SEQ ID NO: 4899080 - DNA, 25 bp, Homo sapien
gataaccaccatgtggcattctaaa

SEQ ID NO: 4899081 - DNA, 25 bp, Homo sapien
tctgtctaatgaattgataaccacc

SEQ ID NO: 4899082 - DNA, 25 bp, Homo sapien
catagtagatacctaggtacttaaa

SEQ ID NO: 4899083 - DNA, 25 bp, Homo sapien
ctgctgagataagctatacatagaa

SEQ ID NO: 4899084 - DNA, 25 bp, Homo sapien
cagagactcatcgtaaagaatgcgt

SEQ ID NO: 4899085 - DNA, 25 bp, Homo sapien
catcgtaaagaatgcgtgtgtgctc

SEQ ID NO: 4899086 - DNA, 25 bp, Homo sapien
ggtttagtgccagagactcatcgta

SEQ ID NO: 4899087 - DNA, 25 bp, Homo sapien
tgcgtgtgtgctcagactttttcat

SEQ ID NO: 4899088 - DNA, 25 bp, Homo sapien
tctacatcctgatcagcacaaaaag

SEQ ID NO: 4899089 - DNA, 25 bp, Homo sapien
ggtcaatcatttgtcctggctgtgg

SEQ ID NO: 4899090 - DNA, 25 bp, Homo sapien
ctggaatagcttcacaaatgtttcc

SEQ ID NO: 4899091 - DNA, 25 bp, Homo sapien
ctttcaaatgaggaggctgcctctt

SEQ ID NO: 4899092 - DNA, 25 bp, Homo sapien
agcccactgccaggctcgtcgttca

SEQ ID NO: 4899093 - DNA, 25 bp, Homo sapien
ggctcgtcgttcactcagcctgagg

SEQ ID NO: 4899094 - DNA, 25 bp, Homo sapien
gctcgtcgttcactcagcctgaggg

SEQ ID NO: 4899095 - DNA, 25 bp, Homo sapien
cactgccaggctcgtcgttcactca

SEQ ID NO: 4899096 - DNA, 25 bp, Homo sapien
ttttctgtgctctcagaatctatat

SEQ ID NO: 4899097 - DNA, 25 bp, Homo sapien
tctgtgctctcagaatctatattca

SEQ ID NO: 4899098 - DNA, 25 bp, Homo sapien
tattttctgtgctctcagaatctat

SEQ ID NO: 4899099 - DNA, 25 bp, Homo sapien
ttctgtgctctcagaatctatattc

SEQ ID NO: 4899100 - DNA, 25 bp, Homo sapien
agttttgaatcacctctgttcctga

SEQ ID NO: 4899101 - DNA, 25 bp, Homo sapien
gccctcacaaggactgacattcagt

SEQ ID NO: 4899102 - DNA, 25 bp, Homo sapien
taaactgatgtagtccagccctcac

SEQ ID NO: 4899103 - DNA, 25 bp, Homo sapien
tccaaattttaggacgagacctcca

SEQ ID NO: 4899104 - DNA, 25 bp, Homo sapien
actcccacctgggcatgaaacttgg

SEQ ID NO: 4899105 - DNA, 25 bp, Homo sapien
tgattttggagcatgggccctagcc

SEQ ID NO: 4899106 - DNA, 25 bp, Homo sapien
tctaaccacaataccaggcaatcca

SEQ ID NO: 4899107 - DNA, 25 bp, Homo sapien
ttggtccttcaagcctgcgaatagc

SEQ ID NO: 4899108 - DNA, 25 bp, Homo sapien
ggcaatccaggcttcatacttggtc

SEQ ID NO: 4899109 - DNA, 25 bp, Homo sapien
tacatcacaacgcagcctcagtgtg

SEQ ID NO: 4899110 - DNA, 25 bp, Homo sapien
cgcagcctcagtgtggtaattagaa

SEQ ID NO: 4899111 - DNA, 25 bp, Homo sapien
tttttgggtcacttacatcacaacg

SEQ ID NO: 4899112 - DNA, 25 bp, Homo sapien
tctgtagcaataaatttggaggtaa

SEQ ID NO: 4899113 - DNA, 25 bp, Homo sapien
gtagtgttgagtgtggccacagtgc

SEQ ID NO: 4899114 - DNA, 25 bp, Homo sapien
gagtgtggccacagtgccaggggag

SEQ ID NO: 4899115 - DNA, 25 bp, Homo sapien
tcacagtgtagtgttgagtgtggcc

SEQ ID NO: 4899116 - DNA, 25 bp, Homo sapien
gttgagtgtggccacagtgccaggg

SEQ ID NO: 4899117 - DNA, 25 bp, Homo sapien
ggatccatgtcatccccgcacgtag

SEQ ID NO: 4899118 - DNA, 25 bp, Homo sapien
agttgacggcgtctggatccatgtc

SEQ ID NO: 4899119 - DNA, 25 bp, Homo sapien
cccgcacgtagcaacgcgcggaggg

SEQ ID NO: 4899120 - DNA, 25 bp, Homo sapien
ctccttcccgtagttgacggcgtct

SEQ ID NO: 4899121 - DNA, 25 bp, Homo sapien
gctctccgcgctcggtgtccccccc

SEQ ID NO: 4899122 - DNA, 25 bp, Homo sapien
cgctctccgcgctcggtgtcccccc

SEQ ID NO: 4899123 - DNA, 25 bp, Homo sapien
gcgctctccgcgctcggtgtccccc

SEQ ID NO: 4899124 - DNA, 25 bp, Homo sapien
gcggagcggggctaggcggacgcac

SEQ ID NO: 4899125 - DNA, 25 bp, Homo sapien
cggctctggcaagggcgcggccgca

SEQ ID NO: 4899126 - DNA, 25 bp, Homo sapien
taggcggacgcaccggctctggcaa

SEQ ID NO: 4899127 - DNA, 25 bp, Homo sapien
ctgacggcctcaggcggagcggggc

SEQ ID NO: 4899128 - DNA, 25 bp, Homo sapien
ggaagatcgacatgcccttggacag

SEQ ID NO: 4899129 - DNA, 25 bp, Homo sapien
tggaggacggcgatgtctcctggga

SEQ ID NO: 4899130 - DNA, 25 bp, Homo sapien
tccgaggagttgttggaggacggcg

SEQ ID NO: 4899131 - DNA, 25 bp, Homo sapien
gtcgaggaagatcgacatgcccttg

SEQ ID NO: 4899132 - DNA, 25 bp, Homo sapien
catttttgtctgctctcctcagtat

SEQ ID NO: 4899133 - DNA, 25 bp, Homo sapien
tgtcagatgtcagatagattccaaa

SEQ ID NO: 4899134 - DNA, 25 bp, Homo sapien
caagggactctatcacatgagggtc

SEQ ID NO: 4899135 - DNA, 25 bp, Homo sapien
catgagggtctgttagcaagagctc

SEQ ID NO: 4899136 - DNA, 25 bp, Homo sapien
tctgggcaggcgaacaattatactg

SEQ ID NO: 4899137 - DNA, 25 bp, Homo sapien
gtattatgtgtatcaatggtatgga

SEQ ID NO: 4899138 - DNA, 25 bp, Homo sapien
tgagaacaccatctgcaaaatatgc

SEQ ID NO: 4899139 - DNA, 25 bp, Homo sapien
aaaagctcgtgtaattcttctccac

SEQ ID NO: 4899140 - DNA, 25 bp, Homo sapien
ggtatggaaaagctcgtgtaattct

SEQ ID NO: 4899141 - DNA, 25 bp, Homo sapien
cttgtggaatccagtgataaaaaag

SEQ ID NO: 4899142 - DNA, 25 bp, Homo sapien
acttgtggaatccagtgataaaaaa

SEQ ID NO: 4899143 - DNA, 25 bp, Homo sapien
tggaatccagtgataaaaaagtttc

SEQ ID NO: 4899144 - DNA, 25 bp, Homo sapien
tgtggaatccagtgataaaaaagtt

SEQ ID NO: 4899145 - DNA, 25 bp, Homo sapien
tgatttttcaagcaatggacacact

SEQ ID NO: 4899146 - DNA, 25 bp, Homo sapien
ggagccatctcaacactttgcctaa

SEQ ID NO: 4899147 - DNA, 25 bp, Homo sapien
tagatgtagcccaagagcattttct

SEQ ID NO: 4899148 - DNA, 25 bp, Homo sapien
tcagcacacctgaattgtccagata

SEQ ID NO: 4899149 - DNA, 25 bp, Homo sapien
aacattcttccccagtagcgattta

SEQ ID NO: 4899150 - DNA, 25 bp, Homo sapien
taagcctgtccttaagtagatccac

SEQ ID NO: 4899151 - DNA, 25 bp, Homo sapien
cccagtagcgatttaaggagtcaac

SEQ ID NO: 4899152 - DNA, 25 bp, Homo sapien
ccagtaaagtgcaacatggctttct

SEQ ID NO: 4899153 - DNA, 25 bp, Homo sapien
aatccccaggtcattttcactgttg

SEQ ID NO: 4899154 - DNA, 25 bp, Homo sapien
tgttgtccctgaaaataaatcccca

SEQ ID NO: 4899155 - DNA, 25 bp, Homo sapien
atccccaggtcattttcactgttgc

SEQ ID NO: 4899156 - DNA, 25 bp, Homo sapien
taaagttgggtcatctacgttatta

SEQ ID NO: 4899157 - DNA, 25 bp, Homo sapien
gggtcatctacgttattaattatct

SEQ ID NO: 4899158 - DNA, 25 bp, Homo sapien
tcatctacgttattaattatcttgg

SEQ ID NO: 4899159 - DNA, 25 bp, Homo sapien
gttgggtcatctacgttattaatta

SEQ ID NO: 4899160 - DNA, 25 bp, Homo sapien
tcaaggctaaccttccctcacaata

SEQ ID NO: 4899161 - DNA, 25 bp, Homo sapien
tattgggttccttcaatgccctgca

SEQ ID NO: 4899162 - DNA, 25 bp, Homo sapien
cttcctctcatatcatcatattggg

SEQ ID NO: 4899163 - DNA, 25 bp, Homo sapien
ggagcctcaaggctaaccttccctc

SEQ ID NO: 4899164 - DNA, 25 bp, Homo sapien
aacactagggcctagcacaaacaca

SEQ ID NO: 4899165 - DNA, 25 bp, Homo sapien
gtactgagcccatatctgaacacta

SEQ ID NO: 4899166 - DNA, 25 bp, Homo sapien
cagtcaccagagtactgagcccata

SEQ ID NO: 4899167 - DNA, 25 bp, Homo sapien
catatctgaacactagggcctagca

SEQ ID NO: 4899168 - DNA, 25 bp, Homo sapien
cacatagctcttctgtgtcaagatt

SEQ ID NO: 4899169 - DNA, 25 bp, Homo sapien
acatagctcttctgtgtcaagatta

SEQ ID NO: 4899170 - DNA, 25 bp, Homo sapien
ctgaaaaatgaaaatattgaaataa

SEQ ID NO: 4899171 - DNA, 25 bp, Homo sapien
ctcatactcgcccaagtgctgagaa

SEQ ID NO: 4899172 - DNA, 25 bp, Homo sapien
tcatactcgcccaagtgctgagaaa

SEQ ID NO: 4899173 - DNA, 25 bp, Homo sapien
caggtcttcaagtgctgctagtaca

SEQ ID NO: 4899174 - DNA, 25 bp, Homo sapien
gattcaggtcttcaagtgctgctag

SEQ ID NO: 4899175 - DNA, 25 bp, Homo sapien
ggaaagattcaggtcttcaagtgct

SEQ ID NO: 4899176 - DNA, 25 bp, Homo sapien
aaagattcaggtcttcaagtgctgc

SEQ ID NO: 4899177 - DNA, 25 bp, Homo sapien
gcagctgattcagggtttccttcaa

SEQ ID NO: 4899178 - DNA, 25 bp, Homo sapien
ttacgaattgttccaaattggaggc

SEQ ID NO: 4899179 - DNA, 25 bp, Homo sapien
aatctagttacgaattgttccaaat

SEQ ID NO: 4899180 - DNA, 25 bp, Homo sapien
agtttccatggcacattccagggaa

SEQ ID NO: 4899181 - DNA, 25 bp, Homo sapien
tgaattatcaggtctcccaagtata

SEQ ID NO: 4899182 - DNA, 25 bp, Homo sapien
tatatccaggttcatgtagtctgta

SEQ ID NO: 4899183 - DNA, 25 bp, Homo sapien
tgtagtctgtaagggtctttcccat

SEQ ID NO: 4899184 - DNA, 25 bp, Homo sapien
atcaggtctcccaagtatatccagg

SEQ ID NO: 4899185 - DNA, 25 bp, Homo sapien
cttgattgacatcataggaaaggta

SEQ ID NO: 4899186 - DNA, 25 bp, Homo sapien
tcaggcgttttcactggtctcttga

SEQ ID NO: 4899187 - DNA, 25 bp, Homo sapien
tcactggtctcttgattgacatcat

SEQ ID NO: 4899188 - DNA, 25 bp, Homo sapien
gggctctcctcacttttggtggcca

SEQ ID NO: 4899189 - DNA, 25 bp, Homo sapien
caacagagataacatttaaccttaa

SEQ ID NO: 4899190 - DNA, 25 bp, Homo sapien
ccttaatgttagtgcttcagtctct

SEQ ID NO: 4899191 - DNA, 25 bp, Homo sapien
atcaacagagataacatttaacctt

SEQ ID NO: 4899192 - DNA, 25 bp, Homo sapien
catttaaccttaatgttagtgcttc

SEQ ID NO: 4899193 - DNA, 25 bp, Homo sapien
tcggcggcttgatcgttttccaggc

SEQ ID NO: 4899194 - DNA, 25 bp, Homo sapien
ttttccaggccattgaatcgacagg

SEQ ID NO: 4899195 - DNA, 25 bp, Homo sapien
tgaatcgacaggacttctggcttgg

SEQ ID NO: 4899196 - DNA, 25 bp, Homo sapien
tgttgtgtctctggactcggcggct

SEQ ID NO: 4899197 - DNA, 25 bp, Homo sapien
tttcaaggcccaccaaattatgatg

SEQ ID NO: 4899198 - DNA, 25 bp, Homo sapien
caaggcccaccaaattatgatgtaa

SEQ ID NO: 4899199 - DNA, 25 bp, Homo sapien
tcaaggcccaccaaattatgatgta

SEQ ID NO: 4899200 - DNA, 25 bp, Homo sapien
ttcaaggcccaccaaattatgatgt

SEQ ID NO: 4899201 - DNA, 25 bp, Homo sapien
ttataaagggagagtgatgtcatca

SEQ ID NO: 4899202 - DNA, 25 bp, Homo sapien
gagagtgatgtcatcagaatttcct

SEQ ID NO: 4899203 - DNA, 25 bp, Homo sapien
taaagggagagtgatgtcatcagaa

SEQ ID NO: 4899204 - DNA, 25 bp, Homo sapien
gggagagtgatgtcatcagaatttc

SEQ ID NO: 4899205 - DNA, 25 bp, Homo sapien
ttccagtctatcaattaatttctgg

SEQ ID NO: 4899206 - DNA, 25 bp, Homo sapien
gtctatcaattaatttctggagtct

SEQ ID NO: 4899207 - DNA, 25 bp, Homo sapien
ttttccagtctatcaattaatttct

SEQ ID NO: 4899208 - DNA, 25 bp, Homo sapien
ccagtctatcaattaatttctggag

SEQ ID NO: 4899209 - DNA, 25 bp, Homo sapien
tctgagctggtattagtgtctctga

SEQ ID NO: 4899210 - DNA, 25 bp, Homo sapien
atgccattttctgagctggtattag

SEQ ID NO: 4899211 - DNA, 25 bp, Homo sapien
attttctgagctggtattagtgtct

SEQ ID NO: 4899212 - DNA, 25 bp, Homo sapien
ttctgagctggtattagtgtctctg

SEQ ID NO: 4899213 - DNA, 25 bp, Homo sapien
tcttctggtggttcgagtttgagat

SEQ ID NO: 4899214 - DNA, 25 bp, Homo sapien
agatttagtattcccttcaataatt

SEQ ID NO: 4899215 - DNA, 25 bp, Homo sapien
cttctggtggttcgagtttgagatc

SEQ ID NO: 4899216 - DNA, 25 bp, Homo sapien
ttcttcttctggtggttcgagtttg

SEQ ID NO: 4899217 - DNA, 25 bp, Homo sapien
aaatattacagggttgtcaaacaca

SEQ ID NO: 4899218 - DNA, 25 bp, Homo sapien
gaagtcctattgttcattgcacagc

SEQ ID NO: 4899219 - DNA, 25 bp, Homo sapien
gtgacaatcattacaaacaactaga

SEQ ID NO: 4899220 - DNA, 25 bp, Homo sapien
gtgatattagacataagtgacaatc

SEQ ID NO: 4899221 - DNA, 25 bp, Homo sapien
cgagggtcactgcgttggctgtcac

SEQ ID NO: 4899222 - DNA, 25 bp, Homo sapien
atttaagctgactcctactgcccat

SEQ ID NO: 4899223 - DNA, 25 bp, Homo sapien
gatgattgtcatccaaaaatatgac

SEQ ID NO: 4899224 - DNA, 25 bp, Homo sapien
taggcaagatattttccttgcctct

SEQ ID NO: 4899225 - DNA, 25 bp, Homo sapien
gaagcactctccacgtagtgtttca

SEQ ID NO: 4899226 - DNA, 25 bp, Homo sapien
ggtcctcttctatcacagacatctg

SEQ ID NO: 4899227 - DNA, 25 bp, Homo sapien
tttcagagcgagctggaattcttcc

SEQ ID NO: 4899228 - DNA, 25 bp, Homo sapien
tcacagacatctgccgctgcacaag

SEQ ID NO: 4899229 - DNA, 25 bp, Homo sapien
aaaagcagatgaatttggacctggg

SEQ ID NO: 4899230 - DNA, 25 bp, Homo sapien
cagatgaatttggacctgggctctg

SEQ ID NO: 4899231 - DNA, 25 bp, Homo sapien
agcagatgaatttggacctgggctc

SEQ ID NO: 4899232 - DNA, 25 bp, Homo sapien
aaagcagatgaatttggacctgggc

SEQ ID NO: 4899233 - DNA, 25 bp, Homo sapien
ctggagtctaagatccttgaaagca

SEQ ID NO: 4899234 - DNA, 25 bp, Homo sapien
ctattttcccaactggagtctaaga

SEQ ID NO: 4899235 - DNA, 25 bp, Homo sapien
tctgagaacataccgtgtacaccac

SEQ ID NO: 4899236 - DNA, 25 bp, Homo sapien
ccacttatattcaattggtacctcc

SEQ ID NO: 4899237 - DNA, 25 bp, Homo sapien
tcaacctcgagctttgggagacctt

SEQ ID NO: 4899238 - DNA, 25 bp, Homo sapien
tttgggagaccttgaatattcctgg

SEQ ID NO: 4899239 - DNA, 25 bp, Homo sapien
ttaaaagatccttccgatggcacag

SEQ ID NO: 4899240 - DNA, 25 bp, Homo sapien
gttgaggtgactgcgaatttaatcc

SEQ ID NO: 4899241 - DNA, 25 bp, Homo sapien
tcctatagcaatgagaagtcactga

SEQ ID NO: 4899242 - DNA, 25 bp, Homo sapien
tccagtcctttgactagcccgaagg

SEQ ID NO: 4899243 - DNA, 25 bp, Homo sapien
ctcatagatcatgtagcgagattca

SEQ ID NO: 4899244 - DNA, 25 bp, Homo sapien
ccagaactcatagatcatgtagcga

SEQ ID NO: 4899245 - DNA, 25 bp, Homo sapien
cgagattcatttgaaagcttctgta

SEQ ID NO: 4899246 - DNA, 25 bp, Homo sapien
catgtagcgagattcatttgaaagc

SEQ ID NO: 4899247 - DNA, 25 bp, Homo sapien
tacttctttggaatgtcttgctata

SEQ ID NO: 4899248 - DNA, 25 bp, Homo sapien
cttgctataatttgtctgaaggtgg

SEQ ID NO: 4899249 - DNA, 25 bp, Homo sapien
caggaactagcattgtagatgtgag

SEQ ID NO: 4899250 - DNA, 25 bp, Homo sapien
tgtagatgtgagttctggagtttcc

SEQ ID NO: 4899251 - DNA, 25 bp, Homo sapien
tagttgttcaggatccaccacgaag

SEQ ID NO: 4899252 - DNA, 25 bp, Homo sapien
ctagttgttcaggatccaccacgaa

SEQ ID NO: 4899253 - DNA, 25 bp, Homo sapien
ccttagagttgaccagaggcacaca

SEQ ID NO: 4899254 - DNA, 25 bp, Homo sapien
gaacacctgttttgcacttggaacc

SEQ ID NO: 4899255 - DNA, 25 bp, Homo sapien
taatcagtttcagctttgcaggagg

SEQ ID NO: 4899256 - DNA, 25 bp, Homo sapien
gaaactgaagttgaaaaacggctgc

SEQ ID NO: 4899257 - DNA, 25 bp, Homo sapien
aaaccagactttctgcctgatcatc

SEQ ID NO: 4899258 - DNA, 25 bp, Homo sapien
gactttctgcctgatcatcccattg

SEQ ID NO: 4899259 - DNA, 25 bp, Homo sapien
ctctcaagtgtttccatctgcagaa

SEQ ID NO: 4899260 - DNA, 25 bp, Homo sapien
gctctcaagtgtttccatctgcaga

SEQ ID NO: 4899261 - DNA, 25 bp, Homo sapien
gactttattgtgtcatagcattaga

SEQ ID NO: 4899262 - DNA, 25 bp, Homo sapien
gcattagataattagtcctactgcc

SEQ ID NO: 4899263 - DNA, 25 bp, Homo sapien
caacagtctagaagaactttggaga

SEQ ID NO: 4899264 - DNA, 25 bp, Homo sapien
actgcctttaggtggagtagttagc

SEQ ID NO: 4899265 - DNA, 25 bp, Homo sapien
aatatattgattccactgtgcagac

SEQ ID NO: 4899266 - DNA, 25 bp, Homo sapien
gaagccatttctaaacggagacagc

SEQ ID NO: 4899267 - DNA, 25 bp, Homo sapien
tctctgatgccaggcgagttgtctc

SEQ ID NO: 4899268 - DNA, 25 bp, Homo sapien
caagggatgcccttttatcatgacc

SEQ ID NO: 4899269 - DNA, 25 bp, Homo sapien
tatgattcagtaatgcaggtgagag

SEQ ID NO: 4899270 - DNA, 25 bp, Homo sapien
ggtttatgtataatcgtttcaagac

SEQ ID NO: 4899271 - DNA, 25 bp, Homo sapien
taagagtcagttatccagaacacag

SEQ ID NO: 4899272 - DNA, 25 bp, Homo sapien
agttcttggtaagctactctggaca

SEQ ID NO: 4899273 - DNA, 25 bp, Homo sapien
ttctgaaatttcatgagtctatgtc

SEQ ID NO: 4899274 - DNA, 25 bp, Homo sapien
tcatttggatattcagtgggccctg

SEQ ID NO: 4899275 - DNA, 25 bp, Homo sapien
tcgtctccgtctaattaggagtaaa

SEQ ID NO: 4899276 - DNA, 25 bp, Homo sapien
gagtctatgtcttcgtgagggtctt

SEQ ID NO: 4899277 - DNA, 25 bp, Homo sapien
tcctcagagttcttagtttattcct

SEQ ID NO: 4899278 - DNA, 25 bp, Homo sapien
gtgttggatcccatgccatcctcag

SEQ ID NO: 4899279 - DNA, 25 bp, Homo sapien
cctgtgttggatcccatgccatcct

SEQ ID NO: 4899280 - DNA, 25 bp, Homo sapien
ggtggagcacatctactctttgctt

SEQ ID NO: 4899281 - DNA, 25 bp, Homo sapien
tagacggataattaaccttggccca

SEQ ID NO: 4899282 - DNA, 25 bp, Homo sapien
ccttggcccagtaatgcttatttct

SEQ ID NO: 4899283 - DNA, 25 bp, Homo sapien
ctcagtccatttgtgggatagtgaa

SEQ ID NO: 4899284 - DNA, 25 bp, Homo sapien
ccaaccagaaggtacaagggtcgtg

SEQ ID NO: 4899285 - DNA, 25 bp, Homo sapien
aaggcccttgcatttactggtatac

SEQ ID NO: 4899286 - DNA, 25 bp, Homo sapien
attgctgggccaataatgactgtcc

SEQ ID NO: 4899287 - DNA, 25 bp, Homo sapien
tcattgggccattagtgaagtcttc

SEQ ID NO: 4899288 - DNA, 25 bp, Homo sapien
cttctccagtgagcggacacaagga

SEQ ID NO: 4899289 - DNA, 25 bp, Homo sapien
tctctgagtccagcttttacactag

SEQ ID NO: 4899290 - DNA, 25 bp, Homo sapien
cagcttttacactagctctcttcct

SEQ ID NO: 4899291 - DNA, 25 bp, Homo sapien
ttgtcatccaataggttcccatttc

SEQ ID NO: 4899292 - DNA, 25 bp, Homo sapien
ccatttctatatgaaaggtcagctc

SEQ ID NO: 4899293 - DNA, 25 bp, Homo sapien
tgtactgtgttctagatcaaatccg

SEQ ID NO: 4899294 - DNA, 25 bp, Homo sapien
tccaaatggtcaggaaaaactgtac

SEQ ID NO: 4899295 - DNA, 25 bp, Homo sapien
atccgtacccaagggcacctaatct

SEQ ID NO: 4899296 - DNA, 25 bp, Homo sapien
ttagttagcactgtccaaatggtca

SEQ ID NO: 4899297 - DNA, 25 bp, Homo sapien
actggaagggcataccacatgttca

SEQ ID NO: 4899298 - DNA, 25 bp, Homo sapien
tctgacaattggaaaacagtacagt

SEQ ID NO: 4899299 - DNA, 25 bp, Homo sapien
aatacgcatgttcttaagctaaacc

SEQ ID NO: 4899300 - DNA, 25 bp, Homo sapien
cataagctgggtgtaaaatttcagt

SEQ ID NO: 4899301 - DNA, 25 bp, Homo sapien
aaggcggcaccggatctaagcaaag

SEQ ID NO: 4899302 - DNA, 25 bp, Homo sapien
gcaccggatctaagcaaagccactg

SEQ ID NO: 4899303 - DNA, 25 bp, Homo sapien
cttcaaggcggcaccggatctaagc

SEQ ID NO: 4899304 - DNA, 25 bp, Homo sapien
caaagccactgcaaagacgagaaac

SEQ ID NO: 4899305 - DNA, 25 bp, Homo sapien
tggctacggctgggacccagccccg

SEQ ID NO: 4899306 - DNA, 25 bp, Homo sapien
ggctacggctgggacccagccccgc

SEQ ID NO: 4899307 - DNA, 25 bp, Homo sapien
aacctgcaccggctagtaggcacct

SEQ ID NO: 4899308 - DNA, 25 bp, Homo sapien
acctgcaccggctagtaggcacctt

SEQ ID NO: 4899309 - DNA, 25 bp, Homo sapien
ctagaagaaacctgcaccggctagt

SEQ ID NO: 4899310 - DNA, 25 bp, Homo sapien
aagaaacctgcaccggctagtaggc

SEQ ID NO: 4899311 - DNA, 25 bp, Homo sapien
gacgaccaggtaccccagcacacgc

SEQ ID NO: 4899312 - DNA, 25 bp, Homo sapien
acgaccaggtaccccagcacacgcg

SEQ ID NO: 4899313 - DNA, 25 bp, Homo sapien
tcttcctcatcaagctcttcggtca

SEQ ID NO: 4899314 - DNA, 25 bp, Homo sapien
tcaagctcttcggtcaataccgcct

SEQ ID NO: 4899315 - DNA, 25 bp, Homo sapien
tctctttgcgatgccttctcagcag

SEQ ID NO: 4899316 - DNA, 25 bp, Homo sapien
tcttctctttgcgatgccttctcag

SEQ ID NO: 4899317 - DNA, 25 bp, Homo sapien
ttccaacttggccacatcttcggtg

SEQ ID NO: 4899318 - DNA, 25 bp, Homo sapien
attgctccagttcctctctatgttt

SEQ ID NO: 4899319 - DNA, 25 bp, Homo sapien
tagtagtcagcttcaattgctccag

SEQ ID NO: 4899320 - DNA, 25 bp, Homo sapien
catcttcggtgagttgcttcctcct

SEQ ID NO: 4899321 - DNA, 25 bp, Homo sapien
tgtgcttttgatatccgaggtggct

SEQ ID NO: 4899322 - DNA, 25 bp, Homo sapien
tgattctcaagcaccaagtttgaaa

SEQ ID NO: 4899323 - DNA, 25 bp, Homo sapien
tccgaggtggctgattctcaagcac

SEQ ID NO: 4899324 - DNA, 25 bp, Homo sapien
tgatatccgaggtggctgattctca

SEQ ID NO: 4899325 - DNA, 25 bp, Homo sapien
tgcatatcctaagcagacaatctcc

SEQ ID NO: 4899326 - DNA, 25 bp, Homo sapien
gaagctagacaattgtgagatcatc

SEQ ID NO: 4899327 - DNA, 25 bp, Homo sapien
taaagataggaagaacttgtgccct

SEQ ID NO: 4899328 - DNA, 25 bp, Homo sapien
cctttttgatctatagaagctagac

SEQ ID NO: 4899329 - DNA, 25 bp, Homo sapien
acatggctttgcatatactcagcgg

SEQ ID NO: 4899330 - DNA, 25 bp, Homo sapien
tatacatacagtggccatcagatgg

SEQ ID NO: 4899331 - DNA, 25 bp, Homo sapien
ttctcaaggcaaccacagtcagagc

SEQ ID NO: 4899332 - DNA, 25 bp, Homo sapien
tactcagcggtctgacttctcaagg

SEQ ID NO: 4899333 - DNA, 25 bp, Homo sapien
gcgttgaccccaaaaattgccacca

SEQ ID NO: 4899334 - DNA, 25 bp, Homo sapien
cctgcatccaaaggaataccatgaa

SEQ ID NO: 4899335 - DNA, 25 bp, Homo sapien
gaatctaatctaactcccaggtcca

SEQ ID NO: 4899336 - DNA, 25 bp, Homo sapien
tgacatgtgttttgaagcccaaacc

SEQ ID NO: 4899337 - DNA, 25 bp, Homo sapien
tcttcacagtacttctgaaattctt

SEQ ID NO: 4899338 - DNA, 25 bp, Homo sapien
gtgtttacaatatcttcacagtact

SEQ ID NO: 4899339 - DNA, 25 bp, Homo sapien
tgcagctgtgtttacaatatcttca

SEQ ID NO: 4899340 - DNA, 25 bp, Homo sapien
ccatgcagctgtgtttacaatatct

SEQ ID NO: 4899341 - DNA, 25 bp, Homo sapien
ctgcctgtattatctctattggtgt

SEQ ID NO: 4899342 - DNA, 25 bp, Homo sapien
ttcaccaactataatgggaggagaa

SEQ ID NO: 4899343 - DNA, 25 bp, Homo sapien
tgggaggagaatctgcctgtattat

SEQ ID NO: 4899344 - DNA, 25 bp, Homo sapien
atgggaggagaatctgcctgtatta

SEQ ID NO: 4899345 - DNA, 25 bp, Homo sapien
caaccgtgtaaccgaattataatgt

SEQ ID NO: 4899346 - DNA, 25 bp, Homo sapien
ccgtgtaaccgaattataatgttct

SEQ ID NO: 4899347 - DNA, 25 bp, Homo sapien
gctgcaattttcagtaactatgttt

SEQ ID NO: 4899348 - DNA, 25 bp, Homo sapien
tagctgcaattttcagtaactatgt

SEQ ID NO: 4899349 - DNA, 25 bp, Homo sapien
ttagctgcaattttcagtaactatg

SEQ ID NO: 4899350 - DNA, 25 bp, Homo sapien
tgcaattttcagtaactatgtttac

SEQ ID NO: 4899351 - DNA, 25 bp, Homo sapien
gagtaacctgaaatctgagctagaa

SEQ ID NO: 4899352 - DNA, 25 bp, Homo sapien
taaaattgcacaaggtaaaggccac

SEQ ID NO: 4899353 - DNA, 25 bp, Homo sapien
catcaagggttacaaaacaggcatc

SEQ ID NO: 4899354 - DNA, 25 bp, Homo sapien
gatgatggtactaactccagtccga

SEQ ID NO: 4899355 - DNA, 25 bp, Homo sapien
gaaccgtttagcaaagagtagtgta

SEQ ID NO: 4899356 - DNA, 25 bp, Homo sapien
cagcacctaaggaggaggaaccgtt

SEQ ID NO: 4899357 - DNA, 25 bp, Homo sapien
tcccaacgctgaatgaagtctgatg

SEQ ID NO: 4899358 - DNA, 25 bp, Homo sapien
gaagctctgacgtaagtgtgaaaaa

SEQ ID NO: 4899359 - DNA, 25 bp, Homo sapien
gggtaaaagtttcaaacatgatcag

SEQ ID NO: 4899360 - DNA, 25 bp, Homo sapien
catgatcagatgcttcatgtacttg

SEQ ID NO: 4899361 - DNA, 25 bp, Homo sapien
tttaaaatgtggtctgagacttggg

SEQ ID NO: 4899362 - DNA, 25 bp, Homo sapien
tgttttggcaagcttattttgtgat

SEQ ID NO: 4899363 - DNA, 25 bp, Homo sapien
tcgtatttttaccaccactcaatgc

SEQ ID NO: 4899364 - DNA, 25 bp, Homo sapien
tcctaatgctgagggcatctttgtc

SEQ ID NO: 4899365 - DNA, 25 bp, Homo sapien
ggactagagtcttcaggccaggcag

SEQ ID NO: 4899366 - DNA, 25 bp, Homo sapien
gtcaagttgcataactctggacaca

SEQ ID NO: 4899367 - DNA, 25 bp, Homo sapien
ttttccatcttcaataccaaaccac

SEQ ID NO: 4899368 - DNA, 25 bp, Homo sapien
tgttttccatcttcaataccaaacc

SEQ ID NO: 4899369 - DNA, 25 bp, Homo sapien
catcttcaataccaaaccacaacag

SEQ ID NO: 4899370 - DNA, 25 bp, Homo sapien
ttcaataccaaaccacaacagcaaa

SEQ ID NO: 4899371 - DNA, 25 bp, Homo sapien
aattgaaaaggaactcccttgctgc

SEQ ID NO: 4899372 - DNA, 25 bp, Homo sapien
gaaaggtttaacacaagcatatggg

SEQ ID NO: 4899373 - DNA, 25 bp, Homo sapien
caagatagacgaccagatccaggtt

SEQ ID NO: 4899374 - DNA, 25 bp, Homo sapien
cagcctgccctaggaaattgaaaag

SEQ ID NO: 4899375 - DNA, 25 bp, Homo sapien
aagtccttgttgtcttgtaactaca

SEQ ID NO: 4899376 - DNA, 25 bp, Homo sapien
taaaagtggttatatatggagatcg

SEQ ID NO: 4899377 - DNA, 25 bp, Homo sapien
taggttcatgactcagtcaagtccc

SEQ ID NO: 4899378 - DNA, 25 bp, Homo sapien
atatttaattctcggtaaccaatgg

SEQ ID NO: 4899379 - DNA, 25 bp, Homo sapien
gagactgcagttgatgaaggaagaa

SEQ ID NO: 4899380 - DNA, 25 bp, Homo sapien
gatacctgtagacctaatcccctga

SEQ ID NO: 4899381 - DNA, 25 bp, Homo sapien
ggtgtagtaacattacatgtaaaag

SEQ ID NO: 4899382 - DNA, 25 bp, Homo sapien
catcttacgaagtggggagtcaaaa

SEQ ID NO: 4899383 - DNA, 25 bp, Homo sapien
tagaagtttagagttacccaagaca

SEQ ID NO: 4899384 - DNA, 25 bp, Homo sapien
gtccttggctgacagtatctagcaa

SEQ ID NO: 4899385 - DNA, 25 bp, Homo sapien
caggaaacagtgggtccaatttaag

SEQ ID NO: 4899386 - DNA, 25 bp, Homo sapien
tccaatttaagagagcaacaaaggg

SEQ ID NO: 4899387 - DNA, 25 bp, Homo sapien
gatggagggtcttagagggaagtct

SEQ ID NO: 4899388 - DNA, 25 bp, Homo sapien
tctttgagggtttctagcacatttt

SEQ ID NO: 4899389 - DNA, 25 bp, Homo sapien
tgataatctacaaccattctttgag

SEQ ID NO: 4899390 - DNA, 25 bp, Homo sapien
tagaactcccattacatagggaaaa

SEQ ID NO: 4899391 - DNA, 25 bp, Homo sapien
taccaactgtgagacggatggagct

SEQ ID NO: 4899392 - DNA, 25 bp, Homo sapien
gtgtttggttaggcaggactttgaa

SEQ ID NO: 4899393 - DNA, 25 bp, Homo sapien
tgtgtttggttaggcaggactttga

SEQ ID NO: 4899394 - DNA, 25 bp, Homo sapien
cactgccgttggactttatgataca

SEQ ID NO: 4899395 - DNA, 25 bp, Homo sapien
ggtcagctgcacatgtgagcagctt

SEQ ID NO: 4899396 - DNA, 25 bp, Homo sapien
tactgtcaattgtttatggccaaat

SEQ ID NO: 4899397 - DNA, 25 bp, Homo sapien
gctatggcagaccatatctttgtcc

SEQ ID NO: 4899398 - DNA, 25 bp, Homo sapien
ccatgaaggcatcctccttttgcat

SEQ ID NO: 4899399 - DNA, 25 bp, Homo sapien
gcatagcacggtgtactttctatta

SEQ ID NO: 4899400 - DNA, 25 bp, Homo sapien
tttgcatttgcatagcacggtgtac

SEQ ID NO: 4899401 - DNA, 25 bp, Homo sapien
cccatgaaggcatcctccttttgca

SEQ ID NO: 4899402 - DNA, 25 bp, Homo sapien
tccttggcagtaaaaggtgctgcag

SEQ ID NO: 4899403 - DNA, 25 bp, Homo sapien
gagatgccactgtcagaagtgcaag

SEQ ID NO: 4899404 - DNA, 25 bp, Homo sapien
cttctatcaggggtagttgtggcca

SEQ ID NO: 4899405 - DNA, 25 bp, Homo sapien
gatgccccttggtggtaggtccagc

SEQ ID NO: 4899406 - DNA, 25 bp, Homo sapien
ctgcaggagtgatacctgtaaatat

SEQ ID NO: 4899407 - DNA, 25 bp, Homo sapien
gatacctgtaaatatgagtgggatt

SEQ ID NO: 4899408 - DNA, 25 bp, Homo sapien
gagtgatacctgtaaatatgagtgg

SEQ ID NO: 4899409 - DNA, 25 bp, Homo sapien
tatgagtgggattggcaggatctcc

SEQ ID NO: 4899410 - DNA, 25 bp, Homo sapien
cttcccaagtagtaggtatgtgcca

SEQ ID NO: 4899411 - DNA, 25 bp, Homo sapien
gcttcccaagtagtaggtatgtgcc

SEQ ID NO: 4899412 - DNA, 25 bp, Homo sapien
ttcccaagtagtaggtatgtgccac

SEQ ID NO: 4899413 - DNA, 25 bp, Homo sapien
tcatctcttccggaacttcttctaa

SEQ ID NO: 4899414 - DNA, 25 bp, Homo sapien
acagatcctatttccagataaatgg

SEQ ID NO: 4899415 - DNA, 25 bp, Homo sapien
caggtgcaaatctacagatcctatt

SEQ ID NO: 4899416 - DNA, 25 bp, Homo sapien
ggctccaggtgcaaatctacagatc

SEQ ID NO: 4899417 - DNA, 25 bp, Homo sapien
tgatgctataatgttgttccttgtt

SEQ ID NO: 4899418 - DNA, 25 bp, Homo sapien
taaatatgagagattaaatttgatg

SEQ ID NO: 4899419 - DNA, 25 bp, Homo sapien
aatttgatgctataatgttgttcct

SEQ ID NO: 4899420 - DNA, 25 bp, Homo sapien
ttcaagagtagtatgtaaatatctc

SEQ ID NO: 4899421 - DNA, 25 bp, Homo sapien
cgtaagatgattgttgttcagatta

SEQ ID NO: 4899422 - DNA, 25 bp, Homo sapien
gaagctgcgtaagatgattgttgtt

SEQ ID NO: 4899423 - DNA, 25 bp, Homo sapien
gctgcgtaagatgattgttgttcag

SEQ ID NO: 4899424 - DNA, 25 bp, Homo sapien
tgcgtaagatgattgttgttcagat

SEQ ID NO: 4899425 - DNA, 25 bp, Homo sapien
taatgtgcccaattctgtggctaac

SEQ ID NO: 4899426 - DNA, 25 bp, Homo sapien
aatctcacagggacttatgctaggc

SEQ ID NO: 4899427 - DNA, 25 bp, Homo sapien
tgtggctaaccaagctccaagaacc

SEQ ID NO: 4899428 - DNA, 25 bp, Homo sapien
gggcacgattgttaaccaagtcttg

SEQ ID NO: 4899429 - DNA, 25 bp, Homo sapien
tttgactccaagtccatgaactgat

SEQ ID NO: 4899430 - DNA, 25 bp, Homo sapien
ccaaatttgactccaagtccatgaa

SEQ ID NO: 4899431 - DNA, 25 bp, Homo sapien
ctgcccaaatttgactccaagtcca

SEQ ID NO: 4899432 - DNA, 25 bp, Homo sapien
gactccaagtccatgaactgatatt

SEQ ID NO: 4899433 - DNA, 25 bp, Homo sapien
ttcctgtgcctgtgcagcgctgtcc

SEQ ID NO: 4899434 - DNA, 25 bp, Homo sapien
ccagcctgggtgagtagggccagac

SEQ ID NO: 4899435 - DNA, 25 bp, Homo sapien
tccagcctgggtgagtagggccaga

SEQ ID NO: 4899436 - DNA, 25 bp, Homo sapien
caccttggtcttcacttcccaactt

SEQ ID NO: 4899437 - DNA, 25 bp, Homo sapien
tgccagcaccttggtcttcacttcc

SEQ ID NO: 4899438 - DNA, 25 bp, Homo sapien
cagcaccttggtcttcacttcccaa

SEQ ID NO: 4899439 - DNA, 25 bp, Homo sapien
ttggtcttcacttcccaacttccag

SEQ ID NO: 4899440 - DNA, 25 bp, Homo sapien
caggtatgcatatcagctgattgta

SEQ ID NO: 4899441 - DNA, 25 bp, Homo sapien
tctaggaatgctggctagttggtta

SEQ ID NO: 4899442 - DNA, 25 bp, Homo sapien
tgaagttcaacaagattctcaagaa

SEQ ID NO: 4899443 - DNA, 25 bp, Homo sapien
taatctcttcaggtatgcatatcag

SEQ ID NO: 4899444 - DNA, 25 bp, Homo sapien
acagcaaactactgtggttccatgt

SEQ ID NO: 4899445 - DNA, 25 bp, Homo sapien
ggttgaaatctcacctctggcaggt

SEQ ID NO: 4899446 - DNA, 25 bp, Homo sapien
tagaagcccttaagtcatacggttg

SEQ ID NO: 4899447 - DNA, 25 bp, Homo sapien
tctggcaggtactataactatgggc

SEQ ID NO: 4899448 - DNA, 25 bp, Homo sapien
gctagaggctgtctgcaatccccat

SEQ ID NO: 4899449 - DNA, 25 bp, Homo sapien
aatatttccagctatgtctaggatt

SEQ ID NO: 4899450 - DNA, 25 bp, Homo sapien
tctgaataatatttccagctatgtc

SEQ ID NO: 4899451 - DNA, 25 bp, Homo sapien
ccagctatgtctaggattcttagtt

SEQ ID NO: 4899452 - DNA, 25 bp, Homo sapien
tcctgatggaaatatctgaataata

SEQ ID NO: 4899453 - DNA, 25 bp, Homo sapien
ctaaagtctctctgtagcagatctg

SEQ ID NO: 4899454 - DNA, 25 bp, Homo sapien
ccacagggtgtaccactaaacccag

SEQ ID NO: 4899455 - DNA, 25 bp, Homo sapien
cacagggtgtaccactaaacccagc

SEQ ID NO: 4899456 - DNA, 25 bp, Homo sapien
gatctgactacatgttcataaaaga

SEQ ID NO: 4899457 - DNA, 25 bp, Homo sapien
tggccagatggtacttttttagaaa

SEQ ID NO: 4899458 - DNA, 25 bp, Homo sapien
tgcatattttcattggcccaataag

SEQ ID NO: 4899459 - DNA, 25 bp, Homo sapien
acaggatctgcattagtgggtccta

SEQ ID NO: 4899460 - DNA, 25 bp, Homo sapien
gatcaggtgcagttgtaaacattct

SEQ ID NO: 4899461 - DNA, 25 bp, Homo sapien
cattagtgggtcctacttctttggg

SEQ ID NO: 4899462 - DNA, 25 bp, Homo sapien
attagattcctgaaagtcttcatct

SEQ ID NO: 4899463 - DNA, 25 bp, Homo sapien
tattagattcctgaaagtcttcatc

SEQ ID NO: 4899464 - DNA, 25 bp, Homo sapien
tggaatacggaacgtgcaatcagta

SEQ ID NO: 4899465 - DNA, 25 bp, Homo sapien
tacggaacgtgcaatcagtatactg

SEQ ID NO: 4899466 - DNA, 25 bp, Homo sapien
ggaatacggaacgtgcaatcagtat

SEQ ID NO: 4899467 - DNA, 25 bp, Homo sapien
aatacggaacgtgcaatcagtatac

SEQ ID NO: 4899468 - DNA, 25 bp, Homo sapien
agaattcccagatgttcttcttcag

SEQ ID NO: 4899469 - DNA, 25 bp, Homo sapien
gttcttcttcagcttttctctccac

SEQ ID NO: 4899470 - DNA, 25 bp, Homo sapien
aattcccagatgttcttcttcagct

SEQ ID NO: 4899471 - DNA, 25 bp, Homo sapien
ctagaattcccagatgttcttcttc

SEQ ID NO: 4899472 - DNA, 25 bp, Homo sapien
gaataaatgtagaactctccgtttg

SEQ ID NO: 4899473 - DNA, 25 bp, Homo sapien
ataaatgtagaactctccgtttgta

SEQ ID NO: 4899474 - DNA, 25 bp, Homo sapien
aataaatgtagaactctccgtttgt

SEQ ID NO: 4899475 - DNA, 25 bp, Homo sapien
ccatgtgcattgtgaggccttgtgg

SEQ ID NO: 4899476 - DNA, 25 bp, Homo sapien
ttcatctcccatgtgcattgtgagg

SEQ ID NO: 4899477 - DNA, 25 bp, Homo sapien
tgtgaggccttgtgggtttccaaac

SEQ ID NO: 4899478 - DNA, 25 bp, Homo sapien
tcccatgtgcattgtgaggccttgt

SEQ ID NO: 4899479 - DNA, 25 bp, Homo sapien
gatatgattagactgtaggaatcaa

SEQ ID NO: 4899480 - DNA, 25 bp, Homo sapien
ccctgtgcttgtattagaagctatg

SEQ ID NO: 4899481 - DNA, 25 bp, Homo sapien
taaaaccctaatagtggtgatatga

SEQ ID NO: 4899482 - DNA, 25 bp, Homo sapien
ctgtgcttgtattagaagctatggc

SEQ ID NO: 4899483 - DNA, 25 bp, Homo sapien
tctccagttccagataacgtccttt

SEQ ID NO: 4899484 - DNA, 25 bp, Homo sapien
tccagataacgtcctttagaccatc

SEQ ID NO: 4899485 - DNA, 25 bp, Homo sapien
gaattgtatctcaactctgcttttc

SEQ ID NO: 4899486 - DNA, 25 bp, Homo sapien
ccagttccagataacgtcctttaga

SEQ ID NO: 4899487 - DNA, 25 bp, Homo sapien
catcagttcactgttgttggagaca

SEQ ID NO: 4899488 - DNA, 25 bp, Homo sapien
tccagatttctctatgtttttgaga

SEQ ID NO: 4899489 - DNA, 25 bp, Homo sapien
ggattgacttttattccaaggaaca

SEQ ID NO: 4899490 - DNA, 25 bp, Homo sapien
aaagaatgtcactaactggtccaga

SEQ ID NO: 4899491 - DNA, 25 bp, Homo sapien
cctttgtcttatgtgagttgttgca

SEQ ID NO: 4899492 - DNA, 25 bp, Homo sapien
gtgagttgttgcaatggtacttgaa

SEQ ID NO: 4899493 - DNA, 25 bp, Homo sapien
ttcattggaggcctttgtcttatgt

SEQ ID NO: 4899494 - DNA, 25 bp, Homo sapien
ggaggcctttgtcttatgtgagttg

SEQ ID NO: 4899495 - DNA, 25 bp, Homo sapien
tctcctgctgtgtagaaatcactgg

SEQ ID NO: 4899496 - DNA, 25 bp, Homo sapien
tgggtttccctcacagtagaattcc

SEQ ID NO: 4899497 - DNA, 25 bp, Homo sapien
cagacgttctcctgctgtgtagaaa

SEQ ID NO: 4899498 - DNA, 25 bp, Homo sapien
tgctgtgtagaaatcactggctgct

SEQ ID NO: 4899499 - DNA, 25 bp, Homo sapien
taccaaagagttctgtaatatgctt

SEQ ID NO: 4899500 - DNA, 25 bp, Homo sapien
ttaccaaagagttctgtaatatgct

SEQ ID NO: 4899501 - DNA, 25 bp, Homo sapien
ttgtgggtaccgttctatgtcatcc

SEQ ID NO: 4899502 - DNA, 25 bp, Homo sapien
catacggttataaagtactgtccac

SEQ ID NO: 4899503 - DNA, 25 bp, Homo sapien
ggtggaggaacaaatcgaacacatt

SEQ ID NO: 4899504 - DNA, 25 bp, Homo sapien
gatcatgctcctgacttgtgggtac

SEQ ID NO: 4899505 - DNA, 25 bp, Homo sapien
gcagagcaccagatgcacactcagt

SEQ ID NO: 4899506 - DNA, 25 bp, Homo sapien
ttctggctgttgttgcttgtattag

SEQ ID NO: 4899507 - DNA, 25 bp, Homo sapien
tccaggtgacatatttagcagagca

SEQ ID NO: 4899508 - DNA, 25 bp, Homo sapien
cattaattgaggtattccaggtgac

SEQ ID NO: 4899509 - DNA, 25 bp, Homo sapien
tacagctacattgcttggagattag

SEQ ID NO: 4899510 - DNA, 25 bp, Homo sapien
gctacattgcttggagattagtcaa

SEQ ID NO: 4899511 - DNA, 25 bp, Homo sapien
ttgcttggagattagtcaagacttg

SEQ ID NO: 4899512 - DNA, 25 bp, Homo sapien
cttttacagctacattgcttggaga

SEQ ID NO: 4899513 - DNA, 25 bp, Homo sapien
tctgattatcatccccaagtattct

SEQ ID NO: 4899514 - DNA, 25 bp, Homo sapien
gttaatctgattatcatccccaagt

SEQ ID NO: 4899515 - DNA, 25 bp, Homo sapien
taatctgattatcatccccaagtat

SEQ ID NO: 4899516 - DNA, 25 bp, Homo sapien
ggttaatctgattatcatccccaag

SEQ ID NO: 4899517 - DNA, 25 bp, Homo sapien
acaaattaatacttggagaggcacc

SEQ ID NO: 4899518 - DNA, 25 bp, Homo sapien
caaattaatacttggagaggcacca

SEQ ID NO: 4899519 - DNA, 25 bp, Homo sapien
gaacaaattaatacttggagaggca

SEQ ID NO: 4899520 - DNA, 25 bp, Homo sapien
aagaacaaattaatacttggagagg

SEQ ID NO: 4899521 - DNA, 25 bp, Homo sapien
ctacacctgagcaattccaaagagg

SEQ ID NO: 4899522 - DNA, 25 bp, Homo sapien
ggagtgaggctatgaatgagcacct

SEQ ID NO: 4899523 - DNA, 25 bp, Homo sapien
tgttgacaaagagaacaggcatggt

SEQ ID NO: 4899524 - DNA, 25 bp, Homo sapien
caggcatggtatcttaagtagggca

SEQ ID NO: 4899525 - DNA, 25 bp, Homo sapien
tgtatgcagagctgacagggcaagt

SEQ ID NO: 4899526 - DNA, 25 bp, Homo sapien
agattttactctgaccccatttaat

SEQ ID NO: 4899527 - DNA, 25 bp, Homo sapien
tcttgagggcttttcgaagagatga

SEQ ID NO: 4899528 - DNA, 25 bp, Homo sapien
cccaagtagcttttaggagagattt

SEQ ID NO: 4899529 - DNA, 25 bp, Homo sapien
gggaccagtgtctgttccagataca

SEQ ID NO: 4899530 - DNA, 25 bp, Homo sapien
cacttgacaacatgagggcattggg

SEQ ID NO: 4899531 - DNA, 25 bp, Homo sapien
tactcagagggactttggacttccc

SEQ ID NO: 4899532 - DNA, 25 bp, Homo sapien
gtaacctattacatcagctcatctc

SEQ ID NO: 4899533 - DNA, 25 bp, Homo sapien
gctggaaatacgaagcttgagactt

SEQ ID NO: 4899534 - DNA, 25 bp, Homo sapien
tgttatcttctacttcatacatgga

SEQ ID NO: 4899535 - DNA, 25 bp, Homo sapien
caacagtatgtaccatctatatgga

SEQ ID NO: 4899536 - DNA, 25 bp, Homo sapien
gactaaaagtagcttacagttcaac

SEQ ID NO: 4899537 - DNA, 25 bp, Homo sapien
tctcttcctaaacatctgggataat

SEQ ID NO: 4899538 - DNA, 25 bp, Homo sapien
gagaagtagttcctgttcatgtaat

SEQ ID NO: 4899539 - DNA, 25 bp, Homo sapien
taatgggttcagtgttaagttggtc

SEQ ID NO: 4899540 - DNA, 25 bp, Homo sapien
taagttggtctacagctctctcgcc

SEQ ID NO: 4899541 - DNA, 25 bp, Homo sapien
tctctcgccagtaattccccttata

SEQ ID NO: 4899542 - DNA, 25 bp, Homo sapien
aaaatcattgcagaacacctccttt

SEQ ID NO: 4899543 - DNA, 25 bp, Homo sapien
tcctttcaatgccaagctccaattc

SEQ ID NO: 4899544 - DNA, 25 bp, Homo sapien
aatcattgcagaacacctcctttca

SEQ ID NO: 4899545 - DNA, 25 bp, Homo sapien
gctccaattcgtctgtggtttacaa

SEQ ID NO: 4899546 - DNA, 25 bp, Homo sapien
agatttcttcttgtagaagtaaact

SEQ ID NO: 4899547 - DNA, 25 bp, Homo sapien
tctttttcctctttgctcctgtcat

SEQ ID NO: 4899548 - DNA, 25 bp, Homo sapien
tttctttttcctctttgctcctgtc

SEQ ID NO: 4899549 - DNA, 25 bp, Homo sapien
tgcttttctttttcctctttgctcc

SEQ ID NO: 4899550 - DNA, 25 bp, Homo sapien
tgctccaaagcatgcttttcttttt

SEQ ID NO: 4899551 - DNA, 25 bp, Homo sapien
tctttcagattgtaatgtggtgccc

SEQ ID NO: 4899552 - DNA, 25 bp, Homo sapien
cagacacagtgtctggaagcaagtt

SEQ ID NO: 4899553 - DNA, 25 bp, Homo sapien
ccaatccaaaatgggcagtcgcctt

SEQ ID NO: 4899554 - DNA, 25 bp, Homo sapien
agtcgccttctacaccactgtataa

SEQ ID NO: 4899555 - DNA, 25 bp, Homo sapien
catgggctcaggtttacccaccaaa

SEQ ID NO: 4899556 - DNA, 25 bp, Homo sapien
ccatgggctcaggtttacccaccaa

SEQ ID NO: 4899557 - DNA, 25 bp, Homo sapien
gctcaggtttacccaccaaaatctg

SEQ ID NO: 4899558 - DNA, 25 bp, Homo sapien
gctggctgatgccttcttcccttac

SEQ ID NO: 4899559 - DNA, 25 bp, Homo sapien
ccatgatgctggctgatgccttctt

SEQ ID NO: 4899560 - DNA, 25 bp, Homo sapien
gatgctggctgatgccttcttccct

SEQ ID NO: 4899561 - DNA, 25 bp, Homo sapien
atgatgctggctgatgccttcttcc

SEQ ID NO: 4899562 - DNA, 25 bp, Homo sapien
ctgtagatgcatgagtctcagcagg

SEQ ID NO: 4899563 - DNA, 25 bp, Homo sapien
agcttgttggagacatgtgtttcaa

SEQ ID NO: 4899564 - DNA, 25 bp, Homo sapien
gcttgttggagacatgtgtttcaat

SEQ ID NO: 4899565 - DNA, 25 bp, Homo sapien
gagcttgttggagacatgtgtttca

SEQ ID NO: 4899566 - DNA, 25 bp, Homo sapien
ttgttggagacatgtgtttcaattc

SEQ ID NO: 4899567 - DNA, 25 bp, Homo sapien
ggatacatctgtgctgacaccatag

SEQ ID NO: 4899568 - DNA, 25 bp, Homo sapien
ccttgtatgtagcatttaggagtgc

SEQ ID NO: 4899569 - DNA, 25 bp, Homo sapien
agcttctattctgcaggttcccatg

SEQ ID NO: 4899570 - DNA, 25 bp, Homo sapien
gcaaggccatcgtctatccagggat

SEQ ID NO: 4899571 - DNA, 25 bp, Homo sapien
gataggacctggaacctacgagacc

SEQ ID NO: 4899572 - DNA, 25 bp, Homo sapien
gacctggaacctacgagaccttctg

SEQ ID NO: 4899573 - DNA, 25 bp, Homo sapien
cagggtgataggacctggaacctac

SEQ ID NO: 4899574 - DNA, 25 bp, Homo sapien
tggaacctacgagaccttctgtttc

SEQ ID NO: 4899575 - DNA, 25 bp, Homo sapien
tatcaaggaatagacacagtgttag

SEQ ID NO: 4899576 - DNA, 25 bp, Homo sapien
ttgcaaatgccgacagatacttatg

SEQ ID NO: 4899577 - DNA, 25 bp, Homo sapien
cactctctaatgctactatttcggg

SEQ ID NO: 4899578 - DNA, 25 bp, Homo sapien
taatgggtctcaaaagaggatggct

SEQ ID NO: 4899579 - DNA, 25 bp, Homo sapien
gtctgccttattacaataacagtca

SEQ ID NO: 4899580 - DNA, 25 bp, Homo sapien
tgaatagcgtgaatagctacctcct

SEQ ID NO: 4899581 - DNA, 25 bp, Homo sapien
aatagcgtgaatagctacctcctgc

SEQ ID NO: 4899582 - DNA, 25 bp, Homo sapien
catatgaatagcgtgaatagctacc

SEQ ID NO: 4899583 - DNA, 25 bp, Homo sapien
accaccttataaccccaagacacag

SEQ ID NO: 4899584 - DNA, 25 bp, Homo sapien
ccaccttataaccccaagacacagt

SEQ ID NO: 4899585 - DNA, 25 bp, Homo sapien
taaaccaaacactgggtgcacagat

SEQ ID NO: 4899586 - DNA, 25 bp, Homo sapien
ataaaccaaacactgggtgcacaga

SEQ ID NO: 4899587 - DNA, 25 bp, Homo sapien
ggcataaattatggcaggaaacaga

SEQ ID NO: 4899588 - DNA, 25 bp, Homo sapien
caaatatggcataaattatggcagg

SEQ ID NO: 4899589 - DNA, 25 bp, Homo sapien
catgatgtcccattccaaatatggc

SEQ ID NO: 4899590 - DNA, 25 bp, Homo sapien
ctgtggcaacatgatgtcccattcc

SEQ ID NO: 4899591 - DNA, 25 bp, Homo sapien
tacatatcgcatggttgaaaggtcc

SEQ ID NO: 4899592 - DNA, 25 bp, Homo sapien
aagaaaatggattgcccctagagcc

SEQ ID NO: 4899593 - DNA, 25 bp, Homo sapien
ggttcatgagccacactttaggcag

SEQ ID NO: 4899594 - DNA, 25 bp, Homo sapien
gagaatttgaagatgcgatactgca

SEQ ID NO: 4899595 - DNA, 25 bp, Homo sapien
tgaaaccaagtggtgtggggaatct

SEQ ID NO: 4899596 - DNA, 25 bp, Homo sapien
ctgaaaccaagtggtgtggggaatc

SEQ ID NO: 4899597 - DNA, 25 bp, Homo sapien
gatattaaggatgtcaaggcaaagg

SEQ ID NO: 4899598 - DNA, 25 bp, Homo sapien
ctgatattaaggatgtcaaggcaaa

SEQ ID NO: 4899599 - DNA, 25 bp, Homo sapien
attaaggatgtcaaggcaaaggtgc

SEQ ID NO: 4899600 - DNA, 25 bp, Homo sapien
tattaaggatgtcaaggcaaaggtg

SEQ ID NO: 4899601 - DNA, 25 bp, Homo sapien
gcatttcaaagtcggataagcccag

SEQ ID NO: 4899602 - DNA, 25 bp, Homo sapien
tgaatcacacctcccaagaaggaaa

SEQ ID NO: 4899603 - DNA, 25 bp, Homo sapien
acgcttgtgttactctgtgtggtga

SEQ ID NO: 4899604 - DNA, 25 bp, Homo sapien
tgttctgagggacaatccgttccac

SEQ ID NO: 4899605 - DNA, 25 bp, Homo sapien
cattgcgctgatcacaggctctgtg

SEQ ID NO: 4899606 - DNA, 25 bp, Homo sapien
tatatggcattttcattcccaagag

SEQ ID NO: 4899607 - DNA, 25 bp, Homo sapien
actgcccagttgcagcacaaacatg

SEQ ID NO: 4899608 - DNA, 25 bp, Homo sapien
ccaagtggtccggatatatatggca

SEQ ID NO: 4899609 - DNA, 25 bp, Homo sapien
tatctctcatcagcctgaattactt

SEQ ID NO: 4899610 - DNA, 25 bp, Homo sapien
ttatctctcatcagcctgaattact

SEQ ID NO: 4899611 - DNA, 25 bp, Homo sapien
atctctcatcagcctgaattacttt

SEQ ID NO: 4899612 - DNA, 25 bp, Homo sapien
ctggaattttgttgtctggaaattt

SEQ ID NO: 4899613 - DNA, 25 bp, Homo sapien
tggaattttgttgtctggaaattta

SEQ ID NO: 4899614 - DNA, 25 bp, Homo sapien
attttgttgtctggaaatttaacat

SEQ ID NO: 4899615 - DNA, 25 bp, Homo sapien
tgctcagcaaggataaaagcaatgc

SEQ ID NO: 4899616 - DNA, 25 bp, Homo sapien
gcttccagtcgcacagacttgatgt

SEQ ID NO: 4899617 - DNA, 25 bp, Homo sapien
ccttttaaactgttcattcagctct

SEQ ID NO: 4899618 - DNA, 25 bp, Homo sapien
gaacaaggaccacaatgctcagcaa

SEQ ID NO: 4899619 - DNA, 25 bp, Homo sapien
gaccaactacttctaatccatatgt

SEQ ID NO: 4899620 - DNA, 25 bp, Homo sapien
tattggtgcaataacaagcaaatga

SEQ ID NO: 4899621 - DNA, 25 bp, Homo sapien
ccttgtggaatatgaccaactactt

SEQ ID NO: 4899622 - DNA, 25 bp, Homo sapien
catatgtgttttccatattggtgca

SEQ ID NO: 4899623 - DNA, 25 bp, Homo sapien
ctgaagcaatgctgcataaagcaat

SEQ ID NO: 4899624 - DNA, 25 bp, Homo sapien
tgaagcaatgctgcataaagcaatt

SEQ ID NO: 4899625 - DNA, 25 bp, Homo sapien
tttgaattttttggcagatccttga

SEQ ID NO: 4899626 - DNA, 25 bp, Homo sapien
tggttgtcatcaattgaatatttga

SEQ ID NO: 4899627 - DNA, 25 bp, Homo sapien
tacaagtgccactccgaaagcttca

SEQ ID NO: 4899628 - DNA, 25 bp, Homo sapien
gaaagcttcagtgatcaccgcagag

SEQ ID NO: 4899629 - DNA, 25 bp, Homo sapien
taggatctgggagtgcacagtgcaa

SEQ ID NO: 4899630 - DNA, 25 bp, Homo sapien
caatgatacaactggagtggagagg

SEQ ID NO: 4899631 - DNA, 25 bp, Homo sapien
cagtgcaatgatacaactggagtgg

SEQ ID NO: 4899632 - DNA, 25 bp, Homo sapien
tgcacagtgcaatgatacaactgga

SEQ ID NO: 4899633 - DNA, 25 bp, Homo sapien
ttaggtcacatcagtcaggtttttc

SEQ ID NO: 4899634 - DNA, 25 bp, Homo sapien
tttaatgctctctgtcatcaatttc

SEQ ID NO: 4899635 - DNA, 25 bp, Homo sapien
aatgctctctgtcatcaatttctcc

SEQ ID NO: 4899636 - DNA, 25 bp, Homo sapien
cctccatctttaggtcacatcagtc

SEQ ID NO: 4899637 - DNA, 25 bp, Homo sapien
gcagcacttggtatgcagaagaaaa

SEQ ID NO: 4899638 - DNA, 25 bp, Homo sapien
tgtgtcttcgctcctgtgctgtaca

SEQ ID NO: 4899639 - DNA, 25 bp, Homo sapien
ctgtgctgtacaggccagccgtcct

SEQ ID NO: 4899640 - DNA, 25 bp, Homo sapien
gaaactatattgctgaggccatggg

SEQ ID NO: 4899641 - DNA, 25 bp, Homo sapien
tccctgcagagcaccagcggatctc

SEQ ID NO: 4899642 - DNA, 25 bp, Homo sapien
ctccctgcagagcaccagcggatct

SEQ ID NO: 4899643 - DNA, 25 bp, Homo sapien
ccctgcagagcaccagcggatctcc

SEQ ID NO: 4899644 - DNA, 25 bp, Homo sapien
cctgcagagcaccagcggatctcct

SEQ ID NO: 4899645 - DNA, 25 bp, Homo sapien
gactataaggacgaaaatgcaagat

SEQ ID NO: 4899646 - DNA, 25 bp, Homo sapien
agcaaaggtcctattgcatagatga

SEQ ID NO: 4899647 - DNA, 25 bp, Homo sapien
aaatgcaagatattagacaagccac

SEQ ID NO: 4899648 - DNA, 25 bp, Homo sapien
tattgcatagatgactataaggacg

SEQ ID NO: 4899649 - DNA, 25 bp, Homo sapien
tggagactggctctcataagcccag

SEQ ID NO: 4899650 - DNA, 25 bp, Homo sapien
tgaacatcatgaagctaaatgccct

SEQ ID NO: 4899651 - DNA, 25 bp, Homo sapien
gaagcactggcactaatgttctgaa

SEQ ID NO: 4899652 - DNA, 25 bp, Homo sapien
gaatatgcctagttccactctccag

SEQ ID NO: 4899653 - DNA, 25 bp, Homo sapien
caacaataatgcttgcaaggacaca

SEQ ID NO: 4899654 - DNA, 25 bp, Homo sapien
ttcagtcccacaacaataatgcttg

SEQ ID NO: 4899655 - DNA, 25 bp, Homo sapien
ttttaaatctcggaactgtattagc

SEQ ID NO: 4899656 - DNA, 25 bp, Homo sapien
tgtattagcattcccttcagtccca

SEQ ID NO: 4899657 - DNA, 25 bp, Homo sapien
cttgggaagcgtcctatcactatag

SEQ ID NO: 4899658 - DNA, 25 bp, Homo sapien
cacattggcagcaaagcatattgta

SEQ ID NO: 4899659 - DNA, 25 bp, Homo sapien
tagctatggtacaaacaacaccaaa

SEQ ID NO: 4899660 - DNA, 25 bp, Homo sapien
gcagcaaagcatattgtaaatacat

SEQ ID NO: 4899661 - DNA, 25 bp, Homo sapien
tcactttaaattccatttctttcat

SEQ ID NO: 4899662 - DNA, 25 bp, Homo sapien
attttttatacttacagtcattgct

SEQ ID NO: 4899663 - DNA, 25 bp, Homo sapien
actgtccatttctgtcttcacttta

SEQ ID NO: 4899664 - DNA, 25 bp, Homo sapien
tcatattttttatacttacagtcat

SEQ ID NO: 4899665 - DNA, 25 bp, Homo sapien
aaatgattaacaattgcataaagga

SEQ ID NO: 4899666 - DNA, 25 bp, Homo sapien
aatgattaacaattgcataaaggaa

SEQ ID NO: 4899667 - DNA, 25 bp, Homo sapien
caaaatgattaacaattgcataaag

SEQ ID NO: 4899668 - DNA, 25 bp, Homo sapien
aaaatgattaacaattgcataaagg

SEQ ID NO: 4899669 - DNA, 25 bp, Homo sapien
tttggaggagaaaaacagattcaga

SEQ ID NO: 4899670 - DNA, 25 bp, Homo sapien
tggaggagaaaaacagattcagaac

SEQ ID NO: 4899671 - DNA, 25 bp, Homo sapien
ggaggagaaaaacagattcagaact

SEQ ID NO: 4899672 - DNA, 25 bp, Homo sapien
cttttggaggagaaaaacagattca

SEQ ID NO: 4899673 - DNA, 25 bp, Homo sapien
atcatcaagtggctgattacaggca

SEQ ID NO: 4899674 - DNA, 25 bp, Homo sapien
ggatcatgttcattaaatcagtata

SEQ ID NO: 4899675 - DNA, 25 bp, Homo sapien
cattcaggaaaacaagcgggttgtt

SEQ ID NO: 4899676 - DNA, 25 bp, Homo sapien
acaagcgggttgtttattgagataa

SEQ ID NO: 4899677 - DNA, 25 bp, Homo sapien
gatagggaattaagcaatgtgtttt

SEQ ID NO: 4899678 - DNA, 25 bp, Homo sapien
ttggatagggaattaagcaatgtgt

SEQ ID NO: 4899679 - DNA, 25 bp, Homo sapien
ccattggatagggaattaagcaatg

SEQ ID NO: 4899680 - DNA, 25 bp, Homo sapien
gaattaagcaatgtgttttgttcac

SEQ ID NO: 4899681 - DNA, 25 bp, Homo sapien
taactagctgcatgatccagagcaa

SEQ ID NO: 4899682 - DNA, 25 bp, Homo sapien
gcaagttaagtctcccatacgggcc

SEQ ID NO: 4899683 - DNA, 25 bp, Homo sapien
tgcaggctgcatttagaccaatcct

SEQ ID NO: 4899684 - DNA, 25 bp, Homo sapien
tatatagcctactttcaacagggac

SEQ ID NO: 4899685 - DNA, 25 bp, Homo sapien
ttccagctggtgttcattacactgc

SEQ ID NO: 4899686 - DNA, 25 bp, Homo sapien
agttccagctggtgttcattacact

SEQ ID NO: 4899687 - DNA, 25 bp, Homo sapien
gtttcagaatcatcatttgtattgt

SEQ ID NO: 4899688 - DNA, 25 bp, Homo sapien
gttccagctggtgttcattacactg

SEQ ID NO: 4899689 - DNA, 25 bp, Homo sapien
cactgcaatccaggattaaataaca

SEQ ID NO: 4899690 - DNA, 25 bp, Homo sapien
aggattaaataacacttctcattag

SEQ ID NO: 4899691 - DNA, 25 bp, Homo sapien
atccaggattaaataacacttctca

SEQ ID NO: 4899692 - DNA, 25 bp, Homo sapien
acacttctcattagggcaggactgt

SEQ ID NO: 4899693 - DNA, 25 bp, Homo sapien
cacactcctgcctttacagtccatg

SEQ ID NO: 4899694 - DNA, 25 bp, Homo sapien
tcctgcctttacagtccatgtaaac

SEQ ID NO: 4899695 - DNA, 25 bp, Homo sapien
cactcctgcctttacagtccatgta

SEQ ID NO: 4899696 - DNA, 25 bp, Homo sapien
actcctgcctttacagtccatgtaa

SEQ ID NO: 4899697 - DNA, 25 bp, Homo sapien
tttgaatggatatgacttattgcag

SEQ ID NO: 4899698 - DNA, 25 bp, Homo sapien
ttgcagcagataccgattcaaaaaa

SEQ ID NO: 4899699 - DNA, 25 bp, Homo sapien
tatgacttattgcagcagataccga

SEQ ID NO: 4899700 - DNA, 25 bp, Homo sapien
gaatggatatgacttattgcagcag

SEQ ID NO: 4899701 - DNA, 25 bp, Homo sapien
tcagagcggtggcattgttggaaga

SEQ ID NO: 4899702 - DNA, 25 bp, Homo sapien
gaagatccaagttatcaaacaacag

SEQ ID NO: 4899703 - DNA, 25 bp, Homo sapien
cattgttggaagatccaagttatca

SEQ ID NO: 4899704 - DNA, 25 bp, Homo sapien
gttatcaaacaacagtttataactg

SEQ ID NO: 4899705 - DNA, 25 bp, Homo sapien
cttagaggcaagatatcagagcaga

SEQ ID NO: 4899706 - DNA, 25 bp, Homo sapien
tttgcaaatgataggcaaccaccca

SEQ ID NO: 4899707 - DNA, 25 bp, Homo sapien
gatcatgtgagcactagattctaca

SEQ ID NO: 4899708 - DNA, 25 bp, Homo sapien
tacaatagggatgactctgcgaggc

SEQ ID NO: 4899709 - DNA, 25 bp, Homo sapien
tcactgtggtcactgagtttgctca

SEQ ID NO: 4899710 - DNA, 25 bp, Homo sapien
tgtggtcactgagtttgctcaaatt

SEQ ID NO: 4899711 - DNA, 25 bp, Homo sapien
actgtggtcactgagtttgctcaaa

SEQ ID NO: 4899712 - DNA, 25 bp, Homo sapien
tcagacttcactgtggtcactgagt

SEQ ID NO: 4899713 - DNA, 25 bp, Homo sapien
cgtacttattgtagcagaggtcatc

SEQ ID NO: 4899714 - DNA, 25 bp, Homo sapien
gctatgcagttactaagtcacatcg

SEQ ID NO: 4899715 - DNA, 25 bp, Homo sapien
ggatacccgtttctttcgattatga

SEQ ID NO: 4899716 - DNA, 25 bp, Homo sapien
tatttcagaggcctatacagagaga

SEQ ID NO: 4899717 - DNA, 25 bp, Homo sapien
tagtgataaagagactgaggctacc

SEQ ID NO: 4899718 - DNA, 25 bp, Homo sapien
tgaggctaccatagggacaaacact

SEQ ID NO: 4899719 - DNA, 25 bp, Homo sapien
gtgaatattaccatccgccattgga

SEQ ID NO: 4899720 - DNA, 25 bp, Homo sapien
cacttggcaggcactagaatttact

SEQ ID NO: 4899721 - DNA, 25 bp, Homo sapien
cacttgaatcatataatcgggagca

SEQ ID NO: 4899722 - DNA, 25 bp, Homo sapien
gattgtgaaagtaccacttaactcc

SEQ ID NO: 4899723 - DNA, 25 bp, Homo sapien
taactgcagcatattagactacatg

SEQ ID NO: 4899724 - DNA, 25 bp, Homo sapien
tgtcaagcattatccatacagggta

SEQ ID NO: 4899725 - DNA, 25 bp, Homo sapien
tgcaactcgggctacagaacattgt

SEQ ID NO: 4899726 - DNA, 25 bp, Homo sapien
cactaaatctattacccatggaatg

SEQ ID NO: 4899727 - DNA, 25 bp, Homo sapien
tcacattgccggtgctctgggcaag

SEQ ID NO: 4899728 - DNA, 25 bp, Homo sapien
taaactacagtaagcatattccaga

SEQ ID NO: 4899729 - DNA, 25 bp, Homo sapien
cgtcggatgtgatttgcaacaagca

SEQ ID NO: 4899730 - DNA, 25 bp, Homo sapien
gaagcacacccaattagcatgtgag

SEQ ID NO: 4899731 - DNA, 25 bp, Homo sapien
ccttattgtagcgtgaaagcgcctc

SEQ ID NO: 4899732 - DNA, 25 bp, Homo sapien
tgaattccatgtcagggcagaaggt

SEQ ID NO: 4899733 - DNA, 25 bp, Homo sapien
ttcctagcccttgttttgcaccctg

SEQ ID NO: 4899734 - DNA, 25 bp, Homo sapien
gaaaggtttctggaatgctttacca

SEQ ID NO: 4899735 - DNA, 25 bp, Homo sapien
tttgcaccctgcaaggaaaggtttc

SEQ ID NO: 4899736 - DNA, 25 bp, Homo sapien
ccctgcaaggaaaggtttctggaat

SEQ ID NO: 4899737 - DNA, 25 bp, Homo sapien
agcacaataatgtcaaggacaatca

SEQ ID NO: 4899738 - DNA, 25 bp, Homo sapien
gccagcgctggaagcacaataatgt

SEQ ID NO: 4899739 - DNA, 25 bp, Homo sapien
gcacaataatgtcaaggacaatcat

SEQ ID NO: 4899740 - DNA, 25 bp, Homo sapien
ctggccagcgctggaagcacaataa

SEQ ID NO: 4899741 - DNA, 25 bp, Homo sapien
ggaatgccaccaggaacaaattaaa

SEQ ID NO: 4899742 - DNA, 25 bp, Homo sapien
caggaacaaattaaaatagtcagtc

SEQ ID NO: 4899743 - DNA, 25 bp, Homo sapien
ctggaatgccaccaggaacaaatta

SEQ ID NO: 4899744 - DNA, 25 bp, Homo sapien
tgccaccaggaacaaattaaaatag

SEQ ID NO: 4899745 - DNA, 25 bp, Homo sapien
tagtaacaatgccggcagcagccac

SEQ ID NO: 4899746 - DNA, 25 bp, Homo sapien
ttagtaacaatgccggcagcagcca

SEQ ID NO: 4899747 - DNA, 25 bp, Homo sapien
agtaacaatgccggcagcagccaca

SEQ ID NO: 4899748 - DNA, 25 bp, Homo sapien
ttacatttggcagaatggtaggcat

SEQ ID NO: 4899749 - DNA, 25 bp, Homo sapien
tttttacatttggcagaatggtagg

SEQ ID NO: 4899750 - DNA, 25 bp, Homo sapien
cctttttacatttggcagaatggta

SEQ ID NO: 4899751 - DNA, 25 bp, Homo sapien
agtgccttgtttatgcctttttaca

SEQ ID NO: 4899752 - DNA, 25 bp, Homo sapien
gtactcagaggtgatagagcttctc

SEQ ID NO: 4899753 - DNA, 25 bp, Homo sapien
ttctctaagcagctccactttgcac

SEQ ID NO: 4899754 - DNA, 25 bp, Homo sapien
tctccttccgggtatcaaagcagct

SEQ ID NO: 4899755 - DNA, 25 bp, Homo sapien
actgtgcttgttgacaaacacactg

SEQ ID NO: 4899756 - DNA, 25 bp, Homo sapien
ctgcccaggaacacctacctttgcc

SEQ ID NO: 4899757 - DNA, 25 bp, Homo sapien
ccaggaacacctacctttgccttca

SEQ ID NO: 4899758 - DNA, 25 bp, Homo sapien
tgcccaggaacacctacctttgcct

SEQ ID NO: 4899759 - DNA, 25 bp, Homo sapien
acttttccccattctgcctgcttgt

SEQ ID NO: 4899760 - DNA, 25 bp, Homo sapien
tttccccattctgcctgcttgtctg

SEQ ID NO: 4899761 - DNA, 25 bp, Homo sapien
cacttttccccattctgcctgcttg

SEQ ID NO: 4899762 - DNA, 25 bp, Homo sapien
tggctcacttttccccattctgcct

SEQ ID NO: 4899763 - DNA, 25 bp, Homo sapien
cataggcttctaaaacctggtgctg

SEQ ID NO: 4899764 - DNA, 25 bp, Homo sapien
gggtcttgacataacagccataggc

SEQ ID NO: 4899765 - DNA, 25 bp, Homo sapien
tgccccagtggcatagcattggtgc

SEQ ID NO: 4899766 - DNA, 25 bp, Homo sapien
ccagtcgttcgctttgaatttgcct

SEQ ID NO: 4899767 - DNA, 25 bp, Homo sapien
agtcctggaggtcatgccatggatt

SEQ ID NO: 4899768 - DNA, 25 bp, Homo sapien
tgactgagggtacagctttaagcct

SEQ ID NO: 4899769 - DNA, 25 bp, Homo sapien
gcatattgagatccataaacttgtg

SEQ ID NO: 4899770 - DNA, 25 bp, Homo sapien
tggttaatatattgccacggattct

SEQ ID NO: 4899771 - DNA, 25 bp, Homo sapien
tcaaagtcacagtcatagagagtgt

SEQ ID NO: 4899772 - DNA, 25 bp, Homo sapien
catagagagtgtagctttcagtaag

SEQ ID NO: 4899773 - DNA, 25 bp, Homo sapien
cagtcatagagagtgtagctttcag

SEQ ID NO: 4899774 - DNA, 25 bp, Homo sapien
gtagctttcagtaagaataagtgac

SEQ ID NO: 4899775 - DNA, 25 bp, Homo sapien
tccaaaacacgacctaggtgatatg

SEQ ID NO: 4899776 - DNA, 25 bp, Homo sapien
tgtccacatccaaaacacgacctag

SEQ ID NO: 4899777 - DNA, 25 bp, Homo sapien
cgacctaggtgatatgccagtattt

SEQ ID NO: 4899778 - DNA, 25 bp, Homo sapien
tttccatcgtgaagtcaaggatgac

SEQ ID NO: 4899779 - DNA, 25 bp, Homo sapien
ctggtccagttgcactgccttttga

SEQ ID NO: 4899780 - DNA, 25 bp, Homo sapien
ctttgtcagcccacttagcatactg

SEQ ID NO: 4899781 - DNA, 25 bp, Homo sapien
gatagcctttccctactggtccagt

SEQ ID NO: 4899782 - DNA, 25 bp, Homo sapien
gccttttgatagcaacacctttgtc

SEQ ID NO: 4899783 - DNA, 25 bp, Homo sapien
tatctttatcatatctttccttcaa

SEQ ID NO: 4899784 - DNA, 25 bp, Homo sapien
tctttatcatatctttccttcaaat

SEQ ID NO: 4899785 - DNA, 25 bp, Homo sapien
cctatctttatcatatctttccttc

SEQ ID NO: 4899786 - DNA, 25 bp, Homo sapien
ctttatcatatctttccttcaaatt

SEQ ID NO: 4899787 - DNA, 25 bp, Homo sapien
tctgtcttcgcgctggatttagcag

SEQ ID NO: 4899788 - DNA, 25 bp, Homo sapien
gcagcttcataattccacacctctg

SEQ ID NO: 4899789 - DNA, 25 bp, Homo sapien
acacctctgtcaacgagacactcat

SEQ ID NO: 4899790 - DNA, 25 bp, Homo sapien
tgtcttcgcgctggatttagcagct

SEQ ID NO: 4899791 - DNA, 25 bp, Homo sapien
tctccttaactgatcgccaaaaagc

SEQ ID NO: 4899792 - DNA, 25 bp, Homo sapien
cttgtccagatgtttgttaggtccc

SEQ ID NO: 4899793 - DNA, 25 bp, Homo sapien
ccatccgttgccctagtgactagaa

SEQ ID NO: 4899794 - DNA, 25 bp, Homo sapien
tagaaagttagcacccagacgaagg

SEQ ID NO: 4899795 - DNA, 25 bp, Homo sapien
tgcctcggtgaccttcctttgtcct

SEQ ID NO: 4899796 - DNA, 25 bp, Homo sapien
gctttgccgatatctgcctcggtga

SEQ ID NO: 4899797 - DNA, 25 bp, Homo sapien
agagtgcttagatgagctttgccga

SEQ ID NO: 4899798 - DNA, 25 bp, Homo sapien
ttcttgagagagtgcttagatgagc

SEQ ID NO: 4899799 - DNA, 25 bp, Homo sapien
tggaggagggtcggtaggtacacag

SEQ ID NO: 4899800 - DNA, 25 bp, Homo sapien
ctggaggagggtcggtaggtacaca

SEQ ID NO: 4899801 - DNA, 25 bp, Homo sapien
acacaggaaaatttttgcaggctct

SEQ ID NO: 4899802 - DNA, 25 bp, Homo sapien
gaggagggtcggtaggtacacagga

SEQ ID NO: 4899803 - DNA, 25 bp, Homo sapien
tctacattgctgtcatctgctgaaa

SEQ ID NO: 4899804 - DNA, 25 bp, Homo sapien
ttccctttgaatggctactggcagc

SEQ ID NO: 4899805 - DNA, 25 bp, Homo sapien
taaggaagttgacttatctggtcct

SEQ ID NO: 4899806 - DNA, 25 bp, Homo sapien
agttgacttatctggtccttgctca

SEQ ID NO: 4899807 - DNA, 25 bp, Homo sapien
gaaggtagactcagaatgatccaaa

SEQ ID NO: 4899808 - DNA, 25 bp, Homo sapien
tcaattgaaggtagactcagaatga

SEQ ID NO: 4899809 - DNA, 25 bp, Homo sapien
tgaaggtagactcagaatgatccaa

SEQ ID NO: 4899810 - DNA, 25 bp, Homo sapien
attgaaggtagactcagaatgatcc

SEQ ID NO: 4899811 - DNA, 25 bp, Homo sapien
gtcttatgaacgctgaaggtgtcag

SEQ ID NO: 4899812 - DNA, 25 bp, Homo sapien
aaatgttgtcttatgaacgctgaag

SEQ ID NO: 4899813 - DNA, 25 bp, Homo sapien
tgaacgctgaaggtgtcagaaccat

SEQ ID NO: 4899814 - DNA, 25 bp, Homo sapien
catctgggttacatctggtgacata

SEQ ID NO: 4899815 - DNA, 25 bp, Homo sapien
gataaagtcagtgatgatttttctg

SEQ ID NO: 4899816 - DNA, 25 bp, Homo sapien
tcttatattcagttactgtttctgc

SEQ ID NO: 4899817 - DNA, 25 bp, Homo sapien
agcagaaatagctctagaggtttct

SEQ ID NO: 4899818 - DNA, 25 bp, Homo sapien
agtcatctccgaagtgataaagtca

SEQ ID NO: 4899819 - DNA, 25 bp, Homo sapien
aatggtttcttgagtaaggatgtgc

SEQ ID NO: 4899820 - DNA, 25 bp, Homo sapien
ttcttgagtaaggatgtgcagtgtt

SEQ ID NO: 4899821 - DNA, 25 bp, Homo sapien
tcaggtaatggtttcttgagtaagg

SEQ ID NO: 4899822 - DNA, 25 bp, Homo sapien
caggtaatggtttcttgagtaagga

SEQ ID NO: 4899823 - DNA, 25 bp, Homo sapien
tcagcccacattagagaaggaattt

SEQ ID NO: 4899824 - DNA, 25 bp, Homo sapien
cagcacaagtgcctacagctgattt

SEQ ID NO: 4899825 - DNA, 25 bp, Homo sapien
cagagttaaactggccattttccca

SEQ ID NO: 4899826 - DNA, 25 bp, Homo sapien
aaggaatttcgagccttcagagtta

SEQ ID NO: 4899827 - DNA, 25 bp, Homo sapien
tagtcagccggatcagatgaatcaa

SEQ ID NO: 4899828 - DNA, 25 bp, Homo sapien
gacactcgcctagtcagccggatca

SEQ ID NO: 4899829 - DNA, 25 bp, Homo sapien
ctcgcctagtcagccggatcagatg

SEQ ID NO: 4899830 - DNA, 25 bp, Homo sapien
cctagtcagccggatcagatgaatc

SEQ ID NO: 4899831 - DNA, 25 bp, Homo sapien
tgcctgtccccatagtcatcagtgt

SEQ ID NO: 4899832 - DNA, 25 bp, Homo sapien
tatcaggatttagagcaaggtattc

SEQ ID NO: 4899833 - DNA, 25 bp, Homo sapien
tagtgagttccttatcagacctagc

SEQ ID NO: 4899834 - DNA, 25 bp, Homo sapien
caagtagcatggagcaattaactca

SEQ ID NO: 4899835 - DNA, 25 bp, Homo sapien
acattcacagccaatgagtgtaata

SEQ ID NO: 4899836 - DNA, 25 bp, Homo sapien
atgggctaaagcattcccgatggtt

SEQ ID NO: 4899837 - DNA, 25 bp, Homo sapien
ctaaagcattcccgatggttcctac

SEQ ID NO: 4899838 - DNA, 25 bp, Homo sapien
tgggctaaagcattcccgatggttc

SEQ ID NO: 4899839 - DNA, 25 bp, Homo sapien
ggctaaagcattcccgatggttcct

SEQ ID NO: 4899840 - DNA, 25 bp, Homo sapien
cgtccaggaggtcaataatgaggat

SEQ ID NO: 4899841 - DNA, 25 bp, Homo sapien
caataatgaggatatagcctaatgg

SEQ ID NO: 4899842 - DNA, 25 bp, Homo sapien
gtccaggaggtcaataatgaggata

SEQ ID NO: 4899843 - DNA, 25 bp, Homo sapien
taatgaggatatagcctaatggcat

SEQ ID NO: 4899844 - DNA, 25 bp, Homo sapien
atgagagggattgttgtccttttcc

SEQ ID NO: 4899845 - DNA, 25 bp, Homo sapien
tttttaagaacgctctggcccaggc

SEQ ID NO: 4899846 - DNA, 25 bp, Homo sapien
tggatgagagggattgttgtccttt

SEQ ID NO: 4899847 - DNA, 25 bp, Homo sapien
gattgatttttaagaacgctctggc

SEQ ID NO: 4899848 - DNA, 25 bp, Homo sapien
aggactctgaacagcattaccacag

SEQ ID NO: 4899849 - DNA, 25 bp, Homo sapien
gactctgaacagcattaccacagcg

SEQ ID NO: 4899850 - DNA, 25 bp, Homo sapien
gaacagcattaccacagcgtttctc

SEQ ID NO: 4899851 - DNA, 25 bp, Homo sapien
tctgaacagcattaccacagcgttt

SEQ ID NO: 4899852 - DNA, 25 bp, Homo sapien
ctgccctggcgcatgacgctcatga

SEQ ID NO: 4899853 - DNA, 25 bp, Homo sapien
tggcgcatgacgctcatgaaagctg

SEQ ID NO: 4899854 - DNA, 25 bp, Homo sapien
gacgctcatgaaagctggctcaatg

SEQ ID NO: 4899855 - DNA, 25 bp, Homo sapien
gctggctcaatgatagctaattgtc

SEQ ID NO: 4899856 - DNA, 25 bp, Homo sapien
cccggtaggagaggttaattagcag

SEQ ID NO: 4899857 - DNA, 25 bp, Homo sapien
tcatttggcaacccggtaggagagg

SEQ ID NO: 4899858 - DNA, 25 bp, Homo sapien
catttggcaacccggtaggagaggt

SEQ ID NO: 4899859 - DNA, 25 bp, Homo sapien
taggagaggttaattagcagggaga

SEQ ID NO: 4899860 - DNA, 25 bp, Homo sapien
tgcctccccggagttagttgcttct

SEQ ID NO: 4899861 - DNA, 25 bp, Homo sapien
gatatgtctctaggtgtcctctcct

SEQ ID NO: 4899862 - DNA, 25 bp, Homo sapien
cacattctcagttccaggtacatga

SEQ ID NO: 4899863 - DNA, 25 bp, Homo sapien
cacagcaaggagagtcttctggtct

SEQ ID NO: 4899864 - DNA, 25 bp, Homo sapien
agtatggctgtaaatgaacatgtcc

SEQ ID NO: 4899865 - DNA, 25 bp, Homo sapien
tgtatatgtatgtgagttaatctcc

SEQ ID NO: 4899866 - DNA, 25 bp, Homo sapien
aatcaacttgtgaagcaatgtcagc

SEQ ID NO: 4899867 - DNA, 25 bp, Homo sapien
tcattctttaggagatacatcctga

SEQ ID NO: 4899868 - DNA, 25 bp, Homo sapien
gagggcagattgcaagggccttgaa

SEQ ID NO: 4899869 - DNA, 25 bp, Homo sapien
aagcactatgaagggctcgttatca

SEQ ID NO: 4899870 - DNA, 25 bp, Homo sapien
ggcttctcataagtgtccaggcaca

SEQ ID NO: 4899871 - DNA, 25 bp, Homo sapien
tcgttatcaggtgggattttctgga

SEQ ID NO: 4899872 - DNA, 25 bp, Homo sapien
ttgaagaattctgggatgctcctct

SEQ ID NO: 4899873 - DNA, 25 bp, Homo sapien
tccttgaagaattctgggatgctcc

SEQ ID NO: 4899874 - DNA, 25 bp, Homo sapien
ccttgaagaattctgggatgctcct

SEQ ID NO: 4899875 - DNA, 25 bp, Homo sapien
gaagaattctgggatgctcctcttt

SEQ ID NO: 4899876 - DNA, 25 bp, Homo sapien
tctactgctgcccgccatgcctggt

SEQ ID NO: 4899877 - DNA, 25 bp, Homo sapien
ttctactgctgcccgccatgcctgg

SEQ ID NO: 4899878 - DNA, 25 bp, Homo sapien
cccgccatgcctggttcaccaaagc

SEQ ID NO: 4899879 - DNA, 25 bp, Homo sapien
atccgttacccaaactgcctcgtat

SEQ ID NO: 4899880 - DNA, 25 bp, Homo sapien
gtatcaccctagcagaaggccagca

SEQ ID NO: 4899881 - DNA, 25 bp, Homo sapien
ctcgtatcaccctagcagaaggcca

SEQ ID NO: 4899882 - DNA, 25 bp, Homo sapien
ctgcctcgtatcaccctagcagaag

SEQ ID NO: 4899883 - DNA, 25 bp, Homo sapien
ttacatcagatccttcccactaaga

SEQ ID NO: 4899884 - DNA, 25 bp, Homo sapien
acaacttagctctcgaatgccacct

SEQ ID NO: 4899885 - DNA, 25 bp, Homo sapien
taagatatagtctttctatgaagct

SEQ ID NO: 4899886 - DNA, 25 bp, Homo sapien
tcttccagattctcaacaaattcct

SEQ ID NO: 4899887 - DNA, 25 bp, Homo sapien
ctctaaaggtgttaccctctaagag

SEQ ID NO: 4899888 - DNA, 25 bp, Homo sapien
ctaaaggtgttaccctctaagagtg

SEQ ID NO: 4899889 - DNA, 25 bp, Homo sapien
aaaggtgttaccctctaagagtgtg

SEQ ID NO: 4899890 - DNA, 25 bp, Homo sapien
catggctgtccacaattgagtagaa

SEQ ID NO: 4899891 - DNA, 25 bp, Homo sapien
ggatcctcccctgctaaagaattta

SEQ ID NO: 4899892 - DNA, 25 bp, Homo sapien
caagccaggttaagattttccaggg

SEQ ID NO: 4899893 - DNA, 25 bp, Homo sapien
tccagggtttaacgtcagacaagcc

SEQ ID NO: 4899894 - DNA, 25 bp, Homo sapien
ttcttggggttagaactgactgaac

SEQ ID NO: 4899895 - DNA, 25 bp, Homo sapien
tgatttacactcctgtttattccaa

SEQ ID NO: 4899896 - DNA, 25 bp, Homo sapien
taatcctttcccaagcccatacatt

SEQ ID NO: 4899897 - DNA, 25 bp, Homo sapien
gactgaacccatgaatgatttacac

SEQ ID NO: 4899898 - DNA, 25 bp, Homo sapien
tggcacaatcttatcaaattacttg

SEQ ID NO: 4899899 - DNA, 25 bp, Homo sapien
gagaagtgtaggtttatctttcagt

SEQ ID NO: 4899900 - DNA, 25 bp, Homo sapien
taggcactaaattggcgttttggca

SEQ ID NO: 4899901 - DNA, 25 bp, Homo sapien
gagactgtgatttccgaatagttgg

SEQ ID NO: 4899902 - DNA, 25 bp, Homo sapien
gatagtcaggattcctcctaccaaa

SEQ ID NO: 4899903 - DNA, 25 bp, Homo sapien
ctcattgatagtcaggattcctcct

SEQ ID NO: 4899904 - DNA, 25 bp, Homo sapien
ggttgttctgtcccattttgtagct

SEQ ID NO: 4899905 - DNA, 25 bp, Homo sapien
caggattcctcctaccaaaatattg

SEQ ID NO: 4899906 - DNA, 25 bp, Homo sapien
tgcctcttgcttgtcacacggctgg

SEQ ID NO: 4899907 - DNA, 25 bp, Homo sapien
gggagcaggtttcgtgacacaattt

SEQ ID NO: 4899908 - DNA, 25 bp, Homo sapien
tcttgcttgtcacacggctgggagc

SEQ ID NO: 4899909 - DNA, 25 bp, Homo sapien
tctcaatttcttcataggtaaaaga

SEQ ID NO: 4899910 - DNA, 25 bp, Homo sapien
catcagctgtgggatgtttttcttt

SEQ ID NO: 4899911 - DNA, 25 bp, Homo sapien
taaggggacatcttatttctatgca

SEQ ID NO: 4899912 - DNA, 25 bp, Homo sapien
tggatttagtagtcctttgcacact

SEQ ID NO: 4899913 - DNA, 25 bp, Homo sapien
ataaatggatttagtagtcctttgc

SEQ ID NO: 4899914 - DNA, 25 bp, Homo sapien
tgtttggttaggctttggagccctc

SEQ ID NO: 4899915 - DNA, 25 bp, Homo sapien
gtctgatcagccagtattctgtttg

SEQ ID NO: 4899916 - DNA, 25 bp, Homo sapien
actgatgatatgctgatgtctgatc

SEQ ID NO: 4899917 - DNA, 25 bp, Homo sapien
ttctccaggcattaagataagcacc

SEQ ID NO: 4899918 - DNA, 25 bp, Homo sapien
gggcaagaacataccaactcaggtc

SEQ ID NO: 4899919 - DNA, 25 bp, Homo sapien
cataacgtggtagagagcatcacat

SEQ ID NO: 4899920 - DNA, 25 bp, Homo sapien
tttcacattgggtgcagtgtacact

SEQ ID NO: 4899921 - DNA, 25 bp, Homo sapien
tctgaatagtaagaagtccaagagc

SEQ ID NO: 4899922 - DNA, 25 bp, Homo sapien
tcttttaatcctgtaggagtaatta

SEQ ID NO: 4899923 - DNA, 25 bp, Homo sapien
ctgtaggagtaattacatattctgt

SEQ ID NO: 4899924 - DNA, 25 bp, Homo sapien
tcctgtaggagtaattacatattct

SEQ ID NO: 4899925 - DNA, 25 bp, Homo sapien
taatcctgtaggagtaattacatat

SEQ ID NO: 4899926 - DNA, 25 bp, Homo sapien
ctgtgtttctagattgtaggagaaa

SEQ ID NO: 4899927 - DNA, 25 bp, Homo sapien
tgtgtttctagattgtaggagaaaa

SEQ ID NO: 4899928 - DNA, 25 bp, Homo sapien
gtgtttctagattgtaggagaaaac

SEQ ID NO: 4899929 - DNA, 25 bp, Homo sapien
ttggtgcccattcttttaatactgg

SEQ ID NO: 4899930 - DNA, 25 bp, Homo sapien
taggttgatacaagttttggtgccc

SEQ ID NO: 4899931 - DNA, 25 bp, Homo sapien
taatactggagcaagtggctgagca

SEQ ID NO: 4899932 - DNA, 25 bp, Homo sapien
gcagccattgcaccagggatcttct

SEQ ID NO: 4899933 - DNA, 25 bp, Homo sapien
tggtagttgtctaatcacgttgcac

SEQ ID NO: 4899934 - DNA, 25 bp, Homo sapien
tgcccgtggggttgagaaatccaac

SEQ ID NO: 4899935 - DNA, 25 bp, Homo sapien
aaatccaacagctccgtatgttggt

SEQ ID NO: 4899936 - DNA, 25 bp, Homo sapien
cgttgcactgcttgtctactcccat

SEQ ID NO: 4899937 - DNA, 25 bp, Homo sapien
catggatatagtggcaatagcttgc

SEQ ID NO: 4899938 - DNA, 25 bp, Homo sapien
ttgccggtgtggatcaaggagccca

SEQ ID NO: 4899939 - DNA, 25 bp, Homo sapien
gaatcgggaagctccttaatgcttt

SEQ ID NO: 4899940 - DNA, 25 bp, Homo sapien
taactgcttagacaggcacatggat

SEQ ID NO: 4899941 - DNA, 25 bp, Homo sapien
ccattatctggagcaaaaagttgtt

SEQ ID NO: 4899942 - DNA, 25 bp, Homo sapien
gaaatgcaagggatcccacgacact

SEQ ID NO: 4899943 - DNA, 25 bp, Homo sapien
ggaaattgtgttggccagcagtaaa

SEQ ID NO: 4899944 - DNA, 25 bp, Homo sapien
tttacacagtgaaagggaaatcaag

SEQ ID NO: 4899945 - DNA, 25 bp, Homo sapien
gctggcactcccagcaattccctgg

SEQ ID NO: 4899946 - DNA, 25 bp, Homo sapien
tccctggcatcacgggctggtgctg

SEQ ID NO: 4899947 - DNA, 25 bp, Homo sapien
aattccctggcatcacgggctggtg

SEQ ID NO: 4899948 - DNA, 25 bp, Homo sapien
tggcactcccagcaattccctggca

SEQ ID NO: 4899949 - DNA, 25 bp, Homo sapien
cttaaagtaagacttccgaaggcag

SEQ ID NO: 4899950 - DNA, 25 bp, Homo sapien
taagaagactcccatgactttgcac

SEQ ID NO: 4899951 - DNA, 25 bp, Homo sapien
gaaggcagtatctgatatccacctg

SEQ ID NO: 4899952 - DNA, 25 bp, Homo sapien
tcagaagaggtccatagagatcatt

SEQ ID NO: 4899953 - DNA, 25 bp, Homo sapien
tgccgtctgtactatttcgtgtttc

SEQ ID NO: 4899954 - DNA, 25 bp, Homo sapien
gccgtctgtactatttcgtgtttca

SEQ ID NO: 4899955 - DNA, 25 bp, Homo sapien
ccgtctgtactatttcgtgtttcat

SEQ ID NO: 4899956 - DNA, 25 bp, Homo sapien
gataccttgtgtcctctgcatagcc

SEQ ID NO: 4899957 - DNA, 25 bp, Homo sapien
tctgaatctgtatttgcggcacttc

SEQ ID NO: 4899958 - DNA, 25 bp, Homo sapien
tatttgggtatagtcctccttcagg

SEQ ID NO: 4899959 - DNA, 25 bp, Homo sapien
cttcaggcttggagcaatctcatgc

SEQ ID NO: 4899960 - DNA, 25 bp, Homo sapien
ctttgatcacaagctgaggtggaga

SEQ ID NO: 4899961 - DNA, 25 bp, Homo sapien
ctttctccattccattaattgggtc

SEQ ID NO: 4899962 - DNA, 25 bp, Homo sapien
gaggccctgataaggaataggttat

SEQ ID NO: 4899963 - DNA, 25 bp, Homo sapien
tagtaaagcagcctaaaggaatgaa

SEQ ID NO: 4899964 - DNA, 25 bp, Homo sapien
agttatatgtgttcaggcaggaatt

SEQ ID NO: 4899965 - DNA, 25 bp, Homo sapien
ctagttatatgtgttcaggcaggaa

SEQ ID NO: 4899966 - DNA, 25 bp, Homo sapien
tagttatatgtgttcaggcaggaat

SEQ ID NO: 4899967 - DNA, 25 bp, Homo sapien
gacatctgtgattctgtctgagtcc

SEQ ID NO: 4899968 - DNA, 25 bp, Homo sapien
catctgtgattctgtctgagtcctc

SEQ ID NO: 4899969 - DNA, 25 bp, Homo sapien
ctttggacatctgtgattctgtctg

SEQ ID NO: 4899970 - DNA, 25 bp, Homo sapien
agtcctcaaaatctgctacatccat

SEQ ID NO: 4899971 - DNA, 25 bp, Homo sapien
taaagtgcattctcacttcagtttt

SEQ ID NO: 4899972 - DNA, 25 bp, Homo sapien
ttgtcttcaatggaccaaatcctat

SEQ ID NO: 4899973 - DNA, 25 bp, Homo sapien
tggaccaaatcctatactagatccc

SEQ ID NO: 4899974 - DNA, 25 bp, Homo sapien
ccactcaacaaattccaattggttg

SEQ ID NO: 4899975 - DNA, 25 bp, Homo sapien
aatcctatactagatcccaggaaga

SEQ ID NO: 4899976 - DNA, 25 bp, Homo sapien
gcagggttgtaccacttgcttcttg

SEQ ID NO: 4899977 - DNA, 25 bp, Homo sapien
cagcctgataacaccttccctcagg

SEQ ID NO: 4899978 - DNA, 25 bp, Homo sapien
tgcagggttgtaccacttgcttctt

SEQ ID NO: 4899979 - DNA, 25 bp, Homo sapien
agatgcagcctgataacaccttccc

SEQ ID NO: 4899980 - DNA, 25 bp, Homo sapien
tcacatgatcattaattctttttct

SEQ ID NO: 4899981 - DNA, 25 bp, Homo sapien
gaccaaatagcagttacacttgggt

SEQ ID NO: 4899982 - DNA, 25 bp, Homo sapien
acagacatccaatttcacatgatca

SEQ ID NO: 4899983 - DNA, 25 bp, Homo sapien
cttgggtgaagaacaagttttgctg

SEQ ID NO: 4899984 - DNA, 25 bp, Homo sapien
tccttagcccaatatgctgtctcag

SEQ ID NO: 4899985 - DNA, 25 bp, Homo sapien
tagcccaatatgctgtctcaggtcc

SEQ ID NO: 4899986 - DNA, 25 bp, Homo sapien
tcaggtcctattctcgttctccagc

SEQ ID NO: 4899987 - DNA, 25 bp, Homo sapien
gctgtctcaggtcctattctcgttc

SEQ ID NO: 4899988 - DNA, 25 bp, Homo sapien
tttcccccaagtggagcccctcatc

SEQ ID NO: 4899989 - DNA, 25 bp, Homo sapien
tatccaggatgccaacccttggttc

SEQ ID NO: 4899990 - DNA, 25 bp, Homo sapien
tggaatgcctcctgtgaatcccttg

SEQ ID NO: 4899991 - DNA, 25 bp, Homo sapien
tctgcagggcaatccaacttttccc

SEQ ID NO: 4899992 - DNA, 25 bp, Homo sapien
atttcgagaacatatatgtgtggat

SEQ ID NO: 4899993 - DNA, 25 bp, Homo sapien
tatttcgagaacatatatgtgtgga

SEQ ID NO: 4899994 - DNA, 25 bp, Homo sapien
ctatttcgagaacatatatgtgtgg

SEQ ID NO: 4899995 - DNA, 25 bp, Homo sapien
cagaggagagtagtgaggtggacca

SEQ ID NO: 4899996 - DNA, 25 bp, Homo sapien
gcagatggttaagtggcccccatgg

SEQ ID NO: 4899997 - DNA, 25 bp, Homo sapien
cccatggtaggccttgcagaggaga

SEQ ID NO: 4899998 - DNA, 25 bp, Homo sapien
taagtggcccccatggtaggccttg

SEQ ID NO: 4899999 - DNA, 25 bp, Homo sapien
aggtgggtagcacagccaatccaat

SEQ ID NO: 4900000 - DNA, 25 bp, Homo sapien
cacaatggtgtaaaagggccggttg

SEQ ID NO: 4900001 - DNA, 25 bp, Homo sapien
gaaagtaagaggacttcatgtgcct

SEQ ID NO: 4900002 - DNA, 25 bp, Homo sapien
ctgagaaagtaagaggacttcatgt

SEQ ID NO: 4900003 - DNA, 25 bp, Homo sapien
gagaaagtaagaggacttcatgtgc

SEQ ID NO: 4900004 - DNA, 25 bp, Homo sapien
agtaagaggacttcatgtgcctatt

SEQ ID NO: 4900005 - DNA, 25 bp, Homo sapien
gactgtaatgtatggtctgtcaacc

SEQ ID NO: 4900006 - DNA, 25 bp, Homo sapien
gaaagcgactccatgttgtccgaat

SEQ ID NO: 4900007 - DNA, 25 bp, Homo sapien
gcaaagcatgcctacgtctggaata

SEQ ID NO: 4900008 - DNA, 25 bp, Homo sapien
tccgaattcctcaagggacagaaaa

SEQ ID NO: 4900009 - DNA, 25 bp, Homo sapien
caaagactgatctgatggaccaaaa

SEQ ID NO: 4900010 - DNA, 25 bp, Homo sapien
aaaggacagtgcatgcatattgctg

SEQ ID NO: 4900011 - DNA, 25 bp, Homo sapien
tagctgtagcatagagtagtcgtgg

SEQ ID NO: 4900012 - DNA, 25 bp, Homo sapien
gatcagcaggttaaacatgttcagc

SEQ ID NO: 4900013 - DNA, 25 bp, Homo sapien
ttcactctgtgcgatgacacaagtg

SEQ ID NO: 4900014 - DNA, 25 bp, Homo sapien
cacaagtgtgcttacagtactctcc

SEQ ID NO: 4900015 - DNA, 25 bp, Homo sapien
catccttttcatagacgcgcatcgg

SEQ ID NO: 4900016 - DNA, 25 bp, Homo sapien
gacgcgcatcgggaattccttcaca

SEQ ID NO: 4900017 - DNA, 25 bp, Homo sapien
taatgttcttgccagttgataatct

SEQ ID NO: 4900018 - DNA, 25 bp, Homo sapien
tacacaggagaatgcatagatattt

SEQ ID NO: 4900019 - DNA, 25 bp, Homo sapien
tccagtccatcctattattaagtag

SEQ ID NO: 4900020 - DNA, 25 bp, Homo sapien
tattaagtagtcatgacatcacagt

SEQ ID NO: 4900021 - DNA, 25 bp, Homo sapien
catttccattgttacagtgtatggc

SEQ ID NO: 4900022 - DNA, 25 bp, Homo sapien
gttatcctgtaggaagtcatttcca

SEQ ID NO: 4900023 - DNA, 25 bp, Homo sapien
tgacacaaggtatctaagctctctc

SEQ ID NO: 4900024 - DNA, 25 bp, Homo sapien
caatatattacccacatgttcatct

SEQ ID NO: 4900025 - DNA, 25 bp, Homo sapien
ggatgaggctccagacaatcctcct

SEQ ID NO: 4900026 - DNA, 25 bp, Homo sapien
aatggcagcggaagatgtttaggat

SEQ ID NO: 4900027 - DNA, 25 bp, Homo sapien
gtagaaacccagcatataaagcaac

SEQ ID NO: 4900028 - DNA, 25 bp, Homo sapien
tatctttgggcttcagacttgtttt

SEQ ID NO: 4900029 - DNA, 25 bp, Homo sapien
taacctggaactagcctatttgaag

SEQ ID NO: 4900030 - DNA, 25 bp, Homo sapien
ttagacatacaagtaatgcctggca

SEQ ID NO: 4900031 - DNA, 25 bp, Homo sapien
tgaagtcgttagatcccaggctgcc

SEQ ID NO: 4900032 - DNA, 25 bp, Homo sapien
tcactggaataaaggtggtaacagc

SEQ ID NO: 4900033 - DNA, 25 bp, Homo sapien
ctctgaaccttctctataaccttct

SEQ ID NO: 4900034 - DNA, 25 bp, Homo sapien
gctgtaccatgttggatatgcttgg

SEQ ID NO: 4900035 - DNA, 25 bp, Homo sapien
taccatgttggatatgcttgggctc

SEQ ID NO: 4900036 - DNA, 25 bp, Homo sapien
ccatgttggatatgcttgggctcat

SEQ ID NO: 4900037 - DNA, 25 bp, Homo sapien
tgtaccatgttggatatgcttgggc

SEQ ID NO: 4900038 - DNA, 25 bp, Homo sapien
ccgcaaatacagagacttaggtagt

SEQ ID NO: 4900039 - DNA, 25 bp, Homo sapien
agacttaggtagtatttgtgttcca

SEQ ID NO: 4900040 - DNA, 25 bp, Homo sapien
cttctgcaggatgccgcaaatacag

SEQ ID NO: 4900041 - DNA, 25 bp, Homo sapien
gatgccgcaaatacagagacttagg

SEQ ID NO: 4900042 - DNA, 25 bp, Homo sapien
catcttagaagagtgataggcttgt

SEQ ID NO: 4900043 - DNA, 25 bp, Homo sapien
tgtaggccatcacagatattgtctg

SEQ ID NO: 4900044 - DNA, 25 bp, Homo sapien
gataggcttgtgaggtttgagggta

SEQ ID NO: 4900045 - DNA, 25 bp, Homo sapien
aaaaagatagttgccttgctgagaa

SEQ ID NO: 4900046 - DNA, 25 bp, Homo sapien
atcttccaagccgcgtctgaactga

SEQ ID NO: 4900047 - DNA, 25 bp, Homo sapien
ttatatcttccaagccgcgtctgaa

SEQ ID NO: 4900048 - DNA, 25 bp, Homo sapien
ttccaagccgcgtctgaactgagca

SEQ ID NO: 4900049 - DNA, 25 bp, Homo sapien
tatatcttccaagccgcgtctgaac

SEQ ID NO: 4900050 - DNA, 25 bp, Homo sapien
gcctcctgtgataaaatagattgaa

SEQ ID NO: 4900051 - DNA, 25 bp, Homo sapien
tgtagtctgacacgctttgtggcct

SEQ ID NO: 4900052 - DNA, 25 bp, Homo sapien
taggccttcagtaagtgtagtctga

SEQ ID NO: 4900053 - DNA, 25 bp, Homo sapien
gaaagtgactgaatgctaagaaatg

SEQ ID NO: 4900054 - DNA, 25 bp, Homo sapien
ggctacctgtgagcctggcatagag

SEQ ID NO: 4900055 - DNA, 25 bp, Homo sapien
gatgagaggtagactgggactcaca

SEQ ID NO: 4900056 - DNA, 25 bp, Homo sapien
taataattccattccaggctacctg

SEQ ID NO: 4900057 - DNA, 25 bp, Homo sapien
taaagctgccatttatgttcagatc

SEQ ID NO: 4900058 - DNA, 25 bp, Homo sapien
cacagccggcccattttttaacagc

SEQ ID NO: 4900059 - DNA, 25 bp, Homo sapien
cctctcacagccggcccatttttta

SEQ ID NO: 4900060 - DNA, 25 bp, Homo sapien
tctcacagccggcccattttttaac

SEQ ID NO: 4900061 - DNA, 25 bp, Homo sapien
tcacagccggcccattttttaacag

SEQ ID NO: 4900062 - DNA, 25 bp, Homo sapien
gctttaagaaggtccctgcagaaat

SEQ ID NO: 4900063 - DNA, 25 bp, Homo sapien
tagctttaagaaggtccctgcagaa

SEQ ID NO: 4900064 - DNA, 25 bp, Homo sapien
taagaaggtccctgcagaaatgatc

SEQ ID NO: 4900065 - DNA, 25 bp, Homo sapien
ttaagaaggtccctgcagaaatgat

SEQ ID NO: 4900066 - DNA, 25 bp, Homo sapien
ttaacacatggccacatcatgtgat

SEQ ID NO: 4900067 - DNA, 25 bp, Homo sapien
catggccacatcatgtgatattttc

SEQ ID NO: 4900068 - DNA, 25 bp, Homo sapien
aacacatggccacatcatgtgatat

SEQ ID NO: 4900069 - DNA, 25 bp, Homo sapien
cacatggccacatcatgtgatattt

SEQ ID NO: 4900070 - DNA, 25 bp, Homo sapien
ctgctccaagtgcaatccggagtgt

SEQ ID NO: 4900071 - DNA, 25 bp, Homo sapien
gtgcaatccggagtgtcagctctcc

SEQ ID NO: 4900072 - DNA, 25 bp, Homo sapien
tccaagtgcaatccggagtgtcagc

SEQ ID NO: 4900073 - DNA, 25 bp, Homo sapien
ctggcaggcgcacgcgcccagcacc

SEQ ID NO: 4900074 - DNA, 25 bp, Homo sapien
caattactgtagtcagataacagct

SEQ ID NO: 4900075 - DNA, 25 bp, Homo sapien
gttgatgtggatcaatttaaagtgg

SEQ ID NO: 4900076 - DNA, 25 bp, Homo sapien
gatacataatcacacagcatatgga

SEQ ID NO: 4900077 - DNA, 25 bp, Homo sapien
tcagacttctaggtgagaatctcca

SEQ ID NO: 4900078 - DNA, 25 bp, Homo sapien
tatcagtgggatgcctttagaaaac

SEQ ID NO: 4900079 - DNA, 25 bp, Homo sapien
atttgaaagcagagctaatgcctcc

SEQ ID NO: 4900080 - DNA, 25 bp, Homo sapien
gggtctgacaaaactagcagatttg

SEQ ID NO: 4900081 - DNA, 25 bp, Homo sapien
tcagcctcatttggtggccagtggt

SEQ ID NO: 4900082 - DNA, 25 bp, Homo sapien
gaggagggaaagttcattggagcat

SEQ ID NO: 4900083 - DNA, 25 bp, Homo sapien
tgtccagatggctgcctgcacagag

SEQ ID NO: 4900084 - DNA, 25 bp, Homo sapien
gagccctccgattttgcctgcagtg

SEQ ID NO: 4900085 - DNA, 25 bp, Homo sapien
agagctctcgagccctccgattttg

SEQ ID NO: 4900086 - DNA, 25 bp, Homo sapien
gaaagctgtccagatggctgcctgc

SEQ ID NO: 4900087 - DNA, 25 bp, Homo sapien
tgtgaaattggtatgtcatgaatag

SEQ ID NO: 4900088 - DNA, 25 bp, Homo sapien
aaaatgtgaaattggtatgtcatga

SEQ ID NO: 4900089 - DNA, 25 bp, Homo sapien
gaaattggtatgtcatgaatagccc

SEQ ID NO: 4900090 - DNA, 25 bp, Homo sapien
gaaaatgtgaaattggtatgtcatg

SEQ ID NO: 4900091 - DNA, 25 bp, Homo sapien
taatgtgagaaaaatgtggaagact

SEQ ID NO: 4900092 - DNA, 25 bp, Homo sapien
gacttgcactgagggtgctcagtaa

SEQ ID NO: 4900093 - DNA, 25 bp, Homo sapien
aattgtggtttgcaggtggtgtcag

SEQ ID NO: 4900094 - DNA, 25 bp, Homo sapien
tgctcagtaagtgtggactgaaatg

SEQ ID NO: 4900095 - DNA, 25 bp, Homo sapien
caagaggaaatctgtccacacagtg

SEQ ID NO: 4900096 - DNA, 25 bp, Homo sapien
gaatgttctgttgatgctccgggca

SEQ ID NO: 4900097 - DNA, 25 bp, Homo sapien
gaagttgatatgcagaaccatggag

SEQ ID NO: 4900098 - DNA, 25 bp, Homo sapien
cgggcagttcttgcggaagttgata

SEQ ID NO: 4900099 - DNA, 25 bp, Homo sapien
gatatgcagaaccatggagccgcag

SEQ ID NO: 4900100 - DNA, 25 bp, Homo sapien
ctggaatccattgggctcttagagt

SEQ ID NO: 4900101 - DNA, 25 bp, Homo sapien
tctggtctgcgtagcaagtttgaag

SEQ ID NO: 4900102 - DNA, 25 bp, Homo sapien
taaagcaaaggactatccatggctg

SEQ ID NO: 4900103 - DNA, 25 bp, Homo sapien
tccatggctgaacagtcggcattgt

SEQ ID NO: 4900104 - DNA, 25 bp, Homo sapien
tccaccccacaatgtctactcttgc

SEQ ID NO: 4900105 - DNA, 25 bp, Homo sapien
tgctagcatccaccccacaatgtct

SEQ ID NO: 4900106 - DNA, 25 bp, Homo sapien
aaacatcactgctagcatccacccc

SEQ ID NO: 4900107 - DNA, 25 bp, Homo sapien
atcactgctagcatccaccccacaa

SEQ ID NO: 4900108 - DNA, 25 bp, Homo sapien
ggatccactgctaagaaaaagttga

SEQ ID NO: 4900109 - DNA, 25 bp, Homo sapien
tagtggatagtggacttgtgcagaa

SEQ ID NO: 4900110 - DNA, 25 bp, Homo sapien
tgagagtcaacacaaatgttgtgtg

SEQ ID NO: 4900111 - DNA, 25 bp, Homo sapien
gaagcaccagggcataaggatccac

SEQ ID NO: 4900112 - DNA, 25 bp, Homo sapien
aatgggcttctgtgaacagtacctg

SEQ ID NO: 4900113 - DNA, 25 bp, Homo sapien
gaatgggcttctgtgaacagtacct

SEQ ID NO: 4900114 - DNA, 25 bp, Homo sapien
cctggcaggtaaaaggttgcagagc

SEQ ID NO: 4900115 - DNA, 25 bp, Homo sapien
ccgtggatgtcgtgggtgatttcca

SEQ ID NO: 4900116 - DNA, 25 bp, Homo sapien
cgtggatgtcgtgggtgatttccat

SEQ ID NO: 4900117 - DNA, 25 bp, Homo sapien
gccgtggatgtcgtgggtgatttcc

SEQ ID NO: 4900118 - DNA, 25 bp, Homo sapien
aggttgtatggactctgctgcagtt

SEQ ID NO: 4900119 - DNA, 25 bp, Homo sapien
aaaggttgtatggactctgctgcag

SEQ ID NO: 4900120 - DNA, 25 bp, Homo sapien
aaggttgtatggactctgctgcagt

SEQ ID NO: 4900121 - DNA, 25 bp, Homo sapien
taaaggttgtatggactctgctgca

SEQ ID NO: 4900122 - DNA, 25 bp, Homo sapien
gacagatccccagtctgagtactct

SEQ ID NO: 4900123 - DNA, 25 bp, Homo sapien
cttcccatccagtctggtcttttgt

SEQ ID NO: 4900124 - DNA, 25 bp, Homo sapien
gaaccacagatggtactgaacagtg

SEQ ID NO: 4900125 - DNA, 25 bp, Homo sapien
tgctctactgcctgatgaatcagct

SEQ ID NO: 4900126 - DNA, 25 bp, Homo sapien
cttggcatctgacttgatggctatg

SEQ ID NO: 4900127 - DNA, 25 bp, Homo sapien
tgacttgatggctatggaactgttc

SEQ ID NO: 4900128 - DNA, 25 bp, Homo sapien
gcttaatagacgatctggccctgat

SEQ ID NO: 4900129 - DNA, 25 bp, Homo sapien
tctctaaaccccagtagtctctctt

SEQ ID NO: 4900130 - DNA, 25 bp, Homo sapien
gattcctgtgcctctttttgaaatg

SEQ ID NO: 4900131 - DNA, 25 bp, Homo sapien
taaggaatagctaggattcccgtgg

SEQ ID NO: 4900132 - DNA, 25 bp, Homo sapien
ctgcagaatagtgcccgaggccaga

SEQ ID NO: 4900133 - DNA, 25 bp, Homo sapien
aatctgcagaaggtcgctttaagga

SEQ ID NO: 4900134 - DNA, 25 bp, Homo sapien
ctaggattcccgtggaggaggtcct

SEQ ID NO: 4900135 - DNA, 25 bp, Homo sapien
gaccgggttggttggcgcacccaga

SEQ ID NO: 4900136 - DNA, 25 bp, Homo sapien
tgaaaggaccgggttggttggcgca

SEQ ID NO: 4900137 - DNA, 25 bp, Homo sapien
ttggttggcgcacccagacctcttt

SEQ ID NO: 4900138 - DNA, 25 bp, Homo sapien
cgccctctttgcgaacctgaaagga

SEQ ID NO: 4900139 - DNA, 25 bp, Homo sapien
cctaaggagtaaagaggcgggatct

SEQ ID NO: 4900140 - DNA, 25 bp, Homo sapien
gcctgcctgcgaactttccttgtta

SEQ ID NO: 4900141 - DNA, 25 bp, Homo sapien
tcttaactttgggacccggctgcaa

SEQ ID NO: 4900142 - DNA, 25 bp, Homo sapien
tgatggtggaaaacttagccctaag

SEQ ID NO: 4900143 - DNA, 25 bp, Homo sapien
aaagaggaacatcgcgggtgactcc

SEQ ID NO: 4900144 - DNA, 25 bp, Homo sapien
tgactccggtctgcgatgacactga

SEQ ID NO: 4900145 - DNA, 25 bp, Homo sapien
gcaaagaggaacatcgcgggtgact

SEQ ID NO: 4900146 - DNA, 25 bp, Homo sapien
cgggtgactccggtctgcgatgaca

SEQ ID NO: 4900147 - DNA, 25 bp, Homo sapien
cgctcaattagggtaggactacgca

SEQ ID NO: 4900148 - DNA, 25 bp, Homo sapien
cgtttggattattcgaccgcgaggc

SEQ ID NO: 4900149 - DNA, 25 bp, Homo sapien
ttaattactgttccgatgaccgtca

SEQ ID NO: 4900150 - DNA, 25 bp, Homo sapien
ccaggctgtacttgtcgctcaatta

SEQ ID NO: 4900151 - DNA, 25 bp, Homo sapien
aagtcttgggctctgcgtggaggtt

SEQ ID NO: 4900152 - DNA, 25 bp, Homo sapien
agtcttgggctctgcgtggaggttg

SEQ ID NO: 4900153 - DNA, 25 bp, Homo sapien
cagagctccgcaagtcttgggctct

SEQ ID NO: 4900154 - DNA, 25 bp, Homo sapien
ctgcagataaatgcgtcgccttcct

SEQ ID NO: 4900155 - DNA, 25 bp, Homo sapien
aatgcgtcgccttcctcgagagtga

SEQ ID NO: 4900156 - DNA, 25 bp, Homo sapien
ggagccggcctgatgcgggcgctct

SEQ ID NO: 4900157 - DNA, 25 bp, Homo sapien
tcgccttcctcgagagtgagcgagg

SEQ ID NO: 4900158 - DNA, 25 bp, Homo sapien
cgtcttgggttactgcagggcactc

SEQ ID NO: 4900159 - DNA, 25 bp, Homo sapien
tgagagtggcttgatttctagcaga

SEQ ID NO: 4900160 - DNA, 25 bp, Homo sapien
gaaggcatcattagggagccaaccc

SEQ ID NO: 4900161 - DNA, 25 bp, Homo sapien
caaatagtcagtctggaaatcagct

SEQ ID NO: 4900162 - DNA, 25 bp, Homo sapien
acatggttcagagtaggatttcaaa

SEQ ID NO: 4900163 - DNA, 25 bp, Homo sapien
caataacatttgcagtcagggtacc

SEQ ID NO: 4900164 - DNA, 25 bp, Homo sapien
caggacatcttacattgatttaggc

SEQ ID NO: 4900165 - DNA, 25 bp, Homo sapien
tgcatcagaccgactcagactctat

SEQ ID NO: 4900166 - DNA, 25 bp, Homo sapien
tatgccttggtgtcatgaatgtatc

SEQ ID NO: 4900167 - DNA, 25 bp, Homo sapien
tacactggcacaatttacagacaga

SEQ ID NO: 4900168 - DNA, 25 bp, Homo sapien
taaagatgactatatgcctccagaa

SEQ ID NO: 4900169 - DNA, 25 bp, Homo sapien
gtatgactagcaaaaaggaagatcc

SEQ ID NO: 4900170 - DNA, 25 bp, Homo sapien
gctaagcaccattcagtgagcaatg

SEQ ID NO: 4900171 - DNA, 25 bp, Homo sapien
gaccattgtctttgtgcagttacag

SEQ ID NO: 4900172 - DNA, 25 bp, Homo sapien
gcagttacagcccaataatatacac

SEQ ID NO: 4900173 - DNA, 25 bp, Homo sapien
aattagctataaaagatcacatgcg

SEQ ID NO: 4900174 - DNA, 25 bp, Homo sapien
cctgggaactatggcaagaaccaac

SEQ ID NO: 4900175 - DNA, 25 bp, Homo sapien
aattgccttggatgccaatttatat

SEQ ID NO: 4900176 - DNA, 25 bp, Homo sapien
ctgggaactatggcaagaaccaaca

SEQ ID NO: 4900177 - DNA, 25 bp, Homo sapien
taaattgccttggatgccaatttat

SEQ ID NO: 4900178 - DNA, 25 bp, Homo sapien
gaagaaaggctattaggccaccagc

SEQ ID NO: 4900179 - DNA, 25 bp, Homo sapien
aagaaaggctattaggccaccagca

SEQ ID NO: 4900180 - DNA, 25 bp, Homo sapien
gaaactggcagtatgcgttgtggaa

SEQ ID NO: 4900181 - DNA, 25 bp, Homo sapien
gcagtatgcgttgtggaaggagcca

SEQ ID NO: 4900182 - DNA, 25 bp, Homo sapien
ttacaattgggccttgggaagttga

SEQ ID NO: 4900183 - DNA, 25 bp, Homo sapien
gaaaatgccatgaaactggcagtat

SEQ ID NO: 4900184 - DNA, 25 bp, Homo sapien
tcctcttgggtctgtcccacatggt

SEQ ID NO: 4900185 - DNA, 25 bp, Homo sapien
tttaattgctgacctcctcgctgga

SEQ ID NO: 4900186 - DNA, 25 bp, Homo sapien
catattgccttttatagtagaggca

SEQ ID NO: 4900187 - DNA, 25 bp, Homo sapien
tgccttttatagtagaggcagttgc

SEQ ID NO: 4900188 - DNA, 25 bp, Homo sapien
tcctcgctggaccatattgcctttt

SEQ ID NO: 4900189 - DNA, 25 bp, Homo sapien
taatttcagctttgaagagttgttc

SEQ ID NO: 4900190 - DNA, 25 bp, Homo sapien
taattattgatcagcacaaagcaca

SEQ ID NO: 4900191 - DNA, 25 bp, Homo sapien
gcttatatctccataattaacagaa

SEQ ID NO: 4900192 - DNA, 25 bp, Homo sapien
gttcttgtgcatgcagaattataaa

SEQ ID NO: 4900193 - DNA, 25 bp, Homo sapien
ggcgcccatgtatggatcccctggg

SEQ ID NO: 4900194 - DNA, 25 bp, Homo sapien
cctcccgaagggatttatcctgcct

SEQ ID NO: 4900195 - DNA, 25 bp, Homo sapien
cagtatgcatccaagggcaagattc

SEQ ID NO: 4900196 - DNA, 25 bp, Homo sapien
ttaatggaaattacagtatgcatcc

SEQ ID NO: 4900197 - DNA, 25 bp, Homo sapien
gatcctctgtaacaagaaatgcgtg

SEQ ID NO: 4900198 - DNA, 25 bp, Homo sapien
ctggaaatcgaaccaggatcctctg

SEQ ID NO: 4900199 - DNA, 25 bp, Homo sapien
caagaaatgcgtgagggttcaatgt

SEQ ID NO: 4900200 - DNA, 25 bp, Homo sapien
cgtgagggttcaatgtgttgtgcat

SEQ ID NO: 4900201 - DNA, 25 bp, Homo sapien
acattctagatcaactacccaggta

SEQ ID NO: 4900202 - DNA, 25 bp, Homo sapien
ctagatcaactacccaggtataaaa

SEQ ID NO: 4900203 - DNA, 25 bp, Homo sapien
acatctttgtgacattctagatcaa

SEQ ID NO: 4900204 - DNA, 25 bp, Homo sapien
aacatctttgtgacattctagatca

SEQ ID NO: 4900205 - DNA, 25 bp, Homo sapien
gtacccagcctaaagtcttcatata

SEQ ID NO: 4900206 - DNA, 25 bp, Homo sapien
tgagctaccaatctatcactggaga

SEQ ID NO: 4900207 - DNA, 25 bp, Homo sapien
aatgatcatctctagtttccaaagg

SEQ ID NO: 4900208 - DNA, 25 bp, Homo sapien
ccagttagccctttaggaactatca

SEQ ID NO: 4900209 - DNA, 25 bp, Homo sapien
cattcttggcgcctgacttttgaaa

SEQ ID NO: 4900210 - DNA, 25 bp, Homo sapien
tctagctgctttgtaagggatttac

SEQ ID NO: 4900211 - DNA, 25 bp, Homo sapien
tcatatattcgtgtatgcatgacag

SEQ ID NO: 4900212 - DNA, 25 bp, Homo sapien
tttgtgtttagagagtgcagtcacc

SEQ ID NO: 4900213 - DNA, 25 bp, Homo sapien
ttgttctgtgaggttgtataagtcc

SEQ ID NO: 4900214 - DNA, 25 bp, Homo sapien
ggttgtataagtcctttagcaaatc

SEQ ID NO: 4900215 - DNA, 25 bp, Homo sapien
tagcaaatccaactcatatccattg

SEQ ID NO: 4900216 - DNA, 25 bp, Homo sapien
tttgtcattcagttgttctgtgagg

SEQ ID NO: 4900217 - DNA, 25 bp, Homo sapien
ttcagaagataagggcagaaccaaa

SEQ ID NO: 4900218 - DNA, 25 bp, Homo sapien
cattgcggggcttgagaattcagaa

SEQ ID NO: 4900219 - DNA, 25 bp, Homo sapien
aataatgataacagtccattgcggg

SEQ ID NO: 4900220 - DNA, 25 bp, Homo sapien
tctgaataatgataacagtccattg

SEQ ID NO: 4900221 - DNA, 25 bp, Homo sapien
tctcggaatcactgctataatcagg

SEQ ID NO: 4900222 - DNA, 25 bp, Homo sapien
gtctctctcggaatcactgctataa

SEQ ID NO: 4900223 - DNA, 25 bp, Homo sapien
ctgctataatcaggactgaccccca

SEQ ID NO: 4900224 - DNA, 25 bp, Homo sapien
aagtctctctcggaatcactgctat

SEQ ID NO: 4900225 - DNA, 25 bp, Homo sapien
agaatttgctggcaaccacctcctc

SEQ ID NO: 4900226 - DNA, 25 bp, Homo sapien
ctagaatttgctggcaaccacctcc

SEQ ID NO: 4900227 - DNA, 25 bp, Homo sapien
tgtctcatttttacaactggacttg

SEQ ID NO: 4900228 - DNA, 25 bp, Homo sapien
aactggacttgactattggatagac

SEQ ID NO: 4900229 - DNA, 25 bp, Homo sapien
ctaccatctgtctcaaagcctgtgg

SEQ ID NO: 4900230 - DNA, 25 bp, Homo sapien
gctaccatctgtctcaaagcctgtg

SEQ ID NO: 4900231 - DNA, 25 bp, Homo sapien
gcttcctgcaggtaactgtcagtca

SEQ ID NO: 4900232 - DNA, 25 bp, Homo sapien
tttgttttgcacatgccaggaggaa

SEQ ID NO: 4900233 - DNA, 25 bp, Homo sapien
gattccctagatgacaaaagtgcag

SEQ ID NO: 4900234 - DNA, 25 bp, Homo sapien
gataattccatctgcgccattcgga

SEQ ID NO: 4900235 - DNA, 25 bp, Homo sapien
gcaggttcccggcagaatgattgaa

SEQ ID NO: 4900236 - DNA, 25 bp, Homo sapien
ttaaagcagatgctctcgccggagc

SEQ ID NO: 4900237 - DNA, 25 bp, Homo sapien
gattgaagccggcaccacttggaga

SEQ ID NO: 4900238 - DNA, 25 bp, Homo sapien
ccggagcggcttgactctgcaggtt

SEQ ID NO: 4900239 - DNA, 25 bp, Homo sapien
ggctgagcagtctatttcagtgacc

SEQ ID NO: 4900240 - DNA, 25 bp, Homo sapien
cacttgatcactggtattagtggtc

SEQ ID NO: 4900241 - DNA, 25 bp, Homo sapien
ctggtattagtggtcattggtctaa

SEQ ID NO: 4900242 - DNA, 25 bp, Homo sapien
tcagtgacccttctcacttgatcac

SEQ ID NO: 4900243 - DNA, 25 bp, Homo sapien
ttctgacttccctccaatttcccat

SEQ ID NO: 4900244 - DNA, 25 bp, Homo sapien
tttccaactgggaggtgtgctgctt

SEQ ID NO: 4900245 - DNA, 25 bp, Homo sapien
ggtgtgctgcttcaggaaatatctg

SEQ ID NO: 4900246 - DNA, 25 bp, Homo sapien
ccgaggtttccaactgggaggtgtg

SEQ ID NO: 4900247 - DNA, 25 bp, Homo sapien
gaataactgcaattggaaaaaacta

SEQ ID NO: 4900248 - DNA, 25 bp, Homo sapien
aggaacataatcttatgacaatgtt

SEQ ID NO: 4900249 - DNA, 25 bp, Homo sapien
tatgaaaagaataactgcaattgga

SEQ ID NO: 4900250 - DNA, 25 bp, Homo sapien
aactcaaggtatctgggaagctcaa

SEQ ID NO: 4900251 - DNA, 25 bp, Homo sapien
cgagttttctcattgccttgcacat

SEQ ID NO: 4900252 - DNA, 25 bp, Homo sapien
gccttgcacatcacactcttttctt

SEQ ID NO: 4900253 - DNA, 25 bp, Homo sapien
caggacctcgagttttctcattgcc

SEQ ID NO: 4900254 - DNA, 25 bp, Homo sapien
gacctcgagttttctcattgccttg

SEQ ID NO: 4900255 - DNA, 25 bp, Homo sapien
ttgttgtgaacaacaaatacatgta

SEQ ID NO: 4900256 - DNA, 25 bp, Homo sapien
tccatcgtacctgccgatttccttt

SEQ ID NO: 4900257 - DNA, 25 bp, Homo sapien
tctctttggaagctaagttaatgtt

SEQ ID NO: 4900258 - DNA, 25 bp, Homo sapien
ttctctctattgttgtgaacaacaa

SEQ ID NO: 4900259 - DNA, 25 bp, Homo sapien
gctgtgatccatgacactcaaggag

SEQ ID NO: 4900260 - DNA, 25 bp, Homo sapien
cagagccttggatccgacacataga

SEQ ID NO: 4900261 - DNA, 25 bp, Homo sapien
tcacctaggagcaacatggagccaa

SEQ ID NO: 4900262 - DNA, 25 bp, Homo sapien
cctgggatctgcaacaaatgagtct

SEQ ID NO: 4900263 - DNA, 25 bp, Homo sapien
gatcagggcttgctgaataatttag

SEQ ID NO: 4900264 - DNA, 25 bp, Homo sapien
tcagggcttgctgaataatttaggt

SEQ ID NO: 4900265 - DNA, 25 bp, Homo sapien
attattagctctttggcaggatctc

SEQ ID NO: 4900266 - DNA, 25 bp, Homo sapien
ggatctccattgttgactaaaaact

SEQ ID NO: 4900267 - DNA, 25 bp, Homo sapien
ctttgatgttcaggacaccgtaaag

SEQ ID NO: 4900268 - DNA, 25 bp, Homo sapien
tacagtggtttcatcccctgagcaa

SEQ ID NO: 4900269 - DNA, 25 bp, Homo sapien
gaatcccctacagtggtttcatccc

SEQ ID NO: 4900270 - DNA, 25 bp, Homo sapien
gtaagtttggagctaccaatcactg

SEQ ID NO: 4900271 - DNA, 25 bp, Homo sapien
gggtaagatattggaagcatgagtc

SEQ ID NO: 4900272 - DNA, 25 bp, Homo sapien
tgtgccaagttactaactctataaa

SEQ ID NO: 4900273 - DNA, 25 bp, Homo sapien
gaagcatgagtctgtgccaagttac

SEQ ID NO: 4900274 - DNA, 25 bp, Homo sapien
gatattggaagcatgagtctgtgcc

SEQ ID NO: 4900275 - DNA, 25 bp, Homo sapien
ttccaacgaggtgatcagacaccat

SEQ ID NO: 4900276 - DNA, 25 bp, Homo sapien
tgttccaacgaggtgatcagacacc

SEQ ID NO: 4900277 - DNA, 25 bp, Homo sapien
cagtgttccaacgaggtgatcagac

SEQ ID NO: 4900278 - DNA, 25 bp, Homo sapien
ctgccagtgttccaacgaggtgatc

SEQ ID NO: 4900279 - DNA, 25 bp, Homo sapien
ggatacttggagtatatgaccactc

SEQ ID NO: 4900280 - DNA, 25 bp, Homo sapien
tttcactcaccaacctgccccagtg

SEQ ID NO: 4900281 - DNA, 25 bp, Homo sapien
taccttcacattgcttattttggaa

SEQ ID NO: 4900282 - DNA, 25 bp, Homo sapien
ctgagaaaatcttgttgagaattcc

SEQ ID NO: 4900283 - DNA, 25 bp, Homo sapien
ttctcctttgggcacctaactccca

SEQ ID NO: 4900284 - DNA, 25 bp, Homo sapien
gagccttgggcctgtatttgtcttt

SEQ ID NO: 4900285 - DNA, 25 bp, Homo sapien
taaggagccttgggcctgtatttgt

SEQ ID NO: 4900286 - DNA, 25 bp, Homo sapien
tctcctttgggcacctaactcccat

SEQ ID NO: 4900287 - DNA, 25 bp, Homo sapien
ttctgcaaatcacctagacaacttg

SEQ ID NO: 4900288 - DNA, 25 bp, Homo sapien
cctagacaacttggaagcaatgaga

SEQ ID NO: 4900289 - DNA, 25 bp, Homo sapien
caagtaattccctagtcttctgcaa

SEQ ID NO: 4900290 - DNA, 25 bp, Homo sapien
gaattgactgtttatatgttcatga

SEQ ID NO: 4900291 - DNA, 25 bp, Homo sapien
caattaagatagtctggatgcaggg

SEQ ID NO: 4900292 - DNA, 25 bp, Homo sapien
tgtacagacagagctaagccaaagg

SEQ ID NO: 4900293 - DNA, 25 bp, Homo sapien
ccactttaataagaggtctgaacct

SEQ ID NO: 4900294 - DNA, 25 bp, Homo sapien
tgaacctagatgtggtacagtttgc

SEQ ID NO: 4900295 - DNA, 25 bp, Homo sapien
tctctccaatttgtgtgactatccc

SEQ ID NO: 4900296 - DNA, 25 bp, Homo sapien
cacatcatctctccaatttgtgtga

SEQ ID NO: 4900297 - DNA, 25 bp, Homo sapien
tctccaatttgtgtgactatcccac

SEQ ID NO: 4900298 - DNA, 25 bp, Homo sapien
atttgtgtgactatcccacatgcca

SEQ ID NO: 4900299 - DNA, 25 bp, Homo sapien
gaaagagtctaagtcgaggaggcat

SEQ ID NO: 4900300 - DNA, 25 bp, Homo sapien
tgtaaatactggagcccagtagaaa

SEQ ID NO: 4900301 - DNA, 25 bp, Homo sapien
cagcaccgcgatggaagagctcctg

SEQ ID NO: 4900302 - DNA, 25 bp, Homo sapien
ctcaggaagataaattggcaaagca

SEQ ID NO: 4900303 - DNA, 25 bp, Homo sapien
gggtgatcaatccatctcctgaaat

SEQ ID NO: 4900304 - DNA, 25 bp, Homo sapien
aatagtttcttgggcctttgatgct

SEQ ID NO: 4900305 - DNA, 25 bp, Homo sapien
caggaacttgtggttaatagtttct

SEQ ID NO: 4900306 - DNA, 25 bp, Homo sapien
ttcttgggcctttgatgctgattgg

SEQ ID NO: 4900307 - DNA, 25 bp, Homo sapien
ctagccccaaaaccaggaacttgtg

SEQ ID NO: 4900308 - DNA, 25 bp, Homo sapien
acattttaccctgagaactggcagt

SEQ ID NO: 4900309 - DNA, 25 bp, Homo sapien
tagatcacattttaccctgagaact

SEQ ID NO: 4900310 - DNA, 25 bp, Homo sapien
caagtttttctagatcacattttac

SEQ ID NO: 4900311 - DNA, 25 bp, Homo sapien
gatcacattttaccctgagaactgg

SEQ ID NO: 4900312 - DNA, 25 bp, Homo sapien
catttggcagataataggcactgag

SEQ ID NO: 4900313 - DNA, 25 bp, Homo sapien
gctaggatctgaacccacaaaatct

SEQ ID NO: 4900314 - DNA, 25 bp, Homo sapien
gacatataggtgcaagcatctgtga

SEQ ID NO: 4900315 - DNA, 25 bp, Homo sapien
tatctacctaggacccagcatagca

SEQ ID NO: 4900316 - DNA, 25 bp, Homo sapien
ttagaggccatcgtagagttacaca

SEQ ID NO: 4900317 - DNA, 25 bp, Homo sapien
tagggccatgttctggattatgctt

SEQ ID NO: 4900318 - DNA, 25 bp, Homo sapien
gagagatacgtgactttttcattca

SEQ ID NO: 4900319 - DNA, 25 bp, Homo sapien
taatcctcagtaaccaacctctgct

SEQ ID NO: 4900320 - DNA, 25 bp, Homo sapien
ttttctgtaacctctaaacagctgg

SEQ ID NO: 4900321 - DNA, 25 bp, Homo sapien
cataggaattaaggcacttgggtca

SEQ ID NO: 4900322 - DNA, 25 bp, Homo sapien
catcagcaaagcctggtgcgttttc

SEQ ID NO: 4900323 - DNA, 25 bp, Homo sapien
aatagctctcccatcatatattggg

SEQ ID NO: 4900324 - DNA, 25 bp, Homo sapien
aatgtaaaagctcttctagttctag

SEQ ID NO: 4900325 - DNA, 25 bp, Homo sapien
cactcatttgggtaacccgattcct

SEQ ID NO: 4900326 - DNA, 25 bp, Homo sapien
taggttgccgatcatttcctttcag

SEQ ID NO: 4900327 - DNA, 25 bp, Homo sapien
cgattccttcccataacttaagaca

SEQ ID NO: 4900328 - DNA, 25 bp, Homo sapien
tgcctggagtgttttaccgctttta

SEQ ID NO: 4900329 - DNA, 25 bp, Homo sapien
tgttttaccgcttttatatctgcag

SEQ ID NO: 4900330 - DNA, 25 bp, Homo sapien
tataatctactgtctaataatgcct

SEQ ID NO: 4900331 - DNA, 25 bp, Homo sapien
tatggaaatttaagccgcagacatc

SEQ ID NO: 4900332 - DNA, 25 bp, Homo sapien
caagcaatcactaacattccagttc

SEQ ID NO: 4900333 - DNA, 25 bp, Homo sapien
tcaagcaatcactaacattccagtt

SEQ ID NO: 4900334 - DNA, 25 bp, Homo sapien
tacacattccttgcgtggtgagtgg

SEQ ID NO: 4900335 - DNA, 25 bp, Homo sapien
tggtgagtggcgttcaccacactgg

SEQ ID NO: 4900336 - DNA, 25 bp, Homo sapien
gaaatacctcgcagtccaaggctac

SEQ ID NO: 4900337 - DNA, 25 bp, Homo sapien
tccacaggtgctcacgaaatacctc

SEQ ID NO: 4900338 - DNA, 25 bp, Homo sapien
ctgggtaatacttcatcccttgttg

SEQ ID NO: 4900339 - DNA, 25 bp, Homo sapien
gggtaatacttcatcccttgttgct

SEQ ID NO: 4900340 - DNA, 25 bp, Homo sapien
tgggtaatacttcatcccttgttgc

SEQ ID NO: 4900341 - DNA, 25 bp, Homo sapien
ccctgggtaatacttcatcccttgt

SEQ ID NO: 4900342 - DNA, 25 bp, Homo sapien
ttttcaggaaggtaaattagcataa

SEQ ID NO: 4900343 - DNA, 25 bp, Homo sapien
gagagttctgttgtaccacctgccc

SEQ ID NO: 4900344 - DNA, 25 bp, Homo sapien
cacatttcattgttgcagggatcga

SEQ ID NO: 4900345 - DNA, 25 bp, Homo sapien
cagggatcgaactgtacaggaggaa

SEQ ID NO: 4900346 - DNA, 25 bp, Homo sapien
tcagtggcaacatggcttaaaggca

SEQ ID NO: 4900347 - DNA, 25 bp, Homo sapien
cttggcatcagtggcaacatggctt

SEQ ID NO: 4900348 - DNA, 25 bp, Homo sapien
ggcatcagtggcaacatggcttaaa

SEQ ID NO: 4900349 - DNA, 25 bp, Homo sapien
caacatggcttaaaggcagtgacat

SEQ ID NO: 4900350 - DNA, 25 bp, Homo sapien
caccacaattaacaagaataagggc

SEQ ID NO: 4900351 - DNA, 25 bp, Homo sapien
acatctaacatcaaacattcctcct

SEQ ID NO: 4900352 - DNA, 25 bp, Homo sapien
atcatctcacatctaacatcaaaca

SEQ ID NO: 4900353 - DNA, 25 bp, Homo sapien
tctcacatctaacatcaaacattcc

SEQ ID NO: 4900354 - DNA, 25 bp, Homo sapien
tgtagtcaatgattgtaattgcttg

SEQ ID NO: 4900355 - DNA, 25 bp, Homo sapien
cagtgcagcccatgaaataggtttt

SEQ ID NO: 4900356 - DNA, 25 bp, Homo sapien
tagggcaccccgctgtttctttgct

SEQ ID NO: 4900357 - DNA, 25 bp, Homo sapien
tattgattattcaagttggcagtca

SEQ ID NO: 4900358 - DNA, 25 bp, Homo sapien
agaatgcacagatgaggctagcatc

SEQ ID NO: 4900359 - DNA, 25 bp, Homo sapien
aatgcacagatgaggctagcatcca

SEQ ID NO: 4900360 - DNA, 25 bp, Homo sapien
gaatgcacagatgaggctagcatcc

SEQ ID NO: 4900361 - DNA, 25 bp, Homo sapien
atgcacagatgaggctagcatccat

SEQ ID NO: 4900362 - DNA, 25 bp, Homo sapien
caagaaccttagatgaaagcaaagc

SEQ ID NO: 4900363 - DNA, 25 bp, Homo sapien
ctagaggtctagctgaggaacaaga

SEQ ID NO: 4900364 - DNA, 25 bp, Homo sapien
gatcccagaatcagaggaccatggt

SEQ ID NO: 4900365 - DNA, 25 bp, Homo sapien
ttaaccgtacggaatacagacttgc

SEQ ID NO: 4900366 - DNA, 25 bp, Homo sapien
aagaatcagccacttcatagggcat

SEQ ID NO: 4900367 - DNA, 25 bp, Homo sapien
aaaagaatcagccacttcatagggc

SEQ ID NO: 4900368 - DNA, 25 bp, Homo sapien
ataaaagaatcagccacttcatagg

SEQ ID NO: 4900369 - DNA, 25 bp, Homo sapien
aaagaatcagccacttcatagggca

SEQ ID NO: 4900370 - DNA, 25 bp, Homo sapien
tctggatgggaatgaatctgcagga

SEQ ID NO: 4900371 - DNA, 25 bp, Homo sapien
gagtatcagtaagatatggctccat

SEQ ID NO: 4900372 - DNA, 25 bp, Homo sapien
gaatgaatctgcaggagtatcagta

SEQ ID NO: 4900373 - DNA, 25 bp, Homo sapien
cagagtctggatgggaatgaatctg

SEQ ID NO: 4900374 - DNA, 25 bp, Homo sapien
tccttcatatgcacaatctaatata

SEQ ID NO: 4900375 - DNA, 25 bp, Homo sapien
ccttcatatgcacaatctaatatat

SEQ ID NO: 4900376 - DNA, 25 bp, Homo sapien
cttaagccagtgaacagggatgtaa

SEQ ID NO: 4900377 - DNA, 25 bp, Homo sapien
taagccagtgaacagggatgtaagc

SEQ ID NO: 4900378 - DNA, 25 bp, Homo sapien
aagccagtgaacagggatgtaagcc

SEQ ID NO: 4900379 - DNA, 25 bp, Homo sapien
agccagtgaacagggatgtaagcca

SEQ ID NO: 4900380 - DNA, 25 bp, Homo sapien
taagctgggtaacctaacagatctg

SEQ ID NO: 4900381 - DNA, 25 bp, Homo sapien
ttactaagctgggtaacctaacaga

SEQ ID NO: 4900382 - DNA, 25 bp, Homo sapien
tctaggggaaggagttactaagctg

SEQ ID NO: 4900383 - DNA, 25 bp, Homo sapien
tactaagctgggtaacctaacagat

SEQ ID NO: 4900384 - DNA, 25 bp, Homo sapien
tctgctaatcgggtggcaagggctc

SEQ ID NO: 4900385 - DNA, 25 bp, Homo sapien
tcatatatcaagttcgtagtggcca

SEQ ID NO: 4900386 - DNA, 25 bp, Homo sapien
gtagtggccatctgttccctccgaa

SEQ ID NO: 4900387 - DNA, 25 bp, Homo sapien
gatgatcgggaagtttctccctgac

SEQ ID NO: 4900388 - DNA, 25 bp, Homo sapien
tgtgacagcccttacccataagagt

SEQ ID NO: 4900389 - DNA, 25 bp, Homo sapien
cttgtaacactccaggttgcctctg

SEQ ID NO: 4900390 - DNA, 25 bp, Homo sapien
aaagctatgcagctgctgtatggcc

SEQ ID NO: 4900391 - DNA, 25 bp, Homo sapien
ccataagagtgggtatgccctttcc

SEQ ID NO: 4900392 - DNA, 25 bp, Homo sapien
acctctccagagacattcatgccta

SEQ ID NO: 4900393 - DNA, 25 bp, Homo sapien
tattttagctctgtccctgcaccag

SEQ ID NO: 4900394 - DNA, 25 bp, Homo sapien
accagacccagtgtatgcacctctc

SEQ ID NO: 4900395 - DNA, 25 bp, Homo sapien
atattttagctctgtccctgcacca

SEQ ID NO: 4900396 - DNA, 25 bp, Homo sapien
ttggaactcaagagagacccctctt

SEQ ID NO: 4900397 - DNA, 25 bp, Homo sapien
aacagccatcgtattgtagcagaag

SEQ ID NO: 4900398 - DNA, 25 bp, Homo sapien
gtaatgatctgcctcttggaactca

SEQ ID NO: 4900399 - DNA, 25 bp, Homo sapien
agaaacagccatcgtattgtagcag

SEQ ID NO: 4900400 - DNA, 25 bp, Homo sapien
tgcagtggagcacttctaaggggca

SEQ ID NO: 4900401 - DNA, 25 bp, Homo sapien
agatgagttggggtgaagggctggt

SEQ ID NO: 4900402 - DNA, 25 bp, Homo sapien
tgagttggggtgaagggctggttct

SEQ ID NO: 4900403 - DNA, 25 bp, Homo sapien
tctcattcatgtgtggaggctgcag

SEQ ID NO: 4900404 - DNA, 25 bp, Homo sapien
tttcaccttggatctaaaatttgcc

SEQ ID NO: 4900405 - DNA, 25 bp, Homo sapien
aaattcattgaatttcaccttggat

SEQ ID NO: 4900406 - DNA, 25 bp, Homo sapien
cattgaatttcaccttggatctaaa

SEQ ID NO: 4900407 - DNA, 25 bp, Homo sapien
ttcaccttggatctaaaatttgcct

SEQ ID NO: 4900408 - DNA, 25 bp, Homo sapien
ccttttgcgtgatgcagttttatat

SEQ ID NO: 4900409 - DNA, 25 bp, Homo sapien
tgctccttttgcgtgatgcagtttt

SEQ ID NO: 4900410 - DNA, 25 bp, Homo sapien
tgctgctccttttgcgtgatgcagt

SEQ ID NO: 4900411 - DNA, 25 bp, Homo sapien
ttgcgtgatgcagttttatattgaa

SEQ ID NO: 4900412 - DNA, 25 bp, Homo sapien
ttctcccaatcgggcctcacattgt

SEQ ID NO: 4900413 - DNA, 25 bp, Homo sapien
ctcttctcccaatcgggcctcacat

SEQ ID NO: 4900414 - DNA, 25 bp, Homo sapien
tcttctcccaatcgggcctcacatt

SEQ ID NO: 4900415 - DNA, 25 bp, Homo sapien
tctcccaatcgggcctcacattgtg

SEQ ID NO: 4900416 - DNA, 25 bp, Homo sapien
cattccccacttaaacttgcctctg

SEQ ID NO: 4900417 - DNA, 25 bp, Homo sapien
aagactaaggatttggggctcttgt

SEQ ID NO: 4900418 - DNA, 25 bp, Homo sapien
cccacttaaacttgcctctgcatct

SEQ ID NO: 4900419 - DNA, 25 bp, Homo sapien
aaagactaaggatttggggctcttg

SEQ ID NO: 4900420 - DNA, 25 bp, Homo sapien
gataagactattgagagcaacatca

SEQ ID NO: 4900421 - DNA, 25 bp, Homo sapien
ctagaaaattcttgctggataagac

SEQ ID NO: 4900422 - DNA, 25 bp, Homo sapien
tctgaatttttctggcgaacctaga

SEQ ID NO: 4900423 - DNA, 25 bp, Homo sapien
ctgaatttttctggcgaacctagaa

SEQ ID NO: 4900424 - DNA, 25 bp, Homo sapien
tatcccgtggattgagacgtacctt

SEQ ID NO: 4900425 - DNA, 25 bp, Homo sapien
taaccagtaagtaacacacgcagcg

SEQ ID NO: 4900426 - DNA, 25 bp, Homo sapien
gacgtaccttgatgaaactgcattg

SEQ ID NO: 4900427 - DNA, 25 bp, Homo sapien
gagctgcgccaaattctccgtctgt

SEQ ID NO: 4900428 - DNA, 25 bp, Homo sapien
gccattcgttaatacggcgccatac

SEQ ID NO: 4900429 - DNA, 25 bp, Homo sapien
caacagaaggtgcttgcatgccatt

SEQ ID NO: 4900430 - DNA, 25 bp, Homo sapien
catgccattcgttaatacggcgcca

SEQ ID NO: 4900431 - DNA, 25 bp, Homo sapien
gcttgcatgccattcgttaatacgg

SEQ ID NO: 4900432 - DNA, 25 bp, Homo sapien
gcaagatggatattaatctcaaagg

SEQ ID NO: 4900433 - DNA, 25 bp, Homo sapien
ggtactcaatttgaacagcaagatg

SEQ ID NO: 4900434 - DNA, 25 bp, Homo sapien
tcagcttataatgttgtcaatataa

SEQ ID NO: 4900435 - DNA, 25 bp, Homo sapien
aaatgtcataatgtggtactcaatt

SEQ ID NO: 4900436 - DNA, 25 bp, Homo sapien
aaagaaagtaggacacaggtccgcg

SEQ ID NO: 4900437 - DNA, 25 bp, Homo sapien
gagtgtagacaagtgactggcagct

SEQ ID NO: 4900438 - DNA, 25 bp, Homo sapien
cacattgacccataagacttcgaag

SEQ ID NO: 4900439 - DNA, 25 bp, Homo sapien
agcactgcctaagatctgtccccag

SEQ ID NO: 4900440 - DNA, 25 bp, Homo sapien
ttttctttcttcaccgcctgagccc

SEQ ID NO: 4900441 - DNA, 25 bp, Homo sapien
tcttgcttgtcccttgcttgtccgt

SEQ ID NO: 4900442 - DNA, 25 bp, Homo sapien
cctctcgtcctcttgcttgtccctt

SEQ ID NO: 4900443 - DNA, 25 bp, Homo sapien
ttgcttgtccgttatccccagagcc

SEQ ID NO: 4900444 - DNA, 25 bp, Homo sapien
aacagaacaatgttccaccccagcg

SEQ ID NO: 4900445 - DNA, 25 bp, Homo sapien
aatgttccaccccagcgtgttcagc

SEQ ID NO: 4900446 - DNA, 25 bp, Homo sapien
gaacaatgttccaccccagcgtgtt

SEQ ID NO: 4900447 - DNA, 25 bp, Homo sapien
tgttccaccccagcgtgttcagctg

SEQ ID NO: 4900448 - DNA, 25 bp, Homo sapien
tggcaaggttatgtctgatctcaga

SEQ ID NO: 4900449 - DNA, 25 bp, Homo sapien
caagccctttgctgcttatggcaag

SEQ ID NO: 4900450 - DNA, 25 bp, Homo sapien
ttgacagcctttttgagggttcacc

SEQ ID NO: 4900451 - DNA, 25 bp, Homo sapien
tccaaattggtggtgcacaggccca

SEQ ID NO: 4900452 - DNA, 25 bp, Homo sapien
gggctgaaatgtgtaggcttggtat

SEQ ID NO: 4900453 - DNA, 25 bp, Homo sapien
ctgaaatgtgtaggcttggtatggg

SEQ ID NO: 4900454 - DNA, 25 bp, Homo sapien
gctgaaatgtgtaggcttggtatgg

SEQ ID NO: 4900455 - DNA, 25 bp, Homo sapien
gaaatgtgtaggcttggtatgggtg

SEQ ID NO: 4900456 - DNA, 25 bp, Homo sapien
cttagccacaaaggaaattctcagg

SEQ ID NO: 4900457 - DNA, 25 bp, Homo sapien
aggtaacagctctaacagtcagggt

SEQ ID NO: 4900458 - DNA, 25 bp, Homo sapien
tatcttagagactgagactcaccta

SEQ ID NO: 4900459 - DNA, 25 bp, Homo sapien
tgttagtagcactcacatttggcca

SEQ ID NO: 4900460 - DNA, 25 bp, Homo sapien
catctgtggtgagtgctgtggttag

SEQ ID NO: 4900461 - DNA, 25 bp, Homo sapien
ttatgtggcatctgtggtgagtgct

SEQ ID NO: 4900462 - DNA, 25 bp, Homo sapien
tctgtggtgagtgctgtggttagag

SEQ ID NO: 4900463 - DNA, 25 bp, Homo sapien
tgtggtgagtgctgtggttagagat

SEQ ID NO: 4900464 - DNA, 25 bp, Homo sapien
gcagctatgttctacaggacctgga

SEQ ID NO: 4900465 - DNA, 25 bp, Homo sapien
gatcattcaattccaggcgcagcta

SEQ ID NO: 4900466 - DNA, 25 bp, Homo sapien
gatagctctgcacggaaaacacgat

SEQ ID NO: 4900467 - DNA, 25 bp, Homo sapien
gaaaaatgggctctaatcacaaaac

SEQ ID NO: 4900468 - DNA, 25 bp, Homo sapien
gggcgaggacaagtgctaaatttaa

SEQ ID NO: 4900469 - DNA, 25 bp, Homo sapien
tcgtgaaccgaaagggcgaggacaa

SEQ ID NO: 4900470 - DNA, 25 bp, Homo sapien
agtgctaaatttaaaagtgcctcgg

SEQ ID NO: 4900471 - DNA, 25 bp, Homo sapien
tgaaacttccaagaaatcgtgaacc

SEQ ID NO: 4900472 - DNA, 25 bp, Homo sapien
tgagtcaaggaacagcagcattgtg

SEQ ID NO: 4900473 - DNA, 25 bp, Homo sapien
gaactgggtctctctaccttcgtaa

SEQ ID NO: 4900474 - DNA, 25 bp, Homo sapien
caaaggacagcatacccagttcatg

SEQ ID NO: 4900475 - DNA, 25 bp, Homo sapien
tgtaattcagcacaacgtagcccat

SEQ ID NO: 4900476 - DNA, 25 bp, Homo sapien
tctgttctcataactttggacctcc

SEQ ID NO: 4900477 - DNA, 25 bp, Homo sapien
acctccatgtatttacttctgttct

SEQ ID NO: 4900478 - DNA, 25 bp, Homo sapien
cttctgttctcataactttggacct

SEQ ID NO: 4900479 - DNA, 25 bp, Homo sapien
ctccatgtatttacttctgttctca

SEQ ID NO: 4900480 - DNA, 25 bp, Homo sapien
ctgacagcagtcagggatacctaat

SEQ ID NO: 4900481 - DNA, 25 bp, Homo sapien
agaatcctctgaacttgtctccttg

SEQ ID NO: 4900482 - DNA, 25 bp, Homo sapien
tcaagcatgacttaaaagctacaac

SEQ ID NO: 4900483 - DNA, 25 bp, Homo sapien
ggatacctaatatcagctcaagctg

SEQ ID NO: 4900484 - DNA, 25 bp, Homo sapien
aatgagcataatgctgacagccatg

SEQ ID NO: 4900485 - DNA, 25 bp, Homo sapien
caatggcgtttcatccaggaggtga

SEQ ID NO: 4900486 - DNA, 25 bp, Homo sapien
ttttcaaagctacacccaatggcgt

SEQ ID NO: 4900487 - DNA, 25 bp, Homo sapien
gggagcaagtccaatgttgagaaca

SEQ ID NO: 4900488 - DNA, 25 bp, Homo sapien
gcattatctgagcatatgcaacatt

SEQ ID NO: 4900489 - DNA, 25 bp, Homo sapien
tttggcattatctgagcatatgcaa

SEQ ID NO: 4900490 - DNA, 25 bp, Homo sapien
tggcattatctgagcatatgcaaca

SEQ ID NO: 4900491 - DNA, 25 bp, Homo sapien
ggcattatctgagcatatgcaacat

SEQ ID NO: 4900492 - DNA, 25 bp, Homo sapien
tgttctttcgcagtcatttggcttt

SEQ ID NO: 4900493 - DNA, 25 bp, Homo sapien
ctcttgcgactctttcatcagtcat

SEQ ID NO: 4900494 - DNA, 25 bp, Homo sapien
aaaactctctcttgcgactctttca

SEQ ID NO: 4900495 - DNA, 25 bp, Homo sapien
tctctgttaaagaggagatgcaaaa

SEQ ID NO: 4900496 - DNA, 25 bp, Homo sapien
gcttaacgagttagttgggccacaa

SEQ ID NO: 4900497 - DNA, 25 bp, Homo sapien
catgagaatgtgagatgccacaggc

SEQ ID NO: 4900498 - DNA, 25 bp, Homo sapien
cacttggagaggcatgtggcctgcc

SEQ ID NO: 4900499 - DNA, 25 bp, Homo sapien
tgtacatagaaaggccacatgccac

SEQ ID NO: 4900500 - DNA, 25 bp, Homo sapien
gacaatagcagtatgcagctgtggc

SEQ ID NO: 4900501 - DNA, 25 bp, Homo sapien
gctgatgcttgtgtaccaggtgcca

SEQ ID NO: 4900502 - DNA, 25 bp, Homo sapien
agcatgttaaaagtagataaaagca

SEQ ID NO: 4900503 - DNA, 25 bp, Homo sapien
gccctctaattagagatgtctcatc

SEQ ID NO: 4900504 - DNA, 25 bp, Homo sapien
catgtggtggagattgtatccatca

SEQ ID NO: 4900505 - DNA, 25 bp, Homo sapien
cttctgcagggagtcaggcattaga

SEQ ID NO: 4900506 - DNA, 25 bp, Homo sapien
tatccatcaatacagcagctgggct

SEQ ID NO: 4900507 - DNA, 25 bp, Homo sapien
caataagtggtttaagatgtgcaaa

SEQ ID NO: 4900508 - DNA, 25 bp, Homo sapien
ctgcaccaactggtagctccttctg

SEQ ID NO: 4900509 - DNA, 25 bp, Homo sapien
ggtgactaccctgcaccaactggta

SEQ ID NO: 4900510 - DNA, 25 bp, Homo sapien
agctcctccttatgacccctggtga

SEQ ID NO: 4900511 - DNA, 25 bp, Homo sapien
cctccagttggagtgaactatgtga

SEQ ID NO: 4900512 - DNA, 25 bp, Homo sapien
tggcttggttagcttttcacttcct

SEQ ID NO: 4900513 - DNA, 25 bp, Homo sapien
acttcctttgttatagaatgacacc

SEQ ID NO: 4900514 - DNA, 25 bp, Homo sapien
tttccactggaattggcttggttag

SEQ ID NO: 4900515 - DNA, 25 bp, Homo sapien
ttgttatagaatgacaccagctctg

SEQ ID NO: 4900516 - DNA, 25 bp, Homo sapien
tgcttattggcctcatgacatctgg

SEQ ID NO: 4900517 - DNA, 25 bp, Homo sapien
ttattggcctcatgacatctggcat

SEQ ID NO: 4900518 - DNA, 25 bp, Homo sapien
ctgcttattggcctcatgacatctg

SEQ ID NO: 4900519 - DNA, 25 bp, Homo sapien
cttattggcctcatgacatctggca

SEQ ID NO: 4900520 - DNA, 25 bp, Homo sapien
agtgccagtttgaattggtacagaa

SEQ ID NO: 4900521 - DNA, 25 bp, Homo sapien
caggtttgatgcagtgccagtttga

SEQ ID NO: 4900522 - DNA, 25 bp, Homo sapien
cagtgccagtttgaattggtacaga

SEQ ID NO: 4900523 - DNA, 25 bp, Homo sapien
tgccagtttgaattggtacagaagc

SEQ ID NO: 4900524 - DNA, 25 bp, Homo sapien
aaactcgaagggtggtacaggcagc

SEQ ID NO: 4900525 - DNA, 25 bp, Homo sapien
tatgggtctcgaaaaactagttgca

SEQ ID NO: 4900526 - DNA, 25 bp, Homo sapien
aggcagcgatgctgacagtgtgcat

SEQ ID NO: 4900527 - DNA, 25 bp, Homo sapien
ttcgcagatgccaccatatgggtct

SEQ ID NO: 4900528 - DNA, 25 bp, Homo sapien
gaatcagcatcccatatatggcact

SEQ ID NO: 4900529 - DNA, 25 bp, Homo sapien
tgcagacctggggtaaagttctcca

SEQ ID NO: 4900530 - DNA, 25 bp, Homo sapien
cacggctccaggattaaagggatgg

SEQ ID NO: 4900531 - DNA, 25 bp, Homo sapien
aaaatgatggaacggccttttgaag

SEQ ID NO: 4900532 - DNA, 25 bp, Homo sapien
caaggggatgatagaagatgtgatc

SEQ ID NO: 4900533 - DNA, 25 bp, Homo sapien
ccctctgacatcaccatgagaacgt

SEQ ID NO: 4900534 - DNA, 25 bp, Homo sapien
gatgtgatctaagcagagtacttct

SEQ ID NO: 4900535 - DNA, 25 bp, Homo sapien
acatcaccatgagaacgtggccaca

SEQ ID NO: 4900536 - DNA, 25 bp, Homo sapien
gttgatggcaacaccagatcaggaa

SEQ ID NO: 4900537 - DNA, 25 bp, Homo sapien
attagcatgttgatggcaacaccag

SEQ ID NO: 4900538 - DNA, 25 bp, Homo sapien
gagtttgcaagtgtacaggaacaat

SEQ ID NO: 4900539 - DNA, 25 bp, Homo sapien
catgttgatggcaacaccagatcag

SEQ ID NO: 4900540 - DNA, 25 bp, Homo sapien
gccacagtaaagctgtggacagttt

SEQ ID NO: 4900541 - DNA, 25 bp, Homo sapien
taaagctgtggacagtttctctttg

SEQ ID NO: 4900542 - DNA, 25 bp, Homo sapien
gtgttatctaagacatccggtgtca

SEQ ID NO: 4900543 - DNA, 25 bp, Homo sapien
cagtaaagctgtggacagtttctct

SEQ ID NO: 4900544 - DNA, 25 bp, Homo sapien
tatatgcttcacagcgacagctagc

SEQ ID NO: 4900545 - DNA, 25 bp, Homo sapien
taaatgggctatagctgtgtccctg

SEQ ID NO: 4900546 - DNA, 25 bp, Homo sapien
gacagctagcgtgtattaacatggc

SEQ ID NO: 4900547 - DNA, 25 bp, Homo sapien
tgtttactggccagataccctctcc

SEQ ID NO: 4900548 - DNA, 25 bp, Homo sapien
cacagttaactgtgttacttgaatt

SEQ ID NO: 4900549 - DNA, 25 bp, Homo sapien
attcgtgagtaacttggcttttggg

SEQ ID NO: 4900550 - DNA, 25 bp, Homo sapien
gaattttccaacctggctttagaga

SEQ ID NO: 4900551 - DNA, 25 bp, Homo sapien
cttcctataattcgtgagtaacttg

SEQ ID NO: 4900552 - DNA, 25 bp, Homo sapien
tcaccactgccagtaggtgtagcag

SEQ ID NO: 4900553 - DNA, 25 bp, Homo sapien
gacaggaggctactcctgcaatttc

SEQ ID NO: 4900554 - DNA, 25 bp, Homo sapien
cttgacatgggaagtagaagaggga

SEQ ID NO: 4900555 - DNA, 25 bp, Homo sapien
ggctactcctgcaatttcaccactg

SEQ ID NO: 4900556 - DNA, 25 bp, Homo sapien
ctagtttatttccttaaagcactga

SEQ ID NO: 4900557 - DNA, 25 bp, Homo sapien
tagtttatttccttaaagcactgac

SEQ ID NO: 4900558 - DNA, 25 bp, Homo sapien
acaagtgagatgggcaacccaggga

SEQ ID NO: 4900559 - DNA, 25 bp, Homo sapien
aagtgagatgggcaacccagggaac

SEQ ID NO: 4900560 - DNA, 25 bp, Homo sapien
tgacaagtgagatgggcaacccagg

SEQ ID NO: 4900561 - DNA, 25 bp, Homo sapien
gctgacaagtgagatgggcaaccca

SEQ ID NO: 4900562 - DNA, 25 bp, Homo sapien
agccctgtgactttgacgtggcaga

SEQ ID NO: 4900563 - DNA, 25 bp, Homo sapien
taactctggactgttaaacccctga

SEQ ID NO: 4900564 - DNA, 25 bp, Homo sapien
taaacccctgaacgagatatcacct

SEQ ID NO: 4900565 - DNA, 25 bp, Homo sapien
tggactgttaaacccctgaacgaga

SEQ ID NO: 4900566 - DNA, 25 bp, Homo sapien
tacttcataactctggactgttaaa

SEQ ID NO: 4900567 - DNA, 25 bp, Homo sapien
cacccactggacacttttgagttct

SEQ ID NO: 4900568 - DNA, 25 bp, Homo sapien
ggttggtgagcatcactgccagtca

SEQ ID NO: 4900569 - DNA, 25 bp, Homo sapien
tggttggtgagcatcactgccagtc

SEQ ID NO: 4900570 - DNA, 25 bp, Homo sapien
aggataaattctaccacccactgga

SEQ ID NO: 4900571 - DNA, 25 bp, Homo sapien
gggctcccagctatgttgtagttgt

SEQ ID NO: 4900572 - DNA, 25 bp, Homo sapien
cccagctatgttgtagttgtgtgtg

SEQ ID NO: 4900573 - DNA, 25 bp, Homo sapien
ctcccagctatgttgtagttgtgtg

SEQ ID NO: 4900574 - DNA, 25 bp, Homo sapien
cagctatgttgtagttgtgtgtggt

SEQ ID NO: 4900575 - DNA, 25 bp, Homo sapien
caattaggctaatggtggttccagg

SEQ ID NO: 4900576 - DNA, 25 bp, Homo sapien
gctgcaaagcccaaagaaggatttg

SEQ ID NO: 4900577 - DNA, 25 bp, Homo sapien
cagctttggcatgccctaacaccag

SEQ ID NO: 4900578 - DNA, 25 bp, Homo sapien
gggaaggctttttgccctgcatagc

SEQ ID NO: 4900579 - DNA, 25 bp, Homo sapien
ctggctttaatagcacatagtctgg

SEQ ID NO: 4900580 - DNA, 25 bp, Homo sapien
gatgctccccgtttattcttctgac

SEQ ID NO: 4900581 - DNA, 25 bp, Homo sapien
ccaaggccacttgagatattaagca

SEQ ID NO: 4900582 - DNA, 25 bp, Homo sapien
cagagaggaccacaattccagatgc

SEQ ID NO: 4900583 - DNA, 25 bp, Homo sapien
aattgtggcttgtggaggtacacca

SEQ ID NO: 4900584 - DNA, 25 bp, Homo sapien
aatgaggctccaggttcattaaatt

SEQ ID NO: 4900585 - DNA, 25 bp, Homo sapien
ccaggttcattaaattgtggcttgt

SEQ ID NO: 4900586 - DNA, 25 bp, Homo sapien
acaaaacagcattatcgagctccag

SEQ ID NO: 4900587 - DNA, 25 bp, Homo sapien
tacctactggtgtttggcagaaatc

SEQ ID NO: 4900588 - DNA, 25 bp, Homo sapien
tagacatgggtatcttccctccagt

SEQ ID NO: 4900589 - DNA, 25 bp, Homo sapien
gaagtttgaaggcttgctggttctt

SEQ ID NO: 4900590 - DNA, 25 bp, Homo sapien
tgcaatagacttaaaatatagccta

SEQ ID NO: 4900591 - DNA, 25 bp, Homo sapien
catttttaggaaaggttgcagcatt

SEQ ID NO: 4900592 - DNA, 25 bp, Homo sapien
tcaagtgggtggcaagggaatatcc

SEQ ID NO: 4900593 - DNA, 25 bp, Homo sapien
cacagcggaccaatccaagtggcat

SEQ ID NO: 4900594 - DNA, 25 bp, Homo sapien
taatgccatgtggtatgtctgttcg

SEQ ID NO: 4900595 - DNA, 25 bp, Homo sapien
taatcaattagaactctttagggag

SEQ ID NO: 4900596 - DNA, 25 bp, Homo sapien
tgcttgtagtatcagttcgcccctc

SEQ ID NO: 4900597 - DNA, 25 bp, Homo sapien
tatttgtgggagcataatgacctgt

SEQ ID NO: 4900598 - DNA, 25 bp, Homo sapien
tcgcccctcttgttagggagatatg

SEQ ID NO: 4900599 - DNA, 25 bp, Homo sapien
cacatatgtctctaaaatagagttc

SEQ ID NO: 4900600 - DNA, 25 bp, Homo sapien
catatgtctctaaaatagagttctt

SEQ ID NO: 4900601 - DNA, 25 bp, Homo sapien
gctcaaagagtcacatatgtctcta

SEQ ID NO: 4900602 - DNA, 25 bp, Homo sapien
gaagctcaaagagtcacatatgtct

SEQ ID NO: 4900603 - DNA, 25 bp, Homo sapien
taacatacctttgttcaaggccttc

SEQ ID NO: 4900604 - DNA, 25 bp, Homo sapien
cataacatacctttgttcaaggcct

SEQ ID NO: 4900605 - DNA, 25 bp, Homo sapien
ataacatacctttgttcaaggcctt

SEQ ID NO: 4900606 - DNA, 25 bp, Homo sapien
caattttaagcctaaatggaccctg

SEQ ID NO: 4900607 - DNA, 25 bp, Homo sapien
aaatgcacaattttaagcctaaatg

SEQ ID NO: 4900608 - DNA, 25 bp, Homo sapien
aaaatgcacaattttaagcctaaat

SEQ ID NO: 4900609 - DNA, 25 bp, Homo sapien
aatgaacgagtatttgcataccaaa

SEQ ID NO: 4900610 - DNA, 25 bp, Homo sapien
tgaacgagtatttgcataccaaaac

SEQ ID NO: 4900611 - DNA, 25 bp, Homo sapien
ttaatgaacgagtatttgcatacca

SEQ ID NO: 4900612 - DNA, 25 bp, Homo sapien
gaacgagtatttgcataccaaaaca

SEQ ID NO: 4900613 - DNA, 25 bp, Homo sapien
tcctcttcactctttttcctgcttc

SEQ ID NO: 4900614 - DNA, 25 bp, Homo sapien
gtactcctcttcactctttttcctg

SEQ ID NO: 4900615 - DNA, 25 bp, Homo sapien
actcctcttcactctttttcctgct

SEQ ID NO: 4900616 - DNA, 25 bp, Homo sapien
ctcttcactctttttcctgcttcct

SEQ ID NO: 4900617 - DNA, 25 bp, Homo sapien
ctctgggttctgccgttcccttttg

SEQ ID NO: 4900618 - DNA, 25 bp, Homo sapien
ggctcctttgtgctgaccgattact

SEQ ID NO: 4900619 - DNA, 25 bp, Homo sapien
caaggtcttccacgcggctcgggat

SEQ ID NO: 4900620 - DNA, 25 bp, Homo sapien
tgaccgattactcgcggtcgcttac

SEQ ID NO: 4900621 - DNA, 25 bp, Homo sapien
cacgcggctcgggattggctccttt

SEQ ID NO: 4900622 - DNA, 25 bp, Homo sapien
gcaacatttcccacaggacacgaag

SEQ ID NO: 4900623 - DNA, 25 bp, Homo sapien
tgacagaaccgtggacagcaacatt

SEQ ID NO: 4900624 - DNA, 25 bp, Homo sapien
cctaaagcgtttgggagacgatcgt

SEQ ID NO: 4900625 - DNA, 25 bp, Homo sapien
gacacgaagtttgtcggcccttgcc

SEQ ID NO: 4900626 - DNA, 25 bp, Homo sapien
aatttctacagtcacctcgtgagac

SEQ ID NO: 4900627 - DNA, 25 bp, Homo sapien
caggtattagaactccggagtggca

SEQ ID NO: 4900628 - DNA, 25 bp, Homo sapien
gaactccggagtggcatcaaaatga

SEQ ID NO: 4900629 - DNA, 25 bp, Homo sapien
cctcgtgagacaggtattagaactc

SEQ ID NO: 4900630 - DNA, 25 bp, Homo sapien
gctgtcgtagttggatgatatacaa

SEQ ID NO: 4900631 - DNA, 25 bp, Homo sapien
tgaaaaagattcagactgaagagct

SEQ ID NO: 4900632 - DNA, 25 bp, Homo sapien
tacaaggctcactccggaagacttt

SEQ ID NO: 4900633 - DNA, 25 bp, Homo sapien
gaagctgagcccatagtccaggatg

SEQ ID NO: 4900634 - DNA, 25 bp, Homo sapien
ggcactgtccagtggtagactgata

SEQ ID NO: 4900635 - DNA, 25 bp, Homo sapien
tcagagaagggtacaagcagagttt

SEQ ID NO: 4900636 - DNA, 25 bp, Homo sapien
tattgcacctttgcctggcactgtc

SEQ ID NO: 4900637 - DNA, 25 bp, Homo sapien
tgttactagtacaaggctcccggta

SEQ ID NO: 4900638 - DNA, 25 bp, Homo sapien
tgcctctgtcgggaatacctccctc

SEQ ID NO: 4900639 - DNA, 25 bp, Homo sapien
ttagctcagacatttctatcttcat

SEQ ID NO: 4900640 - DNA, 25 bp, Homo sapien
tgtcgggaatacctccctccactct

SEQ ID NO: 4900641 - DNA, 25 bp, Homo sapien
cttagctcagacatttctatcttca

SEQ ID NO: 4900642 - DNA, 25 bp, Homo sapien
acttccgacactccggcaattctgg

SEQ ID NO: 4900643 - DNA, 25 bp, Homo sapien
tatataaaggtgacttccgacactc

SEQ ID NO: 4900644 - DNA, 25 bp, Homo sapien
aaaaggaattggatcggggcatgca

SEQ ID NO: 4900645 - DNA, 25 bp, Homo sapien
gatcggggcatgcagcgtctcctta

SEQ ID NO: 4900646 - DNA, 25 bp, Homo sapien
tggtttctgtaatggtttaaatgca

SEQ ID NO: 4900647 - DNA, 25 bp, Homo sapien
tctgtaatggtttaaatgcaagcct

SEQ ID NO: 4900648 - DNA, 25 bp, Homo sapien
aagaagctctggtagtttttgatgc

SEQ ID NO: 4900649 - DNA, 25 bp, Homo sapien
tgttgcttcgaactactgactggca

SEQ ID NO: 4900650 - DNA, 25 bp, Homo sapien
tatttgacagtctggatcaacaaca

SEQ ID NO: 4900651 - DNA, 25 bp, Homo sapien
cttttctcgatatcaacgttggtca

SEQ ID NO: 4900652 - DNA, 25 bp, Homo sapien
cttcttttctcgatatcaacgttgg

SEQ ID NO: 4900653 - DNA, 25 bp, Homo sapien
taagacttcttttctcgatatcaac

SEQ ID NO: 4900654 - DNA, 25 bp, Homo sapien
gatgtagtgatttaagacttctttt

SEQ ID NO: 4900655 - DNA, 25 bp, Homo sapien
tgctggctctggagtatgcattctc

SEQ ID NO: 4900656 - DNA, 25 bp, Homo sapien
aatttgttggcttcacttttcaact

SEQ ID NO: 4900657 - DNA, 25 bp, Homo sapien
attactggtggaaatgtactcttgg

SEQ ID NO: 4900658 - DNA, 25 bp, Homo sapien
tactcttggctttcatggtctggaa

SEQ ID NO: 4900659 - DNA, 25 bp, Homo sapien
taaggacgtagttttcttagcaggc

SEQ ID NO: 4900660 - DNA, 25 bp, Homo sapien
gcagcttgcacacatattagacggt

SEQ ID NO: 4900661 - DNA, 25 bp, Homo sapien
gataaagcccctgatagttgctacc

SEQ ID NO: 4900662 - DNA, 25 bp, Homo sapien
gccaaagaaaacagacaggcagctg

SEQ ID NO: 4900663 - DNA, 25 bp, Homo sapien
gatcatggttggatgcttctctgac

SEQ ID NO: 4900664 - DNA, 25 bp, Homo sapien
gtgatcatggttggatgcttctctg

SEQ ID NO: 4900665 - DNA, 25 bp, Homo sapien
taagaagtgatcatggttggatgct

SEQ ID NO: 4900666 - DNA, 25 bp, Homo sapien
aagtgatcatggttggatgcttctc

SEQ ID NO: 4900667 - DNA, 25 bp, Homo sapien
aaaatgcctgaatatcaggccagca

SEQ ID NO: 4900668 - DNA, 25 bp, Homo sapien
attctcgtgattcagcattacaaaa

SEQ ID NO: 4900669 - DNA, 25 bp, Homo sapien
gcctgaatatcaggccagcaaatcc

SEQ ID NO: 4900670 - DNA, 25 bp, Homo sapien
tcgtgattcagcattacaaaatgcc

SEQ ID NO: 4900671 - DNA, 25 bp, Homo sapien
tgttccacggaagacaaataaatgt

SEQ ID NO: 4900672 - DNA, 25 bp, Homo sapien
tcagacatttgtttcaactacaact

SEQ ID NO: 4900673 - DNA, 25 bp, Homo sapien
tttggatctaacctataacttctgt

SEQ ID NO: 4900674 - DNA, 25 bp, Homo sapien
taacttctgtattcatgttccacgg

SEQ ID NO: 4900675 - DNA, 25 bp, Homo sapien
agtcttgccacagtttcttgctatc

SEQ ID NO: 4900676 - DNA, 25 bp, Homo sapien
ttgctatctgaaggattattgccat

SEQ ID NO: 4900677 - DNA, 25 bp, Homo sapien
tctgaaggattattgccatgttttg

SEQ ID NO: 4900678 - DNA, 25 bp, Homo sapien
cttgccacagtttcttgctatctga

SEQ ID NO: 4900679 - DNA, 25 bp, Homo sapien
aatttgccatcacctcatagctact

SEQ ID NO: 4900680 - DNA, 25 bp, Homo sapien
caatgaaataagttaggccactaaa

SEQ ID NO: 4900681 - DNA, 25 bp, Homo sapien
tactatgcctgataatgcatccgtg

SEQ ID NO: 4900682 - DNA, 25 bp, Homo sapien
gcaaatcgcacacatccattggcca

SEQ ID NO: 4900683 - DNA, 25 bp, Homo sapien
tctggcatagtgattaaggacaaca

SEQ ID NO: 4900684 - DNA, 25 bp, Homo sapien
tatggacaagatagaaacctgattc

SEQ ID NO: 4900685 - DNA, 25 bp, Homo sapien
taacttttgcttccgtaactaggca

SEQ ID NO: 4900686 - DNA, 25 bp, Homo sapien
cattgtggaggtaccgtctctggca

SEQ ID NO: 4900687 - DNA, 25 bp, Homo sapien
tgcaatggtgagaaattaaatcaca

SEQ ID NO: 4900688 - DNA, 25 bp, Homo sapien
cacaattgccctttgtgcattttag

SEQ ID NO: 4900689 - DNA, 25 bp, Homo sapien
ttatctccaccagtgcaatggtgag

SEQ ID NO: 4900690 - DNA, 25 bp, Homo sapien
gaagaggagtgagcattccctgtca

SEQ ID NO: 4900691 - DNA, 25 bp, Homo sapien
taatgcctgtactttgcctacttgc

SEQ ID NO: 4900692 - DNA, 25 bp, Homo sapien
agtcaaccatggctttaatgcctgt

SEQ ID NO: 4900693 - DNA, 25 bp, Homo sapien
caaattctctttgggagtagcaacg

SEQ ID NO: 4900694 - DNA, 25 bp, Homo sapien
caacatctccactcccaaatttggg

SEQ ID NO: 4900695 - DNA, 25 bp, Homo sapien
gggagactcactaccaaaaatattc

SEQ ID NO: 4900696 - DNA, 25 bp, Homo sapien
catgggagactcactaccaaaaata

SEQ ID NO: 4900697 - DNA, 25 bp, Homo sapien
gtgacatgggagactcactaccaaa

SEQ ID NO: 4900698 - DNA, 25 bp, Homo sapien
ctagggaaggtgacatgggagactc

SEQ ID NO: 4900699 - DNA, 25 bp, Homo sapien
tcagtgactgcaaatcatgaaggaa

SEQ ID NO: 4900700 - DNA, 25 bp, Homo sapien
ctcagtgactgcaaatcatgaagga

SEQ ID NO: 4900701 - DNA, 25 bp, Homo sapien
ttggtaaggtataataagtgaacgc

SEQ ID NO: 4900702 - DNA, 25 bp, Homo sapien
taaggtataataagtgaacgcttca

SEQ ID NO: 4900703 - DNA, 25 bp, Homo sapien
tataataagtgaacgcttcatctcc

SEQ ID NO: 4900704 - DNA, 25 bp, Homo sapien
taagtgaacgcttcatctccatttt

SEQ ID NO: 4900705 - DNA, 25 bp, Homo sapien
ttttacattgattgtccagcaaggg

SEQ ID NO: 4900706 - DNA, 25 bp, Homo sapien
tctcccactaacatctgctgtgcag

SEQ ID NO: 4900707 - DNA, 25 bp, Homo sapien
gctagaaactacaattccatttctg

SEQ ID NO: 4900708 - DNA, 25 bp, Homo sapien
catttctgttggaggcgattcccct

SEQ ID NO: 4900709 - DNA, 25 bp, Homo sapien
tctgtgattcactgtgactctttat

SEQ ID NO: 4900710 - DNA, 25 bp, Homo sapien
tctttattattgcaaccaggatggc

SEQ ID NO: 4900711 - DNA, 25 bp, Homo sapien
aattcccctgagtgccgtgcctctg

SEQ ID NO: 4900712 - DNA, 25 bp, Homo sapien
gggatcttttgtccgctccttctgt

SEQ ID NO: 4900713 - DNA, 25 bp, Homo sapien
aaatgttgatgctcgcatttctgta

SEQ ID NO: 4900714 - DNA, 25 bp, Homo sapien
aatgttgatgctcgcatttctgtac

SEQ ID NO: 4900715 - DNA, 25 bp, Homo sapien
aaaaatgttgatgctcgcatttctg

SEQ ID NO: 4900716 - DNA, 25 bp, Homo sapien
aaaatgttgatgctcgcatttctgt

SEQ ID NO: 4900717 - DNA, 25 bp, Homo sapien
ctgccttaatagcgtcatccatttt

SEQ ID NO: 4900718 - DNA, 25 bp, Homo sapien
gcctaattcactatccacacgacag

SEQ ID NO: 4900719 - DNA, 25 bp, Homo sapien
cacacgacagtccactctgcttagt

SEQ ID NO: 4900720 - DNA, 25 bp, Homo sapien
gacccaagggcatctgtgcattcct

SEQ ID NO: 4900721 - DNA, 25 bp, Homo sapien
tctgcttagtgtgtgaggacctgac

SEQ ID NO: 4900722 - DNA, 25 bp, Homo sapien
cttatcagccgctgtggaggcagca

SEQ ID NO: 4900723 - DNA, 25 bp, Homo sapien
atttgggtagatgtagccaatgtac

SEQ ID NO: 4900724 - DNA, 25 bp, Homo sapien
ccttttcaatttgggtagatgtagc

SEQ ID NO: 4900725 - DNA, 25 bp, Homo sapien
caaaaccttccttatcagccgctgt

SEQ ID NO: 4900726 - DNA, 25 bp, Homo sapien
cgagtgtttaactgcaaggttaagg

SEQ ID NO: 4900727 - DNA, 25 bp, Homo sapien
catttgtagttgatctcttgcgagt

SEQ ID NO: 4900728 - DNA, 25 bp, Homo sapien
ctgcaaggttaaggagaggcacagt

SEQ ID NO: 4900729 - DNA, 25 bp, Homo sapien
gatctcttgcgagtgtttaactgca

SEQ ID NO: 4900730 - DNA, 25 bp, Homo sapien
cctccatacattcacccacacgcag

SEQ ID NO: 4900731 - DNA, 25 bp, Homo sapien
cacaaataaggcaaggaacagcaga

SEQ ID NO: 4900732 - DNA, 25 bp, Homo sapien
tgtccacaaataaggcaaggaacag

SEQ ID NO: 4900733 - DNA, 25 bp, Homo sapien
tcacccacacgcagcaaagaaatgt

SEQ ID NO: 4900734 - DNA, 25 bp, Homo sapien
aggtcaaaaacaagcaccagcctct

SEQ ID NO: 4900735 - DNA, 25 bp, Homo sapien
accagcctctgcacttgggggcaca

SEQ ID NO: 4900736 - DNA, 25 bp, Homo sapien
gcacttgggggcacaaatcactcac

SEQ ID NO: 4900737 - DNA, 25 bp, Homo sapien
caggtcaaaaacaagcaccagcctc

SEQ ID NO: 4900738 - DNA, 25 bp, Homo sapien
gttgatatctgttaatccctactgg

SEQ ID NO: 4900739 - DNA, 25 bp, Homo sapien
ggcttcacttttgtacacggtccaa

SEQ ID NO: 4900740 - DNA, 25 bp, Homo sapien
tgatatgggtgatgtgttctctggc

SEQ ID NO: 4900741 - DNA, 25 bp, Homo sapien
cacattatgccctgatatgggtgat

SEQ ID NO: 4900742 - DNA, 25 bp, Homo sapien
gctgttgatccaatgattaactctc

SEQ ID NO: 4900743 - DNA, 25 bp, Homo sapien
tagctgttgatccaatgattaactc

SEQ ID NO: 4900744 - DNA, 25 bp, Homo sapien
cctagctgttgatccaatgattaac

SEQ ID NO: 4900745 - DNA, 25 bp, Homo sapien
gttgatccaatgattaactctccct

SEQ ID NO: 4900746 - DNA, 25 bp, Homo sapien
taaatgaatcagcttgggtggaatt

SEQ ID NO: 4900747 - DNA, 25 bp, Homo sapien
tgaatcagcttgggtggaattcctt

SEQ ID NO: 4900748 - DNA, 25 bp, Homo sapien
aatgaatcagcttgggtggaattcc

SEQ ID NO: 4900749 - DNA, 25 bp, Homo sapien
aaatgaatcagcttgggtggaattc

SEQ ID NO: 4900750 - DNA, 25 bp, Homo sapien
ttgtaacacctatcttctgacgagt

SEQ ID NO: 4900751 - DNA, 25 bp, Homo sapien
catgaagtacactatggatgctgga

SEQ ID NO: 4900752 - DNA, 25 bp, Homo sapien
gcgcagtctggattccatgaagtac

SEQ ID NO: 4900753 - DNA, 25 bp, Homo sapien
tattgctgtcagttggcgcagtctg

SEQ ID NO: 4900754 - DNA, 25 bp, Homo sapien
ttctttctccactaatatgaatatt

SEQ ID NO: 4900755 - DNA, 25 bp, Homo sapien
cccattctttctccactaatatgaa

SEQ ID NO: 4900756 - DNA, 25 bp, Homo sapien
tctttctccactaatatgaatattt

SEQ ID NO: 4900757 - DNA, 25 bp, Homo sapien
ctagcccattctttctccactaata

SEQ ID NO: 4900758 - DNA, 25 bp, Homo sapien
ggccactcagtctcacatacttgtt

SEQ ID NO: 4900759 - DNA, 25 bp, Homo sapien
taaaaagatataaggctccttattg

SEQ ID NO: 4900760 - DNA, 25 bp, Homo sapien
aaggctccttattgtctatatttga

SEQ ID NO: 4900761 - DNA, 25 bp, Homo sapien
tgtctctgtcgagctaacagtaagt

SEQ ID NO: 4900762 - DNA, 25 bp, Homo sapien
tgcttttcttcatagattcccaagg

SEQ ID NO: 4900763 - DNA, 25 bp, Homo sapien
cattgcttttcttcatagattccca

SEQ ID NO: 4900764 - DNA, 25 bp, Homo sapien
acattgcttttcttcatagattccc

SEQ ID NO: 4900765 - DNA, 25 bp, Homo sapien
ttttcttcatagattcccaaggaaa

SEQ ID NO: 4900766 - DNA, 25 bp, Homo sapien
ggtgcctggctacttcaagagttga

SEQ ID NO: 4900767 - DNA, 25 bp, Homo sapien
caagtgttcacgtcagaattttccc

SEQ ID NO: 4900768 - DNA, 25 bp, Homo sapien
gagttgagctaatcacagggaagat

SEQ ID NO: 4900769 - DNA, 25 bp, Homo sapien
caagactgagtccaacaaaagtggt

SEQ ID NO: 4900770 - DNA, 25 bp, Homo sapien
caaatgtacaagatgtatccagttt

SEQ ID NO: 4900771 - DNA, 25 bp, Homo sapien
gaccccacccgtggactctgacata

SEQ ID NO: 4900772 - DNA, 25 bp, Homo sapien
ttttgaccccacccgtggactctga

SEQ ID NO: 4900773 - DNA, 25 bp, Homo sapien
ttgaccccacccgtggactctgaca

SEQ ID NO: 4900774 - DNA, 25 bp, Homo sapien
ttcacactgccgaggctaaagtgct

SEQ ID NO: 4900775 - DNA, 25 bp, Homo sapien
tttccaccgtcctacagtattcaca

SEQ ID NO: 4900776 - DNA, 25 bp, Homo sapien
ctgccgaggctaaagtgctctgaaa

SEQ ID NO: 4900777 - DNA, 25 bp, Homo sapien
gtcctacagtattcacactgccgag

SEQ ID NO: 4900778 - DNA, 25 bp, Homo sapien
tcctcaggtgttcttacagccgcgg

SEQ ID NO: 4900779 - DNA, 25 bp, Homo sapien
agctcctggttcagcgggacactgg

SEQ ID NO: 4900780 - DNA, 25 bp, Homo sapien
acagccgcggtcttttttggagcac

SEQ ID NO: 4900781 - DNA, 25 bp, Homo sapien
ttcggacacttcttagggcttctgg

SEQ ID NO: 4900782 - DNA, 25 bp, Homo sapien
tttttcctctggctgggtcccctca

SEQ ID NO: 4900783 - DNA, 25 bp, Homo sapien
ttttcctctggctgggtcccctcac

SEQ ID NO: 4900784 - DNA, 25 bp, Homo sapien
tcagtttttcctctggctgggtccc

SEQ ID NO: 4900785 - DNA, 25 bp, Homo sapien
tgatctactcttggcgttttgtgaa

SEQ ID NO: 4900786 - DNA, 25 bp, Homo sapien
tgggcctgaagttactcgctgctca

SEQ ID NO: 4900787 - DNA, 25 bp, Homo sapien
tgaaacaagcatgcgccagggacca

SEQ ID NO: 4900788 - DNA, 25 bp, Homo sapien
gaccacaacagcagaacgctagaga

SEQ ID NO: 4900789 - DNA, 25 bp, Homo sapien
gttcccattacacatgtacaagctc

SEQ ID NO: 4900790 - DNA, 25 bp, Homo sapien
aggagaagttttatataccagacat

SEQ ID NO: 4900791 - DNA, 25 bp, Homo sapien
ccagacattctgaggggttatcatg

SEQ ID NO: 4900792 - DNA, 25 bp, Homo sapien
tgggaataatagcttgtgttcccat

SEQ ID NO: 4900793 - DNA, 25 bp, Homo sapien
ccattgctaattggatagtttctcc

SEQ ID NO: 4900794 - DNA, 25 bp, Homo sapien
gactgagaaggcgagtgctcatctg

SEQ ID NO: 4900795 - DNA, 25 bp, Homo sapien
tcacccatacggttgtcaggtgcaa

SEQ ID NO: 4900796 - DNA, 25 bp, Homo sapien
tgctcatctgattggtcacatgaaa

SEQ ID NO: 4900797 - DNA, 25 bp, Homo sapien
ccaaatccacaaagcgggcttcttt

SEQ ID NO: 4900798 - DNA, 25 bp, Homo sapien
gcctcgagtgcagcgccgttaaata

SEQ ID NO: 4900799 - DNA, 25 bp, Homo sapien
catggctggtcttgagacccactcc

SEQ ID NO: 4900800 - DNA, 25 bp, Homo sapien
aactgcatttagatgagagtctgac

SEQ ID NO: 4900801 - DNA, 25 bp, Homo sapien
attcctaaatggctgtcacaagacc

SEQ ID NO: 4900802 - DNA, 25 bp, Homo sapien
gcagactgatgaattcttgtttatt

SEQ ID NO: 4900803 - DNA, 25 bp, Homo sapien
gcttcttcttatgcagactgatgaa

SEQ ID NO: 4900804 - DNA, 25 bp, Homo sapien
tggctgtcacaagacctattcatca

SEQ ID NO: 4900805 - DNA, 25 bp, Homo sapien
gggagacactcccaagcttggaaac

SEQ ID NO: 4900806 - DNA, 25 bp, Homo sapien
tataggagggatgttgattaaggct

SEQ ID NO: 4900807 - DNA, 25 bp, Homo sapien
gattaaggcttcagtttccaacagg

SEQ ID NO: 4900808 - DNA, 25 bp, Homo sapien
gagatctgtcaaggatgaacatgaa

SEQ ID NO: 4900809 - DNA, 25 bp, Homo sapien
gagcacacggctctttctcaatcag

SEQ ID NO: 4900810 - DNA, 25 bp, Homo sapien
gtttcactgggttggaattgcagtt

SEQ ID NO: 4900811 - DNA, 25 bp, Homo sapien
cagttttggaacgagagggagctct

SEQ ID NO: 4900812 - DNA, 25 bp, Homo sapien
tccagtagcaacataacaccgagca

SEQ ID NO: 4900813 - DNA, 25 bp, Homo sapien
gcctgtgcttgtcttagtacagact

SEQ ID NO: 4900814 - DNA, 25 bp, Homo sapien
ctgtgcttgtcttagtacagactgc

SEQ ID NO: 4900815 - DNA, 25 bp, Homo sapien
ggcctgtgcttgtcttagtacagac

SEQ ID NO: 4900816 - DNA, 25 bp, Homo sapien
cctgtgcttgtcttagtacagactg

SEQ ID NO: 4900817 - DNA, 25 bp, Homo sapien
cagtcagccttcatctgcacagctg

SEQ ID NO: 4900818 - DNA, 25 bp, Homo sapien
tgcagtcagccttcatctgcacagc

SEQ ID NO: 4900819 - DNA, 25 bp, Homo sapien
agtcagccttcatctgcacagctgc

SEQ ID NO: 4900820 - DNA, 25 bp, Homo sapien
cttgcagtcagccttcatctgcaca

SEQ ID NO: 4900821 - DNA, 25 bp, Homo sapien
tgcctgcagacttagtaggaaaatg

SEQ ID NO: 4900822 - DNA, 25 bp, Homo sapien
aggaaaatgtgttgagatctaggag

SEQ ID NO: 4900823 - DNA, 25 bp, Homo sapien
gctgcctgcagacttagtaggaaaa

SEQ ID NO: 4900824 - DNA, 25 bp, Homo sapien
tgagatctaggagtaacatctgctg

SEQ ID NO: 4900825 - DNA, 25 bp, Homo sapien
ttctagtgaagtatctaggtgtttc

SEQ ID NO: 4900826 - DNA, 25 bp, Homo sapien
ttgcaacttccaaatcatagtcttc

SEQ ID NO: 4900827 - DNA, 25 bp, Homo sapien
tctccattgcaacttccaaatcata

SEQ ID NO: 4900828 - DNA, 25 bp, Homo sapien
aagtatctaggtgtttcttctaata

SEQ ID NO: 4900829 - DNA, 25 bp, Homo sapien
ggttgtgaaattgcacaatttatgc

SEQ ID NO: 4900830 - DNA, 25 bp, Homo sapien
gagggttgtgaaattgcacaattta

SEQ ID NO: 4900831 - DNA, 25 bp, Homo sapien
ggagttggagggttgtgaaattgca

SEQ ID NO: 4900832 - DNA, 25 bp, Homo sapien
gaaattgcacaatttatgctgtcat

SEQ ID NO: 4900833 - DNA, 25 bp, Homo sapien
gatgctcggagagctcaagcttccg

SEQ ID NO: 4900834 - DNA, 25 bp, Homo sapien
gctcccatgaatacggatgctcgga

SEQ ID NO: 4900835 - DNA, 25 bp, Homo sapien
tcagtccggttaaatgggtcaccaa

SEQ ID NO: 4900836 - DNA, 25 bp, Homo sapien
cccattctggtcttgcaaagtacaa

SEQ ID NO: 4900837 - DNA, 25 bp, Homo sapien
ggcccttgacttgggagatcacagg

SEQ ID NO: 4900838 - DNA, 25 bp, Homo sapien
gcatttaataaccactgccttgtta

SEQ ID NO: 4900839 - DNA, 25 bp, Homo sapien
gagatcacaggcttcttaagggcaa

SEQ ID NO: 4900840 - DNA, 25 bp, Homo sapien
cttgtggcctgataggacgaggttt

SEQ ID NO: 4900841 - DNA, 25 bp, Homo sapien
agcccctgcgtctttcttgttccaa

SEQ ID NO: 4900842 - DNA, 25 bp, Homo sapien
gccattacaatatacagagaataga

SEQ ID NO: 4900843 - DNA, 25 bp, Homo sapien
aagtacagtgtgcttccagcccctg

SEQ ID NO: 4900844 - DNA, 25 bp, Homo sapien
ttaaaagtacagtgtgcttccagcc

SEQ ID NO: 4900845 - DNA, 25 bp, Homo sapien
gcggtgcgcgtctatagtccctgct

SEQ ID NO: 4900846 - DNA, 25 bp, Homo sapien
ttaagtctgagagtcacggctcccc

SEQ ID NO: 4900847 - DNA, 25 bp, Homo sapien
tagtgtcaccatgaaagtgagagct

SEQ ID NO: 4900848 - DNA, 25 bp, Homo sapien
tgtgggaaaatcctggtatcagtcc

SEQ ID NO: 4900849 - DNA, 25 bp, Homo sapien
catggatatgaatgtgaccagaggt

SEQ ID NO: 4900850 - DNA, 25 bp, Homo sapien
gggatgcaacatacactggtgcttt

SEQ ID NO: 4900851 - DNA, 25 bp, Homo sapien
tatgggtctgtacttgcacacgtgt

SEQ ID NO: 4900852 - DNA, 25 bp, Homo sapien
cagtaagtgcactctcctagatgtt

SEQ ID NO: 4900853 - DNA, 25 bp, Homo sapien
ttcactgtgggcagtaattagaggg

SEQ ID NO: 4900854 - DNA, 25 bp, Homo sapien
tagaggtgcaagaaggcatcggcca

SEQ ID NO: 4900855 - DNA, 25 bp, Homo sapien
caaaattctagcaatcagacagcag

SEQ ID NO: 4900856 - DNA, 25 bp, Homo sapien
agtcgggttcatagaggtgcaagaa

SEQ ID NO: 4900857 - DNA, 25 bp, Homo sapien
agctgcggttgccactttgcacact

SEQ ID NO: 4900858 - DNA, 25 bp, Homo sapien
tttgcacacttgcggtaaagggcag

SEQ ID NO: 4900859 - DNA, 25 bp, Homo sapien
tcagctgcggttgccactttgcaca

SEQ ID NO: 4900860 - DNA, 25 bp, Homo sapien
acacttgcggtaaagggcaggcttc

SEQ ID NO: 4900861 - DNA, 25 bp, Homo sapien
tgttattgtacttgtgagacgaagc

SEQ ID NO: 4900862 - DNA, 25 bp, Homo sapien
ggagcaaaggccacggctttcatga

SEQ ID NO: 4900863 - DNA, 25 bp, Homo sapien
gataaatgcctcctcaaacatttcc

SEQ ID NO: 4900864 - DNA, 25 bp, Homo sapien
gacgaagctttaggagcaaaggcca

SEQ ID NO: 4900865 - DNA, 25 bp, Homo sapien
tctttggaattaaggagatactgcc

SEQ ID NO: 4900866 - DNA, 25 bp, Homo sapien
ggagatactgccttatcgcctttgt

SEQ ID NO: 4900867 - DNA, 25 bp, Homo sapien
ccttctttggaattaaggagatact

SEQ ID NO: 4900868 - DNA, 25 bp, Homo sapien
gatactgccttatcgcctttgtctc

SEQ ID NO: 4900869 - DNA, 25 bp, Homo sapien
cctgctggtgtgagataattcagtc

SEQ ID NO: 4900870 - DNA, 25 bp, Homo sapien
gctccaaagaccatgaacctgaact

SEQ ID NO: 4900871 - DNA, 25 bp, Homo sapien
cacttctgctccaaagaccatgaac

SEQ ID NO: 4900872 - DNA, 25 bp, Homo sapien
cttcctgctggtgtgagataattca

SEQ ID NO: 4900873 - DNA, 25 bp, Homo sapien
atatttaggtaggaatcttctttat

SEQ ID NO: 4900874 - DNA, 25 bp, Homo sapien
tatatttaggtaggaatcttcttta

SEQ ID NO: 4900875 - DNA, 25 bp, Homo sapien
caaactgaatatttactgggctgac

SEQ ID NO: 4900876 - DNA, 25 bp, Homo sapien
tattagattcctgcacagtttgtgc

SEQ ID NO: 4900877 - DNA, 25 bp, Homo sapien
tgacatttggcaggctcggctgtgt

SEQ ID NO: 4900878 - DNA, 25 bp, Homo sapien
gttttattgttgtctgttcccagtg

SEQ ID NO: 4900879 - DNA, 25 bp, Homo sapien
tcacactaatacttgtgcaacttca

SEQ ID NO: 4900880 - DNA, 25 bp, Homo sapien
ggctgttcagcagcttgaccattgt

SEQ ID NO: 4900881 - DNA, 25 bp, Homo sapien
cttcactagggggagctcttggctg

SEQ ID NO: 4900882 - DNA, 25 bp, Homo sapien
tggctgttcagcagcttgaccattg

SEQ ID NO: 4900883 - DNA, 25 bp, Homo sapien
catctgagagctattatcacttgtc

SEQ ID NO: 4900884 - DNA, 25 bp, Homo sapien
ctttagcatctgagagctattatca

SEQ ID NO: 4900885 - DNA, 25 bp, Homo sapien
agcatctgagagctattatcacttg

SEQ ID NO: 4900886 - DNA, 25 bp, Homo sapien
ttagcatctgagagctattatcact

SEQ ID NO: 4900887 - DNA, 25 bp, Homo sapien
tctgggtcacaccccgcaatgatgt

SEQ ID NO: 4900888 - DNA, 25 bp, Homo sapien
tgggtcacaccccgcaatgatgtca

SEQ ID NO: 4900889 - DNA, 25 bp, Homo sapien
ggtcacaccccgcaatgatgtcact

SEQ ID NO: 4900890 - DNA, 25 bp, Homo sapien
gtcacaccccgcaatgatgtcactt

SEQ ID NO: 4900891 - DNA, 25 bp, Homo sapien
attttggaacggcagcaacttggag

SEQ ID NO: 4900892 - DNA, 25 bp, Homo sapien
ctatccatattttggaacggcagca

SEQ ID NO: 4900893 - DNA, 25 bp, Homo sapien
gtgggcacactgaattgaggaaaca

SEQ ID NO: 4900894 - DNA, 25 bp, Homo sapien
cacactgaattgaggaaacactctg

SEQ ID NO: 4900895 - DNA, 25 bp, Homo sapien
tgccagatctgaagttgctgggtca

SEQ ID NO: 4900896 - DNA, 25 bp, Homo sapien
gccagatctgaagttgctgggtcat

SEQ ID NO: 4900897 - DNA, 25 bp, Homo sapien
ccttggtgcggagtctttcaatttc

SEQ ID NO: 4900898 - DNA, 25 bp, Homo sapien
caccttggtgcggagtctttcaatt

SEQ ID NO: 4900899 - DNA, 25 bp, Homo sapien
accttggtgcggagtctttcaattt

SEQ ID NO: 4900900 - DNA, 25 bp, Homo sapien
tcattgctggattgcggaggactcc

SEQ ID NO: 4900901 - DNA, 25 bp, Homo sapien
caacatgcaggtacttgtgaggctc

SEQ ID NO: 4900902 - DNA, 25 bp, Homo sapien
tactggctatcaggctcgggccaat

SEQ ID NO: 4900903 - DNA, 25 bp, Homo sapien
gaagaggttgactcccctgggatga

SEQ ID NO: 4900904 - DNA, 25 bp, Homo sapien
gctcccttccagcccgtttattatg

SEQ ID NO: 4900905 - DNA, 25 bp, Homo sapien
tctaccaccacggaaatcttccaag

SEQ ID NO: 4900906 - DNA, 25 bp, Homo sapien
cacggaaatcttccaagttggcagc

SEQ ID NO: 4900907 - DNA, 25 bp, Homo sapien
ttacagaggaggacctcggctccct

SEQ ID NO: 4900908 - DNA, 25 bp, Homo sapien
atttggtctgcgcagtgcaggtctc

SEQ ID NO: 4900909 - DNA, 25 bp, Homo sapien
aatgtatttggtctgcgcagtgcag

SEQ ID NO: 4900910 - DNA, 25 bp, Homo sapien
tctgcgcagtgcaggtctctctgct

SEQ ID NO: 4900911 - DNA, 25 bp, Homo sapien
tgaaatgtatttggtctgcgcagtg

SEQ ID NO: 4900912 - DNA, 25 bp, Homo sapien
ctggaccatagagttgttgagaagt

SEQ ID NO: 4900913 - DNA, 25 bp, Homo sapien
gaccatagagttgttgagaagtcat

SEQ ID NO: 4900914 - DNA, 25 bp, Homo sapien
ggaccatagagttgttgagaagtca

SEQ ID NO: 4900915 - DNA, 25 bp, Homo sapien
tggaccatagagttgttgagaagtc

SEQ ID NO: 4900916 - DNA, 25 bp, Homo sapien
tgatggtcctaattccagacacaaa

SEQ ID NO: 4900917 - DNA, 25 bp, Homo sapien
gtgatggtcctaattccagacacaa

SEQ ID NO: 4900918 - DNA, 25 bp, Homo sapien
ggtgatggtcctaattccagacaca

SEQ ID NO: 4900919 - DNA, 25 bp, Homo sapien
aacttgttagttgcttgtgaattca

SEQ ID NO: 4900920 - DNA, 25 bp, Homo sapien
tctgatagttgctgacttagggaac

SEQ ID NO: 4900921 - DNA, 25 bp, Homo sapien
tgcaacagatctgatagttgctgac

SEQ ID NO: 4900922 - DNA, 25 bp, Homo sapien
gctgtcctccagaaatcatgtctgg

SEQ ID NO: 4900923 - DNA, 25 bp, Homo sapien
tagaatcagatgtgctcagtgaaaa

SEQ ID NO: 4900924 - DNA, 25 bp, Homo sapien
gtagaatcagatgtgctcagtgaaa

SEQ ID NO: 4900925 - DNA, 25 bp, Homo sapien
attcaggtgaactgggttggagtca

SEQ ID NO: 4900926 - DNA, 25 bp, Homo sapien
ttacatcctggttaataccactttc

SEQ ID NO: 4900927 - DNA, 25 bp, Homo sapien
tgcctttgaaattcaggtgaactgg

SEQ ID NO: 4900928 - DNA, 25 bp, Homo sapien
catcctggttaataccactttctac

SEQ ID NO: 4900929 - DNA, 25 bp, Homo sapien
ctaaaacactggtgaggaggcccat

SEQ ID NO: 4900930 - DNA, 25 bp, Homo sapien
cctaaaacactggtgaggaggccca

SEQ ID NO: 4900931 - DNA, 25 bp, Homo sapien
tgcgtgtgaatgaccacaatgcagc

SEQ ID NO: 4900932 - DNA, 25 bp, Homo sapien
cgtgtgaatgaccacaatgcagctg

SEQ ID NO: 4900933 - DNA, 25 bp, Homo sapien
gtgaatgaccacaatgcagctgaga

SEQ ID NO: 4900934 - DNA, 25 bp, Homo sapien
tcaatgcgtgtgaatgaccacaatg

SEQ ID NO: 4900935 - DNA, 25 bp, Homo sapien
agtgcctgctcttaagatagtatgg

SEQ ID NO: 4900936 - DNA, 25 bp, Homo sapien
ctcttgcaccaggttcttggaactc

SEQ ID NO: 4900937 - DNA, 25 bp, Homo sapien
gctcttgcaccaggttcttggaact

SEQ ID NO: 4900938 - DNA, 25 bp, Homo sapien
tcttgcaccaggttcttggaactct

SEQ ID NO: 4900939 - DNA, 25 bp, Homo sapien
ggttgccttctaatgtactgggctc

SEQ ID NO: 4900940 - DNA, 25 bp, Homo sapien
ctggaggttgccttctaatgtactg

SEQ ID NO: 4900941 - DNA, 25 bp, Homo sapien
ttgccttctaatgtactgggctcct

SEQ ID NO: 4900942 - DNA, 25 bp, Homo sapien
ggaggttgccttctaatgtactggg

SEQ ID NO: 4900943 - DNA, 25 bp, Homo sapien
cccacgcagcacagtggatggatgg

SEQ ID NO: 4900944 - DNA, 25 bp, Homo sapien
cagtttccatgccacagaatgtgct

SEQ ID NO: 4900945 - DNA, 25 bp, Homo sapien
ttccctgcgttagaaatgccactgc

SEQ ID NO: 4900946 - DNA, 25 bp, Homo sapien
gaatgtgctgaagtcgtctggcagc

SEQ ID NO: 4900947 - DNA, 25 bp, Homo sapien
aagatcagacaagatccagtgcgtt

SEQ ID NO: 4900948 - DNA, 25 bp, Homo sapien
gatcagacaagatccagtgcgttca

SEQ ID NO: 4900949 - DNA, 25 bp, Homo sapien
cagtcctgaccctgtttaccttcca

SEQ ID NO: 4900950 - DNA, 25 bp, Homo sapien
agacaagatccagtgcgttcagggt

SEQ ID NO: 4900951 - DNA, 25 bp, Homo sapien
gccctgctgagtggaattccccatt

SEQ ID NO: 4900952 - DNA, 25 bp, Homo sapien
gaagccctgatgcaattgaatctgc

SEQ ID NO: 4900953 - DNA, 25 bp, Homo sapien
gagcagcctgctattagaaacgcct

SEQ ID NO: 4900954 - DNA, 25 bp, Homo sapien
gaatagatactctagagaagggccc

SEQ ID NO: 4900955 - DNA, 25 bp, Homo sapien
tttgtgctccatgtactgatgtggc

SEQ ID NO: 4900956 - DNA, 25 bp, Homo sapien
tggtctgttctttcaccagatgttg

SEQ ID NO: 4900957 - DNA, 25 bp, Homo sapien
tctgactgtctggtgctcatgtaac

SEQ ID NO: 4900958 - DNA, 25 bp, Homo sapien
tcaacaggctccaatacgtctctct

SEQ ID NO: 4900959 - DNA, 25 bp, Homo sapien
tggatgacatagctaaacgcctctt

SEQ ID NO: 4900960 - DNA, 25 bp, Homo sapien
gctgcatagtgcaattaaatgtgca

SEQ ID NO: 4900961 - DNA, 25 bp, Homo sapien
tcttgggaatgatggtaattctgca

SEQ ID NO: 4900962 - DNA, 25 bp, Homo sapien
tcttctggtcaaggaacccaaagag

SEQ ID NO: 4900963 - DNA, 25 bp, Homo sapien
tgagtgcttgtgttaagtccaatgt

SEQ ID NO: 4900964 - DNA, 25 bp, Homo sapien
ttgtgttaagtccaatgtggcccag

SEQ ID NO: 4900965 - DNA, 25 bp, Homo sapien
aagaagttagttctctggtgagagt

SEQ ID NO: 4900966 - DNA, 25 bp, Homo sapien
aagttagttctctggtgagagtgag

SEQ ID NO: 4900967 - DNA, 25 bp, Homo sapien
tggagtgtctggtacgggttgttcc

SEQ ID NO: 4900968 - DNA, 25 bp, Homo sapien
gcatgtttttggagtgtctggtacg

SEQ ID NO: 4900969 - DNA, 25 bp, Homo sapien
cttccttcaggagttcttgtaaggc

SEQ ID NO: 4900970 - DNA, 25 bp, Homo sapien
cttcaggagttcttgtaaggcaggc

SEQ ID NO: 4900971 - DNA, 25 bp, Homo sapien
tagaagtgctccatgcagaaaagag

SEQ ID NO: 4900972 - DNA, 25 bp, Homo sapien
gagggcaaggtatgaagctatatta

SEQ ID NO: 4900973 - DNA, 25 bp, Homo sapien
tatctgtagggtccaaatggttgag

SEQ ID NO: 4900974 - DNA, 25 bp, Homo sapien
taagaacagggcgaagagggtatct

SEQ ID NO: 4900975 - DNA, 25 bp, Homo sapien
ctggggagtacggctgagatttcct

SEQ ID NO: 4900976 - DNA, 25 bp, Homo sapien
tggggagtacggctgagatttcctt

SEQ ID NO: 4900977 - DNA, 25 bp, Homo sapien
ctccacctgagtctgcctcgtcctc

SEQ ID NO: 4900978 - DNA, 25 bp, Homo sapien
ccacctgagtctgcctcgtcctccc

SEQ ID NO: 4900979 - DNA, 25 bp, Homo sapien
aaatgtgaggctcggtctgatggaa

SEQ ID NO: 4900980 - DNA, 25 bp, Homo sapien
tgtgaggctcggtctgatggaacgg

SEQ ID NO: 4900981 - DNA, 25 bp, Homo sapien
cctgaaatgtgaggctcggtctgat

SEQ ID NO: 4900982 - DNA, 25 bp, Homo sapien
ggctcggtctgatggaacggtttgg

SEQ ID NO: 4900983 - DNA, 25 bp, Homo sapien
tgtgggtaggagagccatttagtcc

SEQ ID NO: 4900984 - DNA, 25 bp, Homo sapien
gggtaggagagccatttagtcccaa

SEQ ID NO: 4900985 - DNA, 25 bp, Homo sapien
gaagtgtgggtaggagagccattta

SEQ ID NO: 4900986 - DNA, 25 bp, Homo sapien
ctgaagtgtgggtaggagagccatt

SEQ ID NO: 4900987 - DNA, 25 bp, Homo sapien
gcgtccctccgtgtcagcgcatttc

SEQ ID NO: 4900988 - DNA, 25 bp, Homo sapien
agcgcgcgggagtccatttccagcg

SEQ ID NO: 4900989 - DNA, 25 bp, Homo sapien
ggctttcaagggcaaggccgccgcc

SEQ ID NO: 4900990 - DNA, 25 bp, Homo sapien
ttcacagcgccaattagcccgggct

SEQ ID NO: 4900991 - DNA, 25 bp, Homo sapien
gccagtgcaaactctgcaagactcc

SEQ ID NO: 4900992 - DNA, 25 bp, Homo sapien
gccttgccagtgcaaactctgcaag

SEQ ID NO: 4900993 - DNA, 25 bp, Homo sapien
acgccatcagccctagtctgattgc

SEQ ID NO: 4900994 - DNA, 25 bp, Homo sapien
tctgattgcagtcgcctgttcacag

SEQ ID NO: 4900995 - DNA, 25 bp, Homo sapien
cttagtttggtggtgtttccagtgg

SEQ ID NO: 4900996 - DNA, 25 bp, Homo sapien
aaggcgacgactgtgtcttgtctgg

SEQ ID NO: 4900997 - DNA, 25 bp, Homo sapien
ttctcccactcctgctagacttaaa

SEQ ID NO: 4900998 - DNA, 25 bp, Homo sapien
tcctgctagacttaaatccccttga

SEQ ID NO: 4900999 - DNA, 25 bp, Homo sapien
taaatccccttgaaggcgacgactg

SEQ ID NO: 4901000 - DNA, 25 bp, Homo sapien
tagttcttatacagtgggagtcaac

SEQ ID NO: 4901001 - DNA, 25 bp, Homo sapien
tgattttataaaacccgtgtgacaa

SEQ ID NO: 4901002 - DNA, 25 bp, Homo sapien
acaatgctaatggagatagatgcac

SEQ ID NO: 4901003 - DNA, 25 bp, Homo sapien
gatagatgcactgtagttcttatac

SEQ ID NO: 4901004 - DNA, 25 bp, Homo sapien
ttctgagggaagctttagtgggcca

SEQ ID NO: 4901005 - DNA, 25 bp, Homo sapien
tgctttctgagggaagctttagtgg

SEQ ID NO: 4901006 - DNA, 25 bp, Homo sapien
caggggttgttcagaccttgttgga

SEQ ID NO: 4901007 - DNA, 25 bp, Homo sapien
gccaggggttgttcagaccttgttg

SEQ ID NO: 4901008 - DNA, 25 bp, Homo sapien
atcctccactgttcaaaccttcatt

SEQ ID NO: 4901009 - DNA, 25 bp, Homo sapien
gatgaccttcctacaggctgtaaac

SEQ ID NO: 4901010 - DNA, 25 bp, Homo sapien
gactgtttgatattgagagatgacc

SEQ ID NO: 4901011 - DNA, 25 bp, Homo sapien
taaacaattgcttttcaggacagtc

SEQ ID NO: 4901012 - DNA, 25 bp, Homo sapien
cattgccatcatcctgatcaatccg

SEQ ID NO: 4901013 - DNA, 25 bp, Homo sapien
catcatcctgatcaatccggtcttg

SEQ ID NO: 4901014 - DNA, 25 bp, Homo sapien
caatccggtcttggtgccgtgctcc

SEQ ID NO: 4901015 - DNA, 25 bp, Homo sapien
tgatcaatccggtcttggtgccgtg

SEQ ID NO: 4901016 - DNA, 25 bp, Homo sapien
aaagccactccagtgccatgagggt

SEQ ID NO: 4901017 - DNA, 25 bp, Homo sapien
caacacttttggctctctgactatg

SEQ ID NO: 4901018 - DNA, 25 bp, Homo sapien
ggagctggaatgtaaagcctcaaca

SEQ ID NO: 4901019 - DNA, 25 bp, Homo sapien
cacatacacatgctggatgtgagca

SEQ ID NO: 4901020 - DNA, 25 bp, Homo sapien
caatcgtgtcttgctgtggatgcag

SEQ ID NO: 4901021 - DNA, 25 bp, Homo sapien
caggtccagtggtgtcgttctgcca

SEQ ID NO: 4901022 - DNA, 25 bp, Homo sapien
ctcgtggcctggtgactgagatcca

SEQ ID NO: 4901023 - DNA, 25 bp, Homo sapien
gatgaagttgagcatggtacagccc

SEQ ID NO: 4901024 - DNA, 25 bp, Homo sapien
ttgtatgatgaatcctatcacggaa

SEQ ID NO: 4901025 - DNA, 25 bp, Homo sapien
tatgatttagctgctagaatccctg

SEQ ID NO: 4901026 - DNA, 25 bp, Homo sapien
tagctgctagaatccctgaagtcac

SEQ ID NO: 4901027 - DNA, 25 bp, Homo sapien
ctgttggtatgatttagctgctaga

SEQ ID NO: 4901028 - DNA, 25 bp, Homo sapien
ggcagttgggccctctgcgcttgaa

SEQ ID NO: 4901029 - DNA, 25 bp, Homo sapien
gggccctctgcgcttgaatagttaa

SEQ ID NO: 4901030 - DNA, 25 bp, Homo sapien
cctctgcgcttgaatagttaagtga

SEQ ID NO: 4901031 - DNA, 25 bp, Homo sapien
ttttgagggcagttgggccctctgc

SEQ ID NO: 4901032 - DNA, 25 bp, Homo sapien
tctctgcacttgttctacctgctgc

SEQ ID NO: 4901033 - DNA, 25 bp, Homo sapien
tcctgaggcaagctgaggacatcct

SEQ ID NO: 4901034 - DNA, 25 bp, Homo sapien
tgaggacatcctgggttgtatgcat

SEQ ID NO: 4901035 - DNA, 25 bp, Homo sapien
caagctgaggacatcctgggttgta

SEQ ID NO: 4901036 - DNA, 25 bp, Homo sapien
cactgctaggtcctgaggcaagctg

SEQ ID NO: 4901037 - DNA, 25 bp, Homo sapien
aggaatgtggagacggtccctagaa

SEQ ID NO: 4901038 - DNA, 25 bp, Homo sapien
ggaatgtggagacggtccctagaaa

SEQ ID NO: 4901039 - DNA, 25 bp, Homo sapien
tgtggagacggtccctagaaattca

SEQ ID NO: 4901040 - DNA, 25 bp, Homo sapien
gagacggtccctagaaattcagcat

SEQ ID NO: 4901041 - DNA, 25 bp, Homo sapien
ccaagtgagtagagtgacttctttt

SEQ ID NO: 4901042 - DNA, 25 bp, Homo sapien
ggacatttgagtacagccccccaag

SEQ ID NO: 4901043 - DNA, 25 bp, Homo sapien
agtttcagtgggtggttgtttcctg

SEQ ID NO: 4901044 - DNA, 25 bp, Homo sapien
tgctgtctccaagttcggagggtgt

SEQ ID NO: 4901045 - DNA, 25 bp, Homo sapien
caaatgtatccatatccataacctt

SEQ ID NO: 4901046 - DNA, 25 bp, Homo sapien
aatgtatccatatccataaccttgt

SEQ ID NO: 4901047 - DNA, 25 bp, Homo sapien
caactttatgtgcaaatgtatccat

SEQ ID NO: 4901048 - DNA, 25 bp, Homo sapien
tatgtgcaaatgtatccatatccat

SEQ ID NO: 4901049 - DNA, 25 bp, Homo sapien
gcttggaattgtcgggtttgtctga

SEQ ID NO: 4901050 - DNA, 25 bp, Homo sapien
tggaattgtcgggtttgtctgaaag

SEQ ID NO: 4901051 - DNA, 25 bp, Homo sapien
cagggctgctgccactagcttggaa

SEQ ID NO: 4901052 - DNA, 25 bp, Homo sapien
tgctgccactagcttggaattgtcg

SEQ ID NO: 4901053 - DNA, 25 bp, Homo sapien
ccatttttaccaaggtgtacacagg

SEQ ID NO: 4901054 - DNA, 25 bp, Homo sapien
ttgcagaaatccgtggaagggctct

SEQ ID NO: 4901055 - DNA, 25 bp, Homo sapien
tacacaggaggaatgaaagcaaagc

SEQ ID NO: 4901056 - DNA, 25 bp, Homo sapien
gaagatactgggagataccatggat

SEQ ID NO: 4901057 - DNA, 25 bp, Homo sapien
gcttttagctaaatcattgctctgt

SEQ ID NO: 4901058 - DNA, 25 bp, Homo sapien
agaactgctagttgctgaagctgca

SEQ ID NO: 4901059 - DNA, 25 bp, Homo sapien
tccagaactgctagttgctgaagct

SEQ ID NO: 4901060 - DNA, 25 bp, Homo sapien
atcttccagaactgctagttgctga

SEQ ID NO: 4901061 - DNA, 25 bp, Homo sapien
ctaggcaaccatgccttgactaaat

SEQ ID NO: 4901062 - DNA, 25 bp, Homo sapien
aaatcttctcaggatgagggtgcac

SEQ ID NO: 4901063 - DNA, 25 bp, Homo sapien
ggcaaccatgccttgactaaatctt

SEQ ID NO: 4901064 - DNA, 25 bp, Homo sapien
ttgactaaatcttctcaggatgagg

SEQ ID NO: 4901065 - DNA, 25 bp, Homo sapien
ttacaggttagctcgggatgaatag

SEQ ID NO: 4901066 - DNA, 25 bp, Homo sapien
ggttagctcgggatgaataggaggg

SEQ ID NO: 4901067 - DNA, 25 bp, Homo sapien
aggttagctcgggatgaataggagg

SEQ ID NO: 4901068 - DNA, 25 bp, Homo sapien
acaggttagctcgggatgaatagga

SEQ ID NO: 4901069 - DNA, 25 bp, Homo sapien
tcacgttgcaagtccccgtgcttca

SEQ ID NO: 4901070 - DNA, 25 bp, Homo sapien
ttttcattccagtcacgttgcaagt

SEQ ID NO: 4901071 - DNA, 25 bp, Homo sapien
tcttggccatagttcatgccatctc

SEQ ID NO: 4901072 - DNA, 25 bp, Homo sapien
attccagtcacgttgcaagtccccg

SEQ ID NO: 4901073 - DNA, 25 bp, Homo sapien
tgacattaaaaatttcctctccagg

SEQ ID NO: 4901074 - DNA, 25 bp, Homo sapien
tttgacattaaaaatttcctctcca

SEQ ID NO: 4901075 - DNA, 25 bp, Homo sapien
ttgacattaaaaatttcctctccag

SEQ ID NO: 4901076 - DNA, 25 bp, Homo sapien
cattaaaaatttcctctccagggtg

SEQ ID NO: 4901077 - DNA, 25 bp, Homo sapien
acccttctccctggtgtgtattctc

SEQ ID NO: 4901078 - DNA, 25 bp, Homo sapien
aacccttctccctggtgtgtattct

SEQ ID NO: 4901079 - DNA, 25 bp, Homo sapien
gcttttccgcggtcgctgcactcat

SEQ ID NO: 4901080 - DNA, 25 bp, Homo sapien
tcgttgaaggcttttccgcggtcgc

SEQ ID NO: 4901081 - DNA, 25 bp, Homo sapien
aaggcttttccgcggtcgctgcact

SEQ ID NO: 4901082 - DNA, 25 bp, Homo sapien
tgaaggcttttccgcggtcgctgca

SEQ ID NO: 4901083 - DNA, 25 bp, Homo sapien
tgcagtcaaagggcttctctttgag

SEQ ID NO: 4901084 - DNA, 25 bp, Homo sapien
tctttgaggtgagttcttgcatggc

SEQ ID NO: 4901085 - DNA, 25 bp, Homo sapien
caaagggcttctctttgaggtgagt

SEQ ID NO: 4901086 - DNA, 25 bp, Homo sapien
tttgaggtgagttcttgcatggctc

SEQ ID NO: 4901087 - DNA, 25 bp, Homo sapien
gagagggtccagaatgcatttccac

SEQ ID NO: 4901088 - DNA, 25 bp, Homo sapien
agggtccagaatgcatttccacact

SEQ ID NO: 4901089 - DNA, 25 bp, Homo sapien
ctgagagggtccagaatgcatttcc

SEQ ID NO: 4901090 - DNA, 25 bp, Homo sapien
gagggtccagaatgcatttccacac

SEQ ID NO: 4901091 - DNA, 25 bp, Homo sapien
gtgtgaagtctcgtggattttcagg

SEQ ID NO: 4901092 - DNA, 25 bp, Homo sapien
tgtgaagtctcgtggattttcaggg

SEQ ID NO: 4901093 - DNA, 25 bp, Homo sapien
gcactgatcacacttgtaagggctc

SEQ ID NO: 4901094 - DNA, 25 bp, Homo sapien
ctgcactgatcacacttgtaagggc

SEQ ID NO: 4901095 - DNA, 25 bp, Homo sapien
tgatcacacttgtaagggctctcac

SEQ ID NO: 4901096 - DNA, 25 bp, Homo sapien
actgatcacacttgtaagggctctc

SEQ ID NO: 4901097 - DNA, 25 bp, Homo sapien
agtgtgcgttcttttgtgtgcaatg

SEQ ID NO: 4901098 - DNA, 25 bp, Homo sapien
cacagtcgtgacacttacagggcct

SEQ ID NO: 4901099 - DNA, 25 bp, Homo sapien
ggcttctccgccgtgtgattcctca

SEQ ID NO: 4901100 - DNA, 25 bp, Homo sapien
ttccagcggaaggttttgccgcact

SEQ ID NO: 4901101 - DNA, 25 bp, Homo sapien
tagggcttctccgccgtgtgattcc

SEQ ID NO: 4901102 - DNA, 25 bp, Homo sapien
ttttgccgcactgcgtgcatgcgta

SEQ ID NO: 4901103 - DNA, 25 bp, Homo sapien
gggacatgatagctcttctccgcca

SEQ ID NO: 4901104 - DNA, 25 bp, Homo sapien
ctccggggacatgatagctcttctc

SEQ ID NO: 4901105 - DNA, 25 bp, Homo sapien
gatagctcttctccgccatgtggtt

SEQ ID NO: 4901106 - DNA, 25 bp, Homo sapien
atgatagctcttctccgccatgtgg

SEQ ID NO: 4901107 - DNA, 25 bp, Homo sapien
tttcttgactatgtgaagtctcatg

SEQ ID NO: 4901108 - DNA, 25 bp, Homo sapien
ggttttcctacactgccgacattcc

SEQ ID NO: 4901109 - DNA, 25 bp, Homo sapien
cacgggtttcttgactatgtgaagt

SEQ ID NO: 4901110 - DNA, 25 bp, Homo sapien
ggtttcttgactatgtgaagtctca

SEQ ID NO: 4901111 - DNA, 25 bp, Homo sapien
cagtcgttaacgtctctcttgtgtg

SEQ ID NO: 4901112 - DNA, 25 bp, Homo sapien
ggtggcgcagtcgttaacgtctctc

SEQ ID NO: 4901113 - DNA, 25 bp, Homo sapien
ggcgcagtcgttaacgtctctcttg

SEQ ID NO: 4901114 - DNA, 25 bp, Homo sapien
caggtggcgcagtcgttaacgtctc

SEQ ID NO: 4901115 - DNA, 25 bp, Homo sapien
aaggctttgtcacactgcctactct

SEQ ID NO: 4901116 - DNA, 25 bp, Homo sapien
tcacactgcctactctcaacgcgtt

SEQ ID NO: 4901117 - DNA, 25 bp, Homo sapien
ggctttgtcacactgcctactctca

SEQ ID NO: 4901118 - DNA, 25 bp, Homo sapien
gtcacactgcctactctcaacgcgt

SEQ ID NO: 4901119 - DNA, 25 bp, Homo sapien
tgaaggaataatgttcgctgaaggc

SEQ ID NO: 4901120 - DNA, 25 bp, Homo sapien
tcctgaaggaataatgttcgctgaa

SEQ ID NO: 4901121 - DNA, 25 bp, Homo sapien
aaggaataatgttcgctgaaggctt

SEQ ID NO: 4901122 - DNA, 25 bp, Homo sapien
cctgaaggaataatgttcgctgaag

SEQ ID NO: 4901123 - DNA, 25 bp, Homo sapien
acatggacgactcaaagagcttctc

SEQ ID NO: 4901124 - DNA, 25 bp, Homo sapien
ccttttccacatggacgactcaaag

SEQ ID NO: 4901125 - DNA, 25 bp, Homo sapien
tccacatggacgactcaaagagctt

SEQ ID NO: 4901126 - DNA, 25 bp, Homo sapien
ttttccacatggacgactcaaagag

SEQ ID NO: 4901127 - DNA, 25 bp, Homo sapien
cgcatggtcataaggtggatcttcc

SEQ ID NO: 4901128 - DNA, 25 bp, Homo sapien
tctcagaagcccatgcagcgaatct

SEQ ID NO: 4901129 - DNA, 25 bp, Homo sapien
taggtaccgaatctccttgcaaggt

SEQ ID NO: 4901130 - DNA, 25 bp, Homo sapien
tttctcatgtgataggacgtctgga

SEQ ID NO: 4901131 - DNA, 25 bp, Homo sapien
tctgatgaggtctctaagtacaaca

SEQ ID NO: 4901132 - DNA, 25 bp, Homo sapien
tatgggaatgtagtatgacaccggt

SEQ ID NO: 4901133 - DNA, 25 bp, Homo sapien
tgacaccggtggcattttaatgtag

SEQ ID NO: 4901134 - DNA, 25 bp, Homo sapien
tcgttgtttcgtaagtgatggaggc

SEQ ID NO: 4901135 - DNA, 25 bp, Homo sapien
tgctgacagtctggcctctgtttgc

SEQ ID NO: 4901136 - DNA, 25 bp, Homo sapien
gctgctgacagtctggcctctgttt

SEQ ID NO: 4901137 - DNA, 25 bp, Homo sapien
ctgctgctgacagtctggcctctgt

SEQ ID NO: 4901138 - DNA, 25 bp, Homo sapien
ctgacagtctggcctctgtttgcat

SEQ ID NO: 4901139 - DNA, 25 bp, Homo sapien
ctttcagtgcattgccgggcctttg

SEQ ID NO: 4901140 - DNA, 25 bp, Homo sapien
aagcccagtgctagcctaccattga

SEQ ID NO: 4901141 - DNA, 25 bp, Homo sapien
ttactgtgtcgtcagcaggctcacc

SEQ ID NO: 4901142 - DNA, 25 bp, Homo sapien
gacgcgatgctcattaaagcccagt

SEQ ID NO: 4901143 - DNA, 25 bp, Homo sapien
tccacaacgttggaagagtctcctc

SEQ ID NO: 4901144 - DNA, 25 bp, Homo sapien
aatatcctggtacctcaaagaacag

SEQ ID NO: 4901145 - DNA, 25 bp, Homo sapien
gaccactgctatgtggcttaccagc

SEQ ID NO: 4901146 - DNA, 25 bp, Homo sapien
ggctctttggtctgccctgttaaga

SEQ ID NO: 4901147 - DNA, 25 bp, Homo sapien
tatgatgggagataccttctggctc

SEQ ID NO: 4901148 - DNA, 25 bp, Homo sapien
catagtcgtggtcaactctgagcgc

SEQ ID NO: 4901149 - DNA, 25 bp, Homo sapien
aaatgattaccacaagggattgctc

SEQ ID NO: 4901150 - DNA, 25 bp, Homo sapien
tgtaattggagtttgttctatgcct

SEQ ID NO: 4901151 - DNA, 25 bp, Homo sapien
ggaaggagctgtgctttctgcctca

SEQ ID NO: 4901152 - DNA, 25 bp, Homo sapien
ctgcccttggaaggagctgtgcttt

SEQ ID NO: 4901153 - DNA, 25 bp, Homo sapien
cttggaaggagctgtgctttctgcc

SEQ ID NO: 4901154 - DNA, 25 bp, Homo sapien
tgcccttggaaggagctgtgctttc

SEQ ID NO: 4901155 - DNA, 25 bp, Homo sapien
tccgcctgtgcgacttgtagtctcg

SEQ ID NO: 4901156 - DNA, 25 bp, Homo sapien
agacgcgtccgcttcactgctgaat

SEQ ID NO: 4901157 - DNA, 25 bp, Homo sapien
gaatctgaaaacgtgggctcttgag

SEQ ID NO: 4901158 - DNA, 25 bp, Homo sapien
agcgctgctaggctactccgagcag

SEQ ID NO: 4901159 - DNA, 25 bp, Homo sapien
acggcgcctccatcctctctaacag

SEQ ID NO: 4901160 - DNA, 25 bp, Homo sapien
gcggttgtcccgcgcgtccctgccg

SEQ ID NO: 4901161 - DNA, 25 bp, Homo sapien
gctgtgagaagcaccgcggggctac

SEQ ID NO: 4901162 - DNA, 25 bp, Homo sapien
tgcagagccgcctgcgcggttgtcc

SEQ ID NO: 4901163 - DNA, 25 bp, Homo sapien
tttctatggaaacggggcgcgcgcc

SEQ ID NO: 4901164 - DNA, 25 bp, Homo sapien
cccccgcggtcaatgcccgaggcag

SEQ ID NO: 4901165 - DNA, 25 bp, Homo sapien
gcaggccgggcgtttctatggaaac

SEQ ID NO: 4901166 - DNA, 25 bp, Homo sapien
agcagccgccgggagcctgaaagcc

SEQ ID NO: 4901167 - DNA, 25 bp, Homo sapien
ggattccaaggcgcctgggcgcgcg

SEQ ID NO: 4901168 - DNA, 25 bp, Homo sapien
cggggattccaaggcgcctgggcgc

SEQ ID NO: 4901169 - DNA, 25 bp, Homo sapien
gacggggattccaaggcgcctgggc

SEQ ID NO: 4901170 - DNA, 25 bp, Homo sapien
caaggacggggattccaaggcgcct

SEQ ID NO: 4901171 - DNA, 25 bp, Homo sapien
cggttttccagggtgcgcctcatca

SEQ ID NO: 4901172 - DNA, 25 bp, Homo sapien
ggttttccagggtgcgcctcatcat

SEQ ID NO: 4901173 - DNA, 25 bp, Homo sapien
tgggcagctgggctcgggctgttac

SEQ ID NO: 4901174 - DNA, 25 bp, Homo sapien
ctccagtgtgggcggccctgggcag

SEQ ID NO: 4901175 - DNA, 25 bp, Homo sapien
cagccctccagtgtgggcggccctg

SEQ ID NO: 4901176 - DNA, 25 bp, Homo sapien
cccagccctccagtgtgggcggccc

SEQ ID NO: 4901177 - DNA, 25 bp, Homo sapien
tgtgtaggcacaggaaaaggcccag

SEQ ID NO: 4901178 - DNA, 25 bp, Homo sapien
aattcggcgcagaggccccatggac

SEQ ID NO: 4901179 - DNA, 25 bp, Homo sapien
gcctcccactcagggtcggaattcg

SEQ ID NO: 4901180 - DNA, 25 bp, Homo sapien
tgcagcccaaggaattaggccccag

SEQ ID NO: 4901181 - DNA, 25 bp, Homo sapien
aaaggcaaaacattctcgttagaga

SEQ ID NO: 4901182 - DNA, 25 bp, Homo sapien
gagaaggcttcacgttaatttaaca

SEQ ID NO: 4901183 - DNA, 25 bp, Homo sapien
tttaacatgcaaacattccccgggc

SEQ ID NO: 4901184 - DNA, 25 bp, Homo sapien
tctgcagctttgaaggcgtaaaccc

SEQ ID NO: 4901185 - DNA, 25 bp, Homo sapien
cgttaatttcattcaccaggaggtc

SEQ ID NO: 4901186 - DNA, 25 bp, Homo sapien
tacgcgttaatttcattcaccagga

SEQ ID NO: 4901187 - DNA, 25 bp, Homo sapien
gttaatttcattcaccaggaggtct

SEQ ID NO: 4901188 - DNA, 25 bp, Homo sapien
cgcgttaatttcattcaccaggagg

SEQ ID NO: 4901189 - DNA, 25 bp, Homo sapien
atgacactgtgatctcactccatac

SEQ ID NO: 4901190 - DNA, 25 bp, Homo sapien
acaatgacactgtgatctcactcca

SEQ ID NO: 4901191 - DNA, 25 bp, Homo sapien
tcataacaatgacactgtgatctca

SEQ ID NO: 4901192 - DNA, 25 bp, Homo sapien
cataacaatgacactgtgatctcac

SEQ ID NO: 4901193 - DNA, 25 bp, Homo sapien
tcaagacctcaagatgccctaaagg

SEQ ID NO: 4901194 - DNA, 25 bp, Homo sapien
tacccagagcaaaaagtccacacgg

SEQ ID NO: 4901195 - DNA, 25 bp, Homo sapien
taacctatgccgtgaaactgaaaat

SEQ ID NO: 4901196 - DNA, 25 bp, Homo sapien
ggatgcagcaatgatgtcttaccca

SEQ ID NO: 4901197 - DNA, 25 bp, Homo sapien
tatcatatataattgagagttactt

SEQ ID NO: 4901198 - DNA, 25 bp, Homo sapien
agtttcatgacaagaactccacatt

SEQ ID NO: 4901199 - DNA, 25 bp, Homo sapien
tcatgacaagaactccacatttttc

SEQ ID NO: 4901200 - DNA, 25 bp, Homo sapien
gagagttacttgtttattacagaag

SEQ ID NO: 4901201 - DNA, 25 bp, Homo sapien
tccaccatttggtaagcaagggaaa

SEQ ID NO: 4901202 - DNA, 25 bp, Homo sapien
tcattgttcattaggacctccacca

SEQ ID NO: 4901203 - DNA, 25 bp, Homo sapien
ttctcaagataggtgatgtattcaa

SEQ ID NO: 4901204 - DNA, 25 bp, Homo sapien
tcaggacagtttgctttacaccatt

SEQ ID NO: 4901205 - DNA, 25 bp, Homo sapien
tttcattttcacaatggtcccataa

SEQ ID NO: 4901206 - DNA, 25 bp, Homo sapien
atgggtttcgctgacgtgttctttc

SEQ ID NO: 4901207 - DNA, 25 bp, Homo sapien
tcagatgggtttcgctgacgtgttc

SEQ ID NO: 4901208 - DNA, 25 bp, Homo sapien
ttcgctgacgtgttctttctaactg

SEQ ID NO: 4901209 - DNA, 25 bp, Homo sapien
ggtttcgctgacgtgttctttctaa

SEQ ID NO: 4901210 - DNA, 25 bp, Homo sapien
tttatattcaaattctctactcgtt

SEQ ID NO: 4901211 - DNA, 25 bp, Homo sapien
atattcaaattctctactcgtttaa

SEQ ID NO: 4901212 - DNA, 25 bp, Homo sapien
tattcaaattctctactcgtttaaa

SEQ ID NO: 4901213 - DNA, 25 bp, Homo sapien
tatattcaaattctctactcgttta

SEQ ID NO: 4901214 - DNA, 25 bp, Homo sapien
gtttactcacgaacaaggcacattg

SEQ ID NO: 4901215 - DNA, 25 bp, Homo sapien
tacacagtcctacccatctcagttg

SEQ ID NO: 4901216 - DNA, 25 bp, Homo sapien
taagactcctgaggttaactggctg

SEQ ID NO: 4901217 - DNA, 25 bp, Homo sapien
gatttgaattaggtggcgtaacctc

SEQ ID NO: 4901218 - DNA, 25 bp, Homo sapien
aagcaggaaggagacatatagaaga

SEQ ID NO: 4901219 - DNA, 25 bp, Homo sapien
gaagcaggaaggagacatatagaag

SEQ ID NO: 4901220 - DNA, 25 bp, Homo sapien
aagagccactcctcatgtggtttct

SEQ ID NO: 4901221 - DNA, 25 bp, Homo sapien
ccactcctcatgtggtttctggctg

SEQ ID NO: 4901222 - DNA, 25 bp, Homo sapien
cctcatgtggtttctggctgagctg

SEQ ID NO: 4901223 - DNA, 25 bp, Homo sapien
ctcaaagagccactcctcatgtggt

SEQ ID NO: 4901224 - DNA, 25 bp, Homo sapien
aaatcgctgctcaagagactcccct

SEQ ID NO: 4901225 - DNA, 25 bp, Homo sapien
aagcaactggcgcagccccaaatcg

SEQ ID NO: 4901226 - DNA, 25 bp, Homo sapien
gagactcccctcaggaatggaggtg

SEQ ID NO: 4901227 - DNA, 25 bp, Homo sapien
gcagccccaaatcgctgctcaagag

SEQ ID NO: 4901228 - DNA, 25 bp, Homo sapien
cactgcattataggaagcttgttca

SEQ ID NO: 4901229 - DNA, 25 bp, Homo sapien
tagatatttctgtcccagtctccag

SEQ ID NO: 4901230 - DNA, 25 bp, Homo sapien
caagttgcagatcttacccagtgag

SEQ ID NO: 4901231 - DNA, 25 bp, Homo sapien
tcacctgtggcagtaatctcttagg

SEQ ID NO: 4901232 - DNA, 25 bp, Homo sapien
gtaacacatccatttttagcaaaga

SEQ ID NO: 4901233 - DNA, 25 bp, Homo sapien
ctaaagtaacacatccatttttagc

SEQ ID NO: 4901234 - DNA, 25 bp, Homo sapien
gcaaagagaatatagatttctaata

SEQ ID NO: 4901235 - DNA, 25 bp, Homo sapien
ttagcaaagagaatatagatttcta

SEQ ID NO: 4901236 - DNA, 25 bp, Homo sapien
tagagttggctaaatcagggaagca

SEQ ID NO: 4901237 - DNA, 25 bp, Homo sapien
caaatccctttacttgagcatagca

SEQ ID NO: 4901238 - DNA, 25 bp, Homo sapien
catgttaaccttgtgctaatgagaa

SEQ ID NO: 4901239 - DNA, 25 bp, Homo sapien
ggaaacagaagccataaccgggata

SEQ ID NO: 4901240 - DNA, 25 bp, Homo sapien
atagaattatatacacttacaatta

SEQ ID NO: 4901241 - DNA, 25 bp, Homo sapien
aaaaatacatttcaaagagagtata

SEQ ID NO: 4901242 - DNA, 25 bp, Homo sapien
gaaaaaatacatttcaaagagagta

SEQ ID NO: 4901243 - DNA, 25 bp, Homo sapien
aaatacatttcaaagagagtataac

SEQ ID NO: 4901244 - DNA, 25 bp, Homo sapien
aatacatttcaaagagagtataaca

SEQ ID NO: 4901245 - DNA, 25 bp, Homo sapien
gaattcaacagccatatatagtcag

SEQ ID NO: 4901246 - DNA, 25 bp, Homo sapien
gacacagcccagttttcggattaaa

SEQ ID NO: 4901247 - DNA, 25 bp, Homo sapien
tctctttaagcatctcgtctgctag

SEQ ID NO: 4901248 - DNA, 25 bp, Homo sapien
cgtctgctagaacaaaagttgccca

SEQ ID NO: 4901249 - DNA, 25 bp, Homo sapien
cacacagtagagagacagctatgac

SEQ ID NO: 4901250 - DNA, 25 bp, Homo sapien
caaatatttcagcatgggacttcta

SEQ ID NO: 4901251 - DNA, 25 bp, Homo sapien
tggaaatgactaaggagagtggcac

SEQ ID NO: 4901252 - DNA, 25 bp, Homo sapien
tagatggcaagtctaacacgcttgg

SEQ ID NO: 4901253 - DNA, 25 bp, Homo sapien
ctccagatgacgacttgttcggcta

SEQ ID NO: 4901254 - DNA, 25 bp, Homo sapien
gatgacgacttgttcggctagcatc

SEQ ID NO: 4901255 - DNA, 25 bp, Homo sapien
tgacgacttgttcggctagcatcca

SEQ ID NO: 4901256 - DNA, 25 bp, Homo sapien
cagatgacgacttgttcggctagca

SEQ ID NO: 4901257 - DNA, 25 bp, Homo sapien
gaagactgcaagaatttatgtaaag

SEQ ID NO: 4901258 - DNA, 25 bp, Homo sapien
tcataacaccacctcatcctcatgg

SEQ ID NO: 4901259 - DNA, 25 bp, Homo sapien
taatttcataacaccacctcatcct

SEQ ID NO: 4901260 - DNA, 25 bp, Homo sapien
catggagttgctgtgaagactgcaa

SEQ ID NO: 4901261 - DNA, 25 bp, Homo sapien
tagagggctcaggtataccaggctg

SEQ ID NO: 4901262 - DNA, 25 bp, Homo sapien
ggctggcaactgatggataaacggc

SEQ ID NO: 4901263 - DNA, 25 bp, Homo sapien
ctcctagagggaaaactgaacgaag

SEQ ID NO: 4901264 - DNA, 25 bp, Homo sapien
tgaacgaagagtcgatgacaagcca

SEQ ID NO: 4901265 - DNA, 25 bp, Homo sapien
tagacctctaaagctttgccgtgaa

SEQ ID NO: 4901266 - DNA, 25 bp, Homo sapien
taggcagcagtgtagacctctaaag

SEQ ID NO: 4901267 - DNA, 25 bp, Homo sapien
tgttttgtatattctggtaggcagc

SEQ ID NO: 4901268 - DNA, 25 bp, Homo sapien
gccgtgaaataacatttcgattgtg

SEQ ID NO: 4901269 - DNA, 25 bp, Homo sapien
taactaaaaccatcagcataaagca

SEQ ID NO: 4901270 - DNA, 25 bp, Homo sapien
tacagaattgctcattgaggaccag

SEQ ID NO: 4901271 - DNA, 25 bp, Homo sapien
gtatgtcttgaacagttacttcagc

SEQ ID NO: 4901272 - DNA, 25 bp, Homo sapien
gctctaatgttagttggccaatcag

SEQ ID NO: 4901273 - DNA, 25 bp, Homo sapien
aaatgcaaagatcagtagctgactc

SEQ ID NO: 4901274 - DNA, 25 bp, Homo sapien
taatgggccttgtagtcagacttcc

SEQ ID NO: 4901275 - DNA, 25 bp, Homo sapien
tcagacttccggatcagacttccag

SEQ ID NO: 4901276 - DNA, 25 bp, Homo sapien
tgagatctctgggaagtttcttaac

SEQ ID NO: 4901277 - DNA, 25 bp, Homo sapien
aacgcaggcggatcgcttgagcccc

SEQ ID NO: 4901278 - DNA, 25 bp, Homo sapien
cctgggcaacatggcgaaactccat

SEQ ID NO: 4901279 - DNA, 25 bp, Homo sapien
tgggcaacatggcgaaactccatct

SEQ ID NO: 4901280 - DNA, 25 bp, Homo sapien
ggagttcaagaccagcctgggcaac

SEQ ID NO: 4901281 - DNA, 25 bp, Homo sapien
tctggtgcatacagagaatttcgga

SEQ ID NO: 4901282 - DNA, 25 bp, Homo sapien
tgctcttacaatatctaaacgagat

SEQ ID NO: 4901283 - DNA, 25 bp, Homo sapien
tagctgacagtgatctctgaagagg

SEQ ID NO: 4901284 - DNA, 25 bp, Homo sapien
gaagaggtgactttgaatttgctct

SEQ ID NO: 4901285 - DNA, 25 bp, Homo sapien
gggtttggcaagttgcggcccagcc

SEQ ID NO: 4901286 - DNA, 25 bp, Homo sapien
tcagggtttggcaagttgcggccca

SEQ ID NO: 4901287 - DNA, 25 bp, Homo sapien
cagggtttggcaagttgcggcccag

SEQ ID NO: 4901288 - DNA, 25 bp, Homo sapien
gtttggcaagttgcggcccagccag

SEQ ID NO: 4901289 - DNA, 25 bp, Homo sapien
tctgaaggctagatatgaaaagggc

SEQ ID NO: 4901290 - DNA, 25 bp, Homo sapien
ctagatatgaaaagggcatagctct

SEQ ID NO: 4901291 - DNA, 25 bp, Homo sapien
ggctagatatgaaaagggcatagct

SEQ ID NO: 4901292 - DNA, 25 bp, Homo sapien
gaaggctagatatgaaaagggcata

SEQ ID NO: 4901293 - DNA, 25 bp, Homo sapien
ttgcttaaaacttctcttgagggtg

SEQ ID NO: 4901294 - DNA, 25 bp, Homo sapien
gttttaagttgcctgactgccgcca

SEQ ID NO: 4901295 - DNA, 25 bp, Homo sapien
ttcagctaggcagtgggacagaaat

SEQ ID NO: 4901296 - DNA, 25 bp, Homo sapien
gagggtgattatatctaacccaggg

SEQ ID NO: 4901297 - DNA, 25 bp, Homo sapien
gttggacttcactttgaggcttaac

SEQ ID NO: 4901298 - DNA, 25 bp, Homo sapien
ttctgtttccagttggacttcactt

SEQ ID NO: 4901299 - DNA, 25 bp, Homo sapien
acttcactttgaggcttaacatagc

SEQ ID NO: 4901300 - DNA, 25 bp, Homo sapien
ctttgaggcttaacatagcaaagtg

SEQ ID NO: 4901301 - DNA, 25 bp, Homo sapien
aaaaggcacttacacaaaaatcatg

SEQ ID NO: 4901302 - DNA, 25 bp, Homo sapien
tttctggtaatgaaagcatggagtc

SEQ ID NO: 4901303 - DNA, 25 bp, Homo sapien
aatgactacgtaagacccttttctg

SEQ ID NO: 4901304 - DNA, 25 bp, Homo sapien
tggaacttcaagtagatatagtaca

SEQ ID NO: 4901305 - DNA, 25 bp, Homo sapien
gaacagagccatgattgacaaagtc

SEQ ID NO: 4901306 - DNA, 25 bp, Homo sapien
tattccagaattactgttttacgca

SEQ ID NO: 4901307 - DNA, 25 bp, Homo sapien
caaacaaggcaaataatgctcaaga

SEQ ID NO: 4901308 - DNA, 25 bp, Homo sapien
cacttaggactattctcaggaagga

SEQ ID NO: 4901309 - DNA, 25 bp, Homo sapien
gaccatgctaaagatactttcaagg

SEQ ID NO: 4901310 - DNA, 25 bp, Homo sapien
gaagtcataggtagtaaatcgtggg

SEQ ID NO: 4901311 - DNA, 25 bp, Homo sapien
ggatgaagtgcgaggttaagcaact

SEQ ID NO: 4901312 - DNA, 25 bp, Homo sapien
tgcataatctcggtattccctgtga

SEQ ID NO: 4901313 - DNA, 25 bp, Homo sapien
taatgagcaaggcttacctacaggg

SEQ ID NO: 4901314 - DNA, 25 bp, Homo sapien
ttttggtcgcccagaaggtggcaag

SEQ ID NO: 4901315 - DNA, 25 bp, Homo sapien
gatctaaatgataggccagttgggc

SEQ ID NO: 4901316 - DNA, 25 bp, Homo sapien
taaactataatgaagctatggctgc

SEQ ID NO: 4901317 - DNA, 25 bp, Homo sapien
gacttcctgacaattttagacctcc

SEQ ID NO: 4901318 - DNA, 25 bp, Homo sapien
gctccggaggaggaccctagacttc

SEQ ID NO: 4901319 - DNA, 25 bp, Homo sapien
tagacctcctggtgaggattttagg

SEQ ID NO: 4901320 - DNA, 25 bp, Homo sapien
cctggtgaggattttaggagcccgc

SEQ ID NO: 4901321 - DNA, 25 bp, Homo sapien
agactttaggcaccctcctgatgag

SEQ ID NO: 4901322 - DNA, 25 bp, Homo sapien
acccaccagatgaagacttcagggg

SEQ ID NO: 4901323 - DNA, 25 bp, Homo sapien
ctgatgaagactttaggcaccctcc

SEQ ID NO: 4901324 - DNA, 25 bp, Homo sapien
tgatgaggacttcaggagcccccag

SEQ ID NO: 4901325 - DNA, 25 bp, Homo sapien
ttacagttcttcctagggactgtgg

SEQ ID NO: 4901326 - DNA, 25 bp, Homo sapien
tacattataaaaggtggatcatcgt

SEQ ID NO: 4901327 - DNA, 25 bp, Homo sapien
ggatcatcgtaaagaataattatgg

SEQ ID NO: 4901328 - DNA, 25 bp, Homo sapien
gactgtggctctcattggtcattcc

SEQ ID NO: 4901329 - DNA, 25 bp, Homo sapien
cctggcgcgaaagaaggaagctctg

SEQ ID NO: 4901330 - DNA, 25 bp, Homo sapien
acgtagcaactttggcctggcgcga

SEQ ID NO: 4901331 - DNA, 25 bp, Homo sapien
ggctgaaagtctggcgacaacatcg

SEQ ID NO: 4901332 - DNA, 25 bp, Homo sapien
gaatgtttgcccttgagacggcgta

SEQ ID NO: 4901333 - DNA, 25 bp, Homo sapien
gcaagtgttttcagttagatctggg

SEQ ID NO: 4901334 - DNA, 25 bp, Homo sapien
caagtgttttcagttagatctgggg

SEQ ID NO: 4901335 - DNA, 25 bp, Homo sapien
aagtgttttcagttagatctggggg

SEQ ID NO: 4901336 - DNA, 25 bp, Homo sapien
gaagatctcgaaggatttcataggt

SEQ ID NO: 4901337 - DNA, 25 bp, Homo sapien
tagggcaccctcttttcttgctaaa

SEQ ID NO: 4901338 - DNA, 25 bp, Homo sapien
agcgtagctcctgccgttagggcac

SEQ ID NO: 4901339 - DNA, 25 bp, Homo sapien
tatgtcatcgtagtcagtggtggca

SEQ ID NO: 4901340 - DNA, 25 bp, Homo sapien
gcaacactgaaaagacaagtcgcct

SEQ ID NO: 4901341 - DNA, 25 bp, Homo sapien
ccggccacaggagctttttagaaga

SEQ ID NO: 4901342 - DNA, 25 bp, Homo sapien
tagaagatgttttacgccacacagt

SEQ ID NO: 4901343 - DNA, 25 bp, Homo sapien
gacagttgtctaccgaagattctca

SEQ ID NO: 4901344 - DNA, 25 bp, Homo sapien
gcatttctggatctaaatgttttgg

SEQ ID NO: 4901345 - DNA, 25 bp, Homo sapien
tggagtaaaggcagcgaagacacaa

SEQ ID NO: 4901346 - DNA, 25 bp, Homo sapien
cttctacacatgttgcatgtataga

SEQ ID NO: 4901347 - DNA, 25 bp, Homo sapien
caattgccgatcatgcttctacaca

SEQ ID NO: 4901348 - DNA, 25 bp, Homo sapien
ccccagccccaccgcgcgtcgccat

SEQ ID NO: 4901349 - DNA, 25 bp, Homo sapien
accccagccccaccgcgcgtcgcca

SEQ ID NO: 4901350 - DNA, 25 bp, Homo sapien
tgccaccccagccccaccgcgcgtc

SEQ ID NO: 4901351 - DNA, 25 bp, Homo sapien
ccaccccagccccaccgcgcgtcgc

SEQ ID NO: 4901352 - DNA, 25 bp, Homo sapien
aacaacagaaggaacgcggtcacgg

SEQ ID NO: 4901353 - DNA, 25 bp, Homo sapien
ctgtaagaagcgagggaggaacaac

SEQ ID NO: 4901354 - DNA, 25 bp, Homo sapien
tcacggcccgggcggataagaggga

SEQ ID NO: 4901355 - DNA, 25 bp, Homo sapien
cggataagagggaccaaaccgccat

SEQ ID NO: 4901356 - DNA, 25 bp, Homo sapien
tcaaagtactggttgttgtcgcact

SEQ ID NO: 4901357 - DNA, 25 bp, Homo sapien
tccacaaggaacacacgagagggcg

SEQ ID NO: 4901358 - DNA, 25 bp, Homo sapien
cgagagggcggagatatcaaagtac

SEQ ID NO: 4901359 - DNA, 25 bp, Homo sapien
ggcatcttgcctctggttagctcca

SEQ ID NO: 4901360 - DNA, 25 bp, Homo sapien
gcaggtcctccattattagagatca

SEQ ID NO: 4901361 - DNA, 25 bp, Homo sapien
ataatagcaggtcctccattattag

SEQ ID NO: 4901362 - DNA, 25 bp, Homo sapien
tagcaggtcctccattattagagat

SEQ ID NO: 4901363 - DNA, 25 bp, Homo sapien
ccattattagagatcatctgaaatc

SEQ ID NO: 4901364 - DNA, 25 bp, Homo sapien
aaaaagaaatctgctgcgagaccac

SEQ ID NO: 4901365 - DNA, 25 bp, Homo sapien
catgaaatttcgctgatctcccaaa

SEQ ID NO: 4901366 - DNA, 25 bp, Homo sapien
taggtctaagacaactccacttgca

SEQ ID NO: 4901367 - DNA, 25 bp, Homo sapien
tcatgggtaattcagctaggatcaa

SEQ ID NO: 4901368 - DNA, 25 bp, Homo sapien
caagaaatgcagttccagccatctt

SEQ ID NO: 4901369 - DNA, 25 bp, Homo sapien
gttaagtcactagggcaagaaatgc

SEQ ID NO: 4901370 - DNA, 25 bp, Homo sapien
aaatatggccaatgggacagtgaca

SEQ ID NO: 4901371 - DNA, 25 bp, Homo sapien
gacagtgacattttccttcggcagt

SEQ ID NO: 4901372 - DNA, 25 bp, Homo sapien
taaacactattaagggctggacaca

SEQ ID NO: 4901373 - DNA, 25 bp, Homo sapien
cagtggtgttatgtgtgcagtccca

SEQ ID NO: 4901374 - DNA, 25 bp, Homo sapien
tgctaggattaacaacggcctacct

SEQ ID NO: 4901375 - DNA, 25 bp, Homo sapien
tgacattaacaggaatgcttacgct

SEQ ID NO: 4901376 - DNA, 25 bp, Homo sapien
tgtacattccttctaaagtacatgc

SEQ ID NO: 4901377 - DNA, 25 bp, Homo sapien
aagtacatgccaaggtcaggtgcgg

SEQ ID NO: 4901378 - DNA, 25 bp, Homo sapien
attatgttgtacattccttctaaag

SEQ ID NO: 4901379 - DNA, 25 bp, Homo sapien
ttctaaagtacatgccaaggtcagg

SEQ ID NO: 4901380 - DNA, 25 bp, Homo sapien
cacagagctcacaagttgcttgaga

SEQ ID NO: 4901381 - DNA, 25 bp, Homo sapien
tgtctcctaaagcatttactaccat

SEQ ID NO: 4901382 - DNA, 25 bp, Homo sapien
caacaatgttccattaatgtctctt

SEQ ID NO: 4901383 - DNA, 25 bp, Homo sapien
tcacaagttgcttgagacaacaatg

SEQ ID NO: 4901384 - DNA, 25 bp, Homo sapien
aaatgttggctcacatcggacgcac

SEQ ID NO: 4901385 - DNA, 25 bp, Homo sapien
attaacaaatgttggctcacatcgg

SEQ ID NO: 4901386 - DNA, 25 bp, Homo sapien
atgttaggttctgaacatgcacagg

SEQ ID NO: 4901387 - DNA, 25 bp, Homo sapien
cacaggacctgctggtattaacaaa

SEQ ID NO: 4901388 - DNA, 25 bp, Homo sapien
tgctgctgaaacataatccccctgt

SEQ ID NO: 4901389 - DNA, 25 bp, Homo sapien
tgtgctgctgaaacataatccccct

SEQ ID NO: 4901390 - DNA, 25 bp, Homo sapien
gtgctgctgaaacataatccccctg

SEQ ID NO: 4901391 - DNA, 25 bp, Homo sapien
acttctccataacgtgcagctgaaa

SEQ ID NO: 4901392 - DNA, 25 bp, Homo sapien
aacttctccataacgtgcagctgaa

SEQ ID NO: 4901393 - DNA, 25 bp, Homo sapien
ttctccataacgtgcagctgaaatt

SEQ ID NO: 4901394 - DNA, 25 bp, Homo sapien
cttctccataacgtgcagctgaaat

SEQ ID NO: 4901395 - DNA, 25 bp, Homo sapien
gaagtctataatgggtcaactgcat

SEQ ID NO: 4901396 - DNA, 25 bp, Homo sapien
ggatggaacagttcctccctaccca

SEQ ID NO: 4901397 - DNA, 25 bp, Homo sapien
caactgcatggtgctagcagaggag

SEQ ID NO: 4901398 - DNA, 25 bp, Homo sapien
gaagattggtcacattgagcatata

SEQ ID NO: 4901399 - DNA, 25 bp, Homo sapien
tggttctgctagacctttgcagtgc

SEQ ID NO: 4901400 - DNA, 25 bp, Homo sapien
cctgcccgcgccagtgttggttctg

SEQ ID NO: 4901401 - DNA, 25 bp, Homo sapien
ctgggcagtggtgtcgttcctgttc

SEQ ID NO: 4901402 - DNA, 25 bp, Homo sapien
ggcagtggtgtcgttcctgttccca

SEQ ID NO: 4901403 - DNA, 25 bp, Homo sapien
tggcatcggcaggactggggggtcc

SEQ ID NO: 4901404 - DNA, 25 bp, Homo sapien
ctctgaggcagcaggtaccccttgc

SEQ ID NO: 4901405 - DNA, 25 bp, Homo sapien
tcatggcatcggcaggactgggggg

SEQ ID NO: 4901406 - DNA, 25 bp, Homo sapien
caggactggggggtcctctgaggca

SEQ ID NO: 4901407 - DNA, 25 bp, Homo sapien
tgcaaaccattctgaagttaaagac

SEQ ID NO: 4901408 - DNA, 25 bp, Homo sapien
ttgcaaaccattctgaagttaaaga

SEQ ID NO: 4901409 - DNA, 25 bp, Homo sapien
catcaaatgtggcaaagtcgtaaga

SEQ ID NO: 4901410 - DNA, 25 bp, Homo sapien
tgaaatagtccacatgcatcaaatg

SEQ ID NO: 4901411 - DNA, 25 bp, Homo sapien
tagaatgaacagtgctcagtccagc

SEQ ID NO: 4901412 - DNA, 25 bp, Homo sapien
gacaagatgttagattggcatatac

SEQ ID NO: 4901413 - DNA, 25 bp, Homo sapien
ttgaggtgctaatcctaactggtct

SEQ ID NO: 4901414 - DNA, 25 bp, Homo sapien
tgagcacttgaggtgctaatcctaa

SEQ ID NO: 4901415 - DNA, 25 bp, Homo sapien
gaagagaggtagaactgagcacttg

SEQ ID NO: 4901416 - DNA, 25 bp, Homo sapien
aaactgaaatttgtaggaagagagg

SEQ ID NO: 4901417 - DNA, 25 bp, Homo sapien
tgattaaagaaaacgagcaaaatca

SEQ ID NO: 4901418 - DNA, 25 bp, Homo sapien
gaaaacgagcaaaatcaggtcaaat

SEQ ID NO: 4901419 - DNA, 25 bp, Homo sapien
ctgattaaagaaaacgagcaaaatc

SEQ ID NO: 4901420 - DNA, 25 bp, Homo sapien
aagaaaacgagcaaaatcaggtcaa

SEQ ID NO: 4901421 - DNA, 25 bp, Homo sapien
tttcctcttatatcataggaagcag

SEQ ID NO: 4901422 - DNA, 25 bp, Homo sapien
ttatatcataggaagcagcaacaaa

SEQ ID NO: 4901423 - DNA, 25 bp, Homo sapien
cttctaaagtttgccacttgagaaa

SEQ ID NO: 4901424 - DNA, 25 bp, Homo sapien
cctcttatatcataggaagcagcaa

SEQ ID NO: 4901425 - DNA, 25 bp, Homo sapien
tgttggtaggttgttccaaatgaat

SEQ ID NO: 4901426 - DNA, 25 bp, Homo sapien
tttgttggtaggttgttccaaatga

SEQ ID NO: 4901427 - DNA, 25 bp, Homo sapien
taggttgttccaaatgaataagcag

SEQ ID NO: 4901428 - DNA, 25 bp, Homo sapien
tggtaggttgttccaaatgaataag

SEQ ID NO: 4901429 - DNA, 25 bp, Homo sapien
aaatatagactaatatcgttcaaac

SEQ ID NO: 4901430 - DNA, 25 bp, Homo sapien
aacaaggtgctctgtttatgccact

SEQ ID NO: 4901431 - DNA, 25 bp, Homo sapien
tagataacaaggtgctctgtttatg

SEQ ID NO: 4901432 - DNA, 25 bp, Homo sapien
ctctatagataacaaggtgctctgt

SEQ ID NO: 4901433 - DNA, 25 bp, Homo sapien
actctatagataacaaggtgctctg

SEQ ID NO: 4901434 - DNA, 25 bp, Homo sapien
caaaatgctcagaagtaagcattac

SEQ ID NO: 4901435 - DNA, 25 bp, Homo sapien
tatttgttatgagcgggtagaagaa

SEQ ID NO: 4901436 - DNA, 25 bp, Homo sapien
gacctataagcctagaagcagataa

SEQ ID NO: 4901437 - DNA, 25 bp, Homo sapien
ttttaagacctataagcctagaagc

SEQ ID NO: 4901438 - DNA, 25 bp, Homo sapien
ggcacagccaaaatatattgatgtt

SEQ ID NO: 4901439 - DNA, 25 bp, Homo sapien
cataaaatataggagtgggaaagtc

SEQ ID NO: 4901440 - DNA, 25 bp, Homo sapien
tttaggtttaacacaggcacagcca

SEQ ID NO: 4901441 - DNA, 25 bp, Homo sapien
ttcatcagtatattcaaggtacaca

SEQ ID NO: 4901442 - DNA, 25 bp, Homo sapien
tggaaggctttcccctgcaaattac

SEQ ID NO: 4901443 - DNA, 25 bp, Homo sapien
ttggaaggctttcccctgcaaatta

SEQ ID NO: 4901444 - DNA, 25 bp, Homo sapien
atttggaaggctttcccctgcaaat

SEQ ID NO: 4901445 - DNA, 25 bp, Homo sapien
gtttactgcacaaatttaaaacatg

SEQ ID NO: 4901446 - DNA, 25 bp, Homo sapien
tttactgcacaaatttaaaacatga

SEQ ID NO: 4901447 - DNA, 25 bp, Homo sapien
tactgcacaaatttaaaacatgaaa

SEQ ID NO: 4901448 - DNA, 25 bp, Homo sapien
agtttactgcacaaatttaaaacat

SEQ ID NO: 4901449 - DNA, 25 bp, Homo sapien
gcaactcgaattactcttggctgag

SEQ ID NO: 4901450 - DNA, 25 bp, Homo sapien
tccactaagaaaatgcgccgagtta

SEQ ID NO: 4901451 - DNA, 25 bp, Homo sapien
tcagtgatatttgagtagcaactcg

SEQ ID NO: 4901452 - DNA, 25 bp, Homo sapien
cattttctcgtccacttactgcatc

SEQ ID NO: 4901453 - DNA, 25 bp, Homo sapien
tggctgttggcatctttgatatcaa

SEQ ID NO: 4901454 - DNA, 25 bp, Homo sapien
tattgtgttgggtacaaggtggaca

SEQ ID NO: 4901455 - DNA, 25 bp, Homo sapien
tgatatcaatgtcactgtaggcaat

SEQ ID NO: 4901456 - DNA, 25 bp, Homo sapien
taggcaatggtgattaagggagggt

SEQ ID NO: 4901457 - DNA, 25 bp, Homo sapien
ttctccatgatccatttcatatgtg

SEQ ID NO: 4901458 - DNA, 25 bp, Homo sapien
gcatctttgccaaaactatatgaac

SEQ ID NO: 4901459 - DNA, 25 bp, Homo sapien
aaactatatgaactcaatttgatca

SEQ ID NO: 4901460 - DNA, 25 bp, Homo sapien
tattattatagcatcactttggtgg

SEQ ID NO: 4901461 - DNA, 25 bp, Homo sapien
gaatctcccccatgagatacttatt

SEQ ID NO: 4901462 - DNA, 25 bp, Homo sapien
tgagttcacactgatttaaaaataa

SEQ ID NO: 4901463 - DNA, 25 bp, Homo sapien
aaagagatgctaaaacagctagccc

SEQ ID NO: 4901464 - DNA, 25 bp, Homo sapien
gatgctaaaacagctagcccaccca

SEQ ID NO: 4901465 - DNA, 25 bp, Homo sapien
tagcccacccaatacacccaaagca

SEQ ID NO: 4901466 - DNA, 25 bp, Homo sapien
tcatgggactcccaatgcgcctctt

SEQ ID NO: 4901467 - DNA, 25 bp, Homo sapien
aattgaactgcttcctaattttctc

SEQ ID NO: 4901468 - DNA, 25 bp, Homo sapien
aaattgaactgcttcctaattttct

SEQ ID NO: 4901469 - DNA, 25 bp, Homo sapien
ttctcatctttcactatctaagaaa

SEQ ID NO: 4901470 - DNA, 25 bp, Homo sapien
catctttcactatctaagaaaattg

SEQ ID NO: 4901471 - DNA, 25 bp, Homo sapien
gccagtaaagacctgttcccactgt

SEQ ID NO: 4901472 - DNA, 25 bp, Homo sapien
agaaaataagccagtaaagacctgt

SEQ ID NO: 4901473 - DNA, 25 bp, Homo sapien
taaagaaaacattggccagatcacc

SEQ ID NO: 4901474 - DNA, 25 bp, Homo sapien
gccagatcaccagcatagtacacca

SEQ ID NO: 4901475 - DNA, 25 bp, Homo sapien
caaaacgttcttcctgaattggcat

SEQ ID NO: 4901476 - DNA, 25 bp, Homo sapien
acataagtgacaaaacgttcttcct

SEQ ID NO: 4901477 - DNA, 25 bp, Homo sapien
gtgacaaaacgttcttcctgaattg

SEQ ID NO: 4901478 - DNA, 25 bp, Homo sapien
taagtgacaaaacgttcttcctgaa

SEQ ID NO: 4901479 - DNA, 25 bp, Homo sapien
taatctgggatatgagcttatgcaa

SEQ ID NO: 4901480 - DNA, 25 bp, Homo sapien
ctttcctttaggtcgctcccaatca

SEQ ID NO: 4901481 - DNA, 25 bp, Homo sapien
acatctattgtaatctgggatatga

SEQ ID NO: 4901482 - DNA, 25 bp, Homo sapien
tttcctttaggtcgctcccaatcaa

SEQ ID NO: 4901483 - DNA, 25 bp, Homo sapien
gcttacaggaacagtggcacttcgt

SEQ ID NO: 4901484 - DNA, 25 bp, Homo sapien
tctccatatgcttacaggaacagtg

SEQ ID NO: 4901485 - DNA, 25 bp, Homo sapien
aatatgttctccatatgcttacagg

SEQ ID NO: 4901486 - DNA, 25 bp, Homo sapien
gaacagtggcacttcgtacaccacc

SEQ ID NO: 4901487 - DNA, 25 bp, Homo sapien
ttgaaagagtgaattaatttttctc

SEQ ID NO: 4901488 - DNA, 25 bp, Homo sapien
tgaaagagtgaattaatttttctca

SEQ ID NO: 4901489 - DNA, 25 bp, Homo sapien
gaaagagtgaattaatttttctcac

SEQ ID NO: 4901490 - DNA, 25 bp, Homo sapien
tccaaaaagaagaggacagtaagta

SEQ ID NO: 4901491 - DNA, 25 bp, Homo sapien
ctccaaaaagaagaggacagtaagt

SEQ ID NO: 4901492 - DNA, 25 bp, Homo sapien
tagctaggtgggtttctagaaagac

SEQ ID NO: 4901493 - DNA, 25 bp, Homo sapien
tatctcaaaatgcagctataaggag

SEQ ID NO: 4901494 - DNA, 25 bp, Homo sapien
gagcagcagacactgcatatctcaa

SEQ ID NO: 4901495 - DNA, 25 bp, Homo sapien
taatgctaagttcttgaatcccaca

SEQ ID NO: 4901496 - DNA, 25 bp, Homo sapien
gcataaatcaacgaactgtcgaatt

SEQ ID NO: 4901497 - DNA, 25 bp, Homo sapien
tagagcataaatcaacgaactgtcg

SEQ ID NO: 4901498 - DNA, 25 bp, Homo sapien
aatcaacgaactgtcgaattttatc

SEQ ID NO: 4901499 - DNA, 25 bp, Homo sapien
caacgaactgtcgaattttatcttc

SEQ ID NO: 4901500 - DNA, 25 bp, Homo sapien
cgcttctcttttaaggttcatattc

SEQ ID NO: 4901501 - DNA, 25 bp, Homo sapien
taccatgaatgtaatatccaaaaca

SEQ ID NO: 4901502 - DNA, 25 bp, Homo sapien
cccatgtactgatctaccatgaatg

SEQ ID NO: 4901503 - DNA, 25 bp, Homo sapien
gatctaccatgaatgtaatatccaa

SEQ ID NO: 4901504 - DNA, 25 bp, Homo sapien
ccttattagtgtctcatgaattctg

SEQ ID NO: 4901505 - DNA, 25 bp, Homo sapien
tcatgaattctgtcataatgttgtc

SEQ ID NO: 4901506 - DNA, 25 bp, Homo sapien
tctcatctggttagaaattgcaatc

SEQ ID NO: 4901507 - DNA, 25 bp, Homo sapien
ctgtgttgggtaccaaacctctctg

SEQ ID NO: 4901508 - DNA, 25 bp, Homo sapien
ttattcatcatatgatatgctttta

SEQ ID NO: 4901509 - DNA, 25 bp, Homo sapien
atttattcatcatatgatatgcttt

SEQ ID NO: 4901510 - DNA, 25 bp, Homo sapien
tgaactcagtagtctagcaggacca

SEQ ID NO: 4901511 - DNA, 25 bp, Homo sapien
aactcagtagtctagcaggaccatt

SEQ ID NO: 4901512 - DNA, 25 bp, Homo sapien
tccattggttccatgaattccattc

SEQ ID NO: 4901513 - DNA, 25 bp, Homo sapien
cattggttccatgaattccattcca

SEQ ID NO: 4901514 - DNA, 25 bp, Homo sapien
ttttttccattggttccatgaattc

SEQ ID NO: 4901515 - DNA, 25 bp, Homo sapien
tatcttttataaagtaatccatttc

SEQ ID NO: 4901516 - DNA, 25 bp, Homo sapien
tgcttagcacccttcaatgatatcc

SEQ ID NO: 4901517 - DNA, 25 bp, Homo sapien
gccactatgccctggaggaaagcta

SEQ ID NO: 4901518 - DNA, 25 bp, Homo sapien
aactcaacttgtaacctactgacag

SEQ ID NO: 4901519 - DNA, 25 bp, Homo sapien
ataatcctaatgtctaaattatgct

SEQ ID NO: 4901520 - DNA, 25 bp, Homo sapien
agagaaccactgaagcagcccatgg

SEQ ID NO: 4901521 - DNA, 25 bp, Homo sapien
aacatctgctttatacaagagggca

SEQ ID NO: 4901522 - DNA, 25 bp, Homo sapien
catggacacccagttaggaacatct

SEQ ID NO: 4901523 - DNA, 25 bp, Homo sapien
tctcttgaaagggtactagttacag

SEQ ID NO: 4901524 - DNA, 25 bp, Homo sapien
gatcaaaaataagaagagtagcttc

SEQ ID NO: 4901525 - DNA, 25 bp, Homo sapien
ttcatttccataatacaggacactg

SEQ ID NO: 4901526 - DNA, 25 bp, Homo sapien
gcaagccaaatccacaacacagaag

SEQ ID NO: 4901527 - DNA, 25 bp, Homo sapien
ttgtagatatgtaaggaaggatgct

SEQ ID NO: 4901528 - DNA, 25 bp, Homo sapien
gggaggtgtcaaagctgcaagcttt

SEQ ID NO: 4901529 - DNA, 25 bp, Homo sapien
ctgcaagctttggtgctgagccctg

SEQ ID NO: 4901530 - DNA, 25 bp, Homo sapien
gagctagctctccagtgcttgtttt

SEQ ID NO: 4901531 - DNA, 25 bp, Homo sapien
tcaaagctgcaagctttggtgctga

SEQ ID NO: 4901532 - DNA, 25 bp, Homo sapien
atctttgatccaccaatgttttgga

SEQ ID NO: 4901533 - DNA, 25 bp, Homo sapien
caaaaatctttgatccaccaatgtt

SEQ ID NO: 4901534 - DNA, 25 bp, Homo sapien
gatccaccaatgttttggatgccaa

SEQ ID NO: 4901535 - DNA, 25 bp, Homo sapien
tcaaaaatctttgatccaccaatgt

SEQ ID NO: 4901536 - DNA, 25 bp, Homo sapien
ctgatatcatgacttttttttggcc

SEQ ID NO: 4901537 - DNA, 25 bp, Homo sapien
tgagtctttaagttatttattcagg

SEQ ID NO: 4901538 - DNA, 25 bp, Homo sapien
atgattatactgagtctttaagtta

SEQ ID NO: 4901539 - DNA, 25 bp, Homo sapien
tttttttggccatgattatactgag

SEQ ID NO: 4901540 - DNA, 25 bp, Homo sapien
cagaatagtctgcattataagtttt

SEQ ID NO: 4901541 - DNA, 25 bp, Homo sapien
tgtcaatgtgagaagattcaggcag

SEQ ID NO: 4901542 - DNA, 25 bp, Homo sapien
aatgatggggactgttttaattagc

SEQ ID NO: 4901543 - DNA, 25 bp, Homo sapien
ttatttaaccataagcacacaaaac

SEQ ID NO: 4901544 - DNA, 25 bp, Homo sapien
tgagatgcatattaacccaacagtg

SEQ ID NO: 4901545 - DNA, 25 bp, Homo sapien
gtgaattaatccactgccaaagagg

SEQ ID NO: 4901546 - DNA, 25 bp, Homo sapien
tatttcatggaaagcgtatactgac

SEQ ID NO: 4901547 - DNA, 25 bp, Homo sapien
gccaaagaggatgagcaattagaat

SEQ ID NO: 4901548 - DNA, 25 bp, Homo sapien
tactccatcagatatacattaatga

SEQ ID NO: 4901549 - DNA, 25 bp, Homo sapien
ctaaatggtactccatcagatatac

SEQ ID NO: 4901550 - DNA, 25 bp, Homo sapien
tggtactccatcagatatacattaa

SEQ ID NO: 4901551 - DNA, 25 bp, Homo sapien
taaatggtactccatcagatataca

SEQ ID NO: 4901552 - DNA, 25 bp, Homo sapien
cagtcatcctcaagattcagggaaa

SEQ ID NO: 4901553 - DNA, 25 bp, Homo sapien
ggacctctgccccaataatgttata

SEQ ID NO: 4901554 - DNA, 25 bp, Homo sapien
taaaggcattcctgtactgtgatcc

SEQ ID NO: 4901555 - DNA, 25 bp, Homo sapien
caactttggcaatggctgggacctc

SEQ ID NO: 4901556 - DNA, 25 bp, Homo sapien
acctagccaaaataaaaatatcata

SEQ ID NO: 4901557 - DNA, 25 bp, Homo sapien
taaaaatatcatacaaaatttagaa

SEQ ID NO: 4901558 - DNA, 25 bp, Homo sapien
cctagccaaaataaaaatatcatac

SEQ ID NO: 4901559 - DNA, 25 bp, Homo sapien
ctagccaaaataaaaatatcataca

SEQ ID NO: 4901560 - DNA, 25 bp, Homo sapien
agtttactcaatgttaaaagcacat

SEQ ID NO: 4901561 - DNA, 25 bp, Homo sapien
cgaggtgggtgaatctctcgatcag

SEQ ID NO: 4901562 - DNA, 25 bp, Homo sapien
gcattcatagtttactcaatgttaa

SEQ ID NO: 4901563 - DNA, 25 bp, Homo sapien
atagtttactcaatgttaaaagcac

SEQ ID NO: 4901564 - DNA, 25 bp, Homo sapien
cattaacaatgtcatcccagtgttg

SEQ ID NO: 4901565 - DNA, 25 bp, Homo sapien
tcagtcataatgacgtactgtattc

SEQ ID NO: 4901566 - DNA, 25 bp, Homo sapien
tcagacataccacagaagcagtcaa

SEQ ID NO: 4901567 - DNA, 25 bp, Homo sapien
catgaatttgttttgtggctgtcaa

SEQ ID NO: 4901568 - DNA, 25 bp, Homo sapien
ctgctgtgcatcctcacgctcctgc

SEQ ID NO: 4901569 - DNA, 25 bp, Homo sapien
gctgtgcatcctcacgctcctgcat

SEQ ID NO: 4901570 - DNA, 25 bp, Homo sapien
gcctgctgtgcatcctcacgctcct

SEQ ID NO: 4901571 - DNA, 25 bp, Homo sapien
ctgcctgctgtgcatcctcacgctc

SEQ ID NO: 4901572 - DNA, 25 bp, Homo sapien
tccttctgtatagagagtttttgag

SEQ ID NO: 4901573 - DNA, 25 bp, Homo sapien
gctcctccttctgtatagagagttt

SEQ ID NO: 4901574 - DNA, 25 bp, Homo sapien
cctccttctgtatagagagtttttg

SEQ ID NO: 4901575 - DNA, 25 bp, Homo sapien
tctgtatagagagtttttgagtcac

SEQ ID NO: 4901576 - DNA, 25 bp, Homo sapien
ggtttcaatctgtgtcactacccaa

SEQ ID NO: 4901577 - DNA, 25 bp, Homo sapien
tttacaatatatagatgagtgaaaa

SEQ ID NO: 4901578 - DNA, 25 bp, Homo sapien
tgtgtcactacccaaatcttatgta

SEQ ID NO: 4901579 - DNA, 25 bp, Homo sapien
gatatggtttcaatctgtgtcacta

SEQ ID NO: 4901580 - DNA, 25 bp, Homo sapien
ccaggatgagtgttagtaccgcgaa

SEQ ID NO: 4901581 - DNA, 25 bp, Homo sapien
cattgaaatacagggtcagacatcc

SEQ ID NO: 4901582 - DNA, 25 bp, Homo sapien
tcagacatccgtaagagcaggccag

SEQ ID NO: 4901583 - DNA, 25 bp, Homo sapien
tcagaggctgtctcaagaagtgggc

SEQ ID NO: 4901584 - DNA, 25 bp, Homo sapien
tcatcatggcatccagataccaatc

SEQ ID NO: 4901585 - DNA, 25 bp, Homo sapien
cacggtgaaactgattgggcctgga

SEQ ID NO: 4901586 - DNA, 25 bp, Homo sapien
cagttggactcttcccggatgaagc

SEQ ID NO: 4901587 - DNA, 25 bp, Homo sapien
gcaaacatattggatgtcgtgtgct

SEQ ID NO: 4901588 - DNA, 25 bp, Homo sapien
gaaataccccaagtggcaacaagga

SEQ ID NO: 4901589 - DNA, 25 bp, Homo sapien
ctttttgtcaataggatcttctcta

SEQ ID NO: 4901590 - DNA, 25 bp, Homo sapien
tcagaaataccccaagtggcaacaa

SEQ ID NO: 4901591 - DNA, 25 bp, Homo sapien
gatcttctctatacagctcatccac

SEQ ID NO: 4901592 - DNA, 25 bp, Homo sapien
actgctttgagagtagcctgtggtg

SEQ ID NO: 4901593 - DNA, 25 bp, Homo sapien
caaagttagggaggacagcacttga

SEQ ID NO: 4901594 - DNA, 25 bp, Homo sapien
tgaggggtacactaaggcaaagtta

SEQ ID NO: 4901595 - DNA, 25 bp, Homo sapien
ggttgaacttgatcagaaccttgga

SEQ ID NO: 4901596 - DNA, 25 bp, Homo sapien
taatacttcattcctccgcttccca

SEQ ID NO: 4901597 - DNA, 25 bp, Homo sapien
ggcccttcctaatacttcattcctc

SEQ ID NO: 4901598 - DNA, 25 bp, Homo sapien
cccacagtagatcctcaaggttttc

SEQ ID NO: 4901599 - DNA, 25 bp, Homo sapien
tcccacagtagatcctcaaggtttt

SEQ ID NO: 4901600 - DNA, 25 bp, Homo sapien
aacatgctgagtccctgtgagtcac

SEQ ID NO: 4901601 - DNA, 25 bp, Homo sapien
tgaggttctcagatttaaagtcctt

SEQ ID NO: 4901602 - DNA, 25 bp, Homo sapien
cagagattgaataaaatggcctcca

SEQ ID NO: 4901603 - DNA, 25 bp, Homo sapien
gccagtattcttgtaggaaacatgc

SEQ ID NO: 4901604 - DNA, 25 bp, Homo sapien
cgttcactgccatggcctgtgactg

SEQ ID NO: 4901605 - DNA, 25 bp, Homo sapien
gggacgttcactgccatggcctgtg

SEQ ID NO: 4901606 - DNA, 25 bp, Homo sapien
gacgttcactgccatggcctgtgac

SEQ ID NO: 4901607 - DNA, 25 bp, Homo sapien
ctgggacgttcactgccatggcctg

SEQ ID NO: 4901608 - DNA, 25 bp, Homo sapien
taacaagcttgttaatctttactgg

SEQ ID NO: 4901609 - DNA, 25 bp, Homo sapien
caaagcattggctccaacaactgtg

SEQ ID NO: 4901610 - DNA, 25 bp, Homo sapien
tctgggttgggattttgtactgtac

SEQ ID NO: 4901611 - DNA, 25 bp, Homo sapien
tactgtacggccacagacagcagga

SEQ ID NO: 4901612 - DNA, 25 bp, Homo sapien
ttaaaacatattatgaacactattc

SEQ ID NO: 4901613 - DNA, 25 bp, Homo sapien
gggaaagtagaagcctacatttcta

SEQ ID NO: 4901614 - DNA, 25 bp, Homo sapien
gagaaaaatagtgcccctatctcca

SEQ ID NO: 4901615 - DNA, 25 bp, Homo sapien
tagtgcccctatctccaagtttttg

SEQ ID NO: 4901616 - DNA, 25 bp, Homo sapien
tgtgggaaagtagaagcctacattt

SEQ ID NO: 4901617 - DNA, 25 bp, Homo sapien
cgctgcaagtcctctcagagatgag

SEQ ID NO: 4901618 - DNA, 25 bp, Homo sapien
cagagatgagctgcatctgtttctc

SEQ ID NO: 4901619 - DNA, 25 bp, Homo sapien
agagatgagctgcatctgtttctca

SEQ ID NO: 4901620 - DNA, 25 bp, Homo sapien
tctcagagatgagctgcatctgttt

SEQ ID NO: 4901621 - DNA, 25 bp, Homo sapien
tggacaagcttcacagagcaggcac

SEQ ID NO: 4901622 - DNA, 25 bp, Homo sapien
ggcagaactcctgggagttccacac

SEQ ID NO: 4901623 - DNA, 25 bp, Homo sapien
aagcttcacagagcaggcacatttc

SEQ ID NO: 4901624 - DNA, 25 bp, Homo sapien
gggctggacaagcttcacagagcag

SEQ ID NO: 4901625 - DNA, 25 bp, Homo sapien
tctattgacagcactcccagattct

SEQ ID NO: 4901626 - DNA, 25 bp, Homo sapien
ttctcttgtccggaacttcctagcc

SEQ ID NO: 4901627 - DNA, 25 bp, Homo sapien
cctccactctattgacagcactccc

SEQ ID NO: 4901628 - DNA, 25 bp, Homo sapien
tctcttgtccggaacttcctagcct

SEQ ID NO: 4901629 - DNA, 25 bp, Homo sapien
cacatgtggcatgggcagcaaagct

SEQ ID NO: 4901630 - DNA, 25 bp, Homo sapien
cctggcagcatcaggagggttctca

SEQ ID NO: 4901631 - DNA, 25 bp, Homo sapien
catcaggagggttctcacatgtggc

SEQ ID NO: 4901632 - DNA, 25 bp, Homo sapien
agcaaagctatgtggggattctgtc

SEQ ID NO: 4901633 - DNA, 25 bp, Homo sapien
cacagtgggtattgcaaaggccgga

SEQ ID NO: 4901634 - DNA, 25 bp, Homo sapien
cctggtcttggctgtcctcgtttga

SEQ ID NO: 4901635 - DNA, 25 bp, Homo sapien
gaaaccaacacagacatccgaaaaa

SEQ ID NO: 4901636 - DNA, 25 bp, Homo sapien
tcttagtaacccagaagagtgcagg

SEQ ID NO: 4901637 - DNA, 25 bp, Homo sapien
tctcagtccccggcaaagttcacgg

SEQ ID NO: 4901638 - DNA, 25 bp, Homo sapien
ccggcaaagttcacggaccctgaca

SEQ ID NO: 4901639 - DNA, 25 bp, Homo sapien
gtcttctcagtccccggcaaagttc

SEQ ID NO: 4901640 - DNA, 25 bp, Homo sapien
tcagtccccggcaaagttcacggac

SEQ ID NO: 4901641 - DNA, 25 bp, Homo sapien
caatacctacagtcatgtttttgca

SEQ ID NO: 4901642 - DNA, 25 bp, Homo sapien
ctttttaattgtttcggcaatggca

SEQ ID NO: 4901643 - DNA, 25 bp, Homo sapien
cacgatacattccttcttttgacaa

SEQ ID NO: 4901644 - DNA, 25 bp, Homo sapien
attgtttcggcaatggcagttcccc

SEQ ID NO: 4901645 - DNA, 25 bp, Homo sapien
gaggagccctcctcaccagggaagg

SEQ ID NO: 4901646 - DNA, 25 bp, Homo sapien
gaaatgtgagaggagccctcctcac

SEQ ID NO: 4901647 - DNA, 25 bp, Homo sapien
gtgagaggagccctcctcaccaggg

SEQ ID NO: 4901648 - DNA, 25 bp, Homo sapien
agttggaaatgtgagaggagccctc

SEQ ID NO: 4901649 - DNA, 25 bp, Homo sapien
agattaaagggaaagccaaagtcag

SEQ ID NO: 4901650 - DNA, 25 bp, Homo sapien
gaaagccaaagtcagaaagggcctg

SEQ ID NO: 4901651 - DNA, 25 bp, Homo sapien
aagccaaagtcagaaagggcctgtg

SEQ ID NO: 4901652 - DNA, 25 bp, Homo sapien
cagaaagggcctgtgcctcacttac

SEQ ID NO: 4901653 - DNA, 25 bp, Homo sapien
tagtacatgagagcatgagcagcag

SEQ ID NO: 4901654 - DNA, 25 bp, Homo sapien
caagagccacgagctttgaaatagg

SEQ ID NO: 4901655 - DNA, 25 bp, Homo sapien
cctatggaaacaatggagtcctctg

SEQ ID NO: 4901656 - DNA, 25 bp, Homo sapien
taggtatgactaccgctgggccaca

SEQ ID NO: 4901657 - DNA, 25 bp, Homo sapien
tggaatcaaatggaagtgaccgata

SEQ ID NO: 4901658 - DNA, 25 bp, Homo sapien
atggaagtgaccgatagccaaacaa

SEQ ID NO: 4901659 - DNA, 25 bp, Homo sapien
ctttgtagattgttatggaatcaaa

SEQ ID NO: 4901660 - DNA, 25 bp, Homo sapien
tgtagattgttatggaatcaaatgg

SEQ ID NO: 4901661 - DNA, 25 bp, Homo sapien
gaatattgcacttgagtgcagcccc

SEQ ID NO: 4901662 - DNA, 25 bp, Homo sapien
cccttctagctcatggtactggtaa

SEQ ID NO: 4901663 - DNA, 25 bp, Homo sapien
ggaggacaccaccagtcctttggaa

SEQ ID NO: 4901664 - DNA, 25 bp, Homo sapien
tactggtaatcagagtgagctgcca

SEQ ID NO: 4901665 - DNA, 25 bp, Homo sapien
ctgcctagcatctggggaccttggg

SEQ ID NO: 4901666 - DNA, 25 bp, Homo sapien
tgcctagcatctggggaccttgggg

SEQ ID NO: 4901667 - DNA, 25 bp, Homo sapien
aagccttagttcttggactgtcttg

SEQ ID NO: 4901668 - DNA, 25 bp, Homo sapien
aaagccttagttcttggactgtctt

SEQ ID NO: 4901669 - DNA, 25 bp, Homo sapien
agccttagttcttggactgtcttgc

SEQ ID NO: 4901670 - DNA, 25 bp, Homo sapien
ggagagcaatcctaacctgatctgg

SEQ ID NO: 4901671 - DNA, 25 bp, Homo sapien
aagatacatggcctctaggagagca

SEQ ID NO: 4901672 - DNA, 25 bp, Homo sapien
tgtcttgcctgaaatgactagctga

SEQ ID NO: 4901673 - DNA, 25 bp, Homo sapien
ttcctggttccagctttgcaaagaa

SEQ ID NO: 4901674 - DNA, 25 bp, Homo sapien
aaaatattggaaggaggtgagctca

SEQ ID NO: 4901675 - DNA, 25 bp, Homo sapien
aatgaaaatattggaaggaggtgag

SEQ ID NO: 4901676 - DNA, 25 bp, Homo sapien
gacctttagcaactcagcaatgaaa

SEQ ID NO: 4901677 - DNA, 25 bp, Homo sapien
ctcatgacctttagcaactcagcaa

SEQ ID NO: 4901678 - DNA, 25 bp, Homo sapien
ctggttttcgatgcttttcttgtat

SEQ ID NO: 4901679 - DNA, 25 bp, Homo sapien
ggttttcgatgcttttcttgtatgt

SEQ ID NO: 4901680 - DNA, 25 bp, Homo sapien
ttttcgatgcttttcttgtatgtgt

SEQ ID NO: 4901681 - DNA, 25 bp, Homo sapien
aaactggttttcgatgcttttcttg

SEQ ID NO: 4901682 - DNA, 25 bp, Homo sapien
cagcagtcacaggggaaagaggctg

SEQ ID NO: 4901683 - DNA, 25 bp, Homo sapien
tcagcagtcacaggggaaagaggct

SEQ ID NO: 4901684 - DNA, 25 bp, Homo sapien
aatcagcagtcacaggggaaagagg

SEQ ID NO: 4901685 - DNA, 25 bp, Homo sapien
cctgatggttactgatttactgtgg

SEQ ID NO: 4901686 - DNA, 25 bp, Homo sapien
tatcacatggccaactggccagggc

SEQ ID NO: 4901687 - DNA, 25 bp, Homo sapien
cttcaacattggaaagtgttggaaa

SEQ ID NO: 4901688 - DNA, 25 bp, Homo sapien
ggtttactgcgttgaccccagactg

SEQ ID NO: 4901689 - DNA, 25 bp, Homo sapien
tagccaccagagcacttgttgatac

SEQ ID NO: 4901690 - DNA, 25 bp, Homo sapien
gggcacggcaggagaccaaacgatt

SEQ ID NO: 4901691 - DNA, 25 bp, Homo sapien
accgctcggcgctctttccacgcag

SEQ ID NO: 4901692 - DNA, 25 bp, Homo sapien
ttcgggccggagtgcttcccgcctg

SEQ ID NO: 4901693 - DNA, 25 bp, Homo sapien
caaacgattcttcccgacgaggagg

SEQ ID NO: 4901694 - DNA, 25 bp, Homo sapien
cgggcagcagcagcgacagcagcac

SEQ ID NO: 4901695 - DNA, 25 bp, Homo sapien
ccacaacccgcgcgggcagcagcag

SEQ ID NO: 4901696 - DNA, 25 bp, Homo sapien
ggcagcagcagcgacagcagcaccg

SEQ ID NO: 4901697 - DNA, 25 bp, Homo sapien
cagcagcagcgacagcagcaccggc

SEQ ID NO: 4901698 - DNA, 25 bp, Homo sapien
catcacaacacggagccgacaacat

SEQ ID NO: 4901699 - DNA, 25 bp, Homo sapien
tgtcatcacaacacggagccgacaa

SEQ ID NO: 4901700 - DNA, 25 bp, Homo sapien
gtcatcacaacacggagccgacaac

SEQ ID NO: 4901701 - DNA, 25 bp, Homo sapien
ctgtcatcacaacacggagccgaca

SEQ ID NO: 4901702 - DNA, 25 bp, Homo sapien
aattcgtctgggcccgggacacaca

SEQ ID NO: 4901703 - DNA, 25 bp, Homo sapien
caattcgtctgggcccgggacacac

SEQ ID NO: 4901704 - DNA, 25 bp, Homo sapien
gaagatgtgctcaaatgttgggcca

SEQ ID NO: 4901705 - DNA, 25 bp, Homo sapien
tacgaaaatgaagacaagatcaggc

SEQ ID NO: 4901706 - DNA, 25 bp, Homo sapien
cgggaatccatcaggagtaaccatt

SEQ ID NO: 4901707 - DNA, 25 bp, Homo sapien
ggttaagtgtacatgactgagccag

SEQ ID NO: 4901708 - DNA, 25 bp, Homo sapien
agaacagtggcaggctggaacttct

SEQ ID NO: 4901709 - DNA, 25 bp, Homo sapien
ggcatcagagaacagtggcaggctg

SEQ ID NO: 4901710 - DNA, 25 bp, Homo sapien
aggctggaacttctgactgggattc

SEQ ID NO: 4901711 - DNA, 25 bp, Homo sapien
agagaacagtggcaggctggaactt

SEQ ID NO: 4901712 - DNA, 25 bp, Homo sapien
taagttacctctggctcagcagtga

SEQ ID NO: 4901713 - DNA, 25 bp, Homo sapien
gagaggcgctcatgatcaacagtcc

SEQ ID NO: 4901714 - DNA, 25 bp, Homo sapien
aaactcgttgttgcccacagcgtgg

SEQ ID NO: 4901715 - DNA, 25 bp, Homo sapien
gaaaatgccactcgaagcaccaggt

SEQ ID NO: 4901716 - DNA, 25 bp, Homo sapien
aaatgcttagaatgaccaactggaa

SEQ ID NO: 4901717 - DNA, 25 bp, Homo sapien
tagaatgaccaactggaaatgttta

SEQ ID NO: 4901718 - DNA, 25 bp, Homo sapien
aagggtaaatgcttagaatgaccaa

SEQ ID NO: 4901719 - DNA, 25 bp, Homo sapien
gtaaatgcttagaatgaccaactgg

SEQ ID NO: 4901720 - DNA, 25 bp, Homo sapien
aataagaagtacgattccccggcag

SEQ ID NO: 4901721 - DNA, 25 bp, Homo sapien
catgaaatctgagctaggcaggacc

SEQ ID NO: 4901722 - DNA, 25 bp, Homo sapien
cttgcttcaagtgcaggtgccatga

SEQ ID NO: 4901723 - DNA, 25 bp, Homo sapien
taaccaagagactacacacagcaag

SEQ ID NO: 4901724 - DNA, 25 bp, Homo sapien
tattctgagcagcaatcttcctgag

SEQ ID NO: 4901725 - DNA, 25 bp, Homo sapien
tcttgatcatgaccacaggaaacca

SEQ ID NO: 4901726 - DNA, 25 bp, Homo sapien
gattcagtatccacagtccagaagg

SEQ ID NO: 4901727 - DNA, 25 bp, Homo sapien
gctagagcagtccacatatttcatt

SEQ ID NO: 4901728 - DNA, 25 bp, Homo sapien
ggtactctgtaccataccaacattc

SEQ ID NO: 4901729 - DNA, 25 bp, Homo sapien
tttaattcaccataggcatttctcc

SEQ ID NO: 4901730 - DNA, 25 bp, Homo sapien
taattctagacaccgtacaacagtg

SEQ ID NO: 4901731 - DNA, 25 bp, Homo sapien
tatagagcagacaagcttccagact

SEQ ID NO: 4901732 - DNA, 25 bp, Homo sapien
tgtctttccggtgctttgctctcat

SEQ ID NO: 4901733 - DNA, 25 bp, Homo sapien
tgctgtctttccggtgctttgctct

SEQ ID NO: 4901734 - DNA, 25 bp, Homo sapien
ttgttactatttagctcactgctgt

SEQ ID NO: 4901735 - DNA, 25 bp, Homo sapien
cttgttactatttagctcactgctg

SEQ ID NO: 4901736 - DNA, 25 bp, Homo sapien
cactgactgacttgtgggaacctgt

SEQ ID NO: 4901737 - DNA, 25 bp, Homo sapien
aaggttgactcgcacccactgactg

SEQ ID NO: 4901738 - DNA, 25 bp, Homo sapien
cccatttataggcacagaacccata

SEQ ID NO: 4901739 - DNA, 25 bp, Homo sapien
gaacctgtgaggtattgcctgcatc

SEQ ID NO: 4901740 - DNA, 25 bp, Homo sapien
gaaagtacagccactgtccgtagaa

SEQ ID NO: 4901741 - DNA, 25 bp, Homo sapien
gcgttggcgaggaaagtacagccac

SEQ ID NO: 4901742 - DNA, 25 bp, Homo sapien
tacagccactgtccgtagaaagaag

SEQ ID NO: 4901743 - DNA, 25 bp, Homo sapien
tgtccgtagaaagaagataacttgc

SEQ ID NO: 4901744 - DNA, 25 bp, Homo sapien
gagaaaaccataatgcagcaatgat

SEQ ID NO: 4901745 - DNA, 25 bp, Homo sapien
tagagaaaaccataatgcagcaatg

SEQ ID NO: 4901746 - DNA, 25 bp, Homo sapien
agagaaaaccataatgcagcaatga

SEQ ID NO: 4901747 - DNA, 25 bp, Homo sapien
gaaaaccataatgcagcaatgatca

SEQ ID NO: 4901748 - DNA, 25 bp, Homo sapien
gcctctttctcaaaaagggatgcat

SEQ ID NO: 4901749 - DNA, 25 bp, Homo sapien
tctcaaaaagggatgcattaccaaa

SEQ ID NO: 4901750 - DNA, 25 bp, Homo sapien
gagggtctttgtgttgctgccagta

SEQ ID NO: 4901751 - DNA, 25 bp, Homo sapien
agctgtccccgtgcctccatgaggg

SEQ ID NO: 4901752 - DNA, 25 bp, Homo sapien
aacgtgttcgtgacagggtcaagcg

SEQ ID NO: 4901753 - DNA, 25 bp, Homo sapien
gtattgaaggcataagcacagagtc

SEQ ID NO: 4901754 - DNA, 25 bp, Homo sapien
aaggcataagcacagagtcggaaag

SEQ ID NO: 4901755 - DNA, 25 bp, Homo sapien
tgtgctaaacgtgttcgtgacaggg

SEQ ID NO: 4901756 - DNA, 25 bp, Homo sapien
ccagcatttggcatagcgacgtagg

SEQ ID NO: 4901757 - DNA, 25 bp, Homo sapien
tagaagaaaatttgtcaggggacat

SEQ ID NO: 4901758 - DNA, 25 bp, Homo sapien
ggcatagcgacgtaggctttcctac

SEQ ID NO: 4901759 - DNA, 25 bp, Homo sapien
tttggcatagcgacgtaggctttcc

SEQ ID NO: 4901760 - DNA, 25 bp, Homo sapien
tgacaagcaaaagtacacgcctaag

SEQ ID NO: 4901761 - DNA, 25 bp, Homo sapien
aaggtgacaagcaaaagtacacgcc

SEQ ID NO: 4901762 - DNA, 25 bp, Homo sapien
gtacacgactcagctctaaattggc

SEQ ID NO: 4901763 - DNA, 25 bp, Homo sapien
tacacgcctaagcattgtacacgac

SEQ ID NO: 4901764 - DNA, 25 bp, Homo sapien
tcccttggggattccttgccacttg

SEQ ID NO: 4901765 - DNA, 25 bp, Homo sapien
cccttggggattccttgccacttgc

SEQ ID NO: 4901766 - DNA, 25 bp, Homo sapien
aactgacagaagcatcgtgggtccc

SEQ ID NO: 4901767 - DNA, 25 bp, Homo sapien
tacgatgtactcgaagaagcatgag

SEQ ID NO: 4901768 - DNA, 25 bp, Homo sapien
gctggcaattgccaaccacctgggc

SEQ ID NO: 4901769 - DNA, 25 bp, Homo sapien
caccatcccttaatgtcctacgatg

SEQ ID NO: 4901770 - DNA, 25 bp, Homo sapien
tatcttcacttgtagcccccaaaac

SEQ ID NO: 4901771 - DNA, 25 bp, Homo sapien
tccaagctttcattcttatcttcac

SEQ ID NO: 4901772 - DNA, 25 bp, Homo sapien
aaaattccaagctttcattcttatc

SEQ ID NO: 4901773 - DNA, 25 bp, Homo sapien
cttatcttcacttgtagcccccaaa

SEQ ID NO: 4901774 - DNA, 25 bp, Homo sapien
cagagcatgcagagctcctcaaggg

SEQ ID NO: 4901775 - DNA, 25 bp, Homo sapien
gttgcctagcgccagacgccagtct

SEQ ID NO: 4901776 - DNA, 25 bp, Homo sapien
gcggtgttgcctagcgccagacgcc

SEQ ID NO: 4901777 - DNA, 25 bp, Homo sapien
tctgacaaagtccaaatgctcttca

SEQ ID NO: 4901778 - DNA, 25 bp, Homo sapien
tgccttcacctcagtgttgaaactg

SEQ ID NO: 4901779 - DNA, 25 bp, Homo sapien
gataaagatggtaataaaatcctgg

SEQ ID NO: 4901780 - DNA, 25 bp, Homo sapien
ttggaatagagggtctttgtgccca

SEQ ID NO: 4901781 - DNA, 25 bp, Homo sapien
cgagatttatgcttggaatagaggg

SEQ ID NO: 4901782 - DNA, 25 bp, Homo sapien
cgtcgcaaaaccaaggaccagggtg

SEQ ID NO: 4901783 - DNA, 25 bp, Homo sapien
tcgcaaaaccaaggaccagggtgga

SEQ ID NO: 4901784 - DNA, 25 bp, Homo sapien
gctttgagttcctaaagtgtcttga

SEQ ID NO: 4901785 - DNA, 25 bp, Homo sapien
ctggctttgagttcctaaagtgtct

SEQ ID NO: 4901786 - DNA, 25 bp, Homo sapien
tcctaaagtgtcttgaagtcaccat

SEQ ID NO: 4901787 - DNA, 25 bp, Homo sapien
gagttcctaaagtgtcttgaagtca

SEQ ID NO: 4901788 - DNA, 25 bp, Homo sapien
aaaacgctccacttgcaggggtttg

SEQ ID NO: 4901789 - DNA, 25 bp, Homo sapien
gccaccagcagaaaaccagaaggaa

SEQ ID NO: 4901790 - DNA, 25 bp, Homo sapien
agcatcatgggacccttcttattaa

SEQ ID NO: 4901791 - DNA, 25 bp, Homo sapien
cttggggaaaaacgctccacttgca

SEQ ID NO: 4901792 - DNA, 25 bp, Homo sapien
tcattgtgggcatgtacgataaggg

SEQ ID NO: 4901793 - DNA, 25 bp, Homo sapien
tgaagagatcattgtgggcatgtac

SEQ ID NO: 4901794 - DNA, 25 bp, Homo sapien
tgtcatggaagtcccaggacgtgga

SEQ ID NO: 4901795 - DNA, 25 bp, Homo sapien
gcttccaggaggacgttatggctaa

SEQ ID NO: 4901796 - DNA, 25 bp, Homo sapien
tgagtcgtctgatgcacagatgcca

SEQ ID NO: 4901797 - DNA, 25 bp, Homo sapien
aactggattatcagccacccttgca

SEQ ID NO: 4901798 - DNA, 25 bp, Homo sapien
accctggagcccttctggttgctgc

SEQ ID NO: 4901799 - DNA, 25 bp, Homo sapien
ctatgagtcgtctgatgcacagatg

SEQ ID NO: 4901800 - DNA, 25 bp, Homo sapien
cttgtagggtctgttgctgtccttc

SEQ ID NO: 4901801 - DNA, 25 bp, Homo sapien
ggctccttcttgtagggtctgttgc

SEQ ID NO: 4901802 - DNA, 25 bp, Homo sapien
ctggctttacccaccttcctggtgt

SEQ ID NO: 4901803 - DNA, 25 bp, Homo sapien
cttcttgtagggtctgttgctgtcc

SEQ ID NO: 4901804 - DNA, 25 bp, Homo sapien
ggttctgagtgcaaacttagatgtt

SEQ ID NO: 4901805 - DNA, 25 bp, Homo sapien
tcaatcaggacacccctggaatggt

SEQ ID NO: 4901806 - DNA, 25 bp, Homo sapien
agcccacggtgttaagtcccagatt

SEQ ID NO: 4901807 - DNA, 25 bp, Homo sapien
cttagatgtttagagggtccgcagg

SEQ ID NO: 4901808 - DNA, 25 bp, Homo sapien
agtactggtgatggtttcagattta

SEQ ID NO: 4901809 - DNA, 25 bp, Homo sapien
ttaaccagtaaagtactggtgatgg

SEQ ID NO: 4901810 - DNA, 25 bp, Homo sapien
ccagtaaagtactggtgatggtttc

SEQ ID NO: 4901811 - DNA, 25 bp, Homo sapien
taaagtactggtgatggtttcagat

SEQ ID NO: 4901812 - DNA, 25 bp, Homo sapien
tgaagctcacccagtcgacagatga

SEQ ID NO: 4901813 - DNA, 25 bp, Homo sapien
ggatgatacactccattgcaaagcc

SEQ ID NO: 4901814 - DNA, 25 bp, Homo sapien
cagtcgacagatgaacctgggatga

SEQ ID NO: 4901815 - DNA, 25 bp, Homo sapien
agatgaacctgggatgatacactcc

SEQ ID NO: 4901816 - DNA, 25 bp, Homo sapien
tgtgacagtgacctcagagctttgc

SEQ ID NO: 4901817 - DNA, 25 bp, Homo sapien
cagtccccgctgtgacagtgacctc

SEQ ID NO: 4901818 - DNA, 25 bp, Homo sapien
ccccagtccccgctgtgacagtgac

SEQ ID NO: 4901819 - DNA, 25 bp, Homo sapien
gtgacagtgacctcagagctttgcc

SEQ ID NO: 4901820 - DNA, 25 bp, Homo sapien
gcccctggtctacatgccacctagg

SEQ ID NO: 4901821 - DNA, 25 bp, Homo sapien
tctacatgccacctagggccagcat

SEQ ID NO: 4901822 - DNA, 25 bp, Homo sapien
tggtctacatgccacctagggccag

SEQ ID NO: 4901823 - DNA, 25 bp, Homo sapien
ttctagcccctggtctacatgccac

SEQ ID NO: 4901824 - DNA, 25 bp, Homo sapien
ggctggagaactcctcacctgtggc

SEQ ID NO: 4901825 - DNA, 25 bp, Homo sapien
tacttactaaattgctggctggaga

SEQ ID NO: 4901826 - DNA, 25 bp, Homo sapien
cccctcaatgttgctacttactaaa

SEQ ID NO: 4901827 - DNA, 25 bp, Homo sapien
ctggctggagaactcctcacctgtg

SEQ ID NO: 4901828 - DNA, 25 bp, Homo sapien
aggtgaaagcctagtctcccacgca

SEQ ID NO: 4901829 - DNA, 25 bp, Homo sapien
agcaggtgaaagcctagtctcccac

SEQ ID NO: 4901830 - DNA, 25 bp, Homo sapien
gcaggtgaaagcctagtctcccacg

SEQ ID NO: 4901831 - DNA, 25 bp, Homo sapien
gtgaaagcctagtctcccacgcagc

SEQ ID NO: 4901832 - DNA, 25 bp, Homo sapien
ccagcaccatgagatcaatgactga

SEQ ID NO: 4901833 - DNA, 25 bp, Homo sapien
tgcatctactgtgtgaagccccaga

SEQ ID NO: 4901834 - DNA, 25 bp, Homo sapien
aaggagagtctgctcaaggtcgcca

SEQ ID NO: 4901835 - DNA, 25 bp, Homo sapien
caatgactgattatgtggcagcaag

SEQ ID NO: 4901836 - DNA, 25 bp, Homo sapien
ttgctctactttgctgaccaaggag

SEQ ID NO: 4901837 - DNA, 25 bp, Homo sapien
acagcaggatcttctgagaaccagc

SEQ ID NO: 4901838 - DNA, 25 bp, Homo sapien
tctgaggcaaagaccgtgctgctgg

SEQ ID NO: 4901839 - DNA, 25 bp, Homo sapien
tgccttagacatgtttgccatctgc

SEQ ID NO: 4901840 - DNA, 25 bp, Homo sapien
gaagatgccttagacatgtttgcca

SEQ ID NO: 4901841 - DNA, 25 bp, Homo sapien
gcttcctcccagaggtgatgggtga

SEQ ID NO: 4901842 - DNA, 25 bp, Homo sapien
gtatgacaggcccacttgttctgtc

SEQ ID NO: 4901843 - DNA, 25 bp, Homo sapien
cacaccacggctgcatttctttagc

SEQ ID NO: 4901844 - DNA, 25 bp, Homo sapien
gattgtccacaccacggctgcattt

SEQ ID NO: 4901845 - DNA, 25 bp, Homo sapien
tgcatttctttagctgggatgatgg

SEQ ID NO: 4901846 - DNA, 25 bp, Homo sapien
actttcgattgtccacaccacggct

SEQ ID NO: 4901847 - DNA, 25 bp, Homo sapien
aaatcttactctgggccttactgcc

SEQ ID NO: 4901848 - DNA, 25 bp, Homo sapien
ttactctgggccttactgccccact

SEQ ID NO: 4901849 - DNA, 25 bp, Homo sapien
tcaaatcttactctgggccttactg

SEQ ID NO: 4901850 - DNA, 25 bp, Homo sapien
cctcttcaaatcttactctgggcct

SEQ ID NO: 4901851 - DNA, 25 bp, Homo sapien
tctctccagaagagaactgcccctt

SEQ ID NO: 4901852 - DNA, 25 bp, Homo sapien
cagaagagaactgccccttctttac

SEQ ID NO: 4901853 - DNA, 25 bp, Homo sapien
tttctctccagaagagaactgcccc

SEQ ID NO: 4901854 - DNA, 25 bp, Homo sapien
ccttccccacctcattttctctcca

SEQ ID NO: 4901855 - DNA, 25 bp, Homo sapien
ccgaacggtaactggtactggcagc

SEQ ID NO: 4901856 - DNA, 25 bp, Homo sapien
ccaagtttaccccagcgtggcacgg

SEQ ID NO: 4901857 - DNA, 25 bp, Homo sapien
catgccatgacagatcagtagtgtg

SEQ ID NO: 4901858 - DNA, 25 bp, Homo sapien
ggcaggcagagcgatgcaattcctt

SEQ ID NO: 4901859 - DNA, 25 bp, Homo sapien
gaggaccacttgggctttattttgc

SEQ ID NO: 4901860 - DNA, 25 bp, Homo sapien
cacttgggctttattttgcgccctc

SEQ ID NO: 4901861 - DNA, 25 bp, Homo sapien
tgggctttattttgcgccctcctct

SEQ ID NO: 4901862 - DNA, 25 bp, Homo sapien
caggggctgcgctgtgaggaccact

SEQ ID NO: 4901863 - DNA, 25 bp, Homo sapien
cctgctgttagcacactgagcacat

SEQ ID NO: 4901864 - DNA, 25 bp, Homo sapien
tatccctgacaagtccttagaactg

SEQ ID NO: 4901865 - DNA, 25 bp, Homo sapien
catcacatatccctgacaagtcctt

SEQ ID NO: 4901866 - DNA, 25 bp, Homo sapien
gcaatgtgtctatgaagcaagttct

SEQ ID NO: 4901867 - DNA, 25 bp, Homo sapien
ggaaagtcgaggaggatcggcaggg

SEQ ID NO: 4901868 - DNA, 25 bp, Homo sapien
ccggaaagtcgaggaggatcggcag

SEQ ID NO: 4901869 - DNA, 25 bp, Homo sapien
cccggaaagtcgaggaggatcggca

SEQ ID NO: 4901870 - DNA, 25 bp, Homo sapien
agtagggggaagtgcaaggggagca

SEQ ID NO: 4901871 - DNA, 25 bp, Homo sapien
acatcacagggcaccgaggacgttt

SEQ ID NO: 4901872 - DNA, 25 bp, Homo sapien
agggcaccgaggacgtttcctctga

SEQ ID NO: 4901873 - DNA, 25 bp, Homo sapien
gaagcacatcacagggcaccgagga

SEQ ID NO: 4901874 - DNA, 25 bp, Homo sapien
gctgttcaggaagcacatcacaggg

SEQ ID NO: 4901875 - DNA, 25 bp, Homo sapien
aatgcagtgcttggtgaagcaagcc

SEQ ID NO: 4901876 - DNA, 25 bp, Homo sapien
acaggaaagtaaggacgggaatgca

SEQ ID NO: 4901877 - DNA, 25 bp, Homo sapien
gagctccagttttttgagcaagaca

SEQ ID NO: 4901878 - DNA, 25 bp, Homo sapien
ggtgttcagagttgagtgagctcca

SEQ ID NO: 4901879 - DNA, 25 bp, Homo sapien
aggcacttggtgggcattatctcat

SEQ ID NO: 4901880 - DNA, 25 bp, Homo sapien
attatctcattaccctgcacagcag

SEQ ID NO: 4901881 - DNA, 25 bp, Homo sapien
cattatctcattaccctgcacagca

SEQ ID NO: 4901882 - DNA, 25 bp, Homo sapien
ggcattatctcattaccctgcacag

SEQ ID NO: 4901883 - DNA, 25 bp, Homo sapien
acaaatggcaccactagctacacct

SEQ ID NO: 4901884 - DNA, 25 bp, Homo sapien
ggcaccactagctacacctgagcag

SEQ ID NO: 4901885 - DNA, 25 bp, Homo sapien
gcagagaacctgagcgtcaccttcc

SEQ ID NO: 4901886 - DNA, 25 bp, Homo sapien
cagagaacctgagcgtcaccttcct

SEQ ID NO: 4901887 - DNA, 25 bp, Homo sapien
taacttggagattactagccctggg

SEQ ID NO: 4901888 - DNA, 25 bp, Homo sapien
gatgaaccggttttgctgtcagatt

SEQ ID NO: 4901889 - DNA, 25 bp, Homo sapien
tgacagccccaaagctaacttggag

SEQ ID NO: 4901890 - DNA, 25 bp, Homo sapien
tagtctagcgtatgaccactgctcc

SEQ ID NO: 4901891 - DNA, 25 bp, Homo sapien
ctccaagaggttctgttactggttc

SEQ ID NO: 4901892 - DNA, 25 bp, Homo sapien
tggttcacgctgtcctctaaagcag

SEQ ID NO: 4901893 - DNA, 25 bp, Homo sapien
tctaaagcagccagcgcttactaga

SEQ ID NO: 4901894 - DNA, 25 bp, Homo sapien
ccagcgcttactagagtggctttta

SEQ ID NO: 4901895 - DNA, 25 bp, Homo sapien
cagtccatgggacagcatagtgctg

SEQ ID NO: 4901896 - DNA, 25 bp, Homo sapien
tccatgggacagcatagtgctgcat

SEQ ID NO: 4901897 - DNA, 25 bp, Homo sapien
gaggctttcccactagggcgcttta

SEQ ID NO: 4901898 - DNA, 25 bp, Homo sapien
gaagcctgaggctttcccactaggg

SEQ ID NO: 4901899 - DNA, 25 bp, Homo sapien
taggcacccttcaatgcctttctgg

SEQ ID NO: 4901900 - DNA, 25 bp, Homo sapien
attgggaatgccaaagggggacaca

SEQ ID NO: 4901901 - DNA, 25 bp, Homo sapien
caatgcctttctggcgaagtgtgga

SEQ ID NO: 4901902 - DNA, 25 bp, Homo sapien
agccccacacggtcacactcacagt

SEQ ID NO: 4901903 - DNA, 25 bp, Homo sapien
actgctgaagagaggtgtccactgc

SEQ ID NO: 4901904 - DNA, 25 bp, Homo sapien
ccactgctgaagagaggtgtccact

SEQ ID NO: 4901905 - DNA, 25 bp, Homo sapien
tgctgaagagaggtgtccactgcat

SEQ ID NO: 4901906 - DNA, 25 bp, Homo sapien
cccactgctgaagagaggtgtccac

SEQ ID NO: 4901907 - DNA, 25 bp, Homo sapien
gaggccccactcaaaaatggcatcc

SEQ ID NO: 4901908 - DNA, 25 bp, Homo sapien
ctgactgagagcccaacagccgcat

SEQ ID NO: 4901909 - DNA, 25 bp, Homo sapien
ctctgaggccccactcaaaaatggc

SEQ ID NO: 4901910 - DNA, 25 bp, Homo sapien
tctgaggccccactcaaaaatggca

SEQ ID NO: 4901911 - DNA, 25 bp, Homo sapien
caggtgctcttgtttcggattctat

SEQ ID NO: 4901912 - DNA, 25 bp, Homo sapien
ggtgctcttgtttcggattctatca

SEQ ID NO: 4901913 - DNA, 25 bp, Homo sapien
gtgctcttgtttcggattctatcat

SEQ ID NO: 4901914 - DNA, 25 bp, Homo sapien
tcaggtgctcttgtttcggattcta

SEQ ID NO: 4901915 - DNA, 25 bp, Homo sapien
tctcatcctctctgcgttccaacac

SEQ ID NO: 4901916 - DNA, 25 bp, Homo sapien
catcctctctgcgttccaacaccat

SEQ ID NO: 4901917 - DNA, 25 bp, Homo sapien
cctggtcctcactccggctctcatc

SEQ ID NO: 4901918 - DNA, 25 bp, Homo sapien
cctcactccggctctcatcctctct

SEQ ID NO: 4901919 - DNA, 25 bp, Homo sapien
tcaagattaggggaaaccgcggctc

SEQ ID NO: 4901920 - DNA, 25 bp, Homo sapien
ggctccatttccaaggtgctcttca

SEQ ID NO: 4901921 - DNA, 25 bp, Homo sapien
ctctcatctccctgcccttccgagg

SEQ ID NO: 4901922 - DNA, 25 bp, Homo sapien
ggcgggttccaatgtaggtcaagat

SEQ ID NO: 4901923 - DNA, 25 bp, Homo sapien
caatgagattgatccacacaaccat

SEQ ID NO: 4901924 - DNA, 25 bp, Homo sapien
gcaatgagattgatccacacaacca

SEQ ID NO: 4901925 - DNA, 25 bp, Homo sapien
ggcaatgagattgatccacacaacc

SEQ ID NO: 4901926 - DNA, 25 bp, Homo sapien
caccaggaacatttgtccagtttct

SEQ ID NO: 4901927 - DNA, 25 bp, Homo sapien
gagacacaacatgactttgagactg

SEQ ID NO: 4901928 - DNA, 25 bp, Homo sapien
gactgaactctcataaggctcctca

SEQ ID NO: 4901929 - DNA, 25 bp, Homo sapien
tgtttttgtgggctccctcgggaga

SEQ ID NO: 4901930 - DNA, 25 bp, Homo sapien
tagggaaagggtcttgacacggaca

SEQ ID NO: 4901931 - DNA, 25 bp, Homo sapien
tcacaaccaaagtcagtcatggctt

SEQ ID NO: 4901932 - DNA, 25 bp, Homo sapien
acaaccaaagtcagtcatggcttgg

SEQ ID NO: 4901933 - DNA, 25 bp, Homo sapien
aagggtcttgacacggacaggtcag

SEQ ID NO: 4901934 - DNA, 25 bp, Homo sapien
cagacccacagaaggtgttcaaaca

SEQ ID NO: 4901935 - DNA, 25 bp, Homo sapien
tacctgccatgcatacatgctgcgc

SEQ ID NO: 4901936 - DNA, 25 bp, Homo sapien
tgtgacatgttgctctttggctgaa

SEQ ID NO: 4901937 - DNA, 25 bp, Homo sapien
ccttggtaaaggaaccagtcagctg

SEQ ID NO: 4901938 - DNA, 25 bp, Homo sapien
tgcggtggaatgatcccggtgcaca

SEQ ID NO: 4901939 - DNA, 25 bp, Homo sapien
aggaaggagatatttacgtgactca

SEQ ID NO: 4901940 - DNA, 25 bp, Homo sapien
tcagcccttggaccgagaagaaaag

SEQ ID NO: 4901941 - DNA, 25 bp, Homo sapien
gaatgatcccggtgcacaatattcc

SEQ ID NO: 4901942 - DNA, 25 bp, Homo sapien
aacctgtggagatggtggaaaactc

SEQ ID NO: 4901943 - DNA, 25 bp, Homo sapien
tgacagagaatatttggaaagcacc

SEQ ID NO: 4901944 - DNA, 25 bp, Homo sapien
tcaactgatcctcaccccatcaaaa

SEQ ID NO: 4901945 - DNA, 25 bp, Homo sapien
atttggaaagcaccaaaacctgtgg

SEQ ID NO: 4901946 - DNA, 25 bp, Homo sapien
gagctgtctctagtacatcactggt

SEQ ID NO: 4901947 - DNA, 25 bp, Homo sapien
taaatgtgtaggctccaggccgtac

SEQ ID NO: 4901948 - DNA, 25 bp, Homo sapien
gaatctgctagagaaatggctctca

SEQ ID NO: 4901949 - DNA, 25 bp, Homo sapien
tgtccctgaagctgcataccaaaga

SEQ ID NO: 4901950 - DNA, 25 bp, Homo sapien
gcatttgcattaagttaaagccact

SEQ ID NO: 4901951 - DNA, 25 bp, Homo sapien
gaatatggtggtcggtattttctcc

SEQ ID NO: 4901952 - DNA, 25 bp, Homo sapien
cagtttaaggccaatcctcctgctg

SEQ ID NO: 4901953 - DNA, 25 bp, Homo sapien
tatttgtgatagaacgggagggact

SEQ ID NO: 4901954 - DNA, 25 bp, Homo sapien
aaatgactttaagatggcagttcca

SEQ ID NO: 4901955 - DNA, 25 bp, Homo sapien
actcctgcataaagccgccatcttg

SEQ ID NO: 4901956 - DNA, 25 bp, Homo sapien
tgtggtgatcaagtcccattactgc

SEQ ID NO: 4901957 - DNA, 25 bp, Homo sapien
tactgtgggacttctctggagatac

SEQ ID NO: 4901958 - DNA, 25 bp, Homo sapien
aagtaggtgaacctggcaattgcac

SEQ ID NO: 4901959 - DNA, 25 bp, Homo sapien
ctggcaattgcacatgtcctttgac

SEQ ID NO: 4901960 - DNA, 25 bp, Homo sapien
tgaacctggcaattgcacatgtcct

SEQ ID NO: 4901961 - DNA, 25 bp, Homo sapien
ctaccaagtaggtgaacctggcaat

SEQ ID NO: 4901962 - DNA, 25 bp, Homo sapien
ggcgggattcccatgtcttctgttg

SEQ ID NO: 4901963 - DNA, 25 bp, Homo sapien
gttatccgggctggatgcagatcca

SEQ ID NO: 4901964 - DNA, 25 bp, Homo sapien
tggttcccgtctgcaagcaggtgcc

SEQ ID NO: 4901965 - DNA, 25 bp, Homo sapien
aatgaggcactgttcctgcagagca

SEQ ID NO: 4901966 - DNA, 25 bp, Homo sapien
catggcatgcgtagctggagccaga

SEQ ID NO: 4901967 - DNA, 25 bp, Homo sapien
catgcgtagctggagccagattgag

SEQ ID NO: 4901968 - DNA, 25 bp, Homo sapien
gccacttcatggcatgcgtagctgg

SEQ ID NO: 4901969 - DNA, 25 bp, Homo sapien
tagctggagccagattgagggcccc

SEQ ID NO: 4901970 - DNA, 25 bp, Homo sapien
gaattttgacccaggaaatgctctg

SEQ ID NO: 4901971 - DNA, 25 bp, Homo sapien
cactggtgtccataaagtgctgctc

SEQ ID NO: 4901972 - DNA, 25 bp, Homo sapien
aatgctctgtgtatgacccctgcag

SEQ ID NO: 4901973 - DNA, 25 bp, Homo sapien
ctgcagcgacaccaaccactggtgt

SEQ ID NO: 4901974 - DNA, 25 bp, Homo sapien
gagccctggagtgggtcgcttaggg

SEQ ID NO: 4901975 - DNA, 25 bp, Homo sapien
ctaagcatgatccacggacatggtt

SEQ ID NO: 4901976 - DNA, 25 bp, Homo sapien
tgatccacggacatggtttcccaag

SEQ ID NO: 4901977 - DNA, 25 bp, Homo sapien
agtgggtcgcttagggtactgtgcg

SEQ ID NO: 4901978 - DNA, 25 bp, Homo sapien
actctgaataatgtcaccatgcgcc

SEQ ID NO: 4901979 - DNA, 25 bp, Homo sapien
tcaccatgcgccagggcactgtggg

SEQ ID NO: 4901980 - DNA, 25 bp, Homo sapien
ataatgtcaccatgcgccagggcac

SEQ ID NO: 4901981 - DNA, 25 bp, Homo sapien
gaataatgtcaccatgcgccagggc

SEQ ID NO: 4901982 - DNA, 25 bp, Homo sapien
tcttgattgaccaaactgtaggcag

SEQ ID NO: 4901983 - DNA, 25 bp, Homo sapien
taggcaacatctccatgaaggtgaa

SEQ ID NO: 4901984 - DNA, 25 bp, Homo sapien
gatgatccgattggcctctcttggg

SEQ ID NO: 4901985 - DNA, 25 bp, Homo sapien
cagtgcaagataagtggttccccaa

SEQ ID NO: 4901986 - DNA, 25 bp, Homo sapien
cacttggaatctcaactgtctgtga

SEQ ID NO: 4901987 - DNA, 25 bp, Homo sapien
gcacttggaatctcaactgtctgtg

SEQ ID NO: 4901988 - DNA, 25 bp, Homo sapien
tgcacttggaatctcaactgtctgt

SEQ ID NO: 4901989 - DNA, 25 bp, Homo sapien
agacagtgaggcttgtttatacaac

SEQ ID NO: 4901990 - DNA, 25 bp, Homo sapien
caacatagcttacccttaggaatgt

SEQ ID NO: 4901991 - DNA, 25 bp, Homo sapien
aagacagtgaggcttgtttatacaa

SEQ ID NO: 4901992 - DNA, 25 bp, Homo sapien
tatacaacatagcttacccttagga

SEQ ID NO: 4901993 - DNA, 25 bp, Homo sapien
gatgagcttcactgaccaatatagg

SEQ ID NO: 4901994 - DNA, 25 bp, Homo sapien
cagtttgggatgtaacccgatgagc

SEQ ID NO: 4901995 - DNA, 25 bp, Homo sapien
cactctagattgcaggtccaaacag

SEQ ID NO: 4901996 - DNA, 25 bp, Homo sapien
tctgggctactggtttgcctgaagt

SEQ ID NO: 4901997 - DNA, 25 bp, Homo sapien
attgccagttggtgccgatgtgccc

SEQ ID NO: 4901998 - DNA, 25 bp, Homo sapien
ttgccagttggtgccgatgtgccct

SEQ ID NO: 4901999 - DNA, 25 bp, Homo sapien
gttggtgccgatgtgccctgccccg

SEQ ID NO: 4902000 - DNA, 25 bp, Homo sapien
ccagttggtgccgatgtgccctgcc

SEQ ID NO: 4902001 - DNA, 25 bp, Homo sapien
tgtgaccatcttaattctaagctgt

SEQ ID NO: 4902002 - DNA, 25 bp, Homo sapien
ctgtctccaataaggttaacccatt

SEQ ID NO: 4902003 - DNA, 25 bp, Homo sapien
cctttacaatgtctctaagctcagt

SEQ ID NO: 4902004 - DNA, 25 bp, Homo sapien
tccttccaaggtttgtcccattctg

SEQ ID NO: 4902005 - DNA, 25 bp, Homo sapien
ttcatcaagccccaataccatgtga

SEQ ID NO: 4902006 - DNA, 25 bp, Homo sapien
cagggattcctgcattgtaagctcc

SEQ ID NO: 4902007 - DNA, 25 bp, Homo sapien
ggctactaagtttgagatgaagtcc

SEQ ID NO: 4902008 - DNA, 25 bp, Homo sapien
aacatatgcttgttagctttctggg

SEQ ID NO: 4902009 - DNA, 25 bp, Homo sapien
tctgtaagactgtataattgaccaa

SEQ ID NO: 4902010 - DNA, 25 bp, Homo sapien
tctaatgttcaactaaggccagcaa

SEQ ID NO: 4902011 - DNA, 25 bp, Homo sapien
ctgaatccttgggtcacaagtatga

SEQ ID NO: 4902012 - DNA, 25 bp, Homo sapien
ttggcactgaatccttgggtcacaa

SEQ ID NO: 4902013 - DNA, 25 bp, Homo sapien
ggtcacaagtatgagaagtgacttg

SEQ ID NO: 4902014 - DNA, 25 bp, Homo sapien
tatgagaagtgacttggtccgtcat

SEQ ID NO: 4902015 - DNA, 25 bp, Homo sapien
cattattcaattgtatgaaccacaa

SEQ ID NO: 4902016 - DNA, 25 bp, Homo sapien
ggcaaaactttctctagaagtagaa

SEQ ID NO: 4902017 - DNA, 25 bp, Homo sapien
tatgcaggtctctgtacacatgggc

SEQ ID NO: 4902018 - DNA, 25 bp, Homo sapien
attgcttggccatatggtatgccca

SEQ ID NO: 4902019 - DNA, 25 bp, Homo sapien
tagacttttgatggttcctgggctt

SEQ ID NO: 4902020 - DNA, 25 bp, Homo sapien
gtagacttttgatggttcctgggct

SEQ ID NO: 4902021 - DNA, 25 bp, Homo sapien
ctgctgcaccatcaaccacaatttt

SEQ ID NO: 4902022 - DNA, 25 bp, Homo sapien
cagacggtgaaagcgtcatgagtca

SEQ ID NO: 4902023 - DNA, 25 bp, Homo sapien
ggatgaacagcgaagtgacccttag

SEQ ID NO: 4902024 - DNA, 25 bp, Homo sapien
tgacccttagtgtcatagattagat

SEQ ID NO: 4902025 - DNA, 25 bp, Homo sapien
gggaatcagggtagcagacggtgaa

SEQ ID NO: 4902026 - DNA, 25 bp, Homo sapien
tgaggaaatcagtaatcttgccagt

SEQ ID NO: 4902027 - DNA, 25 bp, Homo sapien
gtacgctaccagtgtcaaacttgag

SEQ ID NO: 4902028 - DNA, 25 bp, Homo sapien
cgctaccagtgtcaaacttgaggaa

SEQ ID NO: 4902029 - DNA, 25 bp, Homo sapien
acttgaggaaatcagtaatcttgcc

SEQ ID NO: 4902030 - DNA, 25 bp, Homo sapien
catcaaaagatccaagatgtctttt

SEQ ID NO: 4902031 - DNA, 25 bp, Homo sapien
atcaaaagatccaagatgtcttttc

SEQ ID NO: 4902032 - DNA, 25 bp, Homo sapien
tcaaaagatccaagatgtcttttct

SEQ ID NO: 4902033 - DNA, 25 bp, Homo sapien
taaaaaacgccgaaattcagagatg

SEQ ID NO: 4902034 - DNA, 25 bp, Homo sapien
cgaaattcagagatgcttattttca

SEQ ID NO: 4902035 - DNA, 25 bp, Homo sapien
acgccgaaattcagagatgcttatt

SEQ ID NO: 4902036 - DNA, 25 bp, Homo sapien
aaaaacgccgaaattcagagatgct

SEQ ID NO: 4902037 - DNA, 25 bp, Homo sapien
cttttcgttagtactgtgagcagac

SEQ ID NO: 4902038 - DNA, 25 bp, Homo sapien
gaagatccactcttttcgttagtac

SEQ ID NO: 4902039 - DNA, 25 bp, Homo sapien
aagatgaattagaagatccactctt

SEQ ID NO: 4902040 - DNA, 25 bp, Homo sapien
ccactcttttcgttagtactgtgag

SEQ ID NO: 4902041 - DNA, 25 bp, Homo sapien
catgaacatattgaatagccttgct

SEQ ID NO: 4902042 - DNA, 25 bp, Homo sapien
cttgctagacagaaacacataatgg

SEQ ID NO: 4902043 - DNA, 25 bp, Homo sapien
cacataatggaaagctgctttattt

SEQ ID NO: 4902044 - DNA, 25 bp, Homo sapien
tattgaatagccttgctagacagaa

SEQ ID NO: 4902045 - DNA, 25 bp, Homo sapien
gaatggtcagcggtgtccaaccttt

SEQ ID NO: 4902046 - DNA, 25 bp, Homo sapien
tctgctcagcaaattgtcgaggact

SEQ ID NO: 4902047 - DNA, 25 bp, Homo sapien
cagcaaattgtcgaggacttgaaga

SEQ ID NO: 4902048 - DNA, 25 bp, Homo sapien
gacttgaagaatggtcagcggtgtc

SEQ ID NO: 4902049 - DNA, 25 bp, Homo sapien
acttccctttttgttattgcgatct

SEQ ID NO: 4902050 - DNA, 25 bp, Homo sapien
tattgcgatctgtcaatctgctgca

SEQ ID NO: 4902051 - DNA, 25 bp, Homo sapien
agatctcagtttcaaggtatttatt

SEQ ID NO: 4902052 - DNA, 25 bp, Homo sapien
tttatttacgccaactgctgagcat

SEQ ID NO: 4902053 - DNA, 25 bp, Homo sapien
ttaaattacagtatatgttgcaaaa

SEQ ID NO: 4902054 - DNA, 25 bp, Homo sapien
catttttcagaatataaccactcaa

SEQ ID NO: 4902055 - DNA, 25 bp, Homo sapien
taaccactcaagctactggcacata

SEQ ID NO: 4902056 - DNA, 25 bp, Homo sapien
tcagaatataaccactcaagctact

SEQ ID NO: 4902057 - DNA, 25 bp, Homo sapien
tatagtcacagttaatgtgcaacca

SEQ ID NO: 4902058 - DNA, 25 bp, Homo sapien
tgtgcaaccatcagaacagccagtt

SEQ ID NO: 4902059 - DNA, 25 bp, Homo sapien
ttgctgttctagacattttatatga

SEQ ID NO: 4902060 - DNA, 25 bp, Homo sapien
acaattaacataccctatgattcag

SEQ ID NO: 4902061 - DNA, 25 bp, Homo sapien
ggaggctgacgtagaccagacgctt

SEQ ID NO: 4902062 - DNA, 25 bp, Homo sapien
ccagacgcttaagctcatgagttcg

SEQ ID NO: 4902063 - DNA, 25 bp, Homo sapien
aagtcaaagagtgaccttgttaaga

SEQ ID NO: 4902064 - DNA, 25 bp, Homo sapien
gaccttgttaagagctctttgggag

SEQ ID NO: 4902065 - DNA, 25 bp, Homo sapien
tgtgtgtgctcccatgatgcagcga

SEQ ID NO: 4902066 - DNA, 25 bp, Homo sapien
gtgctcccatgatgcagcgaacatg

SEQ ID NO: 4902067 - DNA, 25 bp, Homo sapien
tcccatgatgcagcgaacatgggag

SEQ ID NO: 4902068 - DNA, 25 bp, Homo sapien
catgatgcagcgaacatgggagtgc

SEQ ID NO: 4902069 - DNA, 25 bp, Homo sapien
ttttgtgtgtgaccagagcacctaa

SEQ ID NO: 4902070 - DNA, 25 bp, Homo sapien
cacacgtacatatatagagacagta

SEQ ID NO: 4902071 - DNA, 25 bp, Homo sapien
tgtatcctctgacgcgtatctcccg

SEQ ID NO: 4902072 - DNA, 25 bp, Homo sapien
gatccctagacttgttcatcgtaca

SEQ ID NO: 4902073 - DNA, 25 bp, Homo sapien
cagacgaacccaaagattctggtca

SEQ ID NO: 4902074 - DNA, 25 bp, Homo sapien
tctctttaaagcccagacgaaccca

SEQ ID NO: 4902075 - DNA, 25 bp, Homo sapien
tcgacgtttgatggttgcacatacc

SEQ ID NO: 4902076 - DNA, 25 bp, Homo sapien
attcttgcatcctcgacgtttgatg

SEQ ID NO: 4902077 - DNA, 25 bp, Homo sapien
tggaagtcgacaagcagcaacagca

SEQ ID NO: 4902078 - DNA, 25 bp, Homo sapien
ctaatgtagttggaagtcgacaagc

SEQ ID NO: 4902079 - DNA, 25 bp, Homo sapien
aacagcagggagagaccgttgctgg

SEQ ID NO: 4902080 - DNA, 25 bp, Homo sapien
cagggagagaccgttgctggttctt

SEQ ID NO: 4902081 - DNA, 25 bp, Homo sapien
agagtgtcggtacgccttctttagg

SEQ ID NO: 4902082 - DNA, 25 bp, Homo sapien
gagagtgtcggtacgccttctttag

SEQ ID NO: 4902083 - DNA, 25 bp, Homo sapien
ctggagagtgtcggtacgccttctt

SEQ ID NO: 4902084 - DNA, 25 bp, Homo sapien
ggagagtgtcggtacgccttcttta

SEQ ID NO: 4902085 - DNA, 25 bp, Homo sapien
gcaggagcgaccgaagtggccttct

SEQ ID NO: 4902086 - DNA, 25 bp, Homo sapien
ctgtaggctcgtgcgggacaaagca

SEQ ID NO: 4902087 - DNA, 25 bp, Homo sapien
gtcgctttgcgcaggctcctcttgg

SEQ ID NO: 4902088 - DNA, 25 bp, Homo sapien
tctgtcagattttcgccggtgcgtc

SEQ ID NO: 4902089 - DNA, 25 bp, Homo sapien
tcgtccgcgattggcttcgccgagg

SEQ ID NO: 4902090 - DNA, 25 bp, Homo sapien
ttggcttcgccgaggcgggatcctt

SEQ ID NO: 4902091 - DNA, 25 bp, Homo sapien
gcgcggcgggctcgtccgcgattgg

SEQ ID NO: 4902092 - DNA, 25 bp, Homo sapien
atccttgagcttctccggcggcgag

SEQ ID NO: 4902093 - DNA, 25 bp, Homo sapien
cagttgttgcctctaggaaggatgc

SEQ ID NO: 4902094 - DNA, 25 bp, Homo sapien
caagttagggtcctctggaatcact

SEQ ID NO: 4902095 - DNA, 25 bp, Homo sapien
tgtattccccactgaaggtctcttg

SEQ ID NO: 4902096 - DNA, 25 bp, Homo sapien
ttggtcctctttaagtctgcagctg

SEQ ID NO: 4902097 - DNA, 25 bp, Homo sapien
gaatactcctcgaggaaattacaat

SEQ ID NO: 4902098 - DNA, 25 bp, Homo sapien
gaaagtcgtggaggccagagcaatt

SEQ ID NO: 4902099 - DNA, 25 bp, Homo sapien
tactcctcgaggaaattacaatgaa

SEQ ID NO: 4902100 - DNA, 25 bp, Homo sapien
aattacaatgaaagtcgtggaggcc

SEQ ID NO: 4902101 - DNA, 25 bp, Homo sapien
tccacagtcagaataggtttttcac

SEQ ID NO: 4902102 - DNA, 25 bp, Homo sapien
ggttcctcaagatggaatacctcca

SEQ ID NO: 4902103 - DNA, 25 bp, Homo sapien
caagtagaccaccatctatgcatgt

SEQ ID NO: 4902104 - DNA, 25 bp, Homo sapien
gatttggacagggtatacgacctca

SEQ ID NO: 4902105 - DNA, 25 bp, Homo sapien
cccagtagttcaagagttcaagttt

SEQ ID NO: 4902106 - DNA, 25 bp, Homo sapien
gtccattatataaaacggtacagta

SEQ ID NO: 4902107 - DNA, 25 bp, Homo sapien
ggtggaatccgtggatgcagaatcc

SEQ ID NO: 4902108 - DNA, 25 bp, Homo sapien
tgctagagggattttatagacctta

SEQ ID NO: 4902109 - DNA, 25 bp, Homo sapien
tgaattgaaaaataggcagggagtt

SEQ ID NO: 4902110 - DNA, 25 bp, Homo sapien
gagtttgttacatattcccggaata

SEQ ID NO: 4902111 - DNA, 25 bp, Homo sapien
cactccagtgttaatcactgtaaga

SEQ ID NO: 4902112 - DNA, 25 bp, Homo sapien
tgtaagaagttgaccacaaggctga

SEQ ID NO: 4902113 - DNA, 25 bp, Homo sapien
cagaaggatgtgatagatttcaagc

SEQ ID NO: 4902114 - DNA, 25 bp, Homo sapien
ggagtggtacatttatagtttagaa

SEQ ID NO: 4902115 - DNA, 25 bp, Homo sapien
gaaaagcatggtaagctagggatat

SEQ ID NO: 4902116 - DNA, 25 bp, Homo sapien
ttggcttggcaacagtaagatcagg

SEQ ID NO: 4902117 - DNA, 25 bp, Homo sapien
ctcctccatccaccgtctccaaaac

SEQ ID NO: 4902118 - DNA, 25 bp, Homo sapien
tgggacatccccttcggtgggtgta

SEQ ID NO: 4902119 - DNA, 25 bp, Homo sapien
gtctccgcacttcgccacccggaga

SEQ ID NO: 4902120 - DNA, 25 bp, Homo sapien
ttttcaacctcgctcactgttatct

SEQ ID NO: 4902121 - DNA, 25 bp, Homo sapien
aaaacagatgttggcatggatgtgg

SEQ ID NO: 4902122 - DNA, 25 bp, Homo sapien
aaagacacttgcacacacgtttata

SEQ ID NO: 4902123 - DNA, 25 bp, Homo sapien
tgttggcatggatgtggtgaaaggg

SEQ ID NO: 4902124 - DNA, 25 bp, Homo sapien
tatgaaaaagacacttgcacacacg

SEQ ID NO: 4902125 - DNA, 25 bp, Homo sapien
gatgcaacttatcaaaaactctggg

SEQ ID NO: 4902126 - DNA, 25 bp, Homo sapien
gcatatacagccctcctggattaaa

SEQ ID NO: 4902127 - DNA, 25 bp, Homo sapien
tggtctgtgggtcaacagtgaaatc

SEQ ID NO: 4902128 - DNA, 25 bp, Homo sapien
ggacacagcaaaagtcgtgctaaga

SEQ ID NO: 4902129 - DNA, 25 bp, Homo sapien
aaaagtaccaagctactgcaagaca

SEQ ID NO: 4902130 - DNA, 25 bp, Homo sapien
gaccgtaagggcagataaatggcat

SEQ ID NO: 4902131 - DNA, 25 bp, Homo sapien
tatataggctgggtgaaacgaggct

SEQ ID NO: 4902132 - DNA, 25 bp, Homo sapien
gaaactcagatgcatattacttagg

SEQ ID NO: 4902133 - DNA, 25 bp, Homo sapien
atggatgtgtttgtgaatgctgatg

SEQ ID NO: 4902134 - DNA, 25 bp, Homo sapien
tggatgtgtttgtgaatgctgatgg

SEQ ID NO: 4902135 - DNA, 25 bp, Homo sapien
cttgaagtccactccatggatgtgt

SEQ ID NO: 4902136 - DNA, 25 bp, Homo sapien
gaagtccactccatggatgtgtttg

SEQ ID NO: 4902137 - DNA, 25 bp, Homo sapien
gacattacttatacttattcctttg

SEQ ID NO: 4902138 - DNA, 25 bp, Homo sapien
tatgggacattacttatacttattc

SEQ ID NO: 4902139 - DNA, 25 bp, Homo sapien
atacggtatgggacattacttatac

SEQ ID NO: 4902140 - DNA, 25 bp, Homo sapien
cattacttatacttattcctttggc

SEQ ID NO: 4902141 - DNA, 25 bp, Homo sapien
ttttgaaagtggtaatgtgtacata

SEQ ID NO: 4902142 - DNA, 25 bp, Homo sapien
gtggtaatgtgtacataggtaacca

SEQ ID NO: 4902143 - DNA, 25 bp, Homo sapien
gaaagtggtaatgtgtacataggta

SEQ ID NO: 4902144 - DNA, 25 bp, Homo sapien
caccttgaaagggagctcatctgtt

SEQ ID NO: 4902145 - DNA, 25 bp, Homo sapien
tctcatagaaaaaggtggcagctgt

SEQ ID NO: 4902146 - DNA, 25 bp, Homo sapien
ggtttatattatgccccgacatgca

SEQ ID NO: 4902147 - DNA, 25 bp, Homo sapien
catgcatggttaagctctaagaggc

SEQ ID NO: 4902148 - DNA, 25 bp, Homo sapien
cagtgaacctgcttctggactcggg

SEQ ID NO: 4902149 - DNA, 25 bp, Homo sapien
tggtaacatggttgagcctccctca

SEQ ID NO: 4902150 - DNA, 25 bp, Homo sapien
tgctggccaattgagagctccctcc

SEQ ID NO: 4902151 - DNA, 25 bp, Homo sapien
cattgttcagtcaggtcacacgtca

SEQ ID NO: 4902152 - DNA, 25 bp, Homo sapien
agctattgcgcccagcccttttgag

SEQ ID NO: 4902153 - DNA, 25 bp, Homo sapien
gagctattgcgcccagcccttttga

SEQ ID NO: 4902154 - DNA, 25 bp, Homo sapien
tgagctattgcgcccagcccttttg

SEQ ID NO: 4902155 - DNA, 25 bp, Homo sapien
ccatggaccaaatagcccccttgat

SEQ ID NO: 4902156 - DNA, 25 bp, Homo sapien
atagcccccttgattgtagccaccg

SEQ ID NO: 4902157 - DNA, 25 bp, Homo sapien
attgtagccaccgtttccatcaggg

SEQ ID NO: 4902158 - DNA, 25 bp, Homo sapien
tccttgccatggaccaaatagcccc

SEQ ID NO: 4902159 - DNA, 25 bp, Homo sapien
ctccatcctcccggcggtcgggcgg

SEQ ID NO: 4902160 - DNA, 25 bp, Homo sapien
tccatcctcccggcggtcgggcggc

SEQ ID NO: 4902161 - DNA, 25 bp, Homo sapien
gtagcaacctctttgaaacgctctg

SEQ ID NO: 4902162 - DNA, 25 bp, Homo sapien
tgtagtaccggtagcaacctctttg

SEQ ID NO: 4902163 - DNA, 25 bp, Homo sapien
ctctttgaaacgctctggcaatgcc

SEQ ID NO: 4902164 - DNA, 25 bp, Homo sapien
atgtacttgttgtagtaccggtagc

SEQ ID NO: 4902165 - DNA, 25 bp, Homo sapien
gagtgcggagtgtgccttcttcttc

SEQ ID NO: 4902166 - DNA, 25 bp, Homo sapien
ttcttcttcagtgatacttgagtag

SEQ ID NO: 4902167 - DNA, 25 bp, Homo sapien
ggagtgcggagtgtgccttcttctt

SEQ ID NO: 4902168 - DNA, 25 bp, Homo sapien
cagtgatacttgagtagctgctggt

SEQ ID NO: 4902169 - DNA, 25 bp, Homo sapien
tggcaggctttgttcagatgagtga

SEQ ID NO: 4902170 - DNA, 25 bp, Homo sapien
tccttcttccgagcggccaaactgg

SEQ ID NO: 4902171 - DNA, 25 bp, Homo sapien
ctttgttcagatgagtgacagttgg

SEQ ID NO: 4902172 - DNA, 25 bp, Homo sapien
ggcttttctggcaggctttgttcag

SEQ ID NO: 4902173 - DNA, 25 bp, Homo sapien
ctgccacaattctgccctctagtag

SEQ ID NO: 4902174 - DNA, 25 bp, Homo sapien
ggaaacatttcacagttgctgctgc

SEQ ID NO: 4902175 - DNA, 25 bp, Homo sapien
gttgctgctgccacaattctgccct

SEQ ID NO: 4902176 - DNA, 25 bp, Homo sapien
ctggaaacatttcacagttgctgct

SEQ ID NO: 4902177 - DNA, 25 bp, Homo sapien
cttgctttttagttggcgagatgcc

SEQ ID NO: 4902178 - DNA, 25 bp, Homo sapien
tagttggcgagatgcctaattcaac

SEQ ID NO: 4902179 - DNA, 25 bp, Homo sapien
ttttcttgctttttagttggcgaga

SEQ ID NO: 4902180 - DNA, 25 bp, Homo sapien
gcgagatgcctaattcaacctccag

SEQ ID NO: 4902181 - DNA, 25 bp, Homo sapien
tctgtccacacccttattccgccta

SEQ ID NO: 4902182 - DNA, 25 bp, Homo sapien
tattccgcctaccagctgtgcccag

SEQ ID NO: 4902183 - DNA, 25 bp, Homo sapien
cccttattccgcctaccagctgtgc

SEQ ID NO: 4902184 - DNA, 25 bp, Homo sapien
cacacccttattccgcctaccagct

SEQ ID NO: 4902185 - DNA, 25 bp, Homo sapien
gccataatcatgtggagaacatcac

SEQ ID NO: 4902186 - DNA, 25 bp, Homo sapien
cagacctaaggcactagtactcttc

SEQ ID NO: 4902187 - DNA, 25 bp, Homo sapien
aatgcataagcgttgtgtatcagcc

SEQ ID NO: 4902188 - DNA, 25 bp, Homo sapien
tgtatcagccttgttggtcaaaggc

SEQ ID NO: 4902189 - DNA, 25 bp, Homo sapien
ccatctcactgcaccgtctttctct

SEQ ID NO: 4902190 - DNA, 25 bp, Homo sapien
gcctctcaagctgggcctttttagt

SEQ ID NO: 4902191 - DNA, 25 bp, Homo sapien
ctctgaatgcccatctcactgcacc

SEQ ID NO: 4902192 - DNA, 25 bp, Homo sapien
tgcctctcaagctgggcctttttag

SEQ ID NO: 4902193 - DNA, 25 bp, Homo sapien
gaatcatgtctgtaacttatgctca

SEQ ID NO: 4902194 - DNA, 25 bp, Homo sapien
ttttaagcgccagagacccaagttg

SEQ ID NO: 4902195 - DNA, 25 bp, Homo sapien
ggcctgtactcttacatacatgaaa

SEQ ID NO: 4902196 - DNA, 25 bp, Homo sapien
taagagacatgatcctgaaccagaa

SEQ ID NO: 4902197 - DNA, 25 bp, Homo sapien
tcctgaacttcagagtgcggagtca

SEQ ID NO: 4902198 - DNA, 25 bp, Homo sapien
tgtgaaacgggcaaccatgcaccta

SEQ ID NO: 4902199 - DNA, 25 bp, Homo sapien
tcaagacgcgtgtcaagggaagctg

SEQ ID NO: 4902200 - DNA, 25 bp, Homo sapien
cgcgccgtctcgtttcctggtagga

SEQ ID NO: 4902201 - DNA, 25 bp, Homo sapien
gctagtgcaaaaggcggtaaccaac

SEQ ID NO: 4902202 - DNA, 25 bp, Homo sapien
tccttgctactgctagtgcaaaagg

SEQ ID NO: 4902203 - DNA, 25 bp, Homo sapien
tcgggaggcggtaaggtggtgtgga

SEQ ID NO: 4902204 - DNA, 25 bp, Homo sapien
tggtcggtgctccacgcccagggca

SEQ ID NO: 4902205 - DNA, 25 bp, Homo sapien
tccttctcatccgagcctagcttgg

SEQ ID NO: 4902206 - DNA, 25 bp, Homo sapien
cagcagtgatcccaaaaagcaccac

SEQ ID NO: 4902207 - DNA, 25 bp, Homo sapien
ccaagtaatccggagaggccgtcat

SEQ ID NO: 4902208 - DNA, 25 bp, Homo sapien
ggccagatccacgactttccagaac

SEQ ID NO: 4902209 - DNA, 25 bp, Homo sapien
tccgaaggtagagaagcacgggtca

SEQ ID NO: 4902210 - DNA, 25 bp, Homo sapien
atcaaagctctcgactcgccatcgg

SEQ ID NO: 4902211 - DNA, 25 bp, Homo sapien
cacccgataggtcggaaaagccctg

SEQ ID NO: 4902212 - DNA, 25 bp, Homo sapien
gggtccggacgcagaatcaaagctc

SEQ ID NO: 4902213 - DNA, 25 bp, Homo sapien
tctttgcagtcctccgtcagttcca

SEQ ID NO: 4902214 - DNA, 25 bp, Homo sapien
taactagcacttcgtgcaactgtcc

SEQ ID NO: 4902215 - DNA, 25 bp, Homo sapien
gacaggctttcgacgtctattttag

SEQ ID NO: 4902216 - DNA, 25 bp, Homo sapien
gtcagttccaactgatccggtctaa

SEQ ID NO: 4902217 - DNA, 25 bp, Homo sapien
gggattccatcagttccgcagtgac

SEQ ID NO: 4902218 - DNA, 25 bp, Homo sapien
tgcacgttcggacctgaaaaacctc

SEQ ID NO: 4902219 - DNA, 25 bp, Homo sapien
taaagaaataatgacggaccgagcc

SEQ ID NO: 4902220 - DNA, 25 bp, Homo sapien
gacacaacgggcagccttgcacgtt

SEQ ID NO: 4902221 - DNA, 25 bp, Homo sapien
ggaagtccctactccaatattcagt

SEQ ID NO: 4902222 - DNA, 25 bp, Homo sapien
gatttgcctgacatgaagctgccca

SEQ ID NO: 4902223 - DNA, 25 bp, Homo sapien
aagctgcccatcagtacagagacag

SEQ ID NO: 4902224 - DNA, 25 bp, Homo sapien
gttcattgctcactgactggttaaa

SEQ ID NO: 4902225 - DNA, 25 bp, Homo sapien
tgtggcaacgtccagtttgtcaata

SEQ ID NO: 4902226 - DNA, 25 bp, Homo sapien
tagaagcattcaggtaatagtacat

SEQ ID NO: 4902227 - DNA, 25 bp, Homo sapien
cttgaattcttttcgaagatcaaaa

SEQ ID NO: 4902228 - DNA, 25 bp, Homo sapien
atcaggtgaaccagggcaacatttc

SEQ ID NO: 4902229 - DNA, 25 bp, Homo sapien
tttcaaatgattcttgagtaatgat

SEQ ID NO: 4902230 - DNA, 25 bp, Homo sapien
cttttctggaactatcttttcaaat

SEQ ID NO: 4902231 - DNA, 25 bp, Homo sapien
gaactatcttttcaaatgattcttg

SEQ ID NO: 4902232 - DNA, 25 bp, Homo sapien
tctggaactatcttttcaaatgatt

SEQ ID NO: 4902233 - DNA, 25 bp, Homo sapien
caattttatccatatgctgacaaaa

SEQ ID NO: 4902234 - DNA, 25 bp, Homo sapien
tatccatatgctgacaaaatttaaa

SEQ ID NO: 4902235 - DNA, 25 bp, Homo sapien
ttttggataggccaattttatccat

SEQ ID NO: 4902236 - DNA, 25 bp, Homo sapien
caaattttggataggccaattttat

SEQ ID NO: 4902237 - DNA, 25 bp, Homo sapien
ggccagtgtccatgccgatttggct

SEQ ID NO: 4902238 - DNA, 25 bp, Homo sapien
ccagtgtccatgccgatttggctca

SEQ ID NO: 4902239 - DNA, 25 bp, Homo sapien
cagtgtccatgccgatttggctcat

SEQ ID NO: 4902240 - DNA, 25 bp, Homo sapien
gccagtgtccatgccgatttggctc

SEQ ID NO: 4902241 - DNA, 25 bp, Homo sapien
gcttatttttaagcacctagctaat

SEQ ID NO: 4902242 - DNA, 25 bp, Homo sapien
gagatattattgtactgaagagtca

SEQ ID NO: 4902243 - DNA, 25 bp, Homo sapien
gatattattgtactgaagagtcaca

SEQ ID NO: 4902244 - DNA, 25 bp, Homo sapien
ccagcctcttactcttagagggtaa

SEQ ID NO: 4902245 - DNA, 25 bp, Homo sapien
gagactagggtcctgctatgtagcc

SEQ ID NO: 4902246 - DNA, 25 bp, Homo sapien
cctactgtggatactggatgggcat

SEQ ID NO: 4902247 - DNA, 25 bp, Homo sapien
gactagggtcctgctatgtagccta

SEQ ID NO: 4902248 - DNA, 25 bp, Homo sapien
actggatgggcataccgcactgcag

SEQ ID NO: 4902249 - DNA, 25 bp, Homo sapien
accaggatcagcgtcacaccaggat

SEQ ID NO: 4902250 - DNA, 25 bp, Homo sapien
atcgcacaccaggatcagcgtcaca

SEQ ID NO: 4902251 - DNA, 25 bp, Homo sapien
gatcagcgtcacaccaggatgagtg

SEQ ID NO: 4902252 - DNA, 25 bp, Homo sapien
cctttgagccatcgcacaccaggat

SEQ ID NO: 4902253 - DNA, 25 bp, Homo sapien
ttggtgccacataacacgtcccaac

SEQ ID NO: 4902254 - DNA, 25 bp, Homo sapien
tggtgccacataacacgtcccaaca

SEQ ID NO: 4902255 - DNA, 25 bp, Homo sapien
cttggtgccacataacacgtcccaa

SEQ ID NO: 4902256 - DNA, 25 bp, Homo sapien
ggtgccacataacacgtcccaacat

SEQ ID NO: 4902257 - DNA, 25 bp, Homo sapien
gaggctccatatcgagagactgaac

SEQ ID NO: 4902258 - DNA, 25 bp, Homo sapien
aacttgagaggctccatatcgagag

SEQ ID NO: 4902259 - DNA, 25 bp, Homo sapien
cccatatcttcaacttgagaggctc

SEQ ID NO: 4902260 - DNA, 25 bp, Homo sapien
tatcgagagactgaactactcttct

SEQ ID NO: 4902261 - DNA, 25 bp, Homo sapien
aaacttgtaattcactctctctgga

SEQ ID NO: 4902262 - DNA, 25 bp, Homo sapien
acttgtaattcactctctctggatc

SEQ ID NO: 4902263 - DNA, 25 bp, Homo sapien
caaacttgtaattcactctctctgg

SEQ ID NO: 4902264 - DNA, 25 bp, Homo sapien
ttcaaacttgtaattcactctctct

SEQ ID NO: 4902265 - DNA, 25 bp, Homo sapien
cctgactacggtgttatcatcaata

SEQ ID NO: 4902266 - DNA, 25 bp, Homo sapien
gcaatatcttgatctgaagactgcc

SEQ ID NO: 4902267 - DNA, 25 bp, Homo sapien
tctgaagactgccatggtaaacctc

SEQ ID NO: 4902268 - DNA, 25 bp, Homo sapien
catggtaaacctcgtgccctgacta

SEQ ID NO: 4902269 - DNA, 25 bp, Homo sapien
tacaaacctaaccagagcttctccg

SEQ ID NO: 4902270 - DNA, 25 bp, Homo sapien
gttccttcgaccctgagcattcaga

SEQ ID NO: 4902271 - DNA, 25 bp, Homo sapien
caatataccgggtccccatgtgatg

SEQ ID NO: 4902272 - DNA, 25 bp, Homo sapien
tgtgcctctgtagtgctaggtctcg

SEQ ID NO: 4902273 - DNA, 25 bp, Homo sapien
aatcttcacctgttgctttgtaaac

SEQ ID NO: 4902274 - DNA, 25 bp, Homo sapien
ggtaggtgacaaagaggatgccttc

SEQ ID NO: 4902275 - DNA, 25 bp, Homo sapien
gaggacaaaagcgtcccctgttggc

SEQ ID NO: 4902276 - DNA, 25 bp, Homo sapien
ccagtaatagggcaatgctgtccaa

SEQ ID NO: 4902277 - DNA, 25 bp, Homo sapien
gagaaactgggctacctcattggaa

SEQ ID NO: 4902278 - DNA, 25 bp, Homo sapien
aaattaatgcaaaggtacaacatac

SEQ ID NO: 4902279 - DNA, 25 bp, Homo sapien
aattaatgcaaaggtacaacatact

SEQ ID NO: 4902280 - DNA, 25 bp, Homo sapien
agaaattaatgcaaaggtacaacat

SEQ ID NO: 4902281 - DNA, 25 bp, Homo sapien
gaaattaatgcaaaggtacaacata

SEQ ID NO: 4902282 - DNA, 25 bp, Homo sapien
aagcagacctgtggaatcatatgaa

SEQ ID NO: 4902283 - DNA, 25 bp, Homo sapien
ctgtggaatcatatgaatcactatt

SEQ ID NO: 4902284 - DNA, 25 bp, Homo sapien
aaagcagacctgtggaatcatatga

SEQ ID NO: 4902285 - DNA, 25 bp, Homo sapien
gacctgtggaatcatatgaatcact

SEQ ID NO: 4902286 - DNA, 25 bp, Homo sapien
gcgcacactgccatgactgcctaat

SEQ ID NO: 4902287 - DNA, 25 bp, Homo sapien
ggggccgaggagaatcgattcagca

SEQ ID NO: 4902288 - DNA, 25 bp, Homo sapien
gggccgaggagaatcgattcagcac

SEQ ID NO: 4902289 - DNA, 25 bp, Homo sapien
tgggaggggttggaagtggaatgag

SEQ ID NO: 4902290 - DNA, 25 bp, Homo sapien
atgggaggggttggaagtggaatga

SEQ ID NO: 4902291 - DNA, 25 bp, Homo sapien
catgagtacgaatatctgtggcgaa

SEQ ID NO: 4902292 - DNA, 25 bp, Homo sapien
tgcatagggaagacctcgaaggcgt

SEQ ID NO: 4902293 - DNA, 25 bp, Homo sapien
ttcaaaaccatgtgaaccccatgag

SEQ ID NO: 4902294 - DNA, 25 bp, Homo sapien
caggatgtcctcaattgtggctgca

SEQ ID NO: 4902295 - DNA, 25 bp, Homo sapien
gcaaataagttttccactaagtatc

SEQ ID NO: 4902296 - DNA, 25 bp, Homo sapien
agcaaataagttttccactaagtat

SEQ ID NO: 4902297 - DNA, 25 bp, Homo sapien
tgagaaaaagcaaataagttttcca

SEQ ID NO: 4902298 - DNA, 25 bp, Homo sapien
caaataagttttccactaagtatct

SEQ ID NO: 4902299 - DNA, 25 bp, Homo sapien
catgcctacttgacgctattgataa

SEQ ID NO: 4902300 - DNA, 25 bp, Homo sapien
agagttgcagagttgaacagccaaa

SEQ ID NO: 4902301 - DNA, 25 bp, Homo sapien
taaagacttagtgtgtaactgagga

SEQ ID NO: 4902302 - DNA, 25 bp, Homo sapien
catccatgattgctgtaacactaca

SEQ ID NO: 4902303 - DNA, 25 bp, Homo sapien
ggcttctcagcaactcattcattaa

SEQ ID NO: 4902304 - DNA, 25 bp, Homo sapien
catttgagagcctgttatgatccac

SEQ ID NO: 4902305 - DNA, 25 bp, Homo sapien
taggtgacaataagctaggaaatac

SEQ ID NO: 4902306 - DNA, 25 bp, Homo sapien
ggtatggattcaagtcctcactgag

SEQ ID NO: 4902307 - DNA, 25 bp, Homo sapien
gaaagtgaccaaatctccaagtgaa

SEQ ID NO: 4902308 - DNA, 25 bp, Homo sapien
taagcctacattcaacccttaatcc

SEQ ID NO: 4902309 - DNA, 25 bp, Homo sapien
gctttgcatttaattaagagtccca

SEQ ID NO: 4902310 - DNA, 25 bp, Homo sapien
tcaatataagcctacattcaaccct

SEQ ID NO: 4902311 - DNA, 25 bp, Homo sapien
tcatccctgagacctaggttggaat

SEQ ID NO: 4902312 - DNA, 25 bp, Homo sapien
taatcaaagagtaatggcctctggg

SEQ ID NO: 4902313 - DNA, 25 bp, Homo sapien
tccacagaggtagaacgccttagtt

SEQ ID NO: 4902314 - DNA, 25 bp, Homo sapien
caagcctgtagatttgtgttccaca

SEQ ID NO: 4902315 - DNA, 25 bp, Homo sapien
aaatccgggtgatggtgtgatctgc

SEQ ID NO: 4902316 - DNA, 25 bp, Homo sapien
tctgctggaacctgacttgcatttc

SEQ ID NO: 4902317 - DNA, 25 bp, Homo sapien
atcacctgatcaccagaatggccaa

SEQ ID NO: 4902318 - DNA, 25 bp, Homo sapien
tgaaagggtctccttgtgactgctg

SEQ ID NO: 4902319 - DNA, 25 bp, Homo sapien
ataaaggcatctcctgatgggcggc

SEQ ID NO: 4902320 - DNA, 25 bp, Homo sapien
gctctgtccgcagacttcatctgga

SEQ ID NO: 4902321 - DNA, 25 bp, Homo sapien
taagccatttcgatttaaagtgccc

SEQ ID NO: 4902322 - DNA, 25 bp, Homo sapien
tgcagccataaatgctctgtccgca

SEQ ID NO: 4902323 - DNA, 25 bp, Homo sapien
tagcgtagaatagcgccaagaccca

SEQ ID NO: 4902324 - DNA, 25 bp, Homo sapien
cagcatatagcgtagaatagcgcca

SEQ ID NO: 4902325 - DNA, 25 bp, Homo sapien
gtagaatagcgccaagacccaagaa

SEQ ID NO: 4902326 - DNA, 25 bp, Homo sapien
gaatagcgccaagacccaagaaaaa

SEQ ID NO: 4902327 - DNA, 25 bp, Homo sapien
tactgattacagatgggagagcctt

SEQ ID NO: 4902328 - DNA, 25 bp, Homo sapien
tatctatatagccaggttgcctccc

SEQ ID NO: 4902329 - DNA, 25 bp, Homo sapien
tatgggtgtccacaaccaaggtctt

SEQ ID NO: 4902330 - DNA, 25 bp, Homo sapien
tgcaacatgtgcatcaaactgccct

SEQ ID NO: 4902331 - DNA, 25 bp, Homo sapien
ccaacaggcctaagaaggtacatct

SEQ ID NO: 4902332 - DNA, 25 bp, Homo sapien
ggattaagccccactgaatgttcta

SEQ ID NO: 4902333 - DNA, 25 bp, Homo sapien
ttagaaagtgaggtgcccaaatccc

SEQ ID NO: 4902334 - DNA, 25 bp, Homo sapien
taaaagctactgacattaccagtgg

SEQ ID NO: 4902335 - DNA, 25 bp, Homo sapien
tatatctaaagtagtgtatatgcac

SEQ ID NO: 4902336 - DNA, 25 bp, Homo sapien
caaactttaagaagttgcataaaag

SEQ ID NO: 4902337 - DNA, 25 bp, Homo sapien
tatatgcactgactacaaaaatgaa

SEQ ID NO: 4902338 - DNA, 25 bp, Homo sapien
ccagcctaggatagctaatcttata

SEQ ID NO: 4902339 - DNA, 25 bp, Homo sapien
cagttctttgcctgaaattcggaaa

SEQ ID NO: 4902340 - DNA, 25 bp, Homo sapien
tagaagtatctgaattccaccctgt

SEQ ID NO: 4902341 - DNA, 25 bp, Homo sapien
gacatgcacgtgctagcactaaaaa

SEQ ID NO: 4902342 - DNA, 25 bp, Homo sapien
catgttcctgagtgccagttactac

SEQ ID NO: 4902343 - DNA, 25 bp, Homo sapien
gagagattctttgagacatatttgt

SEQ ID NO: 4902344 - DNA, 25 bp, Homo sapien
gattctttgagacatatttgtaaca

SEQ ID NO: 4902345 - DNA, 25 bp, Homo sapien
aaagagagattctttgagacatatt

SEQ ID NO: 4902346 - DNA, 25 bp, Homo sapien
gagattctttgagacatatttgtaa

SEQ ID NO: 4902347 - DNA, 25 bp, Homo sapien
ctggaaatgtgtaggagggaggaga

SEQ ID NO: 4902348 - DNA, 25 bp, Homo sapien
tggaaatgtgtaggagggaggagac

SEQ ID NO: 4902349 - DNA, 25 bp, Homo sapien
aatgtgtaggagggaggagacaggc

SEQ ID NO: 4902350 - DNA, 25 bp, Homo sapien
gaaatgtgtaggagggaggagacag

SEQ ID NO: 4902351 - DNA, 25 bp, Homo sapien
ggatagtacgctgtgtaattcatga

SEQ ID NO: 4902352 - DNA, 25 bp, Homo sapien
tgggtagtacgctgtggagggctgc

SEQ ID NO: 4902353 - DNA, 25 bp, Homo sapien
agggctgcagtgctcgtggattcaa

SEQ ID NO: 4902354 - DNA, 25 bp, Homo sapien
tgagtgcctgctgggtagtacgctg

SEQ ID NO: 4902355 - DNA, 25 bp, Homo sapien
gtctcccacctatgcaacagctttg

SEQ ID NO: 4902356 - DNA, 25 bp, Homo sapien
cactgataatcagagaggacccaaa

SEQ ID NO: 4902357 - DNA, 25 bp, Homo sapien
gccctagctaaggtatgagtcactg

SEQ ID NO: 4902358 - DNA, 25 bp, Homo sapien
gaaaccctcttctgaggtagagaag

SEQ ID NO: 4902359 - DNA, 25 bp, Homo sapien
caccacaatgagcacgatcacagct

SEQ ID NO: 4902360 - DNA, 25 bp, Homo sapien
tcaacacgtaaaaggatgactttgt

SEQ ID NO: 4902361 - DNA, 25 bp, Homo sapien
gggatgattttagacccctacctca

SEQ ID NO: 4902362 - DNA, 25 bp, Homo sapien
gtggtgctggaacaatggactatca

SEQ ID NO: 4902363 - DNA, 25 bp, Homo sapien
cacaaaaacagctggtcatagattt

SEQ ID NO: 4902364 - DNA, 25 bp, Homo sapien
ccaaactgatgacgtggaagcagat

SEQ ID NO: 4902365 - DNA, 25 bp, Homo sapien
tatccccaagaacatgaatcccagg

SEQ ID NO: 4902366 - DNA, 25 bp, Homo sapien
gaaactggacaataacactgggcac

SEQ ID NO: 4902367 - DNA, 25 bp, Homo sapien
taaggagaggcatatagacccacgg

SEQ ID NO: 4902368 - DNA, 25 bp, Homo sapien
gccaagactattaggcgaacctggg

SEQ ID NO: 4902369 - DNA, 25 bp, Homo sapien
tgtggagggacaccgctaagattag

SEQ ID NO: 4902370 - DNA, 25 bp, Homo sapien
cagctgtagggaagtagccaagact

SEQ ID NO: 4902371 - DNA, 25 bp, Homo sapien
ctgcattctgaccaccgtgccaggc

SEQ ID NO: 4902372 - DNA, 25 bp, Homo sapien
gcactgaggattattctccttcaag

SEQ ID NO: 4902373 - DNA, 25 bp, Homo sapien
cactgaggattattctccttcaagc

SEQ ID NO: 4902374 - DNA, 25 bp, Homo sapien
aacaaacaagatcaaaagacggaca

SEQ ID NO: 4902375 - DNA, 25 bp, Homo sapien
caaaagacggacaaactgtcactat

SEQ ID NO: 4902376 - DNA, 25 bp, Homo sapien
aaagacggacaaactgtcactatgg

SEQ ID NO: 4902377 - DNA, 25 bp, Homo sapien
gacggacaaactgtcactatggata

SEQ ID NO: 4902378 - DNA, 25 bp, Homo sapien
tgttctaactgctggggcccttaaa

SEQ ID NO: 4902379 - DNA, 25 bp, Homo sapien
ttctgaggatgttctaactgctggg

SEQ ID NO: 4902380 - DNA, 25 bp, Homo sapien
gtataagtccatcctcggttgcata

SEQ ID NO: 4902381 - DNA, 25 bp, Homo sapien
ggatgttctaactgctggggccctt

SEQ ID NO: 4902382 - DNA, 25 bp, Homo sapien
aaataagctgggagtagcggtgtgt

SEQ ID NO: 4902383 - DNA, 25 bp, Homo sapien
aagctgggagtagcggtgtgtgctt

SEQ ID NO: 4902384 - DNA, 25 bp, Homo sapien
taaataagctgggagtagcggtgtg

SEQ ID NO: 4902385 - DNA, 25 bp, Homo sapien
ataagctgggagtagcggtgtgtgc

SEQ ID NO: 4902386 - DNA, 25 bp, Homo sapien
tggcatttacatggcaagggctttg

SEQ ID NO: 4902387 - DNA, 25 bp, Homo sapien
tacacagtagttggcgttctgcacc

SEQ ID NO: 4902388 - DNA, 25 bp, Homo sapien
gaagtttccatggtttacacagtag

SEQ ID NO: 4902389 - DNA, 25 bp, Homo sapien
ttatttcacacagacatagttggca

SEQ ID NO: 4902390 - DNA, 25 bp, Homo sapien
actccaccaaaagataaggcacagg

SEQ ID NO: 4902391 - DNA, 25 bp, Homo sapien
tgagtgtagacaaacttcccctgaa

SEQ ID NO: 4902392 - DNA, 25 bp, Homo sapien
gcacaggcccgtttgtccaatcaag

SEQ ID NO: 4902393 - DNA, 25 bp, Homo sapien
gaagcttccttaacagagttcatgg

SEQ ID NO: 4902394 - DNA, 25 bp, Homo sapien
tatttacaactgatacctgctgaga

SEQ ID NO: 4902395 - DNA, 25 bp, Homo sapien
taaagggccattgccagtcagctga

SEQ ID NO: 4902396 - DNA, 25 bp, Homo sapien
tttctttggagttacatgaggcagc

SEQ ID NO: 4902397 - DNA, 25 bp, Homo sapien
tcttcctattgcagttaaagggcca

SEQ ID NO: 4902398 - DNA, 25 bp, Homo sapien
caaaactggtttagcaaatatgttg

SEQ ID NO: 4902399 - DNA, 25 bp, Homo sapien
tactcttcccaaaaagtgagggcat

SEQ ID NO: 4902400 - DNA, 25 bp, Homo sapien
cgtcctactcttcccaaaaagtgag

SEQ ID NO: 4902401 - DNA, 25 bp, Homo sapien
ctcgtcctactcttcccaaaaagtg

SEQ ID NO: 4902402 - DNA, 25 bp, Homo sapien
ctggaaagcgagactggtgggtctc

SEQ ID NO: 4902403 - DNA, 25 bp, Homo sapien
ggaaggagactccacgccgggagtg

SEQ ID NO: 4902404 - DNA, 25 bp, Homo sapien
actccacgccgggagtgcagcccac

SEQ ID NO: 4902405 - DNA, 25 bp, Homo sapien
aaggagactccacgccgggagtgca

SEQ ID NO: 4902406 - DNA, 25 bp, Homo sapien
tccacgccgggagtgcagcccacag

SEQ ID NO: 4902407 - DNA, 25 bp, Homo sapien
ccgcaggcggcccgggaaccagagt

SEQ ID NO: 4902408 - DNA, 25 bp, Homo sapien
gccgccaaccgcgtccccgcaggcg

SEQ ID NO: 4902409 - DNA, 25 bp, Homo sapien
cctccggtgtcgccgccaaccgcgt

SEQ ID NO: 4902410 - DNA, 25 bp, Homo sapien
aggcggcccgggaaccagagtgttg

SEQ ID NO: 4902411 - DNA, 25 bp, Homo sapien
ctgcgaaggctagggcgccctgcgg

SEQ ID NO: 4902412 - DNA, 25 bp, Homo sapien
tttctgcgaaggctagggcgccctg

SEQ ID NO: 4902413 - DNA, 25 bp, Homo sapien
tctccctccctccgcgtcgccgaac

SEQ ID NO: 4902414 - DNA, 25 bp, Homo sapien
cgtttctgcgaaggctagggcgccc

SEQ ID NO: 4902415 - DNA, 25 bp, Homo sapien
ccatttgctccgctctcctgaattt

SEQ ID NO: 4902416 - DNA, 25 bp, Homo sapien
ttgcttcccaattcggccgacaaaa

SEQ ID NO: 4902417 - DNA, 25 bp, Homo sapien
gaatttctccgcagtcctctcctgg

SEQ ID NO: 4902418 - DNA, 25 bp, Homo sapien
gccgacaaaacttcgggccatttgc

SEQ ID NO: 4902419 - DNA, 25 bp, Homo sapien
ctcttctttggcagattccttattt

SEQ ID NO: 4902420 - DNA, 25 bp, Homo sapien
tcaggaattggaatgtcactgattt

SEQ ID NO: 4902421 - DNA, 25 bp, Homo sapien
gaattggaatgtcactgattttctc

SEQ ID NO: 4902422 - DNA, 25 bp, Homo sapien
tttggagctctttcaggaattggaa

SEQ ID NO: 4902423 - DNA, 25 bp, Homo sapien
actatattgcctaagtttaaatttg

SEQ ID NO: 4902424 - DNA, 25 bp, Homo sapien
gaatttccgttcatggtatgctgat

SEQ ID NO: 4902425 - DNA, 25 bp, Homo sapien
taaccgctgcaagacagccaatgaa

SEQ ID NO: 4902426 - DNA, 25 bp, Homo sapien
tacatcataccactagtaaccgctg

SEQ ID NO: 4902427 - DNA, 25 bp, Homo sapien
tatgctgataagtagagagcataca

SEQ ID NO: 4902428 - DNA, 25 bp, Homo sapien
tgatcaacagaacttcctaaaatgt

SEQ ID NO: 4902429 - DNA, 25 bp, Homo sapien
tcaaacagctttattgtaagacttt

SEQ ID NO: 4902430 - DNA, 25 bp, Homo sapien
taaaaatattagagcacttttcaca

SEQ ID NO: 4902431 - DNA, 25 bp, Homo sapien
tatcttatatattgtgactctccaa

SEQ ID NO: 4902432 - DNA, 25 bp, Homo sapien
tgtcaccctgaaacgtgatttcccg

SEQ ID NO: 4902433 - DNA, 25 bp, Homo sapien
actgtcaccctgaaacgtgatttcc

SEQ ID NO: 4902434 - DNA, 25 bp, Homo sapien
aataggagtaataaatggcactgtc

SEQ ID NO: 4902435 - DNA, 25 bp, Homo sapien
aggagtaataaatggcactgtcacc

SEQ ID NO: 4902436 - DNA, 25 bp, Homo sapien
gttccggatacagagacatttgctg

SEQ ID NO: 4902437 - DNA, 25 bp, Homo sapien
gctagcaataagttccggatacaga

SEQ ID NO: 4902438 - DNA, 25 bp, Homo sapien
taaaatgctagcaataagttccgga

SEQ ID NO: 4902439 - DNA, 25 bp, Homo sapien
ccagtggcttgatataaaatgctag

SEQ ID NO: 4902440 - DNA, 25 bp, Homo sapien
tatagaaatacactggctcaataat

SEQ ID NO: 4902441 - DNA, 25 bp, Homo sapien
tagaaatacactggctcaataatct

SEQ ID NO: 4902442 - DNA, 25 bp, Homo sapien
caatatagaaatacactggctcaat

SEQ ID NO: 4902443 - DNA, 25 bp, Homo sapien
gccaatatagaaatacactggctca

SEQ ID NO: 4902444 - DNA, 25 bp, Homo sapien
tgtaagaaattaaggcctccctggc

SEQ ID NO: 4902445 - DNA, 25 bp, Homo sapien
caggccttcagacgacacagtacaa

SEQ ID NO: 4902446 - DNA, 25 bp, Homo sapien
ccaccaatctaaacctcttgggatt

SEQ ID NO: 4902447 - DNA, 25 bp, Homo sapien
caaaagccagtaaggtactgggcct

SEQ ID NO: 4902448 - DNA, 25 bp, Homo sapien
gatgaggttataacagatacctggc

SEQ ID NO: 4902449 - DNA, 25 bp, Homo sapien
tcattcactgtaagggagaccagct

SEQ ID NO: 4902450 - DNA, 25 bp, Homo sapien
ggcttccattgtggcacactctctc

SEQ ID NO: 4902451 - DNA, 25 bp, Homo sapien
gagaccagctgccaagttgcatgct

SEQ ID NO: 4902452 - DNA, 25 bp, Homo sapien
caagacggtcccaatgattcctgcc

SEQ ID NO: 4902453 - DNA, 25 bp, Homo sapien
catcaaataaggcagtcagacttct

SEQ ID NO: 4902454 - DNA, 25 bp, Homo sapien
tgaagacagatatagggattacatg

SEQ ID NO: 4902455 - DNA, 25 bp, Homo sapien
catttgagtagaatataccaggtca

SEQ ID NO: 4902456 - DNA, 25 bp, Homo sapien
gtaagtgcagcaatttggcatgcaa

SEQ ID NO: 4902457 - DNA, 25 bp, Homo sapien
cctgtaagtgcagcaatttggcatg

SEQ ID NO: 4902458 - DNA, 25 bp, Homo sapien
ctgtaagtgcagcaatttggcatgc

SEQ ID NO: 4902459 - DNA, 25 bp, Homo sapien
gcctgtaagtgcagcaatttggcat

SEQ ID NO: 4902460 - DNA, 25 bp, Homo sapien
tagtggctatactcccacatcatca

SEQ ID NO: 4902461 - DNA, 25 bp, Homo sapien
tagcaggaatagagatattgcttga

SEQ ID NO: 4902462 - DNA, 25 bp, Homo sapien
ctgaaaaggtatctagcaggaatag

SEQ ID NO: 4902463 - DNA, 25 bp, Homo sapien
aggagatagtggctatactcccaca

SEQ ID NO: 4902464 - DNA, 25 bp, Homo sapien
gctgctactaaacttaataaaggag

SEQ ID NO: 4902465 - DNA, 25 bp, Homo sapien
caatgttattgtcagagtacacacc

SEQ ID NO: 4902466 - DNA, 25 bp, Homo sapien
tgttattgtcagagtacacaccaag

SEQ ID NO: 4902467 - DNA, 25 bp, Homo sapien
tattcaatgttattgtcagagtaca

SEQ ID NO: 4902468 - DNA, 25 bp, Homo sapien
ttcaatgttattgtcagagtacaca

SEQ ID NO: 4902469 - DNA, 25 bp, Homo sapien
gcccattttctttgtgtgggacaaa

SEQ ID NO: 4902470 - DNA, 25 bp, Homo sapien
tacttcaaggaatttcagcatgtgc

SEQ ID NO: 4902471 - DNA, 25 bp, Homo sapien
aaggaatttcagcatgtgcccattt

SEQ ID NO: 4902472 - DNA, 25 bp, Homo sapien
tggtcatatttagtccaaattttac

SEQ ID NO: 4902473 - DNA, 25 bp, Homo sapien
aaaatcttgagatggtgcctgcagg

SEQ ID NO: 4902474 - DNA, 25 bp, Homo sapien
gaagactgtgtcaatcgcagaaaaa

SEQ ID NO: 4902475 - DNA, 25 bp, Homo sapien
ggattcttgacagaggagccaattc

SEQ ID NO: 4902476 - DNA, 25 bp, Homo sapien
atgtagaaaggtaataaagaagact

SEQ ID NO: 4902477 - DNA, 25 bp, Homo sapien
ccttctataaccattgcaagagaac

SEQ ID NO: 4902478 - DNA, 25 bp, Homo sapien
tctataaccattgcaagagaaccca

SEQ ID NO: 4902479 - DNA, 25 bp, Homo sapien
gtccatcttcaagagtaacagtttc

SEQ ID NO: 4902480 - DNA, 25 bp, Homo sapien
tctccaattcgtccatcttcaagag

SEQ ID NO: 4902481 - DNA, 25 bp, Homo sapien
cccatgcatcttacttattgtgcag

SEQ ID NO: 4902482 - DNA, 25 bp, Homo sapien
aaagagatttggcctttgccctcaa

SEQ ID NO: 4902483 - DNA, 25 bp, Homo sapien
ttattgtgcagtaaaggattaacct

SEQ ID NO: 4902484 - DNA, 25 bp, Homo sapien
catcttacttattgtgcagtaaagg

SEQ ID NO: 4902485 - DNA, 25 bp, Homo sapien
tgttttactagcaagaaaattggaa

SEQ ID NO: 4902486 - DNA, 25 bp, Homo sapien
cacacacaagagttttaactatagc

SEQ ID NO: 4902487 - DNA, 25 bp, Homo sapien
gttcttcaataggtattgattaaat

SEQ ID NO: 4902488 - DNA, 25 bp, Homo sapien
ctggccacacacaagagttttaact

SEQ ID NO: 4902489 - DNA, 25 bp, Homo sapien
gccatttctagtaatgtagcctaaa

SEQ ID NO: 4902490 - DNA, 25 bp, Homo sapien
ttagcataagagtataaagatagac

SEQ ID NO: 4902491 - DNA, 25 bp, Homo sapien
aaaaaactctaagatagacaatgcc

SEQ ID NO: 4902492 - DNA, 25 bp, Homo sapien
tataaagatagacatacaagggttt

SEQ ID NO: 4902493 - DNA, 25 bp, Homo sapien
caaatggagtcatacatgagacatc

SEQ ID NO: 4902494 - DNA, 25 bp, Homo sapien
gggacagtgaaaaagcttagactct

SEQ ID NO: 4902495 - DNA, 25 bp, Homo sapien
aataccaaaatgctaagggacagtg

SEQ ID NO: 4902496 - DNA, 25 bp, Homo sapien
aaatcaagcagacatgtgggctagc

SEQ ID NO: 4902497 - DNA, 25 bp, Homo sapien
gttcgggagaacatacaccaaatgc

SEQ ID NO: 4902498 - DNA, 25 bp, Homo sapien
catgcacacataaggaatccagatg

SEQ ID NO: 4902499 - DNA, 25 bp, Homo sapien
caacaatattgggtgtacagttctt

SEQ ID NO: 4902500 - DNA, 25 bp, Homo sapien
tacagttcttaatcgaagccacttg

SEQ ID NO: 4902501 - DNA, 25 bp, Homo sapien
agtcatcatgtaatttactcatgct

SEQ ID NO: 4902502 - DNA, 25 bp, Homo sapien
catcatgtaatttactcatgctatt

SEQ ID NO: 4902503 - DNA, 25 bp, Homo sapien
tcatgtaatttactcatgctatttc

SEQ ID NO: 4902504 - DNA, 25 bp, Homo sapien
aattgtattcaatgtagtttccatt

SEQ ID NO: 4902505 - DNA, 25 bp, Homo sapien
aagtctgttgcctgtaggactatcc

SEQ ID NO: 4902506 - DNA, 25 bp, Homo sapien
ggactatccttcacagaaatgtaag

SEQ ID NO: 4902507 - DNA, 25 bp, Homo sapien
tctcactttgcatgaggcagacaca

SEQ ID NO: 4902508 - DNA, 25 bp, Homo sapien
tgctgacagcatgagagccagctcc

SEQ ID NO: 4902509 - DNA, 25 bp, Homo sapien
ctctttccataagctgagacctatt

SEQ ID NO: 4902510 - DNA, 25 bp, Homo sapien
gagacctattatagtaggcacggcc

SEQ ID NO: 4902511 - DNA, 25 bp, Homo sapien
cataagctgagacctattatagtag

SEQ ID NO: 4902512 - DNA, 25 bp, Homo sapien
tattatagtaggcacggccatgctc

SEQ ID NO: 4902513 - DNA, 25 bp, Homo sapien
tgggtcatagaattcctgtagttcc

SEQ ID NO: 4902514 - DNA, 25 bp, Homo sapien
tctgggtcatagaattcctgtagtt

SEQ ID NO: 4902515 - DNA, 25 bp, Homo sapien
tcatagaattcctgtagttccatta

SEQ ID NO: 4902516 - DNA, 25 bp, Homo sapien
ggtcatagaattcctgtagttccat

SEQ ID NO: 4902517 - DNA, 25 bp, Homo sapien
atccatccagtgcataatttaatcg

SEQ ID NO: 4902518 - DNA, 25 bp, Homo sapien
ccatccagtgcataatttaatcgca

SEQ ID NO: 4902519 - DNA, 25 bp, Homo sapien
tccatccagtgcataatttaatcgc

SEQ ID NO: 4902520 - DNA, 25 bp, Homo sapien
catccagtgcataatttaatcgcac

SEQ ID NO: 4902521 - DNA, 25 bp, Homo sapien
tctcatgggtcccacctcattgcag

SEQ ID NO: 4902522 - DNA, 25 bp, Homo sapien
ggtcccacctcattgcagatagcat

SEQ ID NO: 4902523 - DNA, 25 bp, Homo sapien
taattagctttgtaagatgtcagta

SEQ ID NO: 4902524 - DNA, 25 bp, Homo sapien
tagctttgtaagatgtcagtatttt

SEQ ID NO: 4902525 - DNA, 25 bp, Homo sapien
cgcgtgcgtcagtcttaggtggtct

SEQ ID NO: 4902526 - DNA, 25 bp, Homo sapien
taagatacagccaagtcctaacaac

SEQ ID NO: 4902527 - DNA, 25 bp, Homo sapien
gtacaggcaatgaataaggaattcc

SEQ ID NO: 4902528 - DNA, 25 bp, Homo sapien
cgtttttgtggataatagggactca

SEQ ID NO: 4902529 - DNA, 25 bp, Homo sapien
tcactgttagcaaatagaagccttc

SEQ ID NO: 4902530 - DNA, 25 bp, Homo sapien
agccttcttcataagtgagtcacca

SEQ ID NO: 4902531 - DNA, 25 bp, Homo sapien
tatcatgcaccctaccaaggctgag

SEQ ID NO: 4902532 - DNA, 25 bp, Homo sapien
taatccattatcatcgctccgaaga

SEQ ID NO: 4902533 - DNA, 25 bp, Homo sapien
tgagtaggttagcttgtcaccttct

SEQ ID NO: 4902534 - DNA, 25 bp, Homo sapien
gatctgttccagtatactctagtga

SEQ ID NO: 4902535 - DNA, 25 bp, Homo sapien
ttgacctcatgacaaaatcgcccat

SEQ ID NO: 4902536 - DNA, 25 bp, Homo sapien
cacagtgttgattttatatacaaag

SEQ ID NO: 4902537 - DNA, 25 bp, Homo sapien
acaccgagtaggtagaagaaaactg

SEQ ID NO: 4902538 - DNA, 25 bp, Homo sapien
tcccacagaactctggatccagtta

SEQ ID NO: 4902539 - DNA, 25 bp, Homo sapien
caaatgtccatactctgatctgcaa

SEQ ID NO: 4902540 - DNA, 25 bp, Homo sapien
aaggacagtaatgcttgatcttcta

SEQ ID NO: 4902541 - DNA, 25 bp, Homo sapien
gaaacttgcttgaaggtcggaatta

SEQ ID NO: 4902542 - DNA, 25 bp, Homo sapien
gtttgagaaatgtatctgaccttgc

SEQ ID NO: 4902543 - DNA, 25 bp, Homo sapien
aagacacctgtctggaatattgcag

SEQ ID NO: 4902544 - DNA, 25 bp, Homo sapien
ccatgtaacggtaaggaagacacct

SEQ ID NO: 4902545 - DNA, 25 bp, Homo sapien
ttattgtaaaacttcagttgttata

SEQ ID NO: 4902546 - DNA, 25 bp, Homo sapien
tattgtaaaacttcagttgttatac

SEQ ID NO: 4902547 - DNA, 25 bp, Homo sapien
tatgcagaggtacgtttaacaacat

SEQ ID NO: 4902548 - DNA, 25 bp, Homo sapien
tatcctgaatctctctataaggcca

SEQ ID NO: 4902549 - DNA, 25 bp, Homo sapien
gaatagattgtatgccccatatcag

SEQ ID NO: 4902550 - DNA, 25 bp, Homo sapien
gaaagttctcacttaacataagcag

SEQ ID NO: 4902551 - DNA, 25 bp, Homo sapien
tattcagatgtacagagtcaacctg

SEQ ID NO: 4902552 - DNA, 25 bp, Homo sapien
caagtactaccatgtgactattcac

SEQ ID NO: 4902553 - DNA, 25 bp, Homo sapien
gaaatgagaaccactgaaactaatc

SEQ ID NO: 4902554 - DNA, 25 bp, Homo sapien
ggtacactgcctgcaactatcttaa

SEQ ID NO: 4902555 - DNA, 25 bp, Homo sapien
aacacaagtaccaaacctaattcag

SEQ ID NO: 4902556 - DNA, 25 bp, Homo sapien
tcacactagataaaaagtagggtgt

SEQ ID NO: 4902557 - DNA, 25 bp, Homo sapien
cactagataaaaagtagggtgttct

SEQ ID NO: 4902558 - DNA, 25 bp, Homo sapien
gtaccaaacctaattcagcacaggt

SEQ ID NO: 4902559 - DNA, 25 bp, Homo sapien
catagtagatctttattgtcaaacc

SEQ ID NO: 4902560 - DNA, 25 bp, Homo sapien
tccttttcaactgatgctggatgaa

SEQ ID NO: 4902561 - DNA, 25 bp, Homo sapien
tcagtgggtttgcagtatcaagggc

SEQ ID NO: 4902562 - DNA, 25 bp, Homo sapien
aattcaaggcacttgtatcagtggg

SEQ ID NO: 4902563 - DNA, 25 bp, Homo sapien
tttaacaaagacttgcgccgggcgc

SEQ ID NO: 4902564 - DNA, 25 bp, Homo sapien
ttaacaaagacttgcgccgggcgca

SEQ ID NO: 4902565 - DNA, 25 bp, Homo sapien
taacaaagacttgcgccgggcgcag

SEQ ID NO: 4902566 - DNA, 25 bp, Homo sapien
gactgtgtggaagaatgccgtaaca

SEQ ID NO: 4902567 - DNA, 25 bp, Homo sapien
gagaggcactacttttatccacgaa

SEQ ID NO: 4902568 - DNA, 25 bp, Homo sapien
taccagtctaacagaaagcaccaag

SEQ ID NO: 4902569 - DNA, 25 bp, Homo sapien
taacttaggaggctagagatcccat

SEQ ID NO: 4902570 - DNA, 25 bp, Homo sapien
tatttgacataacagcacaaaggag

SEQ ID NO: 4902571 - DNA, 25 bp, Homo sapien
taaggttaatatagcaaatactaca

SEQ ID NO: 4902572 - DNA, 25 bp, Homo sapien
cacaaaggaggtaagttgaaagcaa

SEQ ID NO: 4902573 - DNA, 25 bp, Homo sapien
caccagattgtatcttgaatccatg

SEQ ID NO: 4902574 - DNA, 25 bp, Homo sapien
caaacaccagcatcagccaaaagtc

SEQ ID NO: 4902575 - DNA, 25 bp, Homo sapien
aaacaccagcatcagccaaaagtca

SEQ ID NO: 4902576 - DNA, 25 bp, Homo sapien
tacaaacaccagcatcagccaaaag

SEQ ID NO: 4902577 - DNA, 25 bp, Homo sapien
ctttacaaacaccagcatcagccaa

SEQ ID NO: 4902578 - DNA, 25 bp, Homo sapien
ccacaattgtgtcagggctcaactc

SEQ ID NO: 4902579 - DNA, 25 bp, Homo sapien
tgcagagcagtcacggagagtgcag

SEQ ID NO: 4902580 - DNA, 25 bp, Homo sapien
agtgcagtggtactacagcccctct

SEQ ID NO: 4902581 - DNA, 25 bp, Homo sapien
tcagggctcaactcctcctgcagag

SEQ ID NO: 4902582 - DNA, 25 bp, Homo sapien
tcatgtacattcgaccagctggcat

SEQ ID NO: 4902583 - DNA, 25 bp, Homo sapien
ctagtggtctgtcatgtacattcga

SEQ ID NO: 4902584 - DNA, 25 bp, Homo sapien
tgtcatgtacattcgaccagctggc

SEQ ID NO: 4902585 - DNA, 25 bp, Homo sapien
ggtctgtcatgtacattcgaccagc

SEQ ID NO: 4902586 - DNA, 25 bp, Homo sapien
gtccccatctgcttggatactgcgt

SEQ ID NO: 4902587 - DNA, 25 bp, Homo sapien
cccatctgcttggatactgcgtgct

SEQ ID NO: 4902588 - DNA, 25 bp, Homo sapien
catctgcttggatactgcgtgctga

SEQ ID NO: 4902589 - DNA, 25 bp, Homo sapien
tctgcttggatactgcgtgctgaca

SEQ ID NO: 4902590 - DNA, 25 bp, Homo sapien
gatggcagcatacggtgagcagccc

SEQ ID NO: 4902591 - DNA, 25 bp, Homo sapien
ccttgctgctagctcccgatactta

SEQ ID NO: 4902592 - DNA, 25 bp, Homo sapien
tagctcccgatacttagagcctagt

SEQ ID NO: 4902593 - DNA, 25 bp, Homo sapien
ctagttgatcctttcgatatccccg

SEQ ID NO: 4902594 - DNA, 25 bp, Homo sapien
tcatctagggttgcaacgggcctca

SEQ ID NO: 4902595 - DNA, 25 bp, Homo sapien
tcccggttgccataggagacggcgc

SEQ ID NO: 4902596 - DNA, 25 bp, Homo sapien
tctgagatttcctcgcacctgggtc

SEQ ID NO: 4902597 - DNA, 25 bp, Homo sapien
caatattttcgtaaaggcgaagcga

SEQ ID NO: 4902598 - DNA, 25 bp, Homo sapien
tatgcggaacccggtgggagagagg

SEQ ID NO: 4902599 - DNA, 25 bp, Homo sapien
tgcggaacccggtgggagagaggcc

SEQ ID NO: 4902600 - DNA, 25 bp, Homo sapien
tccgaacgtcccggaaactcacaca

SEQ ID NO: 4902601 - DNA, 25 bp, Homo sapien
ggtatgcggaacccggtgggagaga

SEQ ID NO: 4902602 - DNA, 25 bp, Homo sapien
ctccaacctgacacttggatgcggg

SEQ ID NO: 4902603 - DNA, 25 bp, Homo sapien
ccggctccaacctgacacttggatg

SEQ ID NO: 4902604 - DNA, 25 bp, Homo sapien
ttcccggctccaacctgacacttgg

SEQ ID NO: 4902605 - DNA, 25 bp, Homo sapien
ccaacctgacacttggatgcgggcc

SEQ ID NO: 4902606 - DNA, 25 bp, Homo sapien
caggtctgcggcggggtgcagggcc

SEQ ID NO: 4902607 - DNA, 25 bp, Homo sapien
aggtctgcggcggggtgcagggccg

SEQ ID NO: 4902608 - DNA, 25 bp, Homo sapien
cagggcttgcgcagatgtttctcca

SEQ ID NO: 4902609 - DNA, 25 bp, Homo sapien
ggcagggcttgcgcagatgtttctc

SEQ ID NO: 4902610 - DNA, 25 bp, Homo sapien
cgggcagggcttgcgcagatgtttc

SEQ ID NO: 4902611 - DNA, 25 bp, Homo sapien
ccgggcagggcttgcgcagatgttt

SEQ ID NO: 4902612 - DNA, 25 bp, Homo sapien
tgtgcagcaactttaagagcaagta

SEQ ID NO: 4902613 - DNA, 25 bp, Homo sapien
ctcttgttatcaggcggaggttgaa

SEQ ID NO: 4902614 - DNA, 25 bp, Homo sapien
tctaagtcccacttcaaatgtgcag

SEQ ID NO: 4902615 - DNA, 25 bp, Homo sapien
cattaactgaaggtttggaagcctg

SEQ ID NO: 4902616 - DNA, 25 bp, Homo sapien
catgctttgtcccaggaggaacttt

SEQ ID NO: 4902617 - DNA, 25 bp, Homo sapien
tcggaggtaaagtggccagatccat

SEQ ID NO: 4902618 - DNA, 25 bp, Homo sapien
tattatagagaagtacagccatggc

SEQ ID NO: 4902619 - DNA, 25 bp, Homo sapien
gcagagtagttcatttagtagcata

SEQ ID NO: 4902620 - DNA, 25 bp, Homo sapien
ttgactggaaaactactttgaacaa

SEQ ID NO: 4902621 - DNA, 25 bp, Homo sapien
tccgggttttgcctgtttgactgga

SEQ ID NO: 4902622 - DNA, 25 bp, Homo sapien
agctctttttcctgttgcatttgat

SEQ ID NO: 4902623 - DNA, 25 bp, Homo sapien
caaaatgttttctgttagctctttt

SEQ ID NO: 4902624 - DNA, 25 bp, Homo sapien
tctttttcctgttgcatttgattca

SEQ ID NO: 4902625 - DNA, 25 bp, Homo sapien
tttcaaaatgttttctgttagctct

SEQ ID NO: 4902626 - DNA, 25 bp, Homo sapien
taaatctagagttctcatcgtatgg

SEQ ID NO: 4902627 - DNA, 25 bp, Homo sapien
tagtaccaaaatagaatcagcagct

SEQ ID NO: 4902628 - DNA, 25 bp, Homo sapien
gcctggttccatggccaataaatct

SEQ ID NO: 4902629 - DNA, 25 bp, Homo sapien
ttgactttcaatccagcagtagaac

SEQ ID NO: 4902630 - DNA, 25 bp, Homo sapien
ggcattttcatagacagctgaattt

SEQ ID NO: 4902631 - DNA, 25 bp, Homo sapien
tatgctgcgcccaaatcatagcaca

SEQ ID NO: 4902632 - DNA, 25 bp, Homo sapien
tgaatttgtggagccttgctggaag

SEQ ID NO: 4902633 - DNA, 25 bp, Homo sapien
tggaagtatgctgcgcccaaatcat

SEQ ID NO: 4902634 - DNA, 25 bp, Homo sapien
atggtacaatgaagagataatgaac

SEQ ID NO: 4902635 - DNA, 25 bp, Homo sapien
ctatggtacaatgaagagataatga

SEQ ID NO: 4902636 - DNA, 25 bp, Homo sapien
tacaatgaagagataatgaacctat

SEQ ID NO: 4902637 - DNA, 25 bp, Homo sapien
ggtacaatgaagagataatgaacct

SEQ ID NO: 4902638 - DNA, 25 bp, Homo sapien
gactatatggagtcaactgttgaga

SEQ ID NO: 4902639 - DNA, 25 bp, Homo sapien
ggtacaagaacatcacatgcttgac

SEQ ID NO: 4902640 - DNA, 25 bp, Homo sapien
aacaaatatggacttgactatatgg

SEQ ID NO: 4902641 - DNA, 25 bp, Homo sapien
gagatgtactatcagaagaaggtac

SEQ ID NO: 4902642 - DNA, 25 bp, Homo sapien
cttcataaacctttactagggagct

SEQ ID NO: 4902643 - DNA, 25 bp, Homo sapien
ttatgataattgatctcacccttca

SEQ ID NO: 4902644 - DNA, 25 bp, Homo sapien
gagctctagtctttattaaattcac

SEQ ID NO: 4902645 - DNA, 25 bp, Homo sapien
gagctataactgagagagctctagt

SEQ ID NO: 4902646 - DNA, 25 bp, Homo sapien
cttaggactgactgtcggaactgga

SEQ ID NO: 4902647 - DNA, 25 bp, Homo sapien
ggttaagttgtcttcaatgaaaatc

SEQ ID NO: 4902648 - DNA, 25 bp, Homo sapien
ttcttaaagagttctcttaggactg

SEQ ID NO: 4902649 - DNA, 25 bp, Homo sapien
tgactgtcggaactggacaggtaaa

SEQ ID NO: 4902650 - DNA, 25 bp, Homo sapien
agaaatagctggttaaattgaacac

SEQ ID NO: 4902651 - DNA, 25 bp, Homo sapien
tatatcacggactgtattacaggca

SEQ ID NO: 4902652 - DNA, 25 bp, Homo sapien
acagatttcatctagagcttcattt

SEQ ID NO: 4902653 - DNA, 25 bp, Homo sapien
tgttctgccttccagtatatcacgg

SEQ ID NO: 4902654 - DNA, 25 bp, Homo sapien
gtttcctttcaaagactctgaagct

SEQ ID NO: 4902655 - DNA, 25 bp, Homo sapien
ctaaatttactgatcttgaacatac

SEQ ID NO: 4902656 - DNA, 25 bp, Homo sapien
ttctaaatttactgatcttgaacat

SEQ ID NO: 4902657 - DNA, 25 bp, Homo sapien
aagactctgaagctttttctaaatt

SEQ ID NO: 4902658 - DNA, 25 bp, Homo sapien
tactgcctggttaaaagatacccaa

SEQ ID NO: 4902659 - DNA, 25 bp, Homo sapien
ctcacgtggctatacaaatttgaac

SEQ ID NO: 4902660 - DNA, 25 bp, Homo sapien
tgaacttaatgggttctcaaacacc

SEQ ID NO: 4902661 - DNA, 25 bp, Homo sapien
aaggtaactatataatcctaatgtc

SEQ ID NO: 4902662 - DNA, 25 bp, Homo sapien
tttcgttcttcatctttcaacaatg

SEQ ID NO: 4902663 - DNA, 25 bp, Homo sapien
atactgcagatcttccaaccccaga

SEQ ID NO: 4902664 - DNA, 25 bp, Homo sapien
catgaaaacatactgcagatcttcc

SEQ ID NO: 4902665 - DNA, 25 bp, Homo sapien
cttcctcatctgatcaacaagtagc

SEQ ID NO: 4902666 - DNA, 25 bp, Homo sapien
acattttggctggccgactagagag

SEQ ID NO: 4902667 - DNA, 25 bp, Homo sapien
ttggctggccgactagagagctaac

SEQ ID NO: 4902668 - DNA, 25 bp, Homo sapien
aatagaggggcaaaacatgccaaca

SEQ ID NO: 4902669 - DNA, 25 bp, Homo sapien
tgaatagaggggcaaaacatgccaa

SEQ ID NO: 4902670 - DNA, 25 bp, Homo sapien
tggtctatttctccggtgaaaatct

SEQ ID NO: 4902671 - DNA, 25 bp, Homo sapien
gcagcagtgttaccttggtctattt

SEQ ID NO: 4902672 - DNA, 25 bp, Homo sapien
agtgttaccttggtctatttctccg

SEQ ID NO: 4902673 - DNA, 25 bp, Homo sapien
ttaccttggtctatttctccggtga

SEQ ID NO: 4902674 - DNA, 25 bp, Homo sapien
taaaatttgtctaatcctccaagga

SEQ ID NO: 4902675 - DNA, 25 bp, Homo sapien
tccaaggatccactgacaatataag

SEQ ID NO: 4902676 - DNA, 25 bp, Homo sapien
ggcgctctgaagtcataccatgtaa

SEQ ID NO: 4902677 - DNA, 25 bp, Homo sapien
aactgaccaatgttgacacttgctg

SEQ ID NO: 4902678 - DNA, 25 bp, Homo sapien
tatgtagttagttacgagcattacc

SEQ ID NO: 4902679 - DNA, 25 bp, Homo sapien
tagttacgagcattaccatattgct

SEQ ID NO: 4902680 - DNA, 25 bp, Homo sapien
tagttagttacgagcattaccatat

SEQ ID NO: 4902681 - DNA, 25 bp, Homo sapien
gagtaagtatgtagttagttacgag

SEQ ID NO: 4902682 - DNA, 25 bp, Homo sapien
tgcacacatagaggaagccaaatct

SEQ ID NO: 4902683 - DNA, 25 bp, Homo sapien
taagcacgcggttagtcccagaatc

SEQ ID NO: 4902684 - DNA, 25 bp, Homo sapien
cggctatttaagtatgaagctggca

SEQ ID NO: 4902685 - DNA, 25 bp, Homo sapien
taactcacgggtcgtctcttaaaga

SEQ ID NO: 4902686 - DNA, 25 bp, Homo sapien
tgcagtgcaaacctttggccataag

SEQ ID NO: 4902687 - DNA, 25 bp, Homo sapien
gtactgcagtgcaaacctttggcca

SEQ ID NO: 4902688 - DNA, 25 bp, Homo sapien
cttaacagtactgcagtgcaaacct

SEQ ID NO: 4902689 - DNA, 25 bp, Homo sapien
caaacctttggccataagaatataa

SEQ ID NO: 4902690 - DNA, 25 bp, Homo sapien
gtgcaatgatgcaactccaacctcc

SEQ ID NO: 4902691 - DNA, 25 bp, Homo sapien
tcttaacaagtgtttgatacacact

SEQ ID NO: 4902692 - DNA, 25 bp, Homo sapien
tgagattatagtcacccggctaatt

SEQ ID NO: 4902693 - DNA, 25 bp, Homo sapien
gtgtttgatacacacttttactcac

SEQ ID NO: 4902694 - DNA, 25 bp, Homo sapien
ccagcttcgtgtgtatgaatatcca

SEQ ID NO: 4902695 - DNA, 25 bp, Homo sapien
gcatgacctgacgaagcttcggtga

SEQ ID NO: 4902696 - DNA, 25 bp, Homo sapien
ggtgagaactctgttaccaactcca

SEQ ID NO: 4902697 - DNA, 25 bp, Homo sapien
tacttataaggtcggatggcggtct

SEQ ID NO: 4902698 - DNA, 25 bp, Homo sapien
ctctccagtttaacataaaggcaac

SEQ ID NO: 4902699 - DNA, 25 bp, Homo sapien
ttctctccagtttaacataaaggca

SEQ ID NO: 4902700 - DNA, 25 bp, Homo sapien
gcaacacattcctcagctataactt

SEQ ID NO: 4902701 - DNA, 25 bp, Homo sapien
ctgaagcaaaaatgcaggaacttgg

SEQ ID NO: 4902702 - DNA, 25 bp, Homo sapien
tagcaaacctattggagattcagac

SEQ ID NO: 4902703 - DNA, 25 bp, Homo sapien
gagtgtgattagagcaaccaaagca

SEQ ID NO: 4902704 - DNA, 25 bp, Homo sapien
ctacatgctcatgaattacagggca

SEQ ID NO: 4902705 - DNA, 25 bp, Homo sapien
caaggagaagtgcatccctgacgga

SEQ ID NO: 4902706 - DNA, 25 bp, Homo sapien
atgtagctgctaaaagctgtccaag

SEQ ID NO: 4902707 - DNA, 25 bp, Homo sapien
tgatacctaacgtagattccctctg

SEQ ID NO: 4902708 - DNA, 25 bp, Homo sapien
gctgactggacacactacagatttg

SEQ ID NO: 4902709 - DNA, 25 bp, Homo sapien
ccaaaggtctttggcagtccgtcta

SEQ ID NO: 4902710 - DNA, 25 bp, Homo sapien
gattgtccaactttatgatatacag

SEQ ID NO: 4902711 - DNA, 25 bp, Homo sapien
tgtgaagtcttcaatactatccaac

SEQ ID NO: 4902712 - DNA, 25 bp, Homo sapien
ctccaattctgcaagtgtgaaaagg

SEQ ID NO: 4902713 - DNA, 25 bp, Homo sapien
tactacagaactcgtaagattgtcc

SEQ ID NO: 4902714 - DNA, 25 bp, Homo sapien
tttgataaaagaaagcagttcactc

SEQ ID NO: 4902715 - DNA, 25 bp, Homo sapien
tttttgataaaagaaagcagttcac

SEQ ID NO: 4902716 - DNA, 25 bp, Homo sapien
ttttttgataaaagaaagcagttca

SEQ ID NO: 4902717 - DNA, 25 bp, Homo sapien
ttttgataaaagaaagcagttcact

SEQ ID NO: 4902718 - DNA, 25 bp, Homo sapien
tacaaaaaccagcaatagtaattag

SEQ ID NO: 4902719 - DNA, 25 bp, Homo sapien
ccagcaatagtaattagagcaattt

SEQ ID NO: 4902720 - DNA, 25 bp, Homo sapien
tgaagtacccaataatttttagtca

SEQ ID NO: 4902721 - DNA, 25 bp, Homo sapien
atttagtcagtatttgaagtaccca

SEQ ID NO: 4902722 - DNA, 25 bp, Homo sapien
agaattagaagacgcagtgagttac

SEQ ID NO: 4902723 - DNA, 25 bp, Homo sapien
attagaagacgcagtgagttacaat

SEQ ID NO: 4902724 - DNA, 25 bp, Homo sapien
aattagaagacgcagtgagttacaa

SEQ ID NO: 4902725 - DNA, 25 bp, Homo sapien
aagaattagaagacgcagtgagtta

SEQ ID NO: 4902726 - DNA, 25 bp, Homo sapien
gggcgtggaccatagcacataattt

SEQ ID NO: 4902727 - DNA, 25 bp, Homo sapien
taaatgtttggcttatggtgctatc

SEQ ID NO: 4902728 - DNA, 25 bp, Homo sapien
gacatcaagcattctaaaagaccct

SEQ ID NO: 4902729 - DNA, 25 bp, Homo sapien
cacagaatccttaaacagtgtatgt

SEQ ID NO: 4902730 - DNA, 25 bp, Homo sapien
ccgaacattgtgaagtttcacaaag

SEQ ID NO: 4902731 - DNA, 25 bp, Homo sapien
tgaagtttcacaaagagtgataaaa

SEQ ID NO: 4902732 - DNA, 25 bp, Homo sapien
caaagagtgataaaataatagtcaa

SEQ ID NO: 4902733 - DNA, 25 bp, Homo sapien
gaacattgtgaagtttcacaaagag

SEQ ID NO: 4902734 - DNA, 25 bp, Homo sapien
atggccaaatagaaatgtgttcagc

SEQ ID NO: 4902735 - DNA, 25 bp, Homo sapien
gttgattcccctacatgagaagtgc

SEQ ID NO: 4902736 - DNA, 25 bp, Homo sapien
catgcagcatggtgctcccttggga

SEQ ID NO: 4902737 - DNA, 25 bp, Homo sapien
cctacttaagagttatgctgggcca

SEQ ID NO: 4902738 - DNA, 25 bp, Homo sapien
tcaggaacacaggatgacggactct

SEQ ID NO: 4902739 - DNA, 25 bp, Homo sapien
gcagtgagctgagacctcaccactg

SEQ ID NO: 4902740 - DNA, 25 bp, Homo sapien
gaatcgcttgaaccttgcaggcgta

SEQ ID NO: 4902741 - DNA, 25 bp, Homo sapien
cgcttgaaccttgcaggcgtaggtt

SEQ ID NO: 4902742 - DNA, 25 bp, Homo sapien
cctgggcgacaaagcaacgtgatgt

SEQ ID NO: 4902743 - DNA, 25 bp, Homo sapien
tctgcctggataattaaccaagaat

SEQ ID NO: 4902744 - DNA, 25 bp, Homo sapien
accaagaatggttatttggatttat

SEQ ID NO: 4902745 - DNA, 25 bp, Homo sapien
agtgtatatcgaactagctctttca

SEQ ID NO: 4902746 - DNA, 25 bp, Homo sapien
tatactgagtgtatatcgaactagc

SEQ ID NO: 4902747 - DNA, 25 bp, Homo sapien
ggagagttaggatctatcttcaaga

SEQ ID NO: 4902748 - DNA, 25 bp, Homo sapien
gatctgtagagtaatagaagcattg

SEQ ID NO: 4902749 - DNA, 25 bp, Homo sapien
taatgatcaactgtacctgcagaga

SEQ ID NO: 4902750 - DNA, 25 bp, Homo sapien
tgaaagtttcgtatcaagtgggaaa

SEQ ID NO: 4902751 - DNA, 25 bp, Homo sapien
aagagctgctgaatactgattcgtt

SEQ ID NO: 4902752 - DNA, 25 bp, Homo sapien
aagaagtcagaacacacagctcctg

SEQ ID NO: 4902753 - DNA, 25 bp, Homo sapien
tctgtataaacatcagggggcacag

SEQ ID NO: 4902754 - DNA, 25 bp, Homo sapien
gggcacagccttgttaaagaagtca

SEQ ID NO: 4902755 - DNA, 25 bp, Homo sapien
gggacttacgatcacattacaagga

SEQ ID NO: 4902756 - DNA, 25 bp, Homo sapien
tagagccatgaacctgggacttacg

SEQ ID NO: 4902757 - DNA, 25 bp, Homo sapien
caaggaaatgggtaagttcagccaa

SEQ ID NO: 4902758 - DNA, 25 bp, Homo sapien
caggaagaacatatacaggtaggca

SEQ ID NO: 4902759 - DNA, 25 bp, Homo sapien
tgtgtgtggcaattcagcaaagaac

SEQ ID NO: 4902760 - DNA, 25 bp, Homo sapien
tgtgtggcaattcagcaaagaacaa

SEQ ID NO: 4902761 - DNA, 25 bp, Homo sapien
ctgtgtgtggcaattcagcaaagaa

SEQ ID NO: 4902762 - DNA, 25 bp, Homo sapien
gtggcaattcagcaaagaacaacat

SEQ ID NO: 4902763 - DNA, 25 bp, Homo sapien
gcagagatttaaacgctgttttgta

SEQ ID NO: 4902764 - DNA, 25 bp, Homo sapien
taaacgctgttttgtagtcaatttc

SEQ ID NO: 4902765 - DNA, 25 bp, Homo sapien
ctgttttgttcttgcagagatttaa

SEQ ID NO: 4902766 - DNA, 25 bp, Homo sapien
tgttttgtagtcaatttctctgagg

SEQ ID NO: 4902767 - DNA, 25 bp, Homo sapien
catatgtagtcgtagtaggagtcca

SEQ ID NO: 4902768 - DNA, 25 bp, Homo sapien
ccaaaatggtaacatcccatatgta

SEQ ID NO: 4902769 - DNA, 25 bp, Homo sapien
tagtcgtagtaggagtccatagcat

SEQ ID NO: 4902770 - DNA, 25 bp, Homo sapien
ggtaacatcccatatgtagtcgtag

SEQ ID NO: 4902771 - DNA, 25 bp, Homo sapien
ctaatgaatcagttaaggaaaataa

SEQ ID NO: 4902772 - DNA, 25 bp, Homo sapien
taatgaatcagttaaggaaaataaa

SEQ ID NO: 4902773 - DNA, 25 bp, Homo sapien
aatgaatcagttaaggaaaataaat

SEQ ID NO: 4902774 - DNA, 25 bp, Homo sapien
tgcaatttgtcttttatctgtttct

SEQ ID NO: 4902775 - DNA, 25 bp, Homo sapien
tgtcttttatctgtttctcctcttt

SEQ ID NO: 4902776 - DNA, 25 bp, Homo sapien
gtttctcctcttttatgatgaagat

SEQ ID NO: 4902777 - DNA, 25 bp, Homo sapien
tttatctgtttctcctcttttatga

SEQ ID NO: 4902778 - DNA, 25 bp, Homo sapien
caaggaaagatggactgctgagcca

SEQ ID NO: 4902779 - DNA, 25 bp, Homo sapien
aaccagggccactctcaaggaaaga

SEQ ID NO: 4902780 - DNA, 25 bp, Homo sapien
taaagctacctacgtgctaacaacg

SEQ ID NO: 4902781 - DNA, 25 bp, Homo sapien
tataagtaagctctacatggcgatt

SEQ ID NO: 4902782 - DNA, 25 bp, Homo sapien
cttctctgcgctgccagctgtaaca

SEQ ID NO: 4902783 - DNA, 25 bp, Homo sapien
ttcaactctgtctggccgatggctt

SEQ ID NO: 4902784 - DNA, 25 bp, Homo sapien
tgccagctgtaacacttcttctgga

SEQ ID NO: 4902785 - DNA, 25 bp, Homo sapien
cacttcttctggattgcttgcattc

SEQ ID NO: 4902786 - DNA, 25 bp, Homo sapien
atactgtttatttttagcccattgt

SEQ ID NO: 4902787 - DNA, 25 bp, Homo sapien
aatactgtttatttttagcccattg

SEQ ID NO: 4902788 - DNA, 25 bp, Homo sapien
gaaaacaccactaattgtgtacata

SEQ ID NO: 4902789 - DNA, 25 bp, Homo sapien
tacatttattgttacggtatgaagt

SEQ ID NO: 4902790 - DNA, 25 bp, Homo sapien
ttacggtatgaagtcttctgtatag

SEQ ID NO: 4902791 - DNA, 25 bp, Homo sapien
aagaaaacaccactaattgtgtaca

SEQ ID NO: 4902792 - DNA, 25 bp, Homo sapien
gataaagcttaacacttgacctaaa

SEQ ID NO: 4902793 - DNA, 25 bp, Homo sapien
cattgtgagataaggacagtgtcaa

SEQ ID NO: 4902794 - DNA, 25 bp, Homo sapien
tgtgaaactgttaaggtcctttcta

SEQ ID NO: 4902795 - DNA, 25 bp, Homo sapien
gaaaacttgctgtacataggctagc

SEQ ID NO: 4902796 - DNA, 25 bp, Homo sapien
gtcactttactactctaagatatcc

SEQ ID NO: 4902797 - DNA, 25 bp, Homo sapien
ggaagtcactttactactctaagat

SEQ ID NO: 4902798 - DNA, 25 bp, Homo sapien
gaagtcactttactactctaagata

SEQ ID NO: 4902799 - DNA, 25 bp, Homo sapien
actttactactctaagatatcccta

SEQ ID NO: 4902800 - DNA, 25 bp, Homo sapien
tcctgttagcttttagatctgtgta

SEQ ID NO: 4902801 - DNA, 25 bp, Homo sapien
tattctagccattgattcattagag

SEQ ID NO: 4902802 - DNA, 25 bp, Homo sapien
taagaaagcctcaggtaagactctc

SEQ ID NO: 4902803 - DNA, 25 bp, Homo sapien
cagtacagaatactgactgctgctg

SEQ ID NO: 4902804 - DNA, 25 bp, Homo sapien
ggatacacagagtgcctatcaagtt

SEQ ID NO: 4902805 - DNA, 25 bp, Homo sapien
cattcattcaaatagctcaggtact

SEQ ID NO: 4902806 - DNA, 25 bp, Homo sapien
tgtacttaacctctaagctctgctg

SEQ ID NO: 4902807 - DNA, 25 bp, Homo sapien
tgtcctgtaacaatcatctcctggc

SEQ ID NO: 4902808 - DNA, 25 bp, Homo sapien
tccaggtaaagtgaatagccagcta

SEQ ID NO: 4902809 - DNA, 25 bp, Homo sapien
caggtaaagtgaatagccagctatt

SEQ ID NO: 4902810 - DNA, 25 bp, Homo sapien
ccaggtaaagtgaatagccagctat

SEQ ID NO: 4902811 - DNA, 25 bp, Homo sapien
ggtaaagtgaatagccagctatttt

SEQ ID NO: 4902812 - DNA, 25 bp, Homo sapien
atgtcagaatggcacatgctgtttc

SEQ ID NO: 4902813 - DNA, 25 bp, Homo sapien
gtaatgtcagaatggcacatgctgt

SEQ ID NO: 4902814 - DNA, 25 bp, Homo sapien
tgtaatgtcagaatggcacatgctg

SEQ ID NO: 4902815 - DNA, 25 bp, Homo sapien
taatgtcagaatggcacatgctgtt

SEQ ID NO: 4902816 - DNA, 25 bp, Homo sapien
tgggccaccaaccttgtgtccagtc

SEQ ID NO: 4902817 - DNA, 25 bp, Homo sapien
ccaccaaccttgtgtccagtcccac

SEQ ID NO: 4902818 - DNA, 25 bp, Homo sapien
gggccaccaaccttgtgtccagtcc

SEQ ID NO: 4902819 - DNA, 25 bp, Homo sapien
taaactcttaagttcagcattactc

SEQ ID NO: 4902820 - DNA, 25 bp, Homo sapien
ctaaagatcatttcgatgtggcagg

SEQ ID NO: 4902821 - DNA, 25 bp, Homo sapien
gggagagatcacgtgtgagttaatc

SEQ ID NO: 4902822 - DNA, 25 bp, Homo sapien
agatcacgtgtgagttaatccgacc

SEQ ID NO: 4902823 - DNA, 25 bp, Homo sapien
cttttcactaaagatcatttcgatg

SEQ ID NO: 4902824 - DNA, 25 bp, Homo sapien
ctatatattgggttggcgccggcgc

SEQ ID NO: 4902825 - DNA, 25 bp, Homo sapien
gccggcgccagctgagccgagcggt

SEQ ID NO: 4902826 - DNA, 25 bp, Homo sapien
atatattgggttggcgccggcgcca

SEQ ID NO: 4902827 - DNA, 25 bp, Homo sapien
ggcgccagctgagccgagcggtagc

SEQ ID NO: 4902828 - DNA, 25 bp, Homo sapien
cgccgcgcaaggccggcggagcggg

SEQ ID NO: 4902829 - DNA, 25 bp, Homo sapien
tggtcgcggaccgggactggggaga

SEQ ID NO: 4902830 - DNA, 25 bp, Homo sapien
atgccttccctgggcgcgccgcgca

SEQ ID NO: 4902831 - DNA, 25 bp, Homo sapien
gggcgcgccgcgcaaggccggcgga

SEQ ID NO: 4902832 - DNA, 25 bp, Homo sapien
ccgcacccagtctactggtttatta

SEQ ID NO: 4902833 - DNA, 25 bp, Homo sapien
gcacccagtctactggtttattatt

SEQ ID NO: 4902834 - DNA, 25 bp, Homo sapien
cacccagtctactggtttattattt

SEQ ID NO: 4902835 - DNA, 25 bp, Homo sapien
cgcacccagtctactggtttattat

SEQ ID NO: 4902836 - DNA, 25 bp, Homo sapien
aacatgggtggaacaataatcacta

SEQ ID NO: 4902837 - DNA, 25 bp, Homo sapien
cactagatgatatggtgaaaatgtg

SEQ ID NO: 4902838 - DNA, 25 bp, Homo sapien
aatgtgtgatcagtcaatggtgggc

SEQ ID NO: 4902839 - DNA, 25 bp, Homo sapien
cagataatcatgagggttatagtga

SEQ ID NO: 4902840 - DNA, 25 bp, Homo sapien
gagagttactcttgaaaggcaggca

SEQ ID NO: 4902841 - DNA, 25 bp, Homo sapien
tctaggtggacctctgaaaaccaaa

SEQ ID NO: 4902842 - DNA, 25 bp, Homo sapien
gcaacagtatcctttgcatgggagg

SEQ ID NO: 4902843 - DNA, 25 bp, Homo sapien
gatacagtggtgtcagccttgccat

SEQ ID NO: 4902844 - DNA, 25 bp, Homo sapien
taaaactctgaatacacggcgtctc

SEQ ID NO: 4902845 - DNA, 25 bp, Homo sapien
taggcatctcctgtatgtaagacac

SEQ ID NO: 4902846 - DNA, 25 bp, Homo sapien
tgtggtgtacacaagcagtgcttcg

SEQ ID NO: 4902847 - DNA, 25 bp, Homo sapien
ggttttcgacttcctatcgcaggga

SEQ ID NO: 4902848 - DNA, 25 bp, Homo sapien
aaatcctctgtcatggagcctgtcc

SEQ ID NO: 4902849 - DNA, 25 bp, Homo sapien
tgtctttcatggcatctgagtgaag

SEQ ID NO: 4902850 - DNA, 25 bp, Homo sapien
gaagagtgacaggttggctcaactt

SEQ ID NO: 4902851 - DNA, 25 bp, Homo sapien
ggaagtacttgtccaggcactcaag

SEQ ID NO: 4902852 - DNA, 25 bp, Homo sapien
taacaggtgatagttgccatggata

SEQ ID NO: 4902853 - DNA, 25 bp, Homo sapien
gctgtgtatcacataatgccttgcc

SEQ ID NO: 4902854 - DNA, 25 bp, Homo sapien
tcccaagtacgagaataggcatctt

SEQ ID NO: 4902855 - DNA, 25 bp, Homo sapien
tattctcagggtcagctgtacactt

SEQ ID NO: 4902856 - DNA, 25 bp, Homo sapien
accatgcccagatgtatagttggtt

SEQ ID NO: 4902857 - DNA, 25 bp, Homo sapien
caccatgcccagatgtatagttggt

SEQ ID NO: 4902858 - DNA, 25 bp, Homo sapien
ccaggctatatcctaggtaaggtca

SEQ ID NO: 4902859 - DNA, 25 bp, Homo sapien
gatttggatccttggagcagttcag

SEQ ID NO: 4902860 - DNA, 25 bp, Homo sapien
gaatgttggcattccctctcttagg

SEQ ID NO: 4902861 - DNA, 25 bp, Homo sapien
gatataaacaaaccctaggcagcac

SEQ ID NO: 4902862 - DNA, 25 bp, Homo sapien
cagtcttgccttaacaatgttccag

SEQ ID NO: 4902863 - DNA, 25 bp, Homo sapien
aatctcctgtcggtaccattgggcc

SEQ ID NO: 4902864 - DNA, 25 bp, Homo sapien
aaatgtttgtgggtgaagtcagttc

SEQ ID NO: 4902865 - DNA, 25 bp, Homo sapien
ccattgggccaactaaagacaaggt

SEQ ID NO: 4902866 - DNA, 25 bp, Homo sapien
agagcataaagctgactttgaattc

SEQ ID NO: 4902867 - DNA, 25 bp, Homo sapien
tgaattctgctacagctccagcctt

SEQ ID NO: 4902868 - DNA, 25 bp, Homo sapien
ttgaattctgctacagctccagcct

SEQ ID NO: 4902869 - DNA, 25 bp, Homo sapien
agcataaagctgactttgaattctg

SEQ ID NO: 4902870 - DNA, 25 bp, Homo sapien
ccagtggctttagctgattcagggc

SEQ ID NO: 4902871 - DNA, 25 bp, Homo sapien
catgcagcatcacaggttggggaca

SEQ ID NO: 4902872 - DNA, 25 bp, Homo sapien
gattcagggctagagtccagcacca

SEQ ID NO: 4902873 - DNA, 25 bp, Homo sapien
tcgttcaggacaagcaaaggttccc

SEQ ID NO: 4902874 - DNA, 25 bp, Homo sapien
tcatcagtaggagggtaggccttta

SEQ ID NO: 4902875 - DNA, 25 bp, Homo sapien
caggagccaaggtcaacagtagcag

SEQ ID NO: 4902876 - DNA, 25 bp, Homo sapien
gtagcagtgactgggcagggacagt

SEQ ID NO: 4902877 - DNA, 25 bp, Homo sapien
gagccaaggtcaacagtagcagtga

SEQ ID NO: 4902878 - DNA, 25 bp, Homo sapien
catgtagaaccagcccagttgagag

SEQ ID NO: 4902879 - DNA, 25 bp, Homo sapien
gaaccagcccagttgagagcctcca

SEQ ID NO: 4902880 - DNA, 25 bp, Homo sapien
ctccatgtagaaccagcccagttga

SEQ ID NO: 4902881 - DNA, 25 bp, Homo sapien
aaccagcccagttgagagcctccat

SEQ ID NO: 4902882 - DNA, 25 bp, Homo sapien
tgtatttgtaagtttgtcctcttag

SEQ ID NO: 4902883 - DNA, 25 bp, Homo sapien
tacgtttagccacctgatttcctga

SEQ ID NO: 4902884 - DNA, 25 bp, Homo sapien
tttcaatgacggtacgtttagccac

SEQ ID NO: 4902885 - DNA, 25 bp, Homo sapien
gaagctgcttttcaatgacggtacg

SEQ ID NO: 4902886 - DNA, 25 bp, Homo sapien
aggataattctgaagctgcttttca

SEQ ID NO: 4902887 - DNA, 25 bp, Homo sapien
taattccaatacagagtggattaag

SEQ ID NO: 4902888 - DNA, 25 bp, Homo sapien
ccaatacagagtggattaaggaaga

SEQ ID NO: 4902889 - DNA, 25 bp, Homo sapien
ggttaattccaatacagagtggatt

SEQ ID NO: 4902890 - DNA, 25 bp, Homo sapien
ttccaatacagagtggattaaggaa

SEQ ID NO: 4902891 - DNA, 25 bp, Homo sapien
tataggcaggcggaatccagagcgt

SEQ ID NO: 4902892 - DNA, 25 bp, Homo sapien
aataacctggtgagttggcagtccc

SEQ ID NO: 4902893 - DNA, 25 bp, Homo sapien
tctcggtggcggtttctacagcagg

SEQ ID NO: 4902894 - DNA, 25 bp, Homo sapien
tcacatgagagctaggctgcagcgc

SEQ ID NO: 4902895 - DNA, 25 bp, Homo sapien
tggagatggcctcttcaatggattc

SEQ ID NO: 4902896 - DNA, 25 bp, Homo sapien
cttggttctgaatgtggagatggcc

SEQ ID NO: 4902897 - DNA, 25 bp, Homo sapien
tgtggagatggcctcttcaatggat

SEQ ID NO: 4902898 - DNA, 25 bp, Homo sapien
ctgaatgtggagatggcctcttcaa

SEQ ID NO: 4902899 - DNA, 25 bp, Homo sapien
agagcaatcacagggtcagcccaga

SEQ ID NO: 4902900 - DNA, 25 bp, Homo sapien
agcaatcacagggtcagcccagatt

SEQ ID NO: 4902901 - DNA, 25 bp, Homo sapien
caatcacagggtcagcccagattca

SEQ ID NO: 4902902 - DNA, 25 bp, Homo sapien
gtcagagcaatcacagggtcagccc

SEQ ID NO: 4902903 - DNA, 25 bp, Homo sapien
ttaatgacgaggcttggaagtccta

SEQ ID NO: 4902904 - DNA, 25 bp, Homo sapien
tgcttaatgacgaggcttggaagtc

SEQ ID NO: 4902905 - DNA, 25 bp, Homo sapien
gcttaatgacgaggcttggaagtcc

SEQ ID NO: 4902906 - DNA, 25 bp, Homo sapien
ttgcttaatgacgaggcttggaagt

SEQ ID NO: 4902907 - DNA, 25 bp, Homo sapien
cattttccagagtacaaagcagaag

SEQ ID NO: 4902908 - DNA, 25 bp, Homo sapien
tcctaagggcttttccactcatgtg

SEQ ID NO: 4902909 - DNA, 25 bp, Homo sapien
cctcatgggtggctggcattttcca

SEQ ID NO: 4902910 - DNA, 25 bp, Homo sapien
ccgtcattttggcagtgctccgtgg

SEQ ID NO: 4902911 - DNA, 25 bp, Homo sapien
tctaatcaccacgtggaaatagggt

SEQ ID NO: 4902912 - DNA, 25 bp, Homo sapien
tttctgagatggtaactggcagccc

SEQ ID NO: 4902913 - DNA, 25 bp, Homo sapien
tggcagcccagttaaacgcctgttt

SEQ ID NO: 4902914 - DNA, 25 bp, Homo sapien
aaagctattacacttatggccctgg

SEQ ID NO: 4902915 - DNA, 25 bp, Homo sapien
ttggcagcgggagttacaaaagccc

SEQ ID NO: 4902916 - DNA, 25 bp, Homo sapien
tcaggttgcctctggcatatgcgga

SEQ ID NO: 4902917 - DNA, 25 bp, Homo sapien
catatgcggactgttgggcagtgcc

SEQ ID NO: 4902918 - DNA, 25 bp, Homo sapien
tgagtgaagaagtcgctttggcagc

SEQ ID NO: 4902919 - DNA, 25 bp, Homo sapien
tcacgaactgcctgtgccgaagtca

SEQ ID NO: 4902920 - DNA, 25 bp, Homo sapien
tctttttaacctactccagtcagga

SEQ ID NO: 4902921 - DNA, 25 bp, Homo sapien
tgaccaccatctgttgtgctggact

SEQ ID NO: 4902922 - DNA, 25 bp, Homo sapien
gtagggctggcaccatgtcagaaag

SEQ ID NO: 4902923 - DNA, 25 bp, Homo sapien
gaagtcccagtcatatctacatttg

SEQ ID NO: 4902924 - DNA, 25 bp, Homo sapien
caagtcatcagctgctaacgaggca

SEQ ID NO: 4902925 - DNA, 25 bp, Homo sapien
tgttcattagttccacaacagccac

SEQ ID NO: 4902926 - DNA, 25 bp, Homo sapien
gacatggagcagtttccaccggatg

SEQ ID NO: 4902927 - DNA, 25 bp, Homo sapien
tgaagggcccttcaggctaactaag

SEQ ID NO: 4902928 - DNA, 25 bp, Homo sapien
taccgccagggttcctatgtcacag

SEQ ID NO: 4902929 - DNA, 25 bp, Homo sapien
gactaatacagggtcctaccgccag

SEQ ID NO: 4902930 - DNA, 25 bp, Homo sapien
gactgaagggcccttcaggctaact

SEQ ID NO: 4902931 - DNA, 25 bp, Homo sapien
tgcaacagatgactaaaggatctct

SEQ ID NO: 4902932 - DNA, 25 bp, Homo sapien
tgtgcaaatgtgagtcctggaactg

SEQ ID NO: 4902933 - DNA, 25 bp, Homo sapien
tagcagccttatgagagaaccgaag

SEQ ID NO: 4902934 - DNA, 25 bp, Homo sapien
tctgagtttcaggataatgcaacag

SEQ ID NO: 4902935 - DNA, 25 bp, Homo sapien
cattaatacttactccctaggtgat

SEQ ID NO: 4902936 - DNA, 25 bp, Homo sapien
gggccactgcagtagaatcccaact

SEQ ID NO: 4902937 - DNA, 25 bp, Homo sapien
ggcatcctgaccttagagattctta

SEQ ID NO: 4902938 - DNA, 25 bp, Homo sapien
ggtgctccagagctcattctccatt

SEQ ID NO: 4902939 - DNA, 25 bp, Homo sapien
tactgagacacagtgaaattaagta

SEQ ID NO: 4902940 - DNA, 25 bp, Homo sapien
agatagcttgccttcagacatttca

SEQ ID NO: 4902941 - DNA, 25 bp, Homo sapien
gacatttcagtcctaatcacatggt

SEQ ID NO: 4902942 - DNA, 25 bp, Homo sapien
ccatacctggctaagaattgaatat

SEQ ID NO: 4902943 - DNA, 25 bp, Homo sapien
ggttcctatctgcagcatcaacaaa

SEQ ID NO: 4902944 - DNA, 25 bp, Homo sapien
tggggttcctatctgcagcatcaac

SEQ ID NO: 4902945 - DNA, 25 bp, Homo sapien
tgccccaattccatggggttcctat

SEQ ID NO: 4902946 - DNA, 25 bp, Homo sapien
catggggttcctatctgcagcatca

SEQ ID NO: 4902947 - DNA, 25 bp, Homo sapien
gccaggtatgatgctgcttccttct

SEQ ID NO: 4902948 - DNA, 25 bp, Homo sapien
gcttccatgccaggtatgatgctgc

SEQ ID NO: 4902949 - DNA, 25 bp, Homo sapien
cctgacagcttccatgccaggtatg

SEQ ID NO: 4902950 - DNA, 25 bp, Homo sapien
ccatgccaggtatgatgctgcttcc

SEQ ID NO: 4902951 - DNA, 25 bp, Homo sapien
tggcaaacacatgacttggttcagg

SEQ ID NO: 4902952 - DNA, 25 bp, Homo sapien
tgctctatcccaggggcaactcagc

SEQ ID NO: 4902953 - DNA, 25 bp, Homo sapien
ctggccctaacagttacagggggtg

SEQ ID NO: 4902954 - DNA, 25 bp, Homo sapien
gctcctccaagtggttatgttggtg

SEQ ID NO: 4902955 - DNA, 25 bp, Homo sapien
gcaactttcgttgagagtacatggg

SEQ ID NO: 4902956 - DNA, 25 bp, Homo sapien
cagtagacatctcaccataccatta

SEQ ID NO: 4902957 - DNA, 25 bp, Homo sapien
ggcaggagcagttcagtagacatct

SEQ ID NO: 4902958 - DNA, 25 bp, Homo sapien
ctgcaactttcgttgagagtacatg

SEQ ID NO: 4902959 - DNA, 25 bp, Homo sapien
aaagcagggaattatatccacaaaa

SEQ ID NO: 4902960 - DNA, 25 bp, Homo sapien
ctaaagcagggaattatatccacaa

SEQ ID NO: 4902961 - DNA, 25 bp, Homo sapien
atatccacaaaatgagaatgggtgg

SEQ ID NO: 4902962 - DNA, 25 bp, Homo sapien
agcagggaattatatccacaaaatg

SEQ ID NO: 4902963 - DNA, 25 bp, Homo sapien
tgcagccaaagttgatttcttgtgc

SEQ ID NO: 4902964 - DNA, 25 bp, Homo sapien
gcttctcagatattccaatgtgcag

SEQ ID NO: 4902965 - DNA, 25 bp, Homo sapien
caaagttgatttcttgtgctcagaa

SEQ ID NO: 4902966 - DNA, 25 bp, Homo sapien
tgcacctggtccaaacatcagtatt

SEQ ID NO: 4902967 - DNA, 25 bp, Homo sapien
cagacacttcatgggttgttgagag

SEQ ID NO: 4902968 - DNA, 25 bp, Homo sapien
ccgttcctcttgagcagagggtgga

SEQ ID NO: 4902969 - DNA, 25 bp, Homo sapien
gaaatgctgattggcataggcctgg

SEQ ID NO: 4902970 - DNA, 25 bp, Homo sapien
gcctgggtcatgtgccgttcctctt

SEQ ID NO: 4902971 - DNA, 25 bp, Homo sapien
agtggacgggcaagcaaaagagacc

SEQ ID NO: 4902972 - DNA, 25 bp, Homo sapien
taagatggctatagctgctgcagcc

SEQ ID NO: 4902973 - DNA, 25 bp, Homo sapien
gagaccaaacgcaaaaggcagcctt

SEQ ID NO: 4902974 - DNA, 25 bp, Homo sapien
gagactaggacgttcaagatcaggc

SEQ ID NO: 4902975 - DNA, 25 bp, Homo sapien
acagcaactacaaagctggacaggc

SEQ ID NO: 4902976 - DNA, 25 bp, Homo sapien
ctgcttctgcacgtaaggagcttgg

SEQ ID NO: 4902977 - DNA, 25 bp, Homo sapien
tctgcttctgcacgtaaggagcttg

SEQ ID NO: 4902978 - DNA, 25 bp, Homo sapien
agcaactacaaagctggacaggctg

SEQ ID NO: 4902979 - DNA, 25 bp, Homo sapien
cagaaaccaaattagctcatatgct

SEQ ID NO: 4902980 - DNA, 25 bp, Homo sapien
aaccaaattagctcatatgctattt

SEQ ID NO: 4902981 - DNA, 25 bp, Homo sapien
gaaaccaaattagctcatatgctat

SEQ ID NO: 4902982 - DNA, 25 bp, Homo sapien
ccaaattagctcatatgctattttt

SEQ ID NO: 4902983 - DNA, 25 bp, Homo sapien
ttaaacaccagcctagtaagccagg

SEQ ID NO: 4902984 - DNA, 25 bp, Homo sapien
taggcagatctattagccaggaccg

SEQ ID NO: 4902985 - DNA, 25 bp, Homo sapien
taatgctctgttgtggctgggaaca

SEQ ID NO: 4902986 - DNA, 25 bp, Homo sapien
taaagtactagagagaactgcccct

SEQ ID NO: 4902987 - DNA, 25 bp, Homo sapien
tatagaaatgccaactgtcactgga

SEQ ID NO: 4902988 - DNA, 25 bp, Homo sapien
gagcttcacaacatatctgggctgg

SEQ ID NO: 4902989 - DNA, 25 bp, Homo sapien
cctgggttgggaccattcaaagcca

SEQ ID NO: 4902990 - DNA, 25 bp, Homo sapien
tccacagagctgtaagcagaggtac

SEQ ID NO: 4902991 - DNA, 25 bp, Homo sapien
cccaaggctggtgattcctgtccca

SEQ ID NO: 4902992 - DNA, 25 bp, Homo sapien
cttttcggatgtaaatggcacttgt

SEQ ID NO: 4902993 - DNA, 25 bp, Homo sapien
tggtcccaaactcacaagtcttttc

SEQ ID NO: 4902994 - DNA, 25 bp, Homo sapien
ggaagtggagtgttctcccctagaa

SEQ ID NO: 4902995 - DNA, 25 bp, Homo sapien
ggcaaggatatactgagcaagtcac

SEQ ID NO: 4902996 - DNA, 25 bp, Homo sapien
tcagggccagagatccaaatctgag

SEQ ID NO: 4902997 - DNA, 25 bp, Homo sapien
tagcctggaacactgagggaagtca

SEQ ID NO: 4902998 - DNA, 25 bp, Homo sapien
caaatctgagagtagacttggtagc

SEQ ID NO: 4902999 - DNA, 25 bp, Homo sapien
gagagctctaagtttgtccttgtca

SEQ ID NO: 4903000 - DNA, 25 bp, Homo sapien
aaatcaaagtaagccgcaacccaag

SEQ ID NO: 4903001 - DNA, 25 bp, Homo sapien
gcaacccaaggctttcctgagattt

SEQ ID NO: 4903002 - DNA, 25 bp, Homo sapien
gcaaatgggcaatgtttattacact

SEQ ID NO: 4903003 - DNA, 25 bp, Homo sapien
tccactgtggtgcttctgggaaagt

SEQ ID NO: 4903004 - DNA, 25 bp, Homo sapien
tggtgcttctgggaaagttgcttca

SEQ ID NO: 4903005 - DNA, 25 bp, Homo sapien
actgtggtgcttctgggaaagttgc

SEQ ID NO: 4903006 - DNA, 25 bp, Homo sapien
tgtggtgcttctgggaaagttgctt

SEQ ID NO: 4903007 - DNA, 25 bp, Homo sapien
gtccgctggccgcagccacgctccg

SEQ ID NO: 4903008 - DNA, 25 bp, Homo sapien
caggccggggatgccaagccgcaac

SEQ ID NO: 4903009 - DNA, 25 bp, Homo sapien
atgcgcgcgtacagacccagaggcg

SEQ ID NO: 4903010 - DNA, 25 bp, Homo sapien
ccagacagagccgtgcgcggaggcc

SEQ ID NO: 4903011 - DNA, 25 bp, Homo sapien
ggcaaagcagctctatagttgacat

SEQ ID NO: 4903012 - DNA, 25 bp, Homo sapien
ccaaaagtttctaaggacagcgaag

SEQ ID NO: 4903013 - DNA, 25 bp, Homo sapien
ttgccataaaaagtctccaaacttc

SEQ ID NO: 4903014 - DNA, 25 bp, Homo sapien
agtttctaaggacagcgaaggcaaa

SEQ ID NO: 4903015 - DNA, 25 bp, Homo sapien
caaaaacagagcttcgggattctgc

SEQ ID NO: 4903016 - DNA, 25 bp, Homo sapien
gcaaaaacagagcttcgggattctg

SEQ ID NO: 4903017 - DNA, 25 bp, Homo sapien
tgagtgaataaacaaggctccatgt

SEQ ID NO: 4903018 - DNA, 25 bp, Homo sapien
agaccaaggtgggaactatttatgg

SEQ ID NO: 4903019 - DNA, 25 bp, Homo sapien
gcaatgtttagtgttcagatcccag

SEQ ID NO: 4903020 - DNA, 25 bp, Homo sapien
ttacttccaaatatcctggtggtgg

SEQ ID NO: 4903021 - DNA, 25 bp, Homo sapien
cttccaaatatcctggtggtgggtg

SEQ ID NO: 4903022 - DNA, 25 bp, Homo sapien
tttccatatgtgaagttacttccaa

SEQ ID NO: 4903023 - DNA, 25 bp, Homo sapien
ttttccatatgtgaagttacttcca

SEQ ID NO: 4903024 - DNA, 25 bp, Homo sapien
gaggacacagaccacttaggtaata

SEQ ID NO: 4903025 - DNA, 25 bp, Homo sapien
tggtcttaaaaggtctcctcacagg

SEQ ID NO: 4903026 - DNA, 25 bp, Homo sapien
gggagtcagacggatatttcatgcc

SEQ ID NO: 4903027 - DNA, 25 bp, Homo sapien
tggccttcttaggttcaggcaagaa

SEQ ID NO: 4903028 - DNA, 25 bp, Homo sapien
aatcagtatctttgagggaattttt

SEQ ID NO: 4903029 - DNA, 25 bp, Homo sapien
gcaaatgcattgtctactgtctaaa

SEQ ID NO: 4903030 - DNA, 25 bp, Homo sapien
tttttggaacctatagaacacaaca

SEQ ID NO: 4903031 - DNA, 25 bp, Homo sapien
ctatggtgataaatacatgactaca

SEQ ID NO: 4903032 - DNA, 25 bp, Homo sapien
ttccatagttcaatggccacaggct

SEQ ID NO: 4903033 - DNA, 25 bp, Homo sapien
aactgcattcgcatcagtccaattg

SEQ ID NO: 4903034 - DNA, 25 bp, Homo sapien
cacaggctgatgtggtggattgtca

SEQ ID NO: 4903035 - DNA, 25 bp, Homo sapien
gtggtggattgtcacagtatatatc

SEQ ID NO: 4903036 - DNA, 25 bp, Homo sapien
tacagaaaccctcttttggcaatca

SEQ ID NO: 4903037 - DNA, 25 bp, Homo sapien
cctctgctggtgtgcagacctgaga

SEQ ID NO: 4903038 - DNA, 25 bp, Homo sapien
gaggtgtaccactgtcaggtctgtg

SEQ ID NO: 4903039 - DNA, 25 bp, Homo sapien
tgtgggtggctcctgttacagaaac

SEQ ID NO: 4903040 - DNA, 25 bp, Homo sapien
cgtgcctggccacgaaaccccattt

SEQ ID NO: 4903041 - DNA, 25 bp, Homo sapien
gtgcctggccacgaaaccccatttc

SEQ ID NO: 4903042 - DNA, 25 bp, Homo sapien
caacgtgcctggccacgaaacccca

SEQ ID NO: 4903043 - DNA, 25 bp, Homo sapien
acgtgcctggccacgaaaccccatt

SEQ ID NO: 4903044 - DNA, 25 bp, Homo sapien
tagcagccgctgtgaaggagtttcc

SEQ ID NO: 4903045 - DNA, 25 bp, Homo sapien
aatcagggctctcgagaaatgggcg

SEQ ID NO: 4903046 - DNA, 25 bp, Homo sapien
gagtttccgctgtccaaagctggga

SEQ ID NO: 4903047 - DNA, 25 bp, Homo sapien
tgctccaaaaaatgacggaagcgtg

SEQ ID NO: 4903048 - DNA, 25 bp, Homo sapien
ttcataagccatcttttagtcagat

SEQ ID NO: 4903049 - DNA, 25 bp, Homo sapien
tagtcagattatgtcttttaacagc

SEQ ID NO: 4903050 - DNA, 25 bp, Homo sapien
ttagtcagattatgtcttttaacag

SEQ ID NO: 4903051 - DNA, 25 bp, Homo sapien
ctttcatcgacgattttcataagcc

SEQ ID NO: 4903052 - DNA, 25 bp, Homo sapien
gaaaagttgcatccattaagcagac

SEQ ID NO: 4903053 - DNA, 25 bp, Homo sapien
ttgcatccattaagcagacacttcc

SEQ ID NO: 4903054 - DNA, 25 bp, Homo sapien
aaagaaaagttgcatccattaagca

SEQ ID NO: 4903055 - DNA, 25 bp, Homo sapien
aaagttgcatccattaagcagacac

SEQ ID NO: 4903056 - DNA, 25 bp, Homo sapien
ccaatatttctagtgttaagtaaag

SEQ ID NO: 4903057 - DNA, 25 bp, Homo sapien
caatatttctagtgttaagtaaaga

SEQ ID NO: 4903058 - DNA, 25 bp, Homo sapien
ttcagaaattacacagggctgctct

SEQ ID NO: 4903059 - DNA, 25 bp, Homo sapien
cacagggctgctctattctaagtgc

SEQ ID NO: 4903060 - DNA, 25 bp, Homo sapien
ttctaagtgcataataaatcaatag

SEQ ID NO: 4903061 - DNA, 25 bp, Homo sapien
aaatcaatagaaatagcatagagaa

SEQ ID NO: 4903062 - DNA, 25 bp, Homo sapien
tcaagcaagtgacaatgccttgtgc

SEQ ID NO: 4903063 - DNA, 25 bp, Homo sapien
ggtgttgctctcaagcaagtgacaa

SEQ ID NO: 4903064 - DNA, 25 bp, Homo sapien
ctcccatgatatggtgttgctctca

SEQ ID NO: 4903065 - DNA, 25 bp, Homo sapien
tcttctgctcccatgatatggtgtt

SEQ ID NO: 4903066 - DNA, 25 bp, Homo sapien
gactggcaatgtcatatattacatc

SEQ ID NO: 4903067 - DNA, 25 bp, Homo sapien
tatcttggttcctccgtagaaagtc

SEQ ID NO: 4903068 - DNA, 25 bp, Homo sapien
catttttatcttggttcctccgtag

SEQ ID NO: 4903069 - DNA, 25 bp, Homo sapien
tgctttaggtgcaagtgtgcttgac

SEQ ID NO: 4903070 - DNA, 25 bp, Homo sapien
cacagaggagcccacatgagaaagc

SEQ ID NO: 4903071 - DNA, 25 bp, Homo sapien
ggtaacagtgaatgccgaccacctc

SEQ ID NO: 4903072 - DNA, 25 bp, Homo sapien
gaacaactaaagtgacaggcaggag

SEQ ID NO: 4903073 - DNA, 25 bp, Homo sapien
gaaccagttcaggagccaagtcaga

SEQ ID NO: 4903074 - DNA, 25 bp, Homo sapien
tatattgtccctaacaccaggaaaa

SEQ ID NO: 4903075 - DNA, 25 bp, Homo sapien
taacccattatactccagtttgacc

SEQ ID NO: 4903076 - DNA, 25 bp, Homo sapien
tctgagctacgaacacctggtcact

SEQ ID NO: 4903077 - DNA, 25 bp, Homo sapien
caaccatctactgaaattactctat

SEQ ID NO: 4903078 - DNA, 25 bp, Homo sapien
gaacagttttgtgaaaggacctagc

SEQ ID NO: 4903079 - DNA, 25 bp, Homo sapien
caggaacagttttgtgaaaggacct

SEQ ID NO: 4903080 - DNA, 25 bp, Homo sapien
cactctagtctctcttggcacagga

SEQ ID NO: 4903081 - DNA, 25 bp, Homo sapien
ggaattgccatgttgccactctagt

SEQ ID NO: 4903082 - DNA, 25 bp, Homo sapien
cgacagaagcagcacctcaggaatt

SEQ ID NO: 4903083 - DNA, 25 bp, Homo sapien
tttctgattcggcaggtctgtgagg

SEQ ID NO: 4903084 - DNA, 25 bp, Homo sapien
taatatgcacaaaattgaggagagc

SEQ ID NO: 4903085 - DNA, 25 bp, Homo sapien
tcctggctcgagtggtaagttcatc

SEQ ID NO: 4903086 - DNA, 25 bp, Homo sapien
agagtgtgtacatgtcctagaagac

SEQ ID NO: 4903087 - DNA, 25 bp, Homo sapien
taatggtgacagactagttcctggc

SEQ ID NO: 4903088 - DNA, 25 bp, Homo sapien
tctaagcggcacgagacctcctcgt

SEQ ID NO: 4903089 - DNA, 25 bp, Homo sapien
gtgctccacctttctaagcggcacg

SEQ ID NO: 4903090 - DNA, 25 bp, Homo sapien
caggtcacttagttttgtgctccac

SEQ ID NO: 4903091 - DNA, 25 bp, Homo sapien
cccctagagttctgcggcacagaac

SEQ ID NO: 4903092 - DNA, 25 bp, Homo sapien
gcaaacaggctgtttcaatcaggga

SEQ ID NO: 4903093 - DNA, 25 bp, Homo sapien
caaaatcacgtttgcctggccttat

SEQ ID NO: 4903094 - DNA, 25 bp, Homo sapien
cacagagctagtaccagaaaagcca

SEQ ID NO: 4903095 - DNA, 25 bp, Homo sapien
ccagtaaaagggtatcacagagcta

SEQ ID NO: 4903096 - DNA, 25 bp, Homo sapien
tatatcaaaatccactcgctgaatt

SEQ ID NO: 4903097 - DNA, 25 bp, Homo sapien
taatggaagtaatgtattcttctgc

SEQ ID NO: 4903098 - DNA, 25 bp, Homo sapien
tctttagaaagtcctctagagaaac

SEQ ID NO: 4903099 - DNA, 25 bp, Homo sapien
taaagatgggtggaatatatcaaaa

SEQ ID NO: 4903100 - DNA, 25 bp, Homo sapien
agcttccagggacagcacagcagac

SEQ ID NO: 4903101 - DNA, 25 bp, Homo sapien
gtgcctctgccagaatctcagcagt

SEQ ID NO: 4903102 - DNA, 25 bp, Homo sapien
ccaggggtgccaatggcagtgcctc

SEQ ID NO: 4903103 - DNA, 25 bp, Homo sapien
agtgcctctgccagaatctcagcag

SEQ ID NO: 4903104 - DNA, 25 bp, Homo sapien
tccagaccagccagagctaaagtca

SEQ ID NO: 4903105 - DNA, 25 bp, Homo sapien
tgtagcaaccctttaatggatgttc

SEQ ID NO: 4903106 - DNA, 25 bp, Homo sapien
gaacacctaggttatagctgctcag

SEQ ID NO: 4903107 - DNA, 25 bp, Homo sapien
taaagtcaaattaaggctctgctct

SEQ ID NO: 4903108 - DNA, 25 bp, Homo sapien
agctctagtactaatgcctccatga

SEQ ID NO: 4903109 - DNA, 25 bp, Homo sapien
tagaccatccattccgtttcctggc

SEQ ID NO: 4903110 - DNA, 25 bp, Homo sapien
ttgaactaatgtggatctggcatcc

SEQ ID NO: 4903111 - DNA, 25 bp, Homo sapien
taaaggcctacttcactatgagagt

SEQ ID NO: 4903112 - DNA, 25 bp, Homo sapien
agtggctatctcttacctggtgaaa

SEQ ID NO: 4903113 - DNA, 25 bp, Homo sapien
gaaagagtgtattacaaattccctc

SEQ ID NO: 4903114 - DNA, 25 bp, Homo sapien
aaactgcaacaagaggccgggtgca

SEQ ID NO: 4903115 - DNA, 25 bp, Homo sapien
gcaggcagcgtctttatgttgatta

SEQ ID NO: 4903116 - DNA, 25 bp, Homo sapien
acagttgtggaaggtagaagtccaa

SEQ ID NO: 4903117 - DNA, 25 bp, Homo sapien
acatgtgtgcacgtctctggcttca

SEQ ID NO: 4903118 - DNA, 25 bp, Homo sapien
ctccacatacggtcacactgtgagg

SEQ ID NO: 4903119 - DNA, 25 bp, Homo sapien
tagggcccactcatatgatttcacc

SEQ ID NO: 4903120 - DNA, 25 bp, Homo sapien
cgtggctgctgttcactaccttcct

SEQ ID NO: 4903121 - DNA, 25 bp, Homo sapien
ctcatatctgtggtcccgtggctgc

SEQ ID NO: 4903122 - DNA, 25 bp, Homo sapien
tgctttatgagtggcctcatatctg

SEQ ID NO: 4903123 - DNA, 25 bp, Homo sapien
cctttgattctctccatgggctcct

SEQ ID NO: 4903124 - DNA, 25 bp, Homo sapien
ggatgactgtgtccaccaaaccctc

SEQ ID NO: 4903125 - DNA, 25 bp, Homo sapien
cagagagcggccaaggattaatgac

SEQ ID NO: 4903126 - DNA, 25 bp, Homo sapien
taaggtgactatcttctcagctagc

SEQ ID NO: 4903127 - DNA, 25 bp, Homo sapien
gattaatgacctggatcccattcgg

SEQ ID NO: 4903128 - DNA, 25 bp, Homo sapien
tggggttcagggtgaattgccttta

SEQ ID NO: 4903129 - DNA, 25 bp, Homo sapien
gtgtgctggattcccctgcactcca

SEQ ID NO: 4903130 - DNA, 25 bp, Homo sapien
ctggggttcagggtgaattgccttt

SEQ ID NO: 4903131 - DNA, 25 bp, Homo sapien
ccacgtgtgctggattcccctgcac

SEQ ID NO: 4903132 - DNA, 25 bp, Homo sapien
aggccagaacaagaaagtcttgggg

SEQ ID NO: 4903133 - DNA, 25 bp, Homo sapien
tcaggccagaacaagaaagtcttgg

SEQ ID NO: 4903134 - DNA, 25 bp, Homo sapien
agaacaagaaagtcttgggggacag

SEQ ID NO: 4903135 - DNA, 25 bp, Homo sapien
gaacaagaaagtcttgggggacaga

SEQ ID NO: 4903136 - DNA, 25 bp, Homo sapien
tgacatggagtagccctctagacca

SEQ ID NO: 4903137 - DNA, 25 bp, Homo sapien
tagccctctagaccaaacatttcag

SEQ ID NO: 4903138 - DNA, 25 bp, Homo sapien
ctttgcctctgacatggagtagccc

SEQ ID NO: 4903139 - DNA, 25 bp, Homo sapien
ggagtagccctctagaccaaacatt

SEQ ID NO: 4903140 - DNA, 25 bp, Homo sapien
tgagggtgctgccagatgttatcat

SEQ ID NO: 4903141 - DNA, 25 bp, Homo sapien
aaatggactaagtcaccagataggg

SEQ ID NO: 4903142 - DNA, 25 bp, Homo sapien
gaaaagaaaatggactaagtcacca

SEQ ID NO: 4903143 - DNA, 25 bp, Homo sapien
gccagatgttatcatcagatgaaaa

SEQ ID NO: 4903144 - DNA, 25 bp, Homo sapien
tgttcctaacaaccaccagtacagt

SEQ ID NO: 4903145 - DNA, 25 bp, Homo sapien
gattgatcgagctatatctggcccc

SEQ ID NO: 4903146 - DNA, 25 bp, Homo sapien
ggaatttcctccatacatttgacag

SEQ ID NO: 4903147 - DNA, 25 bp, Homo sapien
tgaacactatgattggctcaggaac

SEQ ID NO: 4903148 - DNA, 25 bp, Homo sapien
ctccataggcagttccagaaaatgc

SEQ ID NO: 4903149 - DNA, 25 bp, Homo sapien
aatcacaggaaagtcacttactggt

SEQ ID NO: 4903150 - DNA, 25 bp, Homo sapien
ttactggtgaactcacagcaccagc

SEQ ID NO: 4903151 - DNA, 25 bp, Homo sapien
aaaatgccattgactttcagcaaac

SEQ ID NO: 4903152 - DNA, 25 bp, Homo sapien
tatttaaaagttcctgtgaagtaca

SEQ ID NO: 4903153 - DNA, 25 bp, Homo sapien
gaagtgtgcgttcctctgagtatgt

SEQ ID NO: 4903154 - DNA, 25 bp, Homo sapien
ctaacttcctgatgcagtcgtttga

SEQ ID NO: 4903155 - DNA, 25 bp, Homo sapien
gcaagagagctccaaccagtgtggc

SEQ ID NO: 4903156 - DNA, 25 bp, Homo sapien
tagaaaagcctcgactgagtcaaag

SEQ ID NO: 4903157 - DNA, 25 bp, Homo sapien
ccccagtgatcatggctgaagaaca

SEQ ID NO: 4903158 - DNA, 25 bp, Homo sapien
aattagctggttgtgttggcattca

SEQ ID NO: 4903159 - DNA, 25 bp, Homo sapien
ggctgatggtgaggcaacaaaaaac

SEQ ID NO: 4903160 - DNA, 25 bp, Homo sapien
tatttctcacccaaagtcagctgta

SEQ ID NO: 4903161 - DNA, 25 bp, Homo sapien
aaaacactggacatctcaatggctt

SEQ ID NO: 4903162 - DNA, 25 bp, Homo sapien
tcattgcaccaacgttaggagtcta

SEQ ID NO: 4903163 - DNA, 25 bp, Homo sapien
tggctggaatacaaggcaccaagtc

SEQ ID NO: 4903164 - DNA, 25 bp, Homo sapien
acatggcctgcagatattttcccta

SEQ ID NO: 4903165 - DNA, 25 bp, Homo sapien
tctgtgtcagggctctaatcccaca

SEQ ID NO: 4903166 - DNA, 25 bp, Homo sapien
tgccggtggatctaccatcctggga

SEQ ID NO: 4903167 - DNA, 25 bp, Homo sapien
tgggtttctcccacaatacatggga

SEQ ID NO: 4903168 - DNA, 25 bp, Homo sapien
caatacatgggaattctgggaatac

SEQ ID NO: 4903169 - DNA, 25 bp, Homo sapien
cactgggtttctcccacaatacatg

SEQ ID NO: 4903170 - DNA, 25 bp, Homo sapien
ccacaaaaacagtatgggggaactg

SEQ ID NO: 4903171 - DNA, 25 bp, Homo sapien
ttccagggtgtgtgctgtccgcagc

SEQ ID NO: 4903172 - DNA, 25 bp, Homo sapien
gtcgaacccgacaacggctgcctgg

SEQ ID NO: 4903173 - DNA, 25 bp, Homo sapien
cgatcctcctggtcgcggacgcagg

SEQ ID NO: 4903174 - DNA, 25 bp, Homo sapien
acagcgaaggcgaaggtccgatcct

SEQ ID NO: 4903175 - DNA, 25 bp, Homo sapien
cgggagcgccccgtttctcacagac

SEQ ID NO: 4903176 - DNA, 25 bp, Homo sapien
gcggcggcgtcctacgggcgggcgc

SEQ ID NO: 4903177 - DNA, 25 bp, Homo sapien
acagaccccaacatggcgtcggccg

SEQ ID NO: 4903178 - DNA, 25 bp, Homo sapien
acggcggcggcaactggcccgcggg

SEQ ID NO: 4903179 - DNA, 25 bp, Homo sapien
caaataggttagatttgatagagaa

SEQ ID NO: 4903180 - DNA, 25 bp, Homo sapien
gtaaaaggcaaagctatgactaatt

SEQ ID NO: 4903181 - DNA, 25 bp, Homo sapien
ctagtaaaggcagtttcaaataggt

SEQ ID NO: 4903182 - DNA, 25 bp, Homo sapien
ttggaatggccactgacaaaataag

SEQ ID NO: 4903183 - DNA, 25 bp, Homo sapien
ggttacagctagataccccaaataa

SEQ ID NO: 4903184 - DNA, 25 bp, Homo sapien
tttaatgattctggcagcccacttg

SEQ ID NO: 4903185 - DNA, 25 bp, Homo sapien
agtaccacttttatctgggttacag

SEQ ID NO: 4903186 - DNA, 25 bp, Homo sapien
acttgattgattggtgggttgtgac

SEQ ID NO: 4903187 - DNA, 25 bp, Homo sapien
tgcctcagagtcaggaacccagaca

SEQ ID NO: 4903188 - DNA, 25 bp, Homo sapien
tcacaaatccgcacaggcttagagg

SEQ ID NO: 4903189 - DNA, 25 bp, Homo sapien
tgatttctccgtagcagtggcagca

SEQ ID NO: 4903190 - DNA, 25 bp, Homo sapien
acatttgcggcaatggtggcgacga

SEQ ID NO: 4903191 - DNA, 25 bp, Homo sapien
cataggttacaagtttctcaggcaa

SEQ ID NO: 4903192 - DNA, 25 bp, Homo sapien
gctattatgataaggcaccactagg

SEQ ID NO: 4903193 - DNA, 25 bp, Homo sapien
tgcaaaagcctatccctgtagaaga

SEQ ID NO: 4903194 - DNA, 25 bp, Homo sapien
caccactaggtatatgaaaaagcca

SEQ ID NO: 4903195 - DNA, 25 bp, Homo sapien
caaacttagttatttgtagctgtca

SEQ ID NO: 4903196 - DNA, 25 bp, Homo sapien
tccaaacttagttatttgtagctgt

SEQ ID NO: 4903197 - DNA, 25 bp, Homo sapien
ccaaacttagttatttgtagctgtc

SEQ ID NO: 4903198 - DNA, 25 bp, Homo sapien
tgacaattataatttgggacctata

SEQ ID NO: 4903199 - DNA, 25 bp, Homo sapien
caattataatttgggacctatataa

SEQ ID NO: 4903200 - DNA, 25 bp, Homo sapien
tttgacaattataatttgggaccta

SEQ ID NO: 4903201 - DNA, 25 bp, Homo sapien
gacaattataatttgggacctatat

SEQ ID NO: 4903202 - DNA, 25 bp, Homo sapien
tcttcaagcctaggtaaatctgtgc

SEQ ID NO: 4903203 - DNA, 25 bp, Homo sapien
tggaaagagtagtgcaaaacgcatc

SEQ ID NO: 4903204 - DNA, 25 bp, Homo sapien
tatactttcaacctaatggctgcct

SEQ ID NO: 4903205 - DNA, 25 bp, Homo sapien
cttaaagtggtctgccttgaggcca

SEQ ID NO: 4903206 - DNA, 25 bp, Homo sapien
caccaacccataaattggaatggtc

SEQ ID NO: 4903207 - DNA, 25 bp, Homo sapien
caacccataaattggaatggtcccg

SEQ ID NO: 4903208 - DNA, 25 bp, Homo sapien
tgtctcccaccccattgtcgggttc

SEQ ID NO: 4903209 - DNA, 25 bp, Homo sapien
tatttgtcggcggattctgcccacg

SEQ ID NO: 4903210 - DNA, 25 bp, Homo sapien
cacgtcccttcagcgtaaacactgg

SEQ ID NO: 4903211 - DNA, 25 bp, Homo sapien
tgctgcagttctgcattttgaggtc

SEQ ID NO: 4903212 - DNA, 25 bp, Homo sapien
gagtgtaatggctgaacaaagtatc

SEQ ID NO: 4903213 - DNA, 25 bp, Homo sapien
gggaccctgtctgcaatcacgctgg

SEQ ID NO: 4903214 - DNA, 25 bp, Homo sapien
tagggcataacgaggcatgtccagc

SEQ ID NO: 4903215 - DNA, 25 bp, Homo sapien
ttcttgtagccccaggaaagttcag

SEQ ID NO: 4903216 - DNA, 25 bp, Homo sapien
tagcagacttcagggagaatagatc

SEQ ID NO: 4903217 - DNA, 25 bp, Homo sapien
gcagagaccagtgttttgtcatgca

SEQ ID NO: 4903218 - DNA, 25 bp, Homo sapien
tgcccgaggtagtagggccacaact

SEQ ID NO: 4903219 - DNA, 25 bp, Homo sapien
gcctgtaacaccactctcaggaggt

SEQ ID NO: 4903220 - DNA, 25 bp, Homo sapien
atgaagctggcggtacgagacacca

SEQ ID NO: 4903221 - DNA, 25 bp, Homo sapien
cgagatctgccactgttgaattgct

SEQ ID NO: 4903222 - DNA, 25 bp, Homo sapien
cggtacgagacaccatgtgaccggg

SEQ ID NO: 4903223 - DNA, 25 bp, Homo sapien
ttccaagctgccactatcacgagat

SEQ ID NO: 4903224 - DNA, 25 bp, Homo sapien
cagcttctccaggagcccctcccca

SEQ ID NO: 4903225 - DNA, 25 bp, Homo sapien
aggagcccctccccagaggagctgg

SEQ ID NO: 4903226 - DNA, 25 bp, Homo sapien
ctccccagaggagctggtgctcagg

SEQ ID NO: 4903227 - DNA, 25 bp, Homo sapien
ctacccagcttctccaggagcccct

SEQ ID NO: 4903228 - DNA, 25 bp, Homo sapien
agccacagaatgagaccggcaggat

SEQ ID NO: 4903229 - DNA, 25 bp, Homo sapien
tgaaggccccagaaagccatctcca

SEQ ID NO: 4903230 - DNA, 25 bp, Homo sapien
cacagaatgagaccggcaggatcca

SEQ ID NO: 4903231 - DNA, 25 bp, Homo sapien
ctgaaggccccagaaagccatctcc

SEQ ID NO: 4903232 - DNA, 25 bp, Homo sapien
ctccactcgggcaggtgggccatca

SEQ ID NO: 4903233 - DNA, 25 bp, Homo sapien
tcccctcctaaaggtgactgagagc

SEQ ID NO: 4903234 - DNA, 25 bp, Homo sapien
tgtaaatagcttgaagtacattggg

SEQ ID NO: 4903235 - DNA, 25 bp, Homo sapien
cagaaagagcgttcacttgcaccca

SEQ ID NO: 4903236 - DNA, 25 bp, Homo sapien
ctctgatgtaagcagcatgggcgat

SEQ ID NO: 4903237 - DNA, 25 bp, Homo sapien
ctcggcagacagaaatcttgagtgg

SEQ ID NO: 4903238 - DNA, 25 bp, Homo sapien
tcagctcctgcttgtaggtacccct

SEQ ID NO: 4903239 - DNA, 25 bp, Homo sapien
tgcttgctgaggatccccagcgtgc

SEQ ID NO: 4903240 - DNA, 25 bp, Homo sapien
cactttgcctccgtttccacccaga

SEQ ID NO: 4903241 - DNA, 25 bp, Homo sapien
tcaaggttccaagctcagtgactgc

SEQ ID NO: 4903242 - DNA, 25 bp, Homo sapien
gcgggtaaggtgctgtccactttgc

SEQ ID NO: 4903243 - DNA, 25 bp, Homo sapien
tggccgtggcagagcgggtaaggtg

SEQ ID NO: 4903244 - DNA, 25 bp, Homo sapien
agctccccattggctacctggacag

SEQ ID NO: 4903245 - DNA, 25 bp, Homo sapien
gaacacagccaagtgcctccagcgc

SEQ ID NO: 4903246 - DNA, 25 bp, Homo sapien
gtagaggtaggaagacgcatgccaa

SEQ ID NO: 4903247 - DNA, 25 bp, Homo sapien
gaagacgcatgccaaagccctgtgc

SEQ ID NO: 4903248 - DNA, 25 bp, Homo sapien
gccttctaccaagggcttcttggaa

SEQ ID NO: 4903249 - DNA, 25 bp, Homo sapien
catcaccttgcaatcagggaagcct

SEQ ID NO: 4903250 - DNA, 25 bp, Homo sapien
gaaagtggatttgtcaatgagattc

SEQ ID NO: 4903251 - DNA, 25 bp, Homo sapien
ccccaagggctgtagacaagtttgt

SEQ ID NO: 4903252 - DNA, 25 bp, Homo sapien
cacagataatgtgtgcactcatgat

SEQ ID NO: 4903253 - DNA, 25 bp, Homo sapien
acgtcctcggcaaaggagctccagg

SEQ ID NO: 4903254 - DNA, 25 bp, Homo sapien
cagcaccacgtcctcggcaaaggag

SEQ ID NO: 4903255 - DNA, 25 bp, Homo sapien
tgtgtgcactcatgatgctcagcac

SEQ ID NO: 4903256 - DNA, 25 bp, Homo sapien
tagaacaaggcggtttccttgtgtg

SEQ ID NO: 4903257 - DNA, 25 bp, Homo sapien
ctagaacaaggcggtttccttgtgt

SEQ ID NO: 4903258 - DNA, 25 bp, Homo sapien
gtttccttgtgtgatgtaagctcag

SEQ ID NO: 4903259 - DNA, 25 bp, Homo sapien
tgtgagttcccatgtttattggcaa

SEQ ID NO: 4903260 - DNA, 25 bp, Homo sapien
gaaactattttagtatcagtataga

SEQ ID NO: 4903261 - DNA, 25 bp, Homo sapien
gtttggcattccataacataataat

SEQ ID NO: 4903262 - DNA, 25 bp, Homo sapien
tctatctttagcaagtagctatttt

SEQ ID NO: 4903263 - DNA, 25 bp, Homo sapien
cacattcggacagatgcatccatga

SEQ ID NO: 4903264 - DNA, 25 bp, Homo sapien
cgctgggtttgtggtaaacattaag

SEQ ID NO: 4903265 - DNA, 25 bp, Homo sapien
cagatcatcagcttcgctgggtttg

SEQ ID NO: 4903266 - DNA, 25 bp, Homo sapien
aagaatgcagactgcacattcggac

SEQ ID NO: 4903267 - DNA, 25 bp, Homo sapien
gatagggcgtttgtaattcttcagc

SEQ ID NO: 4903268 - DNA, 25 bp, Homo sapien
tcatctctgatagggcgtttgtaat

SEQ ID NO: 4903269 - DNA, 25 bp, Homo sapien
tcttcagcctttaggttattgtgtt

SEQ ID NO: 4903270 - DNA, 25 bp, Homo sapien
cagcctttaggttattgtgttcttc

SEQ ID NO: 4903271 - DNA, 25 bp, Homo sapien
tccgcggcagcgcattcgtcgaccc

SEQ ID NO: 4903272 - DNA, 25 bp, Homo sapien
gcggcagcgcattcgtcgaccctct

SEQ ID NO: 4903273 - DNA, 25 bp, Homo sapien
gcgcattcgtcgaccctcttcgcgg

SEQ ID NO: 4903274 - DNA, 25 bp, Homo sapien
gcagcgcattcgtcgaccctcttcg

SEQ ID NO: 4903275 - DNA, 25 bp, Homo sapien
gaaatggctccaacattgtgcaagc

SEQ ID NO: 4903276 - DNA, 25 bp, Homo sapien
taatgggtgaaaagatagtcctggg

SEQ ID NO: 4903277 - DNA, 25 bp, Homo sapien
cccacaaggaagtcgggaagctggt

SEQ ID NO: 4903278 - DNA, 25 bp, Homo sapien
caacaaagagttggacgggatacgt

SEQ ID NO: 4903279 - DNA, 25 bp, Homo sapien
cttccacggcctcagagaaagacat

SEQ ID NO: 4903280 - DNA, 25 bp, Homo sapien
tgcagttgccgttgttctcccatag

SEQ ID NO: 4903281 - DNA, 25 bp, Homo sapien
ttgttctcccatagatccctctgtg

SEQ ID NO: 4903282 - DNA, 25 bp, Homo sapien
tgtggtccctccatcggcaagttct

SEQ ID NO: 4903283 - DNA, 25 bp, Homo sapien
tcgcttggggaccaagatagagaac

SEQ ID NO: 4903284 - DNA, 25 bp, Homo sapien
tgtgtttaaggccaaggtcgcttgg

SEQ ID NO: 4903285 - DNA, 25 bp, Homo sapien
ggggaccaagatagagaacccagaa

SEQ ID NO: 4903286 - DNA, 25 bp, Homo sapien
acccagaaacatgtttggaacttca

SEQ ID NO: 4903287 - DNA, 25 bp, Homo sapien
ccttgagaagcggtcagcttcaact

SEQ ID NO: 4903288 - DNA, 25 bp, Homo sapien
gcttcaactatctaaagagaactag

SEQ ID NO: 4903289 - DNA, 25 bp, Homo sapien
gttacagcaagaccatccatccatg

SEQ ID NO: 4903290 - DNA, 25 bp, Homo sapien
taactattagatgcctaacccacca

SEQ ID NO: 4903291 - DNA, 25 bp, Homo sapien
tggcaggttactactgtcctgccaa

SEQ ID NO: 4903292 - DNA, 25 bp, Homo sapien
ctgtcctgccaaacaggactttccc

SEQ ID NO: 4903293 - DNA, 25 bp, Homo sapien
gcaggttactactgtcctgccaaac

SEQ ID NO: 4903294 - DNA, 25 bp, Homo sapien
tcagtggcaggttactactgtcctg

SEQ ID NO: 4903295 - DNA, 25 bp, Homo sapien
ttagaagcagaactgccaaccagct

SEQ ID NO: 4903296 - DNA, 25 bp, Homo sapien
caaccagctgtgtatgtgcctcaga

SEQ ID NO: 4903297 - DNA, 25 bp, Homo sapien
gggagtgccacagctttagaagcag

SEQ ID NO: 4903298 - DNA, 25 bp, Homo sapien
tccccatgtctggaacagcaggcag

SEQ ID NO: 4903299 - DNA, 25 bp, Homo sapien
tagaaaaagttatcaggcctttgcc

SEQ ID NO: 4903300 - DNA, 25 bp, Homo sapien
aatttcctatccgaagtcatgccag

SEQ ID NO: 4903301 - DNA, 25 bp, Homo sapien
cacagtctctgtgcaggccatatgg

SEQ ID NO: 4903302 - DNA, 25 bp, Homo sapien
cattttcaaacagcgcatggaaggt

SEQ ID NO: 4903303 - DNA, 25 bp, Homo sapien
tactagtcttctagggctaccgtaa

SEQ ID NO: 4903304 - DNA, 25 bp, Homo sapien
ccaaggaggtaggtatgtgatttaa

SEQ ID NO: 4903305 - DNA, 25 bp, Homo sapien
caggctctcggaaaattaggtgccc

SEQ ID NO: 4903306 - DNA, 25 bp, Homo sapien
tctgcaggctagaagtacaacatca

SEQ ID NO: 4903307 - DNA, 25 bp, Homo sapien
caagagccacatgagggaattccca

SEQ ID NO: 4903308 - DNA, 25 bp, Homo sapien
taataggactaaggctgccaaagcc

SEQ ID NO: 4903309 - DNA, 25 bp, Homo sapien
ggatcattcaccaggcgtcagactg

SEQ ID NO: 4903310 - DNA, 25 bp, Homo sapien
gatgagcacctaagtcaccctgaca

SEQ ID NO: 4903311 - DNA, 25 bp, Homo sapien
gcctgatgaaggctggctgacataa

SEQ ID NO: 4903312 - DNA, 25 bp, Homo sapien
atgcctgatgaaggctggctgacat

SEQ ID NO: 4903313 - DNA, 25 bp, Homo sapien
gatgcctgatgaaggctggctgaca

SEQ ID NO: 4903314 - DNA, 25 bp, Homo sapien
gagatgcctgatgaaggctggctga

SEQ ID NO: 4903315 - DNA, 25 bp, Homo sapien
tgtcataggtgaccacctttactac

SEQ ID NO: 4903316 - DNA, 25 bp, Homo sapien
tcataggtgaccacctttactacta

SEQ ID NO: 4903317 - DNA, 25 bp, Homo sapien
ctgtcataggtgaccacctttacta

SEQ ID NO: 4903318 - DNA, 25 bp, Homo sapien
cataggtgaccacctttactactag

SEQ ID NO: 4903319 - DNA, 25 bp, Homo sapien
ttcgttccgagtcctgcctcagggt

SEQ ID NO: 4903320 - DNA, 25 bp, Homo sapien
actgcctggttcgttccgagtcctg

SEQ ID NO: 4903321 - DNA, 25 bp, Homo sapien
gcctcagggtttggctggtcaggag

SEQ ID NO: 4903322 - DNA, 25 bp, Homo sapien
gcactggcaactgcctggttcgttc

SEQ ID NO: 4903323 - DNA, 25 bp, Homo sapien
cttaggcacggaggctgctcttctg

SEQ ID NO: 4903324 - DNA, 25 bp, Homo sapien
tctgccagtggttctgtttgtaagg

SEQ ID NO: 4903325 - DNA, 25 bp, Homo sapien
ctgtttgtaaggaaatatggggagg

SEQ ID NO: 4903326 - DNA, 25 bp, Homo sapien
ttccttccagtgctttctctgccag

SEQ ID NO: 4903327 - DNA, 25 bp, Homo sapien
cagctcaggagctgtaagccttggg

SEQ ID NO: 4903328 - DNA, 25 bp, Homo sapien
agctcaggagctgtaagccttgggc

SEQ ID NO: 4903329 - DNA, 25 bp, Homo sapien
aggagctgtaagccttgggcctttg

SEQ ID NO: 4903330 - DNA, 25 bp, Homo sapien
tcaggagctgtaagccttgggcctt

SEQ ID NO: 4903331 - DNA, 25 bp, Homo sapien
cagccactaccaccaccatggtctt

SEQ ID NO: 4903332 - DNA, 25 bp, Homo sapien
accaccaccatggtctttattattt

SEQ ID NO: 4903333 - DNA, 25 bp, Homo sapien
ctaccaccaccatggtctttattat

SEQ ID NO: 4903334 - DNA, 25 bp, Homo sapien
ccactaccaccaccatggtctttat

SEQ ID NO: 4903335 - DNA, 25 bp, Homo sapien
cttgcatcttttaatagccagcaat

SEQ ID NO: 4903336 - DNA, 25 bp, Homo sapien
catcttttaatagccagcaatctct

SEQ ID NO: 4903337 - DNA, 25 bp, Homo sapien
tgcatcttttaatagccagcaatct

SEQ ID NO: 4903338 - DNA, 25 bp, Homo sapien
tcttttaatagccagcaatctctta

SEQ ID NO: 4903339 - DNA, 25 bp, Homo sapien
ggctgacactcttagcccaaacttc

SEQ ID NO: 4903340 - DNA, 25 bp, Homo sapien
aatgacacatcgacatggctctcac

SEQ ID NO: 4903341 - DNA, 25 bp, Homo sapien
gaccactcacaatgacacatcgaca

SEQ ID NO: 4903342 - DNA, 25 bp, Homo sapien
atggctgacactcttagcccaaact

SEQ ID NO: 4903343 - DNA, 25 bp, Homo sapien
atggggagaacttgtgtgggggctc

SEQ ID NO: 4903344 - DNA, 25 bp, Homo sapien
gtgggggctcaaccacgctgggcat

SEQ ID NO: 4903345 - DNA, 25 bp, Homo sapien
tgtgtgggggctcaaccacgctggg

SEQ ID NO: 4903346 - DNA, 25 bp, Homo sapien
gaggacagaaggaacccatggggag

SEQ ID NO: 4903347 - DNA, 25 bp, Homo sapien
gatgttaaatagagtaacgacacag

SEQ ID NO: 4903348 - DNA, 25 bp, Homo sapien
cctatggccatggcagttctccacg

SEQ ID NO: 4903349 - DNA, 25 bp, Homo sapien
cagttctccacggtactggtgatgt

SEQ ID NO: 4903350 - DNA, 25 bp, Homo sapien
aacgacacagaaccagcaaccaagt

SEQ ID NO: 4903351 - DNA, 25 bp, Homo sapien
agtacctgaagcatacacatcccca

SEQ ID NO: 4903352 - DNA, 25 bp, Homo sapien
tattgcagtacctgaagcatacaca

SEQ ID NO: 4903353 - DNA, 25 bp, Homo sapien
gcagtacctgaagcatacacatccc

SEQ ID NO: 4903354 - DNA, 25 bp, Homo sapien
tctattgcagtacctgaagcataca

SEQ ID NO: 4903355 - DNA, 25 bp, Homo sapien
catccttttgtctaagaagaggctg

SEQ ID NO: 4903356 - DNA, 25 bp, Homo sapien
catcatcatccttttgtctaagaag

SEQ ID NO: 4903357 - DNA, 25 bp, Homo sapien
tctgacataagattgcctgattcca

SEQ ID NO: 4903358 - DNA, 25 bp, Homo sapien
cattggcaccatagtaattacaatc

SEQ ID NO: 4903359 - DNA, 25 bp, Homo sapien
gaactgagggcagacagatagcctt

SEQ ID NO: 4903360 - DNA, 25 bp, Homo sapien
tgagggcagacagatagccttctgc

SEQ ID NO: 4903361 - DNA, 25 bp, Homo sapien
aggaactgagggcagacagatagcc

SEQ ID NO: 4903362 - DNA, 25 bp, Homo sapien
gggcagacagatagccttctgcttc

SEQ ID NO: 4903363 - DNA, 25 bp, Homo sapien
agggtaggagtctgatattgagtca

SEQ ID NO: 4903364 - DNA, 25 bp, Homo sapien
tgtgaaagggtaagccccaagcacc

SEQ ID NO: 4903365 - DNA, 25 bp, Homo sapien
gtgagtgtgaaagggtaagccccaa

SEQ ID NO: 4903366 - DNA, 25 bp, Homo sapien
taggagtctgatattgagtcaaggg

SEQ ID NO: 4903367 - DNA, 25 bp, Homo sapien
catgggcaagtcctattcatcaggt

SEQ ID NO: 4903368 - DNA, 25 bp, Homo sapien
cagctgcataccacgcaagaatcgg

SEQ ID NO: 4903369 - DNA, 25 bp, Homo sapien
agaatcggccttgccatccaaactg

SEQ ID NO: 4903370 - DNA, 25 bp, Homo sapien
gccaccattcttgtgcgctccttgg

SEQ ID NO: 4903371 - DNA, 25 bp, Homo sapien
caaggatggtggagttgggaagtag

SEQ ID NO: 4903372 - DNA, 25 bp, Homo sapien
tctttctcaaggatggtggagttgg

SEQ ID NO: 4903373 - DNA, 25 bp, Homo sapien
tctcaaggatggtggagttgggaag

SEQ ID NO: 4903374 - DNA, 25 bp, Homo sapien
ttctcaaggatggtggagttgggaa

SEQ ID NO: 4903375 - DNA, 25 bp, Homo sapien
ggtgacatcatagaaagctacagct

SEQ ID NO: 4903376 - DNA, 25 bp, Homo sapien
attttagctttggacatcttaagga

SEQ ID NO: 4903377 - DNA, 25 bp, Homo sapien
gcccactggagcctaagctatattt

SEQ ID NO: 4903378 - DNA, 25 bp, Homo sapien
tacagctgatggagtaaggcgccca

SEQ ID NO: 4903379 - DNA, 25 bp, Homo sapien
tgatggagtcagctccattttgatg

SEQ ID NO: 4903380 - DNA, 25 bp, Homo sapien
tgagcataaggcaatcttgatggag

SEQ ID NO: 4903381 - DNA, 25 bp, Homo sapien
gccaattcagacctcccctaaggta

SEQ ID NO: 4903382 - DNA, 25 bp, Homo sapien
tcccctaaggtaatgagcataaggc

SEQ ID NO: 4903383 - DNA, 25 bp, Homo sapien
ttccaaccacaggcagaaaatggct

SEQ ID NO: 4903384 - DNA, 25 bp, Homo sapien
tttccaaccacaggcagaaaatggc

SEQ ID NO: 4903385 - DNA, 25 bp, Homo sapien
gtagggctactgacttcctgaggaa

SEQ ID NO: 4903386 - DNA, 25 bp, Homo sapien
aggtagggctactgacttcctgagg

SEQ ID NO: 4903387 - DNA, 25 bp, Homo sapien
ggtagggctactgacttcctgagga

SEQ ID NO: 4903388 - DNA, 25 bp, Homo sapien
caggtagggctactgacttcctgag

SEQ ID NO: 4903389 - DNA, 25 bp, Homo sapien
tcttgtgctagcaaactcttgatca

SEQ ID NO: 4903390 - DNA, 25 bp, Homo sapien
tgtgctagcaaactcttgatcacct

SEQ ID NO: 4903391 - DNA, 25 bp, Homo sapien
ttgtgctagcaaactcttgatcacc

SEQ ID NO: 4903392 - DNA, 25 bp, Homo sapien
gctagcaaactcttgatcacctcac

SEQ ID NO: 4903393 - DNA, 25 bp, Homo sapien
taatcaagggaaataagatgacata

SEQ ID NO: 4903394 - DNA, 25 bp, Homo sapien
aatcaagggaaataagatgacatac

SEQ ID NO: 4903395 - DNA, 25 bp, Homo sapien
gtaatcaagggaaataagatgacat

SEQ ID NO: 4903396 - DNA, 25 bp, Homo sapien
tgtctttgtagtgcacgagttcttt

SEQ ID NO: 4903397 - DNA, 25 bp, Homo sapien
tctggcccaagtgggatttgtcttt

SEQ ID NO: 4903398 - DNA, 25 bp, Homo sapien
ggtaaacatatgcttctggcccaag

SEQ ID NO: 4903399 - DNA, 25 bp, Homo sapien
cagtggtaaacatatgcttctggcc

SEQ ID NO: 4903400 - DNA, 25 bp, Homo sapien
tcccgttcagggagatgtcctgcca

SEQ ID NO: 4903401 - DNA, 25 bp, Homo sapien
ttttaatgccccttgtgcctgtcca

SEQ ID NO: 4903402 - DNA, 25 bp, Homo sapien
tctgattggtcctgctcagatgtgt

SEQ ID NO: 4903403 - DNA, 25 bp, Homo sapien
cagcactctgtgcaccattccgtat

SEQ ID NO: 4903404 - DNA, 25 bp, Homo sapien
tcacatgatgtcgtaggttctcctg

SEQ ID NO: 4903405 - DNA, 25 bp, Homo sapien
gcatgtcctgtcatccaatggagct

SEQ ID NO: 4903406 - DNA, 25 bp, Homo sapien
gagcttagtgctctcgtcatcacca

SEQ ID NO: 4903407 - DNA, 25 bp, Homo sapien
tggaaagccctttccgagtggacgc

SEQ ID NO: 4903408 - DNA, 25 bp, Homo sapien
tcccatcattaaggacacttcaaca

SEQ ID NO: 4903409 - DNA, 25 bp, Homo sapien
tcattaaggacacttcaacaaccag

SEQ ID NO: 4903410 - DNA, 25 bp, Homo sapien
ccatcattaaggacacttcaacaac

SEQ ID NO: 4903411 - DNA, 25 bp, Homo sapien
catcattaaggacacttcaacaacc

SEQ ID NO: 4903412 - DNA, 25 bp, Homo sapien
gaggagagacaattgccatgtcaca

SEQ ID NO: 4903413 - DNA, 25 bp, Homo sapien
gcttctcacaccttgccaggtctgg

SEQ ID NO: 4903414 - DNA, 25 bp, Homo sapien
ccatgatgggtgctggagcaaagcc

SEQ ID NO: 4903415 - DNA, 25 bp, Homo sapien
cttgccaggtctgggctacattctc

SEQ ID NO: 4903416 - DNA, 25 bp, Homo sapien
atcatttgaggcgctgccttcagct

SEQ ID NO: 4903417 - DNA, 25 bp, Homo sapien
cttacatcatttgaggcgctgcctt

SEQ ID NO: 4903418 - DNA, 25 bp, Homo sapien
catcatttgaggcgctgccttcagc

SEQ ID NO: 4903419 - DNA, 25 bp, Homo sapien
tacatcatttgaggcgctgccttca

SEQ ID NO: 4903420 - DNA, 25 bp, Homo sapien
ttcatagccaccttttccagacttc

SEQ ID NO: 4903421 - DNA, 25 bp, Homo sapien
aagataagtatcagcgtctggagtc

SEQ ID NO: 4903422 - DNA, 25 bp, Homo sapien
ctgcccaaagataagtatcagcgtc

SEQ ID NO: 4903423 - DNA, 25 bp, Homo sapien
cttcttcatagccaccttttccaga

SEQ ID NO: 4903424 - DNA, 25 bp, Homo sapien
ctataagaacataacatcctgggct

SEQ ID NO: 4903425 - DNA, 25 bp, Homo sapien
gaggaagtgacaactggtcggaatt

SEQ ID NO: 4903426 - DNA, 25 bp, Homo sapien
gacaactggtcggaattaaattgaa

SEQ ID NO: 4903427 - DNA, 25 bp, Homo sapien
gaagtgacaactggtcggaattaaa

SEQ ID NO: 4903428 - DNA, 25 bp, Homo sapien
gtgacaactggtcggaattaaattg

SEQ ID NO: 4903429 - DNA, 25 bp, Homo sapien
ttcttctttgggctgaattaggtcg

SEQ ID NO: 4903430 - DNA, 25 bp, Homo sapien
taggtcgttgccatctgtggactgt

SEQ ID NO: 4903431 - DNA, 25 bp, Homo sapien
gtaattgagtgaatgatttcacttg

SEQ ID NO: 4903432 - DNA, 25 bp, Homo sapien
gctgaattaggtcgttgccatctgt

SEQ ID NO: 4903433 - DNA, 25 bp, Homo sapien
tcctcttggaacaaacctggcataa

SEQ ID NO: 4903434 - DNA, 25 bp, Homo sapien
ttcccaagttgtccacgtccaactc

SEQ ID NO: 4903435 - DNA, 25 bp, Homo sapien
gaacaaacctggcataatcccttca

SEQ ID NO: 4903436 - DNA, 25 bp, Homo sapien
aacctggcataatcccttcacagag

SEQ ID NO: 4903437 - DNA, 25 bp, Homo sapien
caggtgttttacatagcgtgtgttg

SEQ ID NO: 4903438 - DNA, 25 bp, Homo sapien
taaggcaccaggtgttttacatagc

SEQ ID NO: 4903439 - DNA, 25 bp, Homo sapien
caccaggtgttttacatagcgtgtg

SEQ ID NO: 4903440 - DNA, 25 bp, Homo sapien
tgtttaaggcaccaggtgttttaca

SEQ ID NO: 4903441 - DNA, 25 bp, Homo sapien
aatccctattggtgcttaagatact

SEQ ID NO: 4903442 - DNA, 25 bp, Homo sapien
tcattaatcagttcagtataaatgg

SEQ ID NO: 4903443 - DNA, 25 bp, Homo sapien
cattaatcagttcagtataaatggg

SEQ ID NO: 4903444 - DNA, 25 bp, Homo sapien
aaaaatccctattggtgcttaagat

SEQ ID NO: 4903445 - DNA, 25 bp, Homo sapien
ttacagagaagagcaacggacaagg

SEQ ID NO: 4903446 - DNA, 25 bp, Homo sapien
tctgccatgacaccctgatcttctt

SEQ ID NO: 4903447 - DNA, 25 bp, Homo sapien
ggaaggtagtatatggagtaactgc

SEQ ID NO: 4903448 - DNA, 25 bp, Homo sapien
gtatatggagtaactgctttatctg

SEQ ID NO: 4903449 - DNA, 25 bp, Homo sapien
cagagccacaaagtgaaggaagcaa

SEQ ID NO: 4903450 - DNA, 25 bp, Homo sapien
aggaagcaataattcttctctggcc

SEQ ID NO: 4903451 - DNA, 25 bp, Homo sapien
gtgaaggaagcaataattcttctct

SEQ ID NO: 4903452 - DNA, 25 bp, Homo sapien
cacaaagtgaaggaagcaataattc

SEQ ID NO: 4903453 - DNA, 25 bp, Homo sapien
gagatttccatcaacttctgtcatt

SEQ ID NO: 4903454 - DNA, 25 bp, Homo sapien
tcaacttctgtcattgtcacaccat

SEQ ID NO: 4903455 - DNA, 25 bp, Homo sapien
atcaacttctgtcattgtcacacca

SEQ ID NO: 4903456 - DNA, 25 bp, Homo sapien
taggagatttccatcaacttctgtc

SEQ ID NO: 4903457 - DNA, 25 bp, Homo sapien
gaagtgttattaaaactcactggat

SEQ ID NO: 4903458 - DNA, 25 bp, Homo sapien
gattttcctcccctggatatcatgt

SEQ ID NO: 4903459 - DNA, 25 bp, Homo sapien
gactgcacaaattcaaccctgagtg

SEQ ID NO: 4903460 - DNA, 25 bp, Homo sapien
tttgacatgtgggtgtggtgtgctt

SEQ ID NO: 4903461 - DNA, 25 bp, Homo sapien
cagccaccgggggaagtttttgctg

SEQ ID NO: 4903462 - DNA, 25 bp, Homo sapien
cataaactcccatttggtctttttg

SEQ ID NO: 4903463 - DNA, 25 bp, Homo sapien
ggtacagtcactacataaactccca

SEQ ID NO: 4903464 - DNA, 25 bp, Homo sapien
gtctttttggtaccccctgctcagc

SEQ ID NO: 4903465 - DNA, 25 bp, Homo sapien
tctccttagctcttaattactacat

SEQ ID NO: 4903466 - DNA, 25 bp, Homo sapien
gtctccttagctcttaattactaca

SEQ ID NO: 4903467 - DNA, 25 bp, Homo sapien
tttagcaaatttgcggttcaggaat

SEQ ID NO: 4903468 - DNA, 25 bp, Homo sapien
agcaatctcaatgggagttagaagt

SEQ ID NO: 4903469 - DNA, 25 bp, Homo sapien
tcaggaatttgtacaagctttgtct

SEQ ID NO: 4903470 - DNA, 25 bp, Homo sapien
ccatgtctggtaagaagcaatctca

SEQ ID NO: 4903471 - DNA, 25 bp, Homo sapien
gtttaacaatatgtatctgaccata

SEQ ID NO: 4903472 - DNA, 25 bp, Homo sapien
caagtttaacaatatgtatctgacc

SEQ ID NO: 4903473 - DNA, 25 bp, Homo sapien
ttaacaatatgtatctgaccataaa

SEQ ID NO: 4903474 - DNA, 25 bp, Homo sapien
aagtttaacaatatgtatctgacca

SEQ ID NO: 4903475 - DNA, 25 bp, Homo sapien
gcaaagcattctgctggccggctcc

SEQ ID NO: 4903476 - DNA, 25 bp, Homo sapien
cacaatttggctcgaatttcctgga

SEQ ID NO: 4903477 - DNA, 25 bp, Homo sapien
caatctcagtttgtgaaccttggca

SEQ ID NO: 4903478 - DNA, 25 bp, Homo sapien
tcctggaaattcagccgaaattcaa

SEQ ID NO: 4903479 - DNA, 25 bp, Homo sapien
caattttagcatgcgtgctgcaaaa

SEQ ID NO: 4903480 - DNA, 25 bp, Homo sapien
tagcatgcgtgctgcaaaagcaggc

SEQ ID NO: 4903481 - DNA, 25 bp, Homo sapien
catgcgtgctgcaaaagcaggcaca

SEQ ID NO: 4903482 - DNA, 25 bp, Homo sapien
ttttagcatgcgtgctgcaaaagca

SEQ ID NO: 4903483 - DNA, 25 bp, Homo sapien
gacatatgctcggtgtcagagacca

SEQ ID NO: 4903484 - DNA, 25 bp, Homo sapien
taagtaaacgagagagaaggtccca

SEQ ID NO: 4903485 - DNA, 25 bp, Homo sapien
gacaaaccaggttggcgaatgcgag

SEQ ID NO: 4903486 - DNA, 25 bp, Homo sapien
tctgcagatctgaagcaggtgaagt

SEQ ID NO: 4903487 - DNA, 25 bp, Homo sapien
cgcataatccttgaatccctcatgg

SEQ ID NO: 4903488 - DNA, 25 bp, Homo sapien
atccttgaatccctcatggccattg

SEQ ID NO: 4903489 - DNA, 25 bp, Homo sapien
gcataatccttgaatccctcatggc

SEQ ID NO: 4903490 - DNA, 25 bp, Homo sapien
taatccttgaatccctcatggccat

SEQ ID NO: 4903491 - DNA, 25 bp, Homo sapien
gattaagtgttctactaccaagcca

SEQ ID NO: 4903492 - DNA, 25 bp, Homo sapien
taaaccatggagtggatgaatgcag

SEQ ID NO: 4903493 - DNA, 25 bp, Homo sapien
cagaagcagcaggataacagaaagc

SEQ ID NO: 4903494 - DNA, 25 bp, Homo sapien
aggacccacatgatctaaaccatgg

SEQ ID NO: 4903495 - DNA, 25 bp, Homo sapien
tttccctgtgttattttggcatctt

SEQ ID NO: 4903496 - DNA, 25 bp, Homo sapien
cctgtgttattttggcatctttttc

SEQ ID NO: 4903497 - DNA, 25 bp, Homo sapien
tccctgtgttattttggcatctttt

SEQ ID NO: 4903498 - DNA, 25 bp, Homo sapien
catccagtttttatgttttccctgt

SEQ ID NO: 4903499 - DNA, 25 bp, Homo sapien
ccattcagaggatagtgtaaacaga

SEQ ID NO: 4903500 - DNA, 25 bp, Homo sapien
gtatgccccaaggtgctattgctta

SEQ ID NO: 4903501 - DNA, 25 bp, Homo sapien
tggcttccctctataaacctattcg

SEQ ID NO: 4903502 - DNA, 25 bp, Homo sapien
caaactgctgtcaagctgcactgaa

SEQ ID NO: 4903503 - DNA, 25 bp, Homo sapien
tcaatgaaattatgctgggtattgc

SEQ ID NO: 4903504 - DNA, 25 bp, Homo sapien
gactgatagactgaatgtggtcaat

SEQ ID NO: 4903505 - DNA, 25 bp, Homo sapien
ctgtggagcaaacctaaagtctagg

SEQ ID NO: 4903506 - DNA, 25 bp, Homo sapien
gggtattgcttattcaggctcttga

SEQ ID NO: 4903507 - DNA, 25 bp, Homo sapien
tcacataacttcaaatgggaggata

SEQ ID NO: 4903508 - DNA, 25 bp, Homo sapien
cttcaaatgggaggataagcaaaac

SEQ ID NO: 4903509 - DNA, 25 bp, Homo sapien
ctgtggtttggctgcctttcctaag

SEQ ID NO: 4903510 - DNA, 25 bp, Homo sapien
aatgggaggataagcaaaactccaa

SEQ ID NO: 4903511 - DNA, 25 bp, Homo sapien
gctgaactgggactattgtctctgc

SEQ ID NO: 4903512 - DNA, 25 bp, Homo sapien
tcagatgctgggttaataggaatag

SEQ ID NO: 4903513 - DNA, 25 bp, Homo sapien
tttgcctgcaaggacttcagatgct

SEQ ID NO: 4903514 - DNA, 25 bp, Homo sapien
ctctgcttggttaggctttttgcct

SEQ ID NO: 4903515 - DNA, 25 bp, Homo sapien
gctgaaaggctgtccccagctcttg

SEQ ID NO: 4903516 - DNA, 25 bp, Homo sapien
ctctactttgtgactggaacacctt

SEQ ID NO: 4903517 - DNA, 25 bp, Homo sapien
cttgcacacagctattgcatctcta

SEQ ID NO: 4903518 - DNA, 25 bp, Homo sapien
gcacacagctattgcatctctactt

SEQ ID NO: 4903519 - DNA, 25 bp, Homo sapien
tgcatctctactttgtgactggaac

SEQ ID NO: 4903520 - DNA, 25 bp, Homo sapien
tgcggatgtaactggcgctgacccg

SEQ ID NO: 4903521 - DNA, 25 bp, Homo sapien
ggcacttctgagtcacgtcctcagc

SEQ ID NO: 4903522 - DNA, 25 bp, Homo sapien
ttcatggaattttggccggcacttc

SEQ ID NO: 4903523 - DNA, 25 bp, Homo sapien
tcagccacaggattccacctgcggc

SEQ ID NO: 4903524 - DNA, 25 bp, Homo sapien
tcttgtaaaacagcaaccacattgc

SEQ ID NO: 4903525 - DNA, 25 bp, Homo sapien
cattgccacatgtgcctggaatttg

SEQ ID NO: 4903526 - DNA, 25 bp, Homo sapien
gactttttcccgagcattcttgtaa

SEQ ID NO: 4903527 - DNA, 25 bp, Homo sapien
ctgagactttttcccgagcattctt

SEQ ID NO: 4903528 - DNA, 25 bp, Homo sapien
cagcttgccaatattgttgcttctg

SEQ ID NO: 4903529 - DNA, 25 bp, Homo sapien
tccgggattctctacccaagccaaa

SEQ ID NO: 4903530 - DNA, 25 bp, Homo sapien
gatttatttgtcctccatccgggat

SEQ ID NO: 4903531 - DNA, 25 bp, Homo sapien
tcctcagcttgccaatattgttgct

SEQ ID NO: 4903532 - DNA, 25 bp, Homo sapien
ggcttgaaaacattgacactgatcc

SEQ ID NO: 4903533 - DNA, 25 bp, Homo sapien
tctggctctcctatgaggcttgaaa

SEQ ID NO: 4903534 - DNA, 25 bp, Homo sapien
tatagctggtaagtctgtgtctggg

SEQ ID NO: 4903535 - DNA, 25 bp, Homo sapien
cactgatccctgagaagacttgtca

SEQ ID NO: 4903536 - DNA, 25 bp, Homo sapien
taacagagctcgaaccaaatggctt

SEQ ID NO: 4903537 - DNA, 25 bp, Homo sapien
cagagctcgaaccaaatggcttttt

SEQ ID NO: 4903538 - DNA, 25 bp, Homo sapien
aattaacagagctcgaaccaaatgg

SEQ ID NO: 4903539 - DNA, 25 bp, Homo sapien
gagctcgaaccaaatggctttttgc

SEQ ID NO: 4903540 - DNA, 25 bp, Homo sapien
tacaggtggcaagtttcagcaagat

SEQ ID NO: 4903541 - DNA, 25 bp, Homo sapien
gttgtctgcttttacaggtggcaag

SEQ ID NO: 4903542 - DNA, 25 bp, Homo sapien
tctttttcccattaggttgtctgct

SEQ ID NO: 4903543 - DNA, 25 bp, Homo sapien
cattaggttgtctgcttttacaggt

SEQ ID NO: 4903544 - DNA, 25 bp, Homo sapien
ctctcctctcgtgcaaatcaatgga

SEQ ID NO: 4903545 - DNA, 25 bp, Homo sapien
aaatcaatggaaattgcctgtattt

SEQ ID NO: 4903546 - DNA, 25 bp, Homo sapien
tatttagacacatctcagtttctct

SEQ ID NO: 4903547 - DNA, 25 bp, Homo sapien
gcaaatcaatggaaattgcctgtat

SEQ ID NO: 4903548 - DNA, 25 bp, Homo sapien
ttattcccatcaacactgctccaag

SEQ ID NO: 4903549 - DNA, 25 bp, Homo sapien
ctccaaggaggtgccgaaacgctgg

SEQ ID NO: 4903550 - DNA, 25 bp, Homo sapien
tctggtagcctgaacaggaacctgc

SEQ ID NO: 4903551 - DNA, 25 bp, Homo sapien
gcctcattctgatcttgcgtctgtc

SEQ ID NO: 4903552 - DNA, 25 bp, Homo sapien
tctgggctggaactggttaactaag

SEQ ID NO: 4903553 - DNA, 25 bp, Homo sapien
tgggctggaactggttaactaagaa

SEQ ID NO: 4903554 - DNA, 25 bp, Homo sapien
ctgggctggaactggttaactaaga

SEQ ID NO: 4903555 - DNA, 25 bp, Homo sapien
tgaagaccacatgagaaacccaggg

SEQ ID NO: 4903556 - DNA, 25 bp, Homo sapien
aacccagggtctgggattggcttga

SEQ ID NO: 4903557 - DNA, 25 bp, Homo sapien
ctgaagaccacatgagaaacccagg

SEQ ID NO: 4903558 - DNA, 25 bp, Homo sapien
tggcttgagagtaaactgtttgcaa

SEQ ID NO: 4903559 - DNA, 25 bp, Homo sapien
ccagctcaagacttgtcagctccaa

SEQ ID NO: 4903560 - DNA, 25 bp, Homo sapien
tttagtaaatggtgcagggatggaa

SEQ ID NO: 4903561 - DNA, 25 bp, Homo sapien
tcacttttagtaaatggtgcaggga

SEQ ID NO: 4903562 - DNA, 25 bp, Homo sapien
tggaaataagcgggggaaccagctc

SEQ ID NO: 4903563 - DNA, 25 bp, Homo sapien
aggagatcacgtctcaccacgttgg

SEQ ID NO: 4903564 - DNA, 25 bp, Homo sapien
ttaaaggagatcacgtctcaccacg

SEQ ID NO: 4903565 - DNA, 25 bp, Homo sapien
gtaaagagtttgcaacagcctagct

SEQ ID NO: 4903566 - DNA, 25 bp, Homo sapien
cacaataaatgtacccagagtaact

SEQ ID NO: 4903567 - DNA, 25 bp, Homo sapien
tgcagttgtcctgttttcttctgcc

SEQ ID NO: 4903568 - DNA, 25 bp, Homo sapien
ctgcagttgtcctgttttcttctgc

SEQ ID NO: 4903569 - DNA, 25 bp, Homo sapien
tcctgttttcttctgccacaccagc

SEQ ID NO: 4903570 - DNA, 25 bp, Homo sapien
tgttttcttctgccacaccagccat

SEQ ID NO: 4903571 - DNA, 25 bp, Homo sapien
cacagctttgtcctcctgacagaca

SEQ ID NO: 4903572 - DNA, 25 bp, Homo sapien
caatccatccagatgcttgggcagc

SEQ ID NO: 4903573 - DNA, 25 bp, Homo sapien
agctacgtcagtaggagccatccct

SEQ ID NO: 4903574 - DNA, 25 bp, Homo sapien
ttaacaacgaaattgtgggtgatcc

SEQ ID NO: 4903575 - DNA, 25 bp, Homo sapien
gagttcttgatcagaagagtgtagg

SEQ ID NO: 4903576 - DNA, 25 bp, Homo sapien
gaaggttttcaccatagactggcag

SEQ ID NO: 4903577 - DNA, 25 bp, Homo sapien
cctttccatacaaggtggatggtgt

SEQ ID NO: 4903578 - DNA, 25 bp, Homo sapien
tccactggagatgtgttactcgaag

SEQ ID NO: 4903579 - DNA, 25 bp, Homo sapien
ctgttcatcattgtaataggtgctc

SEQ ID NO: 4903580 - DNA, 25 bp, Homo sapien
gtaataggtgctcttaattccgagg

SEQ ID NO: 4903581 - DNA, 25 bp, Homo sapien
ttccgaggttcagttgcaatgcagc

SEQ ID NO: 4903582 - DNA, 25 bp, Homo sapien
tcttaattccgaggttcagttgcaa

SEQ ID NO: 4903583 - DNA, 25 bp, Homo sapien
taacaactgtgtcggtggtaacaag

SEQ ID NO: 4903584 - DNA, 25 bp, Homo sapien
ggtaacaaggtggtaacaactgtgc

SEQ ID NO: 4903585 - DNA, 25 bp, Homo sapien
cagggcccacacctaacaactgtgt

SEQ ID NO: 4903586 - DNA, 25 bp, Homo sapien
aactgtgctgaaacactgagctgct

SEQ ID NO: 4903587 - DNA, 25 bp, Homo sapien
caaacaaattattctgcaacgattg

SEQ ID NO: 4903588 - DNA, 25 bp, Homo sapien
tctgcaacgattgatcgtgtcgcac

SEQ ID NO: 4903589 - DNA, 25 bp, Homo sapien
tgtggcccatgatgcctcttcaaac

SEQ ID NO: 4903590 - DNA, 25 bp, Homo sapien
tgatcgtgtcgcactccctttagat

SEQ ID NO: 4903591 - DNA, 25 bp, Homo sapien
gttccagggttgtcagctgggtcca

SEQ ID NO: 4903592 - DNA, 25 bp, Homo sapien
aaagtcgcagatatgggagagactc

SEQ ID NO: 4903593 - DNA, 25 bp, Homo sapien
ctgggtccaaaagtcgcagatatgg

SEQ ID NO: 4903594 - DNA, 25 bp, Homo sapien
atagaccacaagtccatcagccaca

SEQ ID NO: 4903595 - DNA, 25 bp, Homo sapien
ggctgtgtgggatatttggcatctc

SEQ ID NO: 4903596 - DNA, 25 bp, Homo sapien
ctgaaatctgataggggctgtgtgg

SEQ ID NO: 4903597 - DNA, 25 bp, Homo sapien
gatatttggcatctctctgcactcc

SEQ ID NO: 4903598 - DNA, 25 bp, Homo sapien
tgcactccacactgtgtgcaggtag

SEQ ID NO: 4903599 - DNA, 25 bp, Homo sapien
tggcatttcctctgaagcaagttga

SEQ ID NO: 4903600 - DNA, 25 bp, Homo sapien
acagagctccacatcgttctgtggt

SEQ ID NO: 4903601 - DNA, 25 bp, Homo sapien
cccgaacgtttcttccatgtgtggc

SEQ ID NO: 4903602 - DNA, 25 bp, Homo sapien
caggcatatgtaaccaaattgtcaa

SEQ ID NO: 4903603 - DNA, 25 bp, Homo sapien
aatgaggttatgtctccaaagaact

SEQ ID NO: 4903604 - DNA, 25 bp, Homo sapien
aaggcatcaacatgcaaagtggcgg

SEQ ID NO: 4903605 - DNA, 25 bp, Homo sapien
caaagaactttgagttccttggaag

SEQ ID NO: 4903606 - DNA, 25 bp, Homo sapien
cactgagtagggtttcacagctgtc

SEQ ID NO: 4903607 - DNA, 25 bp, Homo sapien
tatctgagctcatatctattacgaa

SEQ ID NO: 4903608 - DNA, 25 bp, Homo sapien
gctcatatctattacgaaaatcaag

SEQ ID NO: 4903609 - DNA, 25 bp, Homo sapien
aaatcaagctgcatgtttttccagg

SEQ ID NO: 4903610 - DNA, 25 bp, Homo sapien
tattacgaaaatcaagctgcatgtt

SEQ ID NO: 4903611 - DNA, 25 bp, Homo sapien
agcaataactgccacccgtttcaaa

SEQ ID NO: 4903612 - DNA, 25 bp, Homo sapien
agcatgcgattcagccacttggact

SEQ ID NO: 4903613 - DNA, 25 bp, Homo sapien
actgccacccgtttcaaaggaactg

SEQ ID NO: 4903614 - DNA, 25 bp, Homo sapien
cacttggactccagcaataactgcc

SEQ ID NO: 4903615 - DNA, 25 bp, Homo sapien
gtgtcattgtaaatgtctttacctt

SEQ ID NO: 4903616 - DNA, 25 bp, Homo sapien
cattgtaaatgtctttaccttgaag

SEQ ID NO: 4903617 - DNA, 25 bp, Homo sapien
gccagttggtgtattgtagggtgca

SEQ ID NO: 4903618 - DNA, 25 bp, Homo sapien
tcaaatgatggaactgccagttggt

SEQ ID NO: 4903619 - DNA, 25 bp, Homo sapien
cttgtcagggcctggaacacactgt

SEQ ID NO: 4903620 - DNA, 25 bp, Homo sapien
tgtgctgtcccttggggaaagccct

SEQ ID NO: 4903621 - DNA, 25 bp, Homo sapien
ctcttgtcagggcctggaacacact

SEQ ID NO: 4903622 - DNA, 25 bp, Homo sapien
ggaacacactgtgctgtcccttggg

SEQ ID NO: 4903623 - DNA, 25 bp, Homo sapien
agtcttccaagatgattaatagagc

SEQ ID NO: 4903624 - DNA, 25 bp, Homo sapien
gatgattaatagagcaagtatttct

SEQ ID NO: 4903625 - DNA, 25 bp, Homo sapien
ccaagatgattaatagagcaagtat

SEQ ID NO: 4903626 - DNA, 25 bp, Homo sapien
tcttccaagatgattaatagagcaa

SEQ ID NO: 4903627 - DNA, 25 bp, Homo sapien
tcttgaaaagtatgactcagctgta

SEQ ID NO: 4903628 - DNA, 25 bp, Homo sapien
tcctaagcagcctgaattgttcttc

SEQ ID NO: 4903629 - DNA, 25 bp, Homo sapien
gctgtaagtcgtgcacatacacagg

SEQ ID NO: 4903630 - DNA, 25 bp, Homo sapien
ttcttcttgtctggtctgcatccca

SEQ ID NO: 4903631 - DNA, 25 bp, Homo sapien
tctttgaaactgtgcaagggaaaca

SEQ ID NO: 4903632 - DNA, 25 bp, Homo sapien
tcaacctgttctgggctactgatag

SEQ ID NO: 4903633 - DNA, 25 bp, Homo sapien
gaacttcttttgacaagggagccca

SEQ ID NO: 4903634 - DNA, 25 bp, Homo sapien
gaaacagggcacttcatgttattct

SEQ ID NO: 4903635 - DNA, 25 bp, Homo sapien
gtgccaggagagcttcagagtatgc

SEQ ID NO: 4903636 - DNA, 25 bp, Homo sapien
gcttcagagtatgccaggagagctt

SEQ ID NO: 4903637 - DNA, 25 bp, Homo sapien
gagagcttcagagtatgccaggaga

SEQ ID NO: 4903638 - DNA, 25 bp, Homo sapien
caggagagcttcagagtatgccagg

SEQ ID NO: 4903639 - DNA, 25 bp, Homo sapien
caaaggaaaggtctgcggagccatt

SEQ ID NO: 4903640 - DNA, 25 bp, Homo sapien
tccaaaggaaaggtctgcggagcca

SEQ ID NO: 4903641 - DNA, 25 bp, Homo sapien
aaggtctgcggagccattgtagatc

SEQ ID NO: 4903642 - DNA, 25 bp, Homo sapien
tgcggagccattgtagatctgtttc

SEQ ID NO: 4903643 - DNA, 25 bp, Homo sapien
ataaggtagattgaaatgaactgcc

SEQ ID NO: 4903644 - DNA, 25 bp, Homo sapien
cttttccatgacggcttttcttgat

SEQ ID NO: 4903645 - DNA, 25 bp, Homo sapien
tgggtcactctcagttctagcttat

SEQ ID NO: 4903646 - DNA, 25 bp, Homo sapien
gaaatgaactgccttgtcccctggt

SEQ ID NO: 4903647 - DNA, 25 bp, Homo sapien
tcacagacattgacgtcagtatcag

SEQ ID NO: 4903648 - DNA, 25 bp, Homo sapien
tttggtgtgggaacaataagcaagc

SEQ ID NO: 4903649 - DNA, 25 bp, Homo sapien
cctctcttgggcgattcacagacat

SEQ ID NO: 4903650 - DNA, 25 bp, Homo sapien
gactcatagcggaacttacagggaa

SEQ ID NO: 4903651 - DNA, 25 bp, Homo sapien
gcaataattgctaccagaccacatt

SEQ ID NO: 4903652 - DNA, 25 bp, Homo sapien
tattgattcttgacagttgccagct

SEQ ID NO: 4903653 - DNA, 25 bp, Homo sapien
cctccttcaattcctagcgtgctaa

SEQ ID NO: 4903654 - DNA, 25 bp, Homo sapien
ttaaagctgcccctggcattcgcaa

SEQ ID NO: 4903655 - DNA, 25 bp, Homo sapien
cctttctttctctcttgtctctcct

SEQ ID NO: 4903656 - DNA, 25 bp, Homo sapien
ctttctctcttgtctctcctttctt

SEQ ID NO: 4903657 - DNA, 25 bp, Homo sapien
ttctctcttgtctctcctttctttc

SEQ ID NO: 4903658 - DNA, 25 bp, Homo sapien
ttctttctctcttgtctctcctttc

SEQ ID NO: 4903659 - DNA, 25 bp, Homo sapien
ccattgggaattacgtccagcattg

SEQ ID NO: 4903660 - DNA, 25 bp, Homo sapien
ttccattgggaattacgtccagcat

SEQ ID NO: 4903661 - DNA, 25 bp, Homo sapien
tccattgggaattacgtccagcatt

SEQ ID NO: 4903662 - DNA, 25 bp, Homo sapien
ttctccaatacatacagggctagag

SEQ ID NO: 4903663 - DNA, 25 bp, Homo sapien
gaaagctatggcatgaatcagtccc

SEQ ID NO: 4903664 - DNA, 25 bp, Homo sapien
tatgggctgggagagaacagttttc

SEQ ID NO: 4903665 - DNA, 25 bp, Homo sapien
tagttgaggttctaacagctaatcc

SEQ ID NO: 4903666 - DNA, 25 bp, Homo sapien
ggcttagtgtttgggtcacttttca

SEQ ID NO: 4903667 - DNA, 25 bp, Homo sapien
tgcttccctccggttgctccaccta

SEQ ID NO: 4903668 - DNA, 25 bp, Homo sapien
aagctggaatgctggttggcttagt

SEQ ID NO: 4903669 - DNA, 25 bp, Homo sapien
ttgctccacctaggcggcgcagaag

SEQ ID NO: 4903670 - DNA, 25 bp, Homo sapien
tccaagccggacaaaacaaatgcgc

SEQ ID NO: 4903671 - DNA, 25 bp, Homo sapien
acaaatgcgctttatctgcaagtaa

SEQ ID NO: 4903672 - DNA, 25 bp, Homo sapien
gcaagtaagattggcttccgagggc

SEQ ID NO: 4903673 - DNA, 25 bp, Homo sapien
gatatatcatgcagaggcctggcga

SEQ ID NO: 4903674 - DNA, 25 bp, Homo sapien
aggtggctgcagcaagaagtccctg

SEQ ID NO: 4903675 - DNA, 25 bp, Homo sapien
caacttagacgccttcccctaagag

SEQ ID NO: 4903676 - DNA, 25 bp, Homo sapien
gctgctagaagcctgtgtggctcag

SEQ ID NO: 4903677 - DNA, 25 bp, Homo sapien
tcatttgttccctgtcaacaagcct

SEQ ID NO: 4903678 - DNA, 25 bp, Homo sapien
tcatttgacgagagtatgtgcagaa

SEQ ID NO: 4903679 - DNA, 25 bp, Homo sapien
tctaggtctcagtcagtttaagttg

SEQ ID NO: 4903680 - DNA, 25 bp, Homo sapien
tgcctttgggaacagtgacacacaa

SEQ ID NO: 4903681 - DNA, 25 bp, Homo sapien
tctgtgaagcatgtaacaccaagaa

SEQ ID NO: 4903682 - DNA, 25 bp, Homo sapien
tatctcttgggactgtcaccctcga

SEQ ID NO: 4903683 - DNA, 25 bp, Homo sapien
ctctcacagggggagtatcttcttt

SEQ ID NO: 4903684 - DNA, 25 bp, Homo sapien
gagatgatcatcgtaggagtcctcc

SEQ ID NO: 4903685 - DNA, 25 bp, Homo sapien
tgtcaccctcgagatgatcatcgta

SEQ ID NO: 4903686 - DNA, 25 bp, Homo sapien
ctccctttctgatcacggggacact

SEQ ID NO: 4903687 - DNA, 25 bp, Homo sapien
cctttctgatcacggggacactcac

SEQ ID NO: 4903688 - DNA, 25 bp, Homo sapien
tctgatcacggggacactcacgctc

SEQ ID NO: 4903689 - DNA, 25 bp, Homo sapien
ttctgatcacggggacactcacgct

SEQ ID NO: 4903690 - DNA, 25 bp, Homo sapien
ttcagccaaaaccagggccagctgc

SEQ ID NO: 4903691 - DNA, 25 bp, Homo sapien
gaactgtagcaagcagtgcccgtga

SEQ ID NO: 4903692 - DNA, 25 bp, Homo sapien
tggaggcccctgccgaactgtagca

SEQ ID NO: 4903693 - DNA, 25 bp, Homo sapien
tttcctgcctatccggggagctggg

SEQ ID NO: 4903694 - DNA, 25 bp, Homo sapien
aggctgtgggatttgcagatcatct

SEQ ID NO: 4903695 - DNA, 25 bp, Homo sapien
ggctgtgggatttgcagatcatctg

SEQ ID NO: 4903696 - DNA, 25 bp, Homo sapien
tcaaggcactagctttcgtttcatg

SEQ ID NO: 4903697 - DNA, 25 bp, Homo sapien
tagctttcgtttcatgaacaggctg

SEQ ID NO: 4903698 - DNA, 25 bp, Homo sapien
ccacactgttgagggaatatcctca

SEQ ID NO: 4903699 - DNA, 25 bp, Homo sapien
tctttgctgccaaacaacagtgcca

SEQ ID NO: 4903700 - DNA, 25 bp, Homo sapien
ggcccacactgttgagggaatatcc

SEQ ID NO: 4903701 - DNA, 25 bp, Homo sapien
gtgccagtgtaagctttctcatctc

SEQ ID NO: 4903702 - DNA, 25 bp, Homo sapien
agttgagggtgatacattaaatgaa

SEQ ID NO: 4903703 - DNA, 25 bp, Homo sapien
tgagggtgatacattaaatgaatgg

SEQ ID NO: 4903704 - DNA, 25 bp, Homo sapien
gggtgatacattaaatgaatgggct

SEQ ID NO: 4903705 - DNA, 25 bp, Homo sapien
tgaatgatgagaagttgagggtgat

SEQ ID NO: 4903706 - DNA, 25 bp, Homo sapien
tgagtaatctcttgtaaccagatgc

SEQ ID NO: 4903707 - DNA, 25 bp, Homo sapien
atctcttgtaaccagatgctgtttg

SEQ ID NO: 4903708 - DNA, 25 bp, Homo sapien
gagcgagttctctgtacagatacac

SEQ ID NO: 4903709 - DNA, 25 bp, Homo sapien
ctgcacaccagggatctcggagaat

SEQ ID NO: 4903710 - DNA, 25 bp, Homo sapien
gggccagggccctgatgaactgctg

SEQ ID NO: 4903711 - DNA, 25 bp, Homo sapien
caaacaatgagctgattggccacag

SEQ ID NO: 4903712 - DNA, 25 bp, Homo sapien
aactgctggtcaatttgggtgttgc

SEQ ID NO: 4903713 - DNA, 25 bp, Homo sapien
atttgggtgttgcaaccgctttcca

SEQ ID NO: 4903714 - DNA, 25 bp, Homo sapien
tctgctcctggttgacaggtggata

SEQ ID NO: 4903715 - DNA, 25 bp, Homo sapien
cagcacagcggaagtcataggagga

SEQ ID NO: 4903716 - DNA, 25 bp, Homo sapien
aataaagctgcctgaagtgaagaat

SEQ ID NO: 4903717 - DNA, 25 bp, Homo sapien
cataggaggaattcaattcagtctc

SEQ ID NO: 4903718 - DNA, 25 bp, Homo sapien
tgacatgccaactcttgtctgggct

SEQ ID NO: 4903719 - DNA, 25 bp, Homo sapien
cagtatccaacacagctgaagtaat

SEQ ID NO: 4903720 - DNA, 25 bp, Homo sapien
gctcttggtggattggcatgatgcc

SEQ ID NO: 4903721 - DNA, 25 bp, Homo sapien
tagcaacgatttctctcacttgtcc

SEQ ID NO: 4903722 - DNA, 25 bp, Homo sapien
ctgaggctctccttgagaaggtatc

SEQ ID NO: 4903723 - DNA, 25 bp, Homo sapien
gaggctctccttgagaaggtatcac

SEQ ID NO: 4903724 - DNA, 25 bp, Homo sapien
tgaggctctccttgagaaggtatca

SEQ ID NO: 4903725 - DNA, 25 bp, Homo sapien
gagagtaacatgcctggagttgtca

SEQ ID NO: 4903726 - DNA, 25 bp, Homo sapien
gtatttccacgtatagtgcacattc

SEQ ID NO: 4903727 - DNA, 25 bp, Homo sapien
tatttccacgtatagtgcacattcc

SEQ ID NO: 4903728 - DNA, 25 bp, Homo sapien
tccacgtatagtgcacattcctggt

SEQ ID NO: 4903729 - DNA, 25 bp, Homo sapien
tttccacgtatagtgcacattcctg

SEQ ID NO: 4903730 - DNA, 25 bp, Homo sapien
tctcagtcaaactgggccactcatg

SEQ ID NO: 4903731 - DNA, 25 bp, Homo sapien
tattttctgacatgtcaattaggtg

SEQ ID NO: 4903732 - DNA, 25 bp, Homo sapien
ccctttatgaccagtggcctggatc

SEQ ID NO: 4903733 - DNA, 25 bp, Homo sapien
tctgacatgtcaattaggtgattca

SEQ ID NO: 4903734 - DNA, 25 bp, Homo sapien
gtctctgatcatctaacacgtccat

SEQ ID NO: 4903735 - DNA, 25 bp, Homo sapien
tcattctcttgttcaccacgtcctt

SEQ ID NO: 4903736 - DNA, 25 bp, Homo sapien
tccatcacaacttgcagatgtgttg

SEQ ID NO: 4903737 - DNA, 25 bp, Homo sapien
ctctcagagatcagtaggaagcagt

SEQ ID NO: 4903738 - DNA, 25 bp, Homo sapien
caaagctcgataggtatttgagttc

SEQ ID NO: 4903739 - DNA, 25 bp, Homo sapien
tgaccattattcaaagctcgatagg

SEQ ID NO: 4903740 - DNA, 25 bp, Homo sapien
ggagatctactcacatgaccattat

SEQ ID NO: 4903741 - DNA, 25 bp, Homo sapien
ccaaaatgacaggcaaggagatcta

SEQ ID NO: 4903742 - DNA, 25 bp, Homo sapien
gaaaatctctttgtgcctcaggtgg

SEQ ID NO: 4903743 - DNA, 25 bp, Homo sapien
tttcaatatatggaatcatctgaga

SEQ ID NO: 4903744 - DNA, 25 bp, Homo sapien
tctgaaatgggctgtcattgtgtcc

SEQ ID NO: 4903745 - DNA, 25 bp, Homo sapien
cctcaggtggtcataatgatgtaca

SEQ ID NO: 4903746 - DNA, 25 bp, Homo sapien
agattcaactgtggagatatctttt

SEQ ID NO: 4903747 - DNA, 25 bp, Homo sapien
taactctagtttcctggatgtaaaa

SEQ ID NO: 4903748 - DNA, 25 bp, Homo sapien
tgtttgggacgtgagaatttcctga

SEQ ID NO: 4903749 - DNA, 25 bp, Homo sapien
tccttagtacccttgagaaaatcag

SEQ ID NO: 4903750 - DNA, 25 bp, Homo sapien
tagatgaatcagaaagactctctgc

SEQ ID NO: 4903751 - DNA, 25 bp, Homo sapien
agagggtcttatactgtggtttagg

SEQ ID NO: 4903752 - DNA, 25 bp, Homo sapien
gagcccaagtgccctgctgatactg

SEQ ID NO: 4903753 - DNA, 25 bp, Homo sapien
gattggagggtagacttttccacag

SEQ ID NO: 4903754 - DNA, 25 bp, Homo sapien
ggtttaggagcaacaagatgatcca

SEQ ID NO: 4903755 - DNA, 25 bp, Homo sapien
gcagtagaaggttaagtctgcagca

SEQ ID NO: 4903756 - DNA, 25 bp, Homo sapien
gtagaaggttaagtctgcagcatca

SEQ ID NO: 4903757 - DNA, 25 bp, Homo sapien
agaaggttaagtctgcagcatcagc

SEQ ID NO: 4903758 - DNA, 25 bp, Homo sapien
gaaggttaagtctgcagcatcagcc

SEQ ID NO: 4903759 - DNA, 25 bp, Homo sapien
agcaggtactccaagtcttgaagat

SEQ ID NO: 4903760 - DNA, 25 bp, Homo sapien
gcaggtactccaagtcttgaagata

SEQ ID NO: 4903761 - DNA, 25 bp, Homo sapien
aactcgctgtgagcattggcttgaa

SEQ ID NO: 4903762 - DNA, 25 bp, Homo sapien
acaaactcgctgtgagcattggctt

SEQ ID NO: 4903763 - DNA, 25 bp, Homo sapien
gaacagttcttaaagtaggagagtg

SEQ ID NO: 4903764 - DNA, 25 bp, Homo sapien
tcatggtttgccaggaacagttctt

SEQ ID NO: 4903765 - DNA, 25 bp, Homo sapien
cacaaagggcacattagtggttacg

SEQ ID NO: 4903766 - DNA, 25 bp, Homo sapien
cattagtggttacgaagccttttgg

SEQ ID NO: 4903767 - DNA, 25 bp, Homo sapien
tttgagacgtcaacgagaacgagcc

SEQ ID NO: 4903768 - DNA, 25 bp, Homo sapien
gcggcccaggcttgagaccacaaag

SEQ ID NO: 4903769 - DNA, 25 bp, Homo sapien
catcggcctagctcccgtgggttgg

SEQ ID NO: 4903770 - DNA, 25 bp, Homo sapien
gagcaaggtggacaatgacatcggc

SEQ ID NO: 4903771 - DNA, 25 bp, Homo sapien
cagacagagtgttactgggaaaggc

SEQ ID NO: 4903772 - DNA, 25 bp, Homo sapien
tccaggtcaggaaccgccctaggca

SEQ ID NO: 4903773 - DNA, 25 bp, Homo sapien
aaaacgtgctcaaacatccttgtgg

SEQ ID NO: 4903774 - DNA, 25 bp, Homo sapien
tagtatgctctacagcgagagcgca

SEQ ID NO: 4903775 - DNA, 25 bp, Homo sapien
tccttggcaaaggaggctaatctga

SEQ ID NO: 4903776 - DNA, 25 bp, Homo sapien
tagcgttttcctcaacgcgggaggc

SEQ ID NO: 4903777 - DNA, 25 bp, Homo sapien
gaccattctgggaatagcccggctg

SEQ ID NO: 4903778 - DNA, 25 bp, Homo sapien
tcgtgattaccaaagggcagagcag

SEQ ID NO: 4903779 - DNA, 25 bp, Homo sapien
tagtcccctcgcgattgaagttcat

SEQ ID NO: 4903780 - DNA, 25 bp, Homo sapien
cattcagagagttgcatagtcccct

SEQ ID NO: 4903781 - DNA, 25 bp, Homo sapien
ttctccacaggtaactccgtcggcg

SEQ ID NO: 4903782 - DNA, 25 bp, Homo sapien
caggagataccatactgcacagttg

SEQ ID NO: 4903783 - DNA, 25 bp, Homo sapien
gaaagtgcctgtaagcatgctcctg

SEQ ID NO: 4903784 - DNA, 25 bp, Homo sapien
aaacaataccagcaccgatttgaga

SEQ ID NO: 4903785 - DNA, 25 bp, Homo sapien
tcctcagagacactgactgtagctt

SEQ ID NO: 4903786 - DNA, 25 bp, Homo sapien
gcttctttgggtgagctctgtcctc

SEQ ID NO: 4903787 - DNA, 25 bp, Homo sapien
gactgtagcttttaatccctctttc

SEQ ID NO: 4903788 - DNA, 25 bp, Homo sapien
acatcagtttgtttaacgggcttct

SEQ ID NO: 4903789 - DNA, 25 bp, Homo sapien
agagccaagcagcagatgctcattc

SEQ ID NO: 4903790 - DNA, 25 bp, Homo sapien
gaataatttcagtgagaaggctccc

SEQ ID NO: 4903791 - DNA, 25 bp, Homo sapien
agctctgggaccatccccggtccgg

SEQ ID NO: 4903792 - DNA, 25 bp, Homo sapien
cttgtactaagaatgaggcaggctt

SEQ ID NO: 4903793 - DNA, 25 bp, Homo sapien
ctctttctgcctgcgcttgagttta

SEQ ID NO: 4903794 - DNA, 25 bp, Homo sapien
ctttctgcctgcgcttgagtttaca

SEQ ID NO: 4903795 - DNA, 25 bp, Homo sapien
tttctgcctgcgcttgagtttacag

SEQ ID NO: 4903796 - DNA, 25 bp, Homo sapien
tctttctgcctgcgcttgagtttac

SEQ ID NO: 4903797 - DNA, 25 bp, Homo sapien
gctttagttgctgcttcccaagcca

SEQ ID NO: 4903798 - DNA, 25 bp, Homo sapien
tgtgtccttgctccggaccctttgt

SEQ ID NO: 4903799 - DNA, 25 bp, Homo sapien
ggctctcgacttggggctgctgttc

SEQ ID NO: 4903800 - DNA, 25 bp, Homo sapien
ccaggtgcaccttcttctgaggaga

SEQ ID NO: 4903801 - DNA, 25 bp, Homo sapien
tattcacttgttccagaattatctg

SEQ ID NO: 4903802 - DNA, 25 bp, Homo sapien
ttattcacttgttccagaattatct

SEQ ID NO: 4903803 - DNA, 25 bp, Homo sapien
gggcttgcatgtctcatctgagtgt

SEQ ID NO: 4903804 - DNA, 25 bp, Homo sapien
tatattgctctaatcaatttcagac

SEQ ID NO: 4903805 - DNA, 25 bp, Homo sapien
ccttggatgtcctcgaagcttccca

SEQ ID NO: 4903806 - DNA, 25 bp, Homo sapien
gacagtctcctccagaacggtcgtg

SEQ ID NO: 4903807 - DNA, 25 bp, Homo sapien
ttggccacatagcactgggatgacc

SEQ ID NO: 4903808 - DNA, 25 bp, Homo sapien
gcttaccaggtcctattgtcaggtg

SEQ ID NO: 4903809 - DNA, 25 bp, Homo sapien
taagtgattgatatggtccaggccc

SEQ ID NO: 4903810 - DNA, 25 bp, Homo sapien
gagcaagtctatagcggaatttcca

SEQ ID NO: 4903811 - DNA, 25 bp, Homo sapien
agcgcggtgagatctgtatttttgg

SEQ ID NO: 4903812 - DNA, 25 bp, Homo sapien
cgcggtgagatctgtatttttggca

SEQ ID NO: 4903813 - DNA, 25 bp, Homo sapien
gtatttttggcaggacccagtccaa

SEQ ID NO: 4903814 - DNA, 25 bp, Homo sapien
gcggtgagatctgtatttttggcag

SEQ ID NO: 4903815 - DNA, 25 bp, Homo sapien
ccgtatctgaaagaggttattcggg

SEQ ID NO: 4903816 - DNA, 25 bp, Homo sapien
gagaagaatgggcaaagaagtaatc

SEQ ID NO: 4903817 - DNA, 25 bp, Homo sapien
aatttctaccttgaaccgtatctga

SEQ ID NO: 4903818 - DNA, 25 bp, Homo sapien
tctgtggatgcagctgttatgaaga

SEQ ID NO: 4903819 - DNA, 25 bp, Homo sapien
gacttcctgagaacctttataatga

SEQ ID NO: 4903820 - DNA, 25 bp, Homo sapien
gagggcactggacctgaacttgaag

SEQ ID NO: 4903821 - DNA, 25 bp, Homo sapien
gatcttgcctaaagagcagtggacc

SEQ ID NO: 4903822 - DNA, 25 bp, Homo sapien
gatgtttcgcattaagagggcactg

SEQ ID NO: 4903823 - DNA, 25 bp, Homo sapien
tgtaagtggccaagtttgtcgcgga

SEQ ID NO: 4903824 - DNA, 25 bp, Homo sapien
tcaaaatggctggtaagcaggccgg

SEQ ID NO: 4903825 - DNA, 25 bp, Homo sapien
ggcatcgtcgcgcttcaccgtttat

SEQ ID NO: 4903826 - DNA, 25 bp, Homo sapien
gaaaaggatgtgcttccccactcgt

SEQ ID NO: 4903827 - DNA, 25 bp, Homo sapien
tctgcagggcaatgtgccaatgtac

SEQ ID NO: 4903828 - DNA, 25 bp, Homo sapien
tgtaagatagatcattcatcagctt

SEQ ID NO: 4903829 - DNA, 25 bp, Homo sapien
cagctttagtgctgtatacaggact

SEQ ID NO: 4903830 - DNA, 25 bp, Homo sapien
cactttggctagtgtaagatagatc

SEQ ID NO: 4903831 - DNA, 25 bp, Homo sapien
gatacaggttgatgtatcctgtctc

SEQ ID NO: 4903832 - DNA, 25 bp, Homo sapien
tcatcttcagtgatacaggttgatg

SEQ ID NO: 4903833 - DNA, 25 bp, Homo sapien
tcttaggaccacaaaggctctgctc

SEQ ID NO: 4903834 - DNA, 25 bp, Homo sapien
tgtttcttaggaccacaaaggctct

SEQ ID NO: 4903835 - DNA, 25 bp, Homo sapien
tttacaacatgtgttatcctgggca

SEQ ID NO: 4903836 - DNA, 25 bp, Homo sapien
tgaactgttacgagtttccagagca

SEQ ID NO: 4903837 - DNA, 25 bp, Homo sapien
tgccttatgatcaccagattgggta

SEQ ID NO: 4903838 - DNA, 25 bp, Homo sapien
gattgggtagactgttaacactggg

SEQ ID NO: 4903839 - DNA, 25 bp, Homo sapien
caaactagtatctattcctgatgaa

SEQ ID NO: 4903840 - DNA, 25 bp, Homo sapien
cctatttaggaagagcacagtatga

SEQ ID NO: 4903841 - DNA, 25 bp, Homo sapien
cagtatgatccagcaaaacctaact

SEQ ID NO: 4903842 - DNA, 25 bp, Homo sapien
agacacttgtttcttacctatttag

SEQ ID NO: 4903843 - DNA, 25 bp, Homo sapien
accgcactcggcctatccttgattc

SEQ ID NO: 4903844 - DNA, 25 bp, Homo sapien
tccctggctgatgtagtgaaaactc

SEQ ID NO: 4903845 - DNA, 25 bp, Homo sapien
tgaggcatctctaccactcgaggaa

SEQ ID NO: 4903846 - DNA, 25 bp, Homo sapien
tcttttcagagcacgtagcccgctg

SEQ ID NO: 4903847 - DNA, 25 bp, Homo sapien
tcgccacaggtaaagcaggagctgc

SEQ ID NO: 4903848 - DNA, 25 bp, Homo sapien
agtcaatggtgatgtcctccacttg

SEQ ID NO: 4903849 - DNA, 25 bp, Homo sapien
cacttgctgctcgttgatcatccgg

SEQ ID NO: 4903850 - DNA, 25 bp, Homo sapien
gtatgcggccggtagaagaagtcaa

SEQ ID NO: 4903851 - DNA, 25 bp, Homo sapien
tacatgaggctgacgatggtgaagc

SEQ ID NO: 4903852 - DNA, 25 bp, Homo sapien
gttccacaggaagggatctaggttg

SEQ ID NO: 4903853 - DNA, 25 bp, Homo sapien
gaaagtggtgcatacgacatgattc

SEQ ID NO: 4903854 - DNA, 25 bp, Homo sapien
cctgtgtatggtgcctgcaggcgct

SEQ ID NO: 4903855 - DNA, 25 bp, Homo sapien
cgatcgtgctaggtgactcgcgtgc

SEQ ID NO: 4903856 - DNA, 25 bp, Homo sapien
ctccagatgttgtcttctggaacag

SEQ ID NO: 4903857 - DNA, 25 bp, Homo sapien
taacagagaggatgcctctccagat

SEQ ID NO: 4903858 - DNA, 25 bp, Homo sapien
agaaaataacagagaggatgcctct

SEQ ID NO: 4903859 - DNA, 25 bp, Homo sapien
gatgttgtcttctggaacagagtca

SEQ ID NO: 4903860 - DNA, 25 bp, Homo sapien
ccaccatgggggaaaagacaagcca

SEQ ID NO: 4903861 - DNA, 25 bp, Homo sapien
aggccaactaagatcccaccatggg

SEQ ID NO: 4903862 - DNA, 25 bp, Homo sapien
acgctaggtccaggccaactaagat

SEQ ID NO: 4903863 - DNA, 25 bp, Homo sapien
ttgtgggatgcaaagcacgctaggt

SEQ ID NO: 4903864 - DNA, 25 bp, Homo sapien
ctgaggaggagccccgcattccaca

SEQ ID NO: 4903865 - DNA, 25 bp, Homo sapien
ggaggagccccgcattccacagcat

SEQ ID NO: 4903866 - DNA, 25 bp, Homo sapien
ctttgcagagcctaagggtgtatgt

SEQ ID NO: 4903867 - DNA, 25 bp, Homo sapien
cagagcctaagggtgtatgtgccag

SEQ ID NO: 4903868 - DNA, 25 bp, Homo sapien
tcatcatcatgtgtgtgcgtttgca

SEQ ID NO: 4903869 - DNA, 25 bp, Homo sapien
catcatcatgtgtgtgcgtttgcat

SEQ ID NO: 4903870 - DNA, 25 bp, Homo sapien
gtcatcatcatgtgtgtgcgtttgc

SEQ ID NO: 4903871 - DNA, 25 bp, Homo sapien
tcatcatgtgtgtgcgtttgcatgt

SEQ ID NO: 4903872 - DNA, 25 bp, Homo sapien
caaaaaccattcgccataaggctgg

SEQ ID NO: 4903873 - DNA, 25 bp, Homo sapien
gctggatgaggtcgagtgaacggac

SEQ ID NO: 4903874 - DNA, 25 bp, Homo sapien
tcgccataaggctggatgaggtcga

SEQ ID NO: 4903875 - DNA, 25 bp, Homo sapien
aaccattcgccataaggctggatga

SEQ ID NO: 4903876 - DNA, 25 bp, Homo sapien
gaagagtaggaataccaggaacagg

SEQ ID NO: 4903877 - DNA, 25 bp, Homo sapien
tgcttcccttgtggcgtatcgaaga

SEQ ID NO: 4903878 - DNA, 25 bp, Homo sapien
cgtatcgaagatttggatctagcca

SEQ ID NO: 4903879 - DNA, 25 bp, Homo sapien
gatttaacctgctcgaaattcagga

SEQ ID NO: 4903880 - DNA, 25 bp, Homo sapien
ctacgagtttctccaagaggccact

SEQ ID NO: 4903881 - DNA, 25 bp, Homo sapien
caagaaagagtctacgagtttctcc

SEQ ID NO: 4903882 - DNA, 25 bp, Homo sapien
tacacccaagaaagagtctacgagt

SEQ ID NO: 4903883 - DNA, 25 bp, Homo sapien
gagtctacgagtttctccaagaggc

SEQ ID NO: 4903884 - DNA, 25 bp, Homo sapien
cctcacagacccctttgcgtaatga

SEQ ID NO: 4903885 - DNA, 25 bp, Homo sapien
taggtaactacacaggaaatacaga

SEQ ID NO: 4903886 - DNA, 25 bp, Homo sapien
gacccctttgcgtaatgagaggatt

SEQ ID NO: 4903887 - DNA, 25 bp, Homo sapien
cctgaactctatcacctgtggacaa

SEQ ID NO: 4903888 - DNA, 25 bp, Homo sapien
ccagccatgcagcaatttttgtggg

SEQ ID NO: 4903889 - DNA, 25 bp, Homo sapien
ccatgcagcaatttttgtgggtcag

SEQ ID NO: 4903890 - DNA, 25 bp, Homo sapien
aagcagcttgtggttgtctaatggg

SEQ ID NO: 4903891 - DNA, 25 bp, Homo sapien
gggtcaggccctgctttgcagaagc

SEQ ID NO: 4903892 - DNA, 25 bp, Homo sapien
ccaggaggaacaggctttaactgaa

SEQ ID NO: 4903893 - DNA, 25 bp, Homo sapien
caggaggaacaggctttaactgaag

SEQ ID NO: 4903894 - DNA, 25 bp, Homo sapien
gcagccagagagctgcatgcaggca

SEQ ID NO: 4903895 - DNA, 25 bp, Homo sapien
tccttgtcctggaagggccacaggg

SEQ ID NO: 4903896 - DNA, 25 bp, Homo sapien
cacagggcattgcagtttaaagcag

SEQ ID NO: 4903897 - DNA, 25 bp, Homo sapien
agggcattgcagtttaaagcagcca

SEQ ID NO: 4903898 - DNA, 25 bp, Homo sapien
gatttgccaattatcccctcataag

SEQ ID NO: 4903899 - DNA, 25 bp, Homo sapien
tttgccaattatcccctcataagac

SEQ ID NO: 4903900 - DNA, 25 bp, Homo sapien
acagatttgccaattatcccctcat

SEQ ID NO: 4903901 - DNA, 25 bp, Homo sapien
cagatttgccaattatcccctcata

SEQ ID NO: 4903902 - DNA, 25 bp, Homo sapien
gattgtccagcagagaccgtaacta

SEQ ID NO: 4903903 - DNA, 25 bp, Homo sapien
ccgtaactacggatcagcaaggcct

SEQ ID NO: 4903904 - DNA, 25 bp, Homo sapien
tatcaaagtggctgataatcctctc

SEQ ID NO: 4903905 - DNA, 25 bp, Homo sapien
cctctcccaggtgatcacatggcag

SEQ ID NO: 4903906 - DNA, 25 bp, Homo sapien
acaccatgaaggctcagacacgcac

SEQ ID NO: 4903907 - DNA, 25 bp, Homo sapien
accatgaaggctcagacacgcacag

SEQ ID NO: 4903908 - DNA, 25 bp, Homo sapien
caccatgaaggctcagacacgcaca

SEQ ID NO: 4903909 - DNA, 25 bp, Homo sapien
gaggtactttgttaagatgagatca

SEQ ID NO: 4903910 - DNA, 25 bp, Homo sapien
cagtgagctgctaatccaatatgac

SEQ ID NO: 4903911 - DNA, 25 bp, Homo sapien
gatcataggcagtacagtgagctgc

SEQ ID NO: 4903912 - DNA, 25 bp, Homo sapien
ttggagatagtcattggagaggtac

SEQ ID NO: 4903913 - DNA, 25 bp, Homo sapien
cttggctaatgacaacatgacaagg

SEQ ID NO: 4903914 - DNA, 25 bp, Homo sapien
tggctaatgacaacatgacaaggat

SEQ ID NO: 4903915 - DNA, 25 bp, Homo sapien
ttggctaatgacaacatgacaagga

SEQ ID NO: 4903916 - DNA, 25 bp, Homo sapien
tcccaccagcactcggcaaaattgg

SEQ ID NO: 4903917 - DNA, 25 bp, Homo sapien
agccaaatgccaccgccattgcaca

SEQ ID NO: 4903918 - DNA, 25 bp, Homo sapien
gcacaacaggatgtccagaatgact

SEQ ID NO: 4903919 - DNA, 25 bp, Homo sapien
caaaattggggaggagatgcatgaa

SEQ ID NO: 4903920 - DNA, 25 bp, Homo sapien
ttgaagcttgcccagtggtaagtcc

SEQ ID NO: 4903921 - DNA, 25 bp, Homo sapien
cttgcccagtggtaagtcctcatct

SEQ ID NO: 4903922 - DNA, 25 bp, Homo sapien
tcatctctaaaaaccggcaaacgac

SEQ ID NO: 4903923 - DNA, 25 bp, Homo sapien
cctcatctctaaaaaccggcaaacg

SEQ ID NO: 4903924 - DNA, 25 bp, Homo sapien
gctactctctgaaaagaagatttgg

SEQ ID NO: 4903925 - DNA, 25 bp, Homo sapien
atcgaacataggtccagctagcagg

SEQ ID NO: 4903926 - DNA, 25 bp, Homo sapien
cttcccggtggtggtatgaatgtcc

SEQ ID NO: 4903927 - DNA, 25 bp, Homo sapien
tgaaaaggtacactccagctactct

SEQ ID NO: 4903928 - DNA, 25 bp, Homo sapien
agaagaaggtattcaactcagtcag

SEQ ID NO: 4903929 - DNA, 25 bp, Homo sapien
gaataatggcgggaacacccaagct

SEQ ID NO: 4903930 - DNA, 25 bp, Homo sapien
caagcttatctcagttgtcctggag

SEQ ID NO: 4903931 - DNA, 25 bp, Homo sapien
gtatagatctactgtccttggcaag

SEQ ID NO: 4903932 - DNA, 25 bp, Homo sapien
cttggcaagtgaggcccgctgctta

SEQ ID NO: 4903933 - DNA, 25 bp, Homo sapien
cttgcactgtgtgtcggtgaggtaa

SEQ ID NO: 4903934 - DNA, 25 bp, Homo sapien
gtcggtgaggtaagcgtagtactgt

SEQ ID NO: 4903935 - DNA, 25 bp, Homo sapien
tcctacgcgcttgcactgtgtgtcg

SEQ ID NO: 4903936 - DNA, 25 bp, Homo sapien
ccagcattgtgttcctacgcgcttg

SEQ ID NO: 4903937 - DNA, 25 bp, Homo sapien
aaatctagtccacctgtcttcatag

SEQ ID NO: 4903938 - DNA, 25 bp, Homo sapien
taacacagggtcaagaaatacccaa

SEQ ID NO: 4903939 - DNA, 25 bp, Homo sapien
taagagagccatttctatactcttg

SEQ ID NO: 4903940 - DNA, 25 bp, Homo sapien
gtaactattcttaacttaaatcaga

SEQ ID NO: 4903941 - DNA, 25 bp, Homo sapien
attcccttgctggatggcgccctct

SEQ ID NO: 4903942 - DNA, 25 bp, Homo sapien
aatagagaaacagccgacctttcca

SEQ ID NO: 4903943 - DNA, 25 bp, Homo sapien
agaaacagccgacctttccacacgg

SEQ ID NO: 4903944 - DNA, 25 bp, Homo sapien
ctaaatagagaaacagccgaccttt

SEQ ID NO: 4903945 - DNA, 25 bp, Homo sapien
tggctgctgcatcccacacgcactg

SEQ ID NO: 4903946 - DNA, 25 bp, Homo sapien
ctgctgcatcccacacgcactgctc

SEQ ID NO: 4903947 - DNA, 25 bp, Homo sapien
gctgctgcatcccacacgcactgct

SEQ ID NO: 4903948 - DNA, 25 bp, Homo sapien
tgctgcatcccacacgcactgctcc

SEQ ID NO: 4903949 - DNA, 25 bp, Homo sapien
tcaaaagtgtagatggctctaaaca

SEQ ID NO: 4903950 - DNA, 25 bp, Homo sapien
tgccatcatcaaaagtgtagatggc

SEQ ID NO: 4903951 - DNA, 25 bp, Homo sapien
cagacatagtggtcactgccatcat

SEQ ID NO: 4903952 - DNA, 25 bp, Homo sapien
tggcagacatagtggtcactgccat

SEQ ID NO: 4903953 - DNA, 25 bp, Homo sapien
tgggtcttagagaagagatcttgtc

SEQ ID NO: 4903954 - DNA, 25 bp, Homo sapien
agcacaacatagagtatttgggtct

SEQ ID NO: 4903955 - DNA, 25 bp, Homo sapien
caacatagagtatttgggtcttaga

SEQ ID NO: 4903956 - DNA, 25 bp, Homo sapien
cttagagaagagatcttgtccaaat

SEQ ID NO: 4903957 - DNA, 25 bp, Homo sapien
aataatgttcgcctctactcctgag

SEQ ID NO: 4903958 - DNA, 25 bp, Homo sapien
gaaggcatggtgtaacttgaagctc

SEQ ID NO: 4903959 - DNA, 25 bp, Homo sapien
tcagggcctcttttcgggcgacgtc

SEQ ID NO: 4903960 - DNA, 25 bp, Homo sapien
tcctgagtctgcgatcaatcttgct

SEQ ID NO: 4903961 - DNA, 25 bp, Homo sapien
caggggagtaattaggggctttgct

SEQ ID NO: 4903962 - DNA, 25 bp, Homo sapien
caggccaggggagtaattaggggct

SEQ ID NO: 4903963 - DNA, 25 bp, Homo sapien
ttctgcattaatctcaagctccgtg

SEQ ID NO: 4903964 - DNA, 25 bp, Homo sapien
gcacccgggatctttgcttctgcat

SEQ ID NO: 4903965 - DNA, 25 bp, Homo sapien
gacaaccacgctcctggaaaagctt

SEQ ID NO: 4903966 - DNA, 25 bp, Homo sapien
tcaaattaatgacggccgagcagac

SEQ ID NO: 4903967 - DNA, 25 bp, Homo sapien
cacaagcagcgccactggttcattt

SEQ ID NO: 4903968 - DNA, 25 bp, Homo sapien
ggaacagtggcagcgtggagagaga

SEQ ID NO: 4903969 - DNA, 25 bp, Homo sapien
agaagcacaagcagcgccactggtt

SEQ ID NO: 4903970 - DNA, 25 bp, Homo sapien
tcctactaaacccacgtgcaaactg

SEQ ID NO: 4903971 - DNA, 25 bp, Homo sapien
aggaccgttcaatgcatttctgccg

SEQ ID NO: 4903972 - DNA, 25 bp, Homo sapien
cagtgggaatcaatgcaggaccgtt

SEQ ID NO: 4903973 - DNA, 25 bp, Homo sapien
aaagttcaatttcccagaacttcag

SEQ ID NO: 4903974 - DNA, 25 bp, Homo sapien
tctgccgtctggacgccggttacaa

SEQ ID NO: 4903975 - DNA, 25 bp, Homo sapien
ttttctcggtgaccatagtgttctg

SEQ ID NO: 4903976 - DNA, 25 bp, Homo sapien
tcatgccgtacagacagaggaaagt

SEQ ID NO: 4903977 - DNA, 25 bp, Homo sapien
tagtgttctgcataccaaatcatgc

SEQ ID NO: 4903978 - DNA, 25 bp, Homo sapien
ataccaaatcatgccgtacagacag

SEQ ID NO: 4903979 - DNA, 25 bp, Homo sapien
gcttccaaaagccagtccacagctt

SEQ ID NO: 4903980 - DNA, 25 bp, Homo sapien
tctactgaacagagccgtcacaagc

SEQ ID NO: 4903981 - DNA, 25 bp, Homo sapien
ggcctccacacagttcaagagctgg

SEQ ID NO: 4903982 - DNA, 25 bp, Homo sapien
gacaaaaatattggtctactgaaca

SEQ ID NO: 4903983 - DNA, 25 bp, Homo sapien
gcaaaaaggcgagcatgctgcatcc

SEQ ID NO: 4903984 - DNA, 25 bp, Homo sapien
ggtgatgcagaatcaatcttccaca

SEQ ID NO: 4903985 - DNA, 25 bp, Homo sapien
agagagacaggcttagtgcaggaat

SEQ ID NO: 4903986 - DNA, 25 bp, Homo sapien
gcaagtgacagaacctccctgtgct

SEQ ID NO: 4903987 - DNA, 25 bp, Homo sapien
gccaggagatctctggactgtaggt

SEQ ID NO: 4903988 - DNA, 25 bp, Homo sapien
ggagatctctggactgtaggtgcca

SEQ ID NO: 4903989 - DNA, 25 bp, Homo sapien
aggagatctctggactgtaggtgcc

SEQ ID NO: 4903990 - DNA, 25 bp, Homo sapien
caggagatctctggactgtaggtgc

SEQ ID NO: 4903991 - DNA, 25 bp, Homo sapien
tggagcctcttcttacaaaccaagt

SEQ ID NO: 4903992 - DNA, 25 bp, Homo sapien
tcttaataagtgacaggagacattc

SEQ ID NO: 4903993 - DNA, 25 bp, Homo sapien
tcccatcagggtgcttgaaatggtg

SEQ ID NO: 4903994 - DNA, 25 bp, Homo sapien
tgtgcctggccggatatacagttct

SEQ ID NO: 4903995 - DNA, 25 bp, Homo sapien
gaatgactgcaacagggcgctttct

SEQ ID NO: 4903996 - DNA, 25 bp, Homo sapien
atcagatttcacaacgggccgctca

SEQ ID NO: 4903997 - DNA, 25 bp, Homo sapien
ttcagtggagaacctgtaagtgcca

SEQ ID NO: 4903998 - DNA, 25 bp, Homo sapien
cattggcccaccgtttctctgagca

SEQ ID NO: 4903999 - DNA, 25 bp, Homo sapien
ccatcctgccctgcaaccaagggtt

SEQ ID NO: 4904000 - DNA, 25 bp, Homo sapien
atcctgccctgcaaccaagggtttc

SEQ ID NO: 4904001 - DNA, 25 bp, Homo sapien
tcctgccctgcaaccaagggtttcc

SEQ ID NO: 4904002 - DNA, 25 bp, Homo sapien
catcctgccctgcaaccaagggttt

SEQ ID NO: 4904003 - DNA, 25 bp, Homo sapien
caatagcgccccaaagtctgggtgg

SEQ ID NO: 4904004 - DNA, 25 bp, Homo sapien
caagtgaaacggaagcccaaacgag

SEQ ID NO: 4904005 - DNA, 25 bp, Homo sapien
ctagtactgaaggagcacacgcggt

SEQ ID NO: 4904006 - DNA, 25 bp, Homo sapien
ggccaaaggaatcagagcacaccgt

SEQ ID NO: 4904007 - DNA, 25 bp, Homo sapien
cctggaagaatggctttcgttgttg

SEQ ID NO: 4904008 - DNA, 25 bp, Homo sapien
tcctggaagaatggctttcgttgtt

SEQ ID NO: 4904009 - DNA, 25 bp, Homo sapien
ctggaagaatggctttcgttgttgc

SEQ ID NO: 4904010 - DNA, 25 bp, Homo sapien
ggaagaatggctttcgttgttgcct

SEQ ID NO: 4904011 - DNA, 25 bp, Homo sapien
tcatttctttccaacgccattggtg

SEQ ID NO: 4904012 - DNA, 25 bp, Homo sapien
catttctttccaacgccattggtga

SEQ ID NO: 4904013 - DNA, 25 bp, Homo sapien
tcaaataatgacccccaagtgccct

SEQ ID NO: 4904014 - DNA, 25 bp, Homo sapien
cctcctcacggggagttccaaatga

SEQ ID NO: 4904015 - DNA, 25 bp, Homo sapien
ctgtgcgcctcgacctcctcacggg

SEQ ID NO: 4904016 - DNA, 25 bp, Homo sapien
ttcctgcttgccctgtgcgcctcga

SEQ ID NO: 4904017 - DNA, 25 bp, Homo sapien
ctgaagttagaagagaccccacgtt

SEQ ID NO: 4904018 - DNA, 25 bp, Homo sapien
agaagagaccccacgttggcaaagg

SEQ ID NO: 4904019 - DNA, 25 bp, Homo sapien
cccaggcgatgatctgcctgacgcg

SEQ ID NO: 4904020 - DNA, 25 bp, Homo sapien
tgatctgcctgacgcggccaggtct

SEQ ID NO: 4904021 - DNA, 25 bp, Homo sapien
aacacaccgcgctgccaccggtgac

SEQ ID NO: 4904022 - DNA, 25 bp, Homo sapien
gctgccaccggtgaccgcatgtcaa

SEQ ID NO: 4904023 - DNA, 25 bp, Homo sapien
gtttcccttcaacacaccgcgctgc

SEQ ID NO: 4904024 - DNA, 25 bp, Homo sapien
ccgtttcccttcaacacaccgcgct

SEQ ID NO: 4904025 - DNA, 25 bp, Homo sapien
taatcggaagcgaggctcctatgca

SEQ ID NO: 4904026 - DNA, 25 bp, Homo sapien
caaacccgatgtaaaaggcacctag

SEQ ID NO: 4904027 - DNA, 25 bp, Homo sapien
caaggtcaaggttctagagcatggc

SEQ ID NO: 4904028 - DNA, 25 bp, Homo sapien
tatactcgccatgtggtaggaggtc

SEQ ID NO: 4904029 - DNA, 25 bp, Homo sapien
cctgttggtcacttgggtagtctaa

SEQ ID NO: 4904030 - DNA, 25 bp, Homo sapien
taagctaatcaactgggtactggcc

SEQ ID NO: 4904031 - DNA, 25 bp, Homo sapien
tcaatagaagataccagtaagatgc

SEQ ID NO: 4904032 - DNA, 25 bp, Homo sapien
gaaacatcagaacgaacctttgtgc

SEQ ID NO: 4904033 - DNA, 25 bp, Homo sapien
tggcctcagaggaagcacacatgct

SEQ ID NO: 4904034 - DNA, 25 bp, Homo sapien
gctccatcagttgcaacaaggcgaa

SEQ ID NO: 4904035 - DNA, 25 bp, Homo sapien
tgagcacattccaaagagcggatgt

SEQ ID NO: 4904036 - DNA, 25 bp, Homo sapien
cattccagggtgctacacggtggct

SEQ ID NO: 4904037 - DNA, 25 bp, Homo sapien
cagacgtcttagctcgccttacagt

SEQ ID NO: 4904038 - DNA, 25 bp, Homo sapien
tacggcatagcaacatgactgcagc

SEQ ID NO: 4904039 - DNA, 25 bp, Homo sapien
tggaacactgatagacagacgtctt

SEQ ID NO: 4904040 - DNA, 25 bp, Homo sapien
gagataggcccatcatcaggttaga

SEQ ID NO: 4904041 - DNA, 25 bp, Homo sapien
catacgtggatgttaccgagaacca

SEQ ID NO: 4904042 - DNA, 25 bp, Homo sapien
gattgcactcaagctgagcctggga

SEQ ID NO: 4904043 - DNA, 25 bp, Homo sapien
caaatgtagtccagagaaagcggca

SEQ ID NO: 4904044 - DNA, 25 bp, Homo sapien
taatattgatgaatggacctgcagc

SEQ ID NO: 4904045 - DNA, 25 bp, Homo sapien
tcaatggtcttcctccggattctgt

SEQ ID NO: 4904046 - DNA, 25 bp, Homo sapien
actacgtggatgttcattggcaacc

SEQ ID NO: 4904047 - DNA, 25 bp, Homo sapien
attggcaaccaggtcactcaatggt

SEQ ID NO: 4904048 - DNA, 25 bp, Homo sapien
agtcaggagtactacgtggatgttc

SEQ ID NO: 4904049 - DNA, 25 bp, Homo sapien
actgggtcaggctttataggcgtac

SEQ ID NO: 4904050 - DNA, 25 bp, Homo sapien
tgccagggacgcatgatctgactag

SEQ ID NO: 4904051 - DNA, 25 bp, Homo sapien
tcagggtctgcgtcttcattcagtc

SEQ ID NO: 4904052 - DNA, 25 bp, Homo sapien
tcttccgatgaagtgctgccaggga

SEQ ID NO: 4904053 - DNA, 25 bp, Homo sapien
tgtctcctctccactggtagcatta

SEQ ID NO: 4904054 - DNA, 25 bp, Homo sapien
cataaaaccaactgtagtagccaga

SEQ ID NO: 4904055 - DNA, 25 bp, Homo sapien
catagatttcgtgtgcactgtctcc

SEQ ID NO: 4904056 - DNA, 25 bp, Homo sapien
ttttagcccagtggagtgcttaggt

SEQ ID NO: 4904057 - DNA, 25 bp, Homo sapien
tgtgtttactccttggagctcaggc

SEQ ID NO: 4904058 - DNA, 25 bp, Homo sapien
agctctaatttttgatgagtacttc

SEQ ID NO: 4904059 - DNA, 25 bp, Homo sapien
ttgatgagtacttcttctgtcctgg

SEQ ID NO: 4904060 - DNA, 25 bp, Homo sapien
tttctgtgtttactccttggagctc

SEQ ID NO: 4904061 - DNA, 25 bp, Homo sapien
tgcccttcctccatgtgtagaagcc

SEQ ID NO: 4904062 - DNA, 25 bp, Homo sapien
ctgcccttcctccatgtgtagaagc

SEQ ID NO: 4904063 - DNA, 25 bp, Homo sapien
gcccttcctccatgtgtagaagcca

SEQ ID NO: 4904064 - DNA, 25 bp, Homo sapien
cccttcctccatgtgtagaagccat

SEQ ID NO: 4904065 - DNA, 25 bp, Homo sapien
acctgaaacattctgcccagccaaa

SEQ ID NO: 4904066 - DNA, 25 bp, Homo sapien
cctgaaacattctgcccagccaaaa

SEQ ID NO: 4904067 - DNA, 25 bp, Homo sapien
tgcccagccaaaataccgttccact

SEQ ID NO: 4904068 - DNA, 25 bp, Homo sapien
tctgcccagccaaaataccgttcca

SEQ ID NO: 4904069 - DNA, 25 bp, Homo sapien
gatgagcagaccattaccattcagt

SEQ ID NO: 4904070 - DNA, 25 bp, Homo sapien
aagacagatgagcagaccattacca

SEQ ID NO: 4904071 - DNA, 25 bp, Homo sapien
gcagaccattaccattcagtgtaaa

SEQ ID NO: 4904072 - DNA, 25 bp, Homo sapien
gctggcctcatgcagtttgcatgag

SEQ ID NO: 4904073 - DNA, 25 bp, Homo sapien
tagcctcatagtcagcaaggatagg

SEQ ID NO: 4904074 - DNA, 25 bp, Homo sapien
ggataggggtcatacacttggtcca

SEQ ID NO: 4904075 - DNA, 25 bp, Homo sapien
atgtaacttcctaatccctgttgtc

SEQ ID NO: 4904076 - DNA, 25 bp, Homo sapien
gatgctgttgtcgtctttcctccct

SEQ ID NO: 4904077 - DNA, 25 bp, Homo sapien
agaatcagggagtacatacgcaggt

SEQ ID NO: 4904078 - DNA, 25 bp, Homo sapien
ttagaatcagggagtacatacgcag

SEQ ID NO: 4904079 - DNA, 25 bp, Homo sapien
tagaatcagggagtacatacgcagg

SEQ ID NO: 4904080 - DNA, 25 bp, Homo sapien
gaatcagggagtacatacgcaggtt

SEQ ID NO: 4904081 - DNA, 25 bp, Homo sapien
ttacaaccagaattccactggttcc

SEQ ID NO: 4904082 - DNA, 25 bp, Homo sapien
gggatagcccaagactatttacaac

SEQ ID NO: 4904083 - DNA, 25 bp, Homo sapien
ttttccttgggatagcccaagacta

SEQ ID NO: 4904084 - DNA, 25 bp, Homo sapien
gcccaagactatttacaaccagaat

SEQ ID NO: 4904085 - DNA, 25 bp, Homo sapien
gaaggcacaccccaaggctcttggt

SEQ ID NO: 4904086 - DNA, 25 bp, Homo sapien
taacaagaagcgtggtgaatgctct

SEQ ID NO: 4904087 - DNA, 25 bp, Homo sapien
gatgagatgctcagtgacttgtttc

SEQ ID NO: 4904088 - DNA, 25 bp, Homo sapien
tacacgtgttgaagggatattatct

SEQ ID NO: 4904089 - DNA, 25 bp, Homo sapien
gatttgctggttctcacagttattg

SEQ ID NO: 4904090 - DNA, 25 bp, Homo sapien
caggaagtgcactccactgatttgc

SEQ ID NO: 4904091 - DNA, 25 bp, Homo sapien
gtcctcataagaggcctcgtctact

SEQ ID NO: 4904092 - DNA, 25 bp, Homo sapien
gtctactcgccagccttcaggcaag

SEQ ID NO: 4904093 - DNA, 25 bp, Homo sapien
gagccaccagcctagtgcccttatt

SEQ ID NO: 4904094 - DNA, 25 bp, Homo sapien
agccaccagcctagtgcccttattt

SEQ ID NO: 4904095 - DNA, 25 bp, Homo sapien
cagtggcctgcactgtagcctctac

SEQ ID NO: 4904096 - DNA, 25 bp, Homo sapien
gccaccagcctagtgcccttatttt

SEQ ID NO: 4904097 - DNA, 25 bp, Homo sapien
tagaacatggcaaatgcgtattccc

SEQ ID NO: 4904098 - DNA, 25 bp, Homo sapien
caatgtctgtggcatattatagaac

SEQ ID NO: 4904099 - DNA, 25 bp, Homo sapien
ggaatgcccactacaggaaaccaga

SEQ ID NO: 4904100 - DNA, 25 bp, Homo sapien
gaattatgacgccattctgctcctg

SEQ ID NO: 4904101 - DNA, 25 bp, Homo sapien
gggagcgcgcgatccgcgcggctgg

SEQ ID NO: 4904102 - DNA, 25 bp, Homo sapien
tgagcctgcttctccgggctcccct

SEQ ID NO: 4904103 - DNA, 25 bp, Homo sapien
agcagcgcgtccaagcggggccact

SEQ ID NO: 4904104 - DNA, 25 bp, Homo sapien
tacggcagaagtttaggggcagagc

SEQ ID NO: 4904105 - DNA, 25 bp, Homo sapien
aaggaataaattcgctggcttgaaa

SEQ ID NO: 4904106 - DNA, 25 bp, Homo sapien
tttaaggaataaattcgctggcttg

SEQ ID NO: 4904107 - DNA, 25 bp, Homo sapien
ggaataaattcgctggcttgaaagg

SEQ ID NO: 4904108 - DNA, 25 bp, Homo sapien
aataaattcgctggcttgaaaggga

SEQ ID NO: 4904109 - DNA, 25 bp, Homo sapien
tggttttgctcctccgcggactcct

SEQ ID NO: 4904110 - DNA, 25 bp, Homo sapien
tcccgacacggagttggtgctccgg

SEQ ID NO: 4904111 - DNA, 25 bp, Homo sapien
tgttggtttctgcactcccgacacg

SEQ ID NO: 4904112 - DNA, 25 bp, Homo sapien
tgctgtggttttgctcctccgcgga

SEQ ID NO: 4904113 - DNA, 25 bp, Homo sapien
ccgcagctgcgccccgggaacgcgg

SEQ ID NO: 4904114 - DNA, 25 bp, Homo sapien
cgcagctgcgccccgggaacgcggc

SEQ ID NO: 4904115 - DNA, 25 bp, Homo sapien
gcagctgcgccccgggaacgcggcg

SEQ ID NO: 4904116 - DNA, 25 bp, Homo sapien
ggctcgggggcgctcgcttcctcct

SEQ ID NO: 4904117 - DNA, 25 bp, Homo sapien
taccgcagcgattgcggctcaggct

SEQ ID NO: 4904118 - DNA, 25 bp, Homo sapien
gcgcacacgaatccggagcagagta

SEQ ID NO: 4904119 - DNA, 25 bp, Homo sapien
gggcaaaacgaagcctcctgcccag

SEQ ID NO: 4904120 - DNA, 25 bp, Homo sapien
gccgctgcttgcaaccagggcaaaa

SEQ ID NO: 4904121 - DNA, 25 bp, Homo sapien
tgagcaggatccacgcgcgccgcat

SEQ ID NO: 4904122 - DNA, 25 bp, Homo sapien
gtgagcaggatccacgcgcgccgca

SEQ ID NO: 4904123 - DNA, 25 bp, Homo sapien
ggtgagcaggatccacgcgcgccgc

SEQ ID NO: 4904124 - DNA, 25 bp, Homo sapien
ctgcgggctcctctcgtagcttcaa

SEQ ID NO: 4904125 - DNA, 25 bp, Homo sapien
gacgagcgcatttgtcccagcggat

SEQ ID NO: 4904126 - DNA, 25 bp, Homo sapien
agcggatctccggtgtatacttggg

SEQ ID NO: 4904127 - DNA, 25 bp, Homo sapien
gtggcgctcccctattccctgcggg

SEQ ID NO: 4904128 - DNA, 25 bp, Homo sapien
cgcggggtaacgccagcgagcagcg

SEQ ID NO: 4904129 - DNA, 25 bp, Homo sapien
ggtaacgccagcgagcagcgctttt

SEQ ID NO: 4904130 - DNA, 25 bp, Homo sapien
cggggtaacgccagcgagcagcgct

SEQ ID NO: 4904131 - DNA, 25 bp, Homo sapien
gggtaacgccagcgagcagcgcttt

SEQ ID NO: 4904132 - DNA, 25 bp, Homo sapien
tagaccaaaccgcaattctcggtgc

SEQ ID NO: 4904133 - DNA, 25 bp, Homo sapien
tgcggctagaccaaaccgcaattct

SEQ ID NO: 4904134 - DNA, 25 bp, Homo sapien
ggctagaccaaaccgcaattctcgg

SEQ ID NO: 4904135 - DNA, 25 bp, Homo sapien
tctgcggctagaccaaaccgcaatt

SEQ ID NO: 4904136 - DNA, 25 bp, Homo sapien
tactgcgattccacgtagtgtcggt

SEQ ID NO: 4904137 - DNA, 25 bp, Homo sapien
cagcattttcggacgcgttccgtgc

SEQ ID NO: 4904138 - DNA, 25 bp, Homo sapien
cccttgagggatcgcctactgcgat

SEQ ID NO: 4904139 - DNA, 25 bp, Homo sapien
gtcgccgcaggactgggaatccagt

SEQ ID NO: 4904140 - DNA, 25 bp, Homo sapien
tctgggccttgaaacagcttctatt

SEQ ID NO: 4904141 - DNA, 25 bp, Homo sapien
taagaattcactaactgtaggcagt

SEQ ID NO: 4904142 - DNA, 25 bp, Homo sapien
gctgctatacatgaaacaaacggag

SEQ ID NO: 4904143 - DNA, 25 bp, Homo sapien
ttttgagccttagttcctgagaacc

SEQ ID NO: 4904144 - DNA, 25 bp, Homo sapien
gcatgagatatcgcgccaggccaca

SEQ ID NO: 4904145 - DNA, 25 bp, Homo sapien
tgagatatcgcgccaggccacattt

SEQ ID NO: 4904146 - DNA, 25 bp, Homo sapien
gagatatcgcgccaggccacatttc

SEQ ID NO: 4904147 - DNA, 25 bp, Homo sapien
atgagatatcgcgccaggccacatt

SEQ ID NO: 4904148 - DNA, 25 bp, Homo sapien
gaaaatcaagtgtctccaagtcatc

SEQ ID NO: 4904149 - DNA, 25 bp, Homo sapien
tactttttacccgattacatatgat

SEQ ID NO: 4904150 - DNA, 25 bp, Homo sapien
tggagaatcaagactggttgaaata

SEQ ID NO: 4904151 - DNA, 25 bp, Homo sapien
accacttggaagtctttctttgaag

SEQ ID NO: 4904152 - DNA, 25 bp, Homo sapien
cgtgcccggccagctaaggctattt

SEQ ID NO: 4904153 - DNA, 25 bp, Homo sapien
ggccagctaaggctatttgatctaa

SEQ ID NO: 4904154 - DNA, 25 bp, Homo sapien
gctaaggctatttgatctaactgaa

SEQ ID NO: 4904155 - DNA, 25 bp, Homo sapien
tatttgatctaactgaacacctact

SEQ ID NO: 4904156 - DNA, 25 bp, Homo sapien
aaaccaatcgttctgcggctctttg

SEQ ID NO: 4904157 - DNA, 25 bp, Homo sapien
taggctttttataccatgaagcgaa

SEQ ID NO: 4904158 - DNA, 25 bp, Homo sapien
cattacaaagatcacatgactaggc

SEQ ID NO: 4904159 - DNA, 25 bp, Homo sapien
cactgtcagggctaggccaaggact

SEQ ID NO: 4904160 - DNA, 25 bp, Homo sapien
ccagcctccgtaactcccctgcagg

SEQ ID NO: 4904161 - DNA, 25 bp, Homo sapien
tctttagcaattgctcttcacattc

SEQ ID NO: 4904162 - DNA, 25 bp, Homo sapien
tttctttagcaattgctcttcacat

SEQ ID NO: 4904163 - DNA, 25 bp, Homo sapien
gaattcttaatactgcattcacagc

SEQ ID NO: 4904164 - DNA, 25 bp, Homo sapien
ctttagcaattgctcttcacattct

SEQ ID NO: 4904165 - DNA, 25 bp, Homo sapien
gaacagacatcagaaaggcataatc

SEQ ID NO: 4904166 - DNA, 25 bp, Homo sapien
cttgaaacttactggaggcttgact

SEQ ID NO: 4904167 - DNA, 25 bp, Homo sapien
gcaattctgatagttgtcaaggctg

SEQ ID NO: 4904168 - DNA, 25 bp, Homo sapien
gatttcttccgtcaatatgtcccca

SEQ ID NO: 4904169 - DNA, 25 bp, Homo sapien
taatacttcactttcaacgctgtgg

SEQ ID NO: 4904170 - DNA, 25 bp, Homo sapien
tccttgctcttatcagcttatattt

SEQ ID NO: 4904171 - DNA, 25 bp, Homo sapien
gaggatagcctcttcaaccggaaaa

SEQ ID NO: 4904172 - DNA, 25 bp, Homo sapien
tcaaatcctgacttccataaccaca

SEQ ID NO: 4904173 - DNA, 25 bp, Homo sapien
aacagagatgaactaaagtcaggta

SEQ ID NO: 4904174 - DNA, 25 bp, Homo sapien
aagtcaggtaagaaaatgcttctcc

SEQ ID NO: 4904175 - DNA, 25 bp, Homo sapien
tgaactaaagtcaggtaagaaaatg

SEQ ID NO: 4904176 - DNA, 25 bp, Homo sapien
gaaatttcttagataaacagagatg

SEQ ID NO: 4904177 - DNA, 25 bp, Homo sapien
tctgctgggtccattaatcaataca

SEQ ID NO: 4904178 - DNA, 25 bp, Homo sapien
ctgctgggtccattaatcaatacat

SEQ ID NO: 4904179 - DNA, 25 bp, Homo sapien
atacatggaaattcagacaaaaggc

SEQ ID NO: 4904180 - DNA, 25 bp, Homo sapien
aaaatggcaggctactcaaatacgt

SEQ ID NO: 4904181 - DNA, 25 bp, Homo sapien
gagctttgctgaagaaaacggtatt

SEQ ID NO: 4904182 - DNA, 25 bp, Homo sapien
tacacgaatagcctaatacttgagc

SEQ ID NO: 4904183 - DNA, 25 bp, Homo sapien
aatacgtatttcaatacaccagaat

SEQ ID NO: 4904184 - DNA, 25 bp, Homo sapien
tggcacccagggtcaataaagggat

SEQ ID NO: 4904185 - DNA, 25 bp, Homo sapien
ggagtaactgagaagtggccccatt

SEQ ID NO: 4904186 - DNA, 25 bp, Homo sapien
cattttggcaaccaagcttacgaag

SEQ ID NO: 4904187 - DNA, 25 bp, Homo sapien
taacaaggtactatagctcaggctg

SEQ ID NO: 4904188 - DNA, 25 bp, Homo sapien
tacagtttcttactaaggctaatac

SEQ ID NO: 4904189 - DNA, 25 bp, Homo sapien
ctaaggctaatacatagctaacttc

SEQ ID NO: 4904190 - DNA, 25 bp, Homo sapien
gggaatataagggtgggaaatatga

SEQ ID NO: 4904191 - DNA, 25 bp, Homo sapien
gctaatacatagctaacttctcaaa

SEQ ID NO: 4904192 - DNA, 25 bp, Homo sapien
cctccatggcaaggctgtaactgaa

SEQ ID NO: 4904193 - DNA, 25 bp, Homo sapien
tcatgtcatcacaccccacacagcc

SEQ ID NO: 4904194 - DNA, 25 bp, Homo sapien
accatcggcccttgtgtcaaatatg

SEQ ID NO: 4904195 - DNA, 25 bp, Homo sapien
tgtctcatgtcatcacaccccacac

SEQ ID NO: 4904196 - DNA, 25 bp, Homo sapien
tctcatgtcatcacaccccacacag

SEQ ID NO: 4904197 - DNA, 25 bp, Homo sapien
gcaagacaatgcctaggcctggtaa

SEQ ID NO: 4904198 - DNA, 25 bp, Homo sapien
cctggtaacggcaggaacaacagag

SEQ ID NO: 4904199 - DNA, 25 bp, Homo sapien
tgcctgcagaatacaagcctgtagt

SEQ ID NO: 4904200 - DNA, 25 bp, Homo sapien
tagaaaggtggagttaccaagctgc

SEQ ID NO: 4904201 - DNA, 25 bp, Homo sapien
ggatagtgatagtgcctacctcaag

SEQ ID NO: 4904202 - DNA, 25 bp, Homo sapien
cacttaccagctgcgggatctctct

SEQ ID NO: 4904203 - DNA, 25 bp, Homo sapien
tagcatcctgcgtgttagatcaaca

SEQ ID NO: 4904204 - DNA, 25 bp, Homo sapien
gggatagtcgctgaaaccctggcac

SEQ ID NO: 4904205 - DNA, 25 bp, Homo sapien
cgctaatgatactattattgctccc

SEQ ID NO: 4904206 - DNA, 25 bp, Homo sapien
gatccaaaggcgctaatgatactat

SEQ ID NO: 4904207 - DNA, 25 bp, Homo sapien
cagtgacttcacagcgccaggatcc

SEQ ID NO: 4904208 - DNA, 25 bp, Homo sapien
ttcacagcgccaggatccaaaggcg

SEQ ID NO: 4904209 - DNA, 25 bp, Homo sapien
ggtggtcacaacaatctgaccaatc

SEQ ID NO: 4904210 - DNA, 25 bp, Homo sapien
cataactaagctggtggtcacaaca

SEQ ID NO: 4904211 - DNA, 25 bp, Homo sapien
acagttttcctggtccgtgtcataa

SEQ ID NO: 4904212 - DNA, 25 bp, Homo sapien
ctggtccgtgtcataactaagctgg

SEQ ID NO: 4904213 - DNA, 25 bp, Homo sapien
gtaaaacagtaagcttcatgcatgg

SEQ ID NO: 4904214 - DNA, 25 bp, Homo sapien
aactagagtacagccacacaatgga

SEQ ID NO: 4904215 - DNA, 25 bp, Homo sapien
taaaccattgtcaagccatgccgcc

SEQ ID NO: 4904216 - DNA, 25 bp, Homo sapien
tgtacattaacagaagtcagtgcct

SEQ ID NO: 4904217 - DNA, 25 bp, Homo sapien
aagcgagaggtttgcagccatgtta

SEQ ID NO: 4904218 - DNA, 25 bp, Homo sapien
ttttggaatatcaaacagagagaag

SEQ ID NO: 4904219 - DNA, 25 bp, Homo sapien
ccttttttggaatatcaaacagaga

SEQ ID NO: 4904220 - DNA, 25 bp, Homo sapien
gatgtgctccgcattgagctttctt

SEQ ID NO: 4904221 - DNA, 25 bp, Homo sapien
tgatctttctgcgtcctctcccttg

SEQ ID NO: 4904222 - DNA, 25 bp, Homo sapien
gggctcttcttataccactgagaaa

SEQ ID NO: 4904223 - DNA, 25 bp, Homo sapien
cctgttggatgcctcttatagagtg

SEQ ID NO: 4904224 - DNA, 25 bp, Homo sapien
aagatgcccaagacccaggcctgag

SEQ ID NO: 4904225 - DNA, 25 bp, Homo sapien
tacccaaaccccaggcaccaataca

SEQ ID NO: 4904226 - DNA, 25 bp, Homo sapien
ccaggcaccaatacaaaaacaccaa

SEQ ID NO: 4904227 - DNA, 25 bp, Homo sapien
tggtgacactactttccttcgtatt

SEQ ID NO: 4904228 - DNA, 25 bp, Homo sapien
gctgcagttctagtctcagctgctg

SEQ ID NO: 4904229 - DNA, 25 bp, Homo sapien
gtctacagggctcccgggtggtctc

SEQ ID NO: 4904230 - DNA, 25 bp, Homo sapien
cctcagccactcagttacttggggt

SEQ ID NO: 4904231 - DNA, 25 bp, Homo sapien
cagttacttggggtctacagggctc

SEQ ID NO: 4904232 - DNA, 25 bp, Homo sapien
ttaaaggcagccaaaagtgtgtttc

SEQ ID NO: 4904233 - DNA, 25 bp, Homo sapien
cgagccagacgcagaagcgtagtca

SEQ ID NO: 4904234 - DNA, 25 bp, Homo sapien
caataggatacactcctgaagcttc

SEQ ID NO: 4904235 - DNA, 25 bp, Homo sapien
gcgtagtcatcgtcatcaataggat

SEQ ID NO: 4904236 - DNA, 25 bp, Homo sapien
gcttcttcaatggagctgttgtcaa

SEQ ID NO: 4904237 - DNA, 25 bp, Homo sapien
agcactagtcaacagtatctttgga

SEQ ID NO: 4904238 - DNA, 25 bp, Homo sapien
tatattcagcgtcgtggtttccact

SEQ ID NO: 4904239 - DNA, 25 bp, Homo sapien
ttccacttttggagcagcactagtc

SEQ ID NO: 4904240 - DNA, 25 bp, Homo sapien
gaagtggtcgagatgttgtcagctc

SEQ ID NO: 4904241 - DNA, 25 bp, Homo sapien
tgttgtgtacagtcagtaaagtgaa

SEQ ID NO: 4904242 - DNA, 25 bp, Homo sapien
tgtacagtcagtaaagtgaagcatt

SEQ ID NO: 4904243 - DNA, 25 bp, Homo sapien
cagtcagtaaagtgaagcatttgta

SEQ ID NO: 4904244 - DNA, 25 bp, Homo sapien
agcatttgtaataacctgataatgc

SEQ ID NO: 4904245 - DNA, 25 bp, Homo sapien
gagactaggaccacctcaagacgtg

SEQ ID NO: 4904246 - DNA, 25 bp, Homo sapien
tagtggatggtcagctaactgcaat

SEQ ID NO: 4904247 - DNA, 25 bp, Homo sapien
gagccatttataacaccacctgaag

SEQ ID NO: 4904248 - DNA, 25 bp, Homo sapien
tccttaagaaggagggccatgtgaa

SEQ ID NO: 4904249 - DNA, 25 bp, Homo sapien
ggtctcaggtgccatgctacatgca

SEQ ID NO: 4904250 - DNA, 25 bp, Homo sapien
taagccatatgttacccctgcactg

SEQ ID NO: 4904251 - DNA, 25 bp, Homo sapien
tacagaatggtgactaggtctcagg

SEQ ID NO: 4904252 - DNA, 25 bp, Homo sapien
gattgcaaagtctaccactacagtt

SEQ ID NO: 4904253 - DNA, 25 bp, Homo sapien
tcttactccaaggaaggcctgtcgc

SEQ ID NO: 4904254 - DNA, 25 bp, Homo sapien
gcacatgccaggtgagtcggtctca

SEQ ID NO: 4904255 - DNA, 25 bp, Homo sapien
cattctggcctgaagacgggatgat

SEQ ID NO: 4904256 - DNA, 25 bp, Homo sapien
taccgcctggcttgtgaagtctacc

SEQ ID NO: 4904257 - DNA, 25 bp, Homo sapien
taattggctgccttgtggaaagaca

SEQ ID NO: 4904258 - DNA, 25 bp, Homo sapien
tggaggtgcacaagcctcaagcggc

SEQ ID NO: 4904259 - DNA, 25 bp, Homo sapien
tgaacaaagcgtgcaatccagggat

SEQ ID NO: 4904260 - DNA, 25 bp, Homo sapien
gaatactcaggtttgtgactaggga

SEQ ID NO: 4904261 - DNA, 25 bp, Homo sapien
atttgtatcctcttcggctgggtcc

SEQ ID NO: 4904262 - DNA, 25 bp, Homo sapien
ctgtccgtttaaacagactgtctga

SEQ ID NO: 4904263 - DNA, 25 bp, Homo sapien
tgtctgagtgtttctcagtatacac

SEQ ID NO: 4904264 - DNA, 25 bp, Homo sapien
tctgagtcagagaggtgaactttct

SEQ ID NO: 4904265 - DNA, 25 bp, Homo sapien
gcataaaactccttagtaggtgcct

SEQ ID NO: 4904266 - DNA, 25 bp, Homo sapien
gccttctgataagcagcactggatg

SEQ ID NO: 4904267 - DNA, 25 bp, Homo sapien
ttctcatgcgatacaccaacagcag

SEQ ID NO: 4904268 - DNA, 25 bp, Homo sapien
tgcgttctccaaggtcatagcttcc

SEQ ID NO: 4904269 - DNA, 25 bp, Homo sapien
taaatagagacactaagttggagtt

SEQ ID NO: 4904270 - DNA, 25 bp, Homo sapien
ataaatagagacactaagttggagt

SEQ ID NO: 4904271 - DNA, 25 bp, Homo sapien
caacttggtaaggtcaatctgagac

SEQ ID NO: 4904272 - DNA, 25 bp, Homo sapien
aatctgcccaaagctacaggtaatg

SEQ ID NO: 4904273 - DNA, 25 bp, Homo sapien
ccatgacagctacaaaaggcatagg

SEQ ID NO: 4904274 - DNA, 25 bp, Homo sapien
taacaaatacagtggccaaaggaat

SEQ ID NO: 4904275 - DNA, 25 bp, Homo sapien
gttgcaaacttcgaaatcccctggc

SEQ ID NO: 4904276 - DNA, 25 bp, Homo sapien
tcttctgacttggacggctcacagt

SEQ ID NO: 4904277 - DNA, 25 bp, Homo sapien
ccttgagagcagacggccgttagca

SEQ ID NO: 4904278 - DNA, 25 bp, Homo sapien
tagataccaacatcaggaaagcccc

SEQ ID NO: 4904279 - DNA, 25 bp, Homo sapien
aattgaatttcactctgctttgcac

SEQ ID NO: 4904280 - DNA, 25 bp, Homo sapien
gggacacagcgtggctttagaaagc

SEQ ID NO: 4904281 - DNA, 25 bp, Homo sapien
tggcacggatattcccagcagttgt

SEQ ID NO: 4904282 - DNA, 25 bp, Homo sapien
ctttgcacagttagaggtataccca

SEQ ID NO: 4904283 - DNA, 25 bp, Homo sapien
ccaaaattttcctgaactcagtaat

SEQ ID NO: 4904284 - DNA, 25 bp, Homo sapien
ctgaactcagtaatcattactaaca

SEQ ID NO: 4904285 - DNA, 25 bp, Homo sapien
taccaaaattttcctgaactcagta

SEQ ID NO: 4904286 - DNA, 25 bp, Homo sapien
aactcagtaatcattactaacactt

SEQ ID NO: 4904287 - DNA, 25 bp, Homo sapien
gaaaaggccctgctaaagaccatat

SEQ ID NO: 4904288 - DNA, 25 bp, Homo sapien
agttgccacgattccatggtcagaa

SEQ ID NO: 4904289 - DNA, 25 bp, Homo sapien
taaactgtaagagtgaagtcaccca

SEQ ID NO: 4904290 - DNA, 25 bp, Homo sapien
tcttagggtctcaccgatgtctggt

SEQ ID NO: 4904291 - DNA, 25 bp, Homo sapien
gattgttaccatagcatacctagcc

SEQ ID NO: 4904292 - DNA, 25 bp, Homo sapien
gatggattgcacatacaagcatttg

SEQ ID NO: 4904293 - DNA, 25 bp, Homo sapien
tgaaagctccacgtgagcagggtcc

SEQ ID NO: 4904294 - DNA, 25 bp, Homo sapien
agtttccagtgcatagtcaggcaaa

SEQ ID NO: 4904295 - DNA, 25 bp, Homo sapien
ggtttagcagccaattccccatggt

SEQ ID NO: 4904296 - DNA, 25 bp, Homo sapien
gagaggacctcttctctgagttcga

SEQ ID NO: 4904297 - DNA, 25 bp, Homo sapien
tcctcaagccatacagagtagagca

SEQ ID NO: 4904298 - DNA, 25 bp, Homo sapien
gaacatgattcacccactactcagg

SEQ ID NO: 4904299 - DNA, 25 bp, Homo sapien
cctacctcttgttcatagatgggca

SEQ ID NO: 4904300 - DNA, 25 bp, Homo sapien
cgtgtgctgagattgttgggcaact

SEQ ID NO: 4904301 - DNA, 25 bp, Homo sapien
gagattgttgggcaactttaagaaa

SEQ ID NO: 4904302 - DNA, 25 bp, Homo sapien
gcagaaagttttcagttcctacctc

SEQ ID NO: 4904303 - DNA, 25 bp, Homo sapien
caggagaacgatacagagagcagag

SEQ ID NO: 4904304 - DNA, 25 bp, Homo sapien
tctgagtactcctcaatcttgagcg

SEQ ID NO: 4904305 - DNA, 25 bp, Homo sapien
gggaggccctgatgaaatcaatggc

SEQ ID NO: 4904306 - DNA, 25 bp, Homo sapien
aagaggacaggagaacgatacagag

SEQ ID NO: 4904307 - DNA, 25 bp, Homo sapien
gcagtctgaatttttggttcacgga

SEQ ID NO: 4904308 - DNA, 25 bp, Homo sapien
cctggcattgcttgagagtgtgttc

SEQ ID NO: 4904309 - DNA, 25 bp, Homo sapien
ggtcagggccaacactgggcaggag

SEQ ID NO: 4904310 - DNA, 25 bp, Homo sapien
aggcacatgggagaagcgccccctg

SEQ ID NO: 4904311 - DNA, 25 bp, Homo sapien
agcatttggagaaattgctctggct

SEQ ID NO: 4904312 - DNA, 25 bp, Homo sapien
ccaggattacgagaaagtacaaaca

SEQ ID NO: 4904313 - DNA, 25 bp, Homo sapien
tcactgaatagtttggcactgtgct

SEQ ID NO: 4904314 - DNA, 25 bp, Homo sapien
tggtgaacagaaccaggattacgag

SEQ ID NO: 4904315 - DNA, 25 bp, Homo sapien
gaggttaaggctttatccttataga

SEQ ID NO: 4904316 - DNA, 25 bp, Homo sapien
caatcttgtttcgaggttaaggctt

SEQ ID NO: 4904317 - DNA, 25 bp, Homo sapien
tcaatcttgtttcgaggttaaggct

SEQ ID NO: 4904318 - DNA, 25 bp, Homo sapien
tcgaggttaaggctttatccttata

SEQ ID NO: 4904319 - DNA, 25 bp, Homo sapien
cttcagtgggtgcccgtgcaggtgg

SEQ ID NO: 4904320 - DNA, 25 bp, Homo sapien
tcagtgggtgcccgtgcaggtggag

SEQ ID NO: 4904321 - DNA, 25 bp, Homo sapien
agggtcctgtgcttcagtgggtgcc

SEQ ID NO: 4904322 - DNA, 25 bp, Homo sapien
gaagggtcctgtgcttcagtgggtg

SEQ ID NO: 4904323 - DNA, 25 bp, Homo sapien
tgttagaaaattgagtgtcgccctg

SEQ ID NO: 4904324 - DNA, 25 bp, Homo sapien
ttctcactcgccctccaagggcgac

SEQ ID NO: 4904325 - DNA, 25 bp, Homo sapien
ctcagggccacagatcggccggaag

SEQ ID NO: 4904326 - DNA, 25 bp, Homo sapien
tggctcctgttagaaaattgagtgt

SEQ ID NO: 4904327 - DNA, 25 bp, Homo sapien
agctcgcggcctagccttacggtgg

SEQ ID NO: 4904328 - DNA, 25 bp, Homo sapien
tagccttacggtggcggcggccaca

SEQ ID NO: 4904329 - DNA, 25 bp, Homo sapien
cctagccttacggtggcggcggcca

SEQ ID NO: 4904330 - DNA, 25 bp, Homo sapien
tcccaggactaagctcgcggcctag

SEQ ID NO: 4904331 - DNA, 25 bp, Homo sapien
ctggaaccacaaaatggtaggaact

SEQ ID NO: 4904332 - DNA, 25 bp, Homo sapien
tagacaagacttcatataagagaca

SEQ ID NO: 4904333 - DNA, 25 bp, Homo sapien
tacaggtgatctagataattagaca

SEQ ID NO: 4904334 - DNA, 25 bp, Homo sapien
tatgcccagaactgtccatgataca

SEQ ID NO: 4904335 - DNA, 25 bp, Homo sapien
aagtaaaagtcaggatccctgccct

SEQ ID NO: 4904336 - DNA, 25 bp, Homo sapien
tccaaacttatttctccccatgagg

SEQ ID NO: 4904337 - DNA, 25 bp, Homo sapien
aatccaaacttatttctccccatga

SEQ ID NO: 4904338 - DNA, 25 bp, Homo sapien
gtccaatcaatccaaacttatttct

SEQ ID NO: 4904339 - DNA, 25 bp, Homo sapien
caaacttatttctccccatgaggaa

SEQ ID NO: 4904340 - DNA, 25 bp, Homo sapien
ggtctcttgggaataaataatcact

SEQ ID NO: 4904341 - DNA, 25 bp, Homo sapien
tgaaaatgcccttcggaatctagtt

SEQ ID NO: 4904342 - DNA, 25 bp, Homo sapien
tagaaacatagggtccagaatgatg

SEQ ID NO: 4904343 - DNA, 25 bp, Homo sapien
catagcaagctgttatattcacaca

SEQ ID NO: 4904344 - DNA, 25 bp, Homo sapien
gaacacttacaaccatttcactatt

SEQ ID NO: 4904345 - DNA, 25 bp, Homo sapien
cctgaacacttacaaccatttcact

SEQ ID NO: 4904346 - DNA, 25 bp, Homo sapien
tccctgaacacttacaaccatttca

SEQ ID NO: 4904347 - DNA, 25 bp, Homo sapien
atctccctgaacacttacaaccatt

SEQ ID NO: 4904348 - DNA, 25 bp, Homo sapien
cctccatttatccagatgccagaaa

SEQ ID NO: 4904349 - DNA, 25 bp, Homo sapien
cgtgctattcctccatttatccaga

SEQ ID NO: 4904350 - DNA, 25 bp, Homo sapien
cgcttcgtgctattcctccatttat

SEQ ID NO: 4904351 - DNA, 25 bp, Homo sapien
tattcctccatttatccagatgcca

SEQ ID NO: 4904352 - DNA, 25 bp, Homo sapien
aaatacaccaaatcccaggtaccag

SEQ ID NO: 4904353 - DNA, 25 bp, Homo sapien
taaaatccaagagtcagaaacctgt

SEQ ID NO: 4904354 - DNA, 25 bp, Homo sapien
gtaccagccataacatactacttaa

SEQ ID NO: 4904355 - DNA, 25 bp, Homo sapien
tattttggaacgcacatttggctag

SEQ ID NO: 4904356 - DNA, 25 bp, Homo sapien
cagttggttttcttgttaagataat

SEQ ID NO: 4904357 - DNA, 25 bp, Homo sapien
tccagttggttttcttgttaagata

SEQ ID NO: 4904358 - DNA, 25 bp, Homo sapien
cttgcatatagctttcccagagcac

SEQ ID NO: 4904359 - DNA, 25 bp, Homo sapien
cagagcacagggataaaaggtgaac

SEQ ID NO: 4904360 - DNA, 25 bp, Homo sapien
gtgaacaccaccgaaaaatgcgaag

SEQ ID NO: 4904361 - DNA, 25 bp, Homo sapien
ccgaaaaatgcgaagataaggaatt

SEQ ID NO: 4904362 - DNA, 25 bp, Homo sapien
ttttctaggttcttggagccactca

SEQ ID NO: 4904363 - DNA, 25 bp, Homo sapien
cagaagtgccaatcgctcataggat

SEQ ID NO: 4904364 - DNA, 25 bp, Homo sapien
tccaacagtatcaaccagaagtgcc

SEQ ID NO: 4904365 - DNA, 25 bp, Homo sapien
cataggatctgttctgggctttacc

SEQ ID NO: 4904366 - DNA, 25 bp, Homo sapien
ttataaaatacaaatcaaactgaaa

SEQ ID NO: 4904367 - DNA, 25 bp, Homo sapien
caaatcaaactgaaaagacaaacaa

SEQ ID NO: 4904368 - DNA, 25 bp, Homo sapien
taaaatacaaatcaaactgaaaaga

SEQ ID NO: 4904369 - DNA, 25 bp, Homo sapien
aatacaaatcaaactgaaaagacaa

SEQ ID NO: 4904370 - DNA, 25 bp, Homo sapien
atctttccccttcgcttgccactca

SEQ ID NO: 4904371 - DNA, 25 bp, Homo sapien
tataatcagggaaattctgagtaaa

SEQ ID NO: 4904372 - DNA, 25 bp, Homo sapien
tcattcattatgtatatggcttggc

SEQ ID NO: 4904373 - DNA, 25 bp, Homo sapien
acatgctttctataataagcaagta

SEQ ID NO: 4904374 - DNA, 25 bp, Homo sapien
catcagccttggactacactgttgg

SEQ ID NO: 4904375 - DNA, 25 bp, Homo sapien
agccttggactacactgttggtgag

SEQ ID NO: 4904376 - DNA, 25 bp, Homo sapien
tcagccttggactacactgttggtg

SEQ ID NO: 4904377 - DNA, 25 bp, Homo sapien
cagccttggactacactgttggtga

SEQ ID NO: 4904378 - DNA, 25 bp, Homo sapien
ggccctgagggacttgtttcatgaa

SEQ ID NO: 4904379 - DNA, 25 bp, Homo sapien
aggccattgcataggacaaacagat

SEQ ID NO: 4904380 - DNA, 25 bp, Homo sapien
ttctggccctgagggacttgtttca

SEQ ID NO: 4904381 - DNA, 25 bp, Homo sapien
gctcaggccattgcataggacaaac

SEQ ID NO: 4904382 - DNA, 25 bp, Homo sapien
taacaggttcgatagtccactcaag

SEQ ID NO: 4904383 - DNA, 25 bp, Homo sapien
gcagctgctcctaatgaataacagg

SEQ ID NO: 4904384 - DNA, 25 bp, Homo sapien
caagggatgtcgcaacaatagggca

SEQ ID NO: 4904385 - DNA, 25 bp, Homo sapien
caattttggcatccggattggagcc

SEQ ID NO: 4904386 - DNA, 25 bp, Homo sapien
tgctctttctgctacatctggcaaa

SEQ ID NO: 4904387 - DNA, 25 bp, Homo sapien
atgctctttctgctacatctggcaa

SEQ ID NO: 4904388 - DNA, 25 bp, Homo sapien
ccacggatcgaatgagagatgccaa

SEQ ID NO: 4904389 - DNA, 25 bp, Homo sapien
tgatgtaaggttggttataaacaac

SEQ ID NO: 4904390 - DNA, 25 bp, Homo sapien
gcagttcatcgaaagaggtcaccac

SEQ ID NO: 4904391 - DNA, 25 bp, Homo sapien
caccgtccttgagtagttgatgtaa

SEQ ID NO: 4904392 - DNA, 25 bp, Homo sapien
ggacaattctactggtactcctaag

SEQ ID NO: 4904393 - DNA, 25 bp, Homo sapien
cctaagttgtagcttgggtttccag

SEQ ID NO: 4904394 - DNA, 25 bp, Homo sapien
taatcagtcttagaggctagcaaca

SEQ ID NO: 4904395 - DNA, 25 bp, Homo sapien
gggctaataatgacccttctgcatg

SEQ ID NO: 4904396 - DNA, 25 bp, Homo sapien
tgatagactccaacaaatacctttg

SEQ ID NO: 4904397 - DNA, 25 bp, Homo sapien
ttgatagactccaacaaataccttt

SEQ ID NO: 4904398 - DNA, 25 bp, Homo sapien
gatagactccaacaaatacctttgc

SEQ ID NO: 4904399 - DNA, 25 bp, Homo sapien
ctttgatagactccaacaaatacct

SEQ ID NO: 4904400 - DNA, 25 bp, Homo sapien
ccacgaaacagttcactctgctaaa

SEQ ID NO: 4904401 - DNA, 25 bp, Homo sapien
gacagtgtccacgaaacagttcact

SEQ ID NO: 4904402 - DNA, 25 bp, Homo sapien
tgagtttccacttcctgtgacagtg

SEQ ID NO: 4904403 - DNA, 25 bp, Homo sapien
tcctgtgacagtgtccacgaaacag

SEQ ID NO: 4904404 - DNA, 25 bp, Homo sapien
gagtgatttcattaaccaagtcttg

SEQ ID NO: 4904405 - DNA, 25 bp, Homo sapien
aacggattgaagctgccatagggca

SEQ ID NO: 4904406 - DNA, 25 bp, Homo sapien
tcagtaacaggcaagggcaagtgga

SEQ ID NO: 4904407 - DNA, 25 bp, Homo sapien
gaggtttgcgtatctgcagatctgc

SEQ ID NO: 4904408 - DNA, 25 bp, Homo sapien
gcaaggacaacacagcaggtaagct

SEQ ID NO: 4904409 - DNA, 25 bp, Homo sapien
gtagaactgtttggtactagggcca

SEQ ID NO: 4904410 - DNA, 25 bp, Homo sapien
gaactctcaatgttactagtagaac

SEQ ID NO: 4904411 - DNA, 25 bp, Homo sapien
caggtaagctttcagtgtgctcaga

SEQ ID NO: 4904412 - DNA, 25 bp, Homo sapien
catgtacttaaacgtcttcagggtc

SEQ ID NO: 4904413 - DNA, 25 bp, Homo sapien
agacggttgactatgttctctgcaa

SEQ ID NO: 4904414 - DNA, 25 bp, Homo sapien
tctctgcaataacttctgacgccag

SEQ ID NO: 4904415 - DNA, 25 bp, Homo sapien
tagatgtatctccacagacggttga

SEQ ID NO: 4904416 - DNA, 25 bp, Homo sapien
gatgagtccacataaatcatcatct

SEQ ID NO: 4904417 - DNA, 25 bp, Homo sapien
tagacttctgatgagtccacataaa

SEQ ID NO: 4904418 - DNA, 25 bp, Homo sapien
acacagacatgcccctttagacttc

SEQ ID NO: 4904419 - DNA, 25 bp, Homo sapien
acagacatgcccctttagacttctg

SEQ ID NO: 4904420 - DNA, 25 bp, Homo sapien
gcttcttgggccaattggctctctg

SEQ ID NO: 4904421 - DNA, 25 bp, Homo sapien
gccaattggctctctgaggttcccg

SEQ ID NO: 4904422 - DNA, 25 bp, Homo sapien
aattggctctctgaggttcccgtac

SEQ ID NO: 4904423 - DNA, 25 bp, Homo sapien
tgcttcttgggccaattggctctct

SEQ ID NO: 4904424 - DNA, 25 bp, Homo sapien
cagactggtgtgcagaaactccttc

SEQ ID NO: 4904425 - DNA, 25 bp, Homo sapien
tctaagtcagactggtgtgcagaaa

SEQ ID NO: 4904426 - DNA, 25 bp, Homo sapien
cagctctaagtcagactggtgtgca

SEQ ID NO: 4904427 - DNA, 25 bp, Homo sapien
agtcagactggtgtgcagaaactcc

SEQ ID NO: 4904428 - DNA, 25 bp, Homo sapien
actggcccagatacatgtagttctg

SEQ ID NO: 4904429 - DNA, 25 bp, Homo sapien
gaagtttgtcaaggctgcagaccag

SEQ ID NO: 4904430 - DNA, 25 bp, Homo sapien
aactctgaaggacattaatagtgcc

SEQ ID NO: 4904431 - DNA, 25 bp, Homo sapien
tagtgccttcatgatcaaaaggtac

SEQ ID NO: 4904432 - DNA, 25 bp, Homo sapien
cttgagagaagaagccaccaggtta

SEQ ID NO: 4904433 - DNA, 25 bp, Homo sapien
ttgagagaagaagccaccaggttac

SEQ ID NO: 4904434 - DNA, 25 bp, Homo sapien
ttgggcacgccatcctggtattcct

SEQ ID NO: 4904435 - DNA, 25 bp, Homo sapien
tctgcatcttccaccgtaatacagg

SEQ ID NO: 4904436 - DNA, 25 bp, Homo sapien
gttggaatcttgggcacgccatcct

SEQ ID NO: 4904437 - DNA, 25 bp, Homo sapien
tccaccgtaatacaggctgttggaa

SEQ ID NO: 4904438 - DNA, 25 bp, Homo sapien
gaatgacaattttgatcccatgaga

SEQ ID NO: 4904439 - DNA, 25 bp, Homo sapien
atgacaattttgatcccatgagaag

SEQ ID NO: 4904440 - DNA, 25 bp, Homo sapien
caattttgatcccatgagaagccat

SEQ ID NO: 4904441 - DNA, 25 bp, Homo sapien
gacaattttgatcccatgagaagcc

SEQ ID NO: 4904442 - DNA, 25 bp, Homo sapien
tggatatttgctcccagtgatctct

SEQ ID NO: 4904443 - DNA, 25 bp, Homo sapien
gatatttgctcccagtgatctctgc

SEQ ID NO: 4904444 - DNA, 25 bp, Homo sapien
cagtatctgggtaggtctttgcccc

SEQ ID NO: 4904445 - DNA, 25 bp, Homo sapien
aggaatcagtatctgggtaggtctt

SEQ ID NO: 4904446 - DNA, 25 bp, Homo sapien
gttttccatcatccctgtggcaaaa

SEQ ID NO: 4904447 - DNA, 25 bp, Homo sapien
aaaagccatggttgatgcccaggtc

SEQ ID NO: 4904448 - DNA, 25 bp, Homo sapien
gggctgggcttgtctatttgaaacc

SEQ ID NO: 4904449 - DNA, 25 bp, Homo sapien
gaaaccaccgtttctctacagctgt

SEQ ID NO: 4904450 - DNA, 25 bp, Homo sapien
ctcagcatttatcttcatcacaacc

SEQ ID NO: 4904451 - DNA, 25 bp, Homo sapien
tcagcatttatcttcatcacaacct

SEQ ID NO: 4904452 - DNA, 25 bp, Homo sapien
tcatgcacactgtccaagatcttct

SEQ ID NO: 4904453 - DNA, 25 bp, Homo sapien
tgcacactgtccaagatcttctggg

SEQ ID NO: 4904454 - DNA, 25 bp, Homo sapien
catgcacactgtccaagatcttctg

SEQ ID NO: 4904455 - DNA, 25 bp, Homo sapien
cacactgtccaagatcttctgggtc

SEQ ID NO: 4904456 - DNA, 25 bp, Homo sapien
gggaaaccatgacccgaggtcctgc

SEQ ID NO: 4904457 - DNA, 25 bp, Homo sapien
gctataatgtgggagacaatctgag

SEQ ID NO: 4904458 - DNA, 25 bp, Homo sapien
tcttagctgggagaaagccttgttt

SEQ ID NO: 4904459 - DNA, 25 bp, Homo sapien
ccctcttgtcagatgggcaccagct

SEQ ID NO: 4904460 - DNA, 25 bp, Homo sapien
ttactgatgtaattgtgaattcctg

SEQ ID NO: 4904461 - DNA, 25 bp, Homo sapien
gaaacagatggtaacgcttagcatg

SEQ ID NO: 4904462 - DNA, 25 bp, Homo sapien
tgaagcaataaggagtggccattaa

SEQ ID NO: 4904463 - DNA, 25 bp, Homo sapien
gaattcctgctgcatttataattaa

SEQ ID NO: 4904464 - DNA, 25 bp, Homo sapien
cagcgatgatgtgtttggattagca

SEQ ID NO: 4904465 - DNA, 25 bp, Homo sapien
acttgagagcagataggtatttact

SEQ ID NO: 4904466 - DNA, 25 bp, Homo sapien
tactgtgctggaagtaccacagcga

SEQ ID NO: 4904467 - DNA, 25 bp, Homo sapien
gattagcaagacttcagatgccaga

SEQ ID NO: 4904468 - DNA, 25 bp, Homo sapien
tgttattccatctgagcaatcgcct

SEQ ID NO: 4904469 - DNA, 25 bp, Homo sapien
catctgagcaatcgccttgttcctg

SEQ ID NO: 4904470 - DNA, 25 bp, Homo sapien
gagcaatcgccttgttcctggcatc

SEQ ID NO: 4904471 - DNA, 25 bp, Homo sapien
aaactgccaagtgttattccatctg

SEQ ID NO: 4904472 - DNA, 25 bp, Homo sapien
agcagtgtatttagagccgagcatc

SEQ ID NO: 4904473 - DNA, 25 bp, Homo sapien
ggaaggttgaggcaagcagtgtatt

SEQ ID NO: 4904474 - DNA, 25 bp, Homo sapien
gggaaggttgaggcaagcagtgtat

SEQ ID NO: 4904475 - DNA, 25 bp, Homo sapien
gaaggttgaggcaagcagtgtattt

SEQ ID NO: 4904476 - DNA, 25 bp, Homo sapien
aagttgcatactctgtgttgtcaca

SEQ ID NO: 4904477 - DNA, 25 bp, Homo sapien
caatgctggtcatactttggaaaca

SEQ ID NO: 4904478 - DNA, 25 bp, Homo sapien
cacaggtctctggaattaagtaatt

SEQ ID NO: 4904479 - DNA, 25 bp, Homo sapien
aaacagacagttgggaaagtatgag

SEQ ID NO: 4904480 - DNA, 25 bp, Homo sapien
cagacaattaattcatcacataatg

SEQ ID NO: 4904481 - DNA, 25 bp, Homo sapien
caattaattcatcacataatgtagc

SEQ ID NO: 4904482 - DNA, 25 bp, Homo sapien
agcacagacaattaattcatcacat

SEQ ID NO: 4904483 - DNA, 25 bp, Homo sapien
cacagacaattaattcatcacataa

SEQ ID NO: 4904484 - DNA, 25 bp, Homo sapien
tagcattgcttaacttaactcggcc

SEQ ID NO: 4904485 - DNA, 25 bp, Homo sapien
gagttgatagcggtctgtctggcaa

SEQ ID NO: 4904486 - DNA, 25 bp, Homo sapien
taactcggcccttgatacaatcttg

SEQ ID NO: 4904487 - DNA, 25 bp, Homo sapien
caggaaactcaggtggtggccacaa

SEQ ID NO: 4904488 - DNA, 25 bp, Homo sapien
cgttagggtcatataagcgagcaag

SEQ ID NO: 4904489 - DNA, 25 bp, Homo sapien
taatgggcttcagctaagacaggtc

SEQ ID NO: 4904490 - DNA, 25 bp, Homo sapien
taaaatagactacaatctgaggcct

SEQ ID NO: 4904491 - DNA, 25 bp, Homo sapien
agtttgaggcctaatgcatttccag

SEQ ID NO: 4904492 - DNA, 25 bp, Homo sapien
gacagttttacaagtgagttcaacc

SEQ ID NO: 4904493 - DNA, 25 bp, Homo sapien
aggtgatcaggtacgggaacacagt

SEQ ID NO: 4904494 - DNA, 25 bp, Homo sapien
aaggcccttggtaactagaagccat

SEQ ID NO: 4904495 - DNA, 25 bp, Homo sapien
tccaatatactaagaaagggccact

SEQ ID NO: 4904496 - DNA, 25 bp, Homo sapien
cactggatgaaagcctgctaggaga

SEQ ID NO: 4904497 - DNA, 25 bp, Homo sapien
aatacaccgcagtcgaacagaaatg

SEQ ID NO: 4904498 - DNA, 25 bp, Homo sapien
gggaagaatacaccgcagtcgaaca

SEQ ID NO: 4904499 - DNA, 25 bp, Homo sapien
gaatgacaacggcatacatccacct

SEQ ID NO: 4904500 - DNA, 25 bp, Homo sapien
atcctgaggcactcaaggcactgac

SEQ ID NO: 4904501 - DNA, 25 bp, Homo sapien
tcttttccaaatgcagtatagagta

SEQ ID NO: 4904502 - DNA, 25 bp, Homo sapien
ttccaaatgcagtatagagtaaaaa

SEQ ID NO: 4904503 - DNA, 25 bp, Homo sapien
tcaaggcactgaccaattcctttcc

SEQ ID NO: 4904504 - DNA, 25 bp, Homo sapien
gatataaaggctccaccgccatcat

SEQ ID NO: 4904505 - DNA, 25 bp, Homo sapien
tcactgggtttctatcatacaaggg

SEQ ID NO: 4904506 - DNA, 25 bp, Homo sapien
ttttagggatacatagcaactggcc

SEQ ID NO: 4904507 - DNA, 25 bp, Homo sapien
tgggccagcccatgttctaagtata

SEQ ID NO: 4904508 - DNA, 25 bp, Homo sapien
tagggtcccatgctgaataccgaag

SEQ ID NO: 4904509 - DNA, 25 bp, Homo sapien
cagtttcaagtccagtaaaccacag

SEQ ID NO: 4904510 - DNA, 25 bp, Homo sapien
tgtagacagttactcgggaaagact

SEQ ID NO: 4904511 - DNA, 25 bp, Homo sapien
aaaagtattcaacgacgcttcacag

SEQ ID NO: 4904512 - DNA, 25 bp, Homo sapien
ttttggagcatcattggccataggc

SEQ ID NO: 4904513 - DNA, 25 bp, Homo sapien
gaaactcaaaattctaacttcatag

SEQ ID NO: 4904514 - DNA, 25 bp, Homo sapien
ctctatagtaatcacagtcaggagg

SEQ ID NO: 4904515 - DNA, 25 bp, Homo sapien
tccacattccaacaaccaggtaata

SEQ ID NO: 4904516 - DNA, 25 bp, Homo sapien
catttctttagacctggaaactcaa

SEQ ID NO: 4904517 - DNA, 25 bp, Homo sapien
tgtacatcctacattcagagaactt

SEQ ID NO: 4904518 - DNA, 25 bp, Homo sapien
cagccaagccatgttggtctgtttc

SEQ ID NO: 4904519 - DNA, 25 bp, Homo sapien
gggaatacttcattctgcactgttc

SEQ ID NO: 4904520 - DNA, 25 bp, Homo sapien
gagaacttaccacaatttcattgca

SEQ ID NO: 4904521 - DNA, 25 bp, Homo sapien
tttctgttaacagggtgtttatgat

SEQ ID NO: 4904522 - DNA, 25 bp, Homo sapien
tctgttaacagggtgtttatgataa

SEQ ID NO: 4904523 - DNA, 25 bp, Homo sapien
cagggtgtttatgataatgacaata

SEQ ID NO: 4904524 - DNA, 25 bp, Homo sapien
ttaacagggtgtttatgataatgac

SEQ ID NO: 4904525 - DNA, 25 bp, Homo sapien
tgttttctcatattacccagatgtt

SEQ ID NO: 4904526 - DNA, 25 bp, Homo sapien
tgctggtgaactggtatcatctttt

SEQ ID NO: 4904527 - DNA, 25 bp, Homo sapien
agtgaagtcgtctctgcgagggtcc

SEQ ID NO: 4904528 - DNA, 25 bp, Homo sapien
gcacctgctctgatggaattagcag

SEQ ID NO: 4904529 - DNA, 25 bp, Homo sapien
cattctgtcattctgttatctttta

SEQ ID NO: 4904530 - DNA, 25 bp, Homo sapien
tccattctgtcattctgttatcttt

SEQ ID NO: 4904531 - DNA, 25 bp, Homo sapien
ttctgtcattctgttatcttttaag

SEQ ID NO: 4904532 - DNA, 25 bp, Homo sapien
tatccattctgtcattctgttatct

SEQ ID NO: 4904533 - DNA, 25 bp, Homo sapien
gagttagggatgattctctatttcc

SEQ ID NO: 4904534 - DNA, 25 bp, Homo sapien
ttatcctttgaaatagtagaattgg

SEQ ID NO: 4904535 - DNA, 25 bp, Homo sapien
cttatcctttgaaatagtagaattg

SEQ ID NO: 4904536 - DNA, 25 bp, Homo sapien
ttagggatgattctctatttcctta

SEQ ID NO: 4904537 - DNA, 25 bp, Homo sapien
gtagatggctattattacctcaagg

SEQ ID NO: 4904538 - DNA, 25 bp, Homo sapien
tatgtctcttaaatcaaccctgcat

SEQ ID NO: 4904539 - DNA, 25 bp, Homo sapien
gtataatgttatctgtttgttgtag

SEQ ID NO: 4904540 - DNA, 25 bp, Homo sapien
tgtctcttaaatcaaccctgcatcc

SEQ ID NO: 4904541 - DNA, 25 bp, Homo sapien
ggaacctactccctgctccattcag

SEQ ID NO: 4904542 - DNA, 25 bp, Homo sapien
attcaggaacctactccctgctcca

SEQ ID NO: 4904543 - DNA, 25 bp, Homo sapien
tcaggaacctactccctgctccatt

SEQ ID NO: 4904544 - DNA, 25 bp, Homo sapien
ccattcaggaacctactccctgctc

SEQ ID NO: 4904545 - DNA, 25 bp, Homo sapien
ctgatccactatgggtcttttgact

SEQ ID NO: 4904546 - DNA, 25 bp, Homo sapien
tctgctgatccactatgggtctttt

SEQ ID NO: 4904547 - DNA, 25 bp, Homo sapien
ggtctctgctgatccactatgggtc

SEQ ID NO: 4904548 - DNA, 25 bp, Homo sapien
tctctgctgatccactatgggtctt

SEQ ID NO: 4904549 - DNA, 25 bp, Homo sapien
ttaaaaacagtttccaagtggcaga

SEQ ID NO: 4904550 - DNA, 25 bp, Homo sapien
caatggctatggtgaagatgggtta

SEQ ID NO: 4904551 - DNA, 25 bp, Homo sapien
aatgcatacacaaacccattcaggc

SEQ ID NO: 4904552 - DNA, 25 bp, Homo sapien
taatgcaccatatatactacgctag

SEQ ID NO: 4904553 - DNA, 25 bp, Homo sapien
actcgttactccctcactagactgt

SEQ ID NO: 4904554 - DNA, 25 bp, Homo sapien
cactcgttactccctcactagactg

SEQ ID NO: 4904555 - DNA, 25 bp, Homo sapien
aagttcccacattattcttatcatc

SEQ ID NO: 4904556 - DNA, 25 bp, Homo sapien
aaaagttcccacattattcttatca

SEQ ID NO: 4904557 - DNA, 25 bp, Homo sapien
acatcattgtagtaggtgttttgca

SEQ ID NO: 4904558 - DNA, 25 bp, Homo sapien
atcaccatcacccacatcattgtag

SEQ ID NO: 4904559 - DNA, 25 bp, Homo sapien
ctgttctaaccatttggcagttaat

SEQ ID NO: 4904560 - DNA, 25 bp, Homo sapien
tcttacaagatccagctccaattcc

SEQ ID NO: 4904561 - DNA, 25 bp, Homo sapien
gcccctggtaaatcaaggagcccta

SEQ ID NO: 4904562 - DNA, 25 bp, Homo sapien
accatttatgccatctggtttgtcc

SEQ ID NO: 4904563 - DNA, 25 bp, Homo sapien
ctactcccttttccaaaagcctcat

SEQ ID NO: 4904564 - DNA, 25 bp, Homo sapien
ggacaccactggtctatgggataga

SEQ ID NO: 4904565 - DNA, 25 bp, Homo sapien
tagattccgatctgcctccaagagt

SEQ ID NO: 4904566 - DNA, 25 bp, Homo sapien
tcctctcggtataactgctgccaga

SEQ ID NO: 4904567 - DNA, 25 bp, Homo sapien
tcaaggccctatgtagatagattcc

SEQ ID NO: 4904568 - DNA, 25 bp, Homo sapien
gtcagtgccaacagtcaccagggag

SEQ ID NO: 4904569 - DNA, 25 bp, Homo sapien
ttctggtcagtgccaacagtcacca

SEQ ID NO: 4904570 - DNA, 25 bp, Homo sapien
ctggtcagtgccaacagtcaccagg

SEQ ID NO: 4904571 - DNA, 25 bp, Homo sapien
ctttctggtcagtgccaacagtcac

SEQ ID NO: 4904572 - DNA, 25 bp, Homo sapien
gcaccagccgcagagtcctctttgg

SEQ ID NO: 4904573 - DNA, 25 bp, Homo sapien
cgcagagtcctctttggacgcagcc

SEQ ID NO: 4904574 - DNA, 25 bp, Homo sapien
atactggaaggcaccaactccacct

SEQ ID NO: 4904575 - DNA, 25 bp, Homo sapien
cttgtgtaactgataatactggaag

SEQ ID NO: 4904576 - DNA, 25 bp, Homo sapien
caccatcatggcaatgctcttggca

SEQ ID NO: 4904577 - DNA, 25 bp, Homo sapien
caccaccatcatggcaatgctcttg

SEQ ID NO: 4904578 - DNA, 25 bp, Homo sapien
catcatggcaatgctcttggcagac

SEQ ID NO: 4904579 - DNA, 25 bp, Homo sapien
cttggaacctggctctcaaatgcca

SEQ ID NO: 4904580 - DNA, 25 bp, Homo sapien
gtcctcccctttgggctccagttga

SEQ ID NO: 4904581 - DNA, 25 bp, Homo sapien
ccgtggttatgagcaggacggcatt

SEQ ID NO: 4904582 - DNA, 25 bp, Homo sapien
ccccatgtgttcttgggagtcggcc

SEQ ID NO: 4904583 - DNA, 25 bp, Homo sapien
tcatgccctttgagggaatcgtcct

SEQ ID NO: 4904584 - DNA, 25 bp, Homo sapien
cagccttcacgtggagtactgcagt

SEQ ID NO: 4904585 - DNA, 25 bp, Homo sapien
cagtagcatcctgtctccgtttcag

SEQ ID NO: 4904586 - DNA, 25 bp, Homo sapien
caagcgaccaccagccttcacgtgg

SEQ ID NO: 4904587 - DNA, 25 bp, Homo sapien
cacgtggagtactgcagtagcatcc

SEQ ID NO: 4904588 - DNA, 25 bp, Homo sapien
tttatgctttactggatgatccttc

SEQ ID NO: 4904589 - DNA, 25 bp, Homo sapien
ctttttatgctttactggatgatcc

SEQ ID NO: 4904590 - DNA, 25 bp, Homo sapien
ttgtttactcctggaaatgcattct

SEQ ID NO: 4904591 - DNA, 25 bp, Homo sapien
gagctgcacttgacatttgtttact

SEQ ID NO: 4904592 - DNA, 25 bp, Homo sapien
accagactgtagttggaaatattta

SEQ ID NO: 4904593 - DNA, 25 bp, Homo sapien
ccagactgtagttggaaatatttac

SEQ ID NO: 4904594 - DNA, 25 bp, Homo sapien
caccagactgtagttggaaatattt

SEQ ID NO: 4904595 - DNA, 25 bp, Homo sapien
gggtaagaaggttcctgcgtcagac

SEQ ID NO: 4904596 - DNA, 25 bp, Homo sapien
ggccctggccttttcactgccagtg

SEQ ID NO: 4904597 - DNA, 25 bp, Homo sapien
cactgccagtgaattgcagcccagt

SEQ ID NO: 4904598 - DNA, 25 bp, Homo sapien
ccagtgggtaagaaggttcctgcgt

SEQ ID NO: 4904599 - DNA, 25 bp, Homo sapien
ttggatccaaaagttgatgtctgtc

SEQ ID NO: 4904600 - DNA, 25 bp, Homo sapien
gatccaaaagttgatgtctgtccct

SEQ ID NO: 4904601 - DNA, 25 bp, Homo sapien
ggctgcagcaggctcataacctcct

SEQ ID NO: 4904602 - DNA, 25 bp, Homo sapien
ctgagtgatattgaggggctgcagc

SEQ ID NO: 4904603 - DNA, 25 bp, Homo sapien
gcagtcaatcagcaagacttgtgga

SEQ ID NO: 4904604 - DNA, 25 bp, Homo sapien
caagacttgtggatctatgagggtg

SEQ ID NO: 4904605 - DNA, 25 bp, Homo sapien
tctaggaaattgctagaagacatgc

SEQ ID NO: 4904606 - DNA, 25 bp, Homo sapien
gcaaaacatcgaagaaaatgcaact

SEQ ID NO: 4904607 - DNA, 25 bp, Homo sapien
ttatgtatggtgagaggaaggagtc

SEQ ID NO: 4904608 - DNA, 25 bp, Homo sapien
tgtacccgtaacatgccattttggt

SEQ ID NO: 4904609 - DNA, 25 bp, Homo sapien
ttttatgtatggtgagaggaaggag

SEQ ID NO: 4904610 - DNA, 25 bp, Homo sapien
tttatgtatggtgagaggaaggagt

SEQ ID NO: 4904611 - DNA, 25 bp, Homo sapien
caagtagcaatgtcacggagttggc

SEQ ID NO: 4904612 - DNA, 25 bp, Homo sapien
ggcatcaaaaaactagcaagtcagg

SEQ ID NO: 4904613 - DNA, 25 bp, Homo sapien
gacaggagcagcacaactctatagt

SEQ ID NO: 4904614 - DNA, 25 bp, Homo sapien
gaagttcatacagcagaagggtcaa

SEQ ID NO: 4904615 - DNA, 25 bp, Homo sapien
gccactgcttccttattgtgccatg

SEQ ID NO: 4904616 - DNA, 25 bp, Homo sapien
tgatgggaatatccttgctgccctt

SEQ ID NO: 4904617 - DNA, 25 bp, Homo sapien
ggcctgtgatgggaatatccttgct

SEQ ID NO: 4904618 - DNA, 25 bp, Homo sapien
ttattgtgccatgctctcagttgct

SEQ ID NO: 4904619 - DNA, 25 bp, Homo sapien
ggcaatgagccagacttaatccaag

SEQ ID NO: 4904620 - DNA, 25 bp, Homo sapien
tgtgaggaccattacgtgacggcag

SEQ ID NO: 4904621 - DNA, 25 bp, Homo sapien
gatcttcacaagaaccctgctatgt

SEQ ID NO: 4904622 - DNA, 25 bp, Homo sapien
tgaggactggagatattatacacgt

SEQ ID NO: 4904623 - DNA, 25 bp, Homo sapien
taaaccagcttatgtgctaccacca

SEQ ID NO: 4904624 - DNA, 25 bp, Homo sapien
tgacctcagcagagatgttggcatg

SEQ ID NO: 4904625 - DNA, 25 bp, Homo sapien
tcatggactaaaatggctagctgcc

SEQ ID NO: 4904626 - DNA, 25 bp, Homo sapien
caattaaaactcactcctgactggg

SEQ ID NO: 4904627 - DNA, 25 bp, Homo sapien
tcggaatagtttagcaggactgttt

SEQ ID NO: 4904628 - DNA, 25 bp, Homo sapien
cccaggtgacacaatggagctggag

SEQ ID NO: 4904629 - DNA, 25 bp, Homo sapien
tggagctggagtcccaattttgtca

SEQ ID NO: 4904630 - DNA, 25 bp, Homo sapien
caaattcccatctgaaatcggaata

SEQ ID NO: 4904631 - DNA, 25 bp, Homo sapien
actccttgtaaatgcctttctgcag

SEQ ID NO: 4904632 - DNA, 25 bp, Homo sapien
gactccttgtaaatgcctttctgca

SEQ ID NO: 4904633 - DNA, 25 bp, Homo sapien
tatatgtcagtctcagtttattgtg

SEQ ID NO: 4904634 - DNA, 25 bp, Homo sapien
ggtctgacgtcaataaagttccctc

SEQ ID NO: 4904635 - DNA, 25 bp, Homo sapien
gaattgtactcgtgtttatatgtca

SEQ ID NO: 4904636 - DNA, 25 bp, Homo sapien
tgtctatacagaatttattgcccac

SEQ ID NO: 4904637 - DNA, 25 bp, Homo sapien
catgtctgcaacaacataagaaaca

SEQ ID NO: 4904638 - DNA, 25 bp, Homo sapien
catgacagtcatggtgtctccgtgg

SEQ ID NO: 4904639 - DNA, 25 bp, Homo sapien
aacattcatctgctttggatccatg

SEQ ID NO: 4904640 - DNA, 25 bp, Homo sapien
taagaaacaacagcccaaacagcag

SEQ ID NO: 4904641 - DNA, 25 bp, Homo sapien
gaagaggagttttccaaagttgcag

SEQ ID NO: 4904642 - DNA, 25 bp, Homo sapien
gaatttggaaagtatcaagaaagat

SEQ ID NO: 4904643 - DNA, 25 bp, Homo sapien
cactgtaatccctaccatatgttga

SEQ ID NO: 4904644 - DNA, 25 bp, Homo sapien
gatgaattggatgaaattgttatgt

SEQ ID NO: 4904645 - DNA, 25 bp, Homo sapien
tttagtcatcttcagtgtaagggtc

SEQ ID NO: 4904646 - DNA, 25 bp, Homo sapien
cagagtactggtgtgctacttcgtc

SEQ ID NO: 4904647 - DNA, 25 bp, Homo sapien
ctacttcgtcagaaatgaaagatcc

SEQ ID NO: 4904648 - DNA, 25 bp, Homo sapien
tggcctacatacaagtccactaatg

SEQ ID NO: 4904649 - DNA, 25 bp, Homo sapien
taggttgataattgttgtctctcag

SEQ ID NO: 4904650 - DNA, 25 bp, Homo sapien
tgttaagaagttagctaaaagtcca

SEQ ID NO: 4904651 - DNA, 25 bp, Homo sapien
ctgagcacagagttgttaggttgat

SEQ ID NO: 4904652 - DNA, 25 bp, Homo sapien
gcttttttcaagatagtccatctct

SEQ ID NO: 4904653 - DNA, 25 bp, Homo sapien
gaatactcaccagaccagtttaaag

SEQ ID NO: 4904654 - DNA, 25 bp, Homo sapien
tgttggtcgcacttagaatactcac

SEQ ID NO: 4904655 - DNA, 25 bp, Homo sapien
gaaaaaggctatctggaacccacag

SEQ ID NO: 4904656 - DNA, 25 bp, Homo sapien
tatttctacatgacagttaggccca

SEQ ID NO: 4904657 - DNA, 25 bp, Homo sapien
aaggcgaatgaggagcaaagagtca

SEQ ID NO: 4904658 - DNA, 25 bp, Homo sapien
gctgaaggcgaatgaggagcaaaga

SEQ ID NO: 4904659 - DNA, 25 bp, Homo sapien
tgaaggcgaatgaggagcaaagagt

SEQ ID NO: 4904660 - DNA, 25 bp, Homo sapien
aggcgaatgaggagcaaagagtcat

SEQ ID NO: 4904661 - DNA, 25 bp, Homo sapien
ttcttagtcatgcttcacatccatt

SEQ ID NO: 4904662 - DNA, 25 bp, Homo sapien
cattatctgaaacattgccatttgc

SEQ ID NO: 4904663 - DNA, 25 bp, Homo sapien
tatttcttagtcatgcttcacatcc

SEQ ID NO: 4904664 - DNA, 25 bp, Homo sapien
aggcattatctgaaacattgccatt

SEQ ID NO: 4904665 - DNA, 25 bp, Homo sapien
tagttactcaatagcttgtgccagg

SEQ ID NO: 4904666 - DNA, 25 bp, Homo sapien
gcctggtacaccctagcaattatga

SEQ ID NO: 4904667 - DNA, 25 bp, Homo sapien
gctttgctacaaaggaatacctaag

SEQ ID NO: 4904668 - DNA, 25 bp, Homo sapien
gaaaataggccaccacacaaatgat

SEQ ID NO: 4904669 - DNA, 25 bp, Homo sapien
caaggctttctgaggtaccatccaa

SEQ ID NO: 4904670 - DNA, 25 bp, Homo sapien
tgtggctgcttgagcaggcccagaa

SEQ ID NO: 4904671 - DNA, 25 bp, Homo sapien
taatcaccaatgatattaagaccgt

SEQ ID NO: 4904672 - DNA, 25 bp, Homo sapien
aagaccgtcaggttctgtgaagaac

SEQ ID NO: 4904673 - DNA, 25 bp, Homo sapien
gtacaatgtgatgtaccactgaact

SEQ ID NO: 4904674 - DNA, 25 bp, Homo sapien
ggttctttgttctactccattgttc

SEQ ID NO: 4904675 - DNA, 25 bp, Homo sapien
tatgtaagggtttatatctgggttc

SEQ ID NO: 4904676 - DNA, 25 bp, Homo sapien
aagttagctattgaatgaaggggag

SEQ ID NO: 4904677 - DNA, 25 bp, Homo sapien
tcttatgcgtttctcatcatagagg

SEQ ID NO: 4904678 - DNA, 25 bp, Homo sapien
tgtttgggtgcataagaagtatttt

SEQ ID NO: 4904679 - DNA, 25 bp, Homo sapien
gaggcccttgtcttgggcattacct

SEQ ID NO: 4904680 - DNA, 25 bp, Homo sapien
gtttctcatcatagaggcccttgtc

SEQ ID NO: 4904681 - DNA, 25 bp, Homo sapien
tctgcaggacagatagtctctccca

SEQ ID NO: 4904682 - DNA, 25 bp, Homo sapien
tctctgcaggacagatagtctctcc

SEQ ID NO: 4904683 - DNA, 25 bp, Homo sapien
catttgccttgccaaatcccattct

SEQ ID NO: 4904684 - DNA, 25 bp, Homo sapien
tgcaggacagatagtctctcccaac

SEQ ID NO: 4904685 - DNA, 25 bp, Homo sapien
gagtatgtacatcgctctttttttc

SEQ ID NO: 4904686 - DNA, 25 bp, Homo sapien
tgtgagtatgtacatcgctcttttt

SEQ ID NO: 4904687 - DNA, 25 bp, Homo sapien
agtatgtacatcgctctttttttct

SEQ ID NO: 4904688 - DNA, 25 bp, Homo sapien
gtgagtatgtacatcgctctttttt

SEQ ID NO: 4904689 - DNA, 25 bp, Homo sapien
gataggcttccagagcctttcatgt

SEQ ID NO: 4904690 - DNA, 25 bp, Homo sapien
aatgtcctgaggctatttctgtcag

SEQ ID NO: 4904691 - DNA, 25 bp, Homo sapien
gcagcatagataggcttccagagcc

SEQ ID NO: 4904692 - DNA, 25 bp, Homo sapien
tgggactgagcagcatagataggct

SEQ ID NO: 4904693 - DNA, 25 bp, Homo sapien
caggagcctgcccagatgctctcgt

SEQ ID NO: 4904694 - DNA, 25 bp, Homo sapien
cagccaggagcctgcccagatgctc

SEQ ID NO: 4904695 - DNA, 25 bp, Homo sapien
agccaggagcctgcccagatgctct

SEQ ID NO: 4904696 - DNA, 25 bp, Homo sapien
agcctgcccagatgctctcgtcctc

SEQ ID NO: 4904697 - DNA, 25 bp, Homo sapien
ttaaccctggacttgggagtgcatt

SEQ ID NO: 4904698 - DNA, 25 bp, Homo sapien
cactatggacccaaccactgctgct

SEQ ID NO: 4904699 - DNA, 25 bp, Homo sapien
tgtagcaccagagtcttcctgctgt

SEQ ID NO: 4904700 - DNA, 25 bp, Homo sapien
tgccttgaccaccactatggaccca

SEQ ID NO: 4904701 - DNA, 25 bp, Homo sapien
ggaagtaaagattgaagagtaatgg

SEQ ID NO: 4904702 - DNA, 25 bp, Homo sapien
taatggttttacatctgcgcacact

SEQ ID NO: 4904703 - DNA, 25 bp, Homo sapien
tacatctgcgcacactccgggctaa

SEQ ID NO: 4904704 - DNA, 25 bp, Homo sapien
acactccgggctaaacaagcagggg

SEQ ID NO: 4904705 - DNA, 25 bp, Homo sapien
caaatcccaatcaagggtttctcca

SEQ ID NO: 4904706 - DNA, 25 bp, Homo sapien
aaatcccaatcaagggtttctccag

SEQ ID NO: 4904707 - DNA, 25 bp, Homo sapien
aatcccaatcaagggtttctccaga

SEQ ID NO: 4904708 - DNA, 25 bp, Homo sapien
gaatgatctatcatcctggtactga

SEQ ID NO: 4904709 - DNA, 25 bp, Homo sapien
tctatcatcctggtactgagcatag

SEQ ID NO: 4904710 - DNA, 25 bp, Homo sapien
aggtttgaagtacgaatgatctatc

SEQ ID NO: 4904711 - DNA, 25 bp, Homo sapien
ctcccgcttgtaagtcagaatatgc

SEQ ID NO: 4904712 - DNA, 25 bp, Homo sapien
gagaaattctgacctaagcctgaag

SEQ ID NO: 4904713 - DNA, 25 bp, Homo sapien
tgtactagatttagcccacgggcca

SEQ ID NO: 4904714 - DNA, 25 bp, Homo sapien
gattctcgtagcatgaaggcagtca

SEQ ID NO: 4904715 - DNA, 25 bp, Homo sapien
tgttaactaagcgtggtctcaggct

SEQ ID NO: 4904716 - DNA, 25 bp, Homo sapien
tagtagagtataatgagtagaacca

SEQ ID NO: 4904717 - DNA, 25 bp, Homo sapien
tcagcccagaagaagggccctaatc

SEQ ID NO: 4904718 - DNA, 25 bp, Homo sapien
tgtcttactttgtttggtgttgcta

SEQ ID NO: 4904719 - DNA, 25 bp, Homo sapien
actaatccattcctgagagcgagaa

SEQ ID NO: 4904720 - DNA, 25 bp, Homo sapien
gaaaggccaaagtgtgcccacttcc

SEQ ID NO: 4904721 - DNA, 25 bp, Homo sapien
ctatggacagaatcctgggagctgt

SEQ ID NO: 4904722 - DNA, 25 bp, Homo sapien
aaagacggtgtcttgtcacatccag

SEQ ID NO: 4904723 - DNA, 25 bp, Homo sapien
cttcctggcaccactatggacagaa

SEQ ID NO: 4904724 - DNA, 25 bp, Homo sapien
gggctgtagcccctgttgacaagta

SEQ ID NO: 4904725 - DNA, 25 bp, Homo sapien
ggctgtagcccctgttgacaagtat

SEQ ID NO: 4904726 - DNA, 25 bp, Homo sapien
acattggtaatagaggacacttcag

SEQ ID NO: 4904727 - DNA, 25 bp, Homo sapien
taatagaggacacttcagggttaat

SEQ ID NO: 4904728 - DNA, 25 bp, Homo sapien
gccttgtctgccacacattggctta

SEQ ID NO: 4904729 - DNA, 25 bp, Homo sapien
tctgccacacattggcttatcgagg

SEQ ID NO: 4904730 - DNA, 25 bp, Homo sapien
cacattggcttatcgagggcccctg

SEQ ID NO: 4904731 - DNA, 25 bp, Homo sapien
tcgagggcccctgcatgaaccttct

SEQ ID NO: 4904732 - DNA, 25 bp, Homo sapien
tgacagctaacaagataaatgtgtc

SEQ ID NO: 4904733 - DNA, 25 bp, Homo sapien
gacagctaacaagataaatgtgtca

SEQ ID NO: 4904734 - DNA, 25 bp, Homo sapien
tgcacataccattgtttgttattgc

SEQ ID NO: 4904735 - DNA, 25 bp, Homo sapien
cttgcacataccattgtttgttatt

SEQ ID NO: 4904736 - DNA, 25 bp, Homo sapien
cacataccattgtttgttattgctg

SEQ ID NO: 4904737 - DNA, 25 bp, Homo sapien
cataccattgtttgttattgctgtt

SEQ ID NO: 4904738 - DNA, 25 bp, Homo sapien
tttcagggtgaccagaggctttttc

SEQ ID NO: 4904739 - DNA, 25 bp, Homo sapien
cttttcagggtgaccagaggctttt

SEQ ID NO: 4904740 - DNA, 25 bp, Homo sapien
tggtcattatgtcaagtggttgcac

SEQ ID NO: 4904741 - DNA, 25 bp, Homo sapien
cattagattcggtctttaagagatc

SEQ ID NO: 4904742 - DNA, 25 bp, Homo sapien
aagtcctccatgtgaaccagttctg

SEQ ID NO: 4904743 - DNA, 25 bp, Homo sapien
gttacatggaagaaagtcctccatg

SEQ ID NO: 4904744 - DNA, 25 bp, Homo sapien
tgaagcaaatagaagcttgcagttt

SEQ ID NO: 4904745 - DNA, 25 bp, Homo sapien
gcaaatagaagcttgcagttttaaa

SEQ ID NO: 4904746 - DNA, 25 bp, Homo sapien
gaagcaaatagaagcttgcagtttt

SEQ ID NO: 4904747 - DNA, 25 bp, Homo sapien
aagcaaatagaagcttgcagtttta

SEQ ID NO: 4904748 - DNA, 25 bp, Homo sapien
tccgggactagaggagctataaatc

SEQ ID NO: 4904749 - DNA, 25 bp, Homo sapien
taaatccagtcagtgcgggatggtc

SEQ ID NO: 4904750 - DNA, 25 bp, Homo sapien
ccctgcccatgatccgggactagag

SEQ ID NO: 4904751 - DNA, 25 bp, Homo sapien
tagaggagctataaatccagtcagt

SEQ ID NO: 4904752 - DNA, 25 bp, Homo sapien
cctgcccaacaccagaaggtgaatc

SEQ ID NO: 4904753 - DNA, 25 bp, Homo sapien
ataaggaggtgccttgcccctttct

SEQ ID NO: 4904754 - DNA, 25 bp, Homo sapien
gatccccagagctgactccagctag

SEQ ID NO: 4904755 - DNA, 25 bp, Homo sapien
ggctcagacaggtgttgagtcagat

SEQ ID NO: 4904756 - DNA, 25 bp, Homo sapien
tgttgagtcagatccccagagctga

SEQ ID NO: 4904757 - DNA, 25 bp, Homo sapien
gacaggtgttgagtcagatccccag

SEQ ID NO: 4904758 - DNA, 25 bp, Homo sapien
agctggagagatccctcagggtcag

SEQ ID NO: 4904759 - DNA, 25 bp, Homo sapien
ggagctggagagatccctcagggtc

SEQ ID NO: 4904760 - DNA, 25 bp, Homo sapien
taggagctggagagatccctcaggg

SEQ ID NO: 4904761 - DNA, 25 bp, Homo sapien
ctggagagatccctcagggtcagct

SEQ ID NO: 4904762 - DNA, 25 bp, Homo sapien
actaaaaaggatccagtgtgctcca

SEQ ID NO: 4904763 - DNA, 25 bp, Homo sapien
ttgcgtaaagaacactgtattccac

SEQ ID NO: 4904764 - DNA, 25 bp, Homo sapien
tccactggagtcacaataacgcttt

SEQ ID NO: 4904765 - DNA, 25 bp, Homo sapien
acttcagaataattgcgtaaagaac

SEQ ID NO: 4904766 - DNA, 25 bp, Homo sapien
ctgtggtataggaggacttcttagc

SEQ ID NO: 4904767 - DNA, 25 bp, Homo sapien
ggtataggaggacttcttagcttcc

SEQ ID NO: 4904768 - DNA, 25 bp, Homo sapien
gtataggaggacttcttagcttcca

SEQ ID NO: 4904769 - DNA, 25 bp, Homo sapien
aattctgcttcgaaaggttccttgg

SEQ ID NO: 4904770 - DNA, 25 bp, Homo sapien
tgtaggtgacattactgaaggcttg

SEQ ID NO: 4904771 - DNA, 25 bp, Homo sapien
gactcaaacacagtgtcatccaatt

SEQ ID NO: 4904772 - DNA, 25 bp, Homo sapien
gaattgtaccatagcatcagaaact

SEQ ID NO: 4904773 - DNA, 25 bp, Homo sapien
tttagaggcagcgaaaaacaaagcc

SEQ ID NO: 4904774 - DNA, 25 bp, Homo sapien
tgcagaagaattccccaaaattggg

SEQ ID NO: 4904775 - DNA, 25 bp, Homo sapien
gataatctcctttgatgtgcccgga

SEQ ID NO: 4904776 - DNA, 25 bp, Homo sapien
aaacaaagccggtgccagaggaatg

SEQ ID NO: 4904777 - DNA, 25 bp, Homo sapien
ggagtaatcgcacaacatgggccag

SEQ ID NO: 4904778 - DNA, 25 bp, Homo sapien
tgggccagccatggtcaagtacaat

SEQ ID NO: 4904779 - DNA, 25 bp, Homo sapien
tgtcagtgacagtatagagctctct

SEQ ID NO: 4904780 - DNA, 25 bp, Homo sapien
gactaagttaggaactgctttctcc

SEQ ID NO: 4904781 - DNA, 25 bp, Homo sapien
tatggcacctgatcagcctaagaca

SEQ ID NO: 4904782 - DNA, 25 bp, Homo sapien
gagtccagggaactagcttgctctc

SEQ ID NO: 4904783 - DNA, 25 bp, Homo sapien
tcacttttgtatggcagacctgaca

SEQ ID NO: 4904784 - DNA, 25 bp, Homo sapien
ttcatgtcgtgaaagaaaggcctgc

SEQ ID NO: 4904785 - DNA, 25 bp, Homo sapien
ctagaaggatgacaatcgtattatt

SEQ ID NO: 4904786 - DNA, 25 bp, Homo sapien
tagaaggatgacaatcgtattatta

SEQ ID NO: 4904787 - DNA, 25 bp, Homo sapien
gaaggatgacaatcgtattattaat

SEQ ID NO: 4904788 - DNA, 25 bp, Homo sapien
aaggatgacaatcgtattattaata

SEQ ID NO: 4904789 - DNA, 25 bp, Homo sapien
tggaggcttcgactgccagctcctt

SEQ ID NO: 4904790 - DNA, 25 bp, Homo sapien
gtggaggcttcgactgccagctcct

SEQ ID NO: 4904791 - DNA, 25 bp, Homo sapien
agaaatcatacctgccctggaaatt

SEQ ID NO: 4904792 - DNA, 25 bp, Homo sapien
aagtgccagtcgtagtgattccggg

SEQ ID NO: 4904793 - DNA, 25 bp, Homo sapien
gagaacactgtcagatcagggcttt

SEQ ID NO: 4904794 - DNA, 25 bp, Homo sapien
tcaaagtgccagtcgtagtgattcc

SEQ ID NO: 4904795 - DNA, 25 bp, Homo sapien
ggaacatcacatgcaattggaacat

SEQ ID NO: 4904796 - DNA, 25 bp, Homo sapien
cacttggtacgcaaattcaatgcaa

SEQ ID NO: 4904797 - DNA, 25 bp, Homo sapien
ctggtacacaatacacttggtacgc

SEQ ID NO: 4904798 - DNA, 25 bp, Homo sapien
tgcaattggaacatcacatgcaatt

SEQ ID NO: 4904799 - DNA, 25 bp, Homo sapien
ctgagccctctatttcccagacaaa

SEQ ID NO: 4904800 - DNA, 25 bp, Homo sapien
aaggacagggactggtcactgagcc

SEQ ID NO: 4904801 - DNA, 25 bp, Homo sapien
gggactggtcactgagccctctatt

SEQ ID NO: 4904802 - DNA, 25 bp, Homo sapien
tgagccctctatttcccagacaaaa

SEQ ID NO: 4904803 - DNA, 25 bp, Homo sapien
catggagcccttgctcttggttcca

SEQ ID NO: 4904804 - DNA, 25 bp, Homo sapien
tgcccaccatgagattcctttgtcg

SEQ ID NO: 4904805 - DNA, 25 bp, Homo sapien
ggtggctccaccttttggtctgtgc

SEQ ID NO: 4904806 - DNA, 25 bp, Homo sapien
tgaaccccagtgacggtctcttgcg

SEQ ID NO: 4904807 - DNA, 25 bp, Homo sapien
cctcttgtggcgtgtggttttggca

SEQ ID NO: 4904808 - DNA, 25 bp, Homo sapien
gtggtccctcttgtggcgtgtggtt

SEQ ID NO: 4904809 - DNA, 25 bp, Homo sapien
ggctctccgtcttctgtttgggagt

SEQ ID NO: 4904810 - DNA, 25 bp, Homo sapien
agtgcctgggctctccgtcttctgt

SEQ ID NO: 4904811 - DNA, 25 bp, Homo sapien
tccggtgatacaggctggcacctcg

SEQ ID NO: 4904812 - DNA, 25 bp, Homo sapien
gcacagtgtccggtgatacaggctg

SEQ ID NO: 4904813 - DNA, 25 bp, Homo sapien
aggctggcacctcgagaatcaggga

SEQ ID NO: 4904814 - DNA, 25 bp, Homo sapien
ctggcacctcgagaatcagggatgg

SEQ ID NO: 4904815 - DNA, 25 bp, Homo sapien
aaagcacagtggatatggacagtgg

SEQ ID NO: 4904816 - DNA, 25 bp, Homo sapien
tggtacaagtaagcctggctggagt

SEQ ID NO: 4904817 - DNA, 25 bp, Homo sapien
agtcactggctttgggtacctgatg

SEQ ID NO: 4904818 - DNA, 25 bp, Homo sapien
tccagaatggttgtctgttaaatgt

SEQ ID NO: 4904819 - DNA, 25 bp, Homo sapien
gcttttctggccagacgatgccttt

SEQ ID NO: 4904820 - DNA, 25 bp, Homo sapien
atctcctctattgcatggtaagtgc

SEQ ID NO: 4904821 - DNA, 25 bp, Homo sapien
tctggccagacgatgcctttttggt

SEQ ID NO: 4904822 - DNA, 25 bp, Homo sapien
tcatctcctctattgcatggtaagt

SEQ ID NO: 4904823 - DNA, 25 bp, Homo sapien
tgttgctgtgttctgtgaaaataac

SEQ ID NO: 4904824 - DNA, 25 bp, Homo sapien
ctgtgttctgtgaaaataacctccc

SEQ ID NO: 4904825 - DNA, 25 bp, Homo sapien
tggaagaataatttggaaattgttg

SEQ ID NO: 4904826 - DNA, 25 bp, Homo sapien
tgttctgtgaaaataacctccccaa

SEQ ID NO: 4904827 - DNA, 25 bp, Homo sapien
taagttcctcaagagagtccttggc

SEQ ID NO: 4904828 - DNA, 25 bp, Homo sapien
gagtgggcctgcaaaatcagacaga

SEQ ID NO: 4904829 - DNA, 25 bp, Homo sapien
gggacctccctagcttggaaaatga

SEQ ID NO: 4904830 - DNA, 25 bp, Homo sapien
gatttggagcaaaaccgtcgagtag

SEQ ID NO: 4904831 - DNA, 25 bp, Homo sapien
tatggagcatctcaagcttctcctg

SEQ ID NO: 4904832 - DNA, 25 bp, Homo sapien
ttggatctccgggttatttccagtg

SEQ ID NO: 4904833 - DNA, 25 bp, Homo sapien
gtctccaatatggagcatctcaagc

SEQ ID NO: 4904834 - DNA, 25 bp, Homo sapien
ttccagtgggtgtaaaagcagagct

SEQ ID NO: 4904835 - DNA, 25 bp, Homo sapien
ggatctgctggcaaaccctgaacct

SEQ ID NO: 4904836 - DNA, 25 bp, Homo sapien
taatgcttcctaagacccaagtgcc

SEQ ID NO: 4904837 - DNA, 25 bp, Homo sapien
gcatctgcttgagttataaacccca

SEQ ID NO: 4904838 - DNA, 25 bp, Homo sapien
ggcactgcgcacacatactaggttg

SEQ ID NO: 4904839 - DNA, 25 bp, Homo sapien
ccaaaagcctgcaactgcttgacaa

SEQ ID NO: 4904840 - DNA, 25 bp, Homo sapien
ggaagcatgtagacacacgtggtat

SEQ ID NO: 4904841 - DNA, 25 bp, Homo sapien
cacgtggtatgaattgaagggctcc

SEQ ID NO: 4904842 - DNA, 25 bp, Homo sapien
ctcgtaattcttgtcagggacaaaa

SEQ ID NO: 4904843 - DNA, 25 bp, Homo sapien
tcaggctccgatggcctcttccatg

SEQ ID NO: 4904844 - DNA, 25 bp, Homo sapien
tatgaactgtgggtattttcctctg

SEQ ID NO: 4904845 - DNA, 25 bp, Homo sapien
gcttcttgccttaggtcaggctccg

SEQ ID NO: 4904846 - DNA, 25 bp, Homo sapien
catgccttgagccaatggaccgagt

SEQ ID NO: 4904847 - DNA, 25 bp, Homo sapien
gctaaatgcaggcactatatttgga

SEQ ID NO: 4904848 - DNA, 25 bp, Homo sapien
aatcaatggttttagcacacacaac

SEQ ID NO: 4904849 - DNA, 25 bp, Homo sapien
gggaatttactctctttgctaaatg

SEQ ID NO: 4904850 - DNA, 25 bp, Homo sapien
tcaataggcaggcttctcccagtat

SEQ ID NO: 4904851 - DNA, 25 bp, Homo sapien
cacaatgaacttgcggccagagctc

SEQ ID NO: 4904852 - DNA, 25 bp, Homo sapien
acaatgaacttgcggccagagctca

SEQ ID NO: 4904853 - DNA, 25 bp, Homo sapien
caatgaacttgcggccagagctcat

SEQ ID NO: 4904854 - DNA, 25 bp, Homo sapien
tgccgacagactttgcttggccctg

SEQ ID NO: 4904855 - DNA, 25 bp, Homo sapien
tttggtcatgcatcagcatgctggc

SEQ ID NO: 4904856 - DNA, 25 bp, Homo sapien
cagcagcttagcctggtctctgtgt

SEQ ID NO: 4904857 - DNA, 25 bp, Homo sapien
tgctgcctgcccgtgtgtttctgag

SEQ ID NO: 4904858 - DNA, 25 bp, Homo sapien
gctagcaagatgaaacgccagagtg

SEQ ID NO: 4904859 - DNA, 25 bp, Homo sapien
tagtgcgagccctagtgaaagtgga

SEQ ID NO: 4904860 - DNA, 25 bp, Homo sapien
tttcctacaacctgagcagctcggg

SEQ ID NO: 4904861 - DNA, 25 bp, Homo sapien
gctcaggcaaaggtctgcattctgt

SEQ ID NO: 4904862 - DNA, 25 bp, Homo sapien
tcgcttcattcccaatcttcccgtc

SEQ ID NO: 4904863 - DNA, 25 bp, Homo sapien
cttctcgcttcattcccaatcttcc

SEQ ID NO: 4904864 - DNA, 25 bp, Homo sapien
tctcgcttcattcccaatcttcccg

SEQ ID NO: 4904865 - DNA, 25 bp, Homo sapien
gcttcattcccaatcttcccgtcat

SEQ ID NO: 4904866 - DNA, 25 bp, Homo sapien
ctgtacccttttactctcccagagg

SEQ ID NO: 4904867 - DNA, 25 bp, Homo sapien
gcagcttctcctcacggtttccagt

SEQ ID NO: 4904868 - DNA, 25 bp, Homo sapien
ctcagactgcatcctgtaccctttt

SEQ ID NO: 4904869 - DNA, 25 bp, Homo sapien
aacactgagagctcacttcatgctc

SEQ ID NO: 4904870 - DNA, 25 bp, Homo sapien
agttctctttcaccacatctaacat

SEQ ID NO: 4904871 - DNA, 25 bp, Homo sapien
cttcccttcaaagtctcttgctgga

SEQ ID NO: 4904872 - DNA, 25 bp, Homo sapien
tccttcccttcaaagtctcttgctg

SEQ ID NO: 4904873 - DNA, 25 bp, Homo sapien
tcttgctggagcctgaaacagttct

SEQ ID NO: 4904874 - DNA, 25 bp, Homo sapien
tgtcatcttgccagctacattctgc

SEQ ID NO: 4904875 - DNA, 25 bp, Homo sapien
agcccccgtgacaacattctgccat

SEQ ID NO: 4904876 - DNA, 25 bp, Homo sapien
atggtctgctactgtcatcttgcca

SEQ ID NO: 4904877 - DNA, 25 bp, Homo sapien
gctactgtcatcttgccagctacat

SEQ ID NO: 4904878 - DNA, 25 bp, Homo sapien
cgaggacctgtagatgcccatgacc

SEQ ID NO: 4904879 - DNA, 25 bp, Homo sapien
tcagtgtccctgtggctcgaggacc

SEQ ID NO: 4904880 - DNA, 25 bp, Homo sapien
gtggcacagactgcaagttctgctc

SEQ ID NO: 4904881 - DNA, 25 bp, Homo sapien
gcactctaatcttgttgtggcacag

SEQ ID NO: 4904882 - DNA, 25 bp, Homo sapien
ttctttctagtcttgattccgtcat

SEQ ID NO: 4904883 - DNA, 25 bp, Homo sapien
tctagtcttgattccgtcataaact

SEQ ID NO: 4904884 - DNA, 25 bp, Homo sapien
agtcttgattccgtcataaactcta

SEQ ID NO: 4904885 - DNA, 25 bp, Homo sapien
ttgattccgtcataaactctatgtt

SEQ ID NO: 4904886 - DNA, 25 bp, Homo sapien
gagctgctccctccaagggttggga

SEQ ID NO: 4904887 - DNA, 25 bp, Homo sapien
ggttgggatgatccacaggcactag

SEQ ID NO: 4904888 - DNA, 25 bp, Homo sapien
gcgcagcctctgcaagggagctgct

SEQ ID NO: 4904889 - DNA, 25 bp, Homo sapien
ggcagccagatgagctgggagatgt

SEQ ID NO: 4904890 - DNA, 25 bp, Homo sapien
ttgggccattgataagggaggggtc

SEQ ID NO: 4904891 - DNA, 25 bp, Homo sapien
ggtccacaagaggaagctctgatgg

SEQ ID NO: 4904892 - DNA, 25 bp, Homo sapien
ccattgataagggaggggtccacaa

SEQ ID NO: 4904893 - DNA, 25 bp, Homo sapien
aggggtccacaagaggaagctctga

SEQ ID NO: 4904894 - DNA, 25 bp, Homo sapien
ggctcctccagggtgaaggccatca

SEQ ID NO: 4904895 - DNA, 25 bp, Homo sapien
caccgtggctcctccagggtgaagg

SEQ ID NO: 4904896 - DNA, 25 bp, Homo sapien
gctcctccagggtgaaggccatcac

SEQ ID NO: 4904897 - DNA, 25 bp, Homo sapien
cgtggctcctccagggtgaaggcca

SEQ ID NO: 4904898 - DNA, 25 bp, Homo sapien
gtcaaaccagagaatgtcaaccagc

SEQ ID NO: 4904899 - DNA, 25 bp, Homo sapien
tcttcatgagtagcagggggaatca

SEQ ID NO: 4904900 - DNA, 25 bp, Homo sapien
cagagactgcacatcaatatccagg

SEQ ID NO: 4904901 - DNA, 25 bp, Homo sapien
tatccaggagttggggtagtaccat

SEQ ID NO: 4904902 - DNA, 25 bp, Homo sapien
gaatcttggctgtatcacttaccag

SEQ ID NO: 4904903 - DNA, 25 bp, Homo sapien
taagaaacccagtgatcctgattgc

SEQ ID NO: 4904904 - DNA, 25 bp, Homo sapien
gattgccactcacttgacctcagca

SEQ ID NO: 4904905 - DNA, 25 bp, Homo sapien
gagctgagctgatcttaagaaaccc

SEQ ID NO: 4904906 - DNA, 25 bp, Homo sapien
aaggacacaaacagtggaccttttg

SEQ ID NO: 4904907 - DNA, 25 bp, Homo sapien
gacacaaacagtggaccttttgtcc

SEQ ID NO: 4904908 - DNA, 25 bp, Homo sapien
ggacacaaacagtggaccttttgtc

SEQ ID NO: 4904909 - DNA, 25 bp, Homo sapien
aggacacaaacagtggaccttttgt

SEQ ID NO: 4904910 - DNA, 25 bp, Homo sapien
gccggaaacagtggtcaattatgat

SEQ ID NO: 4904911 - DNA, 25 bp, Homo sapien
gaaacagtggtcaattatgatcagg

SEQ ID NO: 4904912 - DNA, 25 bp, Homo sapien
aacagtggtcaattatgatcagggc

SEQ ID NO: 4904913 - DNA, 25 bp, Homo sapien
gagagccggaaacagtggtcaatta

SEQ ID NO: 4904914 - DNA, 25 bp, Homo sapien
taagttatcttcagcaacacagggc

SEQ ID NO: 4904915 - DNA, 25 bp, Homo sapien
gataggatggcaatgattgtcttca

SEQ ID NO: 4904916 - DNA, 25 bp, Homo sapien
gaaaaaatgcagttagggtgacata

SEQ ID NO: 4904917 - DNA, 25 bp, Homo sapien
agtctccattgtatgctaagttatc

SEQ ID NO: 4904918 - DNA, 25 bp, Homo sapien
tggctgaagtaggaagccatggttc

SEQ ID NO: 4904919 - DNA, 25 bp, Homo sapien
gctttaagagatcccagatcaagca

SEQ ID NO: 4904920 - DNA, 25 bp, Homo sapien
gactccaaacaaatctcagatcttg

SEQ ID NO: 4904921 - DNA, 25 bp, Homo sapien
ctctgtcctctgactccaaacaaat

SEQ ID NO: 4904922 - DNA, 25 bp, Homo sapien
tcagatcttggctttaagagatccc

SEQ ID NO: 4904923 - DNA, 25 bp, Homo sapien
ggatttatggaggatgctctgaagc

SEQ ID NO: 4904924 - DNA, 25 bp, Homo sapien
cactgttgacaatcctagatatgcc

SEQ ID NO: 4904925 - DNA, 25 bp, Homo sapien
tgggtagcgtgccatccagaagatg

SEQ ID NO: 4904926 - DNA, 25 bp, Homo sapien
gaatatgagtctggaatcctacaca

SEQ ID NO: 4904927 - DNA, 25 bp, Homo sapien
cacaccctttgtccttctgtccata

SEQ ID NO: 4904928 - DNA, 25 bp, Homo sapien
tcacaccctttgtccttctgtccat

SEQ ID NO: 4904929 - DNA, 25 bp, Homo sapien
acaccctttgtccttctgtccatac

SEQ ID NO: 4904930 - DNA, 25 bp, Homo sapien
caggccctcctaggcttcatgagca

SEQ ID NO: 4904931 - DNA, 25 bp, Homo sapien
atgagtcaagtcaagtcccagccca

SEQ ID NO: 4904932 - DNA, 25 bp, Homo sapien
gaaggccagaagtaggacctaacag

SEQ ID NO: 4904933 - DNA, 25 bp, Homo sapien
cacacagtgagagaatgactcctgg

SEQ ID NO: 4904934 - DNA, 25 bp, Homo sapien
tctcaaggttcctgctcttgatggg

SEQ ID NO: 4904935 - DNA, 25 bp, Homo sapien
cataggctcctgatatcagcttctc

SEQ ID NO: 4904936 - DNA, 25 bp, Homo sapien
ctaggcattctcataggctcctgat

SEQ ID NO: 4904937 - DNA, 25 bp, Homo sapien
tatccaggatatattgttagggtcc

SEQ ID NO: 4904938 - DNA, 25 bp, Homo sapien
gaaactgtgaacctctatccaggat

SEQ ID NO: 4904939 - DNA, 25 bp, Homo sapien
ttttccagatcctaagccagctacg

SEQ ID NO: 4904940 - DNA, 25 bp, Homo sapien
cagagtcccgtctgcgtacagctct

SEQ ID NO: 4904941 - DNA, 25 bp, Homo sapien
cattgcaaaccctaacagtggcctt

SEQ ID NO: 4904942 - DNA, 25 bp, Homo sapien
tggtttgacaggagcacctcgttgc

SEQ ID NO: 4904943 - DNA, 25 bp, Homo sapien
actcatacatgtggccaggttcagg

SEQ ID NO: 4904944 - DNA, 25 bp, Homo sapien
aactcatacatgtggccaggttcag

SEQ ID NO: 4904945 - DNA, 25 bp, Homo sapien
tcaggcctgaactcatacatgtggc

SEQ ID NO: 4904946 - DNA, 25 bp, Homo sapien
ggcctgaactcatacatgtggccag

SEQ ID NO: 4904947 - DNA, 25 bp, Homo sapien
cctccaggtctatggagtggaaagc

SEQ ID NO: 4904948 - DNA, 25 bp, Homo sapien
ttggtgtggataaaggtggatggac

SEQ ID NO: 4904949 - DNA, 25 bp, Homo sapien
cagtgtcatcggttggttggtttgt

SEQ ID NO: 4904950 - DNA, 25 bp, Homo sapien
acagacagtgtcatcggttggttgg

SEQ ID NO: 4904951 - DNA, 25 bp, Homo sapien
ttctttgctctcactttggaagagc

SEQ ID NO: 4904952 - DNA, 25 bp, Homo sapien
taggctcgacatcttgacagacatc

SEQ ID NO: 4904953 - DNA, 25 bp, Homo sapien
gccactttgtactggagagtggaga

SEQ ID NO: 4904954 - DNA, 25 bp, Homo sapien
aaagtgaggctaccttttgcacagc

SEQ ID NO: 4904955 - DNA, 25 bp, Homo sapien
gggatactacccatgaaaaagtgag

SEQ ID NO: 4904956 - DNA, 25 bp, Homo sapien
tgagaaccgctctttagtcatatcc

SEQ ID NO: 4904957 - DNA, 25 bp, Homo sapien
cctttcctgtctgatgagaaccgct

SEQ ID NO: 4904958 - DNA, 25 bp, Homo sapien
cctgtctgatgagaaccgctcttta

SEQ ID NO: 4904959 - DNA, 25 bp, Homo sapien
ttcttccctactggcatgctccctt

SEQ ID NO: 4904960 - DNA, 25 bp, Homo sapien
tttgagttatcacttccgccggacc

SEQ ID NO: 4904961 - DNA, 25 bp, Homo sapien
tgccttgcttccacgacgattccag

SEQ ID NO: 4904962 - DNA, 25 bp, Homo sapien
tgttagtggaagtaaatggtccctg

SEQ ID NO: 4904963 - DNA, 25 bp, Homo sapien
gggattagcaccacagtctgcagtc

SEQ ID NO: 4904964 - DNA, 25 bp, Homo sapien
ccctgttgggtcataggacatctga

SEQ ID NO: 4904965 - DNA, 25 bp, Homo sapien
ggctcgagaccctcgccttctggtg

SEQ ID NO: 4904966 - DNA, 25 bp, Homo sapien
tgaggctgatatctcatgggctgca

SEQ ID NO: 4904967 - DNA, 25 bp, Homo sapien
ttctggtgccgagaatcttcccggc

SEQ ID NO: 4904968 - DNA, 25 bp, Homo sapien
tttttgaaggatgaaaatttgttca

SEQ ID NO: 4904969 - DNA, 25 bp, Homo sapien
ttgaaggatgaaaatttgttcatga

SEQ ID NO: 4904970 - DNA, 25 bp, Homo sapien
atggggatatttgaagggttgggct

SEQ ID NO: 4904971 - DNA, 25 bp, Homo sapien
tgttcatgatggggatatttgaagg

SEQ ID NO: 4904972 - DNA, 25 bp, Homo sapien
tatcttcatcaatgatattattact

SEQ ID NO: 4904973 - DNA, 25 bp, Homo sapien
ttaaatatcttattatctgccaata

SEQ ID NO: 4904974 - DNA, 25 bp, Homo sapien
tatcttattatctgccaataatgaa

SEQ ID NO: 4904975 - DNA, 25 bp, Homo sapien
gaatatcggagtaaaccatgacttt

SEQ ID NO: 4904976 - DNA, 25 bp, Homo sapien
agaactgtccaccatagcctcccga

SEQ ID NO: 4904977 - DNA, 25 bp, Homo sapien
acaacacccattctctgattccttc

SEQ ID NO: 4904978 - DNA, 25 bp, Homo sapien
ctcccgatccagacaacacccattc

SEQ ID NO: 4904979 - DNA, 25 bp, Homo sapien
gtccaccatagcctcccgatccaga

SEQ ID NO: 4904980 - DNA, 25 bp, Homo sapien
catatggccacgcactgtatctctg

SEQ ID NO: 4904981 - DNA, 25 bp, Homo sapien
atatggccacgcactgtatctctga

SEQ ID NO: 4904982 - DNA, 25 bp, Homo sapien
tcacattgcttgactgctttatgtc

SEQ ID NO: 4904983 - DNA, 25 bp, Homo sapien
agtgggttcctgctcgctggaactg

SEQ ID NO: 4904984 - DNA, 25 bp, Homo sapien
gtgggttcctgctcgctggaactgg

SEQ ID NO: 4904985 - DNA, 25 bp, Homo sapien
atgggcatgaagaaagttggagaac

SEQ ID NO: 4904986 - DNA, 25 bp, Homo sapien
gaatgggcatgaagaaagttggaga

SEQ ID NO: 4904987 - DNA, 25 bp, Homo sapien
tgggcatgaagaaagttggagaaca

SEQ ID NO: 4904988 - DNA, 25 bp, Homo sapien
ctgaatgggcatgaagaaagttgga

SEQ ID NO: 4904989 - DNA, 25 bp, Homo sapien
ttttttgagccgattaatccatggc

SEQ ID NO: 4904990 - DNA, 25 bp, Homo sapien
tggcggagactagacccaaggatgc

SEQ ID NO: 4904991 - DNA, 25 bp, Homo sapien
gttcctctccgtctgagcctgctgg

SEQ ID NO: 4904992 - DNA, 25 bp, Homo sapien
acaacagggtaagagcaccacgcct

SEQ ID NO: 4904993 - DNA, 25 bp, Homo sapien
ctaacatctatacgcgcttctatgg

SEQ ID NO: 4904994 - DNA, 25 bp, Homo sapien
taacatctatacgcgcttctatggt

SEQ ID NO: 4904995 - DNA, 25 bp, Homo sapien
aacatctatacgcgcttctatggtt

SEQ ID NO: 4904996 - DNA, 25 bp, Homo sapien
tttagcgtcaggttccccacgtgag

SEQ ID NO: 4904997 - DNA, 25 bp, Homo sapien
tcaggttccccacgtgagggttgag

SEQ ID NO: 4904998 - DNA, 25 bp, Homo sapien
tctctgcgccgcacccctgtcccgg

SEQ ID NO: 4904999 - DNA, 25 bp, Homo sapien
cgtgagggttgagggtgcagctgcc

SEQ ID NO: 4905000 - DNA, 25 bp, Homo sapien
tttcaatagatctcagcaggtagct

SEQ ID NO: 4905001 - DNA, 25 bp, Homo sapien
tcttcattctccttgccccccctac

SEQ ID NO: 4905002 - DNA, 25 bp, Homo sapien
accacaggtgttctcactgttaccc

SEQ ID NO: 4905003 - DNA, 25 bp, Homo sapien
ggaaacacaaatagccataaccacc

SEQ ID NO: 4905004 - DNA, 25 bp, Homo sapien
cactgttaccctttccacaaatgga

SEQ ID NO: 4905005 - DNA, 25 bp, Homo sapien
cacatctgctccacaaatgcgtgcg

SEQ ID NO: 4905006 - DNA, 25 bp, Homo sapien
tctgctcttgatttatcggtctgtc

SEQ ID NO: 4905007 - DNA, 25 bp, Homo sapien
gggtctgtggacacctcacatctgc

SEQ ID NO: 4905008 - DNA, 25 bp, Homo sapien
tgagagcagttgcttagggtctctg

SEQ ID NO: 4905009 - DNA, 25 bp, Homo sapien
tcataccagagactgtttatagaga

SEQ ID NO: 4905010 - DNA, 25 bp, Homo sapien
ataccagagactgtttatagagata

SEQ ID NO: 4905011 - DNA, 25 bp, Homo sapien
cataccagagactgtttatagagat

SEQ ID NO: 4905012 - DNA, 25 bp, Homo sapien
agtgtctccagtggcggccgctaag

SEQ ID NO: 4905013 - DNA, 25 bp, Homo sapien
tgtcctccctcggcggaacaatggc

SEQ ID NO: 4905014 - DNA, 25 bp, Homo sapien
gctaagcggcgtctcggcgccagcg

SEQ ID NO: 4905015 - DNA, 25 bp, Homo sapien
tcctccctcggcggaacaatggcgg

SEQ ID NO: 4905016 - DNA, 25 bp, Homo sapien
cgcggccgtccctcgcgccggagcc

SEQ ID NO: 4905017 - DNA, 25 bp, Homo sapien
gcggccgtccctcgcgccggagccg

SEQ ID NO: 4905018 - DNA, 25 bp, Homo sapien
cggccgtccctcgcgccggagccgg

SEQ ID NO: 4905019 - DNA, 25 bp, Homo sapien
ccgggtaacctcaggccgagcgcat

SEQ ID NO: 4905020 - DNA, 25 bp, Homo sapien
ggccgggtaacctcaggccgagcgc

SEQ ID NO: 4905021 - DNA, 25 bp, Homo sapien
gccgggtaacctcaggccgagcgca

SEQ ID NO: 4905022 - DNA, 25 bp, Homo sapien
ttccctcccgtcagagggactcgca

SEQ ID NO: 4905023 - DNA, 25 bp, Homo sapien
tggaatagtcgagggaagcgaggaa

SEQ ID NO: 4905024 - DNA, 25 bp, Homo sapien
gccggggcgcggagacgcagtggaa

SEQ ID NO: 4905025 - DNA, 25 bp, Homo sapien
ccctcccgtcagagggactcgcagg

SEQ ID NO: 4905026 - DNA, 25 bp, Homo sapien
aggccgaccgagagcatttcccgca

SEQ ID NO: 4905027 - DNA, 25 bp, Homo sapien
cgcagaaagcctaggccgaccgaga

SEQ ID NO: 4905028 - DNA, 25 bp, Homo sapien
aagcctaggccgaccgagagcattt

SEQ ID NO: 4905029 - DNA, 25 bp, Homo sapien
agctcgtcctgccagctccgtgcag

SEQ ID NO: 4905030 - DNA, 25 bp, Homo sapien
tcctccgctttttgcgggcgccggc

SEQ ID NO: 4905031 - DNA, 25 bp, Homo sapien
gcgggctcctccgctttttgcgggc

SEQ ID NO: 4905032 - DNA, 25 bp, Homo sapien
ctttttgcgggcgccggcgcaagcc

SEQ ID NO: 4905033 - DNA, 25 bp, Homo sapien
tcctcccgcttgcggggcgggctcc

SEQ ID NO: 4905034 - DNA, 25 bp, Homo sapien
tttgggcttctcggacagtttcttc

SEQ ID NO: 4905035 - DNA, 25 bp, Homo sapien
tcttctgttcctcgctccggagatt

SEQ ID NO: 4905036 - DNA, 25 bp, Homo sapien
cttcttctgttcctcgctccggaga

SEQ ID NO: 4905037 - DNA, 25 bp, Homo sapien
tgggcttctcggacagtttcttccg

SEQ ID NO: 4905038 - DNA, 25 bp, Homo sapien
tacttctttgccctgtaaagctacc

SEQ ID NO: 4905039 - DNA, 25 bp, Homo sapien
tatctaatgagtaccaaacggcagc

SEQ ID NO: 4905040 - DNA, 25 bp, Homo sapien
ttcaccgccttcaatttgtaagcag

SEQ ID NO: 4905041 - DNA, 25 bp, Homo sapien
cttcaatacttagcacagttaaagg

SEQ ID NO: 4905042 - DNA, 25 bp, Homo sapien
tcaaagtgactcattgcaagtagcc

SEQ ID NO: 4905043 - DNA, 25 bp, Homo sapien
gaaatgccttactcaagtttagagt

SEQ ID NO: 4905044 - DNA, 25 bp, Homo sapien
gccagggataacactttgaagaata

SEQ ID NO: 4905045 - DNA, 25 bp, Homo sapien
ctgaacagagcaaggtgaaatgcct

SEQ ID NO: 4905046 - DNA, 25 bp, Homo sapien
tacttgaggtactttcacggtcatt

SEQ ID NO: 4905047 - DNA, 25 bp, Homo sapien
agtgctgctgagcattcctaagcat

SEQ ID NO: 4905048 - DNA, 25 bp, Homo sapien
taatggtccccaactgtagtgctga

SEQ ID NO: 4905049 - DNA, 25 bp, Homo sapien
catttctggacacgcacatgcacag

SEQ ID NO: 4905050 - DNA, 25 bp, Homo sapien
taaaagtgatactgagcatacagga

SEQ ID NO: 4905051 - DNA, 25 bp, Homo sapien
tatatataatcctcatcataaaaaa

SEQ ID NO: 4905052 - DNA, 25 bp, Homo sapien
aattttattggctaaaagtgatact

SEQ ID NO: 4905053 - DNA, 25 bp, Homo sapien
tatataatcctcatcataaaaaaga

SEQ ID NO: 4905054 - DNA, 25 bp, Homo sapien
tctcagcattagacacatgtcatca

SEQ ID NO: 4905055 - DNA, 25 bp, Homo sapien
agagagcgggttccgctatgctgcc

SEQ ID NO: 4905056 - DNA, 25 bp, Homo sapien
tgtgtctcagcattagacacatgtc

SEQ ID NO: 4905057 - DNA, 25 bp, Homo sapien
agtagagagcgggttccgctatgct

SEQ ID NO: 4905058 - DNA, 25 bp, Homo sapien
gcaatttgaccaccaattaactgtg

SEQ ID NO: 4905059 - DNA, 25 bp, Homo sapien
gaatatttcactcattgtctccgag

SEQ ID NO: 4905060 - DNA, 25 bp, Homo sapien
attgattgccatcaacagtcctcag

SEQ ID NO: 4905061 - DNA, 25 bp, Homo sapien
taaagtgacaggtatgatctactca

SEQ ID NO: 4905062 - DNA, 25 bp, Homo sapien
tacactttgaggtgttcgaacagct

SEQ ID NO: 4905063 - DNA, 25 bp, Homo sapien
ccacttcaacagtccgcccatttgg

SEQ ID NO: 4905064 - DNA, 25 bp, Homo sapien
ggtgttcgaacagcttcaccctcag

SEQ ID NO: 4905065 - DNA, 25 bp, Homo sapien
gctgttacactttgaggtgttcgaa

SEQ ID NO: 4905066 - DNA, 25 bp, Homo sapien
tttttgtaatgacaaaatttcgcca

SEQ ID NO: 4905067 - DNA, 25 bp, Homo sapien
cagaaaccacttaccgatcagtgac

SEQ ID NO: 4905068 - DNA, 25 bp, Homo sapien
aaatgagtcggttctaatgccaagc

SEQ ID NO: 4905069 - DNA, 25 bp, Homo sapien
gggctctggatgtggtacctcacgc

SEQ ID NO: 4905070 - DNA, 25 bp, Homo sapien
gaaagggagggtaattcgatgcaca

SEQ ID NO: 4905071 - DNA, 25 bp, Homo sapien
tcaataagctgtccctactagatat

SEQ ID NO: 4905072 - DNA, 25 bp, Homo sapien
gtactcaataagctgtccctactag

SEQ ID NO: 4905073 - DNA, 25 bp, Homo sapien
taaaagtatatctagtaagtactca

SEQ ID NO: 4905074 - DNA, 25 bp, Homo sapien
aagtactcaataagctgtccctact

SEQ ID NO: 4905075 - DNA, 25 bp, Homo sapien
taagtggctaatttggcacacaagc

SEQ ID NO: 4905076 - DNA, 25 bp, Homo sapien
tcctttaagcgacaagatagccttg

SEQ ID NO: 4905077 - DNA, 25 bp, Homo sapien
aaaggtctgcaaatatgcaaatctg

SEQ ID NO: 4905078 - DNA, 25 bp, Homo sapien
taatcacggcttgtctatcagtcat

SEQ ID NO: 4905079 - DNA, 25 bp, Homo sapien
gcagaaatcctggttctggtctcca

SEQ ID NO: 4905080 - DNA, 25 bp, Homo sapien
taaggtaaaaccatggtatagtgga

SEQ ID NO: 4905081 - DNA, 25 bp, Homo sapien
ccatttgcagttcagacagaaaagt

SEQ ID NO: 4905082 - DNA, 25 bp, Homo sapien
tccatttggccatttgcagttcaga

SEQ ID NO: 4905083 - DNA, 25 bp, Homo sapien
tcgtgatctgtccacatgggcctcc

SEQ ID NO: 4905084 - DNA, 25 bp, Homo sapien
cacacctggccaatttttgtatttt

SEQ ID NO: 4905085 - DNA, 25 bp, Homo sapien
cctcgtgatctgtccacatgggcct

SEQ ID NO: 4905086 - DNA, 25 bp, Homo sapien
ccacacctggccaatttttgtattt

SEQ ID NO: 4905087 - DNA, 25 bp, Homo sapien
ggacatttccagtatggctatacct

SEQ ID NO: 4905088 - DNA, 25 bp, Homo sapien
tttccatgtgttaaagtgttcccag

SEQ ID NO: 4905089 - DNA, 25 bp, Homo sapien
ttcccctaaatacatataatcttgc

SEQ ID NO: 4905090 - DNA, 25 bp, Homo sapien
ggtcatttgtcacaaacttccttgg

SEQ ID NO: 4905091 - DNA, 25 bp, Homo sapien
tccatcatggcgtgaactgttttgc

SEQ ID NO: 4905092 - DNA, 25 bp, Homo sapien
cctttccatcatggcgtgaactgtt

SEQ ID NO: 4905093 - DNA, 25 bp, Homo sapien
catggcgtgaactgttttgcactgc

SEQ ID NO: 4905094 - DNA, 25 bp, Homo sapien
gcgtgaactgttttgcactgcttta

SEQ ID NO: 4905095 - DNA, 25 bp, Homo sapien
ttcccttcagaaaaagcactactgg

SEQ ID NO: 4905096 - DNA, 25 bp, Homo sapien
cactactggatccttaacaaaagcg

SEQ ID NO: 4905097 - DNA, 25 bp, Homo sapien
caaacaaaccataattccaggagac

SEQ ID NO: 4905098 - DNA, 25 bp, Homo sapien
aaagcgtttcctaacagtgtcacag

SEQ ID NO: 4905099 - DNA, 25 bp, Homo sapien
aagttgctcggtggtaactgtgatg

SEQ ID NO: 4905100 - DNA, 25 bp, Homo sapien
tatcccagggatagttgaatccaat

SEQ ID NO: 4905101 - DNA, 25 bp, Homo sapien
cagaatcagtcagcaccttatcacg

SEQ ID NO: 4905102 - DNA, 25 bp, Homo sapien
aaatgatgcggttgtaagttgctcg

SEQ ID NO: 4905103 - DNA, 25 bp, Homo sapien
cgatacatggttcacaatactctca

SEQ ID NO: 4905104 - DNA, 25 bp, Homo sapien
tacgcactagaaaagtggcaacatc

SEQ ID NO: 4905105 - DNA, 25 bp, Homo sapien
aacactgctggtattcggtaaaccg

SEQ ID NO: 4905106 - DNA, 25 bp, Homo sapien
gaagaagggtatatcagcacaatga

SEQ ID NO: 4905107 - DNA, 25 bp, Homo sapien
cagatttaaagttgctaacttgaac

SEQ ID NO: 4905108 - DNA, 25 bp, Homo sapien
acttgaacatttagatgagaatcac

SEQ ID NO: 4905109 - DNA, 25 bp, Homo sapien
ttccagatttaaagttgctaacttg

SEQ ID NO: 4905110 - DNA, 25 bp, Homo sapien
tgaagtgtagaatctccttttccag

SEQ ID NO: 4905111 - DNA, 25 bp, Homo sapien
gtacatgacttcttaaaactgggat

SEQ ID NO: 4905112 - DNA, 25 bp, Homo sapien
cacatttctatgattgcttgactta

SEQ ID NO: 4905113 - DNA, 25 bp, Homo sapien
cacttcccctactatcctttgatca

SEQ ID NO: 4905114 - DNA, 25 bp, Homo sapien
gatcaccaaggattgccttaattta

SEQ ID NO: 4905115 - DNA, 25 bp, Homo sapien
ctccaggcagatggctcagttttcc

SEQ ID NO: 4905116 - DNA, 25 bp, Homo sapien
tgcagaagcaggtgaaacggagttc

SEQ ID NO: 4905117 - DNA, 25 bp, Homo sapien
tattgaacggtcactccaactcctt

SEQ ID NO: 4905118 - DNA, 25 bp, Homo sapien
gatctgtgaggagagttttacagac

SEQ ID NO: 4905119 - DNA, 25 bp, Homo sapien
caccagttagctatgttgataatca

SEQ ID NO: 4905120 - DNA, 25 bp, Homo sapien
cttgctctacaaaaaggatgtgaga

SEQ ID NO: 4905121 - DNA, 25 bp, Homo sapien
aagtctacccacacattacatgtat

SEQ ID NO: 4905122 - DNA, 25 bp, Homo sapien
catgtatcacatcactaagaatata

SEQ ID NO: 4905123 - DNA, 25 bp, Homo sapien
gataccgctacacaatttttcaata

SEQ ID NO: 4905124 - DNA, 25 bp, Homo sapien
tttcaaacaagttttgataccgcta

SEQ ID NO: 4905125 - DNA, 25 bp, Homo sapien
aaacaagttttgataccgctacaca

SEQ ID NO: 4905126 - DNA, 25 bp, Homo sapien
tttgataccgctacacaatttttca

SEQ ID NO: 4905127 - DNA, 25 bp, Homo sapien
agttaagtgtgagagatgcaaaaga

SEQ ID NO: 4905128 - DNA, 25 bp, Homo sapien
ttcccctatccacactagaccaagc

SEQ ID NO: 4905129 - DNA, 25 bp, Homo sapien
cccctatccacactagaccaagcag

SEQ ID NO: 4905130 - DNA, 25 bp, Homo sapien
gttaagtgtgagagatgcaaaagaa

SEQ ID NO: 4905131 - DNA, 25 bp, Homo sapien
ccattcatcatcgatatagggttga

SEQ ID NO: 4905132 - DNA, 25 bp, Homo sapien
taacccagaccattcatcatcgata

SEQ ID NO: 4905133 - DNA, 25 bp, Homo sapien
gattacggctaacatcccactgata

SEQ ID NO: 4905134 - DNA, 25 bp, Homo sapien
tatagggttgattacggctaacatc

SEQ ID NO: 4905135 - DNA, 25 bp, Homo sapien
ttttctaccggcacaaaaatgtgtg

SEQ ID NO: 4905136 - DNA, 25 bp, Homo sapien
tctactggcaactgggttaagaaag

SEQ ID NO: 4905137 - DNA, 25 bp, Homo sapien
cagtctattatactacctaggagga

SEQ ID NO: 4905138 - DNA, 25 bp, Homo sapien
aacataaagcatgaattcagggtgc

SEQ ID NO: 4905139 - DNA, 25 bp, Homo sapien
tgtctaagctagtactgaaaacccc

SEQ ID NO: 4905140 - DNA, 25 bp, Homo sapien
ctttagccagcaattcaaggcatgc

SEQ ID NO: 4905141 - DNA, 25 bp, Homo sapien
tactactacattttagagtcgggac

SEQ ID NO: 4905142 - DNA, 25 bp, Homo sapien
ttttacagctcccagacaagtgaca

SEQ ID NO: 4905143 - DNA, 25 bp, Homo sapien
cagtggctttgcttaaatctcacag

SEQ ID NO: 4905144 - DNA, 25 bp, Homo sapien
tgaaaattgccgtccataagccatg

SEQ ID NO: 4905145 - DNA, 25 bp, Homo sapien
tgagtgggcaatataccaacatgtc

SEQ ID NO: 4905146 - DNA, 25 bp, Homo sapien
ttcacataccaagctatcagtggct

SEQ ID NO: 4905147 - DNA, 25 bp, Homo sapien
ggttaacaagttgtcccaacaatgc

SEQ ID NO: 4905148 - DNA, 25 bp, Homo sapien
tacaatggtttaagatgacaaaggt

SEQ ID NO: 4905149 - DNA, 25 bp, Homo sapien
tgacaaaggttaggctttatttcca

SEQ ID NO: 4905150 - DNA, 25 bp, Homo sapien
cctatatatgttcctgtaaatctac

SEQ ID NO: 4905151 - DNA, 25 bp, Homo sapien
aggcgtctatcatttttgccataaa

SEQ ID NO: 4905152 - DNA, 25 bp, Homo sapien
aagcatatcatatggttaaatggaa

SEQ ID NO: 4905153 - DNA, 25 bp, Homo sapien
acagtgtgaattaggcgtctatcat

SEQ ID NO: 4905154 - DNA, 25 bp, Homo sapien
tttctgctaagcatatcatatggtt

SEQ ID NO: 4905155 - DNA, 25 bp, Homo sapien
gtctacccaattgccccactcttct

SEQ ID NO: 4905156 - DNA, 25 bp, Homo sapien
tggtgcattccaatcagagttggga

SEQ ID NO: 4905157 - DNA, 25 bp, Homo sapien
agctctttcttcgtctacccaattg

SEQ ID NO: 4905158 - DNA, 25 bp, Homo sapien
ttagaagtgaagctctttcttcgtc

SEQ ID NO: 4905159 - DNA, 25 bp, Homo sapien
gggttggcaaattacaaatacagcc

SEQ ID NO: 4905160 - DNA, 25 bp, Homo sapien
tccatatcatctatggctacttgct

SEQ ID NO: 4905161 - DNA, 25 bp, Homo sapien
tacagcccagcattagttcctacaa

SEQ ID NO: 4905162 - DNA, 25 bp, Homo sapien
tattgacagacatgctaaaacaggg

SEQ ID NO: 4905163 - DNA, 25 bp, Homo sapien
cattctgcaggacaaaaatatacct

SEQ ID NO: 4905164 - DNA, 25 bp, Homo sapien
aaactgaatttgagaggtcatgtca

SEQ ID NO: 4905165 - DNA, 25 bp, Homo sapien
tagtattcataatgatgcagaggcc

SEQ ID NO: 4905166 - DNA, 25 bp, Homo sapien
tacctatcaagttagcactgttatg

SEQ ID NO: 4905167 - DNA, 25 bp, Homo sapien
gcttatgtttagacagagacttctg

SEQ ID NO: 4905168 - DNA, 25 bp, Homo sapien
ctcagcagtaaaaaggtacaactac

SEQ ID NO: 4905169 - DNA, 25 bp, Homo sapien
aaaaggtacaactactgacacatac

SEQ ID NO: 4905170 - DNA, 25 bp, Homo sapien
aaaacctacacatttagcagcttta

SEQ ID NO: 4905171 - DNA, 25 bp, Homo sapien
tcccagttggaagagctccctctcc

SEQ ID NO: 4905172 - DNA, 25 bp, Homo sapien
gtagagttatcttcaccttgcttct

SEQ ID NO: 4905173 - DNA, 25 bp, Homo sapien
ctgtgcagtagagttatcttcacct

SEQ ID NO: 4905174 - DNA, 25 bp, Homo sapien
ttggatttcccagttggaagagctc

SEQ ID NO: 4905175 - DNA, 25 bp, Homo sapien
ctagtgcttatggtcttcaaggaaa

SEQ ID NO: 4905176 - DNA, 25 bp, Homo sapien
ctggctatttttgacgagtacttcg

SEQ ID NO: 4905177 - DNA, 25 bp, Homo sapien
tgacgagtacttcggctggatcact

SEQ ID NO: 4905178 - DNA, 25 bp, Homo sapien
tacttcggctggatcactagtgctt

SEQ ID NO: 4905179 - DNA, 25 bp, Homo sapien
gataagattacagatggctcggtag

SEQ ID NO: 4905180 - DNA, 25 bp, Homo sapien
ctgtctcttgtagtattggcggcac

SEQ ID NO: 4905181 - DNA, 25 bp, Homo sapien
gggaagagctcttgtcagaatcact

SEQ ID NO: 4905182 - DNA, 25 bp, Homo sapien
tgaaggaggcacactattttgcttg

SEQ ID NO: 4905183 - DNA, 25 bp, Homo sapien
ccgcacccggcagaatttagcattt

SEQ ID NO: 4905184 - DNA, 25 bp, Homo sapien
ggcctccattagacttttaagatca

SEQ ID NO: 4905185 - DNA, 25 bp, Homo sapien
gaaagggctactcttattaatccat

SEQ ID NO: 4905186 - DNA, 25 bp, Homo sapien
cacccggcagaatttagcattttca

SEQ ID NO: 4905187 - DNA, 25 bp, Homo sapien
tatggaactgctgatattcaaccag

SEQ ID NO: 4905188 - DNA, 25 bp, Homo sapien
ggatggtaaatactgttacgtctca

SEQ ID NO: 4905189 - DNA, 25 bp, Homo sapien
caagccctcgttatatattttaagt

SEQ ID NO: 4905190 - DNA, 25 bp, Homo sapien
ctttcctttcaatggtattattagg

SEQ ID NO: 4905191 - DNA, 25 bp, Homo sapien
gggagattcccagctagtttcagac

SEQ ID NO: 4905192 - DNA, 25 bp, Homo sapien
ggagattcccagctagtttcagact

SEQ ID NO: 4905193 - DNA, 25 bp, Homo sapien
ttgggagattcccagctagtttcag

SEQ ID NO: 4905194 - DNA, 25 bp, Homo sapien
gagattcccagctagtttcagactt

SEQ ID NO: 4905195 - DNA, 25 bp, Homo sapien
ccatcactgagtatattctgctgac

SEQ ID NO: 4905196 - DNA, 25 bp, Homo sapien
cagggcactgttgttaaaccaggat

SEQ ID NO: 4905197 - DNA, 25 bp, Homo sapien
tccatttttatggtggtgtccgcag

SEQ ID NO: 4905198 - DNA, 25 bp, Homo sapien
tgcaaacacatgtccaattcaggaa

SEQ ID NO: 4905199 - DNA, 25 bp, Homo sapien
ggttatgcatttgatcaaagcactt

SEQ ID NO: 4905200 - DNA, 25 bp, Homo sapien
gatccaaggaattgcttactaatct

SEQ ID NO: 4905201 - DNA, 25 bp, Homo sapien
caaagcactttgatttaagcataaa

SEQ ID NO: 4905202 - DNA, 25 bp, Homo sapien
caagttctgtgcataagatccaagg

SEQ ID NO: 4905203 - DNA, 25 bp, Homo sapien
aaacaggttcgttcttggcgccaca

SEQ ID NO: 4905204 - DNA, 25 bp, Homo sapien
cattaataaggccagtcttcagcaa

SEQ ID NO: 4905205 - DNA, 25 bp, Homo sapien
tatttacagtgtacatggctgagca

SEQ ID NO: 4905206 - DNA, 25 bp, Homo sapien
tattctacgcactacaggttaaggc

SEQ ID NO: 4905207 - DNA, 25 bp, Homo sapien
caaatgacatattgcacctggtggc

SEQ ID NO: 4905208 - DNA, 25 bp, Homo sapien
gacagacactgttagaggtgcccat

SEQ ID NO: 4905209 - DNA, 25 bp, Homo sapien
tacttgcagtatgcgcaggcaggct

SEQ ID NO: 4905210 - DNA, 25 bp, Homo sapien
aattcaatatgacttcccagcggca

SEQ ID NO: 4905211 - DNA, 25 bp, Homo sapien
gttccatctgtaactgaccatgaac

SEQ ID NO: 4905212 - DNA, 25 bp, Homo sapien
gcagtagtgacaacagggaaaacag

SEQ ID NO: 4905213 - DNA, 25 bp, Homo sapien
caagtgcagtagtgacaacagggaa

SEQ ID NO: 4905214 - DNA, 25 bp, Homo sapien
gagttccatctgtaactgaccatga

SEQ ID NO: 4905215 - DNA, 25 bp, Homo sapien
tcttgcaggtaatcgatacagctcc

SEQ ID NO: 4905216 - DNA, 25 bp, Homo sapien
cactcttatcttgcacgagaggaag

SEQ ID NO: 4905217 - DNA, 25 bp, Homo sapien
tgaaccaccaccgagagcaatttgt

SEQ ID NO: 4905218 - DNA, 25 bp, Homo sapien
gaaaactgcgcggtgctattccagt

SEQ ID NO: 4905219 - DNA, 25 bp, Homo sapien
cctagtcggccctgagtggaggtcc

SEQ ID NO: 4905220 - DNA, 25 bp, Homo sapien
tccttctttcatctggccgttcgtg

SEQ ID NO: 4905221 - DNA, 25 bp, Homo sapien
tcatctggccgttcgtgtaactcca

SEQ ID NO: 4905222 - DNA, 25 bp, Homo sapien
ccaagcacccggtgagtaaatccat

SEQ ID NO: 4905223 - DNA, 25 bp, Homo sapien
gctccgagcttctgccgggtcggta

SEQ ID NO: 4905224 - DNA, 25 bp, Homo sapien
aagttttcaggagcgtcgaccgcct

SEQ ID NO: 4905225 - DNA, 25 bp, Homo sapien
gacttggccatgtgacccgagtccg

SEQ ID NO: 4905226 - DNA, 25 bp, Homo sapien
tcgataccccgagagctccgagctt

SEQ ID NO: 4905227 - DNA, 25 bp, Homo sapien
ataccagacgccgagcaggatggtg

SEQ ID NO: 4905228 - DNA, 25 bp, Homo sapien
gcgtccagggcgcgaccatcttcat

SEQ ID NO: 4905229 - DNA, 25 bp, Homo sapien
ccgcgtccagggcgcgaccatcttc

SEQ ID NO: 4905230 - DNA, 25 bp, Homo sapien
cagataccagacgccgagcaggatg

SEQ ID NO: 4905231 - DNA, 25 bp, Homo sapien
tatggcagggattaactgggaaaca

SEQ ID NO: 4905232 - DNA, 25 bp, Homo sapien
catttaactgtgaattttgccgggc

SEQ ID NO: 4905233 - DNA, 25 bp, Homo sapien
tacctacagtgattggggatatggc

SEQ ID NO: 4905234 - DNA, 25 bp, Homo sapien
ggttacattacagaggcatttgtca

SEQ ID NO: 4905235 - DNA, 25 bp, Homo sapien
aaaggagagttgctagggctcacac

SEQ ID NO: 4905236 - DNA, 25 bp, Homo sapien
gacaaatcagcccaaaaggtggtgg

SEQ ID NO: 4905237 - DNA, 25 bp, Homo sapien
ggatagccaatcacgaaccaatgtt

SEQ ID NO: 4905238 - DNA, 25 bp, Homo sapien
gcaagtctttattatcaggcccaga

SEQ ID NO: 4905239 - DNA, 25 bp, Homo sapien
cgcccagccagtgttagactttctt

SEQ ID NO: 4905240 - DNA, 25 bp, Homo sapien
gtcaaagatatataaactctacggc

SEQ ID NO: 4905241 - DNA, 25 bp, Homo sapien
tctttgcttagtgatagcttagctg

SEQ ID NO: 4905242 - DNA, 25 bp, Homo sapien
gcttagctgtttatattttacgtcc

SEQ ID NO: 4905243 - DNA, 25 bp, Homo sapien
tgcctttctgccctctcctgctcca

SEQ ID NO: 4905244 - DNA, 25 bp, Homo sapien
gcctttctgccctctcctgctccat

SEQ ID NO: 4905245 - DNA, 25 bp, Homo sapien
atgcctttctgccctctcctgctcc

SEQ ID NO: 4905246 - DNA, 25 bp, Homo sapien
aatcaacagtaccacagcattgatg

SEQ ID NO: 4905247 - DNA, 25 bp, Homo sapien
tcaacagtaccacagcattgatgat

SEQ ID NO: 4905248 - DNA, 25 bp, Homo sapien
taaaatcaacagtaccacagcattg

SEQ ID NO: 4905249 - DNA, 25 bp, Homo sapien
ataaaatcaacagtaccacagcatt

SEQ ID NO: 4905250 - DNA, 25 bp, Homo sapien
ccgtaagtagccatagcacatatca

SEQ ID NO: 4905251 - DNA, 25 bp, Homo sapien
cttgtacgctccgtaagtagccata

SEQ ID NO: 4905252 - DNA, 25 bp, Homo sapien
cacatatcaggatcatgagaagaga

SEQ ID NO: 4905253 - DNA, 25 bp, Homo sapien
catagcacatatcaggatcatgaga

SEQ ID NO: 4905254 - DNA, 25 bp, Homo sapien
ctggtaacagaagaatgggatgatc

SEQ ID NO: 4905255 - DNA, 25 bp, Homo sapien
tggtaacagaagaatgggatgatcc

SEQ ID NO: 4905256 - DNA, 25 bp, Homo sapien
atgggatgatccaggctgcgcgttg

SEQ ID NO: 4905257 - DNA, 25 bp, Homo sapien
aagaatgggatgatccaggctgcgc

SEQ ID NO: 4905258 - DNA, 25 bp, Homo sapien
tgattgcaaccaacatgttcagggc

SEQ ID NO: 4905259 - DNA, 25 bp, Homo sapien
agtgattgcaaccaacatgttcagg

SEQ ID NO: 4905260 - DNA, 25 bp, Homo sapien
ttgcaaccaacatgttcagggcaaa

SEQ ID NO: 4905261 - DNA, 25 bp, Homo sapien
gattgcaaccaacatgttcagggca

SEQ ID NO: 4905262 - DNA, 25 bp, Homo sapien
actgacatgacatcatctctgtagg

SEQ ID NO: 4905263 - DNA, 25 bp, Homo sapien
ctgacatgacatcatctctgtaggg

SEQ ID NO: 4905264 - DNA, 25 bp, Homo sapien
agaagaataataaggaccaaacagg

SEQ ID NO: 4905265 - DNA, 25 bp, Homo sapien
acagaagaataataaggaccaaaca

SEQ ID NO: 4905266 - DNA, 25 bp, Homo sapien
caggacatcagaggagttcctacca

SEQ ID NO: 4905267 - DNA, 25 bp, Homo sapien
gatgtatcggtagcagttccaaaca

SEQ ID NO: 4905268 - DNA, 25 bp, Homo sapien
tcctaccattgatgtatcggtagca

SEQ ID NO: 4905269 - DNA, 25 bp, Homo sapien
gacatcagaggagttcctaccattg

SEQ ID NO: 4905270 - DNA, 25 bp, Homo sapien
gaaacaaacgcagctggcattcgac

SEQ ID NO: 4905271 - DNA, 25 bp, Homo sapien
gtatgtcaacacaccaggaaacaaa

SEQ ID NO: 4905272 - DNA, 25 bp, Homo sapien
caaccgctaccaagcaatttcccgg

SEQ ID NO: 4905273 - DNA, 25 bp, Homo sapien
gcaatttcccggcatgtatgtcaac

SEQ ID NO: 4905274 - DNA, 25 bp, Homo sapien
caaataattcgctggtaatgcagaa

SEQ ID NO: 4905275 - DNA, 25 bp, Homo sapien
aactggaaacctgagcacttactgg

SEQ ID NO: 4905276 - DNA, 25 bp, Homo sapien
gaaaaaatcgtcacctatgaagtag

SEQ ID NO: 4905277 - DNA, 25 bp, Homo sapien
gaatcatctagactgtgggacaacc

SEQ ID NO: 4905278 - DNA, 25 bp, Homo sapien
gaaataggagccgagttaatgtcac

SEQ ID NO: 4905279 - DNA, 25 bp, Homo sapien
catactgtcagcctgaacctcagaa

SEQ ID NO: 4905280 - DNA, 25 bp, Homo sapien
tggaaccaacaggtaagtctatctg

SEQ ID NO: 4905281 - DNA, 25 bp, Homo sapien
ggagcatgtagtccaatctcaccca

SEQ ID NO: 4905282 - DNA, 25 bp, Homo sapien
acacatctccttcacgacaacaacc

SEQ ID NO: 4905283 - DNA, 25 bp, Homo sapien
ttccagggggatacaatcccaccat

SEQ ID NO: 4905284 - DNA, 25 bp, Homo sapien
cttcacgacaacaaccgttccaggg

SEQ ID NO: 4905285 - DNA, 25 bp, Homo sapien
agggggatacaatcccaccatgccc

SEQ ID NO: 4905286 - DNA, 25 bp, Homo sapien
caatgctgcaatcttggctcatgca

SEQ ID NO: 4905287 - DNA, 25 bp, Homo sapien
tgcaatgctgcaatcttggctcatg

SEQ ID NO: 4905288 - DNA, 25 bp, Homo sapien
tgtctcctgggttcaaggcattctc

SEQ ID NO: 4905289 - DNA, 25 bp, Homo sapien
acctctgtctcctgggttcaaggca

SEQ ID NO: 4905290 - DNA, 25 bp, Homo sapien
tctggaaaccgcctgagaggcgctg

SEQ ID NO: 4905291 - DNA, 25 bp, Homo sapien
gctgtctccgctcgcactgggccct

SEQ ID NO: 4905292 - DNA, 25 bp, Homo sapien
tgcgggaagccgttcccgggagcca

SEQ ID NO: 4905293 - DNA, 25 bp, Homo sapien
gccacggcccgctctggaaaccgcc

SEQ ID NO: 4905294 - DNA, 25 bp, Homo sapien
cagacacgtaaggtggcggtggctc

SEQ ID NO: 4905295 - DNA, 25 bp, Homo sapien
ttaggcagacacgtaaggtggcggt

SEQ ID NO: 4905296 - DNA, 25 bp, Homo sapien
ggcatcatcatacgggggtagcagc

SEQ ID NO: 4905297 - DNA, 25 bp, Homo sapien
cgtaaggtggcggtggctccttggc

SEQ ID NO: 4905298 - DNA, 25 bp, Homo sapien
aaagcagacttctaggtccatcaga

SEQ ID NO: 4905299 - DNA, 25 bp, Homo sapien
cagtgttccagcaaagcatatgttg

SEQ ID NO: 4905300 - DNA, 25 bp, Homo sapien
gtgaagcccattatatccccaatcg

SEQ ID NO: 4905301 - DNA, 25 bp, Homo sapien
tgcctagggaaggttagtgaagccc

SEQ ID NO: 4905302 - DNA, 25 bp, Homo sapien
ttgaaccaatctagggcagaacact

SEQ ID NO: 4905303 - DNA, 25 bp, Homo sapien
ggtaaaaagcgcatacaaggaaggc

SEQ ID NO: 4905304 - DNA, 25 bp, Homo sapien
taacacatacgaggcatgtcacccc

SEQ ID NO: 4905305 - DNA, 25 bp, Homo sapien
cagtaggatgtagcttgcagggaaa

SEQ ID NO: 4905306 - DNA, 25 bp, Homo sapien
tccttaggctgaactgggtgcatct

SEQ ID NO: 4905307 - DNA, 25 bp, Homo sapien
tagttttcactcagtcattttatga

SEQ ID NO: 4905308 - DNA, 25 bp, Homo sapien
tggagggaaaggtcctcagacacaa

SEQ ID NO: 4905309 - DNA, 25 bp, Homo sapien
gggtgcatctgccagaccatatgtg

SEQ ID NO: 4905310 - DNA, 25 bp, Homo sapien
taggaatgttggaagctcgagtctg

SEQ ID NO: 4905311 - DNA, 25 bp, Homo sapien
gaatgccaatgagatacaccaaaag

SEQ ID NO: 4905312 - DNA, 25 bp, Homo sapien
tcttaatcacccttggaatgtagca

SEQ ID NO: 4905313 - DNA, 25 bp, Homo sapien
ccgtgcaatgctggaaagtctcaaa

SEQ ID NO: 4905314 - DNA, 25 bp, Homo sapien
cttgtatgtagctgttacatgtagg

SEQ ID NO: 4905315 - DNA, 25 bp, Homo sapien
tgttcaactggagaattttaattgt

SEQ ID NO: 4905316 - DNA, 25 bp, Homo sapien
tcaactggagaattttaattgtaaa

SEQ ID NO: 4905317 - DNA, 25 bp, Homo sapien
cttgttcaactggagaattttaatt

SEQ ID NO: 4905318 - DNA, 25 bp, Homo sapien
tcttgttggtgactacagagactcc

SEQ ID NO: 4905319 - DNA, 25 bp, Homo sapien
gcaaccatcactgaatacaaaggct

SEQ ID NO: 4905320 - DNA, 25 bp, Homo sapien
tttccacaataaggttcaagcaacc

SEQ ID NO: 4905321 - DNA, 25 bp, Homo sapien
gaaagcgaactccagaaatatcacc

SEQ ID NO: 4905322 - DNA, 25 bp, Homo sapien
ttgcctttgtatagggccaaaagaa

SEQ ID NO: 4905323 - DNA, 25 bp, Homo sapien
tagggccaaaagaaagacacaggct

SEQ ID NO: 4905324 - DNA, 25 bp, Homo sapien
gggccaaaagaaagacacaggctac

SEQ ID NO: 4905325 - DNA, 25 bp, Homo sapien
tatagggccaaaagaaagacacagg

SEQ ID NO: 4905326 - DNA, 25 bp, Homo sapien
gatgatcttcaggtctgccagaaaa

SEQ ID NO: 4905327 - DNA, 25 bp, Homo sapien
atgaaggaaaagcaagttcaatgtc

SEQ ID NO: 4905328 - DNA, 25 bp, Homo sapien
tgtgggatgatcttcaggtctgcca

SEQ ID NO: 4905329 - DNA, 25 bp, Homo sapien
cttgtgggatgatcttcaggtctgc

SEQ ID NO: 4905330 - DNA, 25 bp, Homo sapien
gacaggattggccagcgacagtcaa

SEQ ID NO: 4905331 - DNA, 25 bp, Homo sapien
gattggccagcgacagtcaaagtgg

SEQ ID NO: 4905332 - DNA, 25 bp, Homo sapien
gatgcagaagacaggattggccagc

SEQ ID NO: 4905333 - DNA, 25 bp, Homo sapien
agcgacagtcaaagtggccggcacc

SEQ ID NO: 4905334 - DNA, 25 bp, Homo sapien
gccgccgccgcttgctccaagtccc

SEQ ID NO: 4905335 - DNA, 25 bp, Homo sapien
cgccgccgccgcttgctccaagtcc

SEQ ID NO: 4905336 - DNA, 25 bp, Homo sapien
ccgccgccgcttgctccaagtccca

SEQ ID NO: 4905337 - DNA, 25 bp, Homo sapien
cagagcgctcccttcgctcgctggc

SEQ ID NO: 4905338 - DNA, 25 bp, Homo sapien
tcgtcggcctcttcgcctcgccgag

SEQ ID NO: 4905339 - DNA, 25 bp, Homo sapien
ctctcctcggggatcgctcgtggga

SEQ ID NO: 4905340 - DNA, 25 bp, Homo sapien
cggcctcttcgcctcgccgagggcc

SEQ ID NO: 4905341 - DNA, 25 bp, Homo sapien
gctctcctcggggatcgctcgtggg

SEQ ID NO: 4905342 - DNA, 25 bp, Homo sapien
tgggaagcgaggcaggggcgcagcc

SEQ ID NO: 4905343 - DNA, 25 bp, Homo sapien
gggaagcgaggcaggggcgcagcca

SEQ ID NO: 4905344 - DNA, 25 bp, Homo sapien
ggaagcgaggcaggggcgcagccac

SEQ ID NO: 4905345 - DNA, 25 bp, Homo sapien
ctgggaagcgaggcaggggcgcagc

SEQ ID NO: 4905346 - DNA, 25 bp, Homo sapien
ctgggcgtccccgctgcgtgccaca

SEQ ID NO: 4905347 - DNA, 25 bp, Homo sapien
acggggcactccggggcggctgcag

SEQ ID NO: 4905348 - DNA, 25 bp, Homo sapien
gggcgtccccgctgcgtgccacagc

SEQ ID NO: 4905349 - DNA, 25 bp, Homo sapien
ggtctgggcgtccccgctgcgtgcc

SEQ ID NO: 4905350 - DNA, 25 bp, Homo sapien
ggagccatcggctgtccgtggaata

SEQ ID NO: 4905351 - DNA, 25 bp, Homo sapien
tgtccgtggaataggaatcaccctg

SEQ ID NO: 4905352 - DNA, 25 bp, Homo sapien
cgtggaataggaatcaccctgcata

SEQ ID NO: 4905353 - DNA, 25 bp, Homo sapien
tcggctgtccgtggaataggaatca

SEQ ID NO: 4905354 - DNA, 25 bp, Homo sapien
tcctggtaactcgggggcctgagat

SEQ ID NO: 4905355 - DNA, 25 bp, Homo sapien
accccagagccccgatttatagaag

SEQ ID NO: 4905356 - DNA, 25 bp, Homo sapien
cagtgtcctggtaactcgggggcct

SEQ ID NO: 4905357 - DNA, 25 bp, Homo sapien
ccagagccccgatttatagaagaca

SEQ ID NO: 4905358 - DNA, 25 bp, Homo sapien
tgacacctccaacaagcaagcttag

SEQ ID NO: 4905359 - DNA, 25 bp, Homo sapien
cactcgctgataagagcttagggca

SEQ ID NO: 4905360 - DNA, 25 bp, Homo sapien
gcttagggcatgacagctgctcgag

SEQ ID NO: 4905361 - DNA, 25 bp, Homo sapien
gcaagcttaggccttggtggccctg

SEQ ID NO: 4905362 - DNA, 25 bp, Homo sapien
gagatttccgggtctccctgaactc

SEQ ID NO: 4905363 - DNA, 25 bp, Homo sapien
tttcaaggcgagcaagaggggcaag

SEQ ID NO: 4905364 - DNA, 25 bp, Homo sapien
ttcaaggcgagcaagaggggcaagg

SEQ ID NO: 4905365 - DNA, 25 bp, Homo sapien
cagggaggaggacgatctgtccgag

SEQ ID NO: 4905366 - DNA, 25 bp, Homo sapien
tcagcagaaagcagcctgcgagcat

SEQ ID NO: 4905367 - DNA, 25 bp, Homo sapien
gaggatcagcagaaagcagcctgcg

SEQ ID NO: 4905368 - DNA, 25 bp, Homo sapien
gacgatctgtccgaggatcagcaga

SEQ ID NO: 4905369 - DNA, 25 bp, Homo sapien
ccgagcgtgtctgcccctagagatg

SEQ ID NO: 4905370 - DNA, 25 bp, Homo sapien
gtccgagcgtgtctgcccctagaga

SEQ ID NO: 4905371 - DNA, 25 bp, Homo sapien
ctgcgggtgggtccgagcgtgtctg

SEQ ID NO: 4905372 - DNA, 25 bp, Homo sapien
gtgggtccgagcgtgtctgccccta

SEQ ID NO: 4905373 - DNA, 25 bp, Homo sapien
tcagataggtccaacaacaaggaca

SEQ ID NO: 4905374 - DNA, 25 bp, Homo sapien
aggtccaacaacaaggacattttca

SEQ ID NO: 4905375 - DNA, 25 bp, Homo sapien
cagataggtccaacaacaaggacat

SEQ ID NO: 4905376 - DNA, 25 bp, Homo sapien
gataggtccaacaacaaggacattt

SEQ ID NO: 4905377 - DNA, 25 bp, Homo sapien
tacatgttttccgtgtgttttcatg

SEQ ID NO: 4905378 - DNA, 25 bp, Homo sapien
ttagaatcagctgatttacatgttt

SEQ ID NO: 4905379 - DNA, 25 bp, Homo sapien
tgtttagaatcagctgatttacatg

SEQ ID NO: 4905380 - DNA, 25 bp, Homo sapien
ctgatttacatgttttccgtgtgtt

SEQ ID NO: 4905381 - DNA, 25 bp, Homo sapien
actgaggctaccaggtcactgggca

SEQ ID NO: 4905382 - DNA, 25 bp, Homo sapien
ctgtggtccctgattgtaatttcgg

SEQ ID NO: 4905383 - DNA, 25 bp, Homo sapien
ttgtaatttcggatgccactgaggc

SEQ ID NO: 4905384 - DNA, 25 bp, Homo sapien
aaacagggctctttaggtccctgtg

SEQ ID NO: 4905385 - DNA, 25 bp, Homo sapien
cacctcctcataggaaagtggggta

SEQ ID NO: 4905386 - DNA, 25 bp, Homo sapien
tcctcataggaaagtggggtaacaa

SEQ ID NO: 4905387 - DNA, 25 bp, Homo sapien
aaaaagtgtgcacaaacgaagcagg

SEQ ID NO: 4905388 - DNA, 25 bp, Homo sapien
acaaacgaagcaggcggccattagc

SEQ ID NO: 4905389 - DNA, 25 bp, Homo sapien
tggcttccacgggttggtcggagag

SEQ ID NO: 4905390 - DNA, 25 bp, Homo sapien
gactagtggcttccacgggttggtc

SEQ ID NO: 4905391 - DNA, 25 bp, Homo sapien
ggcttccacgggttggtcggagagc

SEQ ID NO: 4905392 - DNA, 25 bp, Homo sapien
tagtggcttccacgggttggtcgga

SEQ ID NO: 4905393 - DNA, 25 bp, Homo sapien
ggctgggggttgagcaccttttctg

SEQ ID NO: 4905394 - DNA, 25 bp, Homo sapien
gctgggggttgagcaccttttctgt

SEQ ID NO: 4905395 - DNA, 25 bp, Homo sapien
tccataaaggggctgggggttgagc

SEQ ID NO: 4905396 - DNA, 25 bp, Homo sapien
cataaaggggctgggggttgagcac

SEQ ID NO: 4905397 - DNA, 25 bp, Homo sapien
cagtagaacccaggtgtgaccggct

SEQ ID NO: 4905398 - DNA, 25 bp, Homo sapien
gcatatctgcccctaagccatgcat

SEQ ID NO: 4905399 - DNA, 25 bp, Homo sapien
gggcattctatggtctacacaaaaa

SEQ ID NO: 4905400 - DNA, 25 bp, Homo sapien
tagtacattcaagagtacgcgtgtc

SEQ ID NO: 4905401 - DNA, 25 bp, Homo sapien
agggcggccatgacagcgcctccat

SEQ ID NO: 4905402 - DNA, 25 bp, Homo sapien
tgtactgcccgtgatgcactgcagc

SEQ ID NO: 4905403 - DNA, 25 bp, Homo sapien
tgcccgtgatgcactgcagctgagc

SEQ ID NO: 4905404 - DNA, 25 bp, Homo sapien
tgagggcggccatgacagcgcctcc

SEQ ID NO: 4905405 - DNA, 25 bp, Homo sapien
tcacaagataggaatgaagaatttt

SEQ ID NO: 4905406 - DNA, 25 bp, Homo sapien
cacaagataggaatgaagaatttta

SEQ ID NO: 4905407 - DNA, 25 bp, Homo sapien
acaagataggaatgaagaattttac

SEQ ID NO: 4905408 - DNA, 25 bp, Homo sapien
tattctgaccccaaaatagacccaa

SEQ ID NO: 4905409 - DNA, 25 bp, Homo sapien
acccctcttttgctagctgacacag

SEQ ID NO: 4905410 - DNA, 25 bp, Homo sapien
tgccaacttcccagttcccgcctag

SEQ ID NO: 4905411 - DNA, 25 bp, Homo sapien
ccagttcccgcctaggatatttggc

SEQ ID NO: 4905412 - DNA, 25 bp, Homo sapien
tctatgaacttagccatagcaatcc

SEQ ID NO: 4905413 - DNA, 25 bp, Homo sapien
tgcctcagccaactacccaattatc

SEQ ID NO: 4905414 - DNA, 25 bp, Homo sapien
tgattacaggctttcgctttaaaac

SEQ ID NO: 4905415 - DNA, 25 bp, Homo sapien
ttggcccatcttttaccacaaggca

SEQ ID NO: 4905416 - DNA, 25 bp, Homo sapien
taaaaagcaagctggcatttgaccc

SEQ ID NO: 4905417 - DNA, 25 bp, Homo sapien
gaggccccaaaacacagcgcctcag

SEQ ID NO: 4905418 - DNA, 25 bp, Homo sapien
ccacaggggcactttaactgaataa

SEQ ID NO: 4905419 - DNA, 25 bp, Homo sapien
gccccaaaacacagcgcctcagggc

SEQ ID NO: 4905420 - DNA, 25 bp, Homo sapien
aactgggtagcaagcagctgatgcc

SEQ ID NO: 4905421 - DNA, 25 bp, Homo sapien
tcaagaatgctcgacatacaggctg

SEQ ID NO: 4905422 - DNA, 25 bp, Homo sapien
tgaacaagctactaccaagaagggc

SEQ ID NO: 4905423 - DNA, 25 bp, Homo sapien
ttcctgagcagagccgaagttcaca

SEQ ID NO: 4905424 - DNA, 25 bp, Homo sapien
ttgtgggcccataataaaacgtcat

SEQ ID NO: 4905425 - DNA, 25 bp, Homo sapien
gacagtttgtgggcccataataaaa

SEQ ID NO: 4905426 - DNA, 25 bp, Homo sapien
tgtctccttggcctgggagaagaac

SEQ ID NO: 4905427 - DNA, 25 bp, Homo sapien
tccttggcctgggagaagaacatac

SEQ ID NO: 4905428 - DNA, 25 bp, Homo sapien
ctgtctccttggcctgggagaagaa

SEQ ID NO: 4905429 - DNA, 25 bp, Homo sapien
tctccttggcctgggagaagaacat

SEQ ID NO: 4905430 - DNA, 25 bp, Homo sapien
ggaactgttgagagatgtttccagg

SEQ ID NO: 4905431 - DNA, 25 bp, Homo sapien
aatggatttccttggtgtgtgttct

SEQ ID NO: 4905432 - DNA, 25 bp, Homo sapien
ccaggaaatggatttccttggtgtg

SEQ ID NO: 4905433 - DNA, 25 bp, Homo sapien
tatgctgacaactggttctgatgaa

SEQ ID NO: 4905434 - DNA, 25 bp, Homo sapien
tgtgaaaagcttcacagtttctcca

SEQ ID NO: 4905435 - DNA, 25 bp, Homo sapien
tctaaaacatttgctgtgaaaagct

SEQ ID NO: 4905436 - DNA, 25 bp, Homo sapien
ctgggaacactctaaaacatttgct

SEQ ID NO: 4905437 - DNA, 25 bp, Homo sapien
actctaaaacatttgctgtgaaaag

SEQ ID NO: 4905438 - DNA, 25 bp, Homo sapien
tgcagggagagtgtgacccaataat

SEQ ID NO: 4905439 - DNA, 25 bp, Homo sapien
cagggagagtgtgacccaataatct

SEQ ID NO: 4905440 - DNA, 25 bp, Homo sapien
gagagtgtgacccaataatctttac

SEQ ID NO: 4905441 - DNA, 25 bp, Homo sapien
gggagagtgtgacccaataatcttt

SEQ ID NO: 4905442 - DNA, 25 bp, Homo sapien
caaagattaggatgcccgtgtcccg

SEQ ID NO: 4905443 - DNA, 25 bp, Homo sapien
ggtgttgaagtctacctggcccaca

SEQ ID NO: 4905444 - DNA, 25 bp, Homo sapien
tgttcagggcatactggatggccag

SEQ ID NO: 4905445 - DNA, 25 bp, Homo sapien
caacttcttctggaacacggaggtc

SEQ ID NO: 4905446 - DNA, 25 bp, Homo sapien
gggcagcagcaggggtagagataac

SEQ ID NO: 4905447 - DNA, 25 bp, Homo sapien
gcagcagcaggggtagagataactg

SEQ ID NO: 4905448 - DNA, 25 bp, Homo sapien
cagcagcaggggtagagataactgg

SEQ ID NO: 4905449 - DNA, 25 bp, Homo sapien
gcagcaggggtagagataactggaa

SEQ ID NO: 4905450 - DNA, 25 bp, Homo sapien
cagggtttgacaatcagagtccttt

SEQ ID NO: 4905451 - DNA, 25 bp, Homo sapien
ggttggtacagggtttgacaatcag

SEQ ID NO: 4905452 - DNA, 25 bp, Homo sapien
ctgttggttggtacagggtttgaca

SEQ ID NO: 4905453 - DNA, 25 bp, Homo sapien
ggtacagggtttgacaatcagagtc

SEQ ID NO: 4905454 - DNA, 25 bp, Homo sapien
tcactccagacaccttgcatcgggg

SEQ ID NO: 4905455 - DNA, 25 bp, Homo sapien
ttctcactccagacaccttgcatcg

SEQ ID NO: 4905456 - DNA, 25 bp, Homo sapien
tccagacaccttgcatcggggagct

SEQ ID NO: 4905457 - DNA, 25 bp, Homo sapien
ccagacaccttgcatcggggagctg

SEQ ID NO: 4905458 - DNA, 25 bp, Homo sapien
tgcagacgtatgagccagggatgtt

SEQ ID NO: 4905459 - DNA, 25 bp, Homo sapien
gatccgagttgagaatgtagccttg

SEQ ID NO: 4905460 - DNA, 25 bp, Homo sapien
tctgcaagtcgtctgatccgagttg

SEQ ID NO: 4905461 - DNA, 25 bp, Homo sapien
tgtttgcacctgcagacgtatgagc

SEQ ID NO: 4905462 - DNA, 25 bp, Homo sapien
ggagattatccagctacgcccagga

SEQ ID NO: 4905463 - DNA, 25 bp, Homo sapien
tattgatttgttaccacccgtccca

SEQ ID NO: 4905464 - DNA, 25 bp, Homo sapien
gatggcacagccttcacttggcaca

SEQ ID NO: 4905465 - DNA, 25 bp, Homo sapien
ttccagaagtggagtacatgcctcc

SEQ ID NO: 4905466 - DNA, 25 bp, Homo sapien
cctctagggtcatgggacagtctca

SEQ ID NO: 4905467 - DNA, 25 bp, Homo sapien
cagtctcaaatgatggccaagagtg

SEQ ID NO: 4905468 - DNA, 25 bp, Homo sapien
gattagtgggctgaggaacctatct

SEQ ID NO: 4905469 - DNA, 25 bp, Homo sapien
cattgctagccatgtgagcttgggt

SEQ ID NO: 4905470 - DNA, 25 bp, Homo sapien
gctctctcttggacgcatctgtttg

SEQ ID NO: 4905471 - DNA, 25 bp, Homo sapien
cacgtgtgtgggctctctcttggac

SEQ ID NO: 4905472 - DNA, 25 bp, Homo sapien
gcccaggccttttccttgaactgga

SEQ ID NO: 4905473 - DNA, 25 bp, Homo sapien
cagctgcatccaaccacgtgtgtgg

SEQ ID NO: 4905474 - DNA, 25 bp, Homo sapien
tattttcagggtcaacgaccaccac

SEQ ID NO: 4905475 - DNA, 25 bp, Homo sapien
tcactttccacactcgctttctccc

SEQ ID NO: 4905476 - DNA, 25 bp, Homo sapien
tccctccaagattccatctattttc

SEQ ID NO: 4905477 - DNA, 25 bp, Homo sapien
ttttcagggtcaacgaccaccacca

SEQ ID NO: 4905478 - DNA, 25 bp, Homo sapien
aaagcttgctatgagttagggctcc

SEQ ID NO: 4905479 - DNA, 25 bp, Homo sapien
aatggtaaatgagtcatcagcctcg

SEQ ID NO: 4905480 - DNA, 25 bp, Homo sapien
caagcttgccttttcgagaccatgc

SEQ ID NO: 4905481 - DNA, 25 bp, Homo sapien
ggatttgaagtcttccaatggtaaa

SEQ ID NO: 4905482 - DNA, 25 bp, Homo sapien
actcttgtaagctctgtgaaggaca

SEQ ID NO: 4905483 - DNA, 25 bp, Homo sapien
tactcttgtaagctctgtgaaggac

SEQ ID NO: 4905484 - DNA, 25 bp, Homo sapien
ctcttgtaagctctgtgaaggacag

SEQ ID NO: 4905485 - DNA, 25 bp, Homo sapien
ctactcttgtaagctctgtgaagga

SEQ ID NO: 4905486 - DNA, 25 bp, Homo sapien
atcctcagccagggcgtagccactg

SEQ ID NO: 4905487 - DNA, 25 bp, Homo sapien
ctcagccagggcgtagccactgtag

SEQ ID NO: 4905488 - DNA, 25 bp, Homo sapien
gaaggagcccggcacattcacacag

SEQ ID NO: 4905489 - DNA, 25 bp, Homo sapien
cactggcagacgaaggagcccggca

SEQ ID NO: 4905490 - DNA, 25 bp, Homo sapien
cctgtttgtgcgaagcaaaataaaa

SEQ ID NO: 4905491 - DNA, 25 bp, Homo sapien
ctgtttgtgcgaagcaaaataaaat

SEQ ID NO: 4905492 - DNA, 25 bp, Homo sapien
taacgtgcctgcaattgaaagtggg

SEQ ID NO: 4905493 - DNA, 25 bp, Homo sapien
tgcaacaagcaacaggacctagact

SEQ ID NO: 4905494 - DNA, 25 bp, Homo sapien
gctgagacatcggacctgattgaga

SEQ ID NO: 4905495 - DNA, 25 bp, Homo sapien
gaaagcagccttcaatcagacttca

SEQ ID NO: 4905496 - DNA, 25 bp, Homo sapien
gatgaatcaaagtgaaaccggccca

SEQ ID NO: 4905497 - DNA, 25 bp, Homo sapien
tctcaagaaccaaaccgtcaggact

SEQ ID NO: 4905498 - DNA, 25 bp, Homo sapien
caatgaacatgactttagtggcagc

SEQ ID NO: 4905499 - DNA, 25 bp, Homo sapien
ggaactctggtgctggaattgaacg

SEQ ID NO: 4905500 - DNA, 25 bp, Homo sapien
aattctaacgttttctcagcaggac

SEQ ID NO: 4905501 - DNA, 25 bp, Homo sapien
ctggtccaattctaacgttttctca

SEQ ID NO: 4905502 - DNA, 25 bp, Homo sapien
tccaattctaacgttttctcagcag

SEQ ID NO: 4905503 - DNA, 25 bp, Homo sapien
ggtccaattctaacgttttctcagc

SEQ ID NO: 4905504 - DNA, 25 bp, Homo sapien
gtgcagtggttaaacatggaagaac

SEQ ID NO: 4905505 - DNA, 25 bp, Homo sapien
ctggagacggcagatgaggccatca

SEQ ID NO: 4905506 - DNA, 25 bp, Homo sapien
cagtgcagtggttaaacatggaaga

SEQ ID NO: 4905507 - DNA, 25 bp, Homo sapien
cagtggttaaacatggaagaaccca

SEQ ID NO: 4905508 - DNA, 25 bp, Homo sapien
caggattcacgcattcctgggtccc

SEQ ID NO: 4905509 - DNA, 25 bp, Homo sapien
cttctctggatcttgactctcataa

SEQ ID NO: 4905510 - DNA, 25 bp, Homo sapien
gatgtgattggcaaggcaggattca

SEQ ID NO: 4905511 - DNA, 25 bp, Homo sapien
cacaggcccaattcatgagataaga

SEQ ID NO: 4905512 - DNA, 25 bp, Homo sapien
gttcacatccgtggttttctgaggc

SEQ ID NO: 4905513 - DNA, 25 bp, Homo sapien
gcaaaggtaggagccatcagcattt

SEQ ID NO: 4905514 - DNA, 25 bp, Homo sapien
catcagcatttacacactcatgttc

SEQ ID NO: 4905515 - DNA, 25 bp, Homo sapien
ggttaagagcaaatccttcatggca

SEQ ID NO: 4905516 - DNA, 25 bp, Homo sapien
gaagtaagttgctcggattgtcagc

SEQ ID NO: 4905517 - DNA, 25 bp, Homo sapien
tcaggctgagttagcaggaagtaag

SEQ ID NO: 4905518 - DNA, 25 bp, Homo sapien
aatagtgatgttgagatacagtggt

SEQ ID NO: 4905519 - DNA, 25 bp, Homo sapien
gaaggaacagtcctacacatggtgc

SEQ ID NO: 4905520 - DNA, 25 bp, Homo sapien
ttcctctaactcctgctgtggtcct

SEQ ID NO: 4905521 - DNA, 25 bp, Homo sapien
tccttcctctaactcctgctgtggt

SEQ ID NO: 4905522 - DNA, 25 bp, Homo sapien
ctctaactcctgctgtggtcctggc

SEQ ID NO: 4905523 - DNA, 25 bp, Homo sapien
ctgttctggtctaactggtctcctt

SEQ ID NO: 4905524 - DNA, 25 bp, Homo sapien
gctcgctgcctagctggtgagacct

SEQ ID NO: 4905525 - DNA, 25 bp, Homo sapien
tatgctgcggtatctacttccaggg

SEQ ID NO: 4905526 - DNA, 25 bp, Homo sapien
tcttctaagggatgtactgccctga

SEQ ID NO: 4905527 - DNA, 25 bp, Homo sapien
ggtgagacctcacagctggatcagc

SEQ ID NO: 4905528 - DNA, 25 bp, Homo sapien
tcttagctttccaagtactctgtct

SEQ ID NO: 4905529 - DNA, 25 bp, Homo sapien
tactcttagctttccaagtactctg

SEQ ID NO: 4905530 - DNA, 25 bp, Homo sapien
ttctactcttagctttccaagtact

SEQ ID NO: 4905531 - DNA, 25 bp, Homo sapien
gctttccaagtactctgtctccttt

SEQ ID NO: 4905532 - DNA, 25 bp, Homo sapien
tatttgccagactgcaggctgagaa

SEQ ID NO: 4905533 - DNA, 25 bp, Homo sapien
gggctcagctgcacataaataggat

SEQ ID NO: 4905534 - DNA, 25 bp, Homo sapien
tgcttgaaataaatgaccactgatg

SEQ ID NO: 4905535 - DNA, 25 bp, Homo sapien
tcccatagtggaacttggacacatt

SEQ ID NO: 4905536 - DNA, 25 bp, Homo sapien
tggcaggaataggaatcatctgtgt

SEQ ID NO: 4905537 - DNA, 25 bp, Homo sapien
taacacactcgtgctgacatccgtg

SEQ ID NO: 4905538 - DNA, 25 bp, Homo sapien
gattcagggtaaagcctttcaggca

SEQ ID NO: 4905539 - DNA, 25 bp, Homo sapien
gacatccgtgattagatgaggcaca

SEQ ID NO: 4905540 - DNA, 25 bp, Homo sapien
ttctccaactcccactgtaacttac

SEQ ID NO: 4905541 - DNA, 25 bp, Homo sapien
gcccttctccaactcccactgtaac

SEQ ID NO: 4905542 - DNA, 25 bp, Homo sapien
ccttctccaactcccactgtaactt

SEQ ID NO: 4905543 - DNA, 25 bp, Homo sapien
ttagcagaacaagcccttctccaac

SEQ ID NO: 4905544 - DNA, 25 bp, Homo sapien
agcgctcagaccactccaaaacggt

SEQ ID NO: 4905545 - DNA, 25 bp, Homo sapien
ccttcccatgataatgatgcctgca

SEQ ID NO: 4905546 - DNA, 25 bp, Homo sapien
gggaccaatctgtagcgctcagacc

SEQ ID NO: 4905547 - DNA, 25 bp, Homo sapien
tctctactcgctcttcctttctcag

SEQ ID NO: 4905548 - DNA, 25 bp, Homo sapien
gcaggccataactgagtgccaggaa

SEQ ID NO: 4905549 - DNA, 25 bp, Homo sapien
tgcaggccataactgagtgccagga

SEQ ID NO: 4905550 - DNA, 25 bp, Homo sapien
caggccataactgagtgccaggaaa

SEQ ID NO: 4905551 - DNA, 25 bp, Homo sapien
tgtgcaggccataactgagtgccag

SEQ ID NO: 4905552 - DNA, 25 bp, Homo sapien
aggtgagaatgttggtggaggtgac

SEQ ID NO: 4905553 - DNA, 25 bp, Homo sapien
agaatgttggtggaggtgacaaggc

SEQ ID NO: 4905554 - DNA, 25 bp, Homo sapien
gaagactttgcagtagaggtggaaa

SEQ ID NO: 4905555 - DNA, 25 bp, Homo sapien
gtgacaaggccagggttatgtcttg

SEQ ID NO: 4905556 - DNA, 25 bp, Homo sapien
caggatggatcagtgaaggctctaa

SEQ ID NO: 4905557 - DNA, 25 bp, Homo sapien
ggatggatcagtgaaggctctaaac

SEQ ID NO: 4905558 - DNA, 25 bp, Homo sapien
atgactggacgtgcgggctttgcaa

SEQ ID NO: 4905559 - DNA, 25 bp, Homo sapien
ctgagcatgactggacgtgcgggct

SEQ ID NO: 4905560 - DNA, 25 bp, Homo sapien
gaagaagggcagaccttccttcaga

SEQ ID NO: 4905561 - DNA, 25 bp, Homo sapien
gcactcatgctcacagcccggtttg

SEQ ID NO: 4905562 - DNA, 25 bp, Homo sapien
cacagcccggtttgttcagtgcaca

SEQ ID NO: 4905563 - DNA, 25 bp, Homo sapien
tccagagtgtagccacggtggcagc

SEQ ID NO: 4905564 - DNA, 25 bp, Homo sapien
cagtagtagctctcctccatgttga

SEQ ID NO: 4905565 - DNA, 25 bp, Homo sapien
taggccgatagcattaatagtcaca

SEQ ID NO: 4905566 - DNA, 25 bp, Homo sapien
aactgaggataaggaaggatacacc

SEQ ID NO: 4905567 - DNA, 25 bp, Homo sapien
taactggttgctagtgaacccgccc

SEQ ID NO: 4905568 - DNA, 25 bp, Homo sapien
gcaacccaagttggctaggccgata

SEQ ID NO: 4905569 - DNA, 25 bp, Homo sapien
gacccgtggagatggtgcctcataa

SEQ ID NO: 4905570 - DNA, 25 bp, Homo sapien
ggctccatgataggaacagttcccc

SEQ ID NO: 4905571 - DNA, 25 bp, Homo sapien
atgccaagggcatagggtccatcac

SEQ ID NO: 4905572 - DNA, 25 bp, Homo sapien
gattggaagtttaccctgtgccagg

SEQ ID NO: 4905573 - DNA, 25 bp, Homo sapien
tgacactccgggaaacaggcaggat

SEQ ID NO: 4905574 - DNA, 25 bp, Homo sapien
tggtggatgcatctcctgcgaacac

SEQ ID NO: 4905575 - DNA, 25 bp, Homo sapien
tagagttgactagatcccagagaga

SEQ ID NO: 4905576 - DNA, 25 bp, Homo sapien
catgcagaggcaacgtacagcaggc

SEQ ID NO: 4905577 - DNA, 25 bp, Homo sapien
gaatcctccgtgttcagacacagct

SEQ ID NO: 4905578 - DNA, 25 bp, Homo sapien
tgaggtcctcgttgatgaggaagcc

SEQ ID NO: 4905579 - DNA, 25 bp, Homo sapien
gcactggcagacgaaggaatcctcc

SEQ ID NO: 4905580 - DNA, 25 bp, Homo sapien
gcaggtcttgaggtcctcgttgatg

SEQ ID NO: 4905581 - DNA, 25 bp, Homo sapien
cctatgagaggagcgcggagggact

SEQ ID NO: 4905582 - DNA, 25 bp, Homo sapien
cccctatgagaggagcgcggaggga

SEQ ID NO: 4905583 - DNA, 25 bp, Homo sapien
cttcccctatgagaggagcgcggag

SEQ ID NO: 4905584 - DNA, 25 bp, Homo sapien
ttcccctatgagaggagcgcggagg

SEQ ID NO: 4905585 - DNA, 25 bp, Homo sapien
caggcaaaggatctgtccatgttga

SEQ ID NO: 4905586 - DNA, 25 bp, Homo sapien
gtcttcccatcgctgcggagcacgt

SEQ ID NO: 4905587 - DNA, 25 bp, Homo sapien
ccatgttgacacaggagtattcaca

SEQ ID NO: 4905588 - DNA, 25 bp, Homo sapien
gtgtccctcaggacactgacaggca

SEQ ID NO: 4905589 - DNA, 25 bp, Homo sapien
cacggaacacctgtgcaggtcctgc

SEQ ID NO: 4905590 - DNA, 25 bp, Homo sapien
tgcatctaactgcccgaggcaaaaa

SEQ ID NO: 4905591 - DNA, 25 bp, Homo sapien
aaagcagagcttgcggtcagggggc

SEQ ID NO: 4905592 - DNA, 25 bp, Homo sapien
ctaactgcccgaggcaaaaaggcct

SEQ ID NO: 4905593 - DNA, 25 bp, Homo sapien
aggggacatcgctccagaggccaga

SEQ ID NO: 4905594 - DNA, 25 bp, Homo sapien
tagagagggaaggagtctgcgcagc

SEQ ID NO: 4905595 - DNA, 25 bp, Homo sapien
gagagggaaggagtctgcgcagctg

SEQ ID NO: 4905596 - DNA, 25 bp, Homo sapien
gagggaaggagtctgcgcagctgca

SEQ ID NO: 4905597 - DNA, 25 bp, Homo sapien
ctagagagggaaggagtctgcgcag

SEQ ID NO: 4905598 - DNA, 25 bp, Homo sapien
gatgcccttgcacaaggtcaatctc

SEQ ID NO: 4905599 - DNA, 25 bp, Homo sapien
gggcagtgtggtccatgcacatcag

SEQ ID NO: 4905600 - DNA, 25 bp, Homo sapien
cacatcaggcctatagagtctttct

SEQ ID NO: 4905601 - DNA, 25 bp, Homo sapien
gcccttgcacaaggtcaatctcagg

SEQ ID NO: 4905602 - DNA, 25 bp, Homo sapien
tggtgtcctccgcttgcagaaggga

SEQ ID NO: 4905603 - DNA, 25 bp, Homo sapien
ccttctgagtctcctcagtgcaggg

SEQ ID NO: 4905604 - DNA, 25 bp, Homo sapien
tccctcataggacagcccttggact

SEQ ID NO: 4905605 - DNA, 25 bp, Homo sapien
ggtttccaggcagcaataccttctg

SEQ ID NO: 4905606 - DNA, 25 bp, Homo sapien
gcctgtggtagttggactgggagta

SEQ ID NO: 4905607 - DNA, 25 bp, Homo sapien
ctgtggtagttggactgggagtatc

SEQ ID NO: 4905608 - DNA, 25 bp, Homo sapien
ctgcctgtggtagttggactgggag

SEQ ID NO: 4905609 - DNA, 25 bp, Homo sapien
cctgtggtagttggactgggagtat

SEQ ID NO: 4905610 - DNA, 25 bp, Homo sapien
caaaatgcacgactcacatttgttc

SEQ ID NO: 4905611 - DNA, 25 bp, Homo sapien
agcaaaatgtccagtttctgccctt

SEQ ID NO: 4905612 - DNA, 25 bp, Homo sapien
tgcaaaatgcacgactcacatttgt

SEQ ID NO: 4905613 - DNA, 25 bp, Homo sapien
cttgcaaaatgcacgactcacattt

SEQ ID NO: 4905614 - DNA, 25 bp, Homo sapien
tattttgtgagtccctgcaatgagc

SEQ ID NO: 4905615 - DNA, 25 bp, Homo sapien
gcattgccatcttacagggctgggt

SEQ ID NO: 4905616 - DNA, 25 bp, Homo sapien
tgaagcttacatttggcagcaggtg

SEQ ID NO: 4905617 - DNA, 25 bp, Homo sapien
cagccctgtgcaaagatcttggtgg

SEQ ID NO: 4905618 - DNA, 25 bp, Homo sapien
catcttcacggagtatataaccttc

SEQ ID NO: 4905619 - DNA, 25 bp, Homo sapien
cacgaatgttcacaaccgtggtccc

SEQ ID NO: 4905620 - DNA, 25 bp, Homo sapien
ttcactgcttacacacgaatgttca

SEQ ID NO: 4905621 - DNA, 25 bp, Homo sapien
gcactggcacacaaacgaatcttca

SEQ ID NO: 4905622 - DNA, 25 bp, Homo sapien
gaattgcaatataccccacacctag

SEQ ID NO: 4905623 - DNA, 25 bp, Homo sapien
taaggatagcgatttcacacagtgg

SEQ ID NO: 4905624 - DNA, 25 bp, Homo sapien
gattctatctgccacctgagctcag

SEQ ID NO: 4905625 - DNA, 25 bp, Homo sapien
caaaactggcttcatcacaaggtgc

SEQ ID NO: 4905626 - DNA, 25 bp, Homo sapien
tgttcacagccatggtctatagctt

SEQ ID NO: 4905627 - DNA, 25 bp, Homo sapien
gtttcccatcctcagcgagccggaa

SEQ ID NO: 4905628 - DNA, 25 bp, Homo sapien
tctatagcttggcagacatctttcc

SEQ ID NO: 4905629 - DNA, 25 bp, Homo sapien
tccaagcactcgcacgtgtatgagt

SEQ ID NO: 4905630 - DNA, 25 bp, Homo sapien
tttcagagcacccaaggcaggaact

SEQ ID NO: 4905631 - DNA, 25 bp, Homo sapien
ctagcactgtgcgagtttccgggca

SEQ ID NO: 4905632 - DNA, 25 bp, Homo sapien
gaaagctctagctcccatgagtctg

SEQ ID NO: 4905633 - DNA, 25 bp, Homo sapien
cagggtaccacaggcatcctaggtg

SEQ ID NO: 4905634 - DNA, 25 bp, Homo sapien
gtcttccgtcctcagctagaacaaa

SEQ ID NO: 4905635 - DNA, 25 bp, Homo sapien
attaacacaaatgtgttcgcagcca

SEQ ID NO: 4905636 - DNA, 25 bp, Homo sapien
ttgcaccgtcttccgtcctcagcta

SEQ ID NO: 4905637 - DNA, 25 bp, Homo sapien
tgttcgcagccatggtgggttgatt

SEQ ID NO: 4905638 - DNA, 25 bp, Homo sapien
gcctcttggctgataatgaatttac

SEQ ID NO: 4905639 - DNA, 25 bp, Homo sapien
gctgttcagcctacgatcaccctag

SEQ ID NO: 4905640 - DNA, 25 bp, Homo sapien
gtaccatgcccagaactgaatgtaa

SEQ ID NO: 4905641 - DNA, 25 bp, Homo sapien
tcacaggtgctgcagttaagccctc

SEQ ID NO: 4905642 - DNA, 25 bp, Homo sapien
tggacctgtgtggaatactggagca

SEQ ID NO: 4905643 - DNA, 25 bp, Homo sapien
catgtatttcatgtgggccacggct

SEQ ID NO: 4905644 - DNA, 25 bp, Homo sapien
gtccgtcggtgaacacaatggctgc

SEQ ID NO: 4905645 - DNA, 25 bp, Homo sapien
gctttactggcccactcggagacgt

SEQ ID NO: 4905646 - DNA, 25 bp, Homo sapien
taagaaacctgaaccttgagtggtg

SEQ ID NO: 4905647 - DNA, 25 bp, Homo sapien
ggaggcctttctgtacactcaaaga

SEQ ID NO: 4905648 - DNA, 25 bp, Homo sapien
caaagaagcttacccttatggccag

SEQ ID NO: 4905649 - DNA, 25 bp, Homo sapien
gaccactgagtgagtttaagaaacc

SEQ ID NO: 4905650 - DNA, 25 bp, Homo sapien
gaaacgtaagtgacctgaggccaag

SEQ ID NO: 4905651 - DNA, 25 bp, Homo sapien
tatggcttgctaaatgggaatctct

SEQ ID NO: 4905652 - DNA, 25 bp, Homo sapien
aagaatatgttctgctggagtccaa

SEQ ID NO: 4905653 - DNA, 25 bp, Homo sapien
tcagcatatttgtccgggagcccag

SEQ ID NO: 4905654 - DNA, 25 bp, Homo sapien
tgtgctgaagtcttcggcatagaag

SEQ ID NO: 4905655 - DNA, 25 bp, Homo sapien
ggcaatctcttgtagttcctcctca

SEQ ID NO: 4905656 - DNA, 25 bp, Homo sapien
taccccaacagcatacatagtgata

SEQ ID NO: 4905657 - DNA, 25 bp, Homo sapien
tgtttgtgggctcagaggcaatctc

SEQ ID NO: 4905658 - DNA, 25 bp, Homo sapien
cattaattttaacagtgggcttgga

SEQ ID NO: 4905659 - DNA, 25 bp, Homo sapien
gcaagggcgcaaacaatggtagcta

SEQ ID NO: 4905660 - DNA, 25 bp, Homo sapien
tctgaagtctaaagggcagtctgat

SEQ ID NO: 4905661 - DNA, 25 bp, Homo sapien
tgggcttggaagaactaggtacgcc

SEQ ID NO: 4905662 - DNA, 25 bp, Homo sapien
tgttggctgttggaccgtttttggc

SEQ ID NO: 4905663 - DNA, 25 bp, Homo sapien
agagtcctgtcttccatcggagtct

SEQ ID NO: 4905664 - DNA, 25 bp, Homo sapien
cagttcccctgctggagagtcctgt

SEQ ID NO: 4905665 - DNA, 25 bp, Homo sapien
gctgttggaccgtttttggcagttc

SEQ ID NO: 4905666 - DNA, 25 bp, Homo sapien
ggaaagtaggtcttggatatttatg

SEQ ID NO: 4905667 - DNA, 25 bp, Homo sapien
gatatttatggtgactggctcagat

SEQ ID NO: 4905668 - DNA, 25 bp, Homo sapien
tggatatttatggtgactggctcag

SEQ ID NO: 4905669 - DNA, 25 bp, Homo sapien
cttggatatttatggtgactggctc

SEQ ID NO: 4905670 - DNA, 25 bp, Homo sapien
tttgtgtagaccgtaaaagattgtc

SEQ ID NO: 4905671 - DNA, 25 bp, Homo sapien
tgtagaccgtaaaagattgtcttct

SEQ ID NO: 4905672 - DNA, 25 bp, Homo sapien
tgggaaagcttttgtgtagaccgta

SEQ ID NO: 4905673 - DNA, 25 bp, Homo sapien
tgaatgggaaagcttttgtgtagac

SEQ ID NO: 4905674 - DNA, 25 bp, Homo sapien
ttcttcgtttgcaaggttctggaac

SEQ ID NO: 4905675 - DNA, 25 bp, Homo sapien
tttcacatttgcattgatcgtgttt

SEQ ID NO: 4905676 - DNA, 25 bp, Homo sapien
cttcgtttgcaaggttctggaacat

SEQ ID NO: 4905677 - DNA, 25 bp, Homo sapien
ttcacatttgcattgatcgtgtttt

SEQ ID NO: 4905678 - DNA, 25 bp, Homo sapien
aatattctttgcattccatacagaa

SEQ ID NO: 4905679 - DNA, 25 bp, Homo sapien
tctttgcattccatacagaagcata

SEQ ID NO: 4905680 - DNA, 25 bp, Homo sapien
ttgcattccatacagaagcataatg

SEQ ID NO: 4905681 - DNA, 25 bp, Homo sapien
ttccatacagaagcataatgcaaga

SEQ ID NO: 4905682 - DNA, 25 bp, Homo sapien
cttgatttatccacgtaaaattttg

SEQ ID NO: 4905683 - DNA, 25 bp, Homo sapien
tgtagaactcatttaacatattctg

SEQ ID NO: 4905684 - DNA, 25 bp, Homo sapien
ccatttctgtcaagtatgttaaaac

SEQ ID NO: 4905685 - DNA, 25 bp, Homo sapien
aacatcagcaaagccagatggctca

SEQ ID NO: 4905686 - DNA, 25 bp, Homo sapien
tcatctgtatctcaggcgattttcc

SEQ ID NO: 4905687 - DNA, 25 bp, Homo sapien
tcaggcgattttccagggcttccat

SEQ ID NO: 4905688 - DNA, 25 bp, Homo sapien
ttccagggcttccattctctgtgtc

SEQ ID NO: 4905689 - DNA, 25 bp, Homo sapien
gggcttccattctctgtgtcatttc

SEQ ID NO: 4905690 - DNA, 25 bp, Homo sapien
tgagattgcacactaaggcaggatg

SEQ ID NO: 4905691 - DNA, 25 bp, Homo sapien
tctgcactgcgttcattgtaatccg

SEQ ID NO: 4905692 - DNA, 25 bp, Homo sapien
tcctatggccagtgttctacagaag

SEQ ID NO: 4905693 - DNA, 25 bp, Homo sapien
tgaggcagaagcaagttgtgtccac

SEQ ID NO: 4905694 - DNA, 25 bp, Homo sapien
cagttgctagatttacagggttgtg

SEQ ID NO: 4905695 - DNA, 25 bp, Homo sapien
tgcaggtctctttgtatgtatgggc

SEQ ID NO: 4905696 - DNA, 25 bp, Homo sapien
tatgggctgaaatcaactgagtgca

SEQ ID NO: 4905697 - DNA, 25 bp, Homo sapien
gtcaacagacttactctacaaagag

SEQ ID NO: 4905698 - DNA, 25 bp, Homo sapien
ctttgattaagtgctcttaaaccgc

SEQ ID NO: 4905699 - DNA, 25 bp, Homo sapien
taaaccgctgtcagagagaaagtga

SEQ ID NO: 4905700 - DNA, 25 bp, Homo sapien
gctcttaaaccgctgtcagagagaa

SEQ ID NO: 4905701 - DNA, 25 bp, Homo sapien
taagtgctcttaaaccgctgtcaga

SEQ ID NO: 4905702 - DNA, 25 bp, Homo sapien
agttttagccaacatagcatagtac

SEQ ID NO: 4905703 - DNA, 25 bp, Homo sapien
tttagccaacatagcatagtactct

SEQ ID NO: 4905704 - DNA, 25 bp, Homo sapien
gttttagccaacatagcatagtact

SEQ ID NO: 4905705 - DNA, 25 bp, Homo sapien
catagcatagtactctatttcagat

SEQ ID NO: 4905706 - DNA, 25 bp, Homo sapien
ttttagccaacatagcatagtactc

SEQ ID NO: 4905707 - DNA, 25 bp, Homo sapien
tagccaacatagcatagtactctat

SEQ ID NO: 4905708 - DNA, 25 bp, Homo sapien
ctgtgcccagttcaatattattgcc

SEQ ID NO: 4905709 - DNA, 25 bp, Homo sapien
ggcaataatattgaactgggcacag

SEQ ID NO: 4905710 - DNA, 25 bp, Homo sapien
aatctgaaatagagtactatgctat

SEQ ID NO: 4905711 - DNA, 25 bp, Homo sapien
atagagtactatgctatgttggcta

SEQ ID NO: 4905712 - DNA, 25 bp, Homo sapien
gagtactatgctatgttggctaaaa

SEQ ID NO: 4905713 - DNA, 25 bp, Homo sapien
tagagtactatgctatgttggctaa

SEQ ID NO: 4905714 - DNA, 25 bp, Homo sapien
tctgaaatagagtactatgctatgt

SEQ ID NO: 4905715 - DNA, 25 bp, Homo sapien
gtactatgctatgttggctaaaact

SEQ ID NO: 4905716 - DNA, 25 bp, Homo sapien
ttgacggtaactacagacaccctat

SEQ ID NO: 4905717 - DNA, 25 bp, Homo sapien
aaagccgaacccatgggacaagaca

SEQ ID NO: 4905718 - DNA, 25 bp, Homo sapien
gccctccaggctttgacggtaacta

SEQ ID NO: 4905719 - DNA, 25 bp, Homo sapien
gctttgacggtaactacagacaccc

SEQ ID NO: 4905720 - DNA, 25 bp, Homo sapien
agccgaacccatgggacaagacaga

SEQ ID NO: 4905721 - DNA, 25 bp, Homo sapien
tccaggctttgacggtaactacaga

SEQ ID NO: 4905722 - DNA, 25 bp, Homo sapien
tgtagttaccgtcaaagcctggagg

SEQ ID NO: 4905723 - DNA, 25 bp, Homo sapien
tctgtagttaccgtcaaagcctgga

SEQ ID NO: 4905724 - DNA, 25 bp, Homo sapien
tgtctgtagttaccgtcaaagcctg

SEQ ID NO: 4905725 - DNA, 25 bp, Homo sapien
tagttaccgtcaaagcctggagggc

SEQ ID NO: 4905726 - DNA, 25 bp, Homo sapien
tctgtcttgtcccatgggttcggct

SEQ ID NO: 4905727 - DNA, 25 bp, Homo sapien
tagggtgtctgtagttaccgtcaaa

SEQ ID NO: 4905728 - DNA, 25 bp, Homo sapien
aagggccaaacaccacaatcgctac

SEQ ID NO: 4905729 - DNA, 25 bp, Homo sapien
agggccaaacaccacaatcgctacc

SEQ ID NO: 4905730 - DNA, 25 bp, Homo sapien
gtagcgattgtggtgtttggccctt

SEQ ID NO: 4905731 - DNA, 25 bp, Homo sapien
ggtagcgattgtggtgtttggccct

SEQ ID NO: 4905732 - DNA, 25 bp, Homo sapien
gaagggccaaacaccacaatcgcta

SEQ ID NO: 4905733 - DNA, 25 bp, Homo sapien
aagggccaaacaccacaatcgctac

SEQ ID NO: 4905734 - DNA, 25 bp, Homo sapien
tgaagggccaaacaccacaatcgct

SEQ ID NO: 4905735 - DNA, 25 bp, Homo sapien
atgaagggccaaacaccacaatcgc

SEQ ID NO: 4905736 - DNA, 25 bp, Homo sapien
agggccaaacaccacaatcgctacc

SEQ ID NO: 4905737 - DNA, 25 bp, Homo sapien
gcgattgtggtgtttggcccttcat

SEQ ID NO: 4905738 - DNA, 25 bp, Homo sapien
gtagcgattgtggtgtttggccctt

SEQ ID NO: 4905739 - DNA, 25 bp, Homo sapien
agcgattgtggtgtttggcccttca

SEQ ID NO: 4905740 - DNA, 25 bp, Homo sapien
tagcgattgtggtgtttggcccttc

SEQ ID NO: 4905741 - DNA, 25 bp, Homo sapien
ggtagcgattgtggtgtttggccct

SEQ ID NO: 4905742 - DNA, 25 bp, Homo sapien
gcccgttcagtctcttcgattacct

SEQ ID NO: 4905743 - DNA, 25 bp, Homo sapien
tctcttcgattacctcaaagctggg

SEQ ID NO: 4905744 - DNA, 25 bp, Homo sapien
gcgaagcccgttcagtctcttcgat

SEQ ID NO: 4905745 - DNA, 25 bp, Homo sapien
ttcagtctcttcgattacctcaaag

SEQ ID NO: 4905746 - DNA, 25 bp, Homo sapien
cgttcagtctcttcgattacctcaa

SEQ ID NO: 4905747 - DNA, 25 bp, Homo sapien
gaagcccgttcagtctcttcgatta

SEQ ID NO: 4905748 - DNA, 25 bp, Homo sapien
tgaggtaatcgaagagactgaacgg

SEQ ID NO: 4905749 - DNA, 25 bp, Homo sapien
cccagctttgaggtaatcgaagaga

SEQ ID NO: 4905750 - DNA, 25 bp, Homo sapien
gctttgaggtaatcgaagagactga

SEQ ID NO: 4905751 - DNA, 25 bp, Homo sapien
taatcgaagagactgaacgggcttc

SEQ ID NO: 4905752 - DNA, 25 bp, Homo sapien
tttgaggtaatcgaagagactgaac

SEQ ID NO: 4905753 - DNA, 25 bp, Homo sapien
ggtaatcgaagagactgaacgggct

SEQ ID NO: 4905754 - DNA, 25 bp, Homo sapien
ccaatttcgctttgccttgtctgat

SEQ ID NO: 4905755 - DNA, 25 bp, Homo sapien
ctttgccttgtctgatcatcttcag

SEQ ID NO: 4905756 - DNA, 25 bp, Homo sapien
tttcgctttgccttgtctgatcatc

SEQ ID NO: 4905757 - DNA, 25 bp, Homo sapien
caatttcgctttgccttgtctgatc

SEQ ID NO: 4905758 - DNA, 25 bp, Homo sapien
accaatttcgctttgccttgtctga

SEQ ID NO: 4905759 - DNA, 25 bp, Homo sapien
gaccaatttcgctttgccttgtctg

SEQ ID NO: 4905760 - DNA, 25 bp, Homo sapien
aagatgatcagacaaggcaaagcga

SEQ ID NO: 4905761 - DNA, 25 bp, Homo sapien
ctgaagatgatcagacaaggcaaag

SEQ ID NO: 4905762 - DNA, 25 bp, Homo sapien
tcagacaaggcaaagcgaaattggt

SEQ ID NO: 4905763 - DNA, 25 bp, Homo sapien
cagacaaggcaaagcgaaattggtc

SEQ ID NO: 4905764 - DNA, 25 bp, Homo sapien
gatgatcagacaaggcaaagcgaaa

SEQ ID NO: 4905765 - DNA, 25 bp, Homo sapien
atcagacaaggcaaagcgaaattgg

SEQ ID NO: 4905766 - DNA, 25 bp, Homo sapien
gacctaagggcctcgcctgcaaccg

SEQ ID NO: 4905767 - DNA, 25 bp, Homo sapien
ggcctcgcctgcaaccgcctcaaaa

SEQ ID NO: 4905768 - DNA, 25 bp, Homo sapien
agcaaacattaaatacggacctaag

SEQ ID NO: 4905769 - DNA, 25 bp, Homo sapien
atacggacctaagggcctcgcctgc

SEQ ID NO: 4905770 - DNA, 25 bp, Homo sapien
aatacggacctaagggcctcgcctg

SEQ ID NO: 4905771 - DNA, 25 bp, Homo sapien
tgcaaccgcctcaaaaccggaccca

SEQ ID NO: 4905772 - DNA, 25 bp, Homo sapien
caggcgaggcccttaggtccgtatt

SEQ ID NO: 4905773 - DNA, 25 bp, Homo sapien
tgggtccggttttgaggcggttgca

SEQ ID NO: 4905774 - DNA, 25 bp, Homo sapien
gcaggcgaggcccttaggtccgtat

SEQ ID NO: 4905775 - DNA, 25 bp, Homo sapien
ttttgaggcggttgcaggcgaggcc

SEQ ID NO: 4905776 - DNA, 25 bp, Homo sapien
cttaggtccgtatttaatgtttgct

SEQ ID NO: 4905777 - DNA, 25 bp, Homo sapien
gcggttgcaggcgaggcccttaggt

SEQ ID NO: 4905778 - DNA, 25 bp, Homo sapien
cggcccccaacctagaagagacaga

SEQ ID NO: 4905779 - DNA, 25 bp, Homo sapien
gaaaggaaagacttcccacaatgca

SEQ ID NO: 4905780 - DNA, 25 bp, Homo sapien
gaagcggaaacagatcgcaagcaga

SEQ ID NO: 4905781 - DNA, 25 bp, Homo sapien
gcgctgcctaaacctcggtcggtag

SEQ ID NO: 4905782 - DNA, 25 bp, Homo sapien
tcggtcggtaggagcccactcacca

SEQ ID NO: 4905783 - DNA, 25 bp, Homo sapien
gcggaaacagatcgcaagcagaagg

SEQ ID NO: 4905784 - DNA, 25 bp, Homo sapien
ttccccggccatcttagcggctgct

SEQ ID NO: 4905785 - DNA, 25 bp, Homo sapien
tgcattgtgggaagtctttcctttc

SEQ ID NO: 4905786 - DNA, 25 bp, Homo sapien
tctgcttgcgatctgtttccgcttc

SEQ ID NO: 4905787 - DNA, 25 bp, Homo sapien
taccgaccgaggtttaggcagcgcg

SEQ ID NO: 4905788 - DNA, 25 bp, Homo sapien
tggtgagtgggctcctaccgaccga

SEQ ID NO: 4905789 - DNA, 25 bp, Homo sapien
gccccttctgcttgcgatctgtttc

SEQ ID NO: 4905790 - DNA, 25 bp, Homo sapien
gacctaccgagctcaagcgacctct

SEQ ID NO: 4905791 - DNA, 25 bp, Homo sapien
ttgagctggacgcaacagatcttcc

SEQ ID NO: 4905792 - DNA, 25 bp, Homo sapien
gccttgagctggacgcaacagatct

SEQ ID NO: 4905793 - DNA, 25 bp, Homo sapien
gagctggacgcaacagatcttcccg

SEQ ID NO: 4905794 - DNA, 25 bp, Homo sapien
tgcggcgcatcggagtcacccacaa

SEQ ID NO: 4905795 - DNA, 25 bp, Homo sapien
ctgcggcgcatcggagtcacccaca

SEQ ID NO: 4905796 - DNA, 25 bp, Homo sapien
agcagggcgccaccgttctccaggg

SEQ ID NO: 4905797 - DNA, 25 bp, Homo sapien
ttttgggaaactcgagcagggcgcc

SEQ ID NO: 4905798 - DNA, 25 bp, Homo sapien
tctaccaagcggagagtaaatgcgg

SEQ ID NO: 4905799 - DNA, 25 bp, Homo sapien
gctaacacagtcacaaaaggcgagt

SEQ ID NO: 4905800 - DNA, 25 bp, Homo sapien
tatcgcgctctcagtgcaaactcgg

SEQ ID NO: 4905801 - DNA, 25 bp, Homo sapien
atcgcgctctcagtgcaaactcggc

SEQ ID NO: 4905802 - DNA, 25 bp, Homo sapien
ttatcgcgctctcagtgcaaactcg

SEQ ID NO: 4905803 - DNA, 25 bp, Homo sapien
ctttactctatcaggtagcagcacc

SEQ ID NO: 4905804 - DNA, 25 bp, Homo sapien
cccggcctgaggattcaacttttat

SEQ ID NO: 4905805 - DNA, 25 bp, Homo sapien
tacaactagagtaatagaggaaggc

SEQ ID NO: 4905806 - DNA, 25 bp, Homo sapien
tagcagcaccacaacttctccaggt

SEQ ID NO: 4905807 - DNA, 25 bp, Homo sapien
gctcttgactagaatgcatcccctc

SEQ ID NO: 4905808 - DNA, 25 bp, Homo sapien
gcttaaggtacgtgatggcacatgg

SEQ ID NO: 4905809 - DNA, 25 bp, Homo sapien
taccttccttcagacaatagacagc

SEQ ID NO: 4905810 - DNA, 25 bp, Homo sapien
ggctctttaagaacagtcaccatgt

SEQ ID NO: 4905811 - DNA, 25 bp, Homo sapien
ttctctgcatcgttctaattttcag

SEQ ID NO: 4905812 - DNA, 25 bp, Homo sapien
tgcatcgttctaattttcagtatac

SEQ ID NO: 4905813 - DNA, 25 bp, Homo sapien
gcatcgttctaattttcagtatacg

SEQ ID NO: 4905814 - DNA, 25 bp, Homo sapien
ctctgcatcgttctaattttcagta

SEQ ID NO: 4905815 - DNA, 25 bp, Homo sapien
tctgaaaactacattgttaggcgat

SEQ ID NO: 4905816 - DNA, 25 bp, Homo sapien
taacaataattaatgcttactgtaa

SEQ ID NO: 4905817 - DNA, 25 bp, Homo sapien
gtatattaagaatgatgagcatttg

SEQ ID NO: 4905818 - DNA, 25 bp, Homo sapien
aaatatatagtcattcatcacttaa

SEQ ID NO: 4905819 - DNA, 25 bp, Homo sapien
attgtccttccctctcttgatcttt

SEQ ID NO: 4905820 - DNA, 25 bp, Homo sapien
tgtccttccctctcttgatctttgt

SEQ ID NO: 4905821 - DNA, 25 bp, Homo sapien
tccttccctctcttgatctttgtga

SEQ ID NO: 4905822 - DNA, 25 bp, Homo sapien
ttggattcattgtccttccctctct

SEQ ID NO: 4905823 - DNA, 25 bp, Homo sapien
aagagaggaaaagcccctaaagcag

SEQ ID NO: 4905824 - DNA, 25 bp, Homo sapien
agcgcaaagcggaagagagcgggag

SEQ ID NO: 4905825 - DNA, 25 bp, Homo sapien
taagagaggaaaagcccctaaagca

SEQ ID NO: 4905826 - DNA, 25 bp, Homo sapien
ctgggagcgcaaagcggaagagagc

SEQ ID NO: 4905827 - DNA, 25 bp, Homo sapien
ggagctggcaggaggtggaaggagc

SEQ ID NO: 4905828 - DNA, 25 bp, Homo sapien
ctggaggaggaagggagctggcagg

SEQ ID NO: 4905829 - DNA, 25 bp, Homo sapien
ggaagggagctggcaggaggtggaa

SEQ ID NO: 4905830 - DNA, 25 bp, Homo sapien
agggagctggcaggaggtggaagga

SEQ ID NO: 4905831 - DNA, 25 bp, Homo sapien
ctcccttgggcgtagagcgcaagcg

SEQ ID NO: 4905832 - DNA, 25 bp, Homo sapien
gaaccgggaaccgaaggcaactgca

SEQ ID NO: 4905833 - DNA, 25 bp, Homo sapien
gggagcgcagacacctgtctcagcc

SEQ ID NO: 4905834 - DNA, 25 bp, Homo sapien
actgcacccgtagccgcggaagttt

SEQ ID NO: 4905835 - DNA, 25 bp, Homo sapien
ctgctgtcgccggccttgttgaggg

SEQ ID NO: 4905836 - DNA, 25 bp, Homo sapien
tgctgtcgccggccttgttgagggc

SEQ ID NO: 4905837 - DNA, 25 bp, Homo sapien
tgctgctgtcgccggccttgttgag

SEQ ID NO: 4905838 - DNA, 25 bp, Homo sapien
gctgctgtcgccggccttgttgagg

SEQ ID NO: 4905839 - DNA, 25 bp, Homo sapien
ttggaaggaaatcgcgctttgtccc

SEQ ID NO: 4905840 - DNA, 25 bp, Homo sapien
aatcgcgctttgtcccgggttctgc

SEQ ID NO: 4905841 - DNA, 25 bp, Homo sapien
agcagcgccgctccagatttggaag

SEQ ID NO: 4905842 - DNA, 25 bp, Homo sapien
gggttctgctcgcatcctccgggac

SEQ ID NO: 4905843 - DNA, 25 bp, Homo sapien
gaggctaaccgccttagggcctcaa

SEQ ID NO: 4905844 - DNA, 25 bp, Homo sapien
cccgagatcccatcagcggacaggg

SEQ ID NO: 4905845 - DNA, 25 bp, Homo sapien
acagggtgaatccagcgcccggcct

SEQ ID NO: 4905846 - DNA, 25 bp, Homo sapien
taaggcaatgccgaggctaaccgcc

SEQ ID NO: 4905847 - DNA, 25 bp, Homo sapien
gaagactgtaaactagcttgacgga

SEQ ID NO: 4905848 - DNA, 25 bp, Homo sapien
taaagttcgccttgcagaagactgt

SEQ ID NO: 4905849 - DNA, 25 bp, Homo sapien
gaaaagcattcctcaccgtctggtg

SEQ ID NO: 4905850 - DNA, 25 bp, Homo sapien
tatttctgactaggacacagcggct

SEQ ID NO: 4905851 - DNA, 25 bp, Homo sapien
gatacacctttgaggccaccattaa

SEQ ID NO: 4905852 - DNA, 25 bp, Homo sapien
tcctggtgtaaacatttgaaaactg

SEQ ID NO: 4905853 - DNA, 25 bp, Homo sapien
ccaccattaagcctcctggtgtaaa

SEQ ID NO: 4905854 - DNA, 25 bp, Homo sapien
gaattgaacgagcttcttcataaag

SEQ ID NO: 4905855 - DNA, 25 bp, Homo sapien
gccaggttcggtcactgtgtctatg

SEQ ID NO: 4905856 - DNA, 25 bp, Homo sapien
gcttgccaggttcggtcactgtgtc

SEQ ID NO: 4905857 - DNA, 25 bp, Homo sapien
tgtgtctatgtttcactctgtctga

SEQ ID NO: 4905858 - DNA, 25 bp, Homo sapien
gtggctgcttgccaggttcggtcac

SEQ ID NO: 4905859 - DNA, 25 bp, Homo sapien
ctgcagttgaaaaatgctcatttga

SEQ ID NO: 4905860 - DNA, 25 bp, Homo sapien
tgcagttgaaaaatgctcatttgaa

SEQ ID NO: 4905861 - DNA, 25 bp, Homo sapien
gttgaaaaatgctcatttgaagtta

SEQ ID NO: 4905862 - DNA, 25 bp, Homo sapien
cagttgaaaaatgctcatttgaagt

SEQ ID NO: 4905863 - DNA, 25 bp, Homo sapien
taacaccattagctgtaggctctgc

SEQ ID NO: 4905864 - DNA, 25 bp, Homo sapien
ttggttgggcaaagcaggactcact

SEQ ID NO: 4905865 - DNA, 25 bp, Homo sapien
gtagattctcttcccagtgcatgtg

SEQ ID NO: 4905866 - DNA, 25 bp, Homo sapien
tctacatttcgtgctggatgctcca

SEQ ID NO: 4905867 - DNA, 25 bp, Homo sapien
gctgaaaggtccaccacttctcctg

SEQ ID NO: 4905868 - DNA, 25 bp, Homo sapien
atgtggctgctgaaaggtccaccac

SEQ ID NO: 4905869 - DNA, 25 bp, Homo sapien
tgtttccaccttttcccctgtctca

SEQ ID NO: 4905870 - DNA, 25 bp, Homo sapien
tggctgctgaaaggtccaccacttc

SEQ ID NO: 4905871 - DNA, 25 bp, Homo sapien
catggttccaacagtctctctataa

SEQ ID NO: 4905872 - DNA, 25 bp, Homo sapien
tgtctcctctatgataacacactgt

SEQ ID NO: 4905873 - DNA, 25 bp, Homo sapien
tcatggcttagcagttttgcagaac

SEQ ID NO: 4905874 - DNA, 25 bp, Homo sapien
cacactgtgtcggttcactcttcta

SEQ ID NO: 4905875 - DNA, 25 bp, Homo sapien
tttctatactgaatggccccatggc

SEQ ID NO: 4905876 - DNA, 25 bp, Homo sapien
taaggatctgtggtagttgacaagc

SEQ ID NO: 4905877 - DNA, 25 bp, Homo sapien
tgtgatagcaccagagttgcaatcc

SEQ ID NO: 4905878 - DNA, 25 bp, Homo sapien
tcaacagctgattcgaaatggcaca

SEQ ID NO: 4905879 - DNA, 25 bp, Homo sapien
cataaattgtggtcagctaagtgct

SEQ ID NO: 4905880 - DNA, 25 bp, Homo sapien
taaatgttgacccagcagtatgaat

SEQ ID NO: 4905881 - DNA, 25 bp, Homo sapien
tctccaatggattaagtgctgactc

SEQ ID NO: 4905882 - DNA, 25 bp, Homo sapien
tgacaaacttgtactagacttaggg

SEQ ID NO: 4905883 - DNA, 25 bp, Homo sapien
gaatccccgggtcagaatgacaagc

SEQ ID NO: 4905884 - DNA, 25 bp, Homo sapien
agaatgacaagcctccgcgacagta

SEQ ID NO: 4905885 - DNA, 25 bp, Homo sapien
cagtacccaccgagccaaagctcct

SEQ ID NO: 4905886 - DNA, 25 bp, Homo sapien
cagacgctgtgaggaatccccgggt

SEQ ID NO: 4905887 - DNA, 25 bp, Homo sapien
gaatacttacaagggatctgggcca

SEQ ID NO: 4905888 - DNA, 25 bp, Homo sapien
gacagtgaccttgtaaagcccgagg

SEQ ID NO: 4905889 - DNA, 25 bp, Homo sapien
tctcagcgtggtcgccagaatgacc

SEQ ID NO: 4905890 - DNA, 25 bp, Homo sapien
gaaacgaagcgtacttacaatgcaa

SEQ ID NO: 4905891 - DNA, 25 bp, Homo sapien
gttttctttcttttgcatttgacat

SEQ ID NO: 4905892 - DNA, 25 bp, Homo sapien
tcttggcgtgttttctttcttttgc

SEQ ID NO: 4905893 - DNA, 25 bp, Homo sapien
gcgtgttttctttcttttgcatttg

SEQ ID NO: 4905894 - DNA, 25 bp, Homo sapien
gtgttttctttcttttgcatttgac

SEQ ID NO: 4905895 - DNA, 25 bp, Homo sapien
ctttacacctctgtcagccacaaag

SEQ ID NO: 4905896 - DNA, 25 bp, Homo sapien
gctttacacctctgtcagccacaaa

SEQ ID NO: 4905897 - DNA, 25 bp, Homo sapien
ctagtatattttcaaaaagaaacat

SEQ ID NO: 4905898 - DNA, 25 bp, Homo sapien
tagtatattttcaaaaagaaacatg

SEQ ID NO: 4905899 - DNA, 25 bp, Homo sapien
atattttcaaaaagaaacatgtcac

SEQ ID NO: 4905900 - DNA, 25 bp, Homo sapien
gtatattttcaaaaagaaacatgtc

SEQ ID NO: 4905901 - DNA, 25 bp, Homo sapien
tgccgctgtcgtgaagttccaggat

SEQ ID NO: 4905902 - DNA, 25 bp, Homo sapien
gggttgactctggtttgccgctgtc

SEQ ID NO: 4905903 - DNA, 25 bp, Homo sapien
gagacgtgccctcgggacctgcttt

SEQ ID NO: 4905904 - DNA, 25 bp, Homo sapien
tgagacgtgccctcgggacctgctt

SEQ ID NO: 4905905 - DNA, 25 bp, Homo sapien
gaattcgaagacttctgggtcacag

SEQ ID NO: 4905906 - DNA, 25 bp, Homo sapien
tgggcaatctcctgtaaccgtctgg

SEQ ID NO: 4905907 - DNA, 25 bp, Homo sapien
tcttcgtcgcatgtgccgtggcaga

SEQ ID NO: 4905908 - DNA, 25 bp, Homo sapien
cgtttgacgttgtggctcatggctc

SEQ ID NO: 4905909 - DNA, 25 bp, Homo sapien
tatgaaaccgcttggcgtgccagat

SEQ ID NO: 4905910 - DNA, 25 bp, Homo sapien
taaattctagcgtccggttcatgtg

SEQ ID NO: 4905911 - DNA, 25 bp, Homo sapien
catggctcgatagcaggctctgtgg

SEQ ID NO: 4905912 - DNA, 25 bp, Homo sapien
gaggcaccggttcgtcatggctcga

SEQ ID NO: 4905913 - DNA, 25 bp, Homo sapien
cagaaagcgcctttagtatttcttc

SEQ ID NO: 4905914 - DNA, 25 bp, Homo sapien
ccagaaagcgcctttagtatttctt

SEQ ID NO: 4905915 - DNA, 25 bp, Homo sapien
ttcaactccaaacaacagtaatagg

SEQ ID NO: 4905916 - DNA, 25 bp, Homo sapien
tgcctttcaactccaaacaacagta

SEQ ID NO: 4905917 - DNA, 25 bp, Homo sapien
tgcctgctctcagaagggtcacccg

SEQ ID NO: 4905918 - DNA, 25 bp, Homo sapien
gacttccagataaacgtaacaggcc

SEQ ID NO: 4905919 - DNA, 25 bp, Homo sapien
tattcacccgataaagcacaaggct

SEQ ID NO: 4905920 - DNA, 25 bp, Homo sapien
tttaagggttggatgcagccagatc

SEQ ID NO: 4905921 - DNA, 25 bp, Homo sapien
aacgtattttttaatgtatatatgt

SEQ ID NO: 4905922 - DNA, 25 bp, Homo sapien
acatatatacattaaaaaatacgtt

SEQ ID NO: 4905923 - DNA, 25 bp, Homo sapien
cactggcacgctgcttttatttcct

SEQ ID NO: 4905924 - DNA, 25 bp, Homo sapien
agctgatttgatgggttccacacac

SEQ ID NO: 4905925 - DNA, 25 bp, Homo sapien
ccaattttctcgtcaggcaattcag

SEQ ID NO: 4905926 - DNA, 25 bp, Homo sapien
tggaagtgggtcagcgatgcagaca

SEQ ID NO: 4905927 - DNA, 25 bp, Homo sapien
ctagttccatcaccgataatttttt

SEQ ID NO: 4905928 - DNA, 25 bp, Homo sapien
gagagatccaagagtatggtagaca

SEQ ID NO: 4905929 - DNA, 25 bp, Homo sapien
taatgcctgtggttggagagatcca

SEQ ID NO: 4905930 - DNA, 25 bp, Homo sapien
cctgtggttggagagatccaagagt

SEQ ID NO: 4905931 - DNA, 25 bp, Homo sapien
tgattataatgcctgtggttggaga

SEQ ID NO: 4905932 - DNA, 25 bp, Homo sapien
tctgttcatctccatcgtcaaatcg

SEQ ID NO: 4905933 - DNA, 25 bp, Homo sapien
tattgcttcagttaggatggagtgg

SEQ ID NO: 4905934 - DNA, 25 bp, Homo sapien
ttttattgcttcagttaggatggag

SEQ ID NO: 4905935 - DNA, 25 bp, Homo sapien
gggaaagtggcccaatcagccggaa

SEQ ID NO: 4905936 - DNA, 25 bp, Homo sapien
tgtctgcaatgaagggaaacgctgt

SEQ ID NO: 4905937 - DNA, 25 bp, Homo sapien
caactcgaaaatggcttcttgtctg

SEQ ID NO: 4905938 - DNA, 25 bp, Homo sapien
gaaacgctgtcaggtttcttacagg

SEQ ID NO: 4905939 - DNA, 25 bp, Homo sapien
ggtttctatccaccagcggtgaggt

SEQ ID NO: 4905940 - DNA, 25 bp, Homo sapien
ctggattgggcaaagctttggactt

SEQ ID NO: 4905941 - DNA, 25 bp, Homo sapien
agaatagtacctgccggaatttctg

SEQ ID NO: 4905942 - DNA, 25 bp, Homo sapien
actgtcagtcccagaatagtacctg

SEQ ID NO: 4905943 - DNA, 25 bp, Homo sapien
ggcaaatttattcgaggatccccaa

SEQ ID NO: 4905944 - DNA, 25 bp, Homo sapien
aatcagcttgtaaagtgggcaggta

SEQ ID NO: 4905945 - DNA, 25 bp, Homo sapien
ccttagatcataatcagcttgtaaa

SEQ ID NO: 4905946 - DNA, 25 bp, Homo sapien
tcagcttgtaaagtgggcaggtaag

SEQ ID NO: 4905947 - DNA, 25 bp, Homo sapien
atttccttagatcataatcagcttg

SEQ ID NO: 4905948 - DNA, 25 bp, Homo sapien
cgccagacattttcagagaacgtag

SEQ ID NO: 4905949 - DNA, 25 bp, Homo sapien
gcagagagacaggttttactagata

SEQ ID NO: 4905950 - DNA, 25 bp, Homo sapien
ttcagagaacgtagtttgcagagag

SEQ ID NO: 4905951 - DNA, 25 bp, Homo sapien
ctgaaacgccagacattttcagaga

SEQ ID NO: 4905952 - DNA, 25 bp, Homo sapien
cagatcccttcctcacaattaaaat

SEQ ID NO: 4905953 - DNA, 25 bp, Homo sapien
gcttcgggtgcagatcccttcctca

SEQ ID NO: 4905954 - DNA, 25 bp, Homo sapien
agatcccttcctcacaattaaaatt

SEQ ID NO: 4905955 - DNA, 25 bp, Homo sapien
tcgggtgcagatcccttcctcacaa

SEQ ID NO: 4905956 - DNA, 25 bp, Homo sapien
gatcatctgtatggtcagacagagg

SEQ ID NO: 4905957 - DNA, 25 bp, Homo sapien
ctggatcatctgtatggtcagacag

SEQ ID NO: 4905958 - DNA, 25 bp, Homo sapien
atctgtatggtcagacagaggcttc

SEQ ID NO: 4905959 - DNA, 25 bp, Homo sapien
tcatctgtatggtcagacagaggct

SEQ ID NO: 4905960 - DNA, 25 bp, Homo sapien
gacatcttatacttcagcacctggg

SEQ ID NO: 4905961 - DNA, 25 bp, Homo sapien
ccaagacatcttatacttcagcacc

SEQ ID NO: 4905962 - DNA, 25 bp, Homo sapien
tttctcaggcctctagtactactta

SEQ ID NO: 4905963 - DNA, 25 bp, Homo sapien
tagtactacttagtctaaaccaaga

SEQ ID NO: 4905964 - DNA, 25 bp, Homo sapien
cactcttacagatatcttggttcca

SEQ ID NO: 4905965 - DNA, 25 bp, Homo sapien
ccgagattttattctctgtgacact

SEQ ID NO: 4905966 - DNA, 25 bp, Homo sapien
cagataaagctatgcgtacattcca

SEQ ID NO: 4905967 - DNA, 25 bp, Homo sapien
ttggttccagataaagctatgcgta

SEQ ID NO: 4905968 - DNA, 25 bp, Homo sapien
cagccctttgggagtaggacatccc

SEQ ID NO: 4905969 - DNA, 25 bp, Homo sapien
tgctgaatcaaaagtataggtatct

SEQ ID NO: 4905970 - DNA, 25 bp, Homo sapien
cagcctagtcgatcttcaccagtca

SEQ ID NO: 4905971 - DNA, 25 bp, Homo sapien
gacctaaaataagctgtgacccagg

SEQ ID NO: 4905972 - DNA, 25 bp, Homo sapien
tggaaaatcgcctgggacattaggc

SEQ ID NO: 4905973 - DNA, 25 bp, Homo sapien
ttccgcaaacagcatcccggcaggg

SEQ ID NO: 4905974 - DNA, 25 bp, Homo sapien
gattcttagcttgctcttccgcaaa

SEQ ID NO: 4905975 - DNA, 25 bp, Homo sapien
taggcgacctcttatactgagaatg

SEQ ID NO: 4905976 - DNA, 25 bp, Homo sapien
gaacgtattttttaatgtatatatg

SEQ ID NO: 4905977 - DNA, 25 bp, Homo sapien
catatatacattaaaaaatacgttc

SEQ ID NO: 4905978 - DNA, 25 bp, Homo sapien
tatgactcttgtcactcccagtggc

SEQ ID NO: 4905979 - DNA, 25 bp, Homo sapien
taatgatcttgacggtcatgctgcc

SEQ ID NO: 4905980 - DNA, 25 bp, Homo sapien
tttataccagtactgaaagctccct

SEQ ID NO: 4905981 - DNA, 25 bp, Homo sapien
caaacaaggctgcaattaatgatct

SEQ ID NO: 4905982 - DNA, 25 bp, Homo sapien
ccagtcttgagttaactgctcccag

SEQ ID NO: 4905983 - DNA, 25 bp, Homo sapien
tagttgggccgttttgcaggagggc

SEQ ID NO: 4905984 - DNA, 25 bp, Homo sapien
cagagtgccaagcttaacgtagttg

SEQ ID NO: 4905985 - DNA, 25 bp, Homo sapien
ttgagttaactgctcccagggacag

SEQ ID NO: 4905986 - DNA, 25 bp, Homo sapien
gaaggttcttcgtaagcctggactc

SEQ ID NO: 4905987 - DNA, 25 bp, Homo sapien
cttcgtaagcctggactcttgactc

SEQ ID NO: 4905988 - DNA, 25 bp, Homo sapien
ggttcttcgtaagcctggactcttg

SEQ ID NO: 4905989 - DNA, 25 bp, Homo sapien
acagaaggttcttcgtaagcctgga

SEQ ID NO: 4905990 - DNA, 25 bp, Homo sapien
cagatcttcttaggtcactctcctt

SEQ ID NO: 4905991 - DNA, 25 bp, Homo sapien
gatcttcttaggtcactctccttac

SEQ ID NO: 4905992 - DNA, 25 bp, Homo sapien
ctcagatcttcttaggtcactctcc

SEQ ID NO: 4905993 - DNA, 25 bp, Homo sapien
tcagatcttcttaggtcactctcct

SEQ ID NO: 4905994 - DNA, 25 bp, Homo sapien
tggtctgtgatcctctcaggccctg

SEQ ID NO: 4905995 - DNA, 25 bp, Homo sapien
ggtgctctatggatgtgcccacttc

SEQ ID NO: 4905996 - DNA, 25 bp, Homo sapien
tgccgattcttgacaccctgcatcc

SEQ ID NO: 4905997 - DNA, 25 bp, Homo sapien
ttttaggcatgggagcacaaggcac

SEQ ID NO: 4905998 - DNA, 25 bp, Homo sapien
gaaattatgaggctactatacggaa

SEQ ID NO: 4905999 - DNA, 25 bp, Homo sapien
gagccactaagatttcaatgagtaa

SEQ ID NO: 4906000 - DNA, 25 bp, Homo sapien
caaggctagagggataagcactttt

SEQ ID NO: 4906001 - DNA, 25 bp, Homo sapien
tgagtaaaggaactgtaagggactg

SEQ ID NO: 4906002 - DNA, 25 bp, Homo sapien
gatggacaggcaagcctctctggtc

SEQ ID NO: 4906003 - DNA, 25 bp, Homo sapien
gacacagatcatggtgtgaggctcg

SEQ ID NO: 4906004 - DNA, 25 bp, Homo sapien
tcttgctcctgaatgggtcactgtg

SEQ ID NO: 4906005 - DNA, 25 bp, Homo sapien
tctctggtcaatccttgctggcctc

SEQ ID NO: 4906006 - DNA, 25 bp, Homo sapien
ctcccttttcttcttctctttctgt

SEQ ID NO: 4906007 - DNA, 25 bp, Homo sapien
tggcttctgcctcttctcccttttc

SEQ ID NO: 4906008 - DNA, 25 bp, Homo sapien
ctggcttctgcctcttctccctttt

SEQ ID NO: 4906009 - DNA, 25 bp, Homo sapien
cttttcttcttctctttctgtttca

SEQ ID NO: 4906010 - DNA, 25 bp, Homo sapien
cccccgccgggccatcagaagaggc

SEQ ID NO: 4906011 - DNA, 25 bp, Homo sapien
cttcccccgccgggccatcagaaga

SEQ ID NO: 4906012 - DNA, 25 bp, Homo sapien
gccgggccatcagaagaggcacgtc

SEQ ID NO: 4906013 - DNA, 25 bp, Homo sapien
ttcccccgccgggccatcagaagag

SEQ ID NO: 4906014 - DNA, 25 bp, Homo sapien
agcagtgcaacgtcacacgcggcag

SEQ ID NO: 4906015 - DNA, 25 bp, Homo sapien
acacgcggcagagggcctgaccaca

SEQ ID NO: 4906016 - DNA, 25 bp, Homo sapien
tgcaacgtcacacgcggcagagggc

SEQ ID NO: 4906017 - DNA, 25 bp, Homo sapien
ctggagcagtgcaacgtcacacgcg

SEQ ID NO: 4906018 - DNA, 25 bp, Homo sapien
caaatcgatactgcagagaggcggg

SEQ ID NO: 4906019 - DNA, 25 bp, Homo sapien
acagccatggaaaaatctccctgag

SEQ ID NO: 4906020 - DNA, 25 bp, Homo sapien
cagcatatccagcaagcctgtcaag

SEQ ID NO: 4906021 - DNA, 25 bp, Homo sapien
aggcgggaggcctcagtagcactaa

SEQ ID NO: 4906022 - DNA, 25 bp, Homo sapien
catgtagaacttggcagacaataat

SEQ ID NO: 4906023 - DNA, 25 bp, Homo sapien
gattctccacatgtagaacttggca

SEQ ID NO: 4906024 - DNA, 25 bp, Homo sapien
tatctatgccctgctgggatacaag

SEQ ID NO: 4906025 - DNA, 25 bp, Homo sapien
taataacgtattatctatgccctgc

SEQ ID NO: 4906026 - DNA, 25 bp, Homo sapien
catctcattggtggcaggtacttcc

SEQ ID NO: 4906027 - DNA, 25 bp, Homo sapien
taagaacactggtcctacaaagggc

SEQ ID NO: 4906028 - DNA, 25 bp, Homo sapien
tatttcatgtacagaggccaagcgt

SEQ ID NO: 4906029 - DNA, 25 bp, Homo sapien
gaatctcaggtggacaacgtgactg

SEQ ID NO: 4906030 - DNA, 25 bp, Homo sapien
agtctcctacaatgtcccggcactg

SEQ ID NO: 4906031 - DNA, 25 bp, Homo sapien
ggctggcatcctcagccgacctcct

SEQ ID NO: 4906032 - DNA, 25 bp, Homo sapien
tcccgccattgtcaccccttctggg

SEQ ID NO: 4906033 - DNA, 25 bp, Homo sapien
gggaactgcaccttcccggactaca

SEQ ID NO: 4906034 - DNA, 25 bp, Homo sapien
tactctcggtacagaaaatgcgagc

SEQ ID NO: 4906035 - DNA, 25 bp, Homo sapien
tctgggaaagcgtgaaggtgtcatt

SEQ ID NO: 4906036 - DNA, 25 bp, Homo sapien
gtcactccgagtggctccagggata

SEQ ID NO: 4906037 - DNA, 25 bp, Homo sapien
tttttaaggctatggcaaaatgccc

SEQ ID NO: 4906038 - DNA, 25 bp, Homo sapien
tttaacctctgtggcggcatcaaca

SEQ ID NO: 4906039 - DNA, 25 bp, Homo sapien
gcgtttaacctctgtggcggcatca

SEQ ID NO: 4906040 - DNA, 25 bp, Homo sapien
gtcgcgtttaacctctgtggcggca

SEQ ID NO: 4906041 - DNA, 25 bp, Homo sapien
cccaaagtcgcgtttaacctctgtg

SEQ ID NO: 4906042 - DNA, 25 bp, Homo sapien
ttcctcacacaaggtagacactctg

SEQ ID NO: 4906043 - DNA, 25 bp, Homo sapien
actctgaggcgtaaggctggctgct

SEQ ID NO: 4906044 - DNA, 25 bp, Homo sapien
gttcctcacacaaggtagacactct

SEQ ID NO: 4906045 - DNA, 25 bp, Homo sapien
aggtagacactctgaggcgtaaggc

SEQ ID NO: 4906046 - DNA, 25 bp, Homo sapien
ggactacgggctggcggctttctat

SEQ ID NO: 4906047 - DNA, 25 bp, Homo sapien
gagactgcgtgtggcaaggttggag

SEQ ID NO: 4906048 - DNA, 25 bp, Homo sapien
caacattaggcccaggactacgggc

SEQ ID NO: 4906049 - DNA, 25 bp, Homo sapien
tcatgctgtggcaaggagactgcgt

SEQ ID NO: 4906050 - DNA, 25 bp, Homo sapien
catcccacagactatcatgttcgac

SEQ ID NO: 4906051 - DNA, 25 bp, Homo sapien
cagactatcatgttcgacacagctc

SEQ ID NO: 4906052 - DNA, 25 bp, Homo sapien
cccacagactatcatgttcgacaca

SEQ ID NO: 4906053 - DNA, 25 bp, Homo sapien
agcacatcccacagactatcatgtt

SEQ ID NO: 4906054 - DNA, 25 bp, Homo sapien
ggttagccgggtcccacagcagtgt

SEQ ID NO: 4906055 - DNA, 25 bp, Homo sapien
ggagaaggcgacttaggagcaccca

SEQ ID NO: 4906056 - DNA, 25 bp, Homo sapien
cacatgggtgctcccacaatgggct

SEQ ID NO: 4906057 - DNA, 25 bp, Homo sapien
acagagtctacactttgccagctcc

SEQ ID NO: 4906058 - DNA, 25 bp, Homo sapien
atcacatgagaagggtggagttcat

SEQ ID NO: 4906059 - DNA, 25 bp, Homo sapien
ggcctttctgtatcacatgagaagg

SEQ ID NO: 4906060 - DNA, 25 bp, Homo sapien
agaatccaggcctttctgtatcaca

SEQ ID NO: 4906061 - DNA, 25 bp, Homo sapien
caggcctttctgtatcacatgagaa

SEQ ID NO: 4906062 - DNA, 25 bp, Homo sapien
tctgctgtgattgtctcagaccctg

SEQ ID NO: 4906063 - DNA, 25 bp, Homo sapien
cctctgctgtgattgtctcagaccc

SEQ ID NO: 4906064 - DNA, 25 bp, Homo sapien
gctgtgattgtctcagaccctgtgc

SEQ ID NO: 4906065 - DNA, 25 bp, Homo sapien
tgctgtgattgtctcagaccctgtg

SEQ ID NO: 4906066 - DNA, 25 bp, Homo sapien
ggatgctccgcccagtcagctggac

SEQ ID NO: 4906067 - DNA, 25 bp, Homo sapien
ccacagccaggggacgggatgctcc

SEQ ID NO: 4906068 - DNA, 25 bp, Homo sapien
ccgcccagtcagctggacgtgtagg

SEQ ID NO: 4906069 - DNA, 25 bp, Homo sapien
ggacgggatgctccgcccagtcagc

SEQ ID NO: 4906070 - DNA, 25 bp, Homo sapien
ggccgtacatctggccatttggttt

SEQ ID NO: 4906071 - DNA, 25 bp, Homo sapien
gtacatctggccatttggtttcact

SEQ ID NO: 4906072 - DNA, 25 bp, Homo sapien
cttggccgtacatctggccatttgg

SEQ ID NO: 4906073 - DNA, 25 bp, Homo sapien
cgtacatctggccatttggtttcac

SEQ ID NO: 4906074 - DNA, 25 bp, Homo sapien
atgccaggatgccacccagcatttg

SEQ ID NO: 4906075 - DNA, 25 bp, Homo sapien
ctccagttgtaatgatgccaggatg

SEQ ID NO: 4906076 - DNA, 25 bp, Homo sapien
acccagcatttgccagaaacctgac

SEQ ID NO: 4906077 - DNA, 25 bp, Homo sapien
gtaatgatgccaggatgccacccag

SEQ ID NO: 4906078 - DNA, 25 bp, Homo sapien
tgtccgcagaaaagaaacgtgtcca

SEQ ID NO: 4906079 - DNA, 25 bp, Homo sapien
cacgggccttctctaaagcaaacca

SEQ ID NO: 4906080 - DNA, 25 bp, Homo sapien
gccttccaagatgtccgcagaaaag

SEQ ID NO: 4906081 - DNA, 25 bp, Homo sapien
ggcacagggcttgccttgctggcct

SEQ ID NO: 4906082 - DNA, 25 bp, Homo sapien
ctgcaggggaggacagaaatctgtc

SEQ ID NO: 4906083 - DNA, 25 bp, Homo sapien
tgcaggggaggacagaaatctgtca

SEQ ID NO: 4906084 - DNA, 25 bp, Homo sapien
gcaggggaggacagaaatctgtcac

SEQ ID NO: 4906085 - DNA, 25 bp, Homo sapien
gctgtccggaacatgacagggccca

SEQ ID NO: 4906086 - DNA, 25 bp, Homo sapien
cacggaacctggtacgcaatggcca

SEQ ID NO: 4906087 - DNA, 25 bp, Homo sapien
tctcagtcgctaacaggaaaacagg

SEQ ID NO: 4906088 - DNA, 25 bp, Homo sapien
caagctaggaactcctgcaccaggt

SEQ ID NO: 4906089 - DNA, 25 bp, Homo sapien
ctcttccgagccaccaaagggcctg

SEQ ID NO: 4906090 - DNA, 25 bp, Homo sapien
cttccgagccaccaaagggcctgag

SEQ ID NO: 4906091 - DNA, 25 bp, Homo sapien
tcttccgagccaccaaagggcctga

SEQ ID NO: 4906092 - DNA, 25 bp, Homo sapien
ttccgagccaccaaagggcctgagt

SEQ ID NO: 4906093 - DNA, 25 bp, Homo sapien
ggttaatagtatacaaggaagagtg

SEQ ID NO: 4906094 - DNA, 25 bp, Homo sapien
tcccagagagatataaaggtacaag

SEQ ID NO: 4906095 - DNA, 25 bp, Homo sapien
ggagccgatactggaaggcttccca

SEQ ID NO: 4906096 - DNA, 25 bp, Homo sapien
gagggccttggcaagccaaggttaa

SEQ ID NO: 4906097 - DNA, 25 bp, Homo sapien
tcacacgaagaggaaggcaactcgg

SEQ ID NO: 4906098 - DNA, 25 bp, Homo sapien
cacacgaagaggaaggcaactcggt

SEQ ID NO: 4906099 - DNA, 25 bp, Homo sapien
cacgaagaggaaggcaactcggtaa

SEQ ID NO: 4906100 - DNA, 25 bp, Homo sapien
cgaagaggaaggcaactcggtaagg

SEQ ID NO: 4906101 - DNA, 25 bp, Homo sapien
tcaagcctttccctcatggttctaa

SEQ ID NO: 4906102 - DNA, 25 bp, Homo sapien
tgaggcttgggctctactccctcta

SEQ ID NO: 4906103 - DNA, 25 bp, Homo sapien
caaatccatccagtgtgcacgcatc

SEQ ID NO: 4906104 - DNA, 25 bp, Homo sapien
caaagcacctcacctaaaccttcta

SEQ ID NO: 4906105 - DNA, 25 bp, Homo sapien
gccagtctgtgagctatagttccca

SEQ ID NO: 4906106 - DNA, 25 bp, Homo sapien
tgtgaacaccactaactacattcga

SEQ ID NO: 4906107 - DNA, 25 bp, Homo sapien
tggtctagactcttctgcccttgct

SEQ ID NO: 4906108 - DNA, 25 bp, Homo sapien
tcttagggtccaagttgaaaggcag

SEQ ID NO: 4906109 - DNA, 25 bp, Homo sapien
gacatagaaaacaacccagtggtca

SEQ ID NO: 4906110 - DNA, 25 bp, Homo sapien
taagacacatttgcaggtagaatcc

SEQ ID NO: 4906111 - DNA, 25 bp, Homo sapien
caattcatcacatatctgctaagac

SEQ ID NO: 4906112 - DNA, 25 bp, Homo sapien
gccatttaaacctgtagacatagaa

SEQ ID NO: 4906113 - DNA, 25 bp, Homo sapien
gactactcttatggccaaggaaaac

SEQ ID NO: 4906114 - DNA, 25 bp, Homo sapien
caagggttttgagcctgagttagcc

SEQ ID NO: 4906115 - DNA, 25 bp, Homo sapien
tgttatgcaaacttgagcctaggct

SEQ ID NO: 4906116 - DNA, 25 bp, Homo sapien
gctattttcggtgtaggaagccatc

SEQ ID NO: 4906117 - DNA, 25 bp, Homo sapien
ttcctgagctcctaaaagaaacata

SEQ ID NO: 4906118 - DNA, 25 bp, Homo sapien
taggattttcggcattgtaccggag

SEQ ID NO: 4906119 - DNA, 25 bp, Homo sapien
atctctgctgttctgaaacattggg

SEQ ID NO: 4906120 - DNA, 25 bp, Homo sapien
taaacagggctcagcgtctttggct

SEQ ID NO: 4906121 - DNA, 25 bp, Homo sapien
tttggaaaacgatattatgggaggc

SEQ ID NO: 4906122 - DNA, 25 bp, Homo sapien
cagtttttggaaaacgatattatgg

SEQ ID NO: 4906123 - DNA, 25 bp, Homo sapien
gtgtgccctagtacccttcaagtta

SEQ ID NO: 4906124 - DNA, 25 bp, Homo sapien
tggaagtgtgccctagtacccttca

SEQ ID NO: 4906125 - DNA, 25 bp, Homo sapien
tgcagtggccctctgcgaactccgc

SEQ ID NO: 4906126 - DNA, 25 bp, Homo sapien
gtgcagtggccctctgcgaactccg

SEQ ID NO: 4906127 - DNA, 25 bp, Homo sapien
agtgcagtggccctctgcgaactcc

SEQ ID NO: 4906128 - DNA, 25 bp, Homo sapien
cagtggccctctgcgaactccgcct

SEQ ID NO: 4906129 - DNA, 25 bp, Homo sapien
gaggtgttttcacgtcttcgtagca

SEQ ID NO: 4906130 - DNA, 25 bp, Homo sapien
gcttaggaggtgttttcacgtcttc

SEQ ID NO: 4906131 - DNA, 25 bp, Homo sapien
tgaggaaacagtcagcttaggaggt

SEQ ID NO: 4906132 - DNA, 25 bp, Homo sapien
cccatgaggaaacagtcagcttagg

SEQ ID NO: 4906133 - DNA, 25 bp, Homo sapien
taagtcaatgacaggtttggactgt

SEQ ID NO: 4906134 - DNA, 25 bp, Homo sapien
tctcccttagacgtcaaaagcacca

SEQ ID NO: 4906135 - DNA, 25 bp, Homo sapien
gctatttctgaaagcaatcgccagg

SEQ ID NO: 4906136 - DNA, 25 bp, Homo sapien
atttctctccccttcaatcggctga

SEQ ID NO: 4906137 - DNA, 25 bp, Homo sapien
cttttcttgactattgttgctctcc

SEQ ID NO: 4906138 - DNA, 25 bp, Homo sapien
ttttcttgactattgttgctctcca

SEQ ID NO: 4906139 - DNA, 25 bp, Homo sapien
tttcttgactattgttgctctccat

SEQ ID NO: 4906140 - DNA, 25 bp, Homo sapien
aaaaccgtaagcagagaggccttct

SEQ ID NO: 4906141 - DNA, 25 bp, Homo sapien
cctctggacttgcagggctctgatc

SEQ ID NO: 4906142 - DNA, 25 bp, Homo sapien
ccacattaggctgggtcagtgaatc

SEQ ID NO: 4906143 - DNA, 25 bp, Homo sapien
ggctctgatcgttccagggctgttt

SEQ ID NO: 4906144 - DNA, 25 bp, Homo sapien
gctgtcactgaatttcacgtacggg

SEQ ID NO: 4906145 - DNA, 25 bp, Homo sapien
tgtttcccgcattgacctaagtccg

SEQ ID NO: 4906146 - DNA, 25 bp, Homo sapien
tctcgggcgactggtaccgcaggaa

SEQ ID NO: 4906147 - DNA, 25 bp, Homo sapien
gaagaggtgacatgcaatgtttccc

SEQ ID NO: 4906148 - DNA, 25 bp, Homo sapien
cagtggttccccgttaagagtcaag

SEQ ID NO: 4906149 - DNA, 25 bp, Homo sapien
actgggatcctgtctcgaattctga

SEQ ID NO: 4906150 - DNA, 25 bp, Homo sapien
caggttcccagatccagtagtccag

SEQ ID NO: 4906151 - DNA, 25 bp, Homo sapien
gaatgcctctaaaaaccttggcctg

SEQ ID NO: 4906152 - DNA, 25 bp, Homo sapien
tatgtctcccctaagccacagattt

SEQ ID NO: 4906153 - DNA, 25 bp, Homo sapien
taccttcctatgaggttccagaacc

SEQ ID NO: 4906154 - DNA, 25 bp, Homo sapien
gatgctccatacacagctggaagtg

SEQ ID NO: 4906155 - DNA, 25 bp, Homo sapien
tttgcccttctggaacatgtgcaca

SEQ ID NO: 4906156 - DNA, 25 bp, Homo sapien
ttagaagcagagtgaacaacaccag

SEQ ID NO: 4906157 - DNA, 25 bp, Homo sapien
gaagcagagtgaacaacaccaggac

SEQ ID NO: 4906158 - DNA, 25 bp, Homo sapien
gtttcattagaagcagagtgaacaa

SEQ ID NO: 4906159 - DNA, 25 bp, Homo sapien
gcagagtgaacaacaccaggaccat

SEQ ID NO: 4906160 - DNA, 25 bp, Homo sapien
acaggggtctaggttttgttcagca

SEQ ID NO: 4906161 - DNA, 25 bp, Homo sapien
cacaggggtctaggttttgttcagc

SEQ ID NO: 4906162 - DNA, 25 bp, Homo sapien
ccacaggggtctaggttttgttcag

SEQ ID NO: 4906163 - DNA, 25 bp, Homo sapien
aaaggcctctataaggaatatctgt

SEQ ID NO: 4906164 - DNA, 25 bp, Homo sapien
gaatatctgtaagataaggaatatc

SEQ ID NO: 4906165 - DNA, 25 bp, Homo sapien
aggaatatctgtaagatagcttctc

SEQ ID NO: 4906166 - DNA, 25 bp, Homo sapien
ccacaaaggcctctataaggaatat

SEQ ID NO: 4906167 - DNA, 25 bp, Homo sapien
gctccttctgtgatatccaacttca

SEQ ID NO: 4906168 - DNA, 25 bp, Homo sapien
cctttggggacaccagctgctcctt

SEQ ID NO: 4906169 - DNA, 25 bp, Homo sapien
gctgctccttctgtgatatccaact

SEQ ID NO: 4906170 - DNA, 25 bp, Homo sapien
agctgctccttctgtgatatccaac

SEQ ID NO: 4906171 - DNA, 25 bp, Homo sapien
agaagctgcttcagtgggtgagagc

SEQ ID NO: 4906172 - DNA, 25 bp, Homo sapien
tctcttctccactgctcctgcagaa

SEQ ID NO: 4906173 - DNA, 25 bp, Homo sapien
cctgcagaagctgcttcagtgggtg

SEQ ID NO: 4906174 - DNA, 25 bp, Homo sapien
gcttcagtgggtgagagcatctgtt

SEQ ID NO: 4906175 - DNA, 25 bp, Homo sapien
ggtgagctgcaataagactcccaaa

SEQ ID NO: 4906176 - DNA, 25 bp, Homo sapien
ttttccaggattgagagtggcggat

SEQ ID NO: 4906177 - DNA, 25 bp, Homo sapien
ggttccatactgtgaccagctcctg

SEQ ID NO: 4906178 - DNA, 25 bp, Homo sapien
gctcctggtgagctgcaataagact

SEQ ID NO: 4906179 - DNA, 25 bp, Homo sapien
tggaaatccctgtccataaaagcga

SEQ ID NO: 4906180 - DNA, 25 bp, Homo sapien
taagcatagcatcacatgaggtggg

SEQ ID NO: 4906181 - DNA, 25 bp, Homo sapien
caatggtttggttgccagactggcc

SEQ ID NO: 4906182 - DNA, 25 bp, Homo sapien
tacagggaagttgtgggaatccacc

SEQ ID NO: 4906183 - DNA, 25 bp, Homo sapien
tgtgtgaggcgaaaaatcctttttg

SEQ ID NO: 4906184 - DNA, 25 bp, Homo sapien
gatttgcacattaagctgaatcagc

SEQ ID NO: 4906185 - DNA, 25 bp, Homo sapien
ttttggagcaaaacctgatagcatc

SEQ ID NO: 4906186 - DNA, 25 bp, Homo sapien
tccgtagcaaattcttgtgtgaggc

SEQ ID NO: 4906187 - DNA, 25 bp, Homo sapien
ctctggacagggcttggattccatg

SEQ ID NO: 4906188 - DNA, 25 bp, Homo sapien
ggaaaagtcactcttgatttgcttc

SEQ ID NO: 4906189 - DNA, 25 bp, Homo sapien
ttcggaaaagtcactcttgatttgc

SEQ ID NO: 4906190 - DNA, 25 bp, Homo sapien
tggattccatgagcatgtgcgtgtg

SEQ ID NO: 4906191 - DNA, 25 bp, Homo sapien
ctcttccctagaatgtcgtaactct

SEQ ID NO: 4906192 - DNA, 25 bp, Homo sapien
tcttccctagaatgtcgtaactctg

SEQ ID NO: 4906193 - DNA, 25 bp, Homo sapien
tctcttccctagaatgtcgtaactc

SEQ ID NO: 4906194 - DNA, 25 bp, Homo sapien
taatattcagcaggaatagcgggat

SEQ ID NO: 4906195 - DNA, 25 bp, Homo sapien
ttaatattcagcaggaatagcggga

SEQ ID NO: 4906196 - DNA, 25 bp, Homo sapien
aatattcagcaggaatagcgggatg

SEQ ID NO: 4906197 - DNA, 25 bp, Homo sapien
cgggatggtgcccagttcttgcccc

SEQ ID NO: 4906198 - DNA, 25 bp, Homo sapien
cttgtggctcccttgttctgaagcc

SEQ ID NO: 4906199 - DNA, 25 bp, Homo sapien
ccccttgtggctcccttgttctgaa

SEQ ID NO: 4906200 - DNA, 25 bp, Homo sapien
ccttgtggctcccttgttctgaagc

SEQ ID NO: 4906201 - DNA, 25 bp, Homo sapien
cccttgtggctcccttgttctgaag

SEQ ID NO: 4906202 - DNA, 25 bp, Homo sapien
aaagcgcagtggatttgtcttgacc

SEQ ID NO: 4906203 - DNA, 25 bp, Homo sapien
ctagacgctgggtggatgcagattt

SEQ ID NO: 4906204 - DNA, 25 bp, Homo sapien
tagaataatagaagcaggaccagca

SEQ ID NO: 4906205 - DNA, 25 bp, Homo sapien
tcaccctggatcttctaaagcgcag

SEQ ID NO: 4906206 - DNA, 25 bp, Homo sapien
ctgtacccacccctcagttgttcag

SEQ ID NO: 4906207 - DNA, 25 bp, Homo sapien
tcagttgttcagaccagacagcctg

SEQ ID NO: 4906208 - DNA, 25 bp, Homo sapien
gttgttcagaccagacagcctgcat

SEQ ID NO: 4906209 - DNA, 25 bp, Homo sapien
acccctcagttgttcagaccagaca

SEQ ID NO: 4906210 - DNA, 25 bp, Homo sapien
ggcctgcagtatccacattctgcaa

SEQ ID NO: 4906211 - DNA, 25 bp, Homo sapien
catgtccctgctgattaccaccaag

SEQ ID NO: 4906212 - DNA, 25 bp, Homo sapien
cctgagactcacaccttgtccatgt

SEQ ID NO: 4906213 - DNA, 25 bp, Homo sapien
attctgcaaagcctcgactacaggg

SEQ ID NO: 4906214 - DNA, 25 bp, Homo sapien
cctgcattcacggcttccccacaag

SEQ ID NO: 4906215 - DNA, 25 bp, Homo sapien
ctgcattcacggcttccccacaaga

SEQ ID NO: 4906216 - DNA, 25 bp, Homo sapien
tgcattcacggcttccccacaagag

SEQ ID NO: 4906217 - DNA, 25 bp, Homo sapien
gcattcacggcttccccacaagagg

SEQ ID NO: 4906218 - DNA, 25 bp, Homo sapien
tgatgagctgtcaggccgctttcca

SEQ ID NO: 4906219 - DNA, 25 bp, Homo sapien
gaaacgctgccatgcaggacggagc

SEQ ID NO: 4906220 - DNA, 25 bp, Homo sapien
tgcggcctgcctggactttgaaacg

SEQ ID NO: 4906221 - DNA, 25 bp, Homo sapien
caggaaccggccgtatcagttgggc

SEQ ID NO: 4906222 - DNA, 25 bp, Homo sapien
ctgtggcacagagaaggttcccaga

SEQ ID NO: 4906223 - DNA, 25 bp, Homo sapien
tgtggcacagagaaggttcccagag

SEQ ID NO: 4906224 - DNA, 25 bp, Homo sapien
ccccgcccactgaagttgtgtctga

SEQ ID NO: 4906225 - DNA, 25 bp, Homo sapien
tgtctgaattccaggctcttggagc

SEQ ID NO: 4906226 - DNA, 25 bp, Homo sapien
gagcagggctacagtgacggacggg

SEQ ID NO: 4906227 - DNA, 25 bp, Homo sapien
gtctgttcagattttgctgcatctc

SEQ ID NO: 4906228 - DNA, 25 bp, Homo sapien
gcctctttatcacagagaaaggcgt

SEQ ID NO: 4906229 - DNA, 25 bp, Homo sapien
agagaaaggcgttttggccagctcc

SEQ ID NO: 4906230 - DNA, 25 bp, Homo sapien
gggatttaacgctgtggcctcttta

SEQ ID NO: 4906231 - DNA, 25 bp, Homo sapien
tgaactcacgggatttaacgctgtg

SEQ ID NO: 4906232 - DNA, 25 bp, Homo sapien
caccaccgggatctgatgcgtgggt

SEQ ID NO: 4906233 - DNA, 25 bp, Homo sapien
catgggtctggagggagcctgagtg

SEQ ID NO: 4906234 - DNA, 25 bp, Homo sapien
gcatgggtctggagggagcctgagt

SEQ ID NO: 4906235 - DNA, 25 bp, Homo sapien
ggatctgatgcgtgggtagcagctt

SEQ ID NO: 4906236 - DNA, 25 bp, Homo sapien
tgactctgcattcttgcatctctac

SEQ ID NO: 4906237 - DNA, 25 bp, Homo sapien
tctgcattcttgcatctctacagtc

SEQ ID NO: 4906238 - DNA, 25 bp, Homo sapien
tctgactctgcattcttgcatctct

SEQ ID NO: 4906239 - DNA, 25 bp, Homo sapien
tgcattcttgcatctctacagtcag

SEQ ID NO: 4906240 - DNA, 25 bp, Homo sapien
caggaatgagccaaacacagactcc

SEQ ID NO: 4906241 - DNA, 25 bp, Homo sapien
ctccagggagctccgatcccttgga

SEQ ID NO: 4906242 - DNA, 25 bp, Homo sapien
tgagccaaacacagactccagggag

SEQ ID NO: 4906243 - DNA, 25 bp, Homo sapien
agggagctccgatcccttggactct

SEQ ID NO: 4906244 - DNA, 25 bp, Homo sapien
ccagactttcgcttcctttcagaaa

SEQ ID NO: 4906245 - DNA, 25 bp, Homo sapien
tgtggggcccagactttcgcttcct

SEQ ID NO: 4906246 - DNA, 25 bp, Homo sapien
tatctggctttgctctgctgtactg

SEQ ID NO: 4906247 - DNA, 25 bp, Homo sapien
agaaccctccctgtttctcctgtgg

SEQ ID NO: 4906248 - DNA, 25 bp, Homo sapien
cagagaacatactgcaggctcctcc

SEQ ID NO: 4906249 - DNA, 25 bp, Homo sapien
gctgagggaacaagcacagactgtt

SEQ ID NO: 4906250 - DNA, 25 bp, Homo sapien
gggcaagtaccacctggcagagtct

SEQ ID NO: 4906251 - DNA, 25 bp, Homo sapien
gccctcaggagttgggacaaacact

SEQ ID NO: 4906252 - DNA, 25 bp, Homo sapien
cagcattctccaaggggcatcatca

SEQ ID NO: 4906253 - DNA, 25 bp, Homo sapien
tctgagaaagcttcaactgagtgga

SEQ ID NO: 4906254 - DNA, 25 bp, Homo sapien
gcattctccaaggggcatcatcagc

SEQ ID NO: 4906255 - DNA, 25 bp, Homo sapien
agcattctccaaggggcatcatcag

SEQ ID NO: 4906256 - DNA, 25 bp, Homo sapien
gaatttagatgctccaagacatggc

SEQ ID NO: 4906257 - DNA, 25 bp, Homo sapien
gggctggtgaatttagatgctccaa

SEQ ID NO: 4906258 - DNA, 25 bp, Homo sapien
ggtgaatttagatgctccaagacat

SEQ ID NO: 4906259 - DNA, 25 bp, Homo sapien
tagatgctccaagacatggcacctc

SEQ ID NO: 4906260 - DNA, 25 bp, Homo sapien
cagaggtgctttgaggcttatggac

SEQ ID NO: 4906261 - DNA, 25 bp, Homo sapien
cttatggactaaatgtgggagacac

SEQ ID NO: 4906262 - DNA, 25 bp, Homo sapien
gctcctcgtgcagacagaaggctta

SEQ ID NO: 4906263 - DNA, 25 bp, Homo sapien
aatggcagagggtcagtgcctcacg

SEQ ID NO: 4906264 - DNA, 25 bp, Homo sapien
aattcacattgcaaggtgcggtagc

SEQ ID NO: 4906265 - DNA, 25 bp, Homo sapien
aactctgagcacctgtctatgggca

SEQ ID NO: 4906266 - DNA, 25 bp, Homo sapien
ggttgaactgatagcccatctgtgg

SEQ ID NO: 4906267 - DNA, 25 bp, Homo sapien
tagctgggtccaaagtgggattcag

SEQ ID NO: 4906268 - DNA, 25 bp, Homo sapien
gcgggcgagcatcgcggcggtggcc

SEQ ID NO: 4906269 - DNA, 25 bp, Homo sapien
gagaggcaggaacccgcgccgcatt

SEQ ID NO: 4906270 - DNA, 25 bp, Homo sapien
tgcctgctggcggtgcgtgcgcggg

SEQ ID NO: 4906271 - DNA, 25 bp, Homo sapien
cgcagctgccgaaggctcacaggtg

SEQ ID NO: 4906272 - DNA, 25 bp, Homo sapien
accggagctgagatacgcacgggca

SEQ ID NO: 4906273 - DNA, 25 bp, Homo sapien
cacggggggcgcgtagctttggtgg

SEQ ID NO: 4906274 - DNA, 25 bp, Homo sapien
ttgtccatgggcaggcccgggagac

SEQ ID NO: 4906275 - DNA, 25 bp, Homo sapien
cccgctcgccgcagacaggcgggac

SEQ ID NO: 4906276 - DNA, 25 bp, Homo sapien
ccgcccgcgccgcgcgggggcgcta

SEQ ID NO: 4906277 - DNA, 25 bp, Homo sapien
cccgcgccgcgcgggggcgctacac

SEQ ID NO: 4906278 - DNA, 25 bp, Homo sapien
ggccgcccgcgccgcgcgggggcgc

SEQ ID NO: 4906279 - DNA, 25 bp, Homo sapien
ctggaggcgccggccgcccgcgccg

SEQ ID NO: 4906280 - DNA, 25 bp, Homo sapien
cttgaagccgcccacattgatgcgg

SEQ ID NO: 4906281 - DNA, 25 bp, Homo sapien
tcagccatgacgtgaagcttgccgg

SEQ ID NO: 4906282 - DNA, 25 bp, Homo sapien
tcgaagtagaactcccgctggacgt

SEQ ID NO: 4906283 - DNA, 25 bp, Homo sapien
ggagaagacacatagctcagccatg

SEQ ID NO: 4906284 - DNA, 25 bp, Homo sapien
tcgggctctactttgcggccatggt

SEQ ID NO: 4906285 - DNA, 25 bp, Homo sapien
acttctcctgctcgggctctacttt

SEQ ID NO: 4906286 - DNA, 25 bp, Homo sapien
ctcctgctcgggctctactttgcgg

SEQ ID NO: 4906287 - DNA, 25 bp, Homo sapien
gtcccacttctcctgctcgggctct

SEQ ID NO: 4906288 - DNA, 25 bp, Homo sapien
gatttcgaacctagggtcctcgcca

SEQ ID NO: 4906289 - DNA, 25 bp, Homo sapien
tcaagttgcttttggcgccggtaaa

SEQ ID NO: 4906290 - DNA, 25 bp, Homo sapien
cagctttaagatgcggaagatccgc

SEQ ID NO: 4906291 - DNA, 25 bp, Homo sapien
tccccacggagaggtagagcaagag

SEQ ID NO: 4906292 - DNA, 25 bp, Homo sapien
tacagtcaccctaggaaacaaggag

SEQ ID NO: 4906293 - DNA, 25 bp, Homo sapien
tcatagacagtactgggccacaagc

SEQ ID NO: 4906294 - DNA, 25 bp, Homo sapien
gcatttctactggacgacttgtggg

SEQ ID NO: 4906295 - DNA, 25 bp, Homo sapien
cattctgggtgtactcatctggcaa

SEQ ID NO: 4906296 - DNA, 25 bp, Homo sapien
cacactttttgaggctggagtcccg

SEQ ID NO: 4906297 - DNA, 25 bp, Homo sapien
ccgtaaatgttatgccttccagggc

SEQ ID NO: 4906298 - DNA, 25 bp, Homo sapien
gaattagctccagggtttaagccag

SEQ ID NO: 4906299 - DNA, 25 bp, Homo sapien
cctttggatgaaaaccctggatagc

SEQ ID NO: 4906300 - DNA, 25 bp, Homo sapien
ctgcagagccgcctccccgtccacc

SEQ ID NO: 4906301 - DNA, 25 bp, Homo sapien
gcagagccgcctccccgtccacctg

SEQ ID NO: 4906302 - DNA, 25 bp, Homo sapien
tcctgcagagccgcctccccgtcca

SEQ ID NO: 4906303 - DNA, 25 bp, Homo sapien
gagtcctgcagagccgcctccccgt

SEQ ID NO: 4906304 - DNA, 25 bp, Homo sapien
gcagattcctggtttcacctcaaga

SEQ ID NO: 4906305 - DNA, 25 bp, Homo sapien
gatgaccgaaatttcaacctgaagg

SEQ ID NO: 4906306 - DNA, 25 bp, Homo sapien
ttccccatgagtggtctgaaagcca

SEQ ID NO: 4906307 - DNA, 25 bp, Homo sapien
tatgactgtgcgcaatgccctttgg

SEQ ID NO: 4906308 - DNA, 25 bp, Homo sapien
taaatgtctggagacgtaggcgaca

SEQ ID NO: 4906309 - DNA, 25 bp, Homo sapien
cagtgggttacaacgtagccgctcc

SEQ ID NO: 4906310 - DNA, 25 bp, Homo sapien
tggaaatggtttgcctctgggcctc

SEQ ID NO: 4906311 - DNA, 25 bp, Homo sapien
gccaatagtctagggcacaggctcg

SEQ ID NO: 4906312 - DNA, 25 bp, Homo sapien
tggaacccttgcacaaaaaagtgtg

SEQ ID NO: 4906313 - DNA, 25 bp, Homo sapien
tcaaataggaaagcaataatggcag

SEQ ID NO: 4906314 - DNA, 25 bp, Homo sapien
catttcctgggaattggtaaacatc

SEQ ID NO: 4906315 - DNA, 25 bp, Homo sapien
gaaaatgtgctctgttgtcacagga

SEQ ID NO: 4906316 - DNA, 25 bp, Homo sapien
ctctttactccaaaagaggaggtca

SEQ ID NO: 4906317 - DNA, 25 bp, Homo sapien
tccaaaagaggaggtcagaagtcat

SEQ ID NO: 4906318 - DNA, 25 bp, Homo sapien
ctccaaaagaggaggtcagaagtca

SEQ ID NO: 4906319 - DNA, 25 bp, Homo sapien
gatctctttactccaaaagaggagg

SEQ ID NO: 4906320 - DNA, 25 bp, Homo sapien
ggtcccactagtccctggagagtgt

SEQ ID NO: 4906321 - DNA, 25 bp, Homo sapien
cttgggtcccactagtccctggaga

SEQ ID NO: 4906322 - DNA, 25 bp, Homo sapien
cttccttgggtcccactagtccctg

SEQ ID NO: 4906323 - DNA, 25 bp, Homo sapien
tgggtcccactagtccctggagagt

SEQ ID NO: 4906324 - DNA, 25 bp, Homo sapien
gccactaaaggcagagcctttagtt

SEQ ID NO: 4906325 - DNA, 25 bp, Homo sapien
ttactgagctagctgaatctgtaga

SEQ ID NO: 4906326 - DNA, 25 bp, Homo sapien
gctagctgaatctgtagacccactg

SEQ ID NO: 4906327 - DNA, 25 bp, Homo sapien
agacccactggtgtgccactaaagg

SEQ ID NO: 4906328 - DNA, 25 bp, Homo sapien
caactagttggatggtggaagagcc

SEQ ID NO: 4906329 - DNA, 25 bp, Homo sapien
catagtgtctgccagtggtaagcgc

SEQ ID NO: 4906330 - DNA, 25 bp, Homo sapien
aggattagattcaggcaaggccgca

SEQ ID NO: 4906331 - DNA, 25 bp, Homo sapien
tatatagtaaaagcccagagtcctg

SEQ ID NO: 4906332 - DNA, 25 bp, Homo sapien
catgggtcgtactctgcctaactgt

SEQ ID NO: 4906333 - DNA, 25 bp, Homo sapien
gctttgtcatgggtcgtactctgcc

SEQ ID NO: 4906334 - DNA, 25 bp, Homo sapien
tttgtcatgggtcgtactctgccta

SEQ ID NO: 4906335 - DNA, 25 bp, Homo sapien
tgtcatgggtcgtactctgcctaac

SEQ ID NO: 4906336 - DNA, 25 bp, Homo sapien
accaccactgtcttcatccactgtc

SEQ ID NO: 4906337 - DNA, 25 bp, Homo sapien
agtttgcctgggcttttccagcatc

SEQ ID NO: 4906338 - DNA, 25 bp, Homo sapien
ctttggcttgcctttcttggcactg

SEQ ID NO: 4906339 - DNA, 25 bp, Homo sapien
cttggcactgtttaagattggtttc

SEQ ID NO: 4906340 - DNA, 25 bp, Homo sapien
cagcaccatccgacacccaccccat

SEQ ID NO: 4906341 - DNA, 25 bp, Homo sapien
gcctcagcaccatccgacacccacc

SEQ ID NO: 4906342 - DNA, 25 bp, Homo sapien
tcctgcctcagcaccatccgacacc

SEQ ID NO: 4906343 - DNA, 25 bp, Homo sapien
ctgcctcagcaccatccgacaccca

SEQ ID NO: 4906344 - DNA, 25 bp, Homo sapien
gaagagaagactgactctactccct

SEQ ID NO: 4906345 - DNA, 25 bp, Homo sapien
acttccatgccgtattctttgctta

SEQ ID NO: 4906346 - DNA, 25 bp, Homo sapien
tttgttctgagcatctacttccatg

SEQ ID NO: 4906347 - DNA, 25 bp, Homo sapien
tagacaaaatcgtgaagtatgaggc

SEQ ID NO: 4906348 - DNA, 25 bp, Homo sapien
ccttctctctttggaggttaagcct

SEQ ID NO: 4906349 - DNA, 25 bp, Homo sapien
gaagtactatgcctaatgcagttga

SEQ ID NO: 4906350 - DNA, 25 bp, Homo sapien
aaaattcttactgtactttagcagg

SEQ ID NO: 4906351 - DNA, 25 bp, Homo sapien
agtaaatcagtatgttcagttacca

SEQ ID NO: 4906352 - DNA, 25 bp, Homo sapien
agaatctgaaaccatagtagtgagt

SEQ ID NO: 4906353 - DNA, 25 bp, Homo sapien
aactgttaagttcatggtggcagat

SEQ ID NO: 4906354 - DNA, 25 bp, Homo sapien
tattcatatgtgaacgggtaatgtc

SEQ ID NO: 4906355 - DNA, 25 bp, Homo sapien
tgaaaaatatctggcctaacacata

SEQ ID NO: 4906356 - DNA, 25 bp, Homo sapien
gcaatcagcgagattctgtgggtgt

SEQ ID NO: 4906357 - DNA, 25 bp, Homo sapien
aatcagcgagattctgtgggtgtag

SEQ ID NO: 4906358 - DNA, 25 bp, Homo sapien
tagcaatcagcgagattctgtgggt

SEQ ID NO: 4906359 - DNA, 25 bp, Homo sapien
agattctgtgggtgtaggaccctcc

SEQ ID NO: 4906360 - DNA, 25 bp, Homo sapien
gaaggtttttctcatgtgtccacaa

SEQ ID NO: 4906361 - DNA, 25 bp, Homo sapien
tatcatctggccatacggagcttct

SEQ ID NO: 4906362 - DNA, 25 bp, Homo sapien
gattctgggactagctatatagata

SEQ ID NO: 4906363 - DNA, 25 bp, Homo sapien
gggagagtaccattcagctgaatca

SEQ ID NO: 4906364 - DNA, 25 bp, Homo sapien
ctctcaacctctattctgtatccca

SEQ ID NO: 4906365 - DNA, 25 bp, Homo sapien
gctcaagtccaatctctcaacctct

SEQ ID NO: 4906366 - DNA, 25 bp, Homo sapien
tctcaacctctattctgtatcccat

SEQ ID NO: 4906367 - DNA, 25 bp, Homo sapien
ttccttctctgctcaagtccaatct

SEQ ID NO: 4906368 - DNA, 25 bp, Homo sapien
caggctgcttaactgcaattatgta

SEQ ID NO: 4906369 - DNA, 25 bp, Homo sapien
gactgatgcccccaaaagattgatt

SEQ ID NO: 4906370 - DNA, 25 bp, Homo sapien
tgttcctcgtaaccaggctgcttaa

SEQ ID NO: 4906371 - DNA, 25 bp, Homo sapien
tttgctgtgttcctcgtaaccaggc

SEQ ID NO: 4906372 - DNA, 25 bp, Homo sapien
tctagccaagactctactctgtcac

SEQ ID NO: 4906373 - DNA, 25 bp, Homo sapien
tcaggcattcactttactcctctat

SEQ ID NO: 4906374 - DNA, 25 bp, Homo sapien
caatctttcgatctttctcattttc

SEQ ID NO: 4906375 - DNA, 25 bp, Homo sapien
ttcatcctcaggccatttaacttat

SEQ ID NO: 4906376 - DNA, 25 bp, Homo sapien
ttggcctttactcttgctgtcccat

SEQ ID NO: 4906377 - DNA, 25 bp, Homo sapien
ctcttgctgtcccatccaggtttcc

SEQ ID NO: 4906378 - DNA, 25 bp, Homo sapien
ggcctttactcttgctgtcccatcc

SEQ ID NO: 4906379 - DNA, 25 bp, Homo sapien
atccaggtttccaggcttctctcaa

SEQ ID NO: 4906380 - DNA, 25 bp, Homo sapien
tacataaagagtttctgtacaggat

SEQ ID NO: 4906381 - DNA, 25 bp, Homo sapien
gtacataaagagtttctgtacagga

SEQ ID NO: 4906382 - DNA, 25 bp, Homo sapien
ttgtacataaagagtttctgtacag

SEQ ID NO: 4906383 - DNA, 25 bp, Homo sapien
acataaagagtttctgtacaggatc

SEQ ID NO: 4906384 - DNA, 25 bp, Homo sapien
ctgctttaccatacacttgcttgag

SEQ ID NO: 4906385 - DNA, 25 bp, Homo sapien
tttaccatacacttgcttgagctta

SEQ ID NO: 4906386 - DNA, 25 bp, Homo sapien
tgctttaccatacacttgcttgagc

SEQ ID NO: 4906387 - DNA, 25 bp, Homo sapien
gctttaccatacacttgcttgagct

SEQ ID NO: 4906388 - DNA, 25 bp, Homo sapien
gatgtaccatttctttgcccgtaag

SEQ ID NO: 4906389 - DNA, 25 bp, Homo sapien
ctttgcccgtaagaaaaattgtgca

SEQ ID NO: 4906390 - DNA, 25 bp, Homo sapien
gaaaaattgtgcacagatcttccat

SEQ ID NO: 4906391 - DNA, 25 bp, Homo sapien
taagatgtaccatttctttgcccgt

SEQ ID NO: 4906392 - DNA, 25 bp, Homo sapien
agtaccaaaattgcccatagaccac

SEQ ID NO: 4906393 - DNA, 25 bp, Homo sapien
acactgctagtaccaaaattgccca

SEQ ID NO: 4906394 - DNA, 25 bp, Homo sapien
ttgttcccccggcaacactgctagt

SEQ ID NO: 4906395 - DNA, 25 bp, Homo sapien
cccggcaacactgctagtaccaaaa

SEQ ID NO: 4906396 - DNA, 25 bp, Homo sapien
tttatcatctatcgtgtgaaagaga

SEQ ID NO: 4906397 - DNA, 25 bp, Homo sapien
tcttctatcgtttgaaagggatctt

SEQ ID NO: 4906398 - DNA, 25 bp, Homo sapien
tgaaagagatcttctatcgtttgaa

SEQ ID NO: 4906399 - DNA, 25 bp, Homo sapien
cctgtgtttgggtatcttcgaaggg

SEQ ID NO: 4906400 - DNA, 25 bp, Homo sapien
catatcactgttatctacaaaagat

SEQ ID NO: 4906401 - DNA, 25 bp, Homo sapien
tcccacccttgatacctgaggatta

SEQ ID NO: 4906402 - DNA, 25 bp, Homo sapien
tggtcccacccttgatacctgagga

SEQ ID NO: 4906403 - DNA, 25 bp, Homo sapien
ccatatcactgttatctacaaaaga

SEQ ID NO: 4906404 - DNA, 25 bp, Homo sapien
ccagattatccatacctcctgctta

SEQ ID NO: 4906405 - DNA, 25 bp, Homo sapien
catacctcctgcttagctctgtcac

SEQ ID NO: 4906406 - DNA, 25 bp, Homo sapien
gattatccatacctcctgcttagct

SEQ ID NO: 4906407 - DNA, 25 bp, Homo sapien
atacctcctgcttagctctgtcact

SEQ ID NO: 4906408 - DNA, 25 bp, Homo sapien
tggtaatggacatatggacatcata

SEQ ID NO: 4906409 - DNA, 25 bp, Homo sapien
catgtttcagtttgttggtaatgga

SEQ ID NO: 4906410 - DNA, 25 bp, Homo sapien
tatgaagccaatttgaactgtttcc

SEQ ID NO: 4906411 - DNA, 25 bp, Homo sapien
ggacatcatatgttccacagagtag

SEQ ID NO: 4906412 - DNA, 25 bp, Homo sapien
agagactggcattgggtgtgttctt

SEQ ID NO: 4906413 - DNA, 25 bp, Homo sapien
tagtaagttatgctgctgcggtgtg

SEQ ID NO: 4906414 - DNA, 25 bp, Homo sapien
ctgtagtaagttatgctgctgcggt

SEQ ID NO: 4906415 - DNA, 25 bp, Homo sapien
gcattgggtgtgttcttatagccat

SEQ ID NO: 4906416 - DNA, 25 bp, Homo sapien
tctagtatagatcccaactttgtct

SEQ ID NO: 4906417 - DNA, 25 bp, Homo sapien
ctttctagtatagatcccaactttg

SEQ ID NO: 4906418 - DNA, 25 bp, Homo sapien
ctactttctagtatagatcccaact

SEQ ID NO: 4906419 - DNA, 25 bp, Homo sapien
ttctagtatagatcccaactttgtc

SEQ ID NO: 4906420 - DNA, 25 bp, Homo sapien
gagacttgagtaataccacacccaa

SEQ ID NO: 4906421 - DNA, 25 bp, Homo sapien
tcttcatttagcctgggaaaccaga

SEQ ID NO: 4906422 - DNA, 25 bp, Homo sapien
cttggatgtcttagtgtatgtgcac

SEQ ID NO: 4906423 - DNA, 25 bp, Homo sapien
tgtttgtctgacaccacctgttgga

SEQ ID NO: 4906424 - DNA, 25 bp, Homo sapien
cgaggctggcaggaattgtatcatt

SEQ ID NO: 4906425 - DNA, 25 bp, Homo sapien
cagtaaatccttgttagtgcctacc

SEQ ID NO: 4906426 - DNA, 25 bp, Homo sapien
gaagcccttcctgagtggtagaatg

SEQ ID NO: 4906427 - DNA, 25 bp, Homo sapien
aaacctgtggagtggctgactagta

SEQ ID NO: 4906428 - DNA, 25 bp, Homo sapien
gcagtgagcccaggaacggacagtc

SEQ ID NO: 4906429 - DNA, 25 bp, Homo sapien
cacagtatctttgagcagctgatgc

SEQ ID NO: 4906430 - DNA, 25 bp, Homo sapien
tgtttacctatgaccatgtacctgc

SEQ ID NO: 4906431 - DNA, 25 bp, Homo sapien
cggacagtcgcaggcttatggataa

SEQ ID NO: 4906432 - DNA, 25 bp, Homo sapien
ggcgctcttcatggtacttgcatgc

SEQ ID NO: 4906433 - DNA, 25 bp, Homo sapien
cgctcttcatggtacttgcatgctt

SEQ ID NO: 4906434 - DNA, 25 bp, Homo sapien
gcgctcttcatggtacttgcatgct

SEQ ID NO: 4906435 - DNA, 25 bp, Homo sapien
ggtgtttgcagacttttcagaaaca

SEQ ID NO: 4906436 - DNA, 25 bp, Homo sapien
ttttcagaaacagctccagtcctct

SEQ ID NO: 4906437 - DNA, 25 bp, Homo sapien
tcatgtgttttggtgtttgcagact

SEQ ID NO: 4906438 - DNA, 25 bp, Homo sapien
agtcctctcacttcacactttcttt

SEQ ID NO: 4906439 - DNA, 25 bp, Homo sapien
tgggagttggagattccagtgtgta

SEQ ID NO: 4906440 - DNA, 25 bp, Homo sapien
ggagttggagattccagtgtgtagc

SEQ ID NO: 4906441 - DNA, 25 bp, Homo sapien
tctgggagttggagattccagtgtg

SEQ ID NO: 4906442 - DNA, 25 bp, Homo sapien
ttccagtgtgtagcccagttcaaga

SEQ ID NO: 4906443 - DNA, 25 bp, Homo sapien
ttgaagtagtgaacaaaaatgccgc

SEQ ID NO: 4906444 - DNA, 25 bp, Homo sapien
ttgtggagacattagagaacctgga

SEQ ID NO: 4906445 - DNA, 25 bp, Homo sapien
ggtggttgcacttttaacagactta

SEQ ID NO: 4906446 - DNA, 25 bp, Homo sapien
cgaaagatatgtgacagcaatccct

SEQ ID NO: 4906447 - DNA, 25 bp, Homo sapien
cctctgtggtgccctaggctcggcc

SEQ ID NO: 4906448 - DNA, 25 bp, Homo sapien
gtgccctaggctcggccggccggtg

SEQ ID NO: 4906449 - DNA, 25 bp, Homo sapien
cctttcggccttcgccgtccaccag

SEQ ID NO: 4906450 - DNA, 25 bp, Homo sapien
tcctcctttcggccttcgccgtcca

SEQ ID NO: 4906451 - DNA, 25 bp, Homo sapien
tcataattgagttcctcaccctctc

SEQ ID NO: 4906452 - DNA, 25 bp, Homo sapien
ctgccacactttcataattgagttc

SEQ ID NO: 4906453 - DNA, 25 bp, Homo sapien
taattgagttcctcaccctctctca

SEQ ID NO: 4906454 - DNA, 25 bp, Homo sapien
actttcataattgagttcctcaccc

SEQ ID NO: 4906455 - DNA, 25 bp, Homo sapien
catgaccttgccacaagagcctttc

SEQ ID NO: 4906456 - DNA, 25 bp, Homo sapien
tactagcgtgggctcgaggaacttc

SEQ ID NO: 4906457 - DNA, 25 bp, Homo sapien
acaagagcctttctctatactagcg

SEQ ID NO: 4906458 - DNA, 25 bp, Homo sapien
ggctcgaggaacttccgcacattgc

SEQ ID NO: 4906459 - DNA, 25 bp, Homo sapien
gtggacaccttgtcccaaggagtct

SEQ ID NO: 4906460 - DNA, 25 bp, Homo sapien
ggacaccttgtcccaaggagtctgg

SEQ ID NO: 4906461 - DNA, 25 bp, Homo sapien
tggacaccttgtcccaaggagtctg

SEQ ID NO: 4906462 - DNA, 25 bp, Homo sapien
atctccttggcggcattcaggtgca

SEQ ID NO: 4906463 - DNA, 25 bp, Homo sapien
catctccttggcggcattcaggtgc

SEQ ID NO: 4906464 - DNA, 25 bp, Homo sapien
tctccttggcggcattcaggtgcat

SEQ ID NO: 4906465 - DNA, 25 bp, Homo sapien
cctggtgtggaagattattttcctc

SEQ ID NO: 4906466 - DNA, 25 bp, Homo sapien
tgtggaaagggattcagtttaatac

SEQ ID NO: 4906467 - DNA, 25 bp, Homo sapien
ggtgtggaagattattttcctcagg

SEQ ID NO: 4906468 - DNA, 25 bp, Homo sapien
tgtggaagattattttcctcaggtt

SEQ ID NO: 4906469 - DNA, 25 bp, Homo sapien
ccatcctgttttgaggacccatgtt

SEQ ID NO: 4906470 - DNA, 25 bp, Homo sapien
caccatcctgttttgaggacccatg

SEQ ID NO: 4906471 - DNA, 25 bp, Homo sapien
tccaccatcctgttttgaggaccca

SEQ ID NO: 4906472 - DNA, 25 bp, Homo sapien
cctgttttgaggacccatgtttaga

SEQ ID NO: 4906473 - DNA, 25 bp, Homo sapien
gactgtttatgtctcattactgcta

SEQ ID NO: 4906474 - DNA, 25 bp, Homo sapien
gagctgtgttgattctaaaggccag

SEQ ID NO: 4906475 - DNA, 25 bp, Homo sapien
catgagtttgcaggcctcgttctgt

SEQ ID NO: 4906476 - DNA, 25 bp, Homo sapien
aggccagagatgttattttgaggtt

SEQ ID NO: 4906477 - DNA, 25 bp, Homo sapien
cgggttccttgaaactaaactgcag

SEQ ID NO: 4906478 - DNA, 25 bp, Homo sapien
gcgggttccttgaaactaaactgca

SEQ ID NO: 4906479 - DNA, 25 bp, Homo sapien
cagagacagttggtttatagaccgt

SEQ ID NO: 4906480 - DNA, 25 bp, Homo sapien
tatagaccgtcaactgaagcagggc

SEQ ID NO: 4906481 - DNA, 25 bp, Homo sapien
acaactggagccgtggaatgccaca

SEQ ID NO: 4906482 - DNA, 25 bp, Homo sapien
gcatgcgtgttgtaggatgccaacc

SEQ ID NO: 4906483 - DNA, 25 bp, Homo sapien
cctgcagtttgcctcgtcggagaga

SEQ ID NO: 4906484 - DNA, 25 bp, Homo sapien
tcgtcggagagagccaggctaacgc

SEQ ID NO: 4906485 - DNA, 25 bp, Homo sapien
gcacaagctggatacggctcgggct

SEQ ID NO: 4906486 - DNA, 25 bp, Homo sapien
tttcgccttccggtgactccaggga

SEQ ID NO: 4906487 - DNA, 25 bp, Homo sapien
tattctcagggccaataagcttctc

SEQ ID NO: 4906488 - DNA, 25 bp, Homo sapien
tctgagacggatttttcggacccac

SEQ ID NO: 4906489 - DNA, 25 bp, Homo sapien
tcgggtcctttgtgggagccccaca

SEQ ID NO: 4906490 - DNA, 25 bp, Homo sapien
agaaagataccagttctgaccccag

SEQ ID NO: 4906491 - DNA, 25 bp, Homo sapien
cggtgaggtcggagcccacagcctt

SEQ ID NO: 4906492 - DNA, 25 bp, Homo sapien
ctctcgctgtcgactcccggtgagg

SEQ ID NO: 4906493 - DNA, 25 bp, Homo sapien
tcgactcccggtgaggtcggagccc

SEQ ID NO: 4906494 - DNA, 25 bp, Homo sapien
gccttgcagggccatcaccctccag

SEQ ID NO: 4906495 - DNA, 25 bp, Homo sapien
agcgctcgcccagaacctcgctctt

SEQ ID NO: 4906496 - DNA, 25 bp, Homo sapien
ggccggcgttcagcgctcgcccaga

SEQ ID NO: 4906497 - DNA, 25 bp, Homo sapien
tcagagtctgtggacgcggactgtg

SEQ ID NO: 4906498 - DNA, 25 bp, Homo sapien
tggacgcggactgtgtaaagacccg

SEQ ID NO: 4906499 - DNA, 25 bp, Homo sapien
gcagcgaggcgcacagcttggaaag

SEQ ID NO: 4906500 - DNA, 25 bp, Homo sapien
ggtcattgagtccacgcctggcaaa

SEQ ID NO: 4906501 - DNA, 25 bp, Homo sapien
tttttccgcgcggagtcgcaggagt

SEQ ID NO: 4906502 - DNA, 25 bp, Homo sapien
gagtcgcaggagtcgcggacatgat

SEQ ID NO: 4906503 - DNA, 25 bp, Homo sapien
tcaggaatccgagcgtttaagcccc

SEQ ID NO: 4906504 - DNA, 25 bp, Homo sapien
aaaggacagattgttagggccagac

SEQ ID NO: 4906505 - DNA, 25 bp, Homo sapien
taaagccagcacgaggttgacaaat

SEQ ID NO: 4906506 - DNA, 25 bp, Homo sapien
tgaaatgtgccttcagcgtcgctgg

SEQ ID NO: 4906507 - DNA, 25 bp, Homo sapien
ataaatatgttggtggagctgaggc

SEQ ID NO: 4906508 - DNA, 25 bp, Homo sapien
tcaggaaataacagcgatcatcatc

SEQ ID NO: 4906509 - DNA, 25 bp, Homo sapien
gactggctgtcaccaaggaagatgt

SEQ ID NO: 4906510 - DNA, 25 bp, Homo sapien
tagagctgagccttgtagttcccac

SEQ ID NO: 4906511 - DNA, 25 bp, Homo sapien
aagccggcgcgcttcatcctcctgg

SEQ ID NO: 4906512 - DNA, 25 bp, Homo sapien
tgcaagagcgaagccggcgcgcttc

SEQ ID NO: 4906513 - DNA, 25 bp, Homo sapien
caagccggcgtgcaagagcgaagcc

SEQ ID NO: 4906514 - DNA, 25 bp, Homo sapien
tggcaagccggcgtgcaagagcgaa

SEQ ID NO: 4906515 - DNA, 25 bp, Homo sapien
tgttaggcgaagctcagtcaaccgc

SEQ ID NO: 4906516 - DNA, 25 bp, Homo sapien
caaccgcaatgccaatgctagcagg

SEQ ID NO: 4906517 - DNA, 25 bp, Homo sapien
tctaggcagatacggagcggaagac

SEQ ID NO: 4906518 - DNA, 25 bp, Homo sapien
aaagtcggattcagactctaggcag

SEQ ID NO: 4906519 - DNA, 25 bp, Homo sapien
tgctgaggggaccaaccctttcttc

SEQ ID NO: 4906520 - DNA, 25 bp, Homo sapien
tggggctccgacaaaaacccagtga

SEQ ID NO: 4906521 - DNA, 25 bp, Homo sapien
tcttccaggaatcagaggccggagg

SEQ ID NO: 4906522 - DNA, 25 bp, Homo sapien
gagacaacagcacgtagagaaagcc

SEQ ID NO: 4906523 - DNA, 25 bp, Homo sapien
ggtgagctgcagcgacgggtggagc

SEQ ID NO: 4906524 - DNA, 25 bp, Homo sapien
gtgagctgcagcgacgggtggagcg

SEQ ID NO: 4906525 - DNA, 25 bp, Homo sapien
gagggctttctgtccggagtcaatt

SEQ ID NO: 4906526 - DNA, 25 bp, Homo sapien
tgcatggtctgtaccgcgctgagac

SEQ ID NO: 4906527 - DNA, 25 bp, Homo sapien
cttaggcggatcctcttgcgtggca

SEQ ID NO: 4906528 - DNA, 25 bp, Homo sapien
gatctcgtgcacattgggatacccc

SEQ ID NO: 4906529 - DNA, 25 bp, Homo sapien
aggccctccctcattccaaacaaga

SEQ ID NO: 4906530 - DNA, 25 bp, Homo sapien
ccaaacaagaacgtagcaagagccg

SEQ ID NO: 4906531 - DNA, 25 bp, Homo sapien
tccctcattccaaacaagaacgtag

SEQ ID NO: 4906532 - DNA, 25 bp, Homo sapien
aggccaacagattgttcctgtccaa

SEQ ID NO: 4906533 - DNA, 25 bp, Homo sapien
cagaagtagcccgactgcagccagg

SEQ ID NO: 4906534 - DNA, 25 bp, Homo sapien
ccaacagaagtagcccgactgcagc

SEQ ID NO: 4906535 - DNA, 25 bp, Homo sapien
aaacccaacagaagtagcccgactg

SEQ ID NO: 4906536 - DNA, 25 bp, Homo sapien
gtagcccgactgcagccaggaccgg

SEQ ID NO: 4906537 - DNA, 25 bp, Homo sapien
tgctagagttctagactgacaaaat

SEQ ID NO: 4906538 - DNA, 25 bp, Homo sapien
catgtgtaaagttttgtgaactgct

SEQ ID NO: 4906539 - DNA, 25 bp, Homo sapien
tctagactgacaaaatcctttccca

SEQ ID NO: 4906540 - DNA, 25 bp, Homo sapien
tagagttctagactgacaaaatcct

SEQ ID NO: 4906541 - DNA, 25 bp, Homo sapien
ggtgagttttcagattacttctctg

SEQ ID NO: 4906542 - DNA, 25 bp, Homo sapien
ttacttctctgattaaaggttcttc

SEQ ID NO: 4906543 - DNA, 25 bp, Homo sapien
atgtgggacatttgtgtggagattc

SEQ ID NO: 4906544 - DNA, 25 bp, Homo sapien
aggttcttccacatgtgggacattt

SEQ ID NO: 4906545 - DNA, 25 bp, Homo sapien
agtttcgcctgaacactttgccgca

SEQ ID NO: 4906546 - DNA, 25 bp, Homo sapien
gcagatcacagtttcgcctgaacac

SEQ ID NO: 4906547 - DNA, 25 bp, Homo sapien
gccgcagatcacagtttcgcctgaa

SEQ ID NO: 4906548 - DNA, 25 bp, Homo sapien
gctgtgccgccgcagatcacagttt

SEQ ID NO: 4906549 - DNA, 25 bp, Homo sapien
tagaagtcctgccgcggggtgtgag

SEQ ID NO: 4906550 - DNA, 25 bp, Homo sapien
ctagaagtcctgccgcggggtgtga

SEQ ID NO: 4906551 - DNA, 25 bp, Homo sapien
tccatatctaagtgcatccaacaag

SEQ ID NO: 4906552 - DNA, 25 bp, Homo sapien
cacaacattatgtacagagctctaa

SEQ ID NO: 4906553 - DNA, 25 bp, Homo sapien
gaagaagagttaactccctggagct

SEQ ID NO: 4906554 - DNA, 25 bp, Homo sapien
agtgtgtggctttctacagttctca

SEQ ID NO: 4906555 - DNA, 25 bp, Homo sapien
aaagctctgaatagaacagttatgg

SEQ ID NO: 4906556 - DNA, 25 bp, Homo sapien
tgtcttcaaagctctgaatagaaca

SEQ ID NO: 4906557 - DNA, 25 bp, Homo sapien
tctgaatagaacagttatggtttgg

SEQ ID NO: 4906558 - DNA, 25 bp, Homo sapien
gaacagttatggtttggaaaatgat

SEQ ID NO: 4906559 - DNA, 25 bp, Homo sapien
tagccttaaaatgaggaccaatttc

SEQ ID NO: 4906560 - DNA, 25 bp, Homo sapien
caaaccccaaactcttagtgtcttg

SEQ ID NO: 4906561 - DNA, 25 bp, Homo sapien
taaatgcttgacaactatagacact

SEQ ID NO: 4906562 - DNA, 25 bp, Homo sapien
ctttaatgaaatccaaatgggtgaa

SEQ ID NO: 4906563 - DNA, 25 bp, Homo sapien
caatcgtgttactcgtgtaacaaca

SEQ ID NO: 4906564 - DNA, 25 bp, Homo sapien
aattggctcctgactattttaggca

SEQ ID NO: 4906565 - DNA, 25 bp, Homo sapien
tggccacaaaaccaattttcaactg

SEQ ID NO: 4906566 - DNA, 25 bp, Homo sapien
taattgtactctaagaagggcctaa

SEQ ID NO: 4906567 - DNA, 25 bp, Homo sapien
gtttcttcttcattggttctgaaga

SEQ ID NO: 4906568 - DNA, 25 bp, Homo sapien
cttctttgataagtaatggtttctt

SEQ ID NO: 4906569 - DNA, 25 bp, Homo sapien
tttcttcttcattggttctgaagac

SEQ ID NO: 4906570 - DNA, 25 bp, Homo sapien
ctttgataagtaatggtttcttctt

SEQ ID NO: 4906571 - DNA, 25 bp, Homo sapien
cagtaaggcttcagatcaaaccagt

SEQ ID NO: 4906572 - DNA, 25 bp, Homo sapien
taatctgggccaggtatctaagaga

SEQ ID NO: 4906573 - DNA, 25 bp, Homo sapien
gcaactcaggccgtttcgaatgaag

SEQ ID NO: 4906574 - DNA, 25 bp, Homo sapien
cataagacttctccagcgttcagag

SEQ ID NO: 4906575 - DNA, 25 bp, Homo sapien
catgggaattatcctctttaggtta

SEQ ID NO: 4906576 - DNA, 25 bp, Homo sapien
ttaagaattttaatggtgggccaca

SEQ ID NO: 4906577 - DNA, 25 bp, Homo sapien
aattttaatggtgggccacatgcgg

SEQ ID NO: 4906578 - DNA, 25 bp, Homo sapien
aattgacccatagcatccatttttc

SEQ ID NO: 4906579 - DNA, 25 bp, Homo sapien
gaaagaggtaggaaacagcttcaaa

SEQ ID NO: 4906580 - DNA, 25 bp, Homo sapien
ggaaatcgatctccacacgaagacg

SEQ ID NO: 4906581 - DNA, 25 bp, Homo sapien
tttcacccggagattcagagactgg

SEQ ID NO: 4906582 - DNA, 25 bp, Homo sapien
gaaggccctctttggccgtcggtga

SEQ ID NO: 4906583 - DNA, 25 bp, Homo sapien
ccgtcggtgaaacaggagagatttc

SEQ ID NO: 4906584 - DNA, 25 bp, Homo sapien
caaagaagcaggtagtaacaccctt

SEQ ID NO: 4906585 - DNA, 25 bp, Homo sapien
gcaaagaagcaggtagtaacaccct

SEQ ID NO: 4906586 - DNA, 25 bp, Homo sapien
gaagcaggtagtaacacccttttgc

SEQ ID NO: 4906587 - DNA, 25 bp, Homo sapien
aacacccttttgccactctgctttc

SEQ ID NO: 4906588 - DNA, 25 bp, Homo sapien
gtgtctggtatattctgcttctttg

SEQ ID NO: 4906589 - DNA, 25 bp, Homo sapien
ctaagcgtgttgttatgaatgctca

SEQ ID NO: 4906590 - DNA, 25 bp, Homo sapien
taaggctttctgtgctctaagcgtg

SEQ ID NO: 4906591 - DNA, 25 bp, Homo sapien
tctgtgctctaagcgtgttgttatg

SEQ ID NO: 4906592 - DNA, 25 bp, Homo sapien
gctttctgcaccatcaccactcaat

SEQ ID NO: 4906593 - DNA, 25 bp, Homo sapien
tatcgagggatgctgttttttcttc

SEQ ID NO: 4906594 - DNA, 25 bp, Homo sapien
ctttatcgagggatgctgttttttc

SEQ ID NO: 4906595 - DNA, 25 bp, Homo sapien
tctgcaccatcaccactcaatacct

SEQ ID NO: 4906596 - DNA, 25 bp, Homo sapien
ggccaacatggcgaaaccccatctc

SEQ ID NO: 4906597 - DNA, 25 bp, Homo sapien
tactaaatatacaaaaattagccag

SEQ ID NO: 4906598 - DNA, 25 bp, Homo sapien
gaggtcaggagttcaagcccagcct

SEQ ID NO: 4906599 - DNA, 25 bp, Homo sapien
ggaggtagaggtgggtgaatcacct

SEQ ID NO: 4906600 - DNA, 25 bp, Homo sapien
caaaataaatacagtcaggcatagt

SEQ ID NO: 4906601 - DNA, 25 bp, Homo sapien
aaataaatacagtcaggcatagtgg

SEQ ID NO: 4906602 - DNA, 25 bp, Homo sapien
ctcaaaataaatacagtcaggcata

SEQ ID NO: 4906603 - DNA, 25 bp, Homo sapien
taaatacagtcaggcatagtggctc

SEQ ID NO: 4906604 - DNA, 25 bp, Homo sapien
gtatgcacaaggagatatgtttaac

SEQ ID NO: 4906605 - DNA, 25 bp, Homo sapien
ccttgagggtcatgcatattataca

SEQ ID NO: 4906606 - DNA, 25 bp, Homo sapien
ttaccactttaacatccctaatcca

SEQ ID NO: 4906607 - DNA, 25 bp, Homo sapien
tattatacactcaaaaacgttcaga

SEQ ID NO: 4906608 - DNA, 25 bp, Homo sapien
acatgttcagctccactaatcaggg

SEQ ID NO: 4906609 - DNA, 25 bp, Homo sapien
aagccacaagctgggtgacgatgat

SEQ ID NO: 4906610 - DNA, 25 bp, Homo sapien
gaaaaccaaccaattcatagaagag

SEQ ID NO: 4906611 - DNA, 25 bp, Homo sapien
cacatgtcaaaatacaagccacaag

SEQ ID NO: 4906612 - DNA, 25 bp, Homo sapien
gtgccctttaccataagcagtgaag

SEQ ID NO: 4906613 - DNA, 25 bp, Homo sapien
aattgtatagaacctctcagcagtc

SEQ ID NO: 4906614 - DNA, 25 bp, Homo sapien
ccaaatataggagtagaaatgtgac

SEQ ID NO: 4906615 - DNA, 25 bp, Homo sapien
catatggaatgctaaacgtatgcca

SEQ ID NO: 4906616 - DNA, 25 bp, Homo sapien
aggcacccaggtcgctggttcgatg

SEQ ID NO: 4906617 - DNA, 25 bp, Homo sapien
cacccaggtcgctggttcgatgcag

SEQ ID NO: 4906618 - DNA, 25 bp, Homo sapien
ggaggcacccaggtcgctggttcga

SEQ ID NO: 4906619 - DNA, 25 bp, Homo sapien
ttcccgatgtggaggtccgtcttgg

SEQ ID NO: 4906620 - DNA, 25 bp, Homo sapien
acgccagagtaccgccgcgtcccct

SEQ ID NO: 4906621 - DNA, 25 bp, Homo sapien
cgccagagtaccgccgcgtcccctc

SEQ ID NO: 4906622 - DNA, 25 bp, Homo sapien
cttgatgtagcgattcacatagctc

SEQ ID NO: 4906623 - DNA, 25 bp, Homo sapien
ccaactttaactcgagcttgctgag

SEQ ID NO: 4906624 - DNA, 25 bp, Homo sapien
tagatccgacggctttaagttcttg

SEQ ID NO: 4906625 - DNA, 25 bp, Homo sapien
tccaccccatagtgaaagctgtaga

SEQ ID NO: 4906626 - DNA, 25 bp, Homo sapien
ggagatcaaatacaggacttggtac

SEQ ID NO: 4906627 - DNA, 25 bp, Homo sapien
caacaaacaactatgacacatgcaa

SEQ ID NO: 4906628 - DNA, 25 bp, Homo sapien
tcctgaaacaacaaccatctcctgg

SEQ ID NO: 4906629 - DNA, 25 bp, Homo sapien
tggtacacaaagacttcaaaacatc

SEQ ID NO: 4906630 - DNA, 25 bp, Homo sapien
ttgatggtaattaccactggttctg

SEQ ID NO: 4906631 - DNA, 25 bp, Homo sapien
tccatggtacatgaatcctcaattc

SEQ ID NO: 4906632 - DNA, 25 bp, Homo sapien
aaatgcattccatagtattgatggt

SEQ ID NO: 4906633 - DNA, 25 bp, Homo sapien
tcctcaattcatgaatatgtccact

SEQ ID NO: 4906634 - DNA, 25 bp, Homo sapien
ttctctcaaaaagacataaactcca

SEQ ID NO: 4906635 - DNA, 25 bp, Homo sapien
ttagccgggcattggtggcttccgc

SEQ ID NO: 4906636 - DNA, 25 bp, Homo sapien
cattggtggcttccgcctgtagtac

SEQ ID NO: 4906637 - DNA, 25 bp, Homo sapien
accttctctcaaaaagacataaact

SEQ ID NO: 4906638 - DNA, 25 bp, Homo sapien
aatatgtctgaattataagaaaatc

SEQ ID NO: 4906639 - DNA, 25 bp, Homo sapien
accacaaatatgtctgaattataag

SEQ ID NO: 4906640 - DNA, 25 bp, Homo sapien
gaccacaaatatgtctgaattataa

SEQ ID NO: 4906641 - DNA, 25 bp, Homo sapien
tcagaccacaaatatgtctgaatta

SEQ ID NO: 4906642 - DNA, 25 bp, Homo sapien
taaaaacttccaactcctgcaagag

SEQ ID NO: 4906643 - DNA, 25 bp, Homo sapien
ctaaaaatagcgagagaaaagtgtc

SEQ ID NO: 4906644 - DNA, 25 bp, Homo sapien
taagcagaaaccttaagaccaggag

SEQ ID NO: 4906645 - DNA, 25 bp, Homo sapien
tcaatacaggaagctcaagaacccc

SEQ ID NO: 4906646 - DNA, 25 bp, Homo sapien
cttaatgaccaaaagctgaacattc

SEQ ID NO: 4906647 - DNA, 25 bp, Homo sapien
ttaatgaccaaaagctgaacattca

SEQ ID NO: 4906648 - DNA, 25 bp, Homo sapien
taatgaccaaaagctgaacattcat

SEQ ID NO: 4906649 - DNA, 25 bp, Homo sapien
atactcttacatgccaaattgctgg

SEQ ID NO: 4906650 - DNA, 25 bp, Homo sapien
caacatccatctctatgtaagtgca

SEQ ID NO: 4906651 - DNA, 25 bp, Homo sapien
tagggacttcagaatctatcgaaca

SEQ ID NO: 4906652 - DNA, 25 bp, Homo sapien
tctttgtatcctgtccttagggact

SEQ ID NO: 4906653 - DNA, 25 bp, Homo sapien
gctctcagcagtactacggttggta

SEQ ID NO: 4906654 - DNA, 25 bp, Homo sapien
tctccgcggtttgattgatgatttt

SEQ ID NO: 4906655 - DNA, 25 bp, Homo sapien
tggtagaattagaaccacagctttc

SEQ ID NO: 4906656 - DNA, 25 bp, Homo sapien
cagtactacggttggtagaattaga

SEQ ID NO: 4906657 - DNA, 25 bp, Homo sapien
ctggtggtaagtcaggatctgtagg

SEQ ID NO: 4906658 - DNA, 25 bp, Homo sapien
gtcacactaaggatgagaacctaca

SEQ ID NO: 4906659 - DNA, 25 bp, Homo sapien
tctaagcaaggtacaagatagtgtc

SEQ ID NO: 4906660 - DNA, 25 bp, Homo sapien
gggtctactccacacgcatctgaaa

SEQ ID NO: 4906661 - DNA, 25 bp, Homo sapien
tatttgttcatcatccgggtctact

SEQ ID NO: 4906662 - DNA, 25 bp, Homo sapien
ggaaaggacgatatcatcttcaaca

SEQ ID NO: 4906663 - DNA, 25 bp, Homo sapien
gaaatatccatgaatgcacgatccc

SEQ ID NO: 4906664 - DNA, 25 bp, Homo sapien
tctgcagaagtgatattgacggaaa

SEQ ID NO: 4906665 - DNA, 25 bp, Homo sapien
tatttacaactcgtctaatcagact

SEQ ID NO: 4906666 - DNA, 25 bp, Homo sapien
catttgtataataaaggatcctggt

SEQ ID NO: 4906667 - DNA, 25 bp, Homo sapien
aaatgaagacgagttctgaaggaac

SEQ ID NO: 4906668 - DNA, 25 bp, Homo sapien
taccactggcattccgtttatcaag

SEQ ID NO: 4906669 - DNA, 25 bp, Homo sapien
gtttatcaagacaaactgtacagtc

SEQ ID NO: 4906670 - DNA, 25 bp, Homo sapien
aatgatgggtctaacccaaaatggc

SEQ ID NO: 4906671 - DNA, 25 bp, Homo sapien
gaaacctctgtgaagtaattaatga

SEQ ID NO: 4906672 - DNA, 25 bp, Homo sapien
taattaatgaggtcgaccatatctg

SEQ ID NO: 4906673 - DNA, 25 bp, Homo sapien
cctaggattaggacttggaagaatg

SEQ ID NO: 4906674 - DNA, 25 bp, Homo sapien
tcaaactttccactaaagtatgaat

SEQ ID NO: 4906675 - DNA, 25 bp, Homo sapien
ttcaaactttccactaaagtatgaa

SEQ ID NO: 4906676 - DNA, 25 bp, Homo sapien
tttcaaactttccactaaagtatga

SEQ ID NO: 4906677 - DNA, 25 bp, Homo sapien
gcaattccaagttgcattatacgaa

SEQ ID NO: 4906678 - DNA, 25 bp, Homo sapien
ttatacgaataaacataggcagttg

SEQ ID NO: 4906679 - DNA, 25 bp, Homo sapien
gacaagtaaggtcctctatttcgcc

SEQ ID NO: 4906680 - DNA, 25 bp, Homo sapien
cctatttctccatagtaaagagcaa

SEQ ID NO: 4906681 - DNA, 25 bp, Homo sapien
aggatgtaggccaactgcaactctc

SEQ ID NO: 4906682 - DNA, 25 bp, Homo sapien
aaggaaagaacgactgctacatgca

SEQ ID NO: 4906683 - DNA, 25 bp, Homo sapien
actcttatgacaggagactcttgga

SEQ ID NO: 4906684 - DNA, 25 bp, Homo sapien
tctttcacctgagaaggaaaaggct

SEQ ID NO: 4906685 - DNA, 25 bp, Homo sapien
gatttagattccaactactctttaa

SEQ ID NO: 4906686 - DNA, 25 bp, Homo sapien
gacaaactccatcaaagtcctttaa

SEQ ID NO: 4906687 - DNA, 25 bp, Homo sapien
ggccaggatcggtgacttaaacctg

SEQ ID NO: 4906688 - DNA, 25 bp, Homo sapien
gttacaaactggcagaccaaagatt

SEQ ID NO: 4906689 - DNA, 25 bp, Homo sapien
aactcttgacctttatgctgagcag

SEQ ID NO: 4906690 - DNA, 25 bp, Homo sapien
gatgcaggatcgttcccaacaaagt

SEQ ID NO: 4906691 - DNA, 25 bp, Homo sapien
tcataactcacaattgcaggcacaa

SEQ ID NO: 4906692 - DNA, 25 bp, Homo sapien
gaaagtcaccgttgcctttgtgcaa

SEQ ID NO: 4906693 - DNA, 25 bp, Homo sapien
tagagatataaacagcaagagaaaa

SEQ ID NO: 4906694 - DNA, 25 bp, Homo sapien
atagagatataaacagcaagagaaa

SEQ ID NO: 4906695 - DNA, 25 bp, Homo sapien
agatataaacagcaagagaaaagac

SEQ ID NO: 4906696 - DNA, 25 bp, Homo sapien
gagatataaacagcaagagaaaaga

SEQ ID NO: 4906697 - DNA, 25 bp, Homo sapien
taaggcatgtttgtacaccaactga

SEQ ID NO: 4906698 - DNA, 25 bp, Homo sapien
agggcaaaaaactatccatgaagct

SEQ ID NO: 4906699 - DNA, 25 bp, Homo sapien
aattcaaagatttcaagtggaggag

SEQ ID NO: 4906700 - DNA, 25 bp, Homo sapien
gactctatctcacatctactgaatg

SEQ ID NO: 4906701 - DNA, 25 bp, Homo sapien
tattattctttaacctagacataca

SEQ ID NO: 4906702 - DNA, 25 bp, Homo sapien
gaagtgcaggggtactgggattaca

SEQ ID NO: 4906703 - DNA, 25 bp, Homo sapien
tgtatagataagaacaggtatttta

SEQ ID NO: 4906704 - DNA, 25 bp, Homo sapien
ttttgtatagataagaacaggtatt

SEQ ID NO: 4906705 - DNA, 25 bp, Homo sapien
aatttatatctgttcactctggtat

SEQ ID NO: 4906706 - DNA, 25 bp, Homo sapien
gtatctctggagacaaaacaatgct

SEQ ID NO: 4906707 - DNA, 25 bp, Homo sapien
atgcttagacacagctggcattgaa

SEQ ID NO: 4906708 - DNA, 25 bp, Homo sapien
cctttatattcaatgaacacaatat

SEQ ID NO: 4906709 - DNA, 25 bp, Homo sapien
tagactttgggacttacacctgtgg

SEQ ID NO: 4906710 - DNA, 25 bp, Homo sapien
ggagtttaacaattgagtcagtgaa

SEQ ID NO: 4906711 - DNA, 25 bp, Homo sapien
tatcctacagcctctagcatgtcta

SEQ ID NO: 4906712 - DNA, 25 bp, Homo sapien
gctagcacagctaggataaagcagg

SEQ ID NO: 4906713 - DNA, 25 bp, Homo sapien
gcgaacctcattgtattgcactctg

SEQ ID NO: 4906714 - DNA, 25 bp, Homo sapien
tgtgtgcaataacagtcccatactc

SEQ ID NO: 4906715 - DNA, 25 bp, Homo sapien
aaattggaagtctgtagcaacccca

SEQ ID NO: 4906716 - DNA, 25 bp, Homo sapien
cattcaacaacgtgtagtttcagtc

SEQ ID NO: 4906717 - DNA, 25 bp, Homo sapien
cttcttgttcccaacacaatacttc

SEQ ID NO: 4906718 - DNA, 25 bp, Homo sapien
ctttaaggcacatggctctgcaacc

SEQ ID NO: 4906719 - DNA, 25 bp, Homo sapien
ggtatgtgaaacctttcgtactcaa

SEQ ID NO: 4906720 - DNA, 25 bp, Homo sapien
tgagttgaatccaagataaattctg

SEQ ID NO: 4906721 - DNA, 25 bp, Homo sapien
cgcgagtaccattattttctgggct

SEQ ID NO: 4906722 - DNA, 25 bp, Homo sapien
tctgggcttcggtaatcaaacaatg

SEQ ID NO: 4906723 - DNA, 25 bp, Homo sapien
ttgtatacaggtaatccatataaaa

SEQ ID NO: 4906724 - DNA, 25 bp, Homo sapien
ttccagctatctcagtgtatgtctc

SEQ ID NO: 4906725 - DNA, 25 bp, Homo sapien
ccgttgcattccagctatctcagtg

SEQ ID NO: 4906726 - DNA, 25 bp, Homo sapien
cactagtgttctccattgtatacag

SEQ ID NO: 4906727 - DNA, 25 bp, Homo sapien
caaggcttttggtggacttctcctg

SEQ ID NO: 4906728 - DNA, 25 bp, Homo sapien
tgctatccaaacgaaaatcaagagg

SEQ ID NO: 4906729 - DNA, 25 bp, Homo sapien
aatcaagaggacctataacaaggct

SEQ ID NO: 4906730 - DNA, 25 bp, Homo sapien
ttcaaaatcctatgcaccgcactgc

SEQ ID NO: 4906731 - DNA, 25 bp, Homo sapien
gacatggtgccatcacagtactgag

SEQ ID NO: 4906732 - DNA, 25 bp, Homo sapien
tctaaaggatccagggcggacatgg

SEQ ID NO: 4906733 - DNA, 25 bp, Homo sapien
cctcagcatgcagctttaatctcag

SEQ ID NO: 4906734 - DNA, 25 bp, Homo sapien
tatcttgctactctgtcatcctcag

SEQ ID NO: 4906735 - DNA, 25 bp, Homo sapien
ttcaggattcagtattgtttcattt

SEQ ID NO: 4906736 - DNA, 25 bp, Homo sapien
cttcaggattcagtattgtttcatt

SEQ ID NO: 4906737 - DNA, 25 bp, Homo sapien
gacaggtagtaaatggtccagcaag

SEQ ID NO: 4906738 - DNA, 25 bp, Homo sapien
cacttgtatgtcgagtaggaatata

SEQ ID NO: 4906739 - DNA, 25 bp, Homo sapien
gcaagttgaattcagccatggaaat

SEQ ID NO: 4906740 - DNA, 25 bp, Homo sapien
tgtgcaggtacatttgaggagagta

SEQ ID NO: 4906741 - DNA, 25 bp, Homo sapien
gaaggttgagtaaggctgctgacca

SEQ ID NO: 4906742 - DNA, 25 bp, Homo sapien
caaaggccgaagagactggaagttt

SEQ ID NO: 4906743 - DNA, 25 bp, Homo sapien
aactgttcagcatacattggcactg

SEQ ID NO: 4906744 - DNA, 25 bp, Homo sapien
caatattcgaatggatggcaaaggc

SEQ ID NO: 4906745 - DNA, 25 bp, Homo sapien
acaggtaagcagtaagatccactgc

SEQ ID NO: 4906746 - DNA, 25 bp, Homo sapien
cagcatgtggggagtttcagaagtt

SEQ ID NO: 4906747 - DNA, 25 bp, Homo sapien
tggggagtttcagaagtttcccata

SEQ ID NO: 4906748 - DNA, 25 bp, Homo sapien
aggtaagcagtaagatccactgcaa

SEQ ID NO: 4906749 - DNA, 25 bp, Homo sapien
tgtgctcttgtagcttgaattgtga

SEQ ID NO: 4906750 - DNA, 25 bp, Homo sapien
tcaatcactgcggaagagctgacat

SEQ ID NO: 4906751 - DNA, 25 bp, Homo sapien
tattgcttgcaagagaagtgtctgt

SEQ ID NO: 4906752 - DNA, 25 bp, Homo sapien
tatagcaatctgagatcttttggtc

SEQ ID NO: 4906753 - DNA, 25 bp, Homo sapien
tgaccaacatggtgaaaccccgtct

SEQ ID NO: 4906754 - DNA, 25 bp, Homo sapien
taggaggacgaggtgggtgaattac

SEQ ID NO: 4906755 - DNA, 25 bp, Homo sapien
ttgaggtaaggagttcaagaccagc

SEQ ID NO: 4906756 - DNA, 25 bp, Homo sapien
cctgaccaacatggtgaaaccccgt

SEQ ID NO: 4906757 - DNA, 25 bp, Homo sapien
ttccataggtaatatctttagatgg

SEQ ID NO: 4906758 - DNA, 25 bp, Homo sapien
ccataggtaatatctttagatggat

SEQ ID NO: 4906759 - DNA, 25 bp, Homo sapien
cataggtaatatctttagatggatg

SEQ ID NO: 4906760 - DNA, 25 bp, Homo sapien
tccataggtaatatctttagatgga

SEQ ID NO: 4906761 - DNA, 25 bp, Homo sapien
accctgcccagtcgcattatttctt

SEQ ID NO: 4906762 - DNA, 25 bp, Homo sapien
cctgcccagtcgcattatttcttaa

SEQ ID NO: 4906763 - DNA, 25 bp, Homo sapien
ccctgcccagtcgcattatttctta

SEQ ID NO: 4906764 - DNA, 25 bp, Homo sapien
ctgcccagtcgcattatttcttaaa

SEQ ID NO: 4906765 - DNA, 25 bp, Homo sapien
ggcttgggcctccaatcccggcact

SEQ ID NO: 4906766 - DNA, 25 bp, Homo sapien
gtggcttgggcctccaatcccggca

SEQ ID NO: 4906767 - DNA, 25 bp, Homo sapien
cagtggcttgggcctccaatcccgg

SEQ ID NO: 4906768 - DNA, 25 bp, Homo sapien
atatgtgagccattttgactataca

SEQ ID NO: 4906769 - DNA, 25 bp, Homo sapien
gcctgagagatggaaataaaactct

SEQ ID NO: 4906770 - DNA, 25 bp, Homo sapien
ggctaaggtaggagtatcttttgag

SEQ ID NO: 4906771 - DNA, 25 bp, Homo sapien
caccaaatgtgagactataaatgta

SEQ ID NO: 4906772 - DNA, 25 bp, Homo sapien
tgtctaacacaatggcaccaaatgt

SEQ ID NO: 4906773 - DNA, 25 bp, Homo sapien
gagcaaaccaagtcctctccccttc

SEQ ID NO: 4906774 - DNA, 25 bp, Homo sapien
agagagcaaaccaagtcctctcccc

SEQ ID NO: 4906775 - DNA, 25 bp, Homo sapien
cttttgttgctgtacttactattac

SEQ ID NO: 4906776 - DNA, 25 bp, Homo sapien
cacttttgttgctgtacttactatt

SEQ ID NO: 4906777 - DNA, 25 bp, Homo sapien
gcttgtctaaatctaccaagaagga

SEQ ID NO: 4906778 - DNA, 25 bp, Homo sapien
tctagcttgtctaaatctaccaaga

SEQ ID NO: 4906779 - DNA, 25 bp, Homo sapien
ctttccaaaatctagcttgtctaaa

SEQ ID NO: 4906780 - DNA, 25 bp, Homo sapien
caaaatctagcttgtctaaatctac

SEQ ID NO: 4906781 - DNA, 25 bp, Homo sapien
caccagcatggcacatgtatacata

SEQ ID NO: 4906782 - DNA, 25 bp, Homo sapien
tgtatacatatgtaactaacctgca

SEQ ID NO: 4906783 - DNA, 25 bp, Homo sapien
agatgacacattagtgggtgcagcg

SEQ ID NO: 4906784 - DNA, 25 bp, Homo sapien
ctaatgctagatgacacattagtgg

SEQ ID NO: 4906785 - DNA, 25 bp, Homo sapien
aaaactctgagaacacggtgtgtcc

SEQ ID NO: 4906786 - DNA, 25 bp, Homo sapien
tgaggtactgatttccttgtgtgtc

SEQ ID NO: 4906787 - DNA, 25 bp, Homo sapien
tcctgaataaatagctgaggtactg

SEQ ID NO: 4906788 - DNA, 25 bp, Homo sapien
cagctatgatggttgtgcccctgta

SEQ ID NO: 4906789 - DNA, 25 bp, Homo sapien
agcagttgtcagtgtatgggttgta

SEQ ID NO: 4906790 - DNA, 25 bp, Homo sapien
gggctacagcattaaatgaagcagt

SEQ ID NO: 4906791 - DNA, 25 bp, Homo sapien
ggaagatgttctgggctacagcatt

SEQ ID NO: 4906792 - DNA, 25 bp, Homo sapien
aatgaagcagttgtcagtgtatggg

SEQ ID NO: 4906793 - DNA, 25 bp, Homo sapien
cttaagcattgggtcatcaatggca

SEQ ID NO: 4906794 - DNA, 25 bp, Homo sapien
caatggtaggctgattaatggttga

SEQ ID NO: 4906795 - DNA, 25 bp, Homo sapien
gattaatggttgaggtaatatattc

SEQ ID NO: 4906796 - DNA, 25 bp, Homo sapien
ttacaacttaagcattgggtcatca

SEQ ID NO: 4906797 - DNA, 25 bp, Homo sapien
tgttccatcaaacacataaagggag

SEQ ID NO: 4906798 - DNA, 25 bp, Homo sapien
gaaacttccttatttgcagcactgc

SEQ ID NO: 4906799 - DNA, 25 bp, Homo sapien
tacagctatttgtcaggcccctgca

SEQ ID NO: 4906800 - DNA, 25 bp, Homo sapien
actgccagggtaattttgtatcctc

SEQ ID NO: 4906801 - DNA, 25 bp, Homo sapien
ctttatttggtgtaaaatcagttgg

SEQ ID NO: 4906802 - DNA, 25 bp, Homo sapien
tagactttatttggtgtaaaatcag

SEQ ID NO: 4906803 - DNA, 25 bp, Homo sapien
tacatctgtgcatgcaacataaata

SEQ ID NO: 4906804 - DNA, 25 bp, Homo sapien
tcagttggcagttttacatctgtgc

SEQ ID NO: 4906805 - DNA, 25 bp, Homo sapien
accacttcataactttgacacaaag

SEQ ID NO: 4906806 - DNA, 25 bp, Homo sapien
tatacacaggataatagttaagaaa

SEQ ID NO: 4906807 - DNA, 25 bp, Homo sapien
tcacaaagacctgactgactctagc

SEQ ID NO: 4906808 - DNA, 25 bp, Homo sapien
gttaagaaataccatctctatcact

SEQ ID NO: 4906809 - DNA, 25 bp, Homo sapien
gctgctgataaagtgagcaatttga

SEQ ID NO: 4906810 - DNA, 25 bp, Homo sapien
ctgtttgcagctgtgtctataagct

SEQ ID NO: 4906811 - DNA, 25 bp, Homo sapien
caggattgatgacatgtgctgctga

SEQ ID NO: 4906812 - DNA, 25 bp, Homo sapien
ttgacttgagcaaccacttcaggat

SEQ ID NO: 4906813 - DNA, 25 bp, Homo sapien
acacagattgtctgtctttcgtctg

SEQ ID NO: 4906814 - DNA, 25 bp, Homo sapien
agccaccaagctgcacaaattactt

SEQ ID NO: 4906815 - DNA, 25 bp, Homo sapien
taaacacagattgtctgtctttcgt

SEQ ID NO: 4906816 - DNA, 25 bp, Homo sapien
acagattgtctgtctttcgtctgac

SEQ ID NO: 4906817 - DNA, 25 bp, Homo sapien
caatgcatataaagactctctgatc

SEQ ID NO: 4906818 - DNA, 25 bp, Homo sapien
atataaagactctctgatcagccat

SEQ ID NO: 4906819 - DNA, 25 bp, Homo sapien
atgcatataaagactctctgatcag

SEQ ID NO: 4906820 - DNA, 25 bp, Homo sapien
gcatataaagactctctgatcagcc

SEQ ID NO: 4906821 - DNA, 25 bp, Homo sapien
ctaataaaagaaaactgcaaatgta

SEQ ID NO: 4906822 - DNA, 25 bp, Homo sapien
gattgagccctcaagagttggcagg

SEQ ID NO: 4906823 - DNA, 25 bp, Homo sapien
attcaacattctggattgagccctc

SEQ ID NO: 4906824 - DNA, 25 bp, Homo sapien
gatgtgctgcagtacttcaattcaa

SEQ ID NO: 4906825 - DNA, 25 bp, Homo sapien
agttggcaggggattcttagatttc

SEQ ID NO: 4906826 - DNA, 25 bp, Homo sapien
tggcacaaatttttattgatcccat

SEQ ID NO: 4906827 - DNA, 25 bp, Homo sapien
gctttggcacaaatttttattgatc

SEQ ID NO: 4906828 - DNA, 25 bp, Homo sapien
tttggcacaaatttttattgatccc

SEQ ID NO: 4906829 - DNA, 25 bp, Homo sapien
ctggggctttggcacaaatttttat

SEQ ID NO: 4906830 - DNA, 25 bp, Homo sapien
gaagcaagggaatcaacttctcttt

SEQ ID NO: 4906831 - DNA, 25 bp, Homo sapien
ccacttggtgctatgaaggtcttta

SEQ ID NO: 4906832 - DNA, 25 bp, Homo sapien
gaacttggattgtgaaggccatcaa

SEQ ID NO: 4906833 - DNA, 25 bp, Homo sapien
tctttagtgtcagaaggaccctgaa

SEQ ID NO: 4906834 - DNA, 25 bp, Homo sapien
gacaaaccacataggccaaatctgg

SEQ ID NO: 4906835 - DNA, 25 bp, Homo sapien
cagcagaaacagttgagacagagac

SEQ ID NO: 4906836 - DNA, 25 bp, Homo sapien
cctaaaatattagctgtcaggccct

SEQ ID NO: 4906837 - DNA, 25 bp, Homo sapien
caaccctactttggatctggagcca

SEQ ID NO: 4906838 - DNA, 25 bp, Homo sapien
tgctaggcaattggacaagtcattg

SEQ ID NO: 4906839 - DNA, 25 bp, Homo sapien
gcctaagtaataagctcctctcaaa

SEQ ID NO: 4906840 - DNA, 25 bp, Homo sapien
caaatcacagtcaaaaggctgccta

SEQ ID NO: 4906841 - DNA, 25 bp, Homo sapien
gttcattaacaacctcaccgggaca

SEQ ID NO: 4906842 - DNA, 25 bp, Homo sapien
gaggtgatacattttggcctggtca

SEQ ID NO: 4906843 - DNA, 25 bp, Homo sapien
tggctatttatcaccctgcagaggt

SEQ ID NO: 4906844 - DNA, 25 bp, Homo sapien
gtcaactcatccagctatctcaagg

SEQ ID NO: 4906845 - DNA, 25 bp, Homo sapien
catgcccacatagaaatgaatcgtc

SEQ ID NO: 4906846 - DNA, 25 bp, Homo sapien
agagataaaagggtctcgttcatct

SEQ ID NO: 4906847 - DNA, 25 bp, Homo sapien
tgaatacaggtaactacatggtcac

SEQ ID NO: 4906848 - DNA, 25 bp, Homo sapien
aagggtctcgttcatctttatatca

SEQ ID NO: 4906849 - DNA, 25 bp, Homo sapien
tatcataaggttccagcaccaagaa

SEQ ID NO: 4906850 - DNA, 25 bp, Homo sapien
gaattcataataccttgttttgtgg

SEQ ID NO: 4906851 - DNA, 25 bp, Homo sapien
taataccttgttttgtggcattcct

SEQ ID NO: 4906852 - DNA, 25 bp, Homo sapien
caatgtgaattcataataccttgtt

SEQ ID NO: 4906853 - DNA, 25 bp, Homo sapien
cataataccttgttttgtggcattc

SEQ ID NO: 4906854 - DNA, 25 bp, Homo sapien
tatatagactacttgaccagggccc

SEQ ID NO: 4906855 - DNA, 25 bp, Homo sapien
tataccagcctctagaatgcagcta

SEQ ID NO: 4906856 - DNA, 25 bp, Homo sapien
tcctggcacgtagaaagaactatta

SEQ ID NO: 4906857 - DNA, 25 bp, Homo sapien
tagcctgtgctgtttcacgtaatgg

SEQ ID NO: 4906858 - DNA, 25 bp, Homo sapien
tctctagtaacaaactatagaaatg

SEQ ID NO: 4906859 - DNA, 25 bp, Homo sapien
ggtgctttacacgttcagagaaact

SEQ ID NO: 4906860 - DNA, 25 bp, Homo sapien
aatgatccctgaaagtatagtcttc

SEQ ID NO: 4906861 - DNA, 25 bp, Homo sapien
gtaacaaactatagaaatgatccct

SEQ ID NO: 4906862 - DNA, 25 bp, Homo sapien
gtctgttcatgtccacccgcttttt

SEQ ID NO: 4906863 - DNA, 25 bp, Homo sapien
tgttcatgtccacccgctttttgat

SEQ ID NO: 4906864 - DNA, 25 bp, Homo sapien
ttcatgtccacccgctttttgatgg

SEQ ID NO: 4906865 - DNA, 25 bp, Homo sapien
catgtccacccgctttttgatgggg

SEQ ID NO: 4906866 - DNA, 25 bp, Homo sapien
gcagtcaatagaaactataggaact

SEQ ID NO: 4906867 - DNA, 25 bp, Homo sapien
tagcttctagaacaataaatgctct

SEQ ID NO: 4906868 - DNA, 25 bp, Homo sapien
cttacaatggttcagcataaaattt

SEQ ID NO: 4906869 - DNA, 25 bp, Homo sapien
cctgatctggcacagaaattatatg

SEQ ID NO: 4906870 - DNA, 25 bp, Homo sapien
caacaacaggatgctacaatgtcac

SEQ ID NO: 4906871 - DNA, 25 bp, Homo sapien
cactgttgagtggaaaggcaggtac

SEQ ID NO: 4906872 - DNA, 25 bp, Homo sapien
tatttagtggcatagaaagatggct

SEQ ID NO: 4906873 - DNA, 25 bp, Homo sapien
tgtctaaaacgatgttcaccaaaac

SEQ ID NO: 4906874 - DNA, 25 bp, Homo sapien
tactgaataagctcccgttccatta

SEQ ID NO: 4906875 - DNA, 25 bp, Homo sapien
actgaataagctcccgttccattaa

SEQ ID NO: 4906876 - DNA, 25 bp, Homo sapien
ttactgaataagctcccgttccatt

SEQ ID NO: 4906877 - DNA, 25 bp, Homo sapien
tgaataagctcccgttccattaagt

SEQ ID NO: 4906878 - DNA, 25 bp, Homo sapien
caaaatatagaagtggaatgggcag

SEQ ID NO: 4906879 - DNA, 25 bp, Homo sapien
ggcagagctgctttgatacaatcta

SEQ ID NO: 4906880 - DNA, 25 bp, Homo sapien
gctgagttttaacgatctcctactg

SEQ ID NO: 4906881 - DNA, 25 bp, Homo sapien
tgtctacaaagacctcccgcaagaa

SEQ ID NO: 4906882 - DNA, 25 bp, Homo sapien
gatcatactcaagccggtatatgtc

SEQ ID NO: 4906883 - DNA, 25 bp, Homo sapien
acagactagctacaccaccttttgc

SEQ ID NO: 4906884 - DNA, 25 bp, Homo sapien
ttttgcccttgccagtagatcatac

SEQ ID NO: 4906885 - DNA, 25 bp, Homo sapien
tgtcagtggcactacaattcttagg

SEQ ID NO: 4906886 - DNA, 25 bp, Homo sapien
ccacgtatataagattgggtcaata

SEQ ID NO: 4906887 - DNA, 25 bp, Homo sapien
tgggtcaatattaactgctagtcct

SEQ ID NO: 4906888 - DNA, 25 bp, Homo sapien
ggctgatagatgagccacgtatata

SEQ ID NO: 4906889 - DNA, 25 bp, Homo sapien
catatgtctacttgttcgtttctga

SEQ ID NO: 4906890 - DNA, 25 bp, Homo sapien
cacttctgagacaagacgaacccct

SEQ ID NO: 4906891 - DNA, 25 bp, Homo sapien
cctcagtctactattcaacatgaag

SEQ ID NO: 4906892 - DNA, 25 bp, Homo sapien
tgaagaccttcaagaatgatctact

SEQ ID NO: 4906893 - DNA, 25 bp, Homo sapien
tgagacaagacgaacccctcctctt

SEQ ID NO: 4906894 - DNA, 25 bp, Homo sapien
aaactggcataacaagaggaacagc

SEQ ID NO: 4906895 - DNA, 25 bp, Homo sapien
gctgctttgccaagggggcacttcc

SEQ ID NO: 4906896 - DNA, 25 bp, Homo sapien
cttctacaaactggcataacaagag

SEQ ID NO: 4906897 - DNA, 25 bp, Homo sapien
ggcacttccaatagacacctcatcc

SEQ ID NO: 4906898 - DNA, 25 bp, Homo sapien
ggggaacaccaaagacataaaatgc

SEQ ID NO: 4906899 - DNA, 25 bp, Homo sapien
tgatggttctaaaggtgggggaaca

SEQ ID NO: 4906900 - DNA, 25 bp, Homo sapien
tctgatggttctaaaggtgggggaa

SEQ ID NO: 4906901 - DNA, 25 bp, Homo sapien
gaacaccaaagacataaaatgcaat

SEQ ID NO: 4906902 - DNA, 25 bp, Homo sapien
ttacctttggtgactgctcacagtc

SEQ ID NO: 4906903 - DNA, 25 bp, Homo sapien
caccaaacagggcaatcacaagcat

SEQ ID NO: 4906904 - DNA, 25 bp, Homo sapien
tattatcaagaagagtaccactgcc

SEQ ID NO: 4906905 - DNA, 25 bp, Homo sapien
gatgtatgtactcactctaagaaat

SEQ ID NO: 4906906 - DNA, 25 bp, Homo sapien
tgtattcatgtgtcaaaaccactat

SEQ ID NO: 4906907 - DNA, 25 bp, Homo sapien
cattggaccataggctgtgatgata

SEQ ID NO: 4906908 - DNA, 25 bp, Homo sapien
tacaacaatgtgattatacctaatg

SEQ ID NO: 4906909 - DNA, 25 bp, Homo sapien
tcaaacccagtgcagtatcagcagg

SEQ ID NO: 4906910 - DNA, 25 bp, Homo sapien
cccctgtagccagccacttaacatt

SEQ ID NO: 4906911 - DNA, 25 bp, Homo sapien
agccacttaacattggctgagtttg

SEQ ID NO: 4906912 - DNA, 25 bp, Homo sapien
tgtagccagccacttaacattggct

SEQ ID NO: 4906913 - DNA, 25 bp, Homo sapien
gccagccacttaacattggctgagt

SEQ ID NO: 4906914 - DNA, 25 bp, Homo sapien
tgaaggatatacagattctctggaa

SEQ ID NO: 4906915 - DNA, 25 bp, Homo sapien
tctggctcagtctgccctacatgac

SEQ ID NO: 4906916 - DNA, 25 bp, Homo sapien
gattatcttcatgtggaacagcaag

SEQ ID NO: 4906917 - DNA, 25 bp, Homo sapien
acagcaagtttttattctggctcag

SEQ ID NO: 4906918 - DNA, 25 bp, Homo sapien
gatcataatagctttagggtgcgtg

SEQ ID NO: 4906919 - DNA, 25 bp, Homo sapien
tcagccaaacttaagcctaaacaat

SEQ ID NO: 4906920 - DNA, 25 bp, Homo sapien
gacaaaattggatcttgtttaaagc

SEQ ID NO: 4906921 - DNA, 25 bp, Homo sapien
tcatgaaccatgaggaaagcctggc

SEQ ID NO: 4906922 - DNA, 25 bp, Homo sapien
gatacatagtcttatcttcttacct

SEQ ID NO: 4906923 - DNA, 25 bp, Homo sapien
tagggcccgctaaccatctgaatga

SEQ ID NO: 4906924 - DNA, 25 bp, Homo sapien
cacctaaatacttgtttgtggaaag

SEQ ID NO: 4906925 - DNA, 25 bp, Homo sapien
aaaaataggaggcttgtcatgagaa

SEQ ID NO: 4906926 - DNA, 25 bp, Homo sapien
gcaagtgcggcatacacagatgaga

SEQ ID NO: 4906927 - DNA, 25 bp, Homo sapien
acagtgctctggtggccttggacca

SEQ ID NO: 4906928 - DNA, 25 bp, Homo sapien
gaccctcaggtgtagtgcaagtgcg

SEQ ID NO: 4906929 - DNA, 25 bp, Homo sapien
tcttaagataggaagggactgacca

SEQ ID NO: 4906930 - DNA, 25 bp, Homo sapien
ctgggttctagtttgactggctggc

SEQ ID NO: 4906931 - DNA, 25 bp, Homo sapien
tctagtttgactggctggcaaattg

SEQ ID NO: 4906932 - DNA, 25 bp, Homo sapien
ggttctagtttgactggctggcaaa

SEQ ID NO: 4906933 - DNA, 25 bp, Homo sapien
gggttctagtttgactggctggcaa

SEQ ID NO: 4906934 - DNA, 25 bp, Homo sapien
taacaggaactgacaatgggcggga

SEQ ID NO: 4906935 - DNA, 25 bp, Homo sapien
caacatggctttaacaggaactgac

SEQ ID NO: 4906936 - DNA, 25 bp, Homo sapien
tcagatatattcaacatggctttaa

SEQ ID NO: 4906937 - DNA, 25 bp, Homo sapien
gatgcttcactgcattccaaacaat

SEQ ID NO: 4906938 - DNA, 25 bp, Homo sapien
ccatggtaccaacttcttactgttc

SEQ ID NO: 4906939 - DNA, 25 bp, Homo sapien
ggaatgtcaccagatacaattgtac

SEQ ID NO: 4906940 - DNA, 25 bp, Homo sapien
tggtttgtccatggtaccaacttct

SEQ ID NO: 4906941 - DNA, 25 bp, Homo sapien
ggaataaacacacaacaagattgta

SEQ ID NO: 4906942 - DNA, 25 bp, Homo sapien
tatttgaggcaaacagaggacaagt

SEQ ID NO: 4906943 - DNA, 25 bp, Homo sapien
ggttccatatacttgtgcccagcac

SEQ ID NO: 4906944 - DNA, 25 bp, Homo sapien
gataacaaatggaatctcctgcaga

SEQ ID NO: 4906945 - DNA, 25 bp, Homo sapien
aaggatgggtcgtgggataacaaat

SEQ ID NO: 4906946 - DNA, 25 bp, Homo sapien
gttgggcagggtgactaatacctat

SEQ ID NO: 4906947 - DNA, 25 bp, Homo sapien
cagcctcagcaagaatgaaacctga

SEQ ID NO: 4906948 - DNA, 25 bp, Homo sapien
ttcgataccaacctgtgaaacatgg

SEQ ID NO: 4906949 - DNA, 25 bp, Homo sapien
gattccacttcacaccacttttact

SEQ ID NO: 4906950 - DNA, 25 bp, Homo sapien
taatccagtcattaagtttggacag

SEQ ID NO: 4906951 - DNA, 25 bp, Homo sapien
ttgacatctaagctaagaaccacgg

SEQ ID NO: 4906952 - DNA, 25 bp, Homo sapien
gaaccacggagttattctacagatt

SEQ ID NO: 4906953 - DNA, 25 bp, Homo sapien
actgccctggttctgacaatcattt

SEQ ID NO: 4906954 - DNA, 25 bp, Homo sapien
atggtaggacatcttcagcaaactc

SEQ ID NO: 4906955 - DNA, 25 bp, Homo sapien
ctatggtaggacatcttcagcaaac

SEQ ID NO: 4906956 - DNA, 25 bp, Homo sapien
tggtaggacatcttcagcaaactct

SEQ ID NO: 4906957 - DNA, 25 bp, Homo sapien
tatggtaggacatcttcagcaaact

SEQ ID NO: 4906958 - DNA, 25 bp, Homo sapien
tcttaagtataaagcagtcaccagt

SEQ ID NO: 4906959 - DNA, 25 bp, Homo sapien
tcaccagtaattctttctgcatagg

SEQ ID NO: 4906960 - DNA, 25 bp, Homo sapien
gtcaccagtaattctttctgcatag

SEQ ID NO: 4906961 - DNA, 25 bp, Homo sapien
agttgtcttaagtataaagcagtca

SEQ ID NO: 4906962 - DNA, 25 bp, Homo sapien
acactgcactcatggtcttcccttg

SEQ ID NO: 4906963 - DNA, 25 bp, Homo sapien
tcagtaggtaccagaagatacattc

SEQ ID NO: 4906964 - DNA, 25 bp, Homo sapien
gatgccatactgcagataaattggg

SEQ ID NO: 4906965 - DNA, 25 bp, Homo sapien
taatatgtggtcagcactatggtac

SEQ ID NO: 4906966 - DNA, 25 bp, Homo sapien
tccaagaagggtatatatgctgaaa

SEQ ID NO: 4906967 - DNA, 25 bp, Homo sapien
tttccaagaagggtatatatgctga

SEQ ID NO: 4906968 - DNA, 25 bp, Homo sapien
gctgaaattatgcaagctgatcgtc

SEQ ID NO: 4906969 - DNA, 25 bp, Homo sapien
caagctgatcgtccaaggaaaagca

SEQ ID NO: 4906970 - DNA, 25 bp, Homo sapien
caaatgaatgtcgtgtatcaggtcc

SEQ ID NO: 4906971 - DNA, 25 bp, Homo sapien
tatcaggtcccgtagcaagcagttt

SEQ ID NO: 4906972 - DNA, 25 bp, Homo sapien
tgacagctagagtggaggtgcaacc

SEQ ID NO: 4906973 - DNA, 25 bp, Homo sapien
caagcagtttttgagacgtgacagc

SEQ ID NO: 4906974 - DNA, 25 bp, Homo sapien
ggtatcttcactaggttaacagttc

SEQ ID NO: 4906975 - DNA, 25 bp, Homo sapien
cttggatgcgtaaagactatctctt

SEQ ID NO: 4906976 - DNA, 25 bp, Homo sapien
tcctgtttgggattaggtgaacttc

SEQ ID NO: 4906977 - DNA, 25 bp, Homo sapien
gagcagctggtgacaaactttctta

SEQ ID NO: 4906978 - DNA, 25 bp, Homo sapien
aatattctgagaattggctcacggc

SEQ ID NO: 4906979 - DNA, 25 bp, Homo sapien
catgaaggtactctatctaggcaac

SEQ ID NO: 4906980 - DNA, 25 bp, Homo sapien
atagattcaatagtgtacaagggtc

SEQ ID NO: 4906981 - DNA, 25 bp, Homo sapien
taatcaagaaacgtacacactggct

SEQ ID NO: 4906982 - DNA, 25 bp, Homo sapien
attacacttgtccagtttaatttcg

SEQ ID NO: 4906983 - DNA, 25 bp, Homo sapien
aagattacacttgtccagtttaatt

SEQ ID NO: 4906984 - DNA, 25 bp, Homo sapien
aaaatcaagagctcgcgccaggtgt

SEQ ID NO: 4906985 - DNA, 25 bp, Homo sapien
acaaaaatcaagagctcgcgccagg

SEQ ID NO: 4906986 - DNA, 25 bp, Homo sapien
ctcagtagtagtcccaatgtcagca

SEQ ID NO: 4906987 - DNA, 25 bp, Homo sapien
taggttgagattgcctctcttctga

SEQ ID NO: 4906988 - DNA, 25 bp, Homo sapien
cttgttccagaccttattcatgata

SEQ ID NO: 4906989 - DNA, 25 bp, Homo sapien
cagttagttcatagaagagctggac

SEQ ID NO: 4906990 - DNA, 25 bp, Homo sapien
gtcagggtaacaagtggaaacagtc

SEQ ID NO: 4906991 - DNA, 25 bp, Homo sapien
caaatactatggtgtcagaaacgaa

SEQ ID NO: 4906992 - DNA, 25 bp, Homo sapien
taagcctactggtgtcaccaactgc

SEQ ID NO: 4906993 - DNA, 25 bp, Homo sapien
tattccctgttctgataaactctct

SEQ ID NO: 4906994 - DNA, 25 bp, Homo sapien
tacagtaagttctctatattcaata

SEQ ID NO: 4906995 - DNA, 25 bp, Homo sapien
gcaatttcaaagtgttccccagata

SEQ ID NO: 4906996 - DNA, 25 bp, Homo sapien
tagttttgacccaactaagcaagaa

SEQ ID NO: 4906997 - DNA, 25 bp, Homo sapien
tgtaagctaacctcagattattagc

SEQ ID NO: 4906998 - DNA, 25 bp, Homo sapien
gagctttatagtaattttgggaagc

SEQ ID NO: 4906999 - DNA, 25 bp, Homo sapien
cctcacctgcttgtatagaatctcc

SEQ ID NO: 4907000 - DNA, 25 bp, Homo sapien
ccactggttcctccaatattacttg

SEQ ID NO: 4907001 - DNA, 25 bp, Homo sapien
cataaactaacacgtccactggttc

SEQ ID NO: 4907002 - DNA, 25 bp, Homo sapien
tggtatatacatcctggacatctat

SEQ ID NO: 4907003 - DNA, 25 bp, Homo sapien
cctggacatctatggaagcactgag

SEQ ID NO: 4907004 - DNA, 25 bp, Homo sapien
tacatttcactttggtatatacatc

SEQ ID NO: 4907005 - DNA, 25 bp, Homo sapien
tctagttcactgaccatacaaacct

SEQ ID NO: 4907006 - DNA, 25 bp, Homo sapien
cttcaaaatgtcctgactgccaacc

SEQ ID NO: 4907007 - DNA, 25 bp, Homo sapien
ctttgcattgtagaaatactccttc

SEQ ID NO: 4907008 - DNA, 25 bp, Homo sapien
ttgcattgtagaaatactccttcaa

SEQ ID NO: 4907009 - DNA, 25 bp, Homo sapien
tttctttgcattgtagaaatactcc

SEQ ID NO: 4907010 - DNA, 25 bp, Homo sapien
ataaatttaggtttgagcaaccgct

SEQ ID NO: 4907011 - DNA, 25 bp, Homo sapien
tttgagcaaccgctaggtatggcct

SEQ ID NO: 4907012 - DNA, 25 bp, Homo sapien
taggtttgagcaaccgctaggtatg

SEQ ID NO: 4907013 - DNA, 25 bp, Homo sapien
aaccgctaggtatggcctctgcctg

SEQ ID NO: 4907014 - DNA, 25 bp, Homo sapien
agacacctccacattgccccaaaga

SEQ ID NO: 4907015 - DNA, 25 bp, Homo sapien
tcagtacaggaaaggaagacacctc

SEQ ID NO: 4907016 - DNA, 25 bp, Homo sapien
caaagaccaacactcttccccaagg

SEQ ID NO: 4907017 - DNA, 25 bp, Homo sapien
cagtacaggaaaggaagacacctcc

SEQ ID NO: 4907018 - DNA, 25 bp, Homo sapien
gagcaattactgaaagggtcctgct

SEQ ID NO: 4907019 - DNA, 25 bp, Homo sapien
caacaaggtgcgtctgttcagcttg

SEQ ID NO: 4907020 - DNA, 25 bp, Homo sapien
accaacaaggtgcgtctgttcagct

SEQ ID NO: 4907021 - DNA, 25 bp, Homo sapien
caattactgaaagggtcctgcttgc

SEQ ID NO: 4907022 - DNA, 25 bp, Homo sapien
gaatccatgctgctgatgagtgcca

SEQ ID NO: 4907023 - DNA, 25 bp, Homo sapien
cagtgtatgggtcctcatgggctga

SEQ ID NO: 4907024 - DNA, 25 bp, Homo sapien
ggagaaccatccattaggccttcag

SEQ ID NO: 4907025 - DNA, 25 bp, Homo sapien
tcttgatgttaacttgtggcggaca

SEQ ID NO: 4907026 - DNA, 25 bp, Homo sapien
aaatcgtgctctaatccacaagggc

SEQ ID NO: 4907027 - DNA, 25 bp, Homo sapien
taaacaatgaacttcagacctctgc

SEQ ID NO: 4907028 - DNA, 25 bp, Homo sapien
tgactgaactatgcctgcacattgg

SEQ ID NO: 4907029 - DNA, 25 bp, Homo sapien
caggtgctgctatgctaagcgtgag

SEQ ID NO: 4907030 - DNA, 25 bp, Homo sapien
gacatttatttctaatgaaattgct

SEQ ID NO: 4907031 - DNA, 25 bp, Homo sapien
ttatttctaatgaaattgctccttc

SEQ ID NO: 4907032 - DNA, 25 bp, Homo sapien
catttatttctaatgaaattgctcc

SEQ ID NO: 4907033 - DNA, 25 bp, Homo sapien
cattaatgacatttatttctaatga

SEQ ID NO: 4907034 - DNA, 25 bp, Homo sapien
ttcctaaggacagatctgccaaggg

SEQ ID NO: 4907035 - DNA, 25 bp, Homo sapien
atggcaacagagccaatcttcaaaa

SEQ ID NO: 4907036 - DNA, 25 bp, Homo sapien
tatctttcctaaggacagatctgcc

SEQ ID NO: 4907037 - DNA, 25 bp, Homo sapien
tggtaaatatctttcctaaggacag

SEQ ID NO: 4907038 - DNA, 25 bp, Homo sapien
aagcagtggaattggagaagaaatg

SEQ ID NO: 4907039 - DNA, 25 bp, Homo sapien
agcagtggaattggagaagaaatga

SEQ ID NO: 4907040 - DNA, 25 bp, Homo sapien
aacatcacttcacttggatcagaca

SEQ ID NO: 4907041 - DNA, 25 bp, Homo sapien
gtaaacatcacttcacttggatcag

SEQ ID NO: 4907042 - DNA, 25 bp, Homo sapien
tttgaagaaatgtgctagctatgtt

SEQ ID NO: 4907043 - DNA, 25 bp, Homo sapien
ctgcaagtggaggttctagaaaggt

SEQ ID NO: 4907044 - DNA, 25 bp, Homo sapien
ttccctgtagaaacttaatcctgca

SEQ ID NO: 4907045 - DNA, 25 bp, Homo sapien
gaaatgtgctagctatgttccaagg

SEQ ID NO: 4907046 - DNA, 25 bp, Homo sapien
ctaaatcctgcagatactgattttc

SEQ ID NO: 4907047 - DNA, 25 bp, Homo sapien
tactctaaggttttctgctaaatcc

SEQ ID NO: 4907048 - DNA, 25 bp, Homo sapien
ctgctaaatcctgcagatactgatt

SEQ ID NO: 4907049 - DNA, 25 bp, Homo sapien
ttactctaaggttttctgctaaatc

SEQ ID NO: 4907050 - DNA, 25 bp, Homo sapien
tgatccaggatctcgaagaattcct

SEQ ID NO: 4907051 - DNA, 25 bp, Homo sapien
cactgtgcagtaccaatattgatgg

SEQ ID NO: 4907052 - DNA, 25 bp, Homo sapien
ggttttagttgatgccactgtgcag

SEQ ID NO: 4907053 - DNA, 25 bp, Homo sapien
caagggctggattttgagaattcct

SEQ ID NO: 4907054 - DNA, 25 bp, Homo sapien
gccaggcatgaacccttaaacgtgc

SEQ ID NO: 4907055 - DNA, 25 bp, Homo sapien
gtgcacaatgctacaagaactacag

SEQ ID NO: 4907056 - DNA, 25 bp, Homo sapien
tgctcaacttgttcctactcgagtg

SEQ ID NO: 4907057 - DNA, 25 bp, Homo sapien
tatctcaaggtgctgaacatacaca

SEQ ID NO: 4907058 - DNA, 25 bp, Homo sapien
ttctggagaaactactttggtgaaa

SEQ ID NO: 4907059 - DNA, 25 bp, Homo sapien
ccagttattcggacagaaaaatctg

SEQ ID NO: 4907060 - DNA, 25 bp, Homo sapien
cagcaggtgctccagttattcggac

SEQ ID NO: 4907061 - DNA, 25 bp, Homo sapien
attttctggagaaactactttggtg

SEQ ID NO: 4907062 - DNA, 25 bp, Homo sapien
gagttgaacttgagccacacttagg

SEQ ID NO: 4907063 - DNA, 25 bp, Homo sapien
agtccaggtttgtggttatattcac

SEQ ID NO: 4907064 - DNA, 25 bp, Homo sapien
tcacttctaaggaatggccacacac

SEQ ID NO: 4907065 - DNA, 25 bp, Homo sapien
cagccttgtttgatggttccagtcc

SEQ ID NO: 4907066 - DNA, 25 bp, Homo sapien
tggaacaaatgcagtaagcctgatc

SEQ ID NO: 4907067 - DNA, 25 bp, Homo sapien
gaacaaatgcagtaagcctgatcaa

SEQ ID NO: 4907068 - DNA, 25 bp, Homo sapien
acaaatgcagtaagcctgatcaaaa

SEQ ID NO: 4907069 - DNA, 25 bp, Homo sapien
ggaacaaatgcagtaagcctgatca

SEQ ID NO: 4907070 - DNA, 25 bp, Homo sapien
accacatgcaactaatttttaattt

SEQ ID NO: 4907071 - DNA, 25 bp, Homo sapien
ggagtggagtggcaccatcacacct

SEQ ID NO: 4907072 - DNA, 25 bp, Homo sapien
caccacatgcaactaatttttaatt

SEQ ID NO: 4907073 - DNA, 25 bp, Homo sapien
ggagtggcaccatcacacctcactt

SEQ ID NO: 4907074 - DNA, 25 bp, Homo sapien
gaggtcaccctatgcatatcgtcca

SEQ ID NO: 4907075 - DNA, 25 bp, Homo sapien
aatttgaggtattccgtcacagccc

SEQ ID NO: 4907076 - DNA, 25 bp, Homo sapien
tcagcatagcaacaccaataggagg

SEQ ID NO: 4907077 - DNA, 25 bp, Homo sapien
tacaagtggtctatccaggtgcctc

SEQ ID NO: 4907078 - DNA, 25 bp, Homo sapien
tatggcatcaagcttataccctctc

SEQ ID NO: 4907079 - DNA, 25 bp, Homo sapien
aagcttataccctctcccgtttctg

SEQ ID NO: 4907080 - DNA, 25 bp, Homo sapien
atcaagcttataccctctcccgttt

SEQ ID NO: 4907081 - DNA, 25 bp, Homo sapien
ggcatcaagcttataccctctcccg

SEQ ID NO: 4907082 - DNA, 25 bp, Homo sapien
acaacatacaaaggatctgaaggac

SEQ ID NO: 4907083 - DNA, 25 bp, Homo sapien
tattaacaaacagagtgccaaatca

SEQ ID NO: 4907084 - DNA, 25 bp, Homo sapien
taaagggcattcaatcaggaagtga

SEQ ID NO: 4907085 - DNA, 25 bp, Homo sapien
aagcattcctatacaatattaacaa

SEQ ID NO: 4907086 - DNA, 25 bp, Homo sapien
ccaccatgacagcatactataaaca

SEQ ID NO: 4907087 - DNA, 25 bp, Homo sapien
caccatgacagcatactataaacac

SEQ ID NO: 4907088 - DNA, 25 bp, Homo sapien
aaaccaccatgacagcatactataa

SEQ ID NO: 4907089 - DNA, 25 bp, Homo sapien
aaccaccatgacagcatactataaa

SEQ ID NO: 4907090 - DNA, 25 bp, Homo sapien
tgttcgaatgcatcgcaaggaagct

SEQ ID NO: 4907091 - DNA, 25 bp, Homo sapien
gttctactccaaaggatcgtagctc

SEQ ID NO: 4907092 - DNA, 25 bp, Homo sapien
ccaagctacgggaggatgttcgaat

SEQ ID NO: 4907093 - DNA, 25 bp, Homo sapien
tctaaaaaccagagcgcccgttcta

SEQ ID NO: 4907094 - DNA, 25 bp, Homo sapien
tatagcatagtttgaagtctggtag

SEQ ID NO: 4907095 - DNA, 25 bp, Homo sapien
ttatagcatagtttgaagtctggta

SEQ ID NO: 4907096 - DNA, 25 bp, Homo sapien
cttatagcatagtttgaagtctggt

SEQ ID NO: 4907097 - DNA, 25 bp, Homo sapien
tagggcactcaatataggattgact

SEQ ID NO: 4907098 - DNA, 25 bp, Homo sapien
aaagtcaacagtgaatcctgagtga

SEQ ID NO: 4907099 - DNA, 25 bp, Homo sapien
gacagtgacccattaataacagtcc

SEQ ID NO: 4907100 - DNA, 25 bp, Homo sapien
gagggtcatatatgggtcactaacc

SEQ ID NO: 4907101 - DNA, 25 bp, Homo sapien
ccactgaatgatctagactaccttg

SEQ ID NO: 4907102 - DNA, 25 bp, Homo sapien
aacaggagagttagtacctgaactc

SEQ ID NO: 4907103 - DNA, 25 bp, Homo sapien
tttgcatgggaatatccagtcatcc

SEQ ID NO: 4907104 - DNA, 25 bp, Homo sapien
ccagtcatcctagcattattccttg

SEQ ID NO: 4907105 - DNA, 25 bp, Homo sapien
tagtgagccaaataccaacgactta

SEQ ID NO: 4907106 - DNA, 25 bp, Homo sapien
tgtgggagcacaactgagagcttca

SEQ ID NO: 4907107 - DNA, 25 bp, Homo sapien
tgtttaagtcattgtctagctgcac

SEQ ID NO: 4907108 - DNA, 25 bp, Homo sapien
ccctcaaacatggagttagccaaca

SEQ ID NO: 4907109 - DNA, 25 bp, Homo sapien
attccaaagattcacaaatatcttc

SEQ ID NO: 4907110 - DNA, 25 bp, Homo sapien
aaagattcacaaatatcttccaagg

SEQ ID NO: 4907111 - DNA, 25 bp, Homo sapien
ccaaagattcacaaatatcttccaa

SEQ ID NO: 4907112 - DNA, 25 bp, Homo sapien
ttccaaagattcacaaatatcttcc

SEQ ID NO: 4907113 - DNA, 25 bp, Homo sapien
aacttgagaatgttagaatgtcagc

SEQ ID NO: 4907114 - DNA, 25 bp, Homo sapien
taggaaggaagtttacttgcagact

SEQ ID NO: 4907115 - DNA, 25 bp, Homo sapien
tacatatgtttgcagcagtaagagg

SEQ ID NO: 4907116 - DNA, 25 bp, Homo sapien
gaaaattcactactcaatattaggc

SEQ ID NO: 4907117 - DNA, 25 bp, Homo sapien
taagaggttcctatggtgtgcgtct

SEQ ID NO: 4907118 - DNA, 25 bp, Homo sapien
tgtgcgtctgtagtctaggtacttg

SEQ ID NO: 4907119 - DNA, 25 bp, Homo sapien
gcactatgccagttgggtgtctaca

SEQ ID NO: 4907120 - DNA, 25 bp, Homo sapien
gtagcctacataatctgccagtaat

SEQ ID NO: 4907121 - DNA, 25 bp, Homo sapien
gaggagtgtctactaaatgccaagc

SEQ ID NO: 4907122 - DNA, 25 bp, Homo sapien
ggtagcgccaggattagaaaacagc

SEQ ID NO: 4907123 - DNA, 25 bp, Homo sapien
caatgagcataatttcagcaaggcc

SEQ ID NO: 4907124 - DNA, 25 bp, Homo sapien
tgtactacctcatttagaagacggc

SEQ ID NO: 4907125 - DNA, 25 bp, Homo sapien
tctcagagttaagtttagcagcatc

SEQ ID NO: 4907126 - DNA, 25 bp, Homo sapien
tgctcacggacagaatttttagact

SEQ ID NO: 4907127 - DNA, 25 bp, Homo sapien
gcagttttctgaggttgctcacgga

SEQ ID NO: 4907128 - DNA, 25 bp, Homo sapien
cagaggcgaatgaagggtttattga

SEQ ID NO: 4907129 - DNA, 25 bp, Homo sapien
tgatgaaatccaaggttcattccac

SEQ ID NO: 4907130 - DNA, 25 bp, Homo sapien
aaatccaaggttcattccactgatg

SEQ ID NO: 4907131 - DNA, 25 bp, Homo sapien
cactgatgtcaatgtggaaaccatt

SEQ ID NO: 4907132 - DNA, 25 bp, Homo sapien
cattccactgatgtcaatgtggaaa

SEQ ID NO: 4907133 - DNA, 25 bp, Homo sapien
caactaatgaggaaaggatgtgtac

SEQ ID NO: 4907134 - DNA, 25 bp, Homo sapien
gatgtgtactcttaacatatgaatg

SEQ ID NO: 4907135 - DNA, 25 bp, Homo sapien
caagcattcactttaggaaactggg

SEQ ID NO: 4907136 - DNA, 25 bp, Homo sapien
taacctttaagatatctggcatgat

SEQ ID NO: 4907137 - DNA, 25 bp, Homo sapien
catcaaatatatccacttttttctg

SEQ ID NO: 4907138 - DNA, 25 bp, Homo sapien
gcctccatcaaatatatccactttt

SEQ ID NO: 4907139 - DNA, 25 bp, Homo sapien
tccatcaaatatatccacttttttc

SEQ ID NO: 4907140 - DNA, 25 bp, Homo sapien
caaatatatccacttttttctgttc

SEQ ID NO: 4907141 - DNA, 25 bp, Homo sapien
tgaagactttcaagagagaggaccc

SEQ ID NO: 4907142 - DNA, 25 bp, Homo sapien
tatcctgagcaccactgtagcgaga

SEQ ID NO: 4907143 - DNA, 25 bp, Homo sapien
tgtcaccgtggaaatacatgcctgg

SEQ ID NO: 4907144 - DNA, 25 bp, Homo sapien
catttgtaatcagaggccacccctt

SEQ ID NO: 4907145 - DNA, 25 bp, Homo sapien
taacatggaaagcatacctatgggc

SEQ ID NO: 4907146 - DNA, 25 bp, Homo sapien
ccattaatatgaaaacgagctatgc

SEQ ID NO: 4907147 - DNA, 25 bp, Homo sapien
gcactccagtaagtttgaaggttct

SEQ ID NO: 4907148 - DNA, 25 bp, Homo sapien
tcaatctggaaactatgggaataca

SEQ ID NO: 4907149 - DNA, 25 bp, Homo sapien
gaatggttttggctatgctcaacgg

SEQ ID NO: 4907150 - DNA, 25 bp, Homo sapien
taagaggtcactatcagaacagtca

SEQ ID NO: 4907151 - DNA, 25 bp, Homo sapien
tcaaggatgatcaagcagctagcta

SEQ ID NO: 4907152 - DNA, 25 bp, Homo sapien
tgatgttattaaagctcccaagcag

SEQ ID NO: 4907153 - DNA, 25 bp, Homo sapien
tctgtagtgttataaaggaaggtgg

SEQ ID NO: 4907154 - DNA, 25 bp, Homo sapien
ggtggaataccacttttgctgtcta

SEQ ID NO: 4907155 - DNA, 25 bp, Homo sapien
cagtgcaataatcaagggcttcagg

SEQ ID NO: 4907156 - DNA, 25 bp, Homo sapien
caggcactgtctgtagccaaacagt

SEQ ID NO: 4907157 - DNA, 25 bp, Homo sapien
aacatgctgaagaagaattcgtccc

SEQ ID NO: 4907158 - DNA, 25 bp, Homo sapien
ttaatccatgactggctttctccat

SEQ ID NO: 4907159 - DNA, 25 bp, Homo sapien
agaattcgtccccagtgacaaagtc

SEQ ID NO: 4907160 - DNA, 25 bp, Homo sapien
acaatcccagcactagaaaaacatg

SEQ ID NO: 4907161 - DNA, 25 bp, Homo sapien
tctgtggtttggctctcaaagactg

SEQ ID NO: 4907162 - DNA, 25 bp, Homo sapien
tatctgtggtttggctctcaaagac

SEQ ID NO: 4907163 - DNA, 25 bp, Homo sapien
atctgtggtttggctctcaaagact

SEQ ID NO: 4907164 - DNA, 25 bp, Homo sapien
gaaaccaggattgccgaactgcaat

SEQ ID NO: 4907165 - DNA, 25 bp, Homo sapien
tattctagtgggtttctggtagctg

SEQ ID NO: 4907166 - DNA, 25 bp, Homo sapien
gttccaactaatctatcacctgctg

SEQ ID NO: 4907167 - DNA, 25 bp, Homo sapien
gctgtggactgttccgcagggttta

SEQ ID NO: 4907168 - DNA, 25 bp, Homo sapien
atcaggatctttggcttcgctcctg

SEQ ID NO: 4907169 - DNA, 25 bp, Homo sapien
tttggcttcgctcctggatacccag

SEQ ID NO: 4907170 - DNA, 25 bp, Homo sapien
ggcttcgctcctggatacccaggct

SEQ ID NO: 4907171 - DNA, 25 bp, Homo sapien
ggatctttggcttcgctcctggata

SEQ ID NO: 4907172 - DNA, 25 bp, Homo sapien
tggcagaggtccatggcactctcgc

SEQ ID NO: 4907173 - DNA, 25 bp, Homo sapien
tggcactctcgccaccgtgcgtggg

SEQ ID NO: 4907174 - DNA, 25 bp, Homo sapien
gcagaggtccatggcactctcgcca

SEQ ID NO: 4907175 - DNA, 25 bp, Homo sapien
ctgtggcagaggtccatggcactct

SEQ ID NO: 4907176 - DNA, 25 bp, Homo sapien
agacacggcgtgaagagtgccagct

SEQ ID NO: 4907177 - DNA, 25 bp, Homo sapien
ccaagtcatcagagacacggcgtga

SEQ ID NO: 4907178 - DNA, 25 bp, Homo sapien
gaaggcaccgaggtcccgcaaccat

SEQ ID NO: 4907179 - DNA, 25 bp, Homo sapien
cgaggtcccgcaaccataaaatcca

SEQ ID NO: 4907180 - DNA, 25 bp, Homo sapien
aaggcagtagcgcttcagctcatcc

SEQ ID NO: 4907181 - DNA, 25 bp, Homo sapien
tctgcccgagcgacttattcaccac

SEQ ID NO: 4907182 - DNA, 25 bp, Homo sapien
aagccaaggcagtagcgcttcagct

SEQ ID NO: 4907183 - DNA, 25 bp, Homo sapien
tggcatggatccacagcaggcagaa

SEQ ID NO: 4907184 - DNA, 25 bp, Homo sapien
tgcgctttgcctggtcagggtgtgg

SEQ ID NO: 4907185 - DNA, 25 bp, Homo sapien
ctgcgctttgcctggtcagggtgtg

SEQ ID NO: 4907186 - DNA, 25 bp, Homo sapien
ctggacaaccacgaacacaaggaac

SEQ ID NO: 4907187 - DNA, 25 bp, Homo sapien
cggaggaggtcggcgcggatccgga

SEQ ID NO: 4907188 - DNA, 25 bp, Homo sapien
acaaggaacggcaccaagcggagga

SEQ ID NO: 4907189 - DNA, 25 bp, Homo sapien
ggaggtcggcgcggatccggagaaa

SEQ ID NO: 4907190 - DNA, 25 bp, Homo sapien
tgggtctcaaacgtggatgctggca

SEQ ID NO: 4907191 - DNA, 25 bp, Homo sapien
ctgggtctcaaacgtggatgctggc

SEQ ID NO: 4907192 - DNA, 25 bp, Homo sapien
ttcatggtcacgggcggcaggaatt

SEQ ID NO: 4907193 - DNA, 25 bp, Homo sapien
tcacgggcggcaggaattccatgaa

SEQ ID NO: 4907194 - DNA, 25 bp, Homo sapien
tccttcaggctctcctccttgatgg

SEQ ID NO: 4907195 - DNA, 25 bp, Homo sapien
agctccttcaggctctcctccttga

SEQ ID NO: 4907196 - DNA, 25 bp, Homo sapien
ccttcaggctctcctccttgatgga

SEQ ID NO: 4907197 - DNA, 25 bp, Homo sapien
ccgaagctccttcaggctctcctcc

SEQ ID NO: 4907198 - DNA, 25 bp, Homo sapien
tgggaaaacggagaagtctggtggc

SEQ ID NO: 4907199 - DNA, 25 bp, Homo sapien
ggaaaacggagaagtctggtggcac

SEQ ID NO: 4907200 - DNA, 25 bp, Homo sapien
gaaaacggagaagtctggtggcact

SEQ ID NO: 4907201 - DNA, 25 bp, Homo sapien
aaaacggagaagtctggtggcactg

SEQ ID NO: 4907202 - DNA, 25 bp, Homo sapien
ggaaaaacgcatgatttcctcattg

SEQ ID NO: 4907203 - DNA, 25 bp, Homo sapien
agctgcggccgtgacaggttgtcca

SEQ ID NO: 4907204 - DNA, 25 bp, Homo sapien
gttgtccagggtcagctcattctca

SEQ ID NO: 4907205 - DNA, 25 bp, Homo sapien
gcatgatttcctcattgctgggtct

SEQ ID NO: 4907206 - DNA, 25 bp, Homo sapien
gttgttgatgccgatggactgcagc

SEQ ID NO: 4907207 - DNA, 25 bp, Homo sapien
agctccagcagcttgcacggcgcca

SEQ ID NO: 4907208 - DNA, 25 bp, Homo sapien
tgttgatgccgatggactgcagctc

SEQ ID NO: 4907209 - DNA, 25 bp, Homo sapien
cgcagaagttgttgatgccgatgga

SEQ ID NO: 4907210 - DNA, 25 bp, Homo sapien
ttcgggcgcgacatccttctccaac

SEQ ID NO: 4907211 - DNA, 25 bp, Homo sapien
cttcgggcgcgacatccttctccaa

SEQ ID NO: 4907212 - DNA, 25 bp, Homo sapien
ttggtgagcgacttctgctccttca

SEQ ID NO: 4907213 - DNA, 25 bp, Homo sapien
tttggtgagcgacttctgctccttc

SEQ ID NO: 4907214 - DNA, 25 bp, Homo sapien
ctttggtgagcgacttctgctcctt

SEQ ID NO: 4907215 - DNA, 25 bp, Homo sapien
tctttggtgagcgacttctgctcct

SEQ ID NO: 4907216 - DNA, 25 bp, Homo sapien
tcttgatctcttgcatgttctcgct

SEQ ID NO: 4907217 - DNA, 25 bp, Homo sapien
gtcgctacaatcttggccacctggc

SEQ ID NO: 4907218 - DNA, 25 bp, Homo sapien
ggctggtggaggcatgaacatcttt

SEQ ID NO: 4907219 - DNA, 25 bp, Homo sapien
ggtggaggcatgaacatctttgtcc

SEQ ID NO: 4907220 - DNA, 25 bp, Homo sapien
tctttctccaaggtcgctacaatct

SEQ ID NO: 4907221 - DNA, 25 bp, Homo sapien
acaattattgaagctttcttactga

SEQ ID NO: 4907222 - DNA, 25 bp, Homo sapien
ttcttactgaatacaagcctttact

SEQ ID NO: 4907223 - DNA, 25 bp, Homo sapien
gaagctttcttactgaatacaagcc

SEQ ID NO: 4907224 - DNA, 25 bp, Homo sapien
tattgaagctttcttactgaataca

SEQ ID NO: 4907225 - DNA, 25 bp, Homo sapien
ggctgaagtctcttcactatgtgcc

SEQ ID NO: 4907226 - DNA, 25 bp, Homo sapien
tatctgatccagtttggtgaaactc

SEQ ID NO: 4907227 - DNA, 25 bp, Homo sapien
tctcttcactatgtgccaaactgtg

SEQ ID NO: 4907228 - DNA, 25 bp, Homo sapien
tttgatatatccaaattgacatccg

SEQ ID NO: 4907229 - DNA, 25 bp, Homo sapien
gtttccatggagatcacaatctgag

SEQ ID NO: 4907230 - DNA, 25 bp, Homo sapien
cacggtaatatttggagactggaag

SEQ ID NO: 4907231 - DNA, 25 bp, Homo sapien
cactaaggcttccattgaggtttga

SEQ ID NO: 4907232 - DNA, 25 bp, Homo sapien
aaatcttttgcactccatcaccatg

SEQ ID NO: 4907233 - DNA, 25 bp, Homo sapien
cttttagttggcttggtcacgaata

SEQ ID NO: 4907234 - DNA, 25 bp, Homo sapien
acttttagttggcttggtcacgaat

SEQ ID NO: 4907235 - DNA, 25 bp, Homo sapien
ttagttggcttggtcacgaatattt

SEQ ID NO: 4907236 - DNA, 25 bp, Homo sapien
ttttagttggcttggtcacgaatat

SEQ ID NO: 4907237 - DNA, 25 bp, Homo sapien
gctataccagtatctgcagagtgga

SEQ ID NO: 4907238 - DNA, 25 bp, Homo sapien
taaagaataacataggaggctaaga

SEQ ID NO: 4907239 - DNA, 25 bp, Homo sapien
gaatgggatgggttcaatgaatagc

SEQ ID NO: 4907240 - DNA, 25 bp, Homo sapien
taccaaagattcatgagagaacata

SEQ ID NO: 4907241 - DNA, 25 bp, Homo sapien
gccattgccagaaagtactaagaaa

SEQ ID NO: 4907242 - DNA, 25 bp, Homo sapien
caatgtattagcttcaaggtctgca

SEQ ID NO: 4907243 - DNA, 25 bp, Homo sapien
tatttgcccgtaactcaggcctacc

SEQ ID NO: 4907244 - DNA, 25 bp, Homo sapien
tcctcaatgagggaacacagttatc

SEQ ID NO: 4907245 - DNA, 25 bp, Homo sapien
gggacacagaatgggatagctagaa

SEQ ID NO: 4907246 - DNA, 25 bp, Homo sapien
gattcctttctcacgctatagtggc

SEQ ID NO: 4907247 - DNA, 25 bp, Homo sapien
tctacaaagcatacagaggaatgag

SEQ ID NO: 4907248 - DNA, 25 bp, Homo sapien
ctggaagtctctttaggaatgggct

SEQ ID NO: 4907249 - DNA, 25 bp, Homo sapien
caacatggtcctatcagaatgcggc

SEQ ID NO: 4907250 - DNA, 25 bp, Homo sapien
actgagtagaaatgatgacccaaga

SEQ ID NO: 4907251 - DNA, 25 bp, Homo sapien
gtgtttacaccacttagcttccaga

SEQ ID NO: 4907252 - DNA, 25 bp, Homo sapien
tctgggcctggattcccgctgtgtt

SEQ ID NO: 4907253 - DNA, 25 bp, Homo sapien
caattcaaatgttcttgaccccaga

SEQ ID NO: 4907254 - DNA, 25 bp, Homo sapien
tcaaatgttcttgaccccagaagac

SEQ ID NO: 4907255 - DNA, 25 bp, Homo sapien
acaattcaaatgttcttgaccccag

SEQ ID NO: 4907256 - DNA, 25 bp, Homo sapien
attcaaatgttcttgaccccagaag

SEQ ID NO: 4907257 - DNA, 25 bp, Homo sapien
taaggtatccattgagtaattcatg

SEQ ID NO: 4907258 - DNA, 25 bp, Homo sapien
catactgaaatagacctgtccgtag

SEQ ID NO: 4907259 - DNA, 25 bp, Homo sapien
gtccgtaggtcatctgaactttgtt

SEQ ID NO: 4907260 - DNA, 25 bp, Homo sapien
atttccctcctcattaaggtatcca

SEQ ID NO: 4907261 - DNA, 25 bp, Homo sapien
caggagttattcgtacaagggtgag

SEQ ID NO: 4907262 - DNA, 25 bp, Homo sapien
ctgtagcacatcaccaaggtctgct

SEQ ID NO: 4907263 - DNA, 25 bp, Homo sapien
caagggtgagtactctaggttctgg

SEQ ID NO: 4907264 - DNA, 25 bp, Homo sapien
catccctgggcaatcttcagtttca

SEQ ID NO: 4907265 - DNA, 25 bp, Homo sapien
taaattacgaatgtggatctgaaac

SEQ ID NO: 4907266 - DNA, 25 bp, Homo sapien
gaccaaagttgactgggccaagagc

SEQ ID NO: 4907267 - DNA, 25 bp, Homo sapien
gaaacagaggctggacttgtaaatg

SEQ ID NO: 4907268 - DNA, 25 bp, Homo sapien
gccgtgttggtaaaacgtggctctc

SEQ ID NO: 4907269 - DNA, 25 bp, Homo sapien
cttctcagtgattcaccactatgtg

SEQ ID NO: 4907270 - DNA, 25 bp, Homo sapien
gaatatctcttctcagtgattcacc

SEQ ID NO: 4907271 - DNA, 25 bp, Homo sapien
ttctcagtgattcaccactatgtgg

SEQ ID NO: 4907272 - DNA, 25 bp, Homo sapien
tctgaatatctcttctcagtgattc

SEQ ID NO: 4907273 - DNA, 25 bp, Homo sapien
caaattccttccaatagtagtctaa

SEQ ID NO: 4907274 - DNA, 25 bp, Homo sapien
taaaaccaacatatgatttagctgc

SEQ ID NO: 4907275 - DNA, 25 bp, Homo sapien
tccaatagtagtctaaaaccaacat

SEQ ID NO: 4907276 - DNA, 25 bp, Homo sapien
ccaacatatgatttagctgctttag

SEQ ID NO: 4907277 - DNA, 25 bp, Homo sapien
agcttctgtgccatgggttcgtact

SEQ ID NO: 4907278 - DNA, 25 bp, Homo sapien
agctgttagcatgatgggtttccct

SEQ ID NO: 4907279 - DNA, 25 bp, Homo sapien
atcagctgttagcatgatgggtttc

SEQ ID NO: 4907280 - DNA, 25 bp, Homo sapien
gcttctgtgccatgggttcgtactt

SEQ ID NO: 4907281 - DNA, 25 bp, Homo sapien
tggcagctgtggtagaagaaactac

SEQ ID NO: 4907282 - DNA, 25 bp, Homo sapien
cagctgtggtagaagaaactaccct

SEQ ID NO: 4907283 - DNA, 25 bp, Homo sapien
catcatcggtgttttgatagtagca

SEQ ID NO: 4907284 - DNA, 25 bp, Homo sapien
atagtagcaggtagtgatggcagct

SEQ ID NO: 4907285 - DNA, 25 bp, Homo sapien
tttctccactcagtccaactaagca

SEQ ID NO: 4907286 - DNA, 25 bp, Homo sapien
gctgctgaagctgggccattacccc

SEQ ID NO: 4907287 - DNA, 25 bp, Homo sapien
atggatttctttgcgcaggggctgc

SEQ ID NO: 4907288 - DNA, 25 bp, Homo sapien
gaagctgggccattacccctttctc

SEQ ID NO: 4907289 - DNA, 25 bp, Homo sapien
tgttattaatgcctgtactgaataa

SEQ ID NO: 4907290 - DNA, 25 bp, Homo sapien
ggatttgttattaatgcctgtactg

SEQ ID NO: 4907291 - DNA, 25 bp, Homo sapien
tttgttattaatgcctgtactgaat

SEQ ID NO: 4907292 - DNA, 25 bp, Homo sapien
aatatctataactaaggatttgtta

SEQ ID NO: 4907293 - DNA, 25 bp, Homo sapien
cccagtattccaagctacaaggaac

SEQ ID NO: 4907294 - DNA, 25 bp, Homo sapien
gttcatcccagtattccaagctaca

SEQ ID NO: 4907295 - DNA, 25 bp, Homo sapien
catcccagtattccaagctacaagg

SEQ ID NO: 4907296 - DNA, 25 bp, Homo sapien
tggagttcatcccagtattccaagc

SEQ ID NO: 4907297 - DNA, 25 bp, Homo sapien
ccaaagatctgaagatactaatttc

SEQ ID NO: 4907298 - DNA, 25 bp, Homo sapien
caaactttgctttcagacagattaa

SEQ ID NO: 4907299 - DNA, 25 bp, Homo sapien
ggtcattcacgagattgatatccgg

SEQ ID NO: 4907300 - DNA, 25 bp, Homo sapien
actgctgttcaagacaattctccaa

SEQ ID NO: 4907301 - DNA, 25 bp, Homo sapien
tattttgaggttgaagatgactaga

SEQ ID NO: 4907302 - DNA, 25 bp, Homo sapien
gcttctattgaggtgtgtgtatgac

SEQ ID NO: 4907303 - DNA, 25 bp, Homo sapien
taccttttagaaggagacaattcaa

SEQ ID NO: 4907304 - DNA, 25 bp, Homo sapien
aatgccccaggataatcattacaca

SEQ ID NO: 4907305 - DNA, 25 bp, Homo sapien
tctgtccatcccgtgagagtgctga

SEQ ID NO: 4907306 - DNA, 25 bp, Homo sapien
tgctctgtccatcccgtgagagtgc

SEQ ID NO: 4907307 - DNA, 25 bp, Homo sapien
gtccatcccgtgagagtgctgaatg

SEQ ID NO: 4907308 - DNA, 25 bp, Homo sapien
ctgcatgaacactgctctgtccatc

SEQ ID NO: 4907309 - DNA, 25 bp, Homo sapien
gggatctcacaacagcatactggca

SEQ ID NO: 4907310 - DNA, 25 bp, Homo sapien
tgcgggcaagacaaggtaccatact

SEQ ID NO: 4907311 - DNA, 25 bp, Homo sapien
gaacctagaataatgtatgcgctgc

SEQ ID NO: 4907312 - DNA, 25 bp, Homo sapien
gaatgtcacttctctatggatccct

SEQ ID NO: 4907313 - DNA, 25 bp, Homo sapien
tcaatgcagttcagagtatgactct

SEQ ID NO: 4907314 - DNA, 25 bp, Homo sapien
aaacccaatacttcagtgtcaccat

SEQ ID NO: 4907315 - DNA, 25 bp, Homo sapien
agtatgactctgccactcaaaaacc

SEQ ID NO: 4907316 - DNA, 25 bp, Homo sapien
gtttaagatcaatgcagttcagagt

SEQ ID NO: 4907317 - DNA, 25 bp, Homo sapien
gcctagttggtcaaggtgatgacaa

SEQ ID NO: 4907318 - DNA, 25 bp, Homo sapien
caggagtcaactctggtacaggcag

SEQ ID NO: 4907319 - DNA, 25 bp, Homo sapien
aacgcaaagggatgggacaaaccat

SEQ ID NO: 4907320 - DNA, 25 bp, Homo sapien
ggctgttggagtcacaagtggatca

SEQ ID NO: 4907321 - DNA, 25 bp, Homo sapien
tacagaatcaactatcacggtgcag

SEQ ID NO: 4907322 - DNA, 25 bp, Homo sapien
cccgaagatgctgaagggtttcacc

SEQ ID NO: 4907323 - DNA, 25 bp, Homo sapien
tacatcgctggaaactgccatctgc

SEQ ID NO: 4907324 - DNA, 25 bp, Homo sapien
tattccactgtcgaagatacatgtg

SEQ ID NO: 4907325 - DNA, 25 bp, Homo sapien
cagtagttgctacacatgagtcccc

SEQ ID NO: 4907326 - DNA, 25 bp, Homo sapien
tccaatgcatgtgtagagaacctat

SEQ ID NO: 4907327 - DNA, 25 bp, Homo sapien
tgaagcaccgtttctctcgggtagc

SEQ ID NO: 4907328 - DNA, 25 bp, Homo sapien
tcaaggcactatgttagccagtcag

SEQ ID NO: 4907329 - DNA, 25 bp, Homo sapien
tggcaagtacccttgacatgagagg

SEQ ID NO: 4907330 - DNA, 25 bp, Homo sapien
cagaagtatatcctcttgtggctca

SEQ ID NO: 4907331 - DNA, 25 bp, Homo sapien
tcatgttaacgttgccaaatccctg

SEQ ID NO: 4907332 - DNA, 25 bp, Homo sapien
tttagaatacacagggttaggtgcc

SEQ ID NO: 4907333 - DNA, 25 bp, Homo sapien
cacatcatagatgttgagcctcaga

SEQ ID NO: 4907334 - DNA, 25 bp, Homo sapien
cacagaggttaagttaccagatggg

SEQ ID NO: 4907335 - DNA, 25 bp, Homo sapien
caccattttggtgtaagagaagaca

SEQ ID NO: 4907336 - DNA, 25 bp, Homo sapien
cagggaactatttctctactgctgc

SEQ ID NO: 4907337 - DNA, 25 bp, Homo sapien
tatccacctggccaaaccgcagtgt

SEQ ID NO: 4907338 - DNA, 25 bp, Homo sapien
ggatttgtgagagcgccagctgtac

SEQ ID NO: 4907339 - DNA, 25 bp, Homo sapien
tcacaaaatggctgaagaccaactc

SEQ ID NO: 4907340 - DNA, 25 bp, Homo sapien
tactggtgactgtggagactcgcca

SEQ ID NO: 4907341 - DNA, 25 bp, Homo sapien
tgtgtggttccttcggagacttaaa

SEQ ID NO: 4907342 - DNA, 25 bp, Homo sapien
cccaaccttaacaatggctgtttgt

SEQ ID NO: 4907343 - DNA, 25 bp, Homo sapien
ctacgctgtgtggttccttcggaga

SEQ ID NO: 4907344 - DNA, 25 bp, Homo sapien
cagaagaaatgaatccccaacctta

SEQ ID NO: 4907345 - DNA, 25 bp, Homo sapien
tattctcgagagtacttcctaggat

SEQ ID NO: 4907346 - DNA, 25 bp, Homo sapien
tcttttaatcacaagcaggcagtag

SEQ ID NO: 4907347 - DNA, 25 bp, Homo sapien
tagctaccctcagatggagcccaag

SEQ ID NO: 4907348 - DNA, 25 bp, Homo sapien
tcttcatattatcgctacaggacac

SEQ ID NO: 4907349 - DNA, 25 bp, Homo sapien
tgattaccacaattaagtcattggt

SEQ ID NO: 4907350 - DNA, 25 bp, Homo sapien
gtcattggtaactagaattctgtaa

SEQ ID NO: 4907351 - DNA, 25 bp, Homo sapien
aagtcattggtaactagaattctgt

SEQ ID NO: 4907352 - DNA, 25 bp, Homo sapien
tgatggtttgattaccacaattaag

SEQ ID NO: 4907353 - DNA, 25 bp, Homo sapien
aatggattcccaggctcttgagaac

SEQ ID NO: 4907354 - DNA, 25 bp, Homo sapien
cagcagtgaccatagtagtctctgt

SEQ ID NO: 4907355 - DNA, 25 bp, Homo sapien
tctgaaatacatctgtgatcctggc

SEQ ID NO: 4907356 - DNA, 25 bp, Homo sapien
taatgcccttactctgtcttagctc

SEQ ID NO: 4907357 - DNA, 25 bp, Homo sapien
gcggctggacggtagttcctgggta

SEQ ID NO: 4907358 - DNA, 25 bp, Homo sapien
gattaaaatgcttgccagatggtcc

SEQ ID NO: 4907359 - DNA, 25 bp, Homo sapien
aatgcagttgatggcggctggacgg

SEQ ID NO: 4907360 - DNA, 25 bp, Homo sapien
caaatggagtcagtgtttacagaat

SEQ ID NO: 4907361 - DNA, 25 bp, Homo sapien
ggaagagagagaccattagccgcac

SEQ ID NO: 4907362 - DNA, 25 bp, Homo sapien
aaaggcactgtaagctccctcagag

SEQ ID NO: 4907363 - DNA, 25 bp, Homo sapien
ctctgggcgctttgcacttgaaata

SEQ ID NO: 4907364 - DNA, 25 bp, Homo sapien
taatgaccaaaactgctaggacccc

SEQ ID NO: 4907365 - DNA, 25 bp, Homo sapien
taaaactaagcaataaggcaggttg

SEQ ID NO: 4907366 - DNA, 25 bp, Homo sapien
tagttttcccattgaagacctcaga

SEQ ID NO: 4907367 - DNA, 25 bp, Homo sapien
gacctcagatggaagcatatacagt

SEQ ID NO: 4907368 - DNA, 25 bp, Homo sapien
gccacactcgatggaaggtcccaag

SEQ ID NO: 4907369 - DNA, 25 bp, Homo sapien
ggtcttatatatactctacaacata

SEQ ID NO: 4907370 - DNA, 25 bp, Homo sapien
tgttaatatggcctcactcaagttc

SEQ ID NO: 4907371 - DNA, 25 bp, Homo sapien
tacaacataaaagtaccagaatatc

SEQ ID NO: 4907372 - DNA, 25 bp, Homo sapien
tgctatcagttaggtgacttctaaa

SEQ ID NO: 4907373 - DNA, 25 bp, Homo sapien
aaaaacaataatcgtcataatgcca

SEQ ID NO: 4907374 - DNA, 25 bp, Homo sapien
tcgtcataatgccaaacgtgccaac

SEQ ID NO: 4907375 - DNA, 25 bp, Homo sapien
taatgccaaacgtgccaacaaaaac

SEQ ID NO: 4907376 - DNA, 25 bp, Homo sapien
caataatcgtcataatgccaaacgt

SEQ ID NO: 4907377 - DNA, 25 bp, Homo sapien
ggcatggtccacactgaaaggctct

SEQ ID NO: 4907378 - DNA, 25 bp, Homo sapien
gaaaggctctgaccaacgccagttg

SEQ ID NO: 4907379 - DNA, 25 bp, Homo sapien
gatgagagaagcagttcgacccctg

SEQ ID NO: 4907380 - DNA, 25 bp, Homo sapien
tgttctaataaaagtcccggcatgg

SEQ ID NO: 4907381 - DNA, 25 bp, Homo sapien
gaacaaatctgaacgctaaactacc

SEQ ID NO: 4907382 - DNA, 25 bp, Homo sapien
ccagaacaaatctgaacgctaaact

SEQ ID NO: 4907383 - DNA, 25 bp, Homo sapien
taaccagaacaaatctgaacgctaa

SEQ ID NO: 4907384 - DNA, 25 bp, Homo sapien
ttaaccagaacaaatctgaacgcta

SEQ ID NO: 4907385 - DNA, 25 bp, Homo sapien
tgccaattgaggaaatcctacgtct

SEQ ID NO: 4907386 - DNA, 25 bp, Homo sapien
cttgccaattgaggaaatcctacgt

SEQ ID NO: 4907387 - DNA, 25 bp, Homo sapien
gaggaaatcctacgtctctgatgta

SEQ ID NO: 4907388 - DNA, 25 bp, Homo sapien
aattgaggaaatcctacgtctctga

SEQ ID NO: 4907389 - DNA, 25 bp, Homo sapien
attaggcagctgcagtttattgcaa

SEQ ID NO: 4907390 - DNA, 25 bp, Homo sapien
ccaaatgggccctggtaattaggca

SEQ ID NO: 4907391 - DNA, 25 bp, Homo sapien
gaatccacaaagctcttctgaagct

SEQ ID NO: 4907392 - DNA, 25 bp, Homo sapien
cttctgaagcttggttcccttcttc

SEQ ID NO: 4907393 - DNA, 25 bp, Homo sapien
tgttttctagtatgtacgaaggcaa

SEQ ID NO: 4907394 - DNA, 25 bp, Homo sapien
ttcacacacagctccgtcagttcat

SEQ ID NO: 4907395 - DNA, 25 bp, Homo sapien
tgtgaggcagtcaaaatgttcccga

SEQ ID NO: 4907396 - DNA, 25 bp, Homo sapien
tgaccaatgtaatgctgaacgactt

SEQ ID NO: 4907397 - DNA, 25 bp, Homo sapien
gttgcacttgagagttgggttctaa

SEQ ID NO: 4907398 - DNA, 25 bp, Homo sapien
ttgcacttgagagttgggttctaaa

SEQ ID NO: 4907399 - DNA, 25 bp, Homo sapien
cacttgagagttgggttctaaagtc

SEQ ID NO: 4907400 - DNA, 25 bp, Homo sapien
tgcacttgagagttgggttctaaag

SEQ ID NO: 4907401 - DNA, 25 bp, Homo sapien
gtgtttcactcaatcccagactcct

SEQ ID NO: 4907402 - DNA, 25 bp, Homo sapien
ctggaagatgactcctcatgataaa

SEQ ID NO: 4907403 - DNA, 25 bp, Homo sapien
ggtcaggttctatgttttgcagtgg

SEQ ID NO: 4907404 - DNA, 25 bp, Homo sapien
tcaggtgatgtacaaggtcaggttc

SEQ ID NO: 4907405 - DNA, 25 bp, Homo sapien
gagatgggaactgcacaatctgaag

SEQ ID NO: 4907406 - DNA, 25 bp, Homo sapien
gcacaatctgaaggatcatattctt

SEQ ID NO: 4907407 - DNA, 25 bp, Homo sapien
tgggaactgcacaatctgaaggatc

SEQ ID NO: 4907408 - DNA, 25 bp, Homo sapien
atgttgagatgggaactgcacaatc

SEQ ID NO: 4907409 - DNA, 25 bp, Homo sapien
ggttgaagcgacttttctggcccat

SEQ ID NO: 4907410 - DNA, 25 bp, Homo sapien
cctccagggtgtaccttagtggcta

SEQ ID NO: 4907411 - DNA, 25 bp, Homo sapien
tcgtcaaggatctgattaactgtgc

SEQ ID NO: 4907412 - DNA, 25 bp, Homo sapien
tctggcccatagaattcgtcaagga

SEQ ID NO: 4907413 - DNA, 25 bp, Homo sapien
aacatatggcttccagattgacagc

SEQ ID NO: 4907414 - DNA, 25 bp, Homo sapien
gcttcactcgcattgggctatccca

SEQ ID NO: 4907415 - DNA, 25 bp, Homo sapien
tctccttcaaatagccagaggtccc

SEQ ID NO: 4907416 - DNA, 25 bp, Homo sapien
gattcattgataagcagggcccagg

SEQ ID NO: 4907417 - DNA, 25 bp, Homo sapien
tctttccactttggagatgtcaggt

SEQ ID NO: 4907418 - DNA, 25 bp, Homo sapien
tcttatttcagtatcaacaaacgct

SEQ ID NO: 4907419 - DNA, 25 bp, Homo sapien
tatttgcccagtatattccaatttg

SEQ ID NO: 4907420 - DNA, 25 bp, Homo sapien
gatgtcaggttatggaccagtttaa

SEQ ID NO: 4907421 - DNA, 25 bp, Homo sapien
ctgtcagtatttagcctacaacatg

SEQ ID NO: 4907422 - DNA, 25 bp, Homo sapien
ttaatggcgttcctttcattctcag

SEQ ID NO: 4907423 - DNA, 25 bp, Homo sapien
ttctcagaaatgttctggcccctgt

SEQ ID NO: 4907424 - DNA, 25 bp, Homo sapien
gtatttagcctacaacatggtgctt

SEQ ID NO: 4907425 - DNA, 25 bp, Homo sapien
gaatggggattgcagacagatagct

SEQ ID NO: 4907426 - DNA, 25 bp, Homo sapien
gctgtaccatggaggaaatgcagaa

SEQ ID NO: 4907427 - DNA, 25 bp, Homo sapien
tgtagtcttgtcttcaatctgaata

SEQ ID NO: 4907428 - DNA, 25 bp, Homo sapien
gacagatagctgtggtttataaaat

SEQ ID NO: 4907429 - DNA, 25 bp, Homo sapien
ctaaaagtagcactgtctggaacac

SEQ ID NO: 4907430 - DNA, 25 bp, Homo sapien
aaagtagcactgtctggaacacgaa

SEQ ID NO: 4907431 - DNA, 25 bp, Homo sapien
taaaagtagcactgtctggaacacg

SEQ ID NO: 4907432 - DNA, 25 bp, Homo sapien
gtagcactgtctggaacacgaaaat

SEQ ID NO: 4907433 - DNA, 25 bp, Homo sapien
gcatcaagtcccagcaaggaaggga

SEQ ID NO: 4907434 - DNA, 25 bp, Homo sapien
ggtctaactatagctggcaggctcc

SEQ ID NO: 4907435 - DNA, 25 bp, Homo sapien
gctggatttcatagcaggctgctct

SEQ ID NO: 4907436 - DNA, 25 bp, Homo sapien
gtttctgaagcagggatgcatccag

SEQ ID NO: 4907437 - DNA, 25 bp, Homo sapien
tgagagggttaaataagtcactccg

SEQ ID NO: 4907438 - DNA, 25 bp, Homo sapien
ttcttgatatgtcagcactatagcc

SEQ ID NO: 4907439 - DNA, 25 bp, Homo sapien
tactcgaggactagggtcttctgag

SEQ ID NO: 4907440 - DNA, 25 bp, Homo sapien
catttttactggacatctattgtgg

SEQ ID NO: 4907441 - DNA, 25 bp, Homo sapien
cagttgttacttcatctagaggttc

SEQ ID NO: 4907442 - DNA, 25 bp, Homo sapien
aagtctttggtcttgcagtccggat

SEQ ID NO: 4907443 - DNA, 25 bp, Homo sapien
catgatgaattgagcactcggaggg

SEQ ID NO: 4907444 - DNA, 25 bp, Homo sapien
ggttcaactctcaaaagtaggcttg

SEQ ID NO: 4907445 - DNA, 25 bp, Homo sapien
taaaccacggtctgcaggacatatg

SEQ ID NO: 4907446 - DNA, 25 bp, Homo sapien
tcggtgagggtctgaaacaaatctt

SEQ ID NO: 4907447 - DNA, 25 bp, Homo sapien
cctccagagtaggaagtaaaccacg

SEQ ID NO: 4907448 - DNA, 25 bp, Homo sapien
cctgggatattactgaggagatgtc

SEQ ID NO: 4907449 - DNA, 25 bp, Homo sapien
gctccttcctttcatcagaggacac

SEQ ID NO: 4907450 - DNA, 25 bp, Homo sapien
tcagaggacacagctccttttgctt

SEQ ID NO: 4907451 - DNA, 25 bp, Homo sapien
agacaaactccctcctccagaagga

SEQ ID NO: 4907452 - DNA, 25 bp, Homo sapien
tcacagaccaatggctgaggaaggt

SEQ ID NO: 4907453 - DNA, 25 bp, Homo sapien
caacttgctggtatctgttcgactg

SEQ ID NO: 4907454 - DNA, 25 bp, Homo sapien
atctgttcgactgtgccctggagta

SEQ ID NO: 4907455 - DNA, 25 bp, Homo sapien
cagtgccaacttgctggtatctgtt

SEQ ID NO: 4907456 - DNA, 25 bp, Homo sapien
tgctggtatctgttcgactgtgccc

SEQ ID NO: 4907457 - DNA, 25 bp, Homo sapien
ctggttcttccactgctgccttctt

SEQ ID NO: 4907458 - DNA, 25 bp, Homo sapien
ctccctctgctccttgctgcagccc

SEQ ID NO: 4907459 - DNA, 25 bp, Homo sapien
ccctctgctccttgctgcagcccag

SEQ ID NO: 4907460 - DNA, 25 bp, Homo sapien
ttcctggttcttccactgctgcctt

SEQ ID NO: 4907461 - DNA, 25 bp, Homo sapien
tgtacaacatccacatacacatagc

SEQ ID NO: 4907462 - DNA, 25 bp, Homo sapien
gagcaaatttactggctggatcacc

SEQ ID NO: 4907463 - DNA, 25 bp, Homo sapien
tgtcttccacgtataaccgagcagg

SEQ ID NO: 4907464 - DNA, 25 bp, Homo sapien
gatgggtcctctttcaaacaccgag

SEQ ID NO: 4907465 - DNA, 25 bp, Homo sapien
taatatcacagaggatgctcttgcc

SEQ ID NO: 4907466 - DNA, 25 bp, Homo sapien
gattaccataacgtaccctgagacc

SEQ ID NO: 4907467 - DNA, 25 bp, Homo sapien
tggaaagggctgacaaggctaactc

SEQ ID NO: 4907468 - DNA, 25 bp, Homo sapien
tagagtgaacctggctcaagaacac

SEQ ID NO: 4907469 - DNA, 25 bp, Homo sapien
acacacactgtgatgccgattacca

SEQ ID NO: 4907470 - DNA, 25 bp, Homo sapien
tcagattggagctcagtaacctacg

SEQ ID NO: 4907471 - DNA, 25 bp, Homo sapien
aatgggagccttcgtccttgccagg

SEQ ID NO: 4907472 - DNA, 25 bp, Homo sapien
cactgctgcgtcgtgcagagactga

SEQ ID NO: 4907473 - DNA, 25 bp, Homo sapien
aacctacgtgcctgcttcttatgtg

SEQ ID NO: 4907474 - DNA, 25 bp, Homo sapien
aagagagggacgctcttaaattttg

SEQ ID NO: 4907475 - DNA, 25 bp, Homo sapien
cttctctggaacgttaggatgataa

SEQ ID NO: 4907476 - DNA, 25 bp, Homo sapien
gaacgttaggatgataacactaggg

SEQ ID NO: 4907477 - DNA, 25 bp, Homo sapien
gacgctcttaaattttgagccctcc

SEQ ID NO: 4907478 - DNA, 25 bp, Homo sapien
ggctgtaggccccaagaattggagg

SEQ ID NO: 4907479 - DNA, 25 bp, Homo sapien
ctcagagcccggtaatgggaaggct

SEQ ID NO: 4907480 - DNA, 25 bp, Homo sapien
gactgggtgggagccatccctcctt

SEQ ID NO: 4907481 - DNA, 25 bp, Homo sapien
aaagacagctttctccgggaagcca

SEQ ID NO: 4907482 - DNA, 25 bp, Homo sapien
ccttcttgggttgcaggtgtttgca

SEQ ID NO: 4907483 - DNA, 25 bp, Homo sapien
agcggaggcaccaggataggaggag

SEQ ID NO: 4907484 - DNA, 25 bp, Homo sapien
gggcggccagatgctcaatggcatg

SEQ ID NO: 4907485 - DNA, 25 bp, Homo sapien
tcaatggcatgtcgcaaaggggatg

SEQ ID NO: 4907486 - DNA, 25 bp, Homo sapien
atgtggcggggatgcactctgctac

SEQ ID NO: 4907487 - DNA, 25 bp, Homo sapien
ggtccatgtggcggggatgcactct

SEQ ID NO: 4907488 - DNA, 25 bp, Homo sapien
gggggtccatgtggcggggatgcac

SEQ ID NO: 4907489 - DNA, 25 bp, Homo sapien
tccatgtggcggggatgcactctgc

SEQ ID NO: 4907490 - DNA, 25 bp, Homo sapien
gcccctcatacggaagcctgaagaa

SEQ ID NO: 4907491 - DNA, 25 bp, Homo sapien
tctggagacgccactcacgaaggct

SEQ ID NO: 4907492 - DNA, 25 bp, Homo sapien
gatgtgctttacaaacgatgtggtc

SEQ ID NO: 4907493 - DNA, 25 bp, Homo sapien
cagggctgccaagaatatccagaga

SEQ ID NO: 4907494 - DNA, 25 bp, Homo sapien
cagtgagagccggtccatgttccgg

SEQ ID NO: 4907495 - DNA, 25 bp, Homo sapien
caggcttgtggcgaggttggtgatg

SEQ ID NO: 4907496 - DNA, 25 bp, Homo sapien
ccagccgggacaggccctgtcgaag

SEQ ID NO: 4907497 - DNA, 25 bp, Homo sapien
ccggtccatgttccgggccaggctt

SEQ ID NO: 4907498 - DNA, 25 bp, Homo sapien
gaagagactggaaccctcgggcagg

SEQ ID NO: 4907499 - DNA, 25 bp, Homo sapien
ctgaaaacggagcattggctggggt

SEQ ID NO: 4907500 - DNA, 25 bp, Homo sapien
agactggaaccctcgggcaggaagg

SEQ ID NO: 4907501 - DNA, 25 bp, Homo sapien
tgaaaacggagcattggctggggtt

SEQ ID NO: 4907502 - DNA, 25 bp, Homo sapien
ttcccatcaggtacaatcttacaca

SEQ ID NO: 4907503 - DNA, 25 bp, Homo sapien
gaaagatgacctcatcagggctgat

SEQ ID NO: 4907504 - DNA, 25 bp, Homo sapien
gtcaacaggacccacgcccagaaag

SEQ ID NO: 4907505 - DNA, 25 bp, Homo sapien
gtgactcctcacacaactgattttt

SEQ ID NO: 4907506 - DNA, 25 bp, Homo sapien
cacacacctggtagttctaggacca

SEQ ID NO: 4907507 - DNA, 25 bp, Homo sapien
agccaagcttgagatgcccactgtg

SEQ ID NO: 4907508 - DNA, 25 bp, Homo sapien
aatggtggccaatctataactttcc

SEQ ID NO: 4907509 - DNA, 25 bp, Homo sapien
aattaggcactgcattgtatgtggc

SEQ ID NO: 4907510 - DNA, 25 bp, Homo sapien
taacgagacccatagagtgtactgc

SEQ ID NO: 4907511 - DNA, 25 bp, Homo sapien
aaaatgggataccacgccacagctc

SEQ ID NO: 4907512 - DNA, 25 bp, Homo sapien
gaaactacttggtcactgggctatg

SEQ ID NO: 4907513 - DNA, 25 bp, Homo sapien
gaaagccttcattgtggagcaggaa

SEQ ID NO: 4907514 - DNA, 25 bp, Homo sapien
ggcttcggttactgtggctttgaca

SEQ ID NO: 4907515 - DNA, 25 bp, Homo sapien
ggctttgacagataagactatttgg

SEQ ID NO: 4907516 - DNA, 25 bp, Homo sapien
aggtatcaggtgaggccccctctgt

SEQ ID NO: 4907517 - DNA, 25 bp, Homo sapien
cagataagactatttgggcagcccc

SEQ ID NO: 4907518 - DNA, 25 bp, Homo sapien
gcatatcacgtcaattgtaaaggga

SEQ ID NO: 4907519 - DNA, 25 bp, Homo sapien
gcctagagtcgtgctgccaaacctt

SEQ ID NO: 4907520 - DNA, 25 bp, Homo sapien
cagaatgacctgaggcaacagacct

SEQ ID NO: 4907521 - DNA, 25 bp, Homo sapien
ctggcccctggtagaaattttagtg

SEQ ID NO: 4907522 - DNA, 25 bp, Homo sapien
ctcacttagaatagcgaccaaaacc

SEQ ID NO: 4907523 - DNA, 25 bp, Homo sapien
cctcacttagaatagcgaccaaaac

SEQ ID NO: 4907524 - DNA, 25 bp, Homo sapien
tcctcacttagaatagcgaccaaaa

SEQ ID NO: 4907525 - DNA, 25 bp, Homo sapien
tcacttagaatagcgaccaaaaccc

SEQ ID NO: 4907526 - DNA, 25 bp, Homo sapien
tacaccaagggcagtagacatttat

SEQ ID NO: 4907527 - DNA, 25 bp, Homo sapien
tcaaaatacaatgttcagacggagt

SEQ ID NO: 4907528 - DNA, 25 bp, Homo sapien
tgttcagacggagtttggtccacac

SEQ ID NO: 4907529 - DNA, 25 bp, Homo sapien
ctaagtacaccaagggcagtagaca

SEQ ID NO: 4907530 - DNA, 25 bp, Homo sapien
tttatctggattgaaaatgagtccc

SEQ ID NO: 4907531 - DNA, 25 bp, Homo sapien
tggattgaaaatgagtccccaccct

SEQ ID NO: 4907532 - DNA, 25 bp, Homo sapien
tctggattgaaaatgagtccccacc

SEQ ID NO: 4907533 - DNA, 25 bp, Homo sapien
gattgaaaatgagtccccaccctca

SEQ ID NO: 4907534 - DNA, 25 bp, Homo sapien
gaggcttaaaatcctcggaaaatga

SEQ ID NO: 4907535 - DNA, 25 bp, Homo sapien
acacccgagatgacacccttggcct

SEQ ID NO: 4907536 - DNA, 25 bp, Homo sapien
ggaagttctgcatcggctgatcaac

SEQ ID NO: 4907537 - DNA, 25 bp, Homo sapien
tgaagcctgtgcctcagatgttttc

SEQ ID NO: 4907538 - DNA, 25 bp, Homo sapien
gatgggctttgtgaacacccccatg

SEQ ID NO: 4907539 - DNA, 25 bp, Homo sapien
tggctgatggcgctgtttgggaagc

SEQ ID NO: 4907540 - DNA, 25 bp, Homo sapien
gagaaagtccagctccatgtaaaat

SEQ ID NO: 4907541 - DNA, 25 bp, Homo sapien
gaaagtccagctccatgtaaaatac

SEQ ID NO: 4907542 - DNA, 25 bp, Homo sapien
cagcatgtagatcacttggctgatg

SEQ ID NO: 4907543 - DNA, 25 bp, Homo sapien
gatgtaaagttgagcacgtatctca

SEQ ID NO: 4907544 - DNA, 25 bp, Homo sapien
acaatatggatgtaaagttgagcac

SEQ ID NO: 4907545 - DNA, 25 bp, Homo sapien
tatggatgtaaagttgagcacgtat

SEQ ID NO: 4907546 - DNA, 25 bp, Homo sapien
taaagttgagcacgtatctcaataa

SEQ ID NO: 4907547 - DNA, 25 bp, Homo sapien
tgccagtgccaacaatggctactcc

SEQ ID NO: 4907548 - DNA, 25 bp, Homo sapien
cctgagatgccagtgccaacaatgg

SEQ ID NO: 4907549 - DNA, 25 bp, Homo sapien
ggaagcatggcccattagcttgaga

SEQ ID NO: 4907550 - DNA, 25 bp, Homo sapien
tccctggaagcatggcccattagct

SEQ ID NO: 4907551 - DNA, 25 bp, Homo sapien
tagagtgctggttccacagggaatc

SEQ ID NO: 4907552 - DNA, 25 bp, Homo sapien
tgccaatgtatgaccttccttgagt

SEQ ID NO: 4907553 - DNA, 25 bp, Homo sapien
tccttgagtggttaggtacggaaca

SEQ ID NO: 4907554 - DNA, 25 bp, Homo sapien
aaagatggtcacttatcagtgctca

SEQ ID NO: 4907555 - DNA, 25 bp, Homo sapien
tgtcctgtgcacagtcgatttctgt

SEQ ID NO: 4907556 - DNA, 25 bp, Homo sapien
tcactgacactcaccacgaagagca

SEQ ID NO: 4907557 - DNA, 25 bp, Homo sapien
gccatgtggacttctggtctgccca

SEQ ID NO: 4907558 - DNA, 25 bp, Homo sapien
agcacttctgatgtcagcagcaagc

SEQ ID NO: 4907559 - DNA, 25 bp, Homo sapien
cctccctggccagctagtcttggtt

SEQ ID NO: 4907560 - DNA, 25 bp, Homo sapien
gccagctagtcttggttgccctgtt

SEQ ID NO: 4907561 - DNA, 25 bp, Homo sapien
gctagtcttggttgccctgttttct

SEQ ID NO: 4907562 - DNA, 25 bp, Homo sapien
tccctggccagctagtcttggttgc

SEQ ID NO: 4907563 - DNA, 25 bp, Homo sapien
tctgtggtactcagggggtgggaaa

SEQ ID NO: 4907564 - DNA, 25 bp, Homo sapien
taagtatcatccccaggggggattc

SEQ ID NO: 4907565 - DNA, 25 bp, Homo sapien
caggggggattctgtggtactcagg

SEQ ID NO: 4907566 - DNA, 25 bp, Homo sapien
gtatcatccccaggggggattctgt

SEQ ID NO: 4907567 - DNA, 25 bp, Homo sapien
ccagtctgttgtactgttgctctga

SEQ ID NO: 4907568 - DNA, 25 bp, Homo sapien
gacagtctctctcggactccatcta

SEQ ID NO: 4907569 - DNA, 25 bp, Homo sapien
caaaatgtggatcaaccaggtaatg

SEQ ID NO: 4907570 - DNA, 25 bp, Homo sapien
taaggaagacctgagcaaaatgtgg

SEQ ID NO: 4907571 - DNA, 25 bp, Homo sapien
aatttgaggtcagcaagggcaatgc

SEQ ID NO: 4907572 - DNA, 25 bp, Homo sapien
gagaaactcacctgaacactttggg

SEQ ID NO: 4907573 - DNA, 25 bp, Homo sapien
ggtgactcagcccaaaaacagatgc

SEQ ID NO: 4907574 - DNA, 25 bp, Homo sapien
tctatggcataccagggagttccca

SEQ ID NO: 4907575 - DNA, 25 bp, Homo sapien
caaggtccttatgcctcatggacag

SEQ ID NO: 4907576 - DNA, 25 bp, Homo sapien
gaagtaccttgatgagacttcctac

SEQ ID NO: 4907577 - DNA, 25 bp, Homo sapien
tagaaaaggactgactggtgtgctg

SEQ ID NO: 4907578 - DNA, 25 bp, Homo sapien
tgggtgtccacgagtgactagctgt

SEQ ID NO: 4907579 - DNA, 25 bp, Homo sapien
actaccatggctcccgaagttttgc

SEQ ID NO: 4907580 - DNA, 25 bp, Homo sapien
tagctagaccctgtttctgccaaaa

SEQ ID NO: 4907581 - DNA, 25 bp, Homo sapien
gttttgccaaaacctcggatgcgtg

SEQ ID NO: 4907582 - DNA, 25 bp, Homo sapien
agctccaatcaatgcttccaggtgg

SEQ ID NO: 4907583 - DNA, 25 bp, Homo sapien
ggaccctcgagaacccagctggctt

SEQ ID NO: 4907584 - DNA, 25 bp, Homo sapien
tcgagaacccagctggcttcggagt

SEQ ID NO: 4907585 - DNA, 25 bp, Homo sapien
ctggtacccgctgcgctttttcaca

SEQ ID NO: 4907586 - DNA, 25 bp, Homo sapien
ccggggctggtacccgctgcgcttt

SEQ ID NO: 4907587 - DNA, 25 bp, Homo sapien
tgcactcttattctgcgcctgcgcg

SEQ ID NO: 4907588 - DNA, 25 bp, Homo sapien
tgggcgcactagaggtcttttgaac

SEQ ID NO: 4907589 - DNA, 25 bp, Homo sapien
tttgaactccttcggctaccgtcgc

SEQ ID NO: 4907590 - DNA, 25 bp, Homo sapien
gcggctacagcacggttcgtttttc

SEQ ID NO: 4907591 - DNA, 25 bp, Homo sapien
cctctatcaaaacgtcctcagcttt

SEQ ID NO: 4907592 - DNA, 25 bp, Homo sapien
actttccacgaacttccagttgcct

SEQ ID NO: 4907593 - DNA, 25 bp, Homo sapien
accactttccacgaacttccagttg

SEQ ID NO: 4907594 - DNA, 25 bp, Homo sapien
aaaacgtcctcagctttgccaggta

SEQ ID NO: 4907595 - DNA, 25 bp, Homo sapien
ttcactggatagctagggaagcaca

SEQ ID NO: 4907596 - DNA, 25 bp, Homo sapien
caaatccaggtctgttcggctctag

SEQ ID NO: 4907597 - DNA, 25 bp, Homo sapien
tccctgatcagaatgagactccccg

SEQ ID NO: 4907598 - DNA, 25 bp, Homo sapien
tgataagaggcctgaaaaacgttgg

SEQ ID NO: 4907599 - DNA, 25 bp, Homo sapien
tttttggaggcatgtagagccagca

SEQ ID NO: 4907600 - DNA, 25 bp, Homo sapien
tctctctggtagaggctgccgtttt

SEQ ID NO: 4907601 - DNA, 25 bp, Homo sapien
aggtgccttcttaaaccacatccgg

SEQ ID NO: 4907602 - DNA, 25 bp, Homo sapien
taccgctgatgagcttggaacactc

SEQ ID NO: 4907603 - DNA, 25 bp, Homo sapien
cccacacagatgggacgcggcttag

SEQ ID NO: 4907604 - DNA, 25 bp, Homo sapien
tcccacacagatgggacgcggctta

SEQ ID NO: 4907605 - DNA, 25 bp, Homo sapien
ggtcccacacagatgggacgcggct

SEQ ID NO: 4907606 - DNA, 25 bp, Homo sapien
ggggtcccacacagatgggacgcgg

SEQ ID NO: 4907607 - DNA, 25 bp, Homo sapien
gggctaataaaaatgagcatctttt

SEQ ID NO: 4907608 - DNA, 25 bp, Homo sapien
ttaaagatgctttttaaagagctta

SEQ ID NO: 4907609 - DNA, 25 bp, Homo sapien
tgctttttaaagagcttaaatgggc

SEQ ID NO: 4907610 - DNA, 25 bp, Homo sapien
gggggctaataaaaatgagcatctt

SEQ ID NO: 4907611 - DNA, 25 bp, Homo sapien
tgttcggcgcaagagtaggttagtc

SEQ ID NO: 4907612 - DNA, 25 bp, Homo sapien
tcccgaatccaagtaggctcagaga

SEQ ID NO: 4907613 - DNA, 25 bp, Homo sapien
taggttagtctgtgtactcatgcag

SEQ ID NO: 4907614 - DNA, 25 bp, Homo sapien
ggcaggtgacctactgaaaacataa

SEQ ID NO: 4907615 - DNA, 25 bp, Homo sapien
gtaaatctcttcatgaattcaatct

SEQ ID NO: 4907616 - DNA, 25 bp, Homo sapien
taaatctcttcatgaattcaatctg

SEQ ID NO: 4907617 - DNA, 25 bp, Homo sapien
aggcacataatctctcctccagaat

SEQ ID NO: 4907618 - DNA, 25 bp, Homo sapien
ggcacataatctctcctccagaatc

SEQ ID NO: 4907619 - DNA, 25 bp, Homo sapien
aaagaaggcacataatctctcctcc

SEQ ID NO: 4907620 - DNA, 25 bp, Homo sapien
ccgtcgccgcgtcgctcaggccctg

SEQ ID NO: 4907621 - DNA, 25 bp, Homo sapien
acccgcgcgctagggccctgacggc

SEQ ID NO: 4907622 - DNA, 25 bp, Homo sapien
tcgctcaggccctgacccgcgctgg

SEQ ID NO: 4907623 - DNA, 25 bp, Homo sapien
acgctagccagcgtagctccggagc

SEQ ID NO: 4907624 - DNA, 25 bp, Homo sapien
tggagcaccgcgtttccctggccgt

SEQ ID NO: 4907625 - DNA, 25 bp, Homo sapien
ggtcaccacagtaacgaattcgctg

SEQ ID NO: 4907626 - DNA, 25 bp, Homo sapien
gctgtagtggaggaataacggacct

SEQ ID NO: 4907627 - DNA, 25 bp, Homo sapien
tgccagtggagtctcgagggacaca

SEQ ID NO: 4907628 - DNA, 25 bp, Homo sapien
tgttgccggcctcctgaggaatgag

SEQ ID NO: 4907629 - DNA, 25 bp, Homo sapien
gaatgaggaaaactggaggcctgac

SEQ ID NO: 4907630 - DNA, 25 bp, Homo sapien
cgtgttgccggcctcctgaggaatg

SEQ ID NO: 4907631 - DNA, 25 bp, Homo sapien
ctacgtgttgccggcctcctgagga

SEQ ID NO: 4907632 - DNA, 25 bp, Homo sapien
gcttgactgaataagaccgtttggg

SEQ ID NO: 4907633 - DNA, 25 bp, Homo sapien
aggagactccagatttcagaaacac

SEQ ID NO: 4907634 - DNA, 25 bp, Homo sapien
taaagaggacctagtgcttgactga

SEQ ID NO: 4907635 - DNA, 25 bp, Homo sapien
tacaactgttcagcaggagcgcaaa

SEQ ID NO: 4907636 - DNA, 25 bp, Homo sapien
gggagttacgtttccttgcaataca

SEQ ID NO: 4907637 - DNA, 25 bp, Homo sapien
caggtcagatttgcgttcagatgga

SEQ ID NO: 4907638 - DNA, 25 bp, Homo sapien
gggcttaagctgaactccactggaa

SEQ ID NO: 4907639 - DNA, 25 bp, Homo sapien
ggcaatgaatacaactagatgggag

SEQ ID NO: 4907640 - DNA, 25 bp, Homo sapien
gaaatctgagaactttgagcttcac

SEQ ID NO: 4907641 - DNA, 25 bp, Homo sapien
attttattaagcaggttatactcct

SEQ ID NO: 4907642 - DNA, 25 bp, Homo sapien
aaatctgagaactttgagcttcacc

SEQ ID NO: 4907643 - DNA, 25 bp, Homo sapien
taagcaggttatactcctttcgggc

SEQ ID NO: 4907644 - DNA, 25 bp, Homo sapien
aacttccggcgctggtacatgacgc

SEQ ID NO: 4907645 - DNA, 25 bp, Homo sapien
ttccaaatacaacccggctagtcca

SEQ ID NO: 4907646 - DNA, 25 bp, Homo sapien
tccaggtgtcgagaccaacttccgg

SEQ ID NO: 4907647 - DNA, 25 bp, Homo sapien
aactcactccgcgtttccaaataca

SEQ ID NO: 4907648 - DNA, 25 bp, Homo sapien
tgttttacagaggacgcaaccgata

SEQ ID NO: 4907649 - DNA, 25 bp, Homo sapien
gaaaagagcgatagcatggaccgta

SEQ ID NO: 4907650 - DNA, 25 bp, Homo sapien
cagatctgactgtaaagctcgcgtt

SEQ ID NO: 4907651 - DNA, 25 bp, Homo sapien
cacaagtattgagcgtttaccccaa

SEQ ID NO: 4907652 - DNA, 25 bp, Homo sapien
ctgctttggaggttgaacgtccttc

SEQ ID NO: 4907653 - DNA, 25 bp, Homo sapien
ctttggaggttgaacgtccttctgg

SEQ ID NO: 4907654 - DNA, 25 bp, Homo sapien
gctttggaggttgaacgtccttctg

SEQ ID NO: 4907655 - DNA, 25 bp, Homo sapien
gctgctttggaggttgaacgtcctt

SEQ ID NO: 4907656 - DNA, 25 bp, Homo sapien
caaggacgaacccaggtctactgac

SEQ ID NO: 4907657 - DNA, 25 bp, Homo sapien
tatactcaatctcaagggtctgctg

SEQ ID NO: 4907658 - DNA, 25 bp, Homo sapien
tgttagtaaacagaagaccaaggac

SEQ ID NO: 4907659 - DNA, 25 bp, Homo sapien
gttgtaggccatgcatatttccagg

SEQ ID NO: 4907660 - DNA, 25 bp, Homo sapien
acattctctgcatctgattggatcc

SEQ ID NO: 4907661 - DNA, 25 bp, Homo sapien
attctctgcatctgattggatccct

SEQ ID NO: 4907662 - DNA, 25 bp, Homo sapien
cattctctgcatctgattggatccc

SEQ ID NO: 4907663 - DNA, 25 bp, Homo sapien
actcatatttagaaagcatcgttaa

SEQ ID NO: 4907664 - DNA, 25 bp, Homo sapien
catttcctcctaactcatatttaga

SEQ ID NO: 4907665 - DNA, 25 bp, Homo sapien
tctcctcgtgaactttagcttgtcc

SEQ ID NO: 4907666 - DNA, 25 bp, Homo sapien
taatccgtcgatttacaatgtgtgt

SEQ ID NO: 4907667 - DNA, 25 bp, Homo sapien
gcttgtccataaactgaagctcaag

SEQ ID NO: 4907668 - DNA, 25 bp, Homo sapien
gggcctactctcagtatttgaacaa

SEQ ID NO: 4907669 - DNA, 25 bp, Homo sapien
ttggaatgtatctcccgaagataag

SEQ ID NO: 4907670 - DNA, 25 bp, Homo sapien
ctgtttgaggtttcaggagttcact

SEQ ID NO: 4907671 - DNA, 25 bp, Homo sapien
tttgaggtttcaggagttcactggg

SEQ ID NO: 4907672 - DNA, 25 bp, Homo sapien
gggccttggaatgtatctcccgaag

SEQ ID NO: 4907673 - DNA, 25 bp, Homo sapien
agcaactttaccctttattgtgtgt

SEQ ID NO: 4907674 - DNA, 25 bp, Homo sapien
aacaaggactgcagatgattctagg

SEQ ID NO: 4907675 - DNA, 25 bp, Homo sapien
tacaaaatattagtagatacccaaa

SEQ ID NO: 4907676 - DNA, 25 bp, Homo sapien
tctaaaataggtgagtactgtacaa

SEQ ID NO: 4907677 - DNA, 25 bp, Homo sapien
gggaagtcgcggccgccgcaccggc

SEQ ID NO: 4907678 - DNA, 25 bp, Homo sapien
gaagtcgcggccgccgcaccggctc

SEQ ID NO: 4907679 - DNA, 25 bp, Homo sapien
cgcgtcggggaagtcgcggccgccg

SEQ ID NO: 4907680 - DNA, 25 bp, Homo sapien
cgtcggggaagtcgcggccgccgca

SEQ ID NO: 4907681 - DNA, 25 bp, Homo sapien
gccggcaggtacacacaggcactca

SEQ ID NO: 4907682 - DNA, 25 bp, Homo sapien
ccggcaggtacacacaggcactcac

SEQ ID NO: 4907683 - DNA, 25 bp, Homo sapien
cagttcaaactgctcgggcctacta

SEQ ID NO: 4907684 - DNA, 25 bp, Homo sapien
ggtttctatgtacagcggcgccagg

SEQ ID NO: 4907685 - DNA, 25 bp, Homo sapien
tcggagaccgaaaagaaacggcatc

SEQ ID NO: 4907686 - DNA, 25 bp, Homo sapien
ctactaacgcgaaaagctgggtctc

SEQ ID NO: 4907687 - DNA, 25 bp, Homo sapien
gatcctagctggatttaatttctcc

SEQ ID NO: 4907688 - DNA, 25 bp, Homo sapien
tcccatatttcgtagccagcttagt

SEQ ID NO: 4907689 - DNA, 25 bp, Homo sapien
tacaatactttagaactcttccacc

SEQ ID NO: 4907690 - DNA, 25 bp, Homo sapien
tgtccatctcaagttccaaaaaaca

SEQ ID NO: 4907691 - DNA, 25 bp, Homo sapien
gagtacaacgaggaggtggatctat

SEQ ID NO: 4907692 - DNA, 25 bp, Homo sapien
agaaagagtacaacgaggaggtgga

SEQ ID NO: 4907693 - DNA, 25 bp, Homo sapien
aaagagtacaacgaggaggtggatc

SEQ ID NO: 4907694 - DNA, 25 bp, Homo sapien
agtacaacgaggaggtggatctata

SEQ ID NO: 4907695 - DNA, 25 bp, Homo sapien
tttgttgttccaaagccccacaatg

SEQ ID NO: 4907696 - DNA, 25 bp, Homo sapien
ttgttgttccaaagccccacaatga

SEQ ID NO: 4907697 - DNA, 25 bp, Homo sapien
atgatggataatctttggtggtcat

SEQ ID NO: 4907698 - DNA, 25 bp, Homo sapien
gctggtttatctttcctcaaagctc

SEQ ID NO: 4907699 - DNA, 25 bp, Homo sapien
ttctgtaagttcaggataatatcct

SEQ ID NO: 4907700 - DNA, 25 bp, Homo sapien
caggataatatccttcctcaccaga

SEQ ID NO: 4907701 - DNA, 25 bp, Homo sapien
ttatatcaccatcaattttttccca

SEQ ID NO: 4907702 - DNA, 25 bp, Homo sapien
gtttcatgaaagtgcattttatctt

SEQ ID NO: 4907703 - DNA, 25 bp, Homo sapien
cattgctggaaatgtctcagtttca

SEQ ID NO: 4907704 - DNA, 25 bp, Homo sapien
gaggcaaattatctttcattgctgg

SEQ ID NO: 4907705 - DNA, 25 bp, Homo sapien
aagacagctgtttgaaccacgaact

SEQ ID NO: 4907706 - DNA, 25 bp, Homo sapien
tgcaatgatagtaatctgatttgga

SEQ ID NO: 4907707 - DNA, 25 bp, Homo sapien
gatgaggggattcctatgccctttc

SEQ ID NO: 4907708 - DNA, 25 bp, Homo sapien
cagcttatataactaaactgatgga

SEQ ID NO: 4907709 - DNA, 25 bp, Homo sapien
cagaagtttgcaatgatagtaatct

SEQ ID NO: 4907710 - DNA, 25 bp, Homo sapien
ccattccgcgtaatcccttggagtt

SEQ ID NO: 4907711 - DNA, 25 bp, Homo sapien
ttatcccattccgcgtaatcccttg

SEQ ID NO: 4907712 - DNA, 25 bp, Homo sapien
tcccattccgcgtaatcccttggag

SEQ ID NO: 4907713 - DNA, 25 bp, Homo sapien
cattccgcgtaatcccttggagttt

SEQ ID NO: 4907714 - DNA, 25 bp, Homo sapien
ctcaattttagacaagtgtgacttg

SEQ ID NO: 4907715 - DNA, 25 bp, Homo sapien
agtgtgacttgtctattaccgtctt

SEQ ID NO: 4907716 - DNA, 25 bp, Homo sapien
tattcttgtctcaattttagacaag

SEQ ID NO: 4907717 - DNA, 25 bp, Homo sapien
tgtctattaccgtcttttctttgta

SEQ ID NO: 4907718 - DNA, 25 bp, Homo sapien
ctttctccttttcacgagtggcaag

SEQ ID NO: 4907719 - DNA, 25 bp, Homo sapien
taatctcctgagttgaaagcttcat

SEQ ID NO: 4907720 - DNA, 25 bp, Homo sapien
tttcacgagtggcaagaaaatcctt

SEQ ID NO: 4907721 - DNA, 25 bp, Homo sapien
ggtataatacatcactgcttcttca

SEQ ID NO: 4907722 - DNA, 25 bp, Homo sapien
aacaccactgtactcagaccagcca

SEQ ID NO: 4907723 - DNA, 25 bp, Homo sapien
cttgagctcgattgttataggcaac

SEQ ID NO: 4907724 - DNA, 25 bp, Homo sapien
ttcacaatcctgaaaagcactattc

SEQ ID NO: 4907725 - DNA, 25 bp, Homo sapien
tataggcaactacagtgggaagcgc

SEQ ID NO: 4907726 - DNA, 25 bp, Homo sapien
taactccaagaccttttcacaatcc

SEQ ID NO: 4907727 - DNA, 25 bp, Homo sapien
agttatgttttttaatatgtggcat

SEQ ID NO: 4907728 - DNA, 25 bp, Homo sapien
aagttatgttttttaatatgtggca

SEQ ID NO: 4907729 - DNA, 25 bp, Homo sapien
gcttcccggagcttgttttgatgtt

SEQ ID NO: 4907730 - DNA, 25 bp, Homo sapien
tgatgtttatatgtagtagcacgac

SEQ ID NO: 4907731 - DNA, 25 bp, Homo sapien
cattatcaggctcaacatctagtac

SEQ ID NO: 4907732 - DNA, 25 bp, Homo sapien
tatgtagtagcacgacgcagaagag

SEQ ID NO: 4907733 - DNA, 25 bp, Homo sapien
tcatcttcggagttttctatttcct

SEQ ID NO: 4907734 - DNA, 25 bp, Homo sapien
ttcatcttcggagttttctatttcc

SEQ ID NO: 4907735 - DNA, 25 bp, Homo sapien
tctcagatgcagcttcagaattttt

SEQ ID NO: 4907736 - DNA, 25 bp, Homo sapien
cttcatcttcggagttttctatttc

SEQ ID NO: 4907737 - DNA, 25 bp, Homo sapien
aaactgagcactagaaaaaggtgac

SEQ ID NO: 4907738 - DNA, 25 bp, Homo sapien
tctgtacgaatagaaaaattgagcc

SEQ ID NO: 4907739 - DNA, 25 bp, Homo sapien
taactggcaaatggtctgtgtcaaa

SEQ ID NO: 4907740 - DNA, 25 bp, Homo sapien
aaagatgagcgaaactggcttgtga

SEQ ID NO: 4907741 - DNA, 25 bp, Homo sapien
tgaaaccgtacatgtattagaactg

SEQ ID NO: 4907742 - DNA, 25 bp, Homo sapien
catctcacttcagataagatttaaa

SEQ ID NO: 4907743 - DNA, 25 bp, Homo sapien
cctaagaagatttgctgccagatcg

SEQ ID NO: 4907744 - DNA, 25 bp, Homo sapien
tatgcaaaagctcaatataaaccct

SEQ ID NO: 4907745 - DNA, 25 bp, Homo sapien
tattgtaaggagttcagaatagcca

SEQ ID NO: 4907746 - DNA, 25 bp, Homo sapien
caatcctatcaaaactttttgcaga

SEQ ID NO: 4907747 - DNA, 25 bp, Homo sapien
aatctacagatgcaacacaatccta

SEQ ID NO: 4907748 - DNA, 25 bp, Homo sapien
cctgtaatcataggaagacttattg

SEQ ID NO: 4907749 - DNA, 25 bp, Homo sapien
cttaagattgaaatggctctgaaca

SEQ ID NO: 4907750 - DNA, 25 bp, Homo sapien
gaaatggctctgaacaactttgata

SEQ ID NO: 4907751 - DNA, 25 bp, Homo sapien
aatggctctgaacaactttgatagt

SEQ ID NO: 4907752 - DNA, 25 bp, Homo sapien
tggctctgaacaactttgatagtct

SEQ ID NO: 4907753 - DNA, 25 bp, Homo sapien
ctgaggactcggctcccgggtttcg

SEQ ID NO: 4907754 - DNA, 25 bp, Homo sapien
cctgtggctgaaaaccggcatctca

SEQ ID NO: 4907755 - DNA, 25 bp, Homo sapien
ctaactgtttaagcgctgaagggcc

SEQ ID NO: 4907756 - DNA, 25 bp, Homo sapien
ttcggccagaaacgtaccctgtctc

SEQ ID NO: 4907757 - DNA, 25 bp, Homo sapien
ccttgccggccgcttgccgccttcg

SEQ ID NO: 4907758 - DNA, 25 bp, Homo sapien
ccgtgggctccgcttgtccgcgccg

SEQ ID NO: 4907759 - DNA, 25 bp, Homo sapien
atgttgcccatgacgcacggctggg

SEQ ID NO: 4907760 - DNA, 25 bp, Homo sapien
ttcggctttgccagtcagcttcttc

SEQ ID NO: 4907761 - DNA, 25 bp, Homo sapien
gattgccgccgagtacttgccggcc

SEQ ID NO: 4907762 - DNA, 25 bp, Homo sapien
ttcggaacagctcgttgccctggct

SEQ ID NO: 4907763 - DNA, 25 bp, Homo sapien
gcgaactgcccgcttcggaacagct

SEQ ID NO: 4907764 - DNA, 25 bp, Homo sapien
tgctggctccaggagcgcgattgcc

SEQ ID NO: 4907765 - DNA, 25 bp, Homo sapien
ctctatttgaatataagatacttag

SEQ ID NO: 4907766 - DNA, 25 bp, Homo sapien
tcttttaggtaacatgctgctctat

SEQ ID NO: 4907767 - DNA, 25 bp, Homo sapien
tttccttcttttaggtaacatgctg

SEQ ID NO: 4907768 - DNA, 25 bp, Homo sapien
tataagatacttagatcatctgcaa

SEQ ID NO: 4907769 - DNA, 25 bp, Homo sapien
tatttatgtagctatttaccatcca

SEQ ID NO: 4907770 - DNA, 25 bp, Homo sapien
tacgaagctgtataagacagggttc

SEQ ID NO: 4907771 - DNA, 25 bp, Homo sapien
tccaggcaggtaacttattgagtac

SEQ ID NO: 4907772 - DNA, 25 bp, Homo sapien
ccacgggtgactattatgcttcgag

SEQ ID NO: 4907773 - DNA, 25 bp, Homo sapien
taggtcggtctctacggaggtcagc

SEQ ID NO: 4907774 - DNA, 25 bp, Homo sapien
ggtaggccagctatcaaagaaaaca

SEQ ID NO: 4907775 - DNA, 25 bp, Homo sapien
aagaaaacatctgagtaggtcggtc

SEQ ID NO: 4907776 - DNA, 25 bp, Homo sapien
cacttgagctgaaaagatgttcaca

SEQ ID NO: 4907777 - DNA, 25 bp, Homo sapien
ggatctgtcacctgtaccactgcct

SEQ ID NO: 4907778 - DNA, 25 bp, Homo sapien
tctatgagcagagtcacaaccatgt

SEQ ID NO: 4907779 - DNA, 25 bp, Homo sapien
gaaggaactcttgagtcatttgcca

SEQ ID NO: 4907780 - DNA, 25 bp, Homo sapien
gggagcccttctggcatatcataga

SEQ ID NO: 4907781 - DNA, 25 bp, Homo sapien
tcagaagaggtttcatagagaatgg

SEQ ID NO: 4907782 - DNA, 25 bp, Homo sapien
ccgcctcagaagaggtttcatagag

SEQ ID NO: 4907783 - DNA, 25 bp, Homo sapien
cgcccgcctcagaagaggtttcata

SEQ ID NO: 4907784 - DNA, 25 bp, Homo sapien
gcctcagaagaggtttcatagagaa

SEQ ID NO: 4907785 - DNA, 25 bp, Homo sapien
taacactgtcatttgctagctggag

SEQ ID NO: 4907786 - DNA, 25 bp, Homo sapien
ggagtccacagtctatctgcaacac

SEQ ID NO: 4907787 - DNA, 25 bp, Homo sapien
aatccacataagctttcccatactg

SEQ ID NO: 4907788 - DNA, 25 bp, Homo sapien
tactgctctagagtttcataggcca

SEQ ID NO: 4907789 - DNA, 25 bp, Homo sapien
gaagttacactttaagcaaatggga

SEQ ID NO: 4907790 - DNA, 25 bp, Homo sapien
gataagtgtctatttacaagggcat

SEQ ID NO: 4907791 - DNA, 25 bp, Homo sapien
tttaccttcccattctcacgctggg

SEQ ID NO: 4907792 - DNA, 25 bp, Homo sapien
tccactgacagatatggtgccaatg

SEQ ID NO: 4907793 - DNA, 25 bp, Homo sapien
gaagatcttactttctccagctcta

SEQ ID NO: 4907794 - DNA, 25 bp, Homo sapien
tgaaaactactaagccgaggatggg

SEQ ID NO: 4907795 - DNA, 25 bp, Homo sapien
tctaacactgtgagaagatcttact

SEQ ID NO: 4907796 - DNA, 25 bp, Homo sapien
ctctgccagatacttccggtgtctc

SEQ ID NO: 4907797 - DNA, 25 bp, Homo sapien
agcttctcccgccaatttggtccat

SEQ ID NO: 4907798 - DNA, 25 bp, Homo sapien
agcttgcagtggcacagaagcaggc

SEQ ID NO: 4907799 - DNA, 25 bp, Homo sapien
cacagcaggaataggtgacagcttc

SEQ ID NO: 4907800 - DNA, 25 bp, Homo sapien
ccagctccattaaaattcttgatag

SEQ ID NO: 4907801 - DNA, 25 bp, Homo sapien
tttgagatcatctcttttgccggat

SEQ ID NO: 4907802 - DNA, 25 bp, Homo sapien
ttgagatcatctcttttgccggatg

SEQ ID NO: 4907803 - DNA, 25 bp, Homo sapien
tgtccctctgcacaaattgtataaa

SEQ ID NO: 4907804 - DNA, 25 bp, Homo sapien
tgtaaacaataatcttatttgtccc

SEQ ID NO: 4907805 - DNA, 25 bp, Homo sapien
tcaaaagatctcacatagcctaggc

SEQ ID NO: 4907806 - DNA, 25 bp, Homo sapien
tagcctaggctactcacacctgtta

SEQ ID NO: 4907807 - DNA, 25 bp, Homo sapien
tttgtcatttacacattgatttcct

SEQ ID NO: 4907808 - DNA, 25 bp, Homo sapien
tgagggcgtctttatagtttttgtc

SEQ ID NO: 4907809 - DNA, 25 bp, Homo sapien
tatagtttttgtcatttacacattg

SEQ ID NO: 4907810 - DNA, 25 bp, Homo sapien
gtcatttacacattgatttccttct

SEQ ID NO: 4907811 - DNA, 25 bp, Homo sapien
tattgttaatctttaagcattcgct

SEQ ID NO: 4907812 - DNA, 25 bp, Homo sapien
attgttaatctttaagcattcgctg

SEQ ID NO: 4907813 - DNA, 25 bp, Homo sapien
aaggaaaaaggatctagaccctcag

SEQ ID NO: 4907814 - DNA, 25 bp, Homo sapien
gagaggatggaatggcctctagagt

SEQ ID NO: 4907815 - DNA, 25 bp, Homo sapien
ggaaaaaggatctagaccctcagaa

SEQ ID NO: 4907816 - DNA, 25 bp, Homo sapien
gcctctagagtacgtagaaaggaaa

SEQ ID NO: 4907817 - DNA, 25 bp, Homo sapien
ttgattcaattatggcactgggcat

SEQ ID NO: 4907818 - DNA, 25 bp, Homo sapien
cactgggcatacaaccgcaaacaaa

SEQ ID NO: 4907819 - DNA, 25 bp, Homo sapien
gaaaatagctcaatatgtctgttgc

SEQ ID NO: 4907820 - DNA, 25 bp, Homo sapien
tataccactgcggtttccattgaaa

SEQ ID NO: 4907821 - DNA, 25 bp, Homo sapien
ttcccatcagctagctgaagtgcct

SEQ ID NO: 4907822 - DNA, 25 bp, Homo sapien
cctttatgagccagagctcgtctat

SEQ ID NO: 4907823 - DNA, 25 bp, Homo sapien
gctcgtctatagaaggctttcacgt

SEQ ID NO: 4907824 - DNA, 25 bp, Homo sapien
ccatcagctagctgaagtgcctgat

SEQ ID NO: 4907825 - DNA, 25 bp, Homo sapien
aagcgttctaggcagggagccatac

SEQ ID NO: 4907826 - DNA, 25 bp, Homo sapien
tatttatatcctaagcgttctaggc

SEQ ID NO: 4907827 - DNA, 25 bp, Homo sapien
tatatcctaagcgttctaggcaggg

SEQ ID NO: 4907828 - DNA, 25 bp, Homo sapien
gacactgtatttatatcctaagcgt

SEQ ID NO: 4907829 - DNA, 25 bp, Homo sapien
gcctcaataatacttggatctagta

SEQ ID NO: 4907830 - DNA, 25 bp, Homo sapien
tccatctttgcctcaataatacttg

SEQ ID NO: 4907831 - DNA, 25 bp, Homo sapien
taatacttggatctagtaggataac

SEQ ID NO: 4907832 - DNA, 25 bp, Homo sapien
tggatctagtaggataactttattg

SEQ ID NO: 4907833 - DNA, 25 bp, Homo sapien
tgaatggtgctgtcttatccttaag

SEQ ID NO: 4907834 - DNA, 25 bp, Homo sapien
ctttgttgaatggtgctgtcttatc

SEQ ID NO: 4907835 - DNA, 25 bp, Homo sapien
gaatggtgctgtcttatccttaaga

SEQ ID NO: 4907836 - DNA, 25 bp, Homo sapien
tgttgaatggtgctgtcttatcctt

SEQ ID NO: 4907837 - DNA, 25 bp, Homo sapien
gcaaggcatcccatggagacctccc

SEQ ID NO: 4907838 - DNA, 25 bp, Homo sapien
cttggctatcggaagtttctcaggg

SEQ ID NO: 4907839 - DNA, 25 bp, Homo sapien
aaagatgctgatacaccaatgaggg

SEQ ID NO: 4907840 - DNA, 25 bp, Homo sapien
caaatcttttggtgcagtgatggct

SEQ ID NO: 4907841 - DNA, 25 bp, Homo sapien
tactgagagcatttataatctgacc

SEQ ID NO: 4907842 - DNA, 25 bp, Homo sapien
ggctaaaagatgtgcacaggcttct

SEQ ID NO: 4907843 - DNA, 25 bp, Homo sapien
tggtgtgtccgaaaggtcctcaaac

SEQ ID NO: 4907844 - DNA, 25 bp, Homo sapien
tggcccttgctaattagtgtcaaca

SEQ ID NO: 4907845 - DNA, 25 bp, Homo sapien
ttaaagctcatactgcctttttagg

SEQ ID NO: 4907846 - DNA, 25 bp, Homo sapien
tcaaacagctgttcaattagctcct

SEQ ID NO: 4907847 - DNA, 25 bp, Homo sapien
ctaggccaagttttatccatgcaac

SEQ ID NO: 4907848 - DNA, 25 bp, Homo sapien
cctggaacacatacatgcatggaag

SEQ ID NO: 4907849 - DNA, 25 bp, Homo sapien
gaggactccttcatagcccaaagaa

SEQ ID NO: 4907850 - DNA, 25 bp, Homo sapien
gacccagtcaacaaaggagctttca

SEQ ID NO: 4907851 - DNA, 25 bp, Homo sapien
aactcaagtaggtggccttatcagg

SEQ ID NO: 4907852 - DNA, 25 bp, Homo sapien
tcctggcaggttcttgaaaaactca

SEQ ID NO: 4907853 - DNA, 25 bp, Homo sapien
ccaagggatagcatgtatcactacc

SEQ ID NO: 4907854 - DNA, 25 bp, Homo sapien
tacaaggtcgtacaactgttactaa

SEQ ID NO: 4907855 - DNA, 25 bp, Homo sapien
taccactgtacaaccgtgtttggag

SEQ ID NO: 4907856 - DNA, 25 bp, Homo sapien
tgacataagcagaagttggccaaaa

SEQ ID NO: 4907857 - DNA, 25 bp, Homo sapien
caaagcacggtgcagaacttgtacc

SEQ ID NO: 4907858 - DNA, 25 bp, Homo sapien
gctggttgaactacatgtgactact

SEQ ID NO: 4907859 - DNA, 25 bp, Homo sapien
taaatgagacgagagaggacatgga

SEQ ID NO: 4907860 - DNA, 25 bp, Homo sapien
tagttgttctgacctagaaagcatg

SEQ ID NO: 4907861 - DNA, 25 bp, Homo sapien
cagtgattatcacacccgctttgct

SEQ ID NO: 4907862 - DNA, 25 bp, Homo sapien
tgttagaacaacaaagcacgaactc

SEQ ID NO: 4907863 - DNA, 25 bp, Homo sapien
cgaagtcatgctggcggttcatcca

SEQ ID NO: 4907864 - DNA, 25 bp, Homo sapien
tgagtcaaagccatccaaattcagg

SEQ ID NO: 4907865 - DNA, 25 bp, Homo sapien
caccaagtggtccaaagaagcaaca

SEQ ID NO: 4907866 - DNA, 25 bp, Homo sapien
aggtaaatctagtgccaccaagtgg

SEQ ID NO: 4907867 - DNA, 25 bp, Homo sapien
ctctctgaaatcatggaggaattta

SEQ ID NO: 4907868 - DNA, 25 bp, Homo sapien
ggctctattcccactgcttctagtg

SEQ ID NO: 4907869 - DNA, 25 bp, Homo sapien
taccttatataatgtcctctctgaa

SEQ ID NO: 4907870 - DNA, 25 bp, Homo sapien
gcttctagtggactagcctgaaaaa

SEQ ID NO: 4907871 - DNA, 25 bp, Homo sapien
gatctgccccaactatgtctctgag

SEQ ID NO: 4907872 - DNA, 25 bp, Homo sapien
tagtccatagtgcagccatagtcac

SEQ ID NO: 4907873 - DNA, 25 bp, Homo sapien
ttatcatagcccaaaaggccccaca

SEQ ID NO: 4907874 - DNA, 25 bp, Homo sapien
tagtcacatgtctaaaccctgtcag

SEQ ID NO: 4907875 - DNA, 25 bp, Homo sapien
catctctagtggtgtgtgccagcta

SEQ ID NO: 4907876 - DNA, 25 bp, Homo sapien
gttctaaaacttcaacagcctgggc

SEQ ID NO: 4907877 - DNA, 25 bp, Homo sapien
tggtggtgtgcatctctagtggtgt

SEQ ID NO: 4907878 - DNA, 25 bp, Homo sapien
tgagctcagaagttctaaaacttca

SEQ ID NO: 4907879 - DNA, 25 bp, Homo sapien
gcttttagccgaacaataacattgt

SEQ ID NO: 4907880 - DNA, 25 bp, Homo sapien
ttagagccaagtctagcagctagag

SEQ ID NO: 4907881 - DNA, 25 bp, Homo sapien
tcttcctcaacgtagtcaccatggg

SEQ ID NO: 4907882 - DNA, 25 bp, Homo sapien
gctagagtatcataccaggttggat

SEQ ID NO: 4907883 - DNA, 25 bp, Homo sapien
tgaacacaataggtagggctaaagc

SEQ ID NO: 4907884 - DNA, 25 bp, Homo sapien
gacagtaaattcagggacacaaacc

SEQ ID NO: 4907885 - DNA, 25 bp, Homo sapien
cctttggccaggagatattaagaca

SEQ ID NO: 4907886 - DNA, 25 bp, Homo sapien
gggaaacatgccaaaccaactggaa

SEQ ID NO: 4907887 - DNA, 25 bp, Homo sapien
catgagtttacatcggcaaatgggt

SEQ ID NO: 4907888 - DNA, 25 bp, Homo sapien
tgtgagcttgccttcagtcaaaaag

SEQ ID NO: 4907889 - DNA, 25 bp, Homo sapien
gatagcagtcttctgtaaatcgaac

SEQ ID NO: 4907890 - DNA, 25 bp, Homo sapien
taatgaagggctgtgtgtaaacact

SEQ ID NO: 4907891 - DNA, 25 bp, Homo sapien
ctcataaggaataatcaactttaaa

SEQ ID NO: 4907892 - DNA, 25 bp, Homo sapien
cataaggaataatcaactttaaaat

SEQ ID NO: 4907893 - DNA, 25 bp, Homo sapien
aaattttttcagtggtaattgccat

SEQ ID NO: 4907894 - DNA, 25 bp, Homo sapien
tcataaggaataatcaactttaaaa

SEQ ID NO: 4907895 - DNA, 25 bp, Homo sapien
tcctaatggtgtattgtttgtgctt

SEQ ID NO: 4907896 - DNA, 25 bp, Homo sapien
tctctgggcacttgatcatacctgg

SEQ ID NO: 4907897 - DNA, 25 bp, Homo sapien
tctgggcacttgatcatacctggca

SEQ ID NO: 4907898 - DNA, 25 bp, Homo sapien
ctgggcacttgatcatacctggcat

SEQ ID NO: 4907899 - DNA, 25 bp, Homo sapien
tgtctctgggcacttgatcatacct

SEQ ID NO: 4907900 - DNA, 25 bp, Homo sapien
gaaatgtccattgtcttaagccaac

SEQ ID NO: 4907901 - DNA, 25 bp, Homo sapien
ttggagtgatgtaaccgcaagccga

SEQ ID NO: 4907902 - DNA, 25 bp, Homo sapien
gccccaggaaactactatgcagtca

SEQ ID NO: 4907903 - DNA, 25 bp, Homo sapien
gctggaagagtcaaaggacacattc

SEQ ID NO: 4907904 - DNA, 25 bp, Homo sapien
tgcacaaacgttaaatatcctttag

SEQ ID NO: 4907905 - DNA, 25 bp, Homo sapien
gaaccatattttagtgtgttgcatg

SEQ ID NO: 4907906 - DNA, 25 bp, Homo sapien
tagtgtgttgcatggtaaccccaca

SEQ ID NO: 4907907 - DNA, 25 bp, Homo sapien
aattatgcacaaacgttaaatatcc

SEQ ID NO: 4907908 - DNA, 25 bp, Homo sapien
tagaatcaggagaggcgactaggtt

SEQ ID NO: 4907909 - DNA, 25 bp, Homo sapien
tagtaactagtcagagcaaggctca

SEQ ID NO: 4907910 - DNA, 25 bp, Homo sapien
tgggctactcagacaagactgttat

SEQ ID NO: 4907911 - DNA, 25 bp, Homo sapien
aattatgcctttgaaacactctggg

SEQ ID NO: 4907912 - DNA, 25 bp, Homo sapien
cagaaatggattcggaagtccggtg

SEQ ID NO: 4907913 - DNA, 25 bp, Homo sapien
ctggccgggccgcagccctagcgcc

SEQ ID NO: 4907914 - DNA, 25 bp, Homo sapien
ggacagaaatggattcggaagtccg

SEQ ID NO: 4907915 - DNA, 25 bp, Homo sapien
tgggaaaggcgtctcctccagtgtc

SEQ ID NO: 4907916 - DNA, 25 bp, Homo sapien
ggaggagcttgcgccccggagcggg

SEQ ID NO: 4907917 - DNA, 25 bp, Homo sapien
ccggaggagcttgcgccccggagcg

SEQ ID NO: 4907918 - DNA, 25 bp, Homo sapien
cggaggagcttgcgccccggagcgg

SEQ ID NO: 4907919 - DNA, 25 bp, Homo sapien
agcgggcccggtgggcgtgacgcca

SEQ ID NO: 4907920 - DNA, 25 bp, Homo sapien
gcagcgggcccggtgggcgtgacgc

SEQ ID NO: 4907921 - DNA, 25 bp, Homo sapien
gtgcgcaagggaacagccgcgtcca

SEQ ID NO: 4907922 - DNA, 25 bp, Homo sapien
cgcaagggaacagccgcgtccagag

SEQ ID NO: 4907923 - DNA, 25 bp, Homo sapien
agtctggcaactcccttcaaccggg

SEQ ID NO: 4907924 - DNA, 25 bp, Homo sapien
tgccaagagccagagtcgccgagtc

SEQ ID NO: 4907925 - DNA, 25 bp, Homo sapien
ccttggaggagacgctctctgggcc

SEQ ID NO: 4907926 - DNA, 25 bp, Homo sapien
aataatgccgggcaaactgccaaga

SEQ ID NO: 4907927 - DNA, 25 bp, Homo sapien
tgcagacgcacagggtgctgccgtc

SEQ ID NO: 4907928 - DNA, 25 bp, Homo sapien
gaaaggacatttcctcgccgagagc

SEQ ID NO: 4907929 - DNA, 25 bp, Homo sapien
agagctgcaacatcccggcacttct

SEQ ID NO: 4907930 - DNA, 25 bp, Homo sapien
ctcggcctgccaatctagcaggtga

SEQ ID NO: 4907931 - DNA, 25 bp, Homo sapien
gcagtccggaatctttacgtgcggg

SEQ ID NO: 4907932 - DNA, 25 bp, Homo sapien
cagactcattgtgtttggccagcag

SEQ ID NO: 4907933 - DNA, 25 bp, Homo sapien
caggacgcctttgcattgttgagaa

SEQ ID NO: 4907934 - DNA, 25 bp, Homo sapien
aattccgaagtctctgggcgtggca

SEQ ID NO: 4907935 - DNA, 25 bp, Homo sapien
ctttggaatttgcaaactggcagct

SEQ ID NO: 4907936 - DNA, 25 bp, Homo sapien
tgacttcctcgtcctttctttggaa

SEQ ID NO: 4907937 - DNA, 25 bp, Homo sapien
ttctttggaatttgcaaactggcag

SEQ ID NO: 4907938 - DNA, 25 bp, Homo sapien
ctaactgacttcctcgtcctttctt

SEQ ID NO: 4907939 - DNA, 25 bp, Homo sapien
gagccaggacgtcatcgggaatcca

SEQ ID NO: 4907940 - DNA, 25 bp, Homo sapien
tcgggagttcacctcagcgatgagt

SEQ ID NO: 4907941 - DNA, 25 bp, Homo sapien
ggttacctcaggacttcagcatcgg

SEQ ID NO: 4907942 - DNA, 25 bp, Homo sapien
ggttccgaggaacagctcaagttac

SEQ ID NO: 4907943 - DNA, 25 bp, Homo sapien
tcttaattttctgctgtgcgtgacc

SEQ ID NO: 4907944 - DNA, 25 bp, Homo sapien
taattttctgctgtgcgtgacctga

SEQ ID NO: 4907945 - DNA, 25 bp, Homo sapien
ctgtgcgtgacctgattttctctgc

SEQ ID NO: 4907946 - DNA, 25 bp, Homo sapien
tctgctgtgcgtgacctgattttct

SEQ ID NO: 4907947 - DNA, 25 bp, Homo sapien
tgagctagcatcagcttgactgtgt

SEQ ID NO: 4907948 - DNA, 25 bp, Homo sapien
gctgggtgctcccacatatatgagc

SEQ ID NO: 4907949 - DNA, 25 bp, Homo sapien
gaatgaccctcatatgcagctcagt

SEQ ID NO: 4907950 - DNA, 25 bp, Homo sapien
tagttacccaattccagtagttctc

SEQ ID NO: 4907951 - DNA, 25 bp, Homo sapien
aggaacaaatgactctcgttcaggc

SEQ ID NO: 4907952 - DNA, 25 bp, Homo sapien
tcctctctttgatcaacatcctggc

SEQ ID NO: 4907953 - DNA, 25 bp, Homo sapien
tcgttcaggctgttcctctctttga

SEQ ID NO: 4907954 - DNA, 25 bp, Homo sapien
tctctttgatcaacatcctggcagg

SEQ ID NO: 4907955 - DNA, 25 bp, Homo sapien
tatgggaaagaggtagtgagactaa

SEQ ID NO: 4907956 - DNA, 25 bp, Homo sapien
taatgggcagaatcagggtcattcc

SEQ ID NO: 4907957 - DNA, 25 bp, Homo sapien
taagctgtcgagtcatatgggaaag

SEQ ID NO: 4907958 - DNA, 25 bp, Homo sapien
tctacttcctcccagaggtaagctg

SEQ ID NO: 4907959 - DNA, 25 bp, Homo sapien
gaggttaatgagcattttcacaaga

SEQ ID NO: 4907960 - DNA, 25 bp, Homo sapien
ggtcaaatccaagatgggtgttcct

SEQ ID NO: 4907961 - DNA, 25 bp, Homo sapien
caatatggagcttccaagattgccc

SEQ ID NO: 4907962 - DNA, 25 bp, Homo sapien
cccaaatatgtaagtgttttaacat

SEQ ID NO: 4907963 - DNA, 25 bp, Homo sapien
gagaaattctgctagacattctgct

SEQ ID NO: 4907964 - DNA, 25 bp, Homo sapien
tagacattctgctaattgcaactga

SEQ ID NO: 4907965 - DNA, 25 bp, Homo sapien
tcttctgaagcacggttcactttgg

SEQ ID NO: 4907966 - DNA, 25 bp, Homo sapien
tgtagcctgtgataaccaaacccac

SEQ ID NO: 4907967 - DNA, 25 bp, Homo sapien
ccagtggccactctgtaactggtgc

SEQ ID NO: 4907968 - DNA, 25 bp, Homo sapien
accagtggccactctgtaactggtg

SEQ ID NO: 4907969 - DNA, 25 bp, Homo sapien
cagtggccactctgtaactggtgct

SEQ ID NO: 4907970 - DNA, 25 bp, Homo sapien
cccctggtcaggtctttaatagtga

SEQ ID NO: 4907971 - DNA, 25 bp, Homo sapien
tccctctttagtgggagaggcccca

SEQ ID NO: 4907972 - DNA, 25 bp, Homo sapien
atgttttgccccgtacaggctccct

SEQ ID NO: 4907973 - DNA, 25 bp, Homo sapien
gctgggatactatgacccctggtca

SEQ ID NO: 4907974 - DNA, 25 bp, Homo sapien
tccggctgcgatgcttcatcactgt

SEQ ID NO: 4907975 - DNA, 25 bp, Homo sapien
gtccaaggtcagctcgcatggcatt

SEQ ID NO: 4907976 - DNA, 25 bp, Homo sapien
gtaggtctcggcacagatgaaggca

SEQ ID NO: 4907977 - DNA, 25 bp, Homo sapien
atgaaggcaagggtcgcaggtccaa

SEQ ID NO: 4907978 - DNA, 25 bp, Homo sapien
gcactgtcctggtggaggctctccc

SEQ ID NO: 4907979 - DNA, 25 bp, Homo sapien
tagcactgtcctggtggaggctctc

SEQ ID NO: 4907980 - DNA, 25 bp, Homo sapien
actgtcctggtggaggctctcccac

SEQ ID NO: 4907981 - DNA, 25 bp, Homo sapien
ctagcactgtcctggtggaggctct

SEQ ID NO: 4907982 - DNA, 25 bp, Homo sapien
tccagctttaaggataacaggaaaa

SEQ ID NO: 4907983 - DNA, 25 bp, Homo sapien
ggtttaggatcttatagacagaaga

SEQ ID NO: 4907984 - DNA, 25 bp, Homo sapien
cagaagataatctttgagctccagc

SEQ ID NO: 4907985 - DNA, 25 bp, Homo sapien
gccatcagggtttaggatcttatag

SEQ ID NO: 4907986 - DNA, 25 bp, Homo sapien
cacagagcctgaaccggcaccagct

SEQ ID NO: 4907987 - DNA, 25 bp, Homo sapien
acagagcctgaaccggcaccagctc

SEQ ID NO: 4907988 - DNA, 25 bp, Homo sapien
agagcctgaaccggcaccagctcca

SEQ ID NO: 4907989 - DNA, 25 bp, Homo sapien
agcctgaaccggcaccagctccact

SEQ ID NO: 4907990 - DNA, 25 bp, Homo sapien
gacatcagttccatagaggacagga

SEQ ID NO: 4907991 - DNA, 25 bp, Homo sapien
gaacgtggtctagatcccaaatgct

SEQ ID NO: 4907992 - DNA, 25 bp, Homo sapien
gaccattgtcttgagttgtgtgccc

SEQ ID NO: 4907993 - DNA, 25 bp, Homo sapien
caggattcagtaagtgagcggccca

SEQ ID NO: 4907994 - DNA, 25 bp, Homo sapien
gtaagtgaccggcaacatccaggac

SEQ ID NO: 4907995 - DNA, 25 bp, Homo sapien
tcagtactatctggacagccctagt

SEQ ID NO: 4907996 - DNA, 25 bp, Homo sapien
ctacagcggagaggtggaaggtgtc

SEQ ID NO: 4907997 - DNA, 25 bp, Homo sapien
gacacgcaggcacttggcaaatatc

SEQ ID NO: 4907998 - DNA, 25 bp, Homo sapien
tccagtttcagccaagaatttggtt

SEQ ID NO: 4907999 - DNA, 25 bp, Homo sapien
ggatccagtttcagccaagaatttg

SEQ ID NO: 4908000 - DNA, 25 bp, Homo sapien
tttcagccaagaatttggttgccat

SEQ ID NO: 4908001 - DNA, 25 bp, Homo sapien
cagtttcagccaagaatttggttgc

SEQ ID NO: 4908002 - DNA, 25 bp, Homo sapien
actcgttggtctgcaaaatgctttt

SEQ ID NO: 4908003 - DNA, 25 bp, Homo sapien
gatatttttgtcactgtggatcctc

SEQ ID NO: 4908004 - DNA, 25 bp, Homo sapien
tatttttgtcactgtggatcctcat

SEQ ID NO: 4908005 - DNA, 25 bp, Homo sapien
tttctgccagtttgatatttttgtc

SEQ ID NO: 4908006 - DNA, 25 bp, Homo sapien
atacagccaggtgtgaccctggagc

SEQ ID NO: 4908007 - DNA, 25 bp, Homo sapien
ccaggtgtgaccctggagccacacc

SEQ ID NO: 4908008 - DNA, 25 bp, Homo sapien
ataaccttgtggccaccggcaccat

SEQ ID NO: 4908009 - DNA, 25 bp, Homo sapien
tcataaccttgtggccaccggcacc

SEQ ID NO: 4908010 - DNA, 25 bp, Homo sapien
atcggaagcagactcccctcagtgt

SEQ ID NO: 4908011 - DNA, 25 bp, Homo sapien
cactggtacaccaagtcaacataca

SEQ ID NO: 4908012 - DNA, 25 bp, Homo sapien
gtcaacatacaccaatcggaagcag

SEQ ID NO: 4908013 - DNA, 25 bp, Homo sapien
ctcagtgtcgcaggaagattctgga

SEQ ID NO: 4908014 - DNA, 25 bp, Homo sapien
gctggcacacagattgagaggctca

SEQ ID NO: 4908015 - DNA, 25 bp, Homo sapien
ataaaccgcctaccgcctggacttg

SEQ ID NO: 4908016 - DNA, 25 bp, Homo sapien
ggctcagcacaaaacgcctcggttt

SEQ ID NO: 4908017 - DNA, 25 bp, Homo sapien
tctaacagttgctcaagaacgctgg

SEQ ID NO: 4908018 - DNA, 25 bp, Homo sapien
tgcctgggctcccacgctgccatcc

SEQ ID NO: 4908019 - DNA, 25 bp, Homo sapien
ggctcccacgctgccatccctgaga

SEQ ID NO: 4908020 - DNA, 25 bp, Homo sapien
gcctgggctcccacgctgccatccc

SEQ ID NO: 4908021 - DNA, 25 bp, Homo sapien
tgggctcccacgctgccatccctga

SEQ ID NO: 4908022 - DNA, 25 bp, Homo sapien
tggagtccaatgtcactgaatctga

SEQ ID NO: 4908023 - DNA, 25 bp, Homo sapien
taataagcctttgtcgactggcgac

SEQ ID NO: 4908024 - DNA, 25 bp, Homo sapien
gtttctgagagcaaggctacccttc

SEQ ID NO: 4908025 - DNA, 25 bp, Homo sapien
cctgtgggctgagctagaatcagtt

SEQ ID NO: 4908026 - DNA, 25 bp, Homo sapien
tgcattaccaaagctcccaagagct

SEQ ID NO: 4908027 - DNA, 25 bp, Homo sapien
tctgcattaccaaagctcccaagag

SEQ ID NO: 4908028 - DNA, 25 bp, Homo sapien
ggctttctgcattaccaaagctccc

SEQ ID NO: 4908029 - DNA, 25 bp, Homo sapien
cccaagagctgagctggaaacacag

SEQ ID NO: 4908030 - DNA, 25 bp, Homo sapien
catccgttttctcctaagctgctct

SEQ ID NO: 4908031 - DNA, 25 bp, Homo sapien
aaagtctcccaatgactctccacat

SEQ ID NO: 4908032 - DNA, 25 bp, Homo sapien
cataagggctcaagatgtcactgtc

SEQ ID NO: 4908033 - DNA, 25 bp, Homo sapien
ctctgggtgacacacgtctgggaac

SEQ ID NO: 4908034 - DNA, 25 bp, Homo sapien
aactggagtcccatgccctccggca

SEQ ID NO: 4908035 - DNA, 25 bp, Homo sapien
tcctccaactggagtcccatgccct

SEQ ID NO: 4908036 - DNA, 25 bp, Homo sapien
ctcctccaactggagtcccatgccc

SEQ ID NO: 4908037 - DNA, 25 bp, Homo sapien
tccaactggagtcccatgccctccg

SEQ ID NO: 4908038 - DNA, 25 bp, Homo sapien
gctagggagtctaatctacactcaa

SEQ ID NO: 4908039 - DNA, 25 bp, Homo sapien
gaaacagagctagggagtctaatct

SEQ ID NO: 4908040 - DNA, 25 bp, Homo sapien
ctgctaaggccagggcaatatagga

SEQ ID NO: 4908041 - DNA, 25 bp, Homo sapien
ctcaaaaagcataaacctctcagag

SEQ ID NO: 4908042 - DNA, 25 bp, Homo sapien
gggagtcctttgctgtgtggtcaag

SEQ ID NO: 4908043 - DNA, 25 bp, Homo sapien
gctgtgtggtcaaggcagaaagggt

SEQ ID NO: 4908044 - DNA, 25 bp, Homo sapien
gcaacaagctcgggctgtttctggg

SEQ ID NO: 4908045 - DNA, 25 bp, Homo sapien
tctggggagtcctttgctgtgtggt

SEQ ID NO: 4908046 - DNA, 25 bp, Homo sapien
cagatacaggaatgtgacccttgga

SEQ ID NO: 4908047 - DNA, 25 bp, Homo sapien
gccccaggtccaggtagctgcttgg

SEQ ID NO: 4908048 - DNA, 25 bp, Homo sapien
aaactcacagtcatgtgcaacagat

SEQ ID NO: 4908049 - DNA, 25 bp, Homo sapien
caggtccaggtagctgcttggttga

SEQ ID NO: 4908050 - DNA, 25 bp, Homo sapien
gaaaaggcctgatgacgtgggcaca

SEQ ID NO: 4908051 - DNA, 25 bp, Homo sapien
tggctccctaatgaagctcccagtg

SEQ ID NO: 4908052 - DNA, 25 bp, Homo sapien
tgacaaccccaggatgaaaaggcct

SEQ ID NO: 4908053 - DNA, 25 bp, Homo sapien
agtatcataaagatccggcacagca

SEQ ID NO: 4908054 - DNA, 25 bp, Homo sapien
tggctcataggtcaggattttgacc

SEQ ID NO: 4908055 - DNA, 25 bp, Homo sapien
cattcagatgctcttagtgacttcc

SEQ ID NO: 4908056 - DNA, 25 bp, Homo sapien
cagatgctcttagtgacttccagtg

SEQ ID NO: 4908057 - DNA, 25 bp, Homo sapien
gtagaaatcccaaatcgatggcttg

SEQ ID NO: 4908058 - DNA, 25 bp, Homo sapien
ccttgggcccctgatactgtgctgc

SEQ ID NO: 4908059 - DNA, 25 bp, Homo sapien
cttataccatggagggtcgctgccg

SEQ ID NO: 4908060 - DNA, 25 bp, Homo sapien
gctgctctgtaagctctgtaagccc

SEQ ID NO: 4908061 - DNA, 25 bp, Homo sapien
agctgttcccgccaatttccagagg

SEQ ID NO: 4908062 - DNA, 25 bp, Homo sapien
cataggatagctgtgaaggtctggc

SEQ ID NO: 4908063 - DNA, 25 bp, Homo sapien
tgccgtggaagcataggatagctgt

SEQ ID NO: 4908064 - DNA, 25 bp, Homo sapien
cactggcaagtgctccaaggggaag

SEQ ID NO: 4908065 - DNA, 25 bp, Homo sapien
tgaaggtctggcatcggacagcctg

SEQ ID NO: 4908066 - DNA, 25 bp, Homo sapien
gctataagcctttgggcagattacc

SEQ ID NO: 4908067 - DNA, 25 bp, Homo sapien
tataagcctttgggcagattaccta

SEQ ID NO: 4908068 - DNA, 25 bp, Homo sapien
ctataagcctttgggcagattacct

SEQ ID NO: 4908069 - DNA, 25 bp, Homo sapien
taccatgtattggctataagccttt

SEQ ID NO: 4908070 - DNA, 25 bp, Homo sapien
gccatggacgcggagttcacgcgaa

SEQ ID NO: 4908071 - DNA, 25 bp, Homo sapien
tcctccggtcaagggactccctgta

SEQ ID NO: 4908072 - DNA, 25 bp, Homo sapien
cgcgaacagcacaaatgcctccaaa

SEQ ID NO: 4908073 - DNA, 25 bp, Homo sapien
gatgacaatcacagggtaggccatg

SEQ ID NO: 4908074 - DNA, 25 bp, Homo sapien
gaagctctttgagccgaaggccaaa

SEQ ID NO: 4908075 - DNA, 25 bp, Homo sapien
tgatcagggattccgacagcagagt

SEQ ID NO: 4908076 - DNA, 25 bp, Homo sapien
caaagctgctgtctctatgatcagg

SEQ ID NO: 4908077 - DNA, 25 bp, Homo sapien
gactcgcctacaagggacatctgtg

SEQ ID NO: 4908078 - DNA, 25 bp, Homo sapien
tagtcgcaggcttcatgcatacaaa

SEQ ID NO: 4908079 - DNA, 25 bp, Homo sapien
gatcatcgtaaccatcagcaagcag

SEQ ID NO: 4908080 - DNA, 25 bp, Homo sapien
aaaatgcacactgctatgatcatcg

SEQ ID NO: 4908081 - DNA, 25 bp, Homo sapien
tccccacacgtttatttagtcgcag

SEQ ID NO: 4908082 - DNA, 25 bp, Homo sapien
tcctcggagaacagtgtgcacagtg

SEQ ID NO: 4908083 - DNA, 25 bp, Homo sapien
tttcctctcggaagcctgtggtcac

SEQ ID NO: 4908084 - DNA, 25 bp, Homo sapien
gtgcacagtgttaaccttggtgagt

SEQ ID NO: 4908085 - DNA, 25 bp, Homo sapien
tggtcaccttcagtcttatccacat

SEQ ID NO: 4908086 - DNA, 25 bp, Homo sapien
gcattttgcagaggctagcagaatg

SEQ ID NO: 4908087 - DNA, 25 bp, Homo sapien
aaatggtctccaggcatgcattttg

SEQ ID NO: 4908088 - DNA, 25 bp, Homo sapien
taggcagcagaaatggtctccaggc

SEQ ID NO: 4908089 - DNA, 25 bp, Homo sapien
gtggtggtgacaaagttgacatctc

SEQ ID NO: 4908090 - DNA, 25 bp, Homo sapien
acgctggcccaggtccgatcaggca

SEQ ID NO: 4908091 - DNA, 25 bp, Homo sapien
caggcctgtactgacgctggcccag

SEQ ID NO: 4908092 - DNA, 25 bp, Homo sapien
tgtactgacgctggcccaggtccga

SEQ ID NO: 4908093 - DNA, 25 bp, Homo sapien
acaggcctaagctcagggcccaagc

SEQ ID NO: 4908094 - DNA, 25 bp, Homo sapien
caccccttgcgtttagtactgagaa

SEQ ID NO: 4908095 - DNA, 25 bp, Homo sapien
agttcccagggtcaatgcacccctt

SEQ ID NO: 4908096 - DNA, 25 bp, Homo sapien
acagctctacggcattccccaggct

SEQ ID NO: 4908097 - DNA, 25 bp, Homo sapien
caatgcaccccttgcgtttagtact

SEQ ID NO: 4908098 - DNA, 25 bp, Homo sapien
accttgcaccatggaaataccgtga

SEQ ID NO: 4908099 - DNA, 25 bp, Homo sapien
aatccatttcggttaatgcactttc

SEQ ID NO: 4908100 - DNA, 25 bp, Homo sapien
ttttgagaaatcttgccacttctca

SEQ ID NO: 4908101 - DNA, 25 bp, Homo sapien
tggaaataccgtgaggaagctgagc

SEQ ID NO: 4908102 - DNA, 25 bp, Homo sapien
tgtggagcatgcaggcttccgatca

SEQ ID NO: 4908103 - DNA, 25 bp, Homo sapien
ggagcatgcaggcttccgatcagca

SEQ ID NO: 4908104 - DNA, 25 bp, Homo sapien
gcatgcaggcttccgatcagcagca

SEQ ID NO: 4908105 - DNA, 25 bp, Homo sapien
gagcatgcaggcttccgatcagcag

SEQ ID NO: 4908106 - DNA, 25 bp, Homo sapien
tcatgaacgaactatacaggctggc

SEQ ID NO: 4908107 - DNA, 25 bp, Homo sapien
tccacagtgcgcctgtagcttcatg

SEQ ID NO: 4908108 - DNA, 25 bp, Homo sapien
ccccgcaacaagctgcaggtgtgag

SEQ ID NO: 4908109 - DNA, 25 bp, Homo sapien
tagcttcatgaacgaactatacagg

SEQ ID NO: 4908110 - DNA, 25 bp, Homo sapien
ggtgtaaatccagcaaaaaacagct

SEQ ID NO: 4908111 - DNA, 25 bp, Homo sapien
ttcctgagtaactggctgcttcagg

SEQ ID NO: 4908112 - DNA, 25 bp, Homo sapien
ctttggaatggagaacactacaatt

SEQ ID NO: 4908113 - DNA, 25 bp, Homo sapien
ctatgtatctagtattgaggcttgc

SEQ ID NO: 4908114 - DNA, 25 bp, Homo sapien
tctactgaatagttagcagggaaaa

SEQ ID NO: 4908115 - DNA, 25 bp, Homo sapien
ttaagtctagtcacaaaccaaacaa

SEQ ID NO: 4908116 - DNA, 25 bp, Homo sapien
tcccgagtatcctagtcatcaaaga

SEQ ID NO: 4908117 - DNA, 25 bp, Homo sapien
catcagaattacagtcagaaaatcc

SEQ ID NO: 4908118 - DNA, 25 bp, Homo sapien
tacccttcgtggaaaaccagcctga

SEQ ID NO: 4908119 - DNA, 25 bp, Homo sapien
tcaacctgactttgtaggaaagcct

SEQ ID NO: 4908120 - DNA, 25 bp, Homo sapien
tattgcatcctaacgctacctctga

SEQ ID NO: 4908121 - DNA, 25 bp, Homo sapien
ctaggaagtccttgctatcaaaacc

SEQ ID NO: 4908122 - DNA, 25 bp, Homo sapien
agctcatttcctcgtacaacagtga

SEQ ID NO: 4908123 - DNA, 25 bp, Homo sapien
tcatttcctcgtacaacagtgaatt

SEQ ID NO: 4908124 - DNA, 25 bp, Homo sapien
gctcatttcctcgtacaacagtgaa

SEQ ID NO: 4908125 - DNA, 25 bp, Homo sapien
ctcatttcctcgtacaacagtgaat

SEQ ID NO: 4908126 - DNA, 25 bp, Homo sapien
gcaggcgtcagagggcccctcaagg

SEQ ID NO: 4908127 - DNA, 25 bp, Homo sapien
caggcgtcagagggcccctcaaggg

SEQ ID NO: 4908128 - DNA, 25 bp, Homo sapien
agcaggcgtcagagggcccctcaag

SEQ ID NO: 4908129 - DNA, 25 bp, Homo sapien
aagcaggcgtcagagggcccctcaa

SEQ ID NO: 4908130 - DNA, 25 bp, Homo sapien
caaacgtgttggttgtggacctgac

SEQ ID NO: 4908131 - DNA, 25 bp, Homo sapien
gcaaacgtgttggttgtggacctga

SEQ ID NO: 4908132 - DNA, 25 bp, Homo sapien
ctgcaaacgtgttggttgtggacct

SEQ ID NO: 4908133 - DNA, 25 bp, Homo sapien
tgcaaacgtgttggttgtggacctg

SEQ ID NO: 4908134 - DNA, 25 bp, Homo sapien
cataatgggcatgatccctgagaag

SEQ ID NO: 4908135 - DNA, 25 bp, Homo sapien
agaagactcgatggcctctgtggga

SEQ ID NO: 4908136 - DNA, 25 bp, Homo sapien
aactttggcattgtggaaggacttg

SEQ ID NO: 4908137 - DNA, 25 bp, Homo sapien
ttgtgaccacaatccatgctgccac

SEQ ID NO: 4908138 - DNA, 25 bp, Homo sapien
gctgagtatgccgtggagtccactg

SEQ ID NO: 4908139 - DNA, 25 bp, Homo sapien
gaagctgagtatgccgtggagtcca

SEQ ID NO: 4908140 - DNA, 25 bp, Homo sapien
gagtatgccgtggagtccactggca

SEQ ID NO: 4908141 - DNA, 25 bp, Homo sapien
ctgaagctgagtatgccgtggagtc

SEQ ID NO: 4908142 - DNA, 25 bp, Homo sapien
acatggtctgcatgttccagtattt

SEQ ID NO: 4908143 - DNA, 25 bp, Homo sapien
caactacatggtctgcatgttccag

SEQ ID NO: 4908144 - DNA, 25 bp, Homo sapien
ggtctgcatgttccagtatttctac

SEQ ID NO: 4908145 - DNA, 25 bp, Homo sapien
tcaactacatggtctgcatgttcca

SEQ ID NO: 4908146 - DNA, 25 bp, Homo sapien
gaatttttcattggttggctctcct

SEQ ID NO: 4908147 - DNA, 25 bp, Homo sapien
ggaatttttcattggttggctctcc

SEQ ID NO: 4908148 - DNA, 25 bp, Homo sapien
cattgctgtcatctcacacatcctt

SEQ ID NO: 4908149 - DNA, 25 bp, Homo sapien
ccaggaatttttcattggttggctc

SEQ ID NO: 4908150 - DNA, 25 bp, Homo sapien
gttcgagtcgcaggtacttggcccg

SEQ ID NO: 4908151 - DNA, 25 bp, Homo sapien
accgcgggtccgtgatggcttcttc

SEQ ID NO: 4908152 - DNA, 25 bp, Homo sapien
tgggctagagccacttgatatctcc

SEQ ID NO: 4908153 - DNA, 25 bp, Homo sapien
ccgtccctgtagcactggaggtcca

SEQ ID NO: 4908154 - DNA, 25 bp, Homo sapien
tctgtccacacgagctcatatgtat

SEQ ID NO: 4908155 - DNA, 25 bp, Homo sapien
tatttgatgggttccgagttgcagc

SEQ ID NO: 4908156 - DNA, 25 bp, Homo sapien
gcaggctgaaactcgtcctctgagt

SEQ ID NO: 4908157 - DNA, 25 bp, Homo sapien
tgctcttatcctcactggaaactgg

SEQ ID NO: 4908158 - DNA, 25 bp, Homo sapien
tgaaagaggttagacattctgttga

SEQ ID NO: 4908159 - DNA, 25 bp, Homo sapien
gaggttagacattctgttgatttaa

SEQ ID NO: 4908160 - DNA, 25 bp, Homo sapien
agcttgaaagaggttagacattctg

SEQ ID NO: 4908161 - DNA, 25 bp, Homo sapien
cttgaaagaggttagacattctgtt

SEQ ID NO: 4908162 - DNA, 25 bp, Homo sapien
ggaagacgggagagttctctccttc

SEQ ID NO: 4908163 - DNA, 25 bp, Homo sapien
cgtggacgcaggactgtggaagacg

SEQ ID NO: 4908164 - DNA, 25 bp, Homo sapien
tggaagacgggagagttctctcctt

SEQ ID NO: 4908165 - DNA, 25 bp, Homo sapien
cttgcgtggacgcaggactgtggaa

SEQ ID NO: 4908166 - DNA, 25 bp, Homo sapien
ctgttttagctgtcccttgtcctgc

SEQ ID NO: 4908167 - DNA, 25 bp, Homo sapien
tgttttagctgtcccttgtcctgca

SEQ ID NO: 4908168 - DNA, 25 bp, Homo sapien
tgtcctgcagcgtgtattcagtggc

SEQ ID NO: 4908169 - DNA, 25 bp, Homo sapien
agcgtgtattcagtggcccatgagg

SEQ ID NO: 4908170 - DNA, 25 bp, Homo sapien
cccctcatcactccaggaggtgagg

SEQ ID NO: 4908171 - DNA, 25 bp, Homo sapien
tgcggtagtccctgccaccggcaca

SEQ ID NO: 4908172 - DNA, 25 bp, Homo sapien
gtgaggacctcactctgcggtagtc

SEQ ID NO: 4908173 - DNA, 25 bp, Homo sapien
aggacctcactctgcggtagtccct

SEQ ID NO: 4908174 - DNA, 25 bp, Homo sapien
aatctcgaattttatctacaaagct

SEQ ID NO: 4908175 - DNA, 25 bp, Homo sapien
ttaatctcgaattttatctacaaag

SEQ ID NO: 4908176 - DNA, 25 bp, Homo sapien
taatctcgaattttatctacaaagc

SEQ ID NO: 4908177 - DNA, 25 bp, Homo sapien
accagaatttgtagtcagctgggca

SEQ ID NO: 4908178 - DNA, 25 bp, Homo sapien
aaccagaatttgtagtcagctgggc

SEQ ID NO: 4908179 - DNA, 25 bp, Homo sapien
tgtgcatctcctccgtttggctgtt

SEQ ID NO: 4908180 - DNA, 25 bp, Homo sapien
gtgcatctcctccgtttggctgttt

SEQ ID NO: 4908181 - DNA, 25 bp, Homo sapien
cgagatagtatcaggatgcggactg

SEQ ID NO: 4908182 - DNA, 25 bp, Homo sapien
ttgcctgagtttatgctgatgagat

SEQ ID NO: 4908183 - DNA, 25 bp, Homo sapien
tttatgctgatgagatgattcttgg

SEQ ID NO: 4908184 - DNA, 25 bp, Homo sapien
gggactccgagatagtatcaggatg

SEQ ID NO: 4908185 - DNA, 25 bp, Homo sapien
tacatagcagtctccaaacacagaa

SEQ ID NO: 4908186 - DNA, 25 bp, Homo sapien
ggccgctcccacctgcactgtgtga

SEQ ID NO: 4908187 - DNA, 25 bp, Homo sapien
gactagtattctggcttacatagca

SEQ ID NO: 4908188 - DNA, 25 bp, Homo sapien
tagtattctggcttacatagcagtc

SEQ ID NO: 4908189 - DNA, 25 bp, Homo sapien
cttgagagatgtcagaggtctttat

SEQ ID NO: 4908190 - DNA, 25 bp, Homo sapien
tctttattagcagtgccagagcttg

SEQ ID NO: 4908191 - DNA, 25 bp, Homo sapien
agcagtgccagagcttgtgccttca

SEQ ID NO: 4908192 - DNA, 25 bp, Homo sapien
gatgtcagaggtctttattagcagt

SEQ ID NO: 4908193 - DNA, 25 bp, Homo sapien
gaactggctggccccacattttctg

SEQ ID NO: 4908194 - DNA, 25 bp, Homo sapien
atcttcctgctgtgtgaactggctg

SEQ ID NO: 4908195 - DNA, 25 bp, Homo sapien
tccctcgggctctggcagctttttg

SEQ ID NO: 4908196 - DNA, 25 bp, Homo sapien
agctttttgaccctctgctgctcag

SEQ ID NO: 4908197 - DNA, 25 bp, Homo sapien
tggatgaatgcatgctgcggctcct

SEQ ID NO: 4908198 - DNA, 25 bp, Homo sapien
tggtcgcctacagctgtgagatgag

SEQ ID NO: 4908199 - DNA, 25 bp, Homo sapien
agttgcagccgggtgatccccgcta

SEQ ID NO: 4908200 - DNA, 25 bp, Homo sapien
gaaccgggcgcaggtgattcttcca

SEQ ID NO: 4908201 - DNA, 25 bp, Homo sapien
tctgactctggcaagacactgggcc

SEQ ID NO: 4908202 - DNA, 25 bp, Homo sapien
tcctcttctgcagggtgcgctacag

SEQ ID NO: 4908203 - DNA, 25 bp, Homo sapien
cacggttggaacgaacaggtgagca

SEQ ID NO: 4908204 - DNA, 25 bp, Homo sapien
gctgtactccgtgcacctggacggg

SEQ ID NO: 4908205 - DNA, 25 bp, Homo sapien
caagacaccgctcagccatgaagat

SEQ ID NO: 4908206 - DNA, 25 bp, Homo sapien
gggttcccagcgctactcccaagac

SEQ ID NO: 4908207 - DNA, 25 bp, Homo sapien
gggccgctacgtggtgcgcccaggg

SEQ ID NO: 4908208 - DNA, 25 bp, Homo sapien
tgcatttctgtatcccggtgtccca

SEQ ID NO: 4908209 - DNA, 25 bp, Homo sapien
ggtcacttctgccatggctcgattc

SEQ ID NO: 4908210 - DNA, 25 bp, Homo sapien
cagtttcatttccatagagtggtgt

SEQ ID NO: 4908211 - DNA, 25 bp, Homo sapien
gccatggctcgattcccagcagttt

SEQ ID NO: 4908212 - DNA, 25 bp, Homo sapien
tcctgatgtcatccctcaaatctgg

SEQ ID NO: 4908213 - DNA, 25 bp, Homo sapien
gccaacactcagttccagtcttgtt

SEQ ID NO: 4908214 - DNA, 25 bp, Homo sapien
cagggcctcaggtgttcgctacctg

SEQ ID NO: 4908215 - DNA, 25 bp, Homo sapien
ccagtcttgttattcctggttttga

SEQ ID NO: 4908216 - DNA, 25 bp, Homo sapien
aggtgttcgctacctgaatcagagc

SEQ ID NO: 4908217 - DNA, 25 bp, Homo sapien
ccgatagggtttccagagggctcca

SEQ ID NO: 4908218 - DNA, 25 bp, Homo sapien
tcgccgtcttaattcacatggtatc

SEQ ID NO: 4908219 - DNA, 25 bp, Homo sapien
gagctgggggacatcgccgtcttaa

SEQ ID NO: 4908220 - DNA, 25 bp, Homo sapien
ctccactgtgactgcttcagagctg

SEQ ID NO: 4908221 - DNA, 25 bp, Homo sapien
gggatcctggctttttctcttgcag

SEQ ID NO: 4908222 - DNA, 25 bp, Homo sapien
tctctccatccttagcaattggatt

SEQ ID NO: 4908223 - DNA, 25 bp, Homo sapien
ccatccttagcaattggatttgtag

SEQ ID NO: 4908224 - DNA, 25 bp, Homo sapien
ggatcctggctttttctcttgcagt

SEQ ID NO: 4908225 - DNA, 25 bp, Homo sapien
gttgtgaaagccaatagctctccag

SEQ ID NO: 4908226 - DNA, 25 bp, Homo sapien
taaggcaagttaacccagtagtctg

SEQ ID NO: 4908227 - DNA, 25 bp, Homo sapien
caacataaatcaggccaactggagc

SEQ ID NO: 4908228 - DNA, 25 bp, Homo sapien
tagtctgggcctagagatccaggac

SEQ ID NO: 4908229 - DNA, 25 bp, Homo sapien
ttagtacctatgctgccaacgtgag

SEQ ID NO: 4908230 - DNA, 25 bp, Homo sapien
caattttagtacctatgctgccaac

SEQ ID NO: 4908231 - DNA, 25 bp, Homo sapien
aattttagtacctatgctgccaacg

SEQ ID NO: 4908232 - DNA, 25 bp, Homo sapien
ttttagtacctatgctgccaacgtg

SEQ ID NO: 4908233 - DNA, 25 bp, Homo sapien
ctacagagtagactctactgtccaa

SEQ ID NO: 4908234 - DNA, 25 bp, Homo sapien
ctgtccaatctagctatttgagtgt

SEQ ID NO: 4908235 - DNA, 25 bp, Homo sapien
gagtagactctactgtccaatctag

SEQ ID NO: 4908236 - DNA, 25 bp, Homo sapien
gactctactgtccaatctagctatt

SEQ ID NO: 4908237 - DNA, 25 bp, Homo sapien
ttctctaagtgaagttaaacattta

SEQ ID NO: 4908238 - DNA, 25 bp, Homo sapien
gacagggtccctctttgtcaggcag

SEQ ID NO: 4908239 - DNA, 25 bp, Homo sapien
acagggtccctctttgtcaggcagg

SEQ ID NO: 4908240 - DNA, 25 bp, Homo sapien
cagggtccctctttgtcaggcaggc

SEQ ID NO: 4908241 - DNA, 25 bp, Homo sapien
agcatttccagtacctcagagggct

SEQ ID NO: 4908242 - DNA, 25 bp, Homo sapien
tagcagtagttagctcctatgtggc

SEQ ID NO: 4908243 - DNA, 25 bp, Homo sapien
ggccctgaccaatgattataccctg

SEQ ID NO: 4908244 - DNA, 25 bp, Homo sapien
aaaagcaagcttgtgactaggtctc

SEQ ID NO: 4908245 - DNA, 25 bp, Homo sapien
caattatggccagcaatgaagatta

SEQ ID NO: 4908246 - DNA, 25 bp, Homo sapien
tgcgcccggctttaacagatatttt

SEQ ID NO: 4908247 - DNA, 25 bp, Homo sapien
aatttggtggcactgcaattatggc

SEQ ID NO: 4908248 - DNA, 25 bp, Homo sapien
ttgcctgaggaaccaagctcatgtg

SEQ ID NO: 4908249 - DNA, 25 bp, Homo sapien
gattattagcttaaacccttacatg

SEQ ID NO: 4908250 - DNA, 25 bp, Homo sapien
gcctggcctgccagttgatgattat

SEQ ID NO: 4908251 - DNA, 25 bp, Homo sapien
tatattgaggtttctaggctatgag

SEQ ID NO: 4908252 - DNA, 25 bp, Homo sapien
caatgatagctactcttgaagagga

SEQ ID NO: 4908253 - DNA, 25 bp, Homo sapien
gaaccttatgtaccgagcaaatgcc

SEQ ID NO: 4908254 - DNA, 25 bp, Homo sapien
ccaacctggagtgcattgacgcgat

SEQ ID NO: 4908255 - DNA, 25 bp, Homo sapien
aatatcttaatggtgctgagccgac

SEQ ID NO: 4908256 - DNA, 25 bp, Homo sapien
cccaagaaattgagtagtgcagcca

SEQ ID NO: 4908257 - DNA, 25 bp, Homo sapien
ttagctcagcgcaaagaagagcgcc

SEQ ID NO: 4908258 - DNA, 25 bp, Homo sapien
aagtgtacgagctgttcccaaccct

SEQ ID NO: 4908259 - DNA, 25 bp, Homo sapien
ggctcacctcactaaccagtatatg

SEQ ID NO: 4908260 - DNA, 25 bp, Homo sapien
tgaacggtagaattgtggccacaaa

SEQ ID NO: 4908261 - DNA, 25 bp, Homo sapien
taaaataatagacccgatgtactta

SEQ ID NO: 4908262 - DNA, 25 bp, Homo sapien
gatgtacttaggtaccaccatggtt

SEQ ID NO: 4908263 - DNA, 25 bp, Homo sapien
ataagacagggatgaggaaacctat

SEQ ID NO: 4908264 - DNA, 25 bp, Homo sapien
atttcagttacttccaggtagctgg

SEQ ID NO: 4908265 - DNA, 25 bp, Homo sapien
tggacaccatgaattttgatgttat

SEQ ID NO: 4908266 - DNA, 25 bp, Homo sapien
ggacaccatgaattttgatgttata

SEQ ID NO: 4908267 - DNA, 25 bp, Homo sapien
ttggacaccatgaattttgatgtta

SEQ ID NO: 4908268 - DNA, 25 bp, Homo sapien
tattttgaagctaaacagttaacag

SEQ ID NO: 4908269 - DNA, 25 bp, Homo sapien
cagttaacagaaacacaattttgta

SEQ ID NO: 4908270 - DNA, 25 bp, Homo sapien
ttattttgaagctaaacagttaaca

SEQ ID NO: 4908271 - DNA, 25 bp, Homo sapien
attttgtaaacagataatatctgtg

SEQ ID NO: 4908272 - DNA, 25 bp, Homo sapien
tctgtagcatgcaagaagttcaagt

SEQ ID NO: 4908273 - DNA, 25 bp, Homo sapien
tcacagtactggtggttttcgagta

SEQ ID NO: 4908274 - DNA, 25 bp, Homo sapien
caactggaccagtcttatctgtagc

SEQ ID NO: 4908275 - DNA, 25 bp, Homo sapien
aaaagtggcccatgatacctgtaaa

SEQ ID NO: 4908276 - DNA, 25 bp, Homo sapien
cgttgaacgctgagctccttccgtg

SEQ ID NO: 4908277 - DNA, 25 bp, Homo sapien
tttgcgaccattttctcggcctcag

SEQ ID NO: 4908278 - DNA, 25 bp, Homo sapien
ggcctcagacgctctcaaactttag

SEQ ID NO: 4908279 - DNA, 25 bp, Homo sapien
tgtgctcgaaaaataccacgtgttg

SEQ ID NO: 4908280 - DNA, 25 bp, Homo sapien
agcggcagtggatcgaccccgttct

SEQ ID NO: 4908281 - DNA, 25 bp, Homo sapien
tctgcggccgttgagtagttttcaa

SEQ ID NO: 4908282 - DNA, 25 bp, Homo sapien
gttgatttttgtccctctgcgcttg

SEQ ID NO: 4908283 - DNA, 25 bp, Homo sapien
gaacttccagcagccggcggacggt

SEQ ID NO: 4908284 - DNA, 25 bp, Homo sapien
gtgcaggaggcggtgcttccccttc

SEQ ID NO: 4908285 - DNA, 25 bp, Homo sapien
gggtataagtagagggtgcaggagg

SEQ ID NO: 4908286 - DNA, 25 bp, Homo sapien
gcaggaggcggtgcttccccttctc

SEQ ID NO: 4908287 - DNA, 25 bp, Homo sapien
tctccccggcggttagtgctgagag

SEQ ID NO: 4908288 - DNA, 25 bp, Homo sapien
gagcacttcacgaatgtccggttcc

SEQ ID NO: 4908289 - DNA, 25 bp, Homo sapien
agttcacatgagagcgtcggcaggc

SEQ ID NO: 4908290 - DNA, 25 bp, Homo sapien
gcacttcacgaatgtccggttccat

SEQ ID NO: 4908291 - DNA, 25 bp, Homo sapien
agagcgtcggcaggcaaacaactga

SEQ ID NO: 4908292 - DNA, 25 bp, Homo sapien
gagacgagcctaggcaacttaggtc

SEQ ID NO: 4908293 - DNA, 25 bp, Homo sapien
tttgagacgagcctaggcaacttag

SEQ ID NO: 4908294 - DNA, 25 bp, Homo sapien
ttttgagaggctgagatagaaggat

SEQ ID NO: 4908295 - DNA, 25 bp, Homo sapien
cacttgaggccaggagtttgagacg

SEQ ID NO: 4908296 - DNA, 25 bp, Homo sapien
tgcaggtccccaaggagtctctctc

SEQ ID NO: 4908297 - DNA, 25 bp, Homo sapien
ggttgatctccactgcaaccctcct

SEQ ID NO: 4908298 - DNA, 25 bp, Homo sapien
gcatctgcaggtccccaaggagtct

SEQ ID NO: 4908299 - DNA, 25 bp, Homo sapien
ctcctgtctggagtcagcccgtctg

SEQ ID NO: 4908300 - DNA, 25 bp, Homo sapien
cccgggggtgtcttccatgactgac

SEQ ID NO: 4908301 - DNA, 25 bp, Homo sapien
ccccgggggtgtcttccatgactga

SEQ ID NO: 4908302 - DNA, 25 bp, Homo sapien
ctccccgggggtgtcttccatgact

SEQ ID NO: 4908303 - DNA, 25 bp, Homo sapien
tccccgggggtgtcttccatgactg

SEQ ID NO: 4908304 - DNA, 25 bp, Homo sapien
agcaacatgttcatcgttgtcttca

SEQ ID NO: 4908305 - DNA, 25 bp, Homo sapien
tgcacagtcagcagtccagcagtct

SEQ ID NO: 4908306 - DNA, 25 bp, Homo sapien
gcaacatgttcatcgttgtcttcat

SEQ ID NO: 4908307 - DNA, 25 bp, Homo sapien
ctgcacagtcagcagtccagcagtc

SEQ ID NO: 4908308 - DNA, 25 bp, Homo sapien
tgatacaggtcaaccctggcaggcc

SEQ ID NO: 4908309 - DNA, 25 bp, Homo sapien
ggcaggccgtactcgttccagaatt

SEQ ID NO: 4908310 - DNA, 25 bp, Homo sapien
gcacgttgcgaaatccactcacagg

SEQ ID NO: 4908311 - DNA, 25 bp, Homo sapien
gatcacaattccacagcacgttgcg

SEQ ID NO: 4908312 - DNA, 25 bp, Homo sapien
caatatgccaaaacaacaaatcttt

SEQ ID NO: 4908313 - DNA, 25 bp, Homo sapien
atgtggaactttataacccaatatt

SEQ ID NO: 4908314 - DNA, 25 bp, Homo sapien
aatgtggaactttataacccaatat

SEQ ID NO: 4908315 - DNA, 25 bp, Homo sapien
tgccaaaacaacaaatctttgactt

SEQ ID NO: 4908316 - DNA, 25 bp, Homo sapien
tgaatgccatacagggaaggcgact

SEQ ID NO: 4908317 - DNA, 25 bp, Homo sapien
tcctaataagtagcccatatagcgc

SEQ ID NO: 4908318 - DNA, 25 bp, Homo sapien
atatagcgcttctccctgtcgacca

SEQ ID NO: 4908319 - DNA, 25 bp, Homo sapien
gcttccaagtggaagagctcccgta

SEQ ID NO: 4908320 - DNA, 25 bp, Homo sapien
ccacagcggagtactccaatttcat

SEQ ID NO: 4908321 - DNA, 25 bp, Homo sapien
gccttttgatttctgaccacagcgg

SEQ ID NO: 4908322 - DNA, 25 bp, Homo sapien
tttctgaccacagcggagtactcca

SEQ ID NO: 4908323 - DNA, 25 bp, Homo sapien
tgatttctgaccacagcggagtact

SEQ ID NO: 4908324 - DNA, 25 bp, Homo sapien
tggcactgtcaccttagtctctgtg

SEQ ID NO: 4908325 - DNA, 25 bp, Homo sapien
ccttccagggctaaaaattctatga

SEQ ID NO: 4908326 - DNA, 25 bp, Homo sapien
gtgtctccacttgcaaacttaaagg

SEQ ID NO: 4908327 - DNA, 25 bp, Homo sapien
caatgactttaaggctccttccagg

SEQ ID NO: 4908328 - DNA, 25 bp, Homo sapien
caggtctgtccttgtggaactccaa

SEQ ID NO: 4908329 - DNA, 25 bp, Homo sapien
ccaataatgcattctgccaagaaac

SEQ ID NO: 4908330 - DNA, 25 bp, Homo sapien
gcaggtctgtccttgtggaactcca

SEQ ID NO: 4908331 - DNA, 25 bp, Homo sapien
ggcaggtctgtccttgtggaactcc

SEQ ID NO: 4908332 - DNA, 25 bp, Homo sapien
tcaccacccctaccactttcagcgg

SEQ ID NO: 4908333 - DNA, 25 bp, Homo sapien
tttgccgaatcactttaaccctctc

SEQ ID NO: 4908334 - DNA, 25 bp, Homo sapien
tttcagcggaccacatcggagccac

SEQ ID NO: 4908335 - DNA, 25 bp, Homo sapien
tttctttctggatttgccgaatcac

SEQ ID NO: 4908336 - DNA, 25 bp, Homo sapien
acttgagaaacaccaagtgtaagac

SEQ ID NO: 4908337 - DNA, 25 bp, Homo sapien
ccctgggacttgagaaacaccaagt

SEQ ID NO: 4908338 - DNA, 25 bp, Homo sapien
gggacttgagaaacaccaagtgtaa

SEQ ID NO: 4908339 - DNA, 25 bp, Homo sapien
atcatcaacccccaggtgttctgaa

SEQ ID NO: 4908340 - DNA, 25 bp, Homo sapien
aacacagttccgctttgccctaaat

SEQ ID NO: 4908341 - DNA, 25 bp, Homo sapien
cctaaattggccaaagctccctcga

SEQ ID NO: 4908342 - DNA, 25 bp, Homo sapien
aagctccctcgaggaaaggctaaag

SEQ ID NO: 4908343 - DNA, 25 bp, Homo sapien
gctaaagccttagcttgcctgcaaa

SEQ ID NO: 4908344 - DNA, 25 bp, Homo sapien
ttaaagcttccgcatactatgggga

SEQ ID NO: 4908345 - DNA, 25 bp, Homo sapien
gcttccgcatactatggggaaccag

SEQ ID NO: 4908346 - DNA, 25 bp, Homo sapien
tccgcatactatggggaaccagctc

SEQ ID NO: 4908347 - DNA, 25 bp, Homo sapien
aagcttccgcatactatggggaacc

SEQ ID NO: 4908348 - DNA, 25 bp, Homo sapien
tcctccaccatatgcgaggtgctca

SEQ ID NO: 4908349 - DNA, 25 bp, Homo sapien
accatatgcgaggtgctcatctgcc

SEQ ID NO: 4908350 - DNA, 25 bp, Homo sapien
gcgaggtgctcatctgccagatgcc

SEQ ID NO: 4908351 - DNA, 25 bp, Homo sapien
tatgcgaggtgctcatctgccagat

SEQ ID NO: 4908352 - DNA, 25 bp, Homo sapien
tgggaatggccacgagtgaatactt

SEQ ID NO: 4908353 - DNA, 25 bp, Homo sapien
ctgggaatggccacgagtgaatact

SEQ ID NO: 4908354 - DNA, 25 bp, Homo sapien
gggaatggccacgagtgaatacttc

SEQ ID NO: 4908355 - DNA, 25 bp, Homo sapien
gggaagtatattgctttgagaccac

SEQ ID NO: 4908356 - DNA, 25 bp, Homo sapien
ttttcagaaacactctgtgaagcag

SEQ ID NO: 4908357 - DNA, 25 bp, Homo sapien
gcttgagtccactttagcggcaggg

SEQ ID NO: 4908358 - DNA, 25 bp, Homo sapien
ctttcctgtggacccttgcctcagt

SEQ ID NO: 4908359 - DNA, 25 bp, Homo sapien
caggtgtagcaggtacgaacatttc

SEQ ID NO: 4908360 - DNA, 25 bp, Homo sapien
gggagatgggtagcttcaccctaca

SEQ ID NO: 4908361 - DNA, 25 bp, Homo sapien
gaaaggtcccaatgcacataggctg

SEQ ID NO: 4908362 - DNA, 25 bp, Homo sapien
tgaatgccaacctttccagcagtgc

SEQ ID NO: 4908363 - DNA, 25 bp, Homo sapien
cggccctttttggcacgaccattgt

SEQ ID NO: 4908364 - DNA, 25 bp, Homo sapien
taggcatcgaagacgctcacttcag

SEQ ID NO: 4908365 - DNA, 25 bp, Homo sapien
cttgtccttgggcacgcatcgggca

SEQ ID NO: 4908366 - DNA, 25 bp, Homo sapien
cgcatcgggcacagttagtgcagcg

SEQ ID NO: 4908367 - DNA, 25 bp, Homo sapien
gctttggtgggggacgtggggcagc

SEQ ID NO: 4908368 - DNA, 25 bp, Homo sapien
tttggtgggggacgtggggcagcac

SEQ ID NO: 4908369 - DNA, 25 bp, Homo sapien
ctttggtgggggacgtggggcagca

SEQ ID NO: 4908370 - DNA, 25 bp, Homo sapien
gagaacagcctgtcttcagtcttta

SEQ ID NO: 4908371 - DNA, 25 bp, Homo sapien
cagagaacagcctgtcttcagtctt

SEQ ID NO: 4908372 - DNA, 25 bp, Homo sapien
ctccagagaacagcctgtcttcagt

SEQ ID NO: 4908373 - DNA, 25 bp, Homo sapien
agaacagcctgtcttcagtctttaa

SEQ ID NO: 4908374 - DNA, 25 bp, Homo sapien
acagggaacggtcgcctgagccaaa

SEQ ID NO: 4908375 - DNA, 25 bp, Homo sapien
ccaaagacggcaatgcgcattggct

SEQ ID NO: 4908376 - DNA, 25 bp, Homo sapien
cgcattggctgactagtgactgggt

SEQ ID NO: 4908377 - DNA, 25 bp, Homo sapien
tgaagaactgagctggatcaatccg

SEQ ID NO: 4908378 - DNA, 25 bp, Homo sapien
aatagtgcctctgggtgaagacgcc

SEQ ID NO: 4908379 - DNA, 25 bp, Homo sapien
agctggaaggcacaactgcgctgtc

SEQ ID NO: 4908380 - DNA, 25 bp, Homo sapien
cacatcagggcaggtcggatggtca

SEQ ID NO: 4908381 - DNA, 25 bp, Homo sapien
gctgataagagatggccacacgcct

SEQ ID NO: 4908382 - DNA, 25 bp, Homo sapien
agaaatttgttcctgtagtttctgc

SEQ ID NO: 4908383 - DNA, 25 bp, Homo sapien
tggggcaccgtccagttaggcctct

SEQ ID NO: 4908384 - DNA, 25 bp, Homo sapien
caccgtccagttaggcctctttttg

SEQ ID NO: 4908385 - DNA, 25 bp, Homo sapien
acattatcttgggtcggggaaggca

SEQ ID NO: 4908386 - DNA, 25 bp, Homo sapien
tttacaaagagtttgcaagcccatg

SEQ ID NO: 4908387 - DNA, 25 bp, Homo sapien
gtttgcaagcccatgatcaaatttc

SEQ ID NO: 4908388 - DNA, 25 bp, Homo sapien
aagagtttgcaagcccatgatcaaa

SEQ ID NO: 4908389 - DNA, 25 bp, Homo sapien
caaagagtttgcaagcccatgatca

SEQ ID NO: 4908390 - DNA, 25 bp, Homo sapien
catctctatttcctcggaatccagt

SEQ ID NO: 4908391 - DNA, 25 bp, Homo sapien
atctctatttcctcggaatccagtg

SEQ ID NO: 4908392 - DNA, 25 bp, Homo sapien
tcatctctatttcctcggaatccag

SEQ ID NO: 4908393 - DNA, 25 bp, Homo sapien
ctaataatgggctttggaatcagac

SEQ ID NO: 4908394 - DNA, 25 bp, Homo sapien
taatgggctttggaatcagacatcc

SEQ ID NO: 4908395 - DNA, 25 bp, Homo sapien
atgggctttggaatcagacatcctc

SEQ ID NO: 4908396 - DNA, 25 bp, Homo sapien
aataatgggctttggaatcagacat

SEQ ID NO: 4908397 - DNA, 25 bp, Homo sapien
cagacagttgatcgcttacatagca

SEQ ID NO: 4908398 - DNA, 25 bp, Homo sapien
gacacaaaagtaacgggcggatgcc

SEQ ID NO: 4908399 - DNA, 25 bp, Homo sapien
gcctgaagcggctgctgtgaataca

SEQ ID NO: 4908400 - DNA, 25 bp, Homo sapien
catgaaaaactgatcgccgtggcgg

SEQ ID NO: 4908401 - DNA, 25 bp, Homo sapien
cttgggccatatattgaagtcaact

SEQ ID NO: 4908402 - DNA, 25 bp, Homo sapien
atgagcaaactttagagtgaataac

SEQ ID NO: 4908403 - DNA, 25 bp, Homo sapien
gaataactcgctgaccattaaatgc

SEQ ID NO: 4908404 - DNA, 25 bp, Homo sapien
tgaccattaaatgcaaggaaagctc

SEQ ID NO: 4908405 - DNA, 25 bp, Homo sapien
gcagcagtgtgattagtaaaaacga

SEQ ID NO: 4908406 - DNA, 25 bp, Homo sapien
tagtaaaaacgatgggctttcctgc

SEQ ID NO: 4908407 - DNA, 25 bp, Homo sapien
tgattagtaaaaacgatgggctttc

SEQ ID NO: 4908408 - DNA, 25 bp, Homo sapien
agttgtccttcagaaagtggagcag

SEQ ID NO: 4908409 - DNA, 25 bp, Homo sapien
ctggataagggcagaaacggttcac

SEQ ID NO: 4908410 - DNA, 25 bp, Homo sapien
ctacatactggtttgtcctggcggg

SEQ ID NO: 4908411 - DNA, 25 bp, Homo sapien
gggatcattggttccagtcacaggt

SEQ ID NO: 4908412 - DNA, 25 bp, Homo sapien
ggtttggagcacttacaaggctgtg

SEQ ID NO: 4908413 - DNA, 25 bp, Homo sapien
tgctgtcccacaaatagttttttgt

SEQ ID NO: 4908414 - DNA, 25 bp, Homo sapien
acagtagaccatttgtcatccatgc

SEQ ID NO: 4908415 - DNA, 25 bp, Homo sapien
catttgtcatccatgctgtcccaca

SEQ ID NO: 4908416 - DNA, 25 bp, Homo sapien
gatttatgacaggtttatgttactt

SEQ ID NO: 4908417 - DNA, 25 bp, Homo sapien
ttaaagtgatgacctgagacctaga

SEQ ID NO: 4908418 - DNA, 25 bp, Homo sapien
gacctgagacctagatactgtgttt

SEQ ID NO: 4908419 - DNA, 25 bp, Homo sapien
gtgatgacctgagacctagatactg

SEQ ID NO: 4908420 - DNA, 25 bp, Homo sapien
tctagtttgaagtgatgacattttt

SEQ ID NO: 4908421 - DNA, 25 bp, Homo sapien
tggccctactgccacttcatctggg

SEQ ID NO: 4908422 - DNA, 25 bp, Homo sapien
tatagcacagtgcaatctggcccta

SEQ ID NO: 4908423 - DNA, 25 bp, Homo sapien
cctttaacctctttatatagcacag

SEQ ID NO: 4908424 - DNA, 25 bp, Homo sapien
tcggttaataattgcaggaaacatc

SEQ ID NO: 4908425 - DNA, 25 bp, Homo sapien
ctcctttaatgtggatcagtcttgt

SEQ ID NO: 4908426 - DNA, 25 bp, Homo sapien
agtctttgcctctaatgattttgga

SEQ ID NO: 4908427 - DNA, 25 bp, Homo sapien
aacttttttcaagagtactggctgg

SEQ ID NO: 4908428 - DNA, 25 bp, Homo sapien
cagtttcgatttgtctggtgatcct

SEQ ID NO: 4908429 - DNA, 25 bp, Homo sapien
tttaatctgctatcaagatactggg

SEQ ID NO: 4908430 - DNA, 25 bp, Homo sapien
gacatctgatctagcctttttattt

SEQ ID NO: 4908431 - DNA, 25 bp, Homo sapien
gggttcagctatttacatgaggtca

SEQ ID NO: 4908432 - DNA, 25 bp, Homo sapien
gtagtctcttaatgtagtatcatct

SEQ ID NO: 4908433 - DNA, 25 bp, Homo sapien
ctatcagcattgtttagtgtaggta

SEQ ID NO: 4908434 - DNA, 25 bp, Homo sapien
ggctggctttaacagttcttgaaca

SEQ ID NO: 4908435 - DNA, 25 bp, Homo sapien
gatttcttgttgattaaaagtgcag

SEQ ID NO: 4908436 - DNA, 25 bp, Homo sapien
caggaacatcttgctttgccagatt

SEQ ID NO: 4908437 - DNA, 25 bp, Homo sapien
atagcagtctcaccttgtcgtccag

SEQ ID NO: 4908438 - DNA, 25 bp, Homo sapien
gatagcagtctcaccttgtcgtcca

SEQ ID NO: 4908439 - DNA, 25 bp, Homo sapien
tataaggatagtttcagccaagtat

SEQ ID NO: 4908440 - DNA, 25 bp, Homo sapien
taagatttgcttaatgggttggcct

SEQ ID NO: 4908441 - DNA, 25 bp, Homo sapien
ggttggcctgtatgcatgtgttgaa

SEQ ID NO: 4908442 - DNA, 25 bp, Homo sapien
ttaagcggaccaacataagatttgc

SEQ ID NO: 4908443 - DNA, 25 bp, Homo sapien
tagagaataaacaccgctcaaggtt

SEQ ID NO: 4908444 - DNA, 25 bp, Homo sapien
tgggaagggaaactagctctgtctt

SEQ ID NO: 4908445 - DNA, 25 bp, Homo sapien
tgtaaagtgccacacccaatgacat

SEQ ID NO: 4908446 - DNA, 25 bp, Homo sapien
tagacttaatcacacgacatgttgg

SEQ ID NO: 4908447 - DNA, 25 bp, Homo sapien
tcccaattattacacctgatcgaaa

SEQ ID NO: 4908448 - DNA, 25 bp, Homo sapien
ctaacacgcttatttgcaataccag

SEQ ID NO: 4908449 - DNA, 25 bp, Homo sapien
tttccaaggaaaagacttgtagcag

SEQ ID NO: 4908450 - DNA, 25 bp, Homo sapien
taaaagttcctgtcattgtgagtct

SEQ ID NO: 4908451 - DNA, 25 bp, Homo sapien
ggctcccgtgcttgatggactagaa

SEQ ID NO: 4908452 - DNA, 25 bp, Homo sapien
gtttggggacgcatatcctgctttg

SEQ ID NO: 4908453 - DNA, 25 bp, Homo sapien
aatttcctgggctccgcggtgggag

SEQ ID NO: 4908454 - DNA, 25 bp, Homo sapien
tggtgagcccgcagtcggctcccgt

SEQ ID NO: 4908455 - DNA, 25 bp, Homo sapien
ggtagggcgcccacacgcgagatcc

SEQ ID NO: 4908456 - DNA, 25 bp, Homo sapien
ccgaaggtggacgaggcatggccgg

SEQ ID NO: 4908457 - DNA, 25 bp, Homo sapien
cgcagtggcgcaggtgaggccgccc

SEQ ID NO: 4908458 - DNA, 25 bp, Homo sapien
tcgcttccgcccgagataatgactc

SEQ ID NO: 4908459 - DNA, 25 bp, Homo sapien
ctcgcgcagtcaccgagcgcagatc

SEQ ID NO: 4908460 - DNA, 25 bp, Homo sapien
gatcccgcgctctcgattggaacgc

SEQ ID NO: 4908461 - DNA, 25 bp, Homo sapien
gccataaaaggtctaggaccgcttc

SEQ ID NO: 4908462 - DNA, 25 bp, Homo sapien
tcactcccgtttccgagccataaaa

SEQ ID NO: 4908463 - DNA, 25 bp, Homo sapien
tggatttacaggcacatacacccag

SEQ ID NO: 4908464 - DNA, 25 bp, Homo sapien
tttctgacctgcacaagttcactcc

SEQ ID NO: 4908465 - DNA, 25 bp, Homo sapien
cgcgatcccactaaggattagcaca

SEQ ID NO: 4908466 - DNA, 25 bp, Homo sapien
gcacagaagtttggatctgtcccat

SEQ ID NO: 4908467 - DNA, 25 bp, Homo sapien
cgctcccaggaggtcgtcatgttga

SEQ ID NO: 4908468 - DNA, 25 bp, Homo sapien
cagactcagcgagccaactctgaat

SEQ ID NO: 4908469 - DNA, 25 bp, Homo sapien
gtgtgtattcagactcagcgagcca

SEQ ID NO: 4908470 - DNA, 25 bp, Homo sapien
tattcagactcagcgagccaactct

SEQ ID NO: 4908471 - DNA, 25 bp, Homo sapien
ctcagcgagccaactctgaattctt

SEQ ID NO: 4908472 - DNA, 25 bp, Homo sapien
gacctgggtagtgacctgcaaacca

SEQ ID NO: 4908473 - DNA, 25 bp, Homo sapien
tgggtagtgacctgcaaaccacact

SEQ ID NO: 4908474 - DNA, 25 bp, Homo sapien
cctgggtagtgacctgcaaaccaca

SEQ ID NO: 4908475 - DNA, 25 bp, Homo sapien
ggtagtgacctgcaaaccacactgc

SEQ ID NO: 4908476 - DNA, 25 bp, Homo sapien
attctgcacagtccacggaattctt

SEQ ID NO: 4908477 - DNA, 25 bp, Homo sapien
agctgatctgtgatccctgagatcg

SEQ ID NO: 4908478 - DNA, 25 bp, Homo sapien
ggagctgatctgtgatccctgagat

SEQ ID NO: 4908479 - DNA, 25 bp, Homo sapien
cttagtacttttagtgagctggagc

SEQ ID NO: 4908480 - DNA, 25 bp, Homo sapien
gacaataactcaggctcaatgcagg

SEQ ID NO: 4908481 - DNA, 25 bp, Homo sapien
cacccagctgggtagcaagatatgg

SEQ ID NO: 4908482 - DNA, 25 bp, Homo sapien
taaacggagcctgcaacgagtgatg

SEQ ID NO: 4908483 - DNA, 25 bp, Homo sapien
gagtttatgttctagcaggcaggac

SEQ ID NO: 4908484 - DNA, 25 bp, Homo sapien
gtgtgcaccttcttccgatttgtcc

SEQ ID NO: 4908485 - DNA, 25 bp, Homo sapien
agcttagtgtgcaccttcttccgat

SEQ ID NO: 4908486 - DNA, 25 bp, Homo sapien
tagtgtgcaccttcttccgatttgt

SEQ ID NO: 4908487 - DNA, 25 bp, Homo sapien
ttagtgtgcaccttcttccgatttg

SEQ ID NO: 4908488 - DNA, 25 bp, Homo sapien
gaaaaacccctgtcaggagatgaaa

SEQ ID NO: 4908489 - DNA, 25 bp, Homo sapien
cagaggttcatcctgttttggtaaa

SEQ ID NO: 4908490 - DNA, 25 bp, Homo sapien
ccaaggattaagagactctgcctac

SEQ ID NO: 4908491 - DNA, 25 bp, Homo sapien
aacataccatcatccttgagaagtg

SEQ ID NO: 4908492 - DNA, 25 bp, Homo sapien
gtattaaagctattggcaaaggtca

SEQ ID NO: 4908493 - DNA, 25 bp, Homo sapien
tcagcaactctattggtattaaagc

SEQ ID NO: 4908494 - DNA, 25 bp, Homo sapien
ctgccacagattggataatcaatat

SEQ ID NO: 4908495 - DNA, 25 bp, Homo sapien
taatcaatatcagcaactctattgg

SEQ ID NO: 4908496 - DNA, 25 bp, Homo sapien
tgacactatcttccagtagacgatg

SEQ ID NO: 4908497 - DNA, 25 bp, Homo sapien
taggaacattaagtttcaggaccac

SEQ ID NO: 4908498 - DNA, 25 bp, Homo sapien
gaattgaatcggagggcaaccagct

SEQ ID NO: 4908499 - DNA, 25 bp, Homo sapien
taatactcacctgcatagacattgc

SEQ ID NO: 4908500 - DNA, 25 bp, Homo sapien
ttccaggcctggctactccacaatc

SEQ ID NO: 4908501 - DNA, 25 bp, Homo sapien
aacctcatcgcttgaactaggttga

SEQ ID NO: 4908502 - DNA, 25 bp, Homo sapien
tcttccaggcctggctactccacaa

SEQ ID NO: 4908503 - DNA, 25 bp, Homo sapien
ataaacctcatcgcttgaactaggt

SEQ ID NO: 4908504 - DNA, 25 bp, Homo sapien
tgcccctgaggtgccttgagctgcc

SEQ ID NO: 4908505 - DNA, 25 bp, Homo sapien
gagctgccctggactcaggatgata

SEQ ID NO: 4908506 - DNA, 25 bp, Homo sapien
agctgccctggactcaggatgatac

SEQ ID NO: 4908507 - DNA, 25 bp, Homo sapien
ctctgcccctgaggtgccttgagct

SEQ ID NO: 4908508 - DNA, 25 bp, Homo sapien
gggtagtggaagctctgagataaaa

SEQ ID NO: 4908509 - DNA, 25 bp, Homo sapien
aacagagactttgagtcagacgagg

SEQ ID NO: 4908510 - DNA, 25 bp, Homo sapien
agcccttcgaagaacagcaagaaat

SEQ ID NO: 4908511 - DNA, 25 bp, Homo sapien
gtagtggaagctctgagataaaaga

SEQ ID NO: 4908512 - DNA, 25 bp, Homo sapien
tagaaactagcaagggtcctgtctt

SEQ ID NO: 4908513 - DNA, 25 bp, Homo sapien
ttagaaactagcaagggtcctgtct

SEQ ID NO: 4908514 - DNA, 25 bp, Homo sapien
tcagccagccgtggatttcacagag

SEQ ID NO: 4908515 - DNA, 25 bp, Homo sapien
ttttgcataagagagagccaccaag

SEQ ID NO: 4908516 - DNA, 25 bp, Homo sapien
cagcgaggttgtaccatgaggccca

SEQ ID NO: 4908517 - DNA, 25 bp, Homo sapien
cagggccattcttggtgcatagcca

SEQ ID NO: 4908518 - DNA, 25 bp, Homo sapien
taggagcatgctctgcagaccaaga

SEQ ID NO: 4908519 - DNA, 25 bp, Homo sapien
ttgtactgacttggatagacctggc

SEQ ID NO: 4908520 - DNA, 25 bp, Homo sapien
gatgctcagcggtcaaaactctttg

SEQ ID NO: 4908521 - DNA, 25 bp, Homo sapien
gagtgaccctcaaccagcaagaatg

SEQ ID NO: 4908522 - DNA, 25 bp, Homo sapien
cacctggaggagaaagcgcttctgt

SEQ ID NO: 4908523 - DNA, 25 bp, Homo sapien
ccatctggagcagtcatgggccata

SEQ ID NO: 4908524 - DNA, 25 bp, Homo sapien
gagagaggtttctccgctgtccact

SEQ ID NO: 4908525 - DNA, 25 bp, Homo sapien
attgtgtacggcctctgcccaggca

SEQ ID NO: 4908526 - DNA, 25 bp, Homo sapien
ctgcaaggcaggtctttatccacat

SEQ ID NO: 4908527 - DNA, 25 bp, Homo sapien
ctgatgagctgtcgcccacagctgc

SEQ ID NO: 4908528 - DNA, 25 bp, Homo sapien
agagcctgatgagctgtcgcccaca

SEQ ID NO: 4908529 - DNA, 25 bp, Homo sapien
cacatgaccctgacgttcctgggct

SEQ ID NO: 4908530 - DNA, 25 bp, Homo sapien
aagcacgaagaagcaggcagagtgc

SEQ ID NO: 4908531 - DNA, 25 bp, Homo sapien
ctgtggaagcacgaagaagcaggca

SEQ ID NO: 4908532 - DNA, 25 bp, Homo sapien
tggaagcacgaagaagcaggcagag

SEQ ID NO: 4908533 - DNA, 25 bp, Homo sapien
tgtggaagcacgaagaagcaggcag

SEQ ID NO: 4908534 - DNA, 25 bp, Homo sapien
aggagatgggcagcctacaccgaga

SEQ ID NO: 4908535 - DNA, 25 bp, Homo sapien
tcccttcgaagagctccatccagtt

SEQ ID NO: 4908536 - DNA, 25 bp, Homo sapien
agtccctccagagttccagcagctc

SEQ ID NO: 4908537 - DNA, 25 bp, Homo sapien
cataggagcagtgccagaggagagc

SEQ ID NO: 4908538 - DNA, 25 bp, Homo sapien
ttgggcagtgctgtacatcccatca

SEQ ID NO: 4908539 - DNA, 25 bp, Homo sapien
gggtagtatgggctcccaggctaac

SEQ ID NO: 4908540 - DNA, 25 bp, Homo sapien
ccccaagtctgggtagtatgggctc

SEQ ID NO: 4908541 - DNA, 25 bp, Homo sapien
tacaggtcctctgcttattgacccc

SEQ ID NO: 4908542 - DNA, 25 bp, Homo sapien
gccagattccgcctgctgggagaag

SEQ ID NO: 4908543 - DNA, 25 bp, Homo sapien
gagttgagatgtggagctctctagc

SEQ ID NO: 4908544 - DNA, 25 bp, Homo sapien
caagcctggcatccagcttgtgaaa

SEQ ID NO: 4908545 - DNA, 25 bp, Homo sapien
tgtagccactactctgcacaaagca

SEQ ID NO: 4908546 - DNA, 25 bp, Homo sapien
gagccctcgagtgaatccagacgtt

SEQ ID NO: 4908547 - DNA, 25 bp, Homo sapien
tgatagaatcgaggagggatgggca

SEQ ID NO: 4908548 - DNA, 25 bp, Homo sapien
ccctgttagctagcgtctgaggagt

SEQ ID NO: 4908549 - DNA, 25 bp, Homo sapien
gaagaagccagacatacgccctgtt

SEQ ID NO: 4908550 - DNA, 25 bp, Homo sapien
ctgcacatttaggtttgttagaact

SEQ ID NO: 4908551 - DNA, 25 bp, Homo sapien
acttggctacatcaaagatgagtaa

SEQ ID NO: 4908552 - DNA, 25 bp, Homo sapien
aggtttgttagaacttggctacatc

SEQ ID NO: 4908553 - DNA, 25 bp, Homo sapien
catcaaagatgagtaagtcacaatc

SEQ ID NO: 4908554 - DNA, 25 bp, Homo sapien
ggcatcatcaaaggcatggttcagg

SEQ ID NO: 4908555 - DNA, 25 bp, Homo sapien
gaatacagcacagctatatttactc

SEQ ID NO: 4908556 - DNA, 25 bp, Homo sapien
catcaaaggcatggttcagggttgg

SEQ ID NO: 4908557 - DNA, 25 bp, Homo sapien
cctggaaaagtaatatggcatcatc

SEQ ID NO: 4908558 - DNA, 25 bp, Homo sapien
gagtttcgtgtctcataaagtagcc

SEQ ID NO: 4908559 - DNA, 25 bp, Homo sapien
cacaccatgggaaaagagtttcgtg

SEQ ID NO: 4908560 - DNA, 25 bp, Homo sapien
aagtagcctactggatgtgctacac

SEQ ID NO: 4908561 - DNA, 25 bp, Homo sapien
tgtgctacacttgagggcagacaag

SEQ ID NO: 4908562 - DNA, 25 bp, Homo sapien
ggaaacacgaaaggagccttctgga

SEQ ID NO: 4908563 - DNA, 25 bp, Homo sapien
gacaatccttctccaggaaacacga

SEQ ID NO: 4908564 - DNA, 25 bp, Homo sapien
tcagtcacacctgacccagaaatag

SEQ ID NO: 4908565 - DNA, 25 bp, Homo sapien
gccttctggaatggccgggctggtc

SEQ ID NO: 4908566 - DNA, 25 bp, Homo sapien
gcttcctcgagcaagcatcaggcct

SEQ ID NO: 4908567 - DNA, 25 bp, Homo sapien
tctgcgagggcactttcaagaccca

SEQ ID NO: 4908568 - DNA, 25 bp, Homo sapien
cttgaaaggatgacacgtggtggct

SEQ ID NO: 4908569 - DNA, 25 bp, Homo sapien
tcaggcctcaggtatgggaaagccc

SEQ ID NO: 4908570 - DNA, 25 bp, Homo sapien
tgaggacccgtagcctttttgagga

SEQ ID NO: 4908571 - DNA, 25 bp, Homo sapien
ctttaattctgagtgaggacccgta

SEQ ID NO: 4908572 - DNA, 25 bp, Homo sapien
gacccgtagcctttttgaggatgaa

SEQ ID NO: 4908573 - DNA, 25 bp, Homo sapien
tctgagtgaggacccgtagcctttt

SEQ ID NO: 4908574 - DNA, 25 bp, Homo sapien
cattatcagggtagccagcatggag

SEQ ID NO: 4908575 - DNA, 25 bp, Homo sapien
aggttcccagagtgcagacacgcct

SEQ ID NO: 4908576 - DNA, 25 bp, Homo sapien
gcaggcagagggttcacattatcag

SEQ ID NO: 4908577 - DNA, 25 bp, Homo sapien
ggagcttactctcgcaggttcccag

SEQ ID NO: 4908578 - DNA, 25 bp, Homo sapien
gccccacgtggagataaagcacttg

SEQ ID NO: 4908579 - DNA, 25 bp, Homo sapien
gatccgaattgagccagttcagcca

SEQ ID NO: 4908580 - DNA, 25 bp, Homo sapien
cctaactgtgggtggtgtgctcgtc

SEQ ID NO: 4908581 - DNA, 25 bp, Homo sapien
aactacctaagggtgtccatgggtg

SEQ ID NO: 4908582 - DNA, 25 bp, Homo sapien
tatccagggcttctaagaccccaga

SEQ ID NO: 4908583 - DNA, 25 bp, Homo sapien
agtggcaagcttaagtctcccggga

SEQ ID NO: 4908584 - DNA, 25 bp, Homo sapien
gaaggaattccacggtctcccagga

SEQ ID NO: 4908585 - DNA, 25 bp, Homo sapien
tcctaaaagagatgatatggcctcc

SEQ ID NO: 4908586 - DNA, 25 bp, Homo sapien
tagagactggtacattgtgtgtgcc

SEQ ID NO: 4908587 - DNA, 25 bp, Homo sapien
gagtctacacataggatcgtcccca

SEQ ID NO: 4908588 - DNA, 25 bp, Homo sapien
gcatggcacctgattcctagaagga

SEQ ID NO: 4908589 - DNA, 25 bp, Homo sapien
tcagtcctaccagagaaaggtgtct

SEQ ID NO: 4908590 - DNA, 25 bp, Homo sapien
taactcctgtgagtaattatgctcc

SEQ ID NO: 4908591 - DNA, 25 bp, Homo sapien
acctcaatatgtgctccctggcttg

SEQ ID NO: 4908592 - DNA, 25 bp, Homo sapien
ctggcttgcatctttgccttcacct

SEQ ID NO: 4908593 - DNA, 25 bp, Homo sapien
tatgctccgagtcacggtctctttc

SEQ ID NO: 4908594 - DNA, 25 bp, Homo sapien
gaggcctgtgtcttcccctcaattt

SEQ ID NO: 4908595 - DNA, 25 bp, Homo sapien
ttcccctcaatttccatcctgggct

SEQ ID NO: 4908596 - DNA, 25 bp, Homo sapien
cagctctgaggcctgtgtcttcccc

SEQ ID NO: 4908597 - DNA, 25 bp, Homo sapien
atcctgggctgcttgttgctcttcc

SEQ ID NO: 4908598 - DNA, 25 bp, Homo sapien
cactgagtgtgagaagcatgggcta

SEQ ID NO: 4908599 - DNA, 25 bp, Homo sapien
ggatcctgagaaacaatagaggcca

SEQ ID NO: 4908600 - DNA, 25 bp, Homo sapien
agcctcaggttgcagccagtcctga

SEQ ID NO: 4908601 - DNA, 25 bp, Homo sapien
cgatggacatcgtgttttctgcaca

SEQ ID NO: 4908602 - DNA, 25 bp, Homo sapien
tggaggagcatggagcctcccacgc

SEQ ID NO: 4908603 - DNA, 25 bp, Homo sapien
ggtgagccccagacgacacgggaca

SEQ ID NO: 4908604 - DNA, 25 bp, Homo sapien
gagccccagacgacacgggacactg

SEQ ID NO: 4908605 - DNA, 25 bp, Homo sapien
tgcaggtcagacatgaagacagagc

SEQ ID NO: 4908606 - DNA, 25 bp, Homo sapien
acttgtcctgcccttcctgagttac

SEQ ID NO: 4908607 - DNA, 25 bp, Homo sapien
tgcccttcctgagttactccttcac

SEQ ID NO: 4908608 - DNA, 25 bp, Homo sapien
cctgcccttcctgagttactccttc

SEQ ID NO: 4908609 - DNA, 25 bp, Homo sapien
tcacttgtcctgcccttcctgagtt

SEQ ID NO: 4908610 - DNA, 25 bp, Homo sapien
atgtgagtgccttgacgctctgctc

SEQ ID NO: 4908611 - DNA, 25 bp, Homo sapien
gggagcggaaggccagcaaggctga

SEQ ID NO: 4908612 - DNA, 25 bp, Homo sapien
agaaagcgatgtgagtgccttgacg

SEQ ID NO: 4908613 - DNA, 25 bp, Homo sapien
cctctttgggcctaaaggctgtggg

SEQ ID NO: 4908614 - DNA, 25 bp, Homo sapien
ggaatgagttaataagaaaaggctg

SEQ ID NO: 4908615 - DNA, 25 bp, Homo sapien
ttttgttggtgaagagaaacgccat

SEQ ID NO: 4908616 - DNA, 25 bp, Homo sapien
attttgttggtgaagagaaacgcca

SEQ ID NO: 4908617 - DNA, 25 bp, Homo sapien
tgagaacgcgtaaagcaaacattta

SEQ ID NO: 4908618 - DNA, 25 bp, Homo sapien
ctgagaacgcgtaaagcaaacattt

SEQ ID NO: 4908619 - DNA, 25 bp, Homo sapien
ttctcctcccgatgacctttaggaa

SEQ ID NO: 4908620 - DNA, 25 bp, Homo sapien
acaagccttcccacatcgctcccac

SEQ ID NO: 4908621 - DNA, 25 bp, Homo sapien
ctcggcttctcctcccgatgacctt

SEQ ID NO: 4908622 - DNA, 25 bp, Homo sapien
ggcttctcctcccgatgacctttag

SEQ ID NO: 4908623 - DNA, 25 bp, Homo sapien
tctgcgaataccctgggggtctcgc

SEQ ID NO: 4908624 - DNA, 25 bp, Homo sapien
ggtctgcgaataccctgggggtctc

SEQ ID NO: 4908625 - DNA, 25 bp, Homo sapien
gtctgcgaataccctgggggtctcg

SEQ ID NO: 4908626 - DNA, 25 bp, Homo sapien
ggcggatgtgacagaccctccagga

SEQ ID NO: 4908627 - DNA, 25 bp, Homo sapien
gcggatgtgacagaccctccaggac

SEQ ID NO: 4908628 - DNA, 25 bp, Homo sapien
tggcggatgtgacagaccctccagg

SEQ ID NO: 4908629 - DNA, 25 bp, Homo sapien
gtggcggatgtgacagaccctccag

SEQ ID NO: 4908630 - DNA, 25 bp, Homo sapien
caggagagaacagtcaacctgttgt

SEQ ID NO: 4908631 - DNA, 25 bp, Homo sapien
atcaggagagaacagtcaacctgtt

SEQ ID NO: 4908632 - DNA, 25 bp, Homo sapien
gagagaacagtcaacctgttgtgct

SEQ ID NO: 4908633 - DNA, 25 bp, Homo sapien
tctgcggtttggagcaatcaggaga

SEQ ID NO: 4908634 - DNA, 25 bp, Homo sapien
tgacagtttcagcctccgggttggg

SEQ ID NO: 4908635 - DNA, 25 bp, Homo sapien
ttcagcctccgggttggggcaggag

SEQ ID NO: 4908636 - DNA, 25 bp, Homo sapien
catgacagtttcagcctccgggttg

SEQ ID NO: 4908637 - DNA, 25 bp, Homo sapien
aggcaggtggtagccaaggcactgc

SEQ ID NO: 4908638 - DNA, 25 bp, Homo sapien
ccctgctgttaggatctggctgctc

SEQ ID NO: 4908639 - DNA, 25 bp, Homo sapien
tgctcaccaggtagagacatccagg

SEQ ID NO: 4908640 - DNA, 25 bp, Homo sapien
agaacccagggagagctgtccagtc

SEQ ID NO: 4908641 - DNA, 25 bp, Homo sapien
tagagacatccagggaaaagtggcc

SEQ ID NO: 4908642 - DNA, 25 bp, Homo sapien
caaggtggattacatccagatgaag

SEQ ID NO: 4908643 - DNA, 25 bp, Homo sapien
ccaatttagtccaatcccaagttct

SEQ ID NO: 4908644 - DNA, 25 bp, Homo sapien
cagaggcagcctaggagatccaatt

SEQ ID NO: 4908645 - DNA, 25 bp, Homo sapien
ctagattaggtgtcaggcgttccgc

SEQ ID NO: 4908646 - DNA, 25 bp, Homo sapien
catcagccatgagtgagaacagagc

SEQ ID NO: 4908647 - DNA, 25 bp, Homo sapien
aagttgtaaggacatcctcacggag

SEQ ID NO: 4908648 - DNA, 25 bp, Homo sapien
gctgcagcaacgtgaaattttcctc

SEQ ID NO: 4908649 - DNA, 25 bp, Homo sapien
tgtcctcagaggtggtccaaatgat

SEQ ID NO: 4908650 - DNA, 25 bp, Homo sapien
agatctgatttctgcgtgaagccgc

SEQ ID NO: 4908651 - DNA, 25 bp, Homo sapien
tcctccttggtgttctttgaaagct

SEQ ID NO: 4908652 - DNA, 25 bp, Homo sapien
gggtcatactcttcgtgtgcattac

SEQ ID NO: 4908653 - DNA, 25 bp, Homo sapien
ctttattggcccgggctgccttgca

SEQ ID NO: 4908654 - DNA, 25 bp, Homo sapien
tcttacgtagacacctgataggcct

SEQ ID NO: 4908655 - DNA, 25 bp, Homo sapien
ggagtcttgatcttttggttggttc

SEQ ID NO: 4908656 - DNA, 25 bp, Homo sapien
ttgccattctgtgcactaccgccag

SEQ ID NO: 4908657 - DNA, 25 bp, Homo sapien
gagacactgccgctagaggatcaca

SEQ ID NO: 4908658 - DNA, 25 bp, Homo sapien
ctcttccactgagcgtgcggcttcg

SEQ ID NO: 4908659 - DNA, 25 bp, Homo sapien
gagcgcagctagtctatacccttaa

SEQ ID NO: 4908660 - DNA, 25 bp, Homo sapien
tatcggcatgtatagggtgtactct

SEQ ID NO: 4908661 - DNA, 25 bp, Homo sapien
taaaaatcgctaacagcacagtcat

SEQ ID NO: 4908662 - DNA, 25 bp, Homo sapien
ttttcacaaaaagtgctgttagcgg

SEQ ID NO: 4908663 - DNA, 25 bp, Homo sapien
caatctttttaacgtgtatcggcat

SEQ ID NO: 4908664 - DNA, 25 bp, Homo sapien
ggacagccttcacaccctgttgtag

SEQ ID NO: 4908665 - DNA, 25 bp, Homo sapien
tctggaagaggtatgggaaatgaac

SEQ ID NO: 4908666 - DNA, 25 bp, Homo sapien
aagagaagaatccttgcagggcagg

SEQ ID NO: 4908667 - DNA, 25 bp, Homo sapien
tgggaaaagcctcagattgcagcac

SEQ ID NO: 4908668 - DNA, 25 bp, Homo sapien
ccaagctactgtctgaacactaaga

SEQ ID NO: 4908669 - DNA, 25 bp, Homo sapien
gggacaccaagcctcaggaagaaca

SEQ ID NO: 4908670 - DNA, 25 bp, Homo sapien
tccttaattgcagcccaagaggaca

SEQ ID NO: 4908671 - DNA, 25 bp, Homo sapien
tgggacttaaagtgggtgcctcaag

SEQ ID NO: 4908672 - DNA, 25 bp, Homo sapien
taacactgagagagaattggtccat

SEQ ID NO: 4908673 - DNA, 25 bp, Homo sapien
gcagctgaagacaccatatttaaca

SEQ ID NO: 4908674 - DNA, 25 bp, Homo sapien
tatctcagtgatagggaaatagctg

SEQ ID NO: 4908675 - DNA, 25 bp, Homo sapien
tccccatgtttaactgacacactgg

SEQ ID NO: 4908676 - DNA, 25 bp, Homo sapien
tacatgctagccatctctgatcaaa

SEQ ID NO: 4908677 - DNA, 25 bp, Homo sapien
taataacagggttgtatacaagacc

SEQ ID NO: 4908678 - DNA, 25 bp, Homo sapien
ctatccccttagcaaagcttctgag

SEQ ID NO: 4908679 - DNA, 25 bp, Homo sapien
aaagtcgagttgacaagtttaccag

SEQ ID NO: 4908680 - DNA, 25 bp, Homo sapien
caggtaaaatgatgctagtaggagc

SEQ ID NO: 4908681 - DNA, 25 bp, Homo sapien
catatgccagtcactaagttgtagg

SEQ ID NO: 4908682 - DNA, 25 bp, Homo sapien
taattgtctatactgagaaggttca

SEQ ID NO: 4908683 - DNA, 25 bp, Homo sapien
tacattctatgtgacctacctttct

SEQ ID NO: 4908684 - DNA, 25 bp, Homo sapien
tgcctcccggattcaagcaattctc

SEQ ID NO: 4908685 - DNA, 25 bp, Homo sapien
ggtgccatcacgcgtcactgcaacc

SEQ ID NO: 4908686 - DNA, 25 bp, Homo sapien
gcagtggtgccatcacgcgtcactg

SEQ ID NO: 4908687 - DNA, 25 bp, Homo sapien
gccatcacgcgtcactgcaacctct

SEQ ID NO: 4908688 - DNA, 25 bp, Homo sapien
tccattgtatgttcctgtcctgcaa

SEQ ID NO: 4908689 - DNA, 25 bp, Homo sapien
aattatggtcctagtcagaagaagc

SEQ ID NO: 4908690 - DNA, 25 bp, Homo sapien
taacttgtgtggtcgaataaaagcc

SEQ ID NO: 4908691 - DNA, 25 bp, Homo sapien
gaagctagcacccttccctggtgaa

SEQ ID NO: 4908692 - DNA, 25 bp, Homo sapien
ttaacataaaacaagatttcccaca

SEQ ID NO: 4908693 - DNA, 25 bp, Homo sapien
tttcccacaaaatcagtgtattaag

SEQ ID NO: 4908694 - DNA, 25 bp, Homo sapien
cccacaaaatcagtgtattaagata

SEQ ID NO: 4908695 - DNA, 25 bp, Homo sapien
agatttcccacaaaatcagtgtatt

SEQ ID NO: 4908696 - DNA, 25 bp, Homo sapien
gttgagctgtccaaaagcaggtggt

SEQ ID NO: 4908697 - DNA, 25 bp, Homo sapien
cgcatttaatcaaggagcggttgta

SEQ ID NO: 4908698 - DNA, 25 bp, Homo sapien
tgagagcaagtcctaagttgagctg

SEQ ID NO: 4908699 - DNA, 25 bp, Homo sapien
ttgttgcctcctacgagagcgcctc

SEQ ID NO: 4908700 - DNA, 25 bp, Homo sapien
tctcctctccccaaaacgatggtgt

SEQ ID NO: 4908701 - DNA, 25 bp, Homo sapien
tgagcctacttcctggacccaaaat

SEQ ID NO: 4908702 - DNA, 25 bp, Homo sapien
ggcctcttcctttccgatggttatg

SEQ ID NO: 4908703 - DNA, 25 bp, Homo sapien
ccgatggttatggagaatgagccta

SEQ ID NO: 4908704 - DNA, 25 bp, Homo sapien
gcgacagccgccggtcagctgccag

SEQ ID NO: 4908705 - DNA, 25 bp, Homo sapien
ggcgcgtcttggtccagggtccgtg

SEQ ID NO: 4908706 - DNA, 25 bp, Homo sapien
ggtccgtgaggactggctagatggg

SEQ ID NO: 4908707 - DNA, 25 bp, Homo sapien
agagtgtggcgctcccggtggacgc

SEQ ID NO: 4908708 - DNA, 25 bp, Homo sapien
tgaagaagccgcccggaccgagcgc

SEQ ID NO: 4908709 - DNA, 25 bp, Homo sapien
aggaccgggatcacgtggctcccag

SEQ ID NO: 4908710 - DNA, 25 bp, Homo sapien
gggctgggtgaagaagccgcccgga

SEQ ID NO: 4908711 - DNA, 25 bp, Homo sapien
accaaccaggaccgggatcacgtgg

SEQ ID NO: 4908712 - DNA, 25 bp, Homo sapien
cccggcctagccagcaatttttaat

SEQ ID NO: 4908713 - DNA, 25 bp, Homo sapien
acttaggcttgaatcttgaactcac

SEQ ID NO: 4908714 - DNA, 25 bp, Homo sapien
tgttagcagtcaaactaaacccctc

SEQ ID NO: 4908715 - DNA, 25 bp, Homo sapien
agacgtgggtctcgctatgtactca

SEQ ID NO: 4908716 - DNA, 25 bp, Homo sapien
actgaacacccggatcactgcatgc

SEQ ID NO: 4908717 - DNA, 25 bp, Homo sapien
tctccactcaaatgcaataggcagc

SEQ ID NO: 4908718 - DNA, 25 bp, Homo sapien
tcatttcgtatttttctccactcaa

SEQ ID NO: 4908719 - DNA, 25 bp, Homo sapien
acacccggatcactgcatgccatgt

SEQ ID NO: 4908720 - DNA, 25 bp, Homo sapien
tcttcagacatactcggttcatttg

SEQ ID NO: 4908721 - DNA, 25 bp, Homo sapien
ggttcatttgatcaatatccattta

SEQ ID NO: 4908722 - DNA, 25 bp, Homo sapien
taagctagagcttcatgctatgtca

SEQ ID NO: 4908723 - DNA, 25 bp, Homo sapien
cgtctactatgtttaacatactgcg

SEQ ID NO: 4908724 - DNA, 25 bp, Homo sapien
tcattcacggctagataaacacaga

SEQ ID NO: 4908725 - DNA, 25 bp, Homo sapien
tataacataagtaggacaccagctg

SEQ ID NO: 4908726 - DNA, 25 bp, Homo sapien
tcacaactggagatgaggtgctact

SEQ ID NO: 4908727 - DNA, 25 bp, Homo sapien
gaagttcccatttctagggccaaca

SEQ ID NO: 4908728 - DNA, 25 bp, Homo sapien
tgttgattaatcaccaattctttca

SEQ ID NO: 4908729 - DNA, 25 bp, Homo sapien
ctaaacatttgtcagaatagtctgt

SEQ ID NO: 4908730 - DNA, 25 bp, Homo sapien
gaatagtctgtttattgggaaaata

SEQ ID NO: 4908731 - DNA, 25 bp, Homo sapien
tgttgctattatttgccactaaaca

SEQ ID NO: 4908732 - DNA, 25 bp, Homo sapien
gacttacaattaatggctccttaga

SEQ ID NO: 4908733 - DNA, 25 bp, Homo sapien
tgaatgtctataagacatcagaggg

SEQ ID NO: 4908734 - DNA, 25 bp, Homo sapien
ggcacaacagtgaatgagattcctt

SEQ ID NO: 4908735 - DNA, 25 bp, Homo sapien
tgagaaatctcaacatgcagaagcg

SEQ ID NO: 4908736 - DNA, 25 bp, Homo sapien
tcaggaagatcatcctgccagcaat

SEQ ID NO: 4908737 - DNA, 25 bp, Homo sapien
agtaggtcagatttgtgcttcagga

SEQ ID NO: 4908738 - DNA, 25 bp, Homo sapien
ttcaggaagatcatcctgccagcaa

SEQ ID NO: 4908739 - DNA, 25 bp, Homo sapien
gcctgttatgtccaagtgaatgtga

SEQ ID NO: 4908740 - DNA, 25 bp, Homo sapien
tatgtccaagtgaatgtgaatccat

SEQ ID NO: 4908741 - DNA, 25 bp, Homo sapien
gtccaagtgaatgtgaatccatcat

SEQ ID NO: 4908742 - DNA, 25 bp, Homo sapien
gttatgtccaagtgaatgtgaatcc

SEQ ID NO: 4908743 - DNA, 25 bp, Homo sapien
tttgagtgtaagtaggtttgagtgg

SEQ ID NO: 4908744 - DNA, 25 bp, Homo sapien
gagtgtaagtaggtttgagtgggtc

SEQ ID NO: 4908745 - DNA, 25 bp, Homo sapien
tgttgctggtaatcaaaggaaccat

SEQ ID NO: 4908746 - DNA, 25 bp, Homo sapien
taagtaggtttgagtgggtctctgt

SEQ ID NO: 4908747 - DNA, 25 bp, Homo sapien
taatgagtcaaggtgggaataagca

SEQ ID NO: 4908748 - DNA, 25 bp, Homo sapien
gagtcaaggtgggaataagcagcac

SEQ ID NO: 4908749 - DNA, 25 bp, Homo sapien
ctgggctcacaggtgaccgccagag

SEQ ID NO: 4908750 - DNA, 25 bp, Homo sapien
aggtgaccgccagagaagagtcttg

SEQ ID NO: 4908751 - DNA, 25 bp, Homo sapien
aaagacgtttctgattcacccaggg

SEQ ID NO: 4908752 - DNA, 25 bp, Homo sapien
caaagacgtttctgattcacccagg

SEQ ID NO: 4908753 - DNA, 25 bp, Homo sapien
gcaaagacgtttctgattcacccag

SEQ ID NO: 4908754 - DNA, 25 bp, Homo sapien
tggcaaagacgtttctgattcaccc

SEQ ID NO: 4908755 - DNA, 25 bp, Homo sapien
gattgtgaacattaggcctttgtca

SEQ ID NO: 4908756 - DNA, 25 bp, Homo sapien
tccgatgattagctatgatgagcat

SEQ ID NO: 4908757 - DNA, 25 bp, Homo sapien
catatctttgttgaccacttataca

SEQ ID NO: 4908758 - DNA, 25 bp, Homo sapien
tttacgttccttatagattgtgaac

SEQ ID NO: 4908759 - DNA, 25 bp, Homo sapien
agctgttacctccttatcacttatg

SEQ ID NO: 4908760 - DNA, 25 bp, Homo sapien
gtgaacagctgttacctccttatca

SEQ ID NO: 4908761 - DNA, 25 bp, Homo sapien
tgtacaatgccagtgtgaacagctg

SEQ ID NO: 4908762 - DNA, 25 bp, Homo sapien
tctgtacaatgccagtgtgaacagc

SEQ ID NO: 4908763 - DNA, 25 bp, Homo sapien
tccccatgggagaacgagggtatca

SEQ ID NO: 4908764 - DNA, 25 bp, Homo sapien
gacaggcaggcttggctctaccatt

SEQ ID NO: 4908765 - DNA, 25 bp, Homo sapien
tcattcccagcttggaggcgagaag

SEQ ID NO: 4908766 - DNA, 25 bp, Homo sapien
taagattcaggaagccacggtcaat

SEQ ID NO: 4908767 - DNA, 25 bp, Homo sapien
tcagagtcgctttggcctggctgca

SEQ ID NO: 4908768 - DNA, 25 bp, Homo sapien
ctgctgtcccgttaaacaaaatcca

SEQ ID NO: 4908769 - DNA, 25 bp, Homo sapien
ctaagactgggttttcactctcaga

SEQ ID NO: 4908770 - DNA, 25 bp, Homo sapien
tgacttgtggattcctaagactggg

SEQ ID NO: 4908771 - DNA, 25 bp, Homo sapien
tcaggcccttctcgcagactattgc

SEQ ID NO: 4908772 - DNA, 25 bp, Homo sapien
ggcccttctcgcagactattgcccc

SEQ ID NO: 4908773 - DNA, 25 bp, Homo sapien
catcaggcccttctcgcagactatt

SEQ ID NO: 4908774 - DNA, 25 bp, Homo sapien
cccttctcgcagactattgccccac

SEQ ID NO: 4908775 - DNA, 25 bp, Homo sapien
tgtctgacaaccttgcctttcaatt

SEQ ID NO: 4908776 - DNA, 25 bp, Homo sapien
tacattgataacattcctcagttgg

SEQ ID NO: 4908777 - DNA, 25 bp, Homo sapien
tcttagctgccatatctgtctgaca

SEQ ID NO: 4908778 - DNA, 25 bp, Homo sapien
aatatggcaatttcacggagctaca

SEQ ID NO: 4908779 - DNA, 25 bp, Homo sapien
gttgaatagtaaacagcactgagca

SEQ ID NO: 4908780 - DNA, 25 bp, Homo sapien
agcactctggtggtgaccgtaacca

SEQ ID NO: 4908781 - DNA, 25 bp, Homo sapien
tggtggtgaccgtaaccagagtcat

SEQ ID NO: 4908782 - DNA, 25 bp, Homo sapien
acagcactgagcactctggtggtga

SEQ ID NO: 4908783 - DNA, 25 bp, Homo sapien
ggtcagccatattggaacattcaca

SEQ ID NO: 4908784 - DNA, 25 bp, Homo sapien
gtttaatgtgtgctggaaacctggc

SEQ ID NO: 4908785 - DNA, 25 bp, Homo sapien
gaaacctggctgatggagcctcagg

SEQ ID NO: 4908786 - DNA, 25 bp, Homo sapien
tttcccagcgtctggattctggctc

SEQ ID NO: 4908787 - DNA, 25 bp, Homo sapien
gaagattgaaaaatctgggccatgt

SEQ ID NO: 4908788 - DNA, 25 bp, Homo sapien
aatctgggccatgtcgttgttatac

SEQ ID NO: 4908789 - DNA, 25 bp, Homo sapien
caaccagatatagagggagacaaag

SEQ ID NO: 4908790 - DNA, 25 bp, Homo sapien
acaaagggacacttttgaaatgaag

SEQ ID NO: 4908791 - DNA, 25 bp, Homo sapien
aatgggtacaattgtctgctggtcc

SEQ ID NO: 4908792 - DNA, 25 bp, Homo sapien
ccaagaaggcatctgtcatccctga

SEQ ID NO: 4908793 - DNA, 25 bp, Homo sapien
tatccttccttagaaccagaaaata

SEQ ID NO: 4908794 - DNA, 25 bp, Homo sapien
catccctgaagccttagaaggaagt

SEQ ID NO: 4908795 - DNA, 25 bp, Homo sapien
ggaaatagagttcaaagaaatcaaa

SEQ ID NO: 4908796 - DNA, 25 bp, Homo sapien
tgttcatataaggaaatagagttca

SEQ ID NO: 4908797 - DNA, 25 bp, Homo sapien
cttgttcatataaggaaatagagtt

SEQ ID NO: 4908798 - DNA, 25 bp, Homo sapien
ttcatataaggaaatagagttcaaa

SEQ ID NO: 4908799 - DNA, 25 bp, Homo sapien
ttccatcaggtggttctgaacccag

SEQ ID NO: 4908800 - DNA, 25 bp, Homo sapien
gatccattcttcactgaggtctaag

SEQ ID NO: 4908801 - DNA, 25 bp, Homo sapien
taatcgccgcctaagaaagtcgcct

SEQ ID NO: 4908802 - DNA, 25 bp, Homo sapien
gcagaggctctcaggtaaggattct

SEQ ID NO: 4908803 - DNA, 25 bp, Homo sapien
gcagaggcactggagacactttgca

SEQ ID NO: 4908804 - DNA, 25 bp, Homo sapien
agacactttgcagcaagcacagaga

SEQ ID NO: 4908805 - DNA, 25 bp, Homo sapien
gcaagcacagagaacatcatactgc

SEQ ID NO: 4908806 - DNA, 25 bp, Homo sapien
aagcacagagaacatcatactgctg

SEQ ID NO: 4908807 - DNA, 25 bp, Homo sapien
tggttggggccagcacggcttctct

SEQ ID NO: 4908808 - DNA, 25 bp, Homo sapien
ctggttggggccagcacggcttctc

SEQ ID NO: 4908809 - DNA, 25 bp, Homo sapien
ggggccagcacggcttctctgaggc

SEQ ID NO: 4908810 - DNA, 25 bp, Homo sapien
gttggggccagcacggcttctctga

SEQ ID NO: 4908811 - DNA, 25 bp, Homo sapien
gcccaggatgctaagggaccacttg

SEQ ID NO: 4908812 - DNA, 25 bp, Homo sapien
tattaaatgctgctctataggatag

SEQ ID NO: 4908813 - DNA, 25 bp, Homo sapien
agctgctaatcctgatcccaaagga

SEQ ID NO: 4908814 - DNA, 25 bp, Homo sapien
tcccacttccggctgtgtattaaat

SEQ ID NO: 4908815 - DNA, 25 bp, Homo sapien
gacgtcagaatctgagcaagactgg

SEQ ID NO: 4908816 - DNA, 25 bp, Homo sapien
gaaagacgtcagaatctgagcaaga

SEQ ID NO: 4908817 - DNA, 25 bp, Homo sapien
aagagaaagacgtcagaatctgagc

SEQ ID NO: 4908818 - DNA, 25 bp, Homo sapien
gaatctgagcaagactgggtcacag

SEQ ID NO: 4908819 - DNA, 25 bp, Homo sapien
tccccaaggtcctcgaaggctttca

SEQ ID NO: 4908820 - DNA, 25 bp, Homo sapien
ccccaaggtcctcgaaggctttcat

SEQ ID NO: 4908821 - DNA, 25 bp, Homo sapien
ttagtggaacctctccattggaagc

SEQ ID NO: 4908822 - DNA, 25 bp, Homo sapien
gaatccgaagttagtggaacctctc

SEQ ID NO: 4908823 - DNA, 25 bp, Homo sapien
gagaatgtctatacactgggaatcc

SEQ ID NO: 4908824 - DNA, 25 bp, Homo sapien
gaagcgtggaagcagattcctttct

SEQ ID NO: 4908825 - DNA, 25 bp, Homo sapien
acattgaccgacacacatggtccag

SEQ ID NO: 4908826 - DNA, 25 bp, Homo sapien
tgatgggaggcataaacattgaccg

SEQ ID NO: 4908827 - DNA, 25 bp, Homo sapien
gaggcataaacattgaccgacacac

SEQ ID NO: 4908828 - DNA, 25 bp, Homo sapien
tgcaaatgatgggaggcataaacat

SEQ ID NO: 4908829 - DNA, 25 bp, Homo sapien
gctgacatgaggacccaggtgtgtc

SEQ ID NO: 4908830 - DNA, 25 bp, Homo sapien
gacatgaggacccaggtgtgtcatc

SEQ ID NO: 4908831 - DNA, 25 bp, Homo sapien
catgaggacccaggtgtgtcatctc

SEQ ID NO: 4908832 - DNA, 25 bp, Homo sapien
ctgacatgaggacccaggtgtgtca

SEQ ID NO: 4908833 - DNA, 25 bp, Homo sapien
tgggtagaaagaccagccctgtcca

SEQ ID NO: 4908834 - DNA, 25 bp, Homo sapien
tgttcctcacaaaagaggggcttag

SEQ ID NO: 4908835 - DNA, 25 bp, Homo sapien
aaagtgttggctgaatgttcctcac

SEQ ID NO: 4908836 - DNA, 25 bp, Homo sapien
tttctttgcaagacggctgcccgtg

SEQ ID NO: 4908837 - DNA, 25 bp, Homo sapien
gcttggggtggtgtctgcaccttca

SEQ ID NO: 4908838 - DNA, 25 bp, Homo sapien
agccggacgcccaaaacactgtatt

SEQ ID NO: 4908839 - DNA, 25 bp, Homo sapien
aagccggacgcccaaaacactgtat

SEQ ID NO: 4908840 - DNA, 25 bp, Homo sapien
gaagccggacgcccaaaacactgta

SEQ ID NO: 4908841 - DNA, 25 bp, Homo sapien
ccagagagagcgtgacccacgtctg

SEQ ID NO: 4908842 - DNA, 25 bp, Homo sapien
gagagagcgtgacccacgtctgttg

SEQ ID NO: 4908843 - DNA, 25 bp, Homo sapien
gcgtgacccacgtctgttgcagaag

SEQ ID NO: 4908844 - DNA, 25 bp, Homo sapien
atggcggcagaaagagagccagaga

SEQ ID NO: 4908845 - DNA, 25 bp, Homo sapien
agcaactgctgctctatagcaggga

SEQ ID NO: 4908846 - DNA, 25 bp, Homo sapien
actggacttgtgcggttacctgggt

SEQ ID NO: 4908847 - DNA, 25 bp, Homo sapien
caactggacttgtgcggttacctgg

SEQ ID NO: 4908848 - DNA, 25 bp, Homo sapien
tggacttgtgcggttacctgggtgg

SEQ ID NO: 4908849 - DNA, 25 bp, Homo sapien
gacttgtgcggttacctgggtggaa

SEQ ID NO: 4908850 - DNA, 25 bp, Homo sapien
ccttcttttcactccgcctctgttt

SEQ ID NO: 4908851 - DNA, 25 bp, Homo sapien
tcactccgcctctgttttgctttac

SEQ ID NO: 4908852 - DNA, 25 bp, Homo sapien
ggttcttcatcaatttcagctgcta

SEQ ID NO: 4908853 - DNA, 25 bp, Homo sapien
ttccgtgccttcttttcactccgcc

SEQ ID NO: 4908854 - DNA, 25 bp, Homo sapien
ccggatggtgactctagtaactcct

SEQ ID NO: 4908855 - DNA, 25 bp, Homo sapien
tttccggatggtgactctagtaact

SEQ ID NO: 4908856 - DNA, 25 bp, Homo sapien
ggatggtgactctagtaactcctgt

SEQ ID NO: 4908857 - DNA, 25 bp, Homo sapien
tccggatggtgactctagtaactcc

SEQ ID NO: 4908858 - DNA, 25 bp, Homo sapien
aaaaaccatgtaggtatccgaagcg

SEQ ID NO: 4908859 - DNA, 25 bp, Homo sapien
ccatgtaggtatccgaagcgggctc

SEQ ID NO: 4908860 - DNA, 25 bp, Homo sapien
aaccatgtaggtatccgaagcgggc

SEQ ID NO: 4908861 - DNA, 25 bp, Homo sapien
aaaccatgtaggtatccgaagcggg

SEQ ID NO: 4908862 - DNA, 25 bp, Homo sapien
gacctcttcgtcttcactgccctct

SEQ ID NO: 4908863 - DNA, 25 bp, Homo sapien
tcgacctcttcgtcttcactgccct

SEQ ID NO: 4908864 - DNA, 25 bp, Homo sapien
cgacctcttcgtcttcactgccctc

SEQ ID NO: 4908865 - DNA, 25 bp, Homo sapien
aaccaagctgcagttactcatctga

SEQ ID NO: 4908866 - DNA, 25 bp, Homo sapien
ctcatctgagacaccaaaaaagttg

SEQ ID NO: 4908867 - DNA, 25 bp, Homo sapien
gcagttactcatctgagacaccaaa

SEQ ID NO: 4908868 - DNA, 25 bp, Homo sapien
ttactcatctgagacaccaaaaaag

SEQ ID NO: 4908869 - DNA, 25 bp, Homo sapien
attattattaccctgaaatcagagc

SEQ ID NO: 4908870 - DNA, 25 bp, Homo sapien
tctgtttaatttggcaaaatactgt

SEQ ID NO: 4908871 - DNA, 25 bp, Homo sapien
gccatcttccactgaactctctttt

SEQ ID NO: 4908872 - DNA, 25 bp, Homo sapien
taccctgaaatcagagccatcttcc

SEQ ID NO: 4908873 - DNA, 25 bp, Homo sapien
ccgctcgtagcaagcattcagcaaa

SEQ ID NO: 4908874 - DNA, 25 bp, Homo sapien
gccaccgctcgtagcaagcattcag

SEQ ID NO: 4908875 - DNA, 25 bp, Homo sapien
tgagccaccgctcgtagcaagcatt

SEQ ID NO: 4908876 - DNA, 25 bp, Homo sapien
caccgctcgtagcaagcattcagca

SEQ ID NO: 4908877 - DNA, 25 bp, Homo sapien
taaggaagatcactctgagacaggt

SEQ ID NO: 4908878 - DNA, 25 bp, Homo sapien
caggctggccttcacggagtttaca

SEQ ID NO: 4908879 - DNA, 25 bp, Homo sapien
caagtgacaggatcagcaaaggcag

SEQ ID NO: 4908880 - DNA, 25 bp, Homo sapien
gaagagagattttaccagacccaga

SEQ ID NO: 4908881 - DNA, 25 bp, Homo sapien
catagccttccctgctctttcagct

SEQ ID NO: 4908882 - DNA, 25 bp, Homo sapien
tgtcacagcctccatagccttccct

SEQ ID NO: 4908883 - DNA, 25 bp, Homo sapien
agtatttccacttgactggttttgg

SEQ ID NO: 4908884 - DNA, 25 bp, Homo sapien
catgctcttctattgttgccagtat

SEQ ID NO: 4908885 - DNA, 25 bp, Homo sapien
ttcattacaagggttcccatgtaga

SEQ ID NO: 4908886 - DNA, 25 bp, Homo sapien
tggtgctcccattgtcacatattac

SEQ ID NO: 4908887 - DNA, 25 bp, Homo sapien
gtagagctggatggtgctcccattg

SEQ ID NO: 4908888 - DNA, 25 bp, Homo sapien
tacaagggttcccatgtagagctgg

SEQ ID NO: 4908889 - DNA, 25 bp, Homo sapien
ctgccaggcttctcgacatgtggaa

SEQ ID NO: 4908890 - DNA, 25 bp, Homo sapien
gccaggcttctcgacatgtggaact

SEQ ID NO: 4908891 - DNA, 25 bp, Homo sapien
aggcttctcgacatgtggaactcac

SEQ ID NO: 4908892 - DNA, 25 bp, Homo sapien
caggcttctcgacatgtggaactca

SEQ ID NO: 4908893 - DNA, 25 bp, Homo sapien
attggattatttacaacacacaata

SEQ ID NO: 4908894 - DNA, 25 bp, Homo sapien
gaaaattggattatttacaacacac

SEQ ID NO: 4908895 - DNA, 25 bp, Homo sapien
ggattatttacaacacacaatacag

SEQ ID NO: 4908896 - DNA, 25 bp, Homo sapien
aaattggattatttacaacacacaa

SEQ ID NO: 4908897 - DNA, 25 bp, Homo sapien
tcttaaagtgtatagaatcgttctc

SEQ ID NO: 4908898 - DNA, 25 bp, Homo sapien
tcgttctccgctataccaaatgtcc

SEQ ID NO: 4908899 - DNA, 25 bp, Homo sapien
atagaatcgttctccgctataccaa

SEQ ID NO: 4908900 - DNA, 25 bp, Homo sapien
ttcttaaagtgtatagaatcgttct

SEQ ID NO: 4908901 - DNA, 25 bp, Homo sapien
ttctatgatgtagggtatgcttttc

SEQ ID NO: 4908902 - DNA, 25 bp, Homo sapien
atttcttgtctttgagtccttttga

SEQ ID NO: 4908903 - DNA, 25 bp, Homo sapien
tccttttgaacagagacttttctat

SEQ ID NO: 4908904 - DNA, 25 bp, Homo sapien
tctttgagtccttttgaacagagac

SEQ ID NO: 4908905 - DNA, 25 bp, Homo sapien
ggttctgattaatgcgaggtagatg

SEQ ID NO: 4908906 - DNA, 25 bp, Homo sapien
caaagtgctcaacaaccgtttggag

SEQ ID NO: 4908907 - DNA, 25 bp, Homo sapien
tgttggcaagagtacccttgggggc

SEQ ID NO: 4908908 - DNA, 25 bp, Homo sapien
tgattaatgcgaggtagatgttggg

SEQ ID NO: 4908909 - DNA, 25 bp, Homo sapien
tccaccatgtcgaaccttgccttta

SEQ ID NO: 4908910 - DNA, 25 bp, Homo sapien
tgcctttattcaggcatctaagcat

SEQ ID NO: 4908911 - DNA, 25 bp, Homo sapien
cagagaagagtcttagccatgatgg

SEQ ID NO: 4908912 - DNA, 25 bp, Homo sapien
tagccatgatggtatctccaccatg

SEQ ID NO: 4908913 - DNA, 25 bp, Homo sapien
cctcaagaaacaccagcatgtcaga

SEQ ID NO: 4908914 - DNA, 25 bp, Homo sapien
ctcaagaaacaccagcatgtcagac

SEQ ID NO: 4908915 - DNA, 25 bp, Homo sapien
ttccctcaagaaacaccagcatgtc

SEQ ID NO: 4908916 - DNA, 25 bp, Homo sapien
tccctcaagaaacaccagcatgtca

SEQ ID NO: 4908917 - DNA, 25 bp, Homo sapien
gcccccctctacaaggtttctgtga

SEQ ID NO: 4908918 - DNA, 25 bp, Homo sapien
tgagcccccctctacaaggtttctg

SEQ ID NO: 4908919 - DNA, 25 bp, Homo sapien
ccatcgtagcctggcaagttgagcc

SEQ ID NO: 4908920 - DNA, 25 bp, Homo sapien
ttatcaccatcgtagcctggcaagt

SEQ ID NO: 4908921 - DNA, 25 bp, Homo sapien
cattccgggtagcagattcccagtc

SEQ ID NO: 4908922 - DNA, 25 bp, Homo sapien
cgggtagcagattcccagtcctgct

SEQ ID NO: 4908923 - DNA, 25 bp, Homo sapien
tcagcattccgggtagcagattccc

SEQ ID NO: 4908924 - DNA, 25 bp, Homo sapien
tccgggtagcagattcccagtcctg

SEQ ID NO: 4908925 - DNA, 25 bp, Homo sapien
tacagatgtccatttgacccacaga

SEQ ID NO: 4908926 - DNA, 25 bp, Homo sapien
tcatcaaccgcatggcagaggcagt

SEQ ID NO: 4908927 - DNA, 25 bp, Homo sapien
cctggtcgactggactacagatgtc

SEQ ID NO: 4908928 - DNA, 25 bp, Homo sapien
cattcacaagaagtgggctcctggc

SEQ ID NO: 4908929 - DNA, 25 bp, Homo sapien
tgctccttccgggtgctgagcatga

SEQ ID NO: 4908930 - DNA, 25 bp, Homo sapien
gaatagatatctctggccttctggg

SEQ ID NO: 4908931 - DNA, 25 bp, Homo sapien
ttttagctctcgaagccggtcagga

SEQ ID NO: 4908932 - DNA, 25 bp, Homo sapien
ggtgtcttttagctctcgaagccgg

SEQ ID NO: 4908933 - DNA, 25 bp, Homo sapien
cttaacgtaatggagacagtctgag

SEQ ID NO: 4908934 - DNA, 25 bp, Homo sapien
gaacaaaatgagaacctttgcagca

SEQ ID NO: 4908935 - DNA, 25 bp, Homo sapien
tggagacactggcatcactgtcgtt

SEQ ID NO: 4908936 - DNA, 25 bp, Homo sapien
cactgtcgttcttggctcagaggag

SEQ ID NO: 4908937 - DNA, 25 bp, Homo sapien
caaaatgagaacctttgcagcagtg

SEQ ID NO: 4908938 - DNA, 25 bp, Homo sapien
gagcggaagacatccgataggtgac

SEQ ID NO: 4908939 - DNA, 25 bp, Homo sapien
cagtgtggactgagcggaagacatc

SEQ ID NO: 4908940 - DNA, 25 bp, Homo sapien
gacatccgataggtgacagagcgca

SEQ ID NO: 4908941 - DNA, 25 bp, Homo sapien
acagagcgcacagccagtcgttggg

SEQ ID NO: 4908942 - DNA, 25 bp, Homo sapien
caagtcttgtaaaccaaggacacag

SEQ ID NO: 4908943 - DNA, 25 bp, Homo sapien
tcaagtcttgtaaaccaaggacaca

SEQ ID NO: 4908944 - DNA, 25 bp, Homo sapien
aagtcttgtaaaccaaggacacagc

SEQ ID NO: 4908945 - DNA, 25 bp, Homo sapien
ccttaggcatccttactatgtattt

SEQ ID NO: 4908946 - DNA, 25 bp, Homo sapien
ctctccttaggcatccttactatgt

SEQ ID NO: 4908947 - DNA, 25 bp, Homo sapien
ctccttaggcatccttactatgtat

SEQ ID NO: 4908948 - DNA, 25 bp, Homo sapien
cttaggcatccttactatgtatttt

SEQ ID NO: 4908949 - DNA, 25 bp, Homo sapien
ctttacaacacagggtgatactgac

SEQ ID NO: 4908950 - DNA, 25 bp, Homo sapien
tgaactcacatctaagaggaggaga

SEQ ID NO: 4908951 - DNA, 25 bp, Homo sapien
ggagacaagcgcataggcccatgtt

SEQ ID NO: 4908952 - DNA, 25 bp, Homo sapien
tgatactgacggaaatagaaatctg

SEQ ID NO: 4908953 - DNA, 25 bp, Homo sapien
tgtgttctttgactgatccatccct

SEQ ID NO: 4908954 - DNA, 25 bp, Homo sapien
tgactgatccatcccttgtgtgcct

SEQ ID NO: 4908955 - DNA, 25 bp, Homo sapien
tgtagataaatcctgaatgctgtgt

SEQ ID NO: 4908956 - DNA, 25 bp, Homo sapien
tatttccttctagtagtgtagataa

SEQ ID NO: 4908957 - DNA, 25 bp, Homo sapien
atcttcccacgaagtcctgctgtca

SEQ ID NO: 4908958 - DNA, 25 bp, Homo sapien
tcttcccacgaagtcctgctgtcat

SEQ ID NO: 4908959 - DNA, 25 bp, Homo sapien
ttgccgcagaagacaccgaaaaagg

SEQ ID NO: 4908960 - DNA, 25 bp, Homo sapien
agacaccgaaaaaggcaaaatactg

SEQ ID NO: 4908961 - DNA, 25 bp, Homo sapien
tctctcagcattgccgcagaagaca

SEQ ID NO: 4908962 - DNA, 25 bp, Homo sapien
ttggctgtttctctcagcattgccg

SEQ ID NO: 4908963 - DNA, 25 bp, Homo sapien
tttgcaaggtaaagaagcaaaataa

SEQ ID NO: 4908964 - DNA, 25 bp, Homo sapien
tggctggaagccgttagctatttgc

SEQ ID NO: 4908965 - DNA, 25 bp, Homo sapien
ctggaagccgttagctatttgcaag

SEQ ID NO: 4908966 - DNA, 25 bp, Homo sapien
ccctggctggaagccgttagctatt

SEQ ID NO: 4908967 - DNA, 25 bp, Homo sapien
ctgggtccgacaggcatgtgcacgc

SEQ ID NO: 4908968 - DNA, 25 bp, Homo sapien
ttttcttttaaagacgcaccgatga

SEQ ID NO: 4908969 - DNA, 25 bp, Homo sapien
acatgcgcatgtttggaccagaccc

SEQ ID NO: 4908970 - DNA, 25 bp, Homo sapien
ggaactcggaactatggaaaggtca

SEQ ID NO: 4908971 - DNA, 25 bp, Homo sapien
ttagggtttcgtgggaacatgcgca

SEQ ID NO: 4908972 - DNA, 25 bp, Homo sapien
tggctgaaataatcgagggaactcg

SEQ ID NO: 4908973 - DNA, 25 bp, Homo sapien
cccgccgagagcagaaagtttttga

SEQ ID NO: 4908974 - DNA, 25 bp, Homo sapien
aattttttgagatatggcgagaggc

SEQ ID NO: 4908975 - DNA, 25 bp, Homo sapien
ttggtgtccttttgccccgccgaga

SEQ ID NO: 4908976 - DNA, 25 bp, Homo sapien
ctttcccttgattttgacagatttg

SEQ ID NO: 4908977 - DNA, 25 bp, Homo sapien
tgtcctgcacttcaaatgatgactg

SEQ ID NO: 4908978 - DNA, 25 bp, Homo sapien
caagtaagtgtgactgttctgactg

SEQ ID NO: 4908979 - DNA, 25 bp, Homo sapien
tgagagacccgaagccactgcaagt

SEQ ID NO: 4908980 - DNA, 25 bp, Homo sapien
ttcttcttccggagacagtttgatg

SEQ ID NO: 4908981 - DNA, 25 bp, Homo sapien
accaccagctctcgaagcctcaacc

SEQ ID NO: 4908982 - DNA, 25 bp, Homo sapien
ccaccagctctcgaagcctcaacct

SEQ ID NO: 4908983 - DNA, 25 bp, Homo sapien
cagtgtggatatcaggtaggtctgc

SEQ ID NO: 4908984 - DNA, 25 bp, Homo sapien
tctgcaaggctttactggattagac

SEQ ID NO: 4908985 - DNA, 25 bp, Homo sapien
gattatttctgttgggagactgccc

SEQ ID NO: 4908986 - DNA, 25 bp, Homo sapien
gatacattagcacttgccctctggg

SEQ ID NO: 4908987 - DNA, 25 bp, Homo sapien
tgggttcagacaggcagtatattct

SEQ ID NO: 4908988 - DNA, 25 bp, Homo sapien
tagagccaggtttaacaaagcaagg

SEQ ID NO: 4908989 - DNA, 25 bp, Homo sapien
gcttccactggtaggttattgttac

SEQ ID NO: 4908990 - DNA, 25 bp, Homo sapien
cctcagtgagcgttcaacagtctgt

SEQ ID NO: 4908991 - DNA, 25 bp, Homo sapien
gagagccactggacctacaagaagg

SEQ ID NO: 4908992 - DNA, 25 bp, Homo sapien
gaatttagggagatacagttcagcc

SEQ ID NO: 4908993 - DNA, 25 bp, Homo sapien
gaaagatcgtatgctaatcagtgag

SEQ ID NO: 4908994 - DNA, 25 bp, Homo sapien
agccaggagccaagtttataccacc

SEQ ID NO: 4908995 - DNA, 25 bp, Homo sapien
caagcttggcctagaaaatcaagtg

SEQ ID NO: 4908996 - DNA, 25 bp, Homo sapien
cagtgcaagtaagctcccatccata

SEQ ID NO: 4908997 - DNA, 25 bp, Homo sapien
tacaaagctgttaggcccctaggcc

SEQ ID NO: 4908998 - DNA, 25 bp, Homo sapien
tccatattagttttccaggctgcca

SEQ ID NO: 4908999 - DNA, 25 bp, Homo sapien
gccattgaatctgttgtgaagccat

SEQ ID NO: 4909000 - DNA, 25 bp, Homo sapien
tatgtcatcatatgcggggccagta

SEQ ID NO: 4909001 - DNA, 25 bp, Homo sapien
tccaccatatgtcatcatatgcggg

SEQ ID NO: 4909002 - DNA, 25 bp, Homo sapien
gggccagtatagcagatctgccatt

SEQ ID NO: 4909003 - DNA, 25 bp, Homo sapien
caaactgtcccaaattgtctgtgca

SEQ ID NO: 4909004 - DNA, 25 bp, Homo sapien
ctttctgtactgaccactatggcca

SEQ ID NO: 4909005 - DNA, 25 bp, Homo sapien
cagaccactctagggttttgtaggg

SEQ ID NO: 4909006 - DNA, 25 bp, Homo sapien
tttgttcagatagcttgttgtcccc

SEQ ID NO: 4909007 - DNA, 25 bp, Homo sapien
gcagctcggcggcagcctgtgagag

SEQ ID NO: 4909008 - DNA, 25 bp, Homo sapien
gggtcagttcttcgagtagatctca

SEQ ID NO: 4909009 - DNA, 25 bp, Homo sapien
ttcttcgagtagatctcaagctgcg

SEQ ID NO: 4909010 - DNA, 25 bp, Homo sapien
tgagagctgagggtcagttcttcga

SEQ ID NO: 4909011 - DNA, 25 bp, Homo sapien
agctgccattggcagaggcgcgctc

SEQ ID NO: 4909012 - DNA, 25 bp, Homo sapien
ctcaggtgagctgccattggcagag

SEQ ID NO: 4909013 - DNA, 25 bp, Homo sapien
agaggcgcgctcaggtaaggccctt

SEQ ID NO: 4909014 - DNA, 25 bp, Homo sapien
caggtaaggcccttctccgagtgca

SEQ ID NO: 4909015 - DNA, 25 bp, Homo sapien
ccgagggacgagctgcgcgatgatt

SEQ ID NO: 4909016 - DNA, 25 bp, Homo sapien
gagggacgagctgcgcgatgattgg

SEQ ID NO: 4909017 - DNA, 25 bp, Homo sapien
gcccgagggacgagctgcgcgatga

SEQ ID NO: 4909018 - DNA, 25 bp, Homo sapien
cgagggacgagctgcgcgatgattg

SEQ ID NO: 4909019 - DNA, 25 bp, Homo sapien
gcggcgcggagtcctcctggatcgt

SEQ ID NO: 4909020 - DNA, 25 bp, Homo sapien
ggcgcggagtcctcctggatcgtgg

SEQ ID NO: 4909021 - DNA, 25 bp, Homo sapien
cggcgcggagtcctcctggatcgtg

SEQ ID NO: 4909022 - DNA, 25 bp, Homo sapien
gggcggcgcggagtcctcctggatc

SEQ ID NO: 4909023 - DNA, 25 bp, Homo sapien
cactctcgctcgctcgcccgctcgc

SEQ ID NO: 4909024 - DNA, 25 bp, Homo sapien
ctcgctcgctcgcccgctcgcgccc

SEQ ID NO: 4909025 - DNA, 25 bp, Homo sapien
tcgctcgctcgcccgctcgcgccct

SEQ ID NO: 4909026 - DNA, 25 bp, Homo sapien
ctcgctcgcccgctcgcgccctcac

SEQ ID NO: 4909027 - DNA, 25 bp, Homo sapien
tgagagcgcccgagatggcagaaca

SEQ ID NO: 4909028 - DNA, 25 bp, Homo sapien
aaggtgtgtgagagcgcccgagatg

SEQ ID NO: 4909029 - DNA, 25 bp, Homo sapien
cgagatggcagaacaagagctacag

SEQ ID NO: 4909030 - DNA, 25 bp, Homo sapien
agaacaagagctacaggtaattctg

SEQ ID NO: 4909031 - DNA, 25 bp, Homo sapien
caatgaacttgctccgcttttcctg

SEQ ID NO: 4909032 - DNA, 25 bp, Homo sapien
aatgaacttgctccgcttttcctgg

SEQ ID NO: 4909033 - DNA, 25 bp, Homo sapien
gatccaatgaacttgctccgctttt

SEQ ID NO: 4909034 - DNA, 25 bp, Homo sapien
gtttgatccaatgaacttgctccgc

SEQ ID NO: 4909035 - DNA, 25 bp, Homo sapien
gcagccggcgcgtgtgatccactta

SEQ ID NO: 4909036 - DNA, 25 bp, Homo sapien
cagccggcgcgtgtgatccacttac

SEQ ID NO: 4909037 - DNA, 25 bp, Homo sapien
cagcagccggcgcgtgtgatccact

SEQ ID NO: 4909038 - DNA, 25 bp, Homo sapien
agcagccggcgcgtgtgatccactt

SEQ ID NO: 4909039 - DNA, 25 bp, Homo sapien
cacttttactatcaaggcccaaagg

SEQ ID NO: 4909040 - DNA, 25 bp, Homo sapien
caaaacctctggcaatatccaagta

SEQ ID NO: 4909041 - DNA, 25 bp, Homo sapien
taatgcggaaaagtctggatccacc

SEQ ID NO: 4909042 - DNA, 25 bp, Homo sapien
gagctgagaccattcctaagggaag

SEQ ID NO: 4909043 - DNA, 25 bp, Homo sapien
ctaaacgccagatcggtgggagcag

SEQ ID NO: 4909044 - DNA, 25 bp, Homo sapien
tttggacaaatcgaaggaactcagc

SEQ ID NO: 4909045 - DNA, 25 bp, Homo sapien
cccggtgcgagaagatggccgtttc

SEQ ID NO: 4909046 - DNA, 25 bp, Homo sapien
tgttgcggtcacacaaaagcggcca

SEQ ID NO: 4909047 - DNA, 25 bp, Homo sapien
ggaactcagctgaacttccaaatgg

SEQ ID NO: 4909048 - DNA, 25 bp, Homo sapien
gccctaactcgaggcctcacatgag

SEQ ID NO: 4909049 - DNA, 25 bp, Homo sapien
gctcgaggggcgtgcagacgccgtc

SEQ ID NO: 4909050 - DNA, 25 bp, Homo sapien
gaatcgctcagtggcaggcgcccct

SEQ ID NO: 4909051 - DNA, 25 bp, Homo sapien
tcgggggcgcgggtgaatcgctcag

SEQ ID NO: 4909052 - DNA, 25 bp, Homo sapien
cggctcgcacaaagccttccgaggg

SEQ ID NO: 4909053 - DNA, 25 bp, Homo sapien
tgtggctccccgacgcgtctggagt

SEQ ID NO: 4909054 - DNA, 25 bp, Homo sapien
agagcaccccgagaaggctcggcgc

SEQ ID NO: 4909055 - DNA, 25 bp, Homo sapien
gccctcggccttgacggcgagagca

SEQ ID NO: 4909056 - DNA, 25 bp, Homo sapien
tggccgcaacgccacggcaaagtta

SEQ ID NO: 4909057 - DNA, 25 bp, Homo sapien
cttccaataggacgcagccagttcc

SEQ ID NO: 4909058 - DNA, 25 bp, Homo sapien
ctctccggcgagacaccttcaggaa

SEQ ID NO: 4909059 - DNA, 25 bp, Homo sapien
cctcgtggtccctcaacttgggacg

SEQ ID NO: 4909060 - DNA, 25 bp, Homo sapien
aaaaacttgctgtcgcctccggatt

SEQ ID NO: 4909061 - DNA, 25 bp, Homo sapien
gcctccggatttggctactgaaaat

SEQ ID NO: 4909062 - DNA, 25 bp, Homo sapien
tgacgcaggcaaagatcaaaacaaa

SEQ ID NO: 4909063 - DNA, 25 bp, Homo sapien
aactcgagtcgtgtttccttgaaga

SEQ ID NO: 4909064 - DNA, 25 bp, Homo sapien
ttataattgaacaagagtcattgaa

SEQ ID NO: 4909065 - DNA, 25 bp, Homo sapien
cctggccaggcctagtttttataat

SEQ ID NO: 4909066 - DNA, 25 bp, Homo sapien
cacagtaggataccagaggagattt

SEQ ID NO: 4909067 - DNA, 25 bp, Homo sapien
aaaagtatacaccaggactccagag

SEQ ID NO: 4909068 - DNA, 25 bp, Homo sapien
gtaatgcttgcatagtgtcccatca

SEQ ID NO: 4909069 - DNA, 25 bp, Homo sapien
taaaccaacccttgatagccaggct

SEQ ID NO: 4909070 - DNA, 25 bp, Homo sapien
tgtcctgggattcgaccacatgggt

SEQ ID NO: 4909071 - DNA, 25 bp, Homo sapien
gcattgaaagctaggaggcaggtca

SEQ ID NO: 4909072 - DNA, 25 bp, Homo sapien
gcttgtaattcaacgtgtcctggga

SEQ ID NO: 4909073 - DNA, 25 bp, Homo sapien
tacgctgcagcggaaaaacttggag

SEQ ID NO: 4909074 - DNA, 25 bp, Homo sapien
tcagttgtcaaccactaaaccacca

SEQ ID NO: 4909075 - DNA, 25 bp, Homo sapien
cagttgtcaaccactaaaccaccag

SEQ ID NO: 4909076 - DNA, 25 bp, Homo sapien
agttgtcaaccactaaaccaccagg

SEQ ID NO: 4909077 - DNA, 25 bp, Homo sapien
attcagagtaatagagaaattatgc

SEQ ID NO: 4909078 - DNA, 25 bp, Homo sapien
gagcctgagttcttatgcatccttc

SEQ ID NO: 4909079 - DNA, 25 bp, Homo sapien
ccaatataacagaggatgatatcca

SEQ ID NO: 4909080 - DNA, 25 bp, Homo sapien
ctactcttgaccatgctctattttc

SEQ ID NO: 4909081 - DNA, 25 bp, Homo sapien
gagtcttgagcacttgagattggtc

SEQ ID NO: 4909082 - DNA, 25 bp, Homo sapien
agaaaaatgaccatattcagaccaa

SEQ ID NO: 4909083 - DNA, 25 bp, Homo sapien
accgcggccagctgaattctactct

SEQ ID NO: 4909084 - DNA, 25 bp, Homo sapien
cactacggctgattactgacttaag

SEQ ID NO: 4909085 - DNA, 25 bp, Homo sapien
aatgaaaagtgtgtcaagggccctt

SEQ ID NO: 4909086 - DNA, 25 bp, Homo sapien
aaagtgtgtcaagggccctttgtgt

SEQ ID NO: 4909087 - DNA, 25 bp, Homo sapien
tgaaaagtgtgtcaagggccctttg

SEQ ID NO: 4909088 - DNA, 25 bp, Homo sapien
aaaagtgtgtcaagggccctttgtg

SEQ ID NO: 4909089 - DNA, 25 bp, Homo sapien
tttgtgatggagaactggcgtgaac

SEQ ID NO: 4909090 - DNA, 25 bp, Homo sapien
tgtgatggagaactggcgtgaactc

SEQ ID NO: 4909091 - DNA, 25 bp, Homo sapien
ttgtgatggagaactggcgtgaact

SEQ ID NO: 4909092 - DNA, 25 bp, Homo sapien
tgatggagaactggcgtgaactcac

SEQ ID NO: 4909093 - DNA, 25 bp, Homo sapien
cactaaggccactagtcttttatta

SEQ ID NO: 4909094 - DNA, 25 bp, Homo sapien
ggcactaaggccactagtcttttat

SEQ ID NO: 4909095 - DNA, 25 bp, Homo sapien
gcactaaggccactagtcttttatt

SEQ ID NO: 4909096 - DNA, 25 bp, Homo sapien
gggattctccaagtatgacttccag

SEQ ID NO: 4909097 - DNA, 25 bp, Homo sapien
taggctcttcgggtattgaatggag

SEQ ID NO: 4909098 - DNA, 25 bp, Homo sapien
catcaccattaatgctcatcatggc

SEQ ID NO: 4909099 - DNA, 25 bp, Homo sapien
catcctcactggtgtaggctcttcg

SEQ ID NO: 4909100 - DNA, 25 bp, Homo sapien
aatgttcaaccactgagcaataact

SEQ ID NO: 4909101 - DNA, 25 bp, Homo sapien
caaaattaggtgttgaaattcctgc

SEQ ID NO: 4909102 - DNA, 25 bp, Homo sapien
tgcaaaagtcttccacgaaagtgtt

SEQ ID NO: 4909103 - DNA, 25 bp, Homo sapien
ttaataattcaaaaggagcaggtca

SEQ ID NO: 4909104 - DNA, 25 bp, Homo sapien
catgcaatgtagtttaggccttaaa

SEQ ID NO: 4909105 - DNA, 25 bp, Homo sapien
tggatggtcctacctgtcagtcact

SEQ ID NO: 4909106 - DNA, 25 bp, Homo sapien
ggtggtcacaatctgccaatgctgg

SEQ ID NO: 4909107 - DNA, 25 bp, Homo sapien
gataagtgggaaagtcagcctagac

SEQ ID NO: 4909108 - DNA, 25 bp, Homo sapien
aaactcctttgcacccaaaaagcag

SEQ ID NO: 4909109 - DNA, 25 bp, Homo sapien
tactggagtcctctagcaattcctg

SEQ ID NO: 4909110 - DNA, 25 bp, Homo sapien
caagagtccagacctagagcctgct

SEQ ID NO: 4909111 - DNA, 25 bp, Homo sapien
tgtacacaagcccagatacctggct

SEQ ID NO: 4909112 - DNA, 25 bp, Homo sapien
gacagcagcctcttgtctcgaggaa

SEQ ID NO: 4909113 - DNA, 25 bp, Homo sapien
tgtcacttgctttgcttacagacag

SEQ ID NO: 4909114 - DNA, 25 bp, Homo sapien
ttgcttacagacagcagcctcttgt

SEQ ID NO: 4909115 - DNA, 25 bp, Homo sapien
tggtcttcttggctgtcacttgctt

SEQ ID NO: 4909116 - DNA, 25 bp, Homo sapien
gatgctgtactgttcccgcttggaa

SEQ ID NO: 4909117 - DNA, 25 bp, Homo sapien
tctgtggctgcgtccttgaagctct

SEQ ID NO: 4909118 - DNA, 25 bp, Homo sapien
agcgagggcacgtcatactgagtct

SEQ ID NO: 4909119 - DNA, 25 bp, Homo sapien
ctgtatgtgctgtccggagtgctgc

SEQ ID NO: 4909120 - DNA, 25 bp, Homo sapien
ccacggcatgacgtttgtccacaat

SEQ ID NO: 4909121 - DNA, 25 bp, Homo sapien
ttgtccacaataattgcaaggtgtt

SEQ ID NO: 4909122 - DNA, 25 bp, Homo sapien
catgacgtttgtccacaataattgc

SEQ ID NO: 4909123 - DNA, 25 bp, Homo sapien
gacgtttgtccacaataattgcaag

SEQ ID NO: 4909124 - DNA, 25 bp, Homo sapien
gatttaggtcctgaagccagacagc

SEQ ID NO: 4909125 - DNA, 25 bp, Homo sapien
tagtacctaccacatagggcttttg

SEQ ID NO: 4909126 - DNA, 25 bp, Homo sapien
gccagacagcttaggttgagtccta

SEQ ID NO: 4909127 - DNA, 25 bp, Homo sapien
tattgagaattagaaggccccaggc

SEQ ID NO: 4909128 - DNA, 25 bp, Homo sapien
ctagtatacaacagttgctctctgc

SEQ ID NO: 4909129 - DNA, 25 bp, Homo sapien
tttgcagagagccagtccctgctca

SEQ ID NO: 4909130 - DNA, 25 bp, Homo sapien
catcaaccttttgtactctttgctc

SEQ ID NO: 4909131 - DNA, 25 bp, Homo sapien
acaacagttgctctctgcaactttg

SEQ ID NO: 4909132 - DNA, 25 bp, Homo sapien
cactcccagtctaaagcacttttta

SEQ ID NO: 4909133 - DNA, 25 bp, Homo sapien
taaagcaaactactcccttccctgc

SEQ ID NO: 4909134 - DNA, 25 bp, Homo sapien
accactcccagtctaaagcactttt

SEQ ID NO: 4909135 - DNA, 25 bp, Homo sapien
cttccctgctaccactgtgcacaca

SEQ ID NO: 4909136 - DNA, 25 bp, Homo sapien
cttgatgtctgatcatacatgtact

SEQ ID NO: 4909137 - DNA, 25 bp, Homo sapien
gatgtctgatcatacatgtactcct

SEQ ID NO: 4909138 - DNA, 25 bp, Homo sapien
atgtactcctcagccccaactgaag

SEQ ID NO: 4909139 - DNA, 25 bp, Homo sapien
ccccaactgaagcactccgaaattt

SEQ ID NO: 4909140 - DNA, 25 bp, Homo sapien
ttcagacatgatcataaccaaggtc

SEQ ID NO: 4909141 - DNA, 25 bp, Homo sapien
cacttcctgtgaatatttgccctca

SEQ ID NO: 4909142 - DNA, 25 bp, Homo sapien
catgtgcaggcctataggtccattt

SEQ ID NO: 4909143 - DNA, 25 bp, Homo sapien
ttatatatctctgtagcaggactca

SEQ ID NO: 4909144 - DNA, 25 bp, Homo sapien
tgaggtaggtcatggggccctcccc

SEQ ID NO: 4909145 - DNA, 25 bp, Homo sapien
catttgttgtctccggtctcgctga

SEQ ID NO: 4909146 - DNA, 25 bp, Homo sapien
ctcgctgagtgttatggcatagaac

SEQ ID NO: 4909147 - DNA, 25 bp, Homo sapien
gggtgtcggaagcatttgttgtctc

SEQ ID NO: 4909148 - DNA, 25 bp, Homo sapien
gtgcccccttcttaagtgttctgaa

SEQ ID NO: 4909149 - DNA, 25 bp, Homo sapien
tggcgctgtaggcacaccatgtgcc

SEQ ID NO: 4909150 - DNA, 25 bp, Homo sapien
tcttaagtgttctgaagtggtagga

SEQ ID NO: 4909151 - DNA, 25 bp, Homo sapien
cgagttgtggcgctgtaggcacacc

SEQ ID NO: 4909152 - DNA, 25 bp, Homo sapien
tccagtatttgagctgttcatctct

SEQ ID NO: 4909153 - DNA, 25 bp, Homo sapien
tctgcttcgccgtatgctgccgaga

SEQ ID NO: 4909154 - DNA, 25 bp, Homo sapien
caatgtcaaggaccctctgcttcgc

SEQ ID NO: 4909155 - DNA, 25 bp, Homo sapien
gccgagagtgccagtatttccagta

SEQ ID NO: 4909156 - DNA, 25 bp, Homo sapien
ggaaggcacagaccaaagaatcagg

SEQ ID NO: 4909157 - DNA, 25 bp, Homo sapien
aatcaggatgtctgtgaaccagtct

SEQ ID NO: 4909158 - DNA, 25 bp, Homo sapien
ggatgtctgtgaaccagtctctctc

SEQ ID NO: 4909159 - DNA, 25 bp, Homo sapien
ggcctggtgggtgccaagaactggc

SEQ ID NO: 4909160 - DNA, 25 bp, Homo sapien
tcagactgcaaaacgtcctccatgt

SEQ ID NO: 4909161 - DNA, 25 bp, Homo sapien
ctcaagttagagctcattgctaatg

SEQ ID NO: 4909162 - DNA, 25 bp, Homo sapien
caactcctgccaaacagtttacgac

SEQ ID NO: 4909163 - DNA, 25 bp, Homo sapien
caatgtacaagaaccgcatatcaaa

SEQ ID NO: 4909164 - DNA, 25 bp, Homo sapien
gcatatcaaactggcttccaccaat

SEQ ID NO: 4909165 - DNA, 25 bp, Homo sapien
caaccagttagcaaagctgtgcttt

SEQ ID NO: 4909166 - DNA, 25 bp, Homo sapien
gggagggcatccaaccagttagcaa

SEQ ID NO: 4909167 - DNA, 25 bp, Homo sapien
catccaaccagttagcaaagctgtg

SEQ ID NO: 4909168 - DNA, 25 bp, Homo sapien
gagggcatccaaccagttagcaaag

SEQ ID NO: 4909169 - DNA, 25 bp, Homo sapien
tgtttgtggaatcaggctcactaca

SEQ ID NO: 4909170 - DNA, 25 bp, Homo sapien
gtttgtggaatcaggctcactacat

SEQ ID NO: 4909171 - DNA, 25 bp, Homo sapien
tttgtggaatcaggctcactacatc

SEQ ID NO: 4909172 - DNA, 25 bp, Homo sapien
ttgtggaatcaggctcactacatca

SEQ ID NO: 4909173 - DNA, 25 bp, Homo sapien
gggaacagtggactctacctgggaa

SEQ ID NO: 4909174 - DNA, 25 bp, Homo sapien
cagggaacaaggtctcaaggtgtga

SEQ ID NO: 4909175 - DNA, 25 bp, Homo sapien
cagtttaagatgtcgggcaggaagt

SEQ ID NO: 4909176 - DNA, 25 bp, Homo sapien
tcaaaaagttcagcgtctagtagga

SEQ ID NO: 4909177 - DNA, 25 bp, Homo sapien
acagaatgagttaagtgacgtagga

SEQ ID NO: 4909178 - DNA, 25 bp, Homo sapien
tgagttaagtgacgtaggaaggtaa

SEQ ID NO: 4909179 - DNA, 25 bp, Homo sapien
aatgagttaagtgacgtaggaaggt

SEQ ID NO: 4909180 - DNA, 25 bp, Homo sapien
caaatcacatacacagaatgagtta

SEQ ID NO: 4909181 - DNA, 25 bp, Homo sapien
tccacaggtggtacaatagctctgc

SEQ ID NO: 4909182 - DNA, 25 bp, Homo sapien
taacagatgtgcctctggtttctga

SEQ ID NO: 4909183 - DNA, 25 bp, Homo sapien
tccacatgcatagttgtccgacaaa

SEQ ID NO: 4909184 - DNA, 25 bp, Homo sapien
gactctcaaagtcttccaagggact

SEQ ID NO: 4909185 - DNA, 25 bp, Homo sapien
tcaatgtttccaatcgtattaaagc

SEQ ID NO: 4909186 - DNA, 25 bp, Homo sapien
gtaaaggaaacagcattatatgcaa

SEQ ID NO: 4909187 - DNA, 25 bp, Homo sapien
gtattaaagctctccttgtaatcgg

SEQ ID NO: 4909188 - DNA, 25 bp, Homo sapien
tcttcattcacgtcccaggtaaagg

SEQ ID NO: 4909189 - DNA, 25 bp, Homo sapien
aacaccctcctagatggtccagaac

SEQ ID NO: 4909190 - DNA, 25 bp, Homo sapien
atctggcaccttcccatgagtgcaa

SEQ ID NO: 4909191 - DNA, 25 bp, Homo sapien
ccttcccatgagtgcaaaataagaa

SEQ ID NO: 4909192 - DNA, 25 bp, Homo sapien
ttagtttgaagacaaactcttctaa

SEQ ID NO: 4909193 - DNA, 25 bp, Homo sapien
caggtcttgattacagatctgtggc

SEQ ID NO: 4909194 - DNA, 25 bp, Homo sapien
caagaataccaaataccggattggt

SEQ ID NO: 4909195 - DNA, 25 bp, Homo sapien
aagcatatttagaaggtctcctctg

SEQ ID NO: 4909196 - DNA, 25 bp, Homo sapien
tcttgggaagacatacaggtttctc

SEQ ID NO: 4909197 - DNA, 25 bp, Homo sapien
cagaagacgtggatagagagagccc

SEQ ID NO: 4909198 - DNA, 25 bp, Homo sapien
caaatgctccgttgaagagtgcaag

SEQ ID NO: 4909199 - DNA, 25 bp, Homo sapien
tggacaggtgatgtaccagggcaac

SEQ ID NO: 4909200 - DNA, 25 bp, Homo sapien
tcagttccggtcaatgatatgcacg

SEQ ID NO: 4909201 - DNA, 25 bp, Homo sapien
catcccctctttacaattaacacta

SEQ ID NO: 4909202 - DNA, 25 bp, Homo sapien
ttgttccctaccatacactcttctt

SEQ ID NO: 4909203 - DNA, 25 bp, Homo sapien
tccttatgtctaagtccacctgacc

SEQ ID NO: 4909204 - DNA, 25 bp, Homo sapien
cacactctcctgagtggcacagtgc

SEQ ID NO: 4909205 - DNA, 25 bp, Homo sapien
ctatacttcaccctgttttgcccac

SEQ ID NO: 4909206 - DNA, 25 bp, Homo sapien
gtggccacagcctccgacatccaag

SEQ ID NO: 4909207 - DNA, 25 bp, Homo sapien
gtgtgcatctctgaggccaaggcag

SEQ ID NO: 4909208 - DNA, 25 bp, Homo sapien
cactatggagagcagccctcaagga

SEQ ID NO: 4909209 - DNA, 25 bp, Homo sapien
caaaaccatgagaaacggactgcat

SEQ ID NO: 4909210 - DNA, 25 bp, Homo sapien
cacagcgacactatggagagcagcc

SEQ ID NO: 4909211 - DNA, 25 bp, Homo sapien
agccctcaaggaagcaaaaccatga

SEQ ID NO: 4909212 - DNA, 25 bp, Homo sapien
tgctcaagcaattcacggtgatgaa

SEQ ID NO: 4909213 - DNA, 25 bp, Homo sapien
taactgtatgtgtcaatctgaatca

SEQ ID NO: 4909214 - DNA, 25 bp, Homo sapien
tgatctggcaataagctctatgaat

SEQ ID NO: 4909215 - DNA, 25 bp, Homo sapien
aatgggtttattgctacgattgtta

SEQ ID NO: 4909216 - DNA, 25 bp, Homo sapien
gttctgcttccgctcttcatctcgg

SEQ ID NO: 4909217 - DNA, 25 bp, Homo sapien
tcttcatctcggatttttctttctg

SEQ ID NO: 4909218 - DNA, 25 bp, Homo sapien
gcttccgctcttcatctcggatttt

SEQ ID NO: 4909219 - DNA, 25 bp, Homo sapien
tcctgttctgcttccgctcttcatc

SEQ ID NO: 4909220 - DNA, 25 bp, Homo sapien
ggttttgaagtaggtgatgtcactc

SEQ ID NO: 4909221 - DNA, 25 bp, Homo sapien
tctgtaaaggtatggcagccaactt

SEQ ID NO: 4909222 - DNA, 25 bp, Homo sapien
tgcaaagtgaacatcaggtatgaag

SEQ ID NO: 4909223 - DNA, 25 bp, Homo sapien
acatcaggtatgaagagaactggct

SEQ ID NO: 4909224 - DNA, 25 bp, Homo sapien
caggtcaaagttagccaatctctgc

SEQ ID NO: 4909225 - DNA, 25 bp, Homo sapien
tcaaagttagccaatctctgctcca

SEQ ID NO: 4909226 - DNA, 25 bp, Homo sapien
gtcaaagttagccaatctctgctcc

SEQ ID NO: 4909227 - DNA, 25 bp, Homo sapien
ctgcaggtcaaagttagccaatctc

SEQ ID NO: 4909228 - DNA, 25 bp, Homo sapien
ggcttactgtaggtcagagacaaga

SEQ ID NO: 4909229 - DNA, 25 bp, Homo sapien
tgtacagactttcctaaggcataaa

SEQ ID NO: 4909230 - DNA, 25 bp, Homo sapien
ctgtggaacaaaacaataggcttac

SEQ ID NO: 4909231 - DNA, 25 bp, Homo sapien
ggaaaaaatattacgtgatgtacag

SEQ ID NO: 4909232 - DNA, 25 bp, Homo sapien
ttctcgttcatcatccgtgttgtaa

SEQ ID NO: 4909233 - DNA, 25 bp, Homo sapien
ccttctcgttcatcatccgtgttgt

SEQ ID NO: 4909234 - DNA, 25 bp, Homo sapien
cgttcatcatccgtgttgtaataca

SEQ ID NO: 4909235 - DNA, 25 bp, Homo sapien
ctcgttcatcatccgtgttgtaata

SEQ ID NO: 4909236 - DNA, 25 bp, Homo sapien
catgggccggaacatccgtttaaca

SEQ ID NO: 4909237 - DNA, 25 bp, Homo sapien
ctgctttgaaggcactggaccaaac

SEQ ID NO: 4909238 - DNA, 25 bp, Homo sapien
ttccatgggccggaacatccgttta

SEQ ID NO: 4909239 - DNA, 25 bp, Homo sapien
gaaggcactggaccaaactcctctt

SEQ ID NO: 4909240 - DNA, 25 bp, Homo sapien
tcattacgttctcccaaggcaaagg

SEQ ID NO: 4909241 - DNA, 25 bp, Homo sapien
cacacgcagcaagagtttcgttctt

SEQ ID NO: 4909242 - DNA, 25 bp, Homo sapien
taaccttgtaccttgctgctggatg

SEQ ID NO: 4909243 - DNA, 25 bp, Homo sapien
tgtgtgaagagaaagtcaccaggct

SEQ ID NO: 4909244 - DNA, 25 bp, Homo sapien
tctccataaacaacctgtggctagg

SEQ ID NO: 4909245 - DNA, 25 bp, Homo sapien
tcaacaagggtgactgagacatctc

SEQ ID NO: 4909246 - DNA, 25 bp, Homo sapien
tggagagtggcacctcctgcgaagc

SEQ ID NO: 4909247 - DNA, 25 bp, Homo sapien
agatgggcaagagagccacgtgacc

SEQ ID NO: 4909248 - DNA, 25 bp, Homo sapien
gcatcgaacacatcgtcagtctcct

SEQ ID NO: 4909249 - DNA, 25 bp, Homo sapien
ttcaacatcaatgcatcgaacacat

SEQ ID NO: 4909250 - DNA, 25 bp, Homo sapien
catcaatgcatcgaacacatcgtca

SEQ ID NO: 4909251 - DNA, 25 bp, Homo sapien
aatgcatcgaacacatcgtcagtct

SEQ ID NO: 4909252 - DNA, 25 bp, Homo sapien
ttttggactacaccatcacggccag

SEQ ID NO: 4909253 - DNA, 25 bp, Homo sapien
gctgcacgttagtacatggattcca

SEQ ID NO: 4909254 - DNA, 25 bp, Homo sapien
taataagccttgacagtagcgagat

SEQ ID NO: 4909255 - DNA, 25 bp, Homo sapien
ggtttcataccgagagacaagtgag

SEQ ID NO: 4909256 - DNA, 25 bp, Homo sapien
ttaatgtgaggcagatccagtaaca

SEQ ID NO: 4909257 - DNA, 25 bp, Homo sapien
taacaacaaactccatactatggaa

SEQ ID NO: 4909258 - DNA, 25 bp, Homo sapien
ttccttaatgtgaggcagatccagt

SEQ ID NO: 4909259 - DNA, 25 bp, Homo sapien
gtaacaacaaactccatactatgga

SEQ ID NO: 4909260 - DNA, 25 bp, Homo sapien
agtgaggcaggtgtaatgagctccc

SEQ ID NO: 4909261 - DNA, 25 bp, Homo sapien
ttcagctaaccaaagtgaggcaggt

SEQ ID NO: 4909262 - DNA, 25 bp, Homo sapien
cttcagctaaccaaagtgaggcagg

SEQ ID NO: 4909263 - DNA, 25 bp, Homo sapien
aaagtgaggcaggtgtaatgagctc

SEQ ID NO: 4909264 - DNA, 25 bp, Homo sapien
gaacttctcttgcacagctttccca

SEQ ID NO: 4909265 - DNA, 25 bp, Homo sapien
cttaggaagcaaggagatagcctgt

SEQ ID NO: 4909266 - DNA, 25 bp, Homo sapien
tgcatcacccgaggatcctggagga

SEQ ID NO: 4909267 - DNA, 25 bp, Homo sapien
ctgtgttggtgcttcaatgaaacct

SEQ ID NO: 4909268 - DNA, 25 bp, Homo sapien
cacagcatgcttatgcccttgctta

SEQ ID NO: 4909269 - DNA, 25 bp, Homo sapien
ttcacagcatgcttatgcccttgct

SEQ ID NO: 4909270 - DNA, 25 bp, Homo sapien
tcatttcacagcatgcttatgccct

SEQ ID NO: 4909271 - DNA, 25 bp, Homo sapien
atttcacagcatgcttatgcccttg

SEQ ID NO: 4909272 - DNA, 25 bp, Homo sapien
cactatggtaaagtgtcgtgcacta

SEQ ID NO: 4909273 - DNA, 25 bp, Homo sapien
tgtcgtgcactagtaaggccctggt

SEQ ID NO: 4909274 - DNA, 25 bp, Homo sapien
ctggtgtcactatggtaaagtgtcg

SEQ ID NO: 4909275 - DNA, 25 bp, Homo sapien
taaagtgtcgtgcactagtaaggcc

SEQ ID NO: 4909276 - DNA, 25 bp, Homo sapien
ataacagcaggttctccaatgggaa

SEQ ID NO: 4909277 - DNA, 25 bp, Homo sapien
taacacctggctgaggatagggagt

SEQ ID NO: 4909278 - DNA, 25 bp, Homo sapien
atagggagttgggtgttcagtaggg

SEQ ID NO: 4909279 - DNA, 25 bp, Homo sapien
tcagtaggggcaataacagcaggtt

SEQ ID NO: 4909280 - DNA, 25 bp, Homo sapien
tgctctcagtgcaactctcagcatc

SEQ ID NO: 4909281 - DNA, 25 bp, Homo sapien
aaaggcagcttgcaaatgtgccacc

SEQ ID NO: 4909282 - DNA, 25 bp, Homo sapien
gggagatgcgctttgccaaattcag

SEQ ID NO: 4909283 - DNA, 25 bp, Homo sapien
cctgcctgcatgcacgtcagggaga

SEQ ID NO: 4909284 - DNA, 25 bp, Homo sapien
attccctgggattctagaatgaccc

SEQ ID NO: 4909285 - DNA, 25 bp, Homo sapien
ccattccctgggattctagaatgac

SEQ ID NO: 4909286 - DNA, 25 bp, Homo sapien
ttccctgggattctagaatgaccca

SEQ ID NO: 4909287 - DNA, 25 bp, Homo sapien
ccccattccctgggattctagaatg

SEQ ID NO: 4909288 - DNA, 25 bp, Homo sapien
tactcccaaatcaactctgtctgcc

SEQ ID NO: 4909289 - DNA, 25 bp, Homo sapien
cctctctactcccaaatcaactctg

SEQ ID NO: 4909290 - DNA, 25 bp, Homo sapien
tctactcccaaatcaactctgtctg

SEQ ID NO: 4909291 - DNA, 25 bp, Homo sapien
ccaaatcaactctgtctgccccttc

SEQ ID NO: 4909292 - DNA, 25 bp, Homo sapien
cagatgagcacagaaggacgcccaa

SEQ ID NO: 4909293 - DNA, 25 bp, Homo sapien
ccacgggcagcccatatttctcaga

SEQ ID NO: 4909294 - DNA, 25 bp, Homo sapien
gcttttcttgtaaagctttgctatc

SEQ ID NO: 4909295 - DNA, 25 bp, Homo sapien
agctttgctatcttctccacgggca

SEQ ID NO: 4909296 - DNA, 25 bp, Homo sapien
cgggcagcccatatttctcagatat

SEQ ID NO: 4909297 - DNA, 25 bp, Homo sapien
tctgcaattctctggaagaaggaca

SEQ ID NO: 4909298 - DNA, 25 bp, Homo sapien
cattgaaataggcatctcagttgac

SEQ ID NO: 4909299 - DNA, 25 bp, Homo sapien
ctcagttgacatagtgccagtgcac

SEQ ID NO: 4909300 - DNA, 25 bp, Homo sapien
ggccatacgtgattccctataaact

SEQ ID NO: 4909301 - DNA, 25 bp, Homo sapien
tgttgaggatgaaggtgtcctcgtt

SEQ ID NO: 4909302 - DNA, 25 bp, Homo sapien
gaaggtgtcctcgttcgagtagtgc

SEQ ID NO: 4909303 - DNA, 25 bp, Homo sapien
cgagtagtgctcgatgatgttgtca

SEQ ID NO: 4909304 - DNA, 25 bp, Homo sapien
tcgatgatgttgtcatccatgttca

SEQ ID NO: 4909305 - DNA, 25 bp, Homo sapien
ctagatttccatgagcgtgaccttg

SEQ ID NO: 4909306 - DNA, 25 bp, Homo sapien
atttccatgagcgtgaccttgaagc

SEQ ID NO: 4909307 - DNA, 25 bp, Homo sapien
ccatgagcgtgaccttgaagccctc

SEQ ID NO: 4909308 - DNA, 25 bp, Homo sapien
tccatgagcgtgaccttgaagccct

SEQ ID NO: 4909309 - DNA, 25 bp, Homo sapien
cccagcacggtcttgtaacagcagt

SEQ ID NO: 4909310 - DNA, 25 bp, Homo sapien
gaacagagccccattagtaccctgg

SEQ ID NO: 4909311 - DNA, 25 bp, Homo sapien
tatttagcaagacagccttccccag

SEQ ID NO: 4909312 - DNA, 25 bp, Homo sapien
tcattgtgagataaacgtggtggcc

SEQ ID NO: 4909313 - DNA, 25 bp, Homo sapien
catgggggcccactcccctctcttc

SEQ ID NO: 4909314 - DNA, 25 bp, Homo sapien
cccatgggggcccactcccctctct

SEQ ID NO: 4909315 - DNA, 25 bp, Homo sapien
ccatgggggcccactcccctctctt

SEQ ID NO: 4909316 - DNA, 25 bp, Homo sapien
ggcccactcccctctcttccccagc

SEQ ID NO: 4909317 - DNA, 25 bp, Homo sapien
tggatggcaccggatgctggattcc

SEQ ID NO: 4909318 - DNA, 25 bp, Homo sapien
caagaacaagttaccctctggggtg

SEQ ID NO: 4909319 - DNA, 25 bp, Homo sapien
ggtgatggatggcaccggatgctgg

SEQ ID NO: 4909320 - DNA, 25 bp, Homo sapien
atctgttgtcacacgtgccgtaggg

SEQ ID NO: 4909321 - DNA, 25 bp, Homo sapien
ctgtgattctattgcaagcttcaag

SEQ ID NO: 4909322 - DNA, 25 bp, Homo sapien
ctctgttctaaaacgtaagactcgg

SEQ ID NO: 4909323 - DNA, 25 bp, Homo sapien
tgtggagagcatggacagacttcgt

SEQ ID NO: 4909324 - DNA, 25 bp, Homo sapien
cgtggtgttcattgtttgatgattt

SEQ ID NO: 4909325 - DNA, 25 bp, Homo sapien
tgcgcccaccaatcgaattgtagag

SEQ ID NO: 4909326 - DNA, 25 bp, Homo sapien
ggaagagttcatccgaggagccaaa

SEQ ID NO: 4909327 - DNA, 25 bp, Homo sapien
tcgtggatgcttcgtgggaatgccc

SEQ ID NO: 4909328 - DNA, 25 bp, Homo sapien
atcaatggtgatgccgtcccctgtg

SEQ ID NO: 4909329 - DNA, 25 bp, Homo sapien
tgactctatcttggccagaagccac

SEQ ID NO: 4909330 - DNA, 25 bp, Homo sapien
tgctattcataaagtccacaaatgt

SEQ ID NO: 4909331 - DNA, 25 bp, Homo sapien
tgatgccaagggatttagcaccatt

SEQ ID NO: 4909332 - DNA, 25 bp, Homo sapien
gggatagattcaatccctgtgactc

SEQ ID NO: 4909333 - DNA, 25 bp, Homo sapien
tctatcctctaatcaagtcagagac

SEQ ID NO: 4909334 - DNA, 25 bp, Homo sapien
catttagacagtcaccagagctatt

SEQ ID NO: 4909335 - DNA, 25 bp, Homo sapien
gagctattaaatttgcctctttggt

SEQ ID NO: 4909336 - DNA, 25 bp, Homo sapien
tgccactgtctcatttcaagtcagt

SEQ ID NO: 4909337 - DNA, 25 bp, Homo sapien
caaatagggcataggtctcatttcc

SEQ ID NO: 4909338 - DNA, 25 bp, Homo sapien
gtgatccaaatagggcataggtctc

SEQ ID NO: 4909339 - DNA, 25 bp, Homo sapien
agggcataggtctcatttccttaca

SEQ ID NO: 4909340 - DNA, 25 bp, Homo sapien
tttgtgatccaaatagggcataggt

SEQ ID NO: 4909341 - DNA, 25 bp, Homo sapien
aacatatttcgggcaattccagcaa

SEQ ID NO: 4909342 - DNA, 25 bp, Homo sapien
acatatttcgggcaattccagcaaa

SEQ ID NO: 4909343 - DNA, 25 bp, Homo sapien
ctttgtaacatatttcgggcaattc

SEQ ID NO: 4909344 - DNA, 25 bp, Homo sapien
tgtaacatatttcgggcaattccag

SEQ ID NO: 4909345 - DNA, 25 bp, Homo sapien
gcccagcctcgctgggaagaggcct

SEQ ID NO: 4909346 - DNA, 25 bp, Homo sapien
ccagcctcgctgggaagaggcctca

SEQ ID NO: 4909347 - DNA, 25 bp, Homo sapien
atgcccagcctcgctgggaagaggc

SEQ ID NO: 4909348 - DNA, 25 bp, Homo sapien
cagcctcgctgggaagaggcctcac

SEQ ID NO: 4909349 - DNA, 25 bp, Homo sapien
ctctgttgcaatggtctgacggcca

SEQ ID NO: 4909350 - DNA, 25 bp, Homo sapien
gctctgttgcaatggtctgacggcc

SEQ ID NO: 4909351 - DNA, 25 bp, Homo sapien
tctgttgcaatggtctgacggccag

SEQ ID NO: 4909352 - DNA, 25 bp, Homo sapien
gggtatcctattggctgggcctgga

SEQ ID NO: 4909353 - DNA, 25 bp, Homo sapien
cggggtatcctattggctgggcctg

SEQ ID NO: 4909354 - DNA, 25 bp, Homo sapien
cacggggtatcctattggctgggcc

SEQ ID NO: 4909355 - DNA, 25 bp, Homo sapien
acggggtatcctattggctgggcct

SEQ ID NO: 4909356 - DNA, 25 bp, Homo sapien
tataaagggccaagcagcactgctg

SEQ ID NO: 4909357 - DNA, 25 bp, Homo sapien
agcactgctgtaacagcctgccgat

SEQ ID NO: 4909358 - DNA, 25 bp, Homo sapien
gattgtaatagcttcctgctcccat

SEQ ID NO: 4909359 - DNA, 25 bp, Homo sapien
ctctgtgtgcctggaagtataaagg

SEQ ID NO: 4909360 - DNA, 25 bp, Homo sapien
tctttttggcgtgcctgttgccatt

SEQ ID NO: 4909361 - DNA, 25 bp, Homo sapien
atgtagtggttgagtcatgttgtag

SEQ ID NO: 4909362 - DNA, 25 bp, Homo sapien
tgtagtggttgagtcatgttgtagc

SEQ ID NO: 4909363 - DNA, 25 bp, Homo sapien
acacttctttttggcgtgcctgttg

SEQ ID NO: 4909364 - DNA, 25 bp, Homo sapien
aggtgaaagcacttcacaggctctg

SEQ ID NO: 4909365 - DNA, 25 bp, Homo sapien
tccaatgaggacataaggtgaaagc

SEQ ID NO: 4909366 - DNA, 25 bp, Homo sapien
agggtccaatgaggacataaggtga

SEQ ID NO: 4909367 - DNA, 25 bp, Homo sapien
caatgaggacataaggtgaaagcac

SEQ ID NO: 4909368 - DNA, 25 bp, Homo sapien
gccactagcggtacatttatactca

SEQ ID NO: 4909369 - DNA, 25 bp, Homo sapien
ccaaggtccttcaccaaaacagtga

SEQ ID NO: 4909370 - DNA, 25 bp, Homo sapien
gaaccagcttttctgttaaatcctc

SEQ ID NO: 4909371 - DNA, 25 bp, Homo sapien
gaaacacttatctccatagacaatg

SEQ ID NO: 4909372 - DNA, 25 bp, Homo sapien
tgcagtatggcctgtggcaatcctt

SEQ ID NO: 4909373 - DNA, 25 bp, Homo sapien
tcccagaatattttgcagtatggcc

SEQ ID NO: 4909374 - DNA, 25 bp, Homo sapien
aatattttgcagtatggcctgtggc

SEQ ID NO: 4909375 - DNA, 25 bp, Homo sapien
ctggcctggaggtaaagctgcagag

SEQ ID NO: 4909376 - DNA, 25 bp, Homo sapien
tgcttgcttactcccaatgaatgga

SEQ ID NO: 4909377 - DNA, 25 bp, Homo sapien
tatgcagctgtataatcatcatttg

SEQ ID NO: 4909378 - DNA, 25 bp, Homo sapien
tatccattagaacatatgcagctgt

SEQ ID NO: 4909379 - DNA, 25 bp, Homo sapien
tatcccagaatgtggcttcagcttc

SEQ ID NO: 4909380 - DNA, 25 bp, Homo sapien
ttacaactataggcctcttcttttc

SEQ ID NO: 4909381 - DNA, 25 bp, Homo sapien
ttagaattccgtctctgagctgttg

SEQ ID NO: 4909382 - DNA, 25 bp, Homo sapien
tgttagaattccgtctctgagctgt

SEQ ID NO: 4909383 - DNA, 25 bp, Homo sapien
acttttacaactataggcctcttct

SEQ ID NO: 4909384 - DNA, 25 bp, Homo sapien
aggctctgccttgtgtgggcgccat

SEQ ID NO: 4909385 - DNA, 25 bp, Homo sapien
catgatgctagctggagtggtccct

SEQ ID NO: 4909386 - DNA, 25 bp, Homo sapien
gccttgggtagatcttctcacattc

SEQ ID NO: 4909387 - DNA, 25 bp, Homo sapien
atgccttgggtagatcttctcacat

SEQ ID NO: 4909388 - DNA, 25 bp, Homo sapien
ccttgggtagatcttctcacattca

SEQ ID NO: 4909389 - DNA, 25 bp, Homo sapien
cttgggtagatcttctcacattcat

SEQ ID NO: 4909390 - DNA, 25 bp, Homo sapien
gcggagagcccagctagtgggactg

SEQ ID NO: 4909391 - DNA, 25 bp, Homo sapien
gtgggaatgtggaagcggagagccc

SEQ ID NO: 4909392 - DNA, 25 bp, Homo sapien
aagcggagagcccagctagtgggac

SEQ ID NO: 4909393 - DNA, 25 bp, Homo sapien
aatgtggaagcggagagcccagcta

SEQ ID NO: 4909394 - DNA, 25 bp, Homo sapien
cagtccagatcactacacaactggg

SEQ ID NO: 4909395 - DNA, 25 bp, Homo sapien
ccgatgccagtaggaagttctcagt

SEQ ID NO: 4909396 - DNA, 25 bp, Homo sapien
tactccgagcccaatgtgatgaacc

SEQ ID NO: 4909397 - DNA, 25 bp, Homo sapien
tggtgacaaagagatccgatgccag

SEQ ID NO: 4909398 - DNA, 25 bp, Homo sapien
tcatattactccaacctccatctgg

SEQ ID NO: 4909399 - DNA, 25 bp, Homo sapien
gagaggagcaccagcccaaactgat

SEQ ID NO: 4909400 - DNA, 25 bp, Homo sapien
tgctgggtcagtggagaggagcacc

SEQ ID NO: 4909401 - DNA, 25 bp, Homo sapien
gatcccccagggctcttggttggaa

SEQ ID NO: 4909402 - DNA, 25 bp, Homo sapien
tacaagttatgcgagttaaaaccat

SEQ ID NO: 4909403 - DNA, 25 bp, Homo sapien
atagtgttagtacaagttatgcgag

SEQ ID NO: 4909404 - DNA, 25 bp, Homo sapien
tgttagtacaagttatgcgagttaa

SEQ ID NO: 4909405 - DNA, 25 bp, Homo sapien
tagtacaagttatgcgagttaaaac

SEQ ID NO: 4909406 - DNA, 25 bp, Homo sapien
gagcatggactgttaaatcttgcac

SEQ ID NO: 4909407 - DNA, 25 bp, Homo sapien
ctgcagagcatggactgttaaatct

SEQ ID NO: 4909408 - DNA, 25 bp, Homo sapien
cagagcatggactgttaaatcttgc

SEQ ID NO: 4909409 - DNA, 25 bp, Homo sapien
catggactgttaaatcttgcacttc

SEQ ID NO: 4909410 - DNA, 25 bp, Homo sapien
gacagggactttgacgtcagctaga

SEQ ID NO: 4909411 - DNA, 25 bp, Homo sapien
aataatttcagagccggtctgtggt

SEQ ID NO: 4909412 - DNA, 25 bp, Homo sapien
gctacgacaaccaatgatctcttgg

SEQ ID NO: 4909413 - DNA, 25 bp, Homo sapien
caaaggcttgtgagaatctggtgga

SEQ ID NO: 4909414 - DNA, 25 bp, Homo sapien
aaccttaagatgtaggtactgcagc

SEQ ID NO: 4909415 - DNA, 25 bp, Homo sapien
gcttgctcaaggtccagccataaaa

SEQ ID NO: 4909416 - DNA, 25 bp, Homo sapien
atacacacttgagccatctaccctg

SEQ ID NO: 4909417 - DNA, 25 bp, Homo sapien
tcattcaacatggattgaggattca

SEQ ID NO: 4909418 - DNA, 25 bp, Homo sapien
gaaacaacgtatactccagtggata

SEQ ID NO: 4909419 - DNA, 25 bp, Homo sapien
gaatttcttgacagcacagcttcca

SEQ ID NO: 4909420 - DNA, 25 bp, Homo sapien
tgcgtccttcatggaccacacagga

SEQ ID NO: 4909421 - DNA, 25 bp, Homo sapien
tcctaaacaggacctcgtggagggc

SEQ ID NO: 4909422 - DNA, 25 bp, Homo sapien
ctgcttcatgtgtggacgaactaga

SEQ ID NO: 4909423 - DNA, 25 bp, Homo sapien
cacacattctccacaagtcctcagg

SEQ ID NO: 4909424 - DNA, 25 bp, Homo sapien
gtggacgaactagactggaagatgc

SEQ ID NO: 4909425 - DNA, 25 bp, Homo sapien
cagaccttccagacaatgagctctt

SEQ ID NO: 4909426 - DNA, 25 bp, Homo sapien
tggatcactgctgcgggcagtttct

SEQ ID NO: 4909427 - DNA, 25 bp, Homo sapien
ggcagtcgtccactccacaagaaag

SEQ ID NO: 4909428 - DNA, 25 bp, Homo sapien
gtttctcaggggtgccaagacggca

SEQ ID NO: 4909429 - DNA, 25 bp, Homo sapien
tgagtcaccatttatttggatcact

SEQ ID NO: 4909430 - DNA, 25 bp, Homo sapien
agcccaaaaatcaggtcccgagcag

SEQ ID NO: 4909431 - DNA, 25 bp, Homo sapien
cagcatgggcttctgattgggatga

SEQ ID NO: 4909432 - DNA, 25 bp, Homo sapien
tacagatccctttaccacattggtc

SEQ ID NO: 4909433 - DNA, 25 bp, Homo sapien
gtacagatccctttaccacattggt

SEQ ID NO: 4909434 - DNA, 25 bp, Homo sapien
tatttgtaatctcagtggcctgtat

SEQ ID NO: 4909435 - DNA, 25 bp, Homo sapien
tagggctggctaaggttcataagat

SEQ ID NO: 4909436 - DNA, 25 bp, Homo sapien
gcctgtatgtggagaataatggtga

SEQ ID NO: 4909437 - DNA, 25 bp, Homo sapien
tggtgattcctatcagtggtagtag

SEQ ID NO: 4909438 - DNA, 25 bp, Homo sapien
cctgcctttgttgtagctcttcctt

SEQ ID NO: 4909439 - DNA, 25 bp, Homo sapien
gataaaagaagttagcgctagcttg

SEQ ID NO: 4909440 - DNA, 25 bp, Homo sapien
tagcttgtctctgcttgctcgtaat

SEQ ID NO: 4909441 - DNA, 25 bp, Homo sapien
ttcaaattcaatgccagtcatggca

SEQ ID NO: 4909442 - DNA, 25 bp, Homo sapien
tcctcggagcagcagttgttcctga

SEQ ID NO: 4909443 - DNA, 25 bp, Homo sapien
tatctgacatagagtcctcggagca

SEQ ID NO: 4909444 - DNA, 25 bp, Homo sapien
ttttgggccaaagcggatgttatat

SEQ ID NO: 4909445 - DNA, 25 bp, Homo sapien
gcagcagttgttcctgaaagttcct

SEQ ID NO: 4909446 - DNA, 25 bp, Homo sapien
aaacaactcagagagacctcgttgg

SEQ ID NO: 4909447 - DNA, 25 bp, Homo sapien
gcagctggtgcacacttcaagcaca

SEQ ID NO: 4909448 - DNA, 25 bp, Homo sapien
tgtatgcagggaccaacagtcatgt

SEQ ID NO: 4909449 - DNA, 25 bp, Homo sapien
acctcgttggcataagggaatactc

SEQ ID NO: 4909450 - DNA, 25 bp, Homo sapien
cctgttagggatactggtcccatct

SEQ ID NO: 4909451 - DNA, 25 bp, Homo sapien
cttcctgttagggatactggtccca

SEQ ID NO: 4909452 - DNA, 25 bp, Homo sapien
gttagggatactggtcccatctgac

SEQ ID NO: 4909453 - DNA, 25 bp, Homo sapien
tgcctgacacttgctcattcttcat

SEQ ID NO: 4909454 - DNA, 25 bp, Homo sapien
tctctgtcaagatgtgtgatgatca

SEQ ID NO: 4909455 - DNA, 25 bp, Homo sapien
catctctgtcaagatgtgtgatgat

SEQ ID NO: 4909456 - DNA, 25 bp, Homo sapien
atctctgtcaagatgtgtgatgatc

SEQ ID NO: 4909457 - DNA, 25 bp, Homo sapien
agaagaaagaactctatcttgttct

SEQ ID NO: 4909458 - DNA, 25 bp, Homo sapien
tcttttacttccattgacttgacat

SEQ ID NO: 4909459 - DNA, 25 bp, Homo sapien
aagaaagaactctatcttgttctcc

SEQ ID NO: 4909460 - DNA, 25 bp, Homo sapien
ttacttccattgacttgacatctcc

SEQ ID NO: 4909461 - DNA, 25 bp, Homo sapien
gaaatcagtaggcaccttgcaggaa

SEQ ID NO: 4909462 - DNA, 25 bp, Homo sapien
caccaggatgttgcactaccacaga

SEQ ID NO: 4909463 - DNA, 25 bp, Homo sapien
cagaagggtagaacagaaagctcaa

SEQ ID NO: 4909464 - DNA, 25 bp, Homo sapien
gaaggaaggcttatagaatcacaga

SEQ ID NO: 4909465 - DNA, 25 bp, Homo sapien
aacttccacacctgtcctagaacct

SEQ ID NO: 4909466 - DNA, 25 bp, Homo sapien
tcttcttgggaccacttttcccatc

SEQ ID NO: 4909467 - DNA, 25 bp, Homo sapien
tgtcctagaacctcccatcctcttc

SEQ ID NO: 4909468 - DNA, 25 bp, Homo sapien
cagagatggggccagcaaaacaaaa

SEQ ID NO: 4909469 - DNA, 25 bp, Homo sapien
ttgaggctatctaaaatggactcct

SEQ ID NO: 4909470 - DNA, 25 bp, Homo sapien
gttgaggctatctaaaatggactcc

SEQ ID NO: 4909471 - DNA, 25 bp, Homo sapien
tggtgtcatcagttgatggggacat

SEQ ID NO: 4909472 - DNA, 25 bp, Homo sapien
gttggtgtcatcagttgatggggac

SEQ ID NO: 4909473 - DNA, 25 bp, Homo sapien
ttggtgtcatcagttgatggggaca

SEQ ID NO: 4909474 - DNA, 25 bp, Homo sapien
cagtgggagaaaaaaagccatcaca

SEQ ID NO: 4909475 - DNA, 25 bp, Homo sapien
tcagtgggagaaaaaaagccatcac

SEQ ID NO: 4909476 - DNA, 25 bp, Homo sapien
ctcagtgggagaaaaaaagccatca

SEQ ID NO: 4909477 - DNA, 25 bp, Homo sapien
gccctctgagtttcccaaaacctgc

SEQ ID NO: 4909478 - DNA, 25 bp, Homo sapien
tgtctgttggcttaacagctgtgtt

SEQ ID NO: 4909479 - DNA, 25 bp, Homo sapien
ctgggtttaggttgtctgttggctt

SEQ ID NO: 4909480 - DNA, 25 bp, Homo sapien
ttctaccaccatgaagaactgtttc

SEQ ID NO: 4909481 - DNA, 25 bp, Homo sapien
ccaaatggaattctaccaccatgaa

SEQ ID NO: 4909482 - DNA, 25 bp, Homo sapien
attcaggtgatggctaaccaaaatc

SEQ ID NO: 4909483 - DNA, 25 bp, Homo sapien
gaattctaccaccatgaagaactgt

SEQ ID NO: 4909484 - DNA, 25 bp, Homo sapien
tgagggacagtctgaagcaggacaa

SEQ ID NO: 4909485 - DNA, 25 bp, Homo sapien
gcttgaggatcaggatggatatcca

SEQ ID NO: 4909486 - DNA, 25 bp, Homo sapien
cctgagggacagtctgaagcaggac

SEQ ID NO: 4909487 - DNA, 25 bp, Homo sapien
agttctcaggcatctctgtagcttg

SEQ ID NO: 4909488 - DNA, 25 bp, Homo sapien
cggagaagaggcagtttgtaaggct

SEQ ID NO: 4909489 - DNA, 25 bp, Homo sapien
ggaagagatgtcagagcttggcgga

SEQ ID NO: 4909490 - DNA, 25 bp, Homo sapien
ttggcggagaagaggcagtttgtaa

SEQ ID NO: 4909491 - DNA, 25 bp, Homo sapien
gatgtcagagcttggcggagaagag

SEQ ID NO: 4909492 - DNA, 25 bp, Homo sapien
gggttctgccagccaaggatggatg

SEQ ID NO: 4909493 - DNA, 25 bp, Homo sapien
ggttctgccagccaaggatggatgg

SEQ ID NO: 4909494 - DNA, 25 bp, Homo sapien
gccaaggatggatggcagatgaggc

SEQ ID NO: 4909495 - DNA, 25 bp, Homo sapien
gttctgccagccaaggatggatggc

SEQ ID NO: 4909496 - DNA, 25 bp, Homo sapien
ggaaatgattctcccaggagggctg

SEQ ID NO: 4909497 - DNA, 25 bp, Homo sapien
gtgggtattgcctacatggctttgc

SEQ ID NO: 4909498 - DNA, 25 bp, Homo sapien
gtgtctggtgggtattgcctacatg

SEQ ID NO: 4909499 - DNA, 25 bp, Homo sapien
gacaacaggcctgggggtgtcaaca

SEQ ID NO: 4909500 - DNA, 25 bp, Homo sapien
cctgctgacaacacgggtgctctca

SEQ ID NO: 4909501 - DNA, 25 bp, Homo sapien
gagctgatggaaagccccattaaga

SEQ ID NO: 4909502 - DNA, 25 bp, Homo sapien
taagggcctctgatcatcacaacat

SEQ ID NO: 4909503 - DNA, 25 bp, Homo sapien
tgccatccacacttaagggcctctg

SEQ ID NO: 4909504 - DNA, 25 bp, Homo sapien
agagacagtagccacatctgactac

SEQ ID NO: 4909505 - DNA, 25 bp, Homo sapien
tggattgaatattgggcccctagga

SEQ ID NO: 4909506 - DNA, 25 bp, Homo sapien
ctcaggaagtaaggcatctttacca

SEQ ID NO: 4909507 - DNA, 25 bp, Homo sapien
caagggtttctcaggaagtaaggca

SEQ ID NO: 4909508 - DNA, 25 bp, Homo sapien
tgcagagactgcttgtgttgccaaa

SEQ ID NO: 4909509 - DNA, 25 bp, Homo sapien
gactgcttgtgttgccaaattccaa

SEQ ID NO: 4909510 - DNA, 25 bp, Homo sapien
caaattccaagatggtttaaggctg

SEQ ID NO: 4909511 - DNA, 25 bp, Homo sapien
tgaaccaatgaaagctccaacctgc

SEQ ID NO: 4909512 - DNA, 25 bp, Homo sapien
gaaaggctgttcaggtccaattctc

SEQ ID NO: 4909513 - DNA, 25 bp, Homo sapien
agatgaatctaagagcccaacctcc

SEQ ID NO: 4909514 - DNA, 25 bp, Homo sapien
aggttttgtgagaatacatggaaag

SEQ ID NO: 4909515 - DNA, 25 bp, Homo sapien
gatgaatctaagagcccaacctccc

SEQ ID NO: 4909516 - DNA, 25 bp, Homo sapien
ctcacatacctctagtgaatccgtg

SEQ ID NO: 4909517 - DNA, 25 bp, Homo sapien
tcctcacatacctctagtgaatccg

SEQ ID NO: 4909518 - DNA, 25 bp, Homo sapien
cacatacctctagtgaatccgtgga

SEQ ID NO: 4909519 - DNA, 25 bp, Homo sapien
catacctctagtgaatccgtggatt

SEQ ID NO: 4909520 - DNA, 25 bp, Homo sapien
cttgttcattactctgaactactga

SEQ ID NO: 4909521 - DNA, 25 bp, Homo sapien
cctgtttgtatgtgggctgatctga

SEQ ID NO: 4909522 - DNA, 25 bp, Homo sapien
tctgattgatctgagtagtctacca

SEQ ID NO: 4909523 - DNA, 25 bp, Homo sapien
gattaatagtttgctccccatcttg

SEQ ID NO: 4909524 - DNA, 25 bp, Homo sapien
tgcttcaaatgggttctgcgtggct

SEQ ID NO: 4909525 - DNA, 25 bp, Homo sapien
gcttgttggcttccacgcagcatgg

SEQ ID NO: 4909526 - DNA, 25 bp, Homo sapien
aaatctctaatctgagctggtccag

SEQ ID NO: 4909527 - DNA, 25 bp, Homo sapien
tctgtcacaggctacttaaagggct

SEQ ID NO: 4909528 - DNA, 25 bp, Homo sapien
tgctgctagtctgcccttcaaagag

SEQ ID NO: 4909529 - DNA, 25 bp, Homo sapien
cagttcattgttttccgcccagaga

SEQ ID NO: 4909530 - DNA, 25 bp, Homo sapien
cccagagacgtgcacgatgcagtgc

SEQ ID NO: 4909531 - DNA, 25 bp, Homo sapien
tacttctcgtgatggaaaaggcgtg

SEQ ID NO: 4909532 - DNA, 25 bp, Homo sapien
cggacatttgagtagtaccagcaca

SEQ ID NO: 4909533 - DNA, 25 bp, Homo sapien
gatggcgtcagttcccatgcgactt

SEQ ID NO: 4909534 - DNA, 25 bp, Homo sapien
ttcagggaaggatatgtcagcagcc

SEQ ID NO: 4909535 - DNA, 25 bp, Homo sapien
tcagcagcccatgttctttgctcag

SEQ ID NO: 4909536 - DNA, 25 bp, Homo sapien
gaaccagattgggacttcacagtcg

SEQ ID NO: 4909537 - DNA, 25 bp, Homo sapien
agagctggagacactatcactagag

SEQ ID NO: 4909538 - DNA, 25 bp, Homo sapien
ccttggctctgaatggtcactcttg

SEQ ID NO: 4909539 - DNA, 25 bp, Homo sapien
cttgagtgtgtagaatcagagagct

SEQ ID NO: 4909540 - DNA, 25 bp, Homo sapien
cttgctgggtattgttctaggtgct

SEQ ID NO: 4909541 - DNA, 25 bp, Homo sapien
taagctccaaagtagacctctgaag

SEQ ID NO: 4909542 - DNA, 25 bp, Homo sapien
caaatacttgctgggtattgttcta

SEQ ID NO: 4909543 - DNA, 25 bp, Homo sapien
agtagctactactctattctatttc

SEQ ID NO: 4909544 - DNA, 25 bp, Homo sapien
taagaacttctgctgcgaggctcag

SEQ ID NO: 4909545 - DNA, 25 bp, Homo sapien
tttagtgagcaacaaaacgccatgc

SEQ ID NO: 4909546 - DNA, 25 bp, Homo sapien
tgatgggttcttgggcaaagctacc

SEQ ID NO: 4909547 - DNA, 25 bp, Homo sapien
tgaaaatagaccagttgcagcagat

SEQ ID NO: 4909548 - DNA, 25 bp, Homo sapien
caagaggagcaaattgtggagaccc

SEQ ID NO: 4909549 - DNA, 25 bp, Homo sapien
atcatgatggaagggccactgagca

SEQ ID NO: 4909550 - DNA, 25 bp, Homo sapien
tctaatgaagggactactgcagacc

SEQ ID NO: 4909551 - DNA, 25 bp, Homo sapien
tggctcccaaaaactagcagcaggg

SEQ ID NO: 4909552 - DNA, 25 bp, Homo sapien
tccctggcctgagcggtgccttgtg

SEQ ID NO: 4909553 - DNA, 25 bp, Homo sapien
gcggtgccttgtgctcttcatccca

SEQ ID NO: 4909554 - DNA, 25 bp, Homo sapien
cttccctggcctgagcggtgccttg

SEQ ID NO: 4909555 - DNA, 25 bp, Homo sapien
agcggtgccttgtgctcttcatccc

SEQ ID NO: 4909556 - DNA, 25 bp, Homo sapien
aacttctcttaagcataatctttta

SEQ ID NO: 4909557 - DNA, 25 bp, Homo sapien
tatttgctgaaaattgctcactggt

SEQ ID NO: 4909558 - DNA, 25 bp, Homo sapien
actggtttatatgctccagcactga

SEQ ID NO: 4909559 - DNA, 25 bp, Homo sapien
gaaacagcaaatctgatcttcaaaa

SEQ ID NO: 4909560 - DNA, 25 bp, Homo sapien
gaaaatgacatcgtgtgctgtccaa

SEQ ID NO: 4909561 - DNA, 25 bp, Homo sapien
gcagcacagtttgcttggcagagca

SEQ ID NO: 4909562 - DNA, 25 bp, Homo sapien
gacattcgggcttgttcctgccaag

SEQ ID NO: 4909563 - DNA, 25 bp, Homo sapien
gccactgacttaagggaagagcatt

SEQ ID NO: 4909564 - DNA, 25 bp, Homo sapien
gttggagttgacagctaattgttgc

SEQ ID NO: 4909565 - DNA, 25 bp, Homo sapien
attgttgccactgattgctttgctg

SEQ ID NO: 4909566 - DNA, 25 bp, Homo sapien
ttgttgccactgattgctttgctga

SEQ ID NO: 4909567 - DNA, 25 bp, Homo sapien
tgttgccactgattgctttgctgac

SEQ ID NO: 4909568 - DNA, 25 bp, Homo sapien
agggtggtaagtattgctctagttc

SEQ ID NO: 4909569 - DNA, 25 bp, Homo sapien
taaggtagtggacactgcaggaacc

SEQ ID NO: 4909570 - DNA, 25 bp, Homo sapien
catcatgttgattatgttctgagac

SEQ ID NO: 4909571 - DNA, 25 bp, Homo sapien
tctgagactctaagggcttggctta

SEQ ID NO: 4909572 - DNA, 25 bp, Homo sapien
tggaagcctctttctcgggaaccac

SEQ ID NO: 4909573 - DNA, 25 bp, Homo sapien
cctctttctcgggaaccacaatgac

SEQ ID NO: 4909574 - DNA, 25 bp, Homo sapien
ttctcgggaaccacaatgactacac

SEQ ID NO: 4909575 - DNA, 25 bp, Homo sapien
cacaatgactacacagttctacctt

SEQ ID NO: 4909576 - DNA, 25 bp, Homo sapien
caagcctttggacacctctctgagt

SEQ ID NO: 4909577 - DNA, 25 bp, Homo sapien
tttaagaccctgtagaacaaggcag

SEQ ID NO: 4909578 - DNA, 25 bp, Homo sapien
gaccctgtcatagagcatggcaaga

SEQ ID NO: 4909579 - DNA, 25 bp, Homo sapien
gattccttctagttatgggcccctg

SEQ ID NO: 4909580 - DNA, 25 bp, Homo sapien
tagtacctgctaggtaagattgtcc

SEQ ID NO: 4909581 - DNA, 25 bp, Homo sapien
taagcaccatctagtctataagccc

SEQ ID NO: 4909582 - DNA, 25 bp, Homo sapien
ccctctcaaaagctggtaagaataa

SEQ ID NO: 4909583 - DNA, 25 bp, Homo sapien
gcatcatatcctcaagtggacagag

SEQ ID NO: 4909584 - DNA, 25 bp, Homo sapien
gttttgtgccgaccatgagctccct

SEQ ID NO: 4909585 - DNA, 25 bp, Homo sapien
atgagctccctgtgatgaatttgaa

SEQ ID NO: 4909586 - DNA, 25 bp, Homo sapien
tgtttgttttgtgccgaccatgagc

SEQ ID NO: 4909587 - DNA, 25 bp, Homo sapien
tttgttttgtgccgaccatgagctc

SEQ ID NO: 4909588 - DNA, 25 bp, Homo sapien
caggatgaagcaggagctgttttcc

SEQ ID NO: 4909589 - DNA, 25 bp, Homo sapien
tcaggatgaagcaggagctgttttc

SEQ ID NO: 4909590 - DNA, 25 bp, Homo sapien
ggatgaagcaggagctgttttccat

SEQ ID NO: 4909591 - DNA, 25 bp, Homo sapien
ctcaggatgaagcaggagctgtttt

SEQ ID NO: 4909592 - DNA, 25 bp, Homo sapien
cacagttgcatttgttcgtgtaatc

SEQ ID NO: 4909593 - DNA, 25 bp, Homo sapien
caaacacagttgcatttgttcgtgt

SEQ ID NO: 4909594 - DNA, 25 bp, Homo sapien
catttgttcgtgtaatcattgcctt

SEQ ID NO: 4909595 - DNA, 25 bp, Homo sapien
taatcattgccttgtttgaggttgt

SEQ ID NO: 4909596 - DNA, 25 bp, Homo sapien
taaacagcatttggggatgagatca

SEQ ID NO: 4909597 - DNA, 25 bp, Homo sapien
catttggggatgagatcacttctgt

SEQ ID NO: 4909598 - DNA, 25 bp, Homo sapien
ggatagatgaggaagggttaactcc

SEQ ID NO: 4909599 - DNA, 25 bp, Homo sapien
ggaggatagatgaggaagggttaac

SEQ ID NO: 4909600 - DNA, 25 bp, Homo sapien
gggagtgggtgttagtactctctcc

SEQ ID NO: 4909601 - DNA, 25 bp, Homo sapien
ctgactcgtacaagcatccagtggc

SEQ ID NO: 4909602 - DNA, 25 bp, Homo sapien
agtgggtgttagtactctctcctct

SEQ ID NO: 4909603 - DNA, 25 bp, Homo sapien
tcgtacaagcatccagtggcccttc

SEQ ID NO: 4909604 - DNA, 25 bp, Homo sapien
caggatagtgaggtgtgttactgca

SEQ ID NO: 4909605 - DNA, 25 bp, Homo sapien
tgcaataatatctggaatggactct

SEQ ID NO: 4909606 - DNA, 25 bp, Homo sapien
gggctacaaattccagagggtataa

SEQ ID NO: 4909607 - DNA, 25 bp, Homo sapien
tataaatgatactgctgaggctgcc

SEQ ID NO: 4909608 - DNA, 25 bp, Homo sapien
ccccttcggactgtaagctgcctga

SEQ ID NO: 4909609 - DNA, 25 bp, Homo sapien
caatttgttttggtatactaactct

SEQ ID NO: 4909610 - DNA, 25 bp, Homo sapien
taattatgtaacctgctaataaagg

SEQ ID NO: 4909611 - DNA, 25 bp, Homo sapien
gatagatttcttcagatttgctaga

SEQ ID NO: 4909612 - DNA, 25 bp, Homo sapien
cacaatgcggcctccgtattttgaa

SEQ ID NO: 4909613 - DNA, 25 bp, Homo sapien
gctcccatccatggacacaatgcgg

SEQ ID NO: 4909614 - DNA, 25 bp, Homo sapien
atccatggacacaatgcggcctccg

SEQ ID NO: 4909615 - DNA, 25 bp, Homo sapien
catggacacaatgcggcctccgtat

SEQ ID NO: 4909616 - DNA, 25 bp, Homo sapien
tttttatgacgaaagaggaatcatc

SEQ ID NO: 4909617 - DNA, 25 bp, Homo sapien
ccagtgccttgtaaagggactgcca

SEQ ID NO: 4909618 - DNA, 25 bp, Homo sapien
tatgtttatcaaacgatgttctgtg

SEQ ID NO: 4909619 - DNA, 25 bp, Homo sapien
tctttaaatgtcagcacgatgtctg

SEQ ID NO: 4909620 - DNA, 25 bp, Homo sapien
gccagaggggtcccttaggcttgtg

SEQ ID NO: 4909621 - DNA, 25 bp, Homo sapien
ccttaggcttgtgttggtaaaagca

SEQ ID NO: 4909622 - DNA, 25 bp, Homo sapien
agaggggtcccttaggcttgtgttg

SEQ ID NO: 4909623 - DNA, 25 bp, Homo sapien
cttaggcttgtgttggtaaaagcac

SEQ ID NO: 4909624 - DNA, 25 bp, Homo sapien
cagattctggatcctaaaaagaggg

SEQ ID NO: 4909625 - DNA, 25 bp, Homo sapien
taagcaaacacagttggaaggcaaa

SEQ ID NO: 4909626 - DNA, 25 bp, Homo sapien
gaagtaatttctgatgctccccaaa

SEQ ID NO: 4909627 - DNA, 25 bp, Homo sapien
gttattacacaccagaactgtctca

SEQ ID NO: 4909628 - DNA, 25 bp, Homo sapien
ggacttcaaaacccaagagaagcat

SEQ ID NO: 4909629 - DNA, 25 bp, Homo sapien
aggacttcaaaacccaagagaagca

SEQ ID NO: 4909630 - DNA, 25 bp, Homo sapien
ttatcttagtttcattggtggccat

SEQ ID NO: 4909631 - DNA, 25 bp, Homo sapien
gttgctgtttatcttagtttcattg

SEQ ID NO: 4909632 - DNA, 25 bp, Homo sapien
gctgtttatcttagtttcattggtg

SEQ ID NO: 4909633 - DNA, 25 bp, Homo sapien
tgtttatcttagtttcattggtggc

SEQ ID NO: 4909634 - DNA, 25 bp, Homo sapien
atagatttaattccttgattattgc

SEQ ID NO: 4909635 - DNA, 25 bp, Homo sapien
gggaaaggccttgaggaatatagat

SEQ ID NO: 4909636 - DNA, 25 bp, Homo sapien
aggccttgaggaatatagatttaat

SEQ ID NO: 4909637 - DNA, 25 bp, Homo sapien
ccttgaggaatatagatttaattcc

SEQ ID NO: 4909638 - DNA, 25 bp, Homo sapien
ttgccttctctgctggcggccaagt

SEQ ID NO: 4909639 - DNA, 25 bp, Homo sapien
ctggcgtcttggcattggtgacagt

SEQ ID NO: 4909640 - DNA, 25 bp, Homo sapien
gccaccactggcgtcttggcattgg

SEQ ID NO: 4909641 - DNA, 25 bp, Homo sapien
ccactggcgtcttggcattggtgac

SEQ ID NO: 4909642 - DNA, 25 bp, Homo sapien
tgtccagcaagtctcacgagtgcat

SEQ ID NO: 4909643 - DNA, 25 bp, Homo sapien
tactcggctgccttggttgcaatga

SEQ ID NO: 4909644 - DNA, 25 bp, Homo sapien
tcacgagtgcattgcgtgctgtttc

SEQ ID NO: 4909645 - DNA, 25 bp, Homo sapien
caatgacggaggatgttttctgtcc

SEQ ID NO: 4909646 - DNA, 25 bp, Homo sapien
gccagtttcctctgccttggttgga

SEQ ID NO: 4909647 - DNA, 25 bp, Homo sapien
ccagtttcctctgccttggttggag

SEQ ID NO: 4909648 - DNA, 25 bp, Homo sapien
agtttcctctgccttggttggagca

SEQ ID NO: 4909649 - DNA, 25 bp, Homo sapien
gtttcctctgccttggttggagcac

SEQ ID NO: 4909650 - DNA, 25 bp, Homo sapien
ggccaagggagaggccgaaaggcgc

SEQ ID NO: 4909651 - DNA, 25 bp, Homo sapien
tggatcccgggcctgcggagtctgc

SEQ ID NO: 4909652 - DNA, 25 bp, Homo sapien
ttgaacacggacgaggaagtggtct

SEQ ID NO: 4909653 - DNA, 25 bp, Homo sapien
cgggcctgcggagtctgcccggaaa

SEQ ID NO: 4909654 - DNA, 25 bp, Homo sapien
gaagaccatagatcagtgcctttct

SEQ ID NO: 4909655 - DNA, 25 bp, Homo sapien
tggatccctcctaaactctcagtaa

SEQ ID NO: 4909656 - DNA, 25 bp, Homo sapien
tccactgccgacagatgtttggaac

SEQ ID NO: 4909657 - DNA, 25 bp, Homo sapien
tcagaagcattacattgtttctctg

SEQ ID NO: 4909658 - DNA, 25 bp, Homo sapien
aagcaaaggcgtgccatgggaactg

SEQ ID NO: 4909659 - DNA, 25 bp, Homo sapien
gcaaaggcgtgccatgggaactgtc

SEQ ID NO: 4909660 - DNA, 25 bp, Homo sapien
aaggcgtgccatgggaactgtccat

SEQ ID NO: 4909661 - DNA, 25 bp, Homo sapien
tgaagcaaaggcgtgccatgggaac

SEQ ID NO: 4909662 - DNA, 25 bp, Homo sapien
caagaagcgtctcaccaaatggcat

SEQ ID NO: 4909663 - DNA, 25 bp, Homo sapien
gccaagaagcgtctcaccaaatggc

SEQ ID NO: 4909664 - DNA, 25 bp, Homo sapien
ccaagaagcgtctcaccaaatggca

SEQ ID NO: 4909665 - DNA, 25 bp, Homo sapien
agccaagaagcgtctcaccaaatgg

SEQ ID NO: 4909666 - DNA, 25 bp, Homo sapien
tgggaaagctggtgtcgctccccaa

SEQ ID NO: 4909667 - DNA, 25 bp, Homo sapien
tcacccgatagaagggaattccaac

SEQ ID NO: 4909668 - DNA, 25 bp, Homo sapien
tgcaagtaggtgtgggtaaattccc

SEQ ID NO: 4909669 - DNA, 25 bp, Homo sapien
caagagggtcttcacccgatagaag

SEQ ID NO: 4909670 - DNA, 25 bp, Homo sapien
agctcatgaagacagttgcgtcagt

SEQ ID NO: 4909671 - DNA, 25 bp, Homo sapien
gaagacagttgcgtcagtttccttc

SEQ ID NO: 4909672 - DNA, 25 bp, Homo sapien
cactggggatggttcctttgtgtct

SEQ ID NO: 4909673 - DNA, 25 bp, Homo sapien
ccttcactggggatggttcctttgt

SEQ ID NO: 4909674 - DNA, 25 bp, Homo sapien
catcttgcaaactggctgtgcacat

SEQ ID NO: 4909675 - DNA, 25 bp, Homo sapien
tggtggagctcttgaaccactggtt

SEQ ID NO: 4909676 - DNA, 25 bp, Homo sapien
cagaaatgtcttgctcgagggcttg

SEQ ID NO: 4909677 - DNA, 25 bp, Homo sapien
tcacggagggaactgaagatgcaga

SEQ ID NO: 4909678 - DNA, 25 bp, Homo sapien
tcaagacggaagattctgtttccag

SEQ ID NO: 4909679 - DNA, 25 bp, Homo sapien
ccgctgtggcacatggtatactgaa

SEQ ID NO: 4909680 - DNA, 25 bp, Homo sapien
tctctgtacttatgaccgctgtggc

SEQ ID NO: 4909681 - DNA, 25 bp, Homo sapien
aaggtagggaccatgctctttacgt

SEQ ID NO: 4909682 - DNA, 25 bp, Homo sapien
taactgagccgctttaaggtaggga

SEQ ID NO: 4909683 - DNA, 25 bp, Homo sapien
tagtgtaccagcaattgacttaggc

SEQ ID NO: 4909684 - DNA, 25 bp, Homo sapien
catttatacatagaggaagggctta

SEQ ID NO: 4909685 - DNA, 25 bp, Homo sapien
gaacaaagattggaaaaagctggcc

SEQ ID NO: 4909686 - DNA, 25 bp, Homo sapien
aagctggccgagaaccatttataca

SEQ ID NO: 4909687 - DNA, 25 bp, Homo sapien
gagtcactcaatggacaggcgagaa

SEQ ID NO: 4909688 - DNA, 25 bp, Homo sapien
cagggagatttccttaggccgcagg

SEQ ID NO: 4909689 - DNA, 25 bp, Homo sapien
gagtaggctaagcagtccagagcag

SEQ ID NO: 4909690 - DNA, 25 bp, Homo sapien
gtgttcctggaacaccacgagggcg

SEQ ID NO: 4909691 - DNA, 25 bp, Homo sapien
ccagccctttccctagcgaagtgtt

SEQ ID NO: 4909692 - DNA, 25 bp, Homo sapien
cagcaacagcgcgttctcttcgcct

SEQ ID NO: 4909693 - DNA, 25 bp, Homo sapien
ttggcggtgtagctgtcccgtcccc

SEQ ID NO: 4909694 - DNA, 25 bp, Homo sapien
gttgtttacgcacgaaaccagccag

SEQ ID NO: 4909695 - DNA, 25 bp, Homo sapien
gatggcctgactcgtacgtggaagc

SEQ ID NO: 4909696 - DNA, 25 bp, Homo sapien
cgtgccggcctagccaagacaattt

SEQ ID NO: 4909697 - DNA, 25 bp, Homo sapien
agaggttaattgacccaaggtagca

SEQ ID NO: 4909698 - DNA, 25 bp, Homo sapien
gtgtgactcaggcatctcaatttga

SEQ ID NO: 4909699 - DNA, 25 bp, Homo sapien
agcagtcttgctcatcctcactatg

SEQ ID NO: 4909700 - DNA, 25 bp, Homo sapien
tgttactgccagactgacaactatg

SEQ ID NO: 4909701 - DNA, 25 bp, Homo sapien
gacaactatgttatccctaaaccag

SEQ ID NO: 4909702 - DNA, 25 bp, Homo sapien
gatgcatcaaacagtacacgaacag

SEQ ID NO: 4909703 - DNA, 25 bp, Homo sapien
tattgatggcctatatgcaaaggga

SEQ ID NO: 4909704 - DNA, 25 bp, Homo sapien
ccttgagatctttcagttacgcgtg

SEQ ID NO: 4909705 - DNA, 25 bp, Homo sapien
tgcagaatcctcttactccttgaga

SEQ ID NO: 4909706 - DNA, 25 bp, Homo sapien
gggaaactcacactgcctacactat

SEQ ID NO: 4909707 - DNA, 25 bp, Homo sapien
cactccagcctggtgcccgagcgag

SEQ ID NO: 4909708 - DNA, 25 bp, Homo sapien
cggaggttgtagtaagccgagaccg

SEQ ID NO: 4909709 - DNA, 25 bp, Homo sapien
aggttgtagtaagccgagaccgtgc

SEQ ID NO: 4909710 - DNA, 25 bp, Homo sapien
tgcactccagcctggtgcccgagcg

SEQ ID NO: 4909711 - DNA, 25 bp, Homo sapien
taacctctgtatgcacatgatggga

SEQ ID NO: 4909712 - DNA, 25 bp, Homo sapien
tcagtaagtctttggtggaggccag

SEQ ID NO: 4909713 - DNA, 25 bp, Homo sapien
tcttcatgcagatcatcccaggtga

SEQ ID NO: 4909714 - DNA, 25 bp, Homo sapien
gtgtgaccccttacttggcatagga

SEQ ID NO: 4909715 - DNA, 25 bp, Homo sapien
tctcaagaggttactgcacttcagt

SEQ ID NO: 4909716 - DNA, 25 bp, Homo sapien
cggtttgactgcattgagctctagg

SEQ ID NO: 4909717 - DNA, 25 bp, Homo sapien
aaatgttcgtgagcagcttaactac

SEQ ID NO: 4909718 - DNA, 25 bp, Homo sapien
gggccaatgcacaatacttttatca

SEQ ID NO: 4909719 - DNA, 25 bp, Homo sapien
tcaatcacaataagaccaccagatg

SEQ ID NO: 4909720 - DNA, 25 bp, Homo sapien
taaggagcactagcaacatttggct

SEQ ID NO: 4909721 - DNA, 25 bp, Homo sapien
tgttactcgccattaagaccaagaa

SEQ ID NO: 4909722 - DNA, 25 bp, Homo sapien
tatggaagttaatgctgtcataccc

SEQ ID NO: 4909723 - DNA, 25 bp, Homo sapien
gacagacactgaagaatgatgcgta

SEQ ID NO: 4909724 - DNA, 25 bp, Homo sapien
tacatgttcagcaaactatttcagg

SEQ ID NO: 4909725 - DNA, 25 bp, Homo sapien
aagcttttccttaagagagacagac

SEQ ID NO: 4909726 - DNA, 25 bp, Homo sapien
tatagaattctagatgagctttccc

SEQ ID NO: 4909727 - DNA, 25 bp, Homo sapien
tggaaagtctacctcttagtggaac

SEQ ID NO: 4909728 - DNA, 25 bp, Homo sapien
tcttattagtacagagccccagcta

SEQ ID NO: 4909729 - DNA, 25 bp, Homo sapien
tgtactcctggaacattgccccggt

SEQ ID NO: 4909730 - DNA, 25 bp, Homo sapien
tttgactagtgccaagccttgacag

SEQ ID NO: 4909731 - DNA, 25 bp, Homo sapien
catctgaaagcgttttagacaggca

SEQ ID NO: 4909732 - DNA, 25 bp, Homo sapien
aaataaactgcctaagatcttgcca

SEQ ID NO: 4909733 - DNA, 25 bp, Homo sapien
ctgacatacagatgagataaaactc

SEQ ID NO: 4909734 - DNA, 25 bp, Homo sapien
gccactccaagtatgatcctcagat

SEQ ID NO: 4909735 - DNA, 25 bp, Homo sapien
tatctttcctgagatactgacaggg

SEQ ID NO: 4909736 - DNA, 25 bp, Homo sapien
aggtaaggtactaagacaattcctg

SEQ ID NO: 4909737 - DNA, 25 bp, Homo sapien
ccctctagctgtatgatgttaccaa

SEQ ID NO: 4909738 - DNA, 25 bp, Homo sapien
tgatccctgtgctacaataattgtg

SEQ ID NO: 4909739 - DNA, 25 bp, Homo sapien
gcattgtagaagtgttccagcaccc

SEQ ID NO: 4909740 - DNA, 25 bp, Homo sapien
cattttgtcagggagcctttagtcc

SEQ ID NO: 4909741 - DNA, 25 bp, Homo sapien
gaagtctccgttatctggaatgtga

SEQ ID NO: 4909742 - DNA, 25 bp, Homo sapien
cattagtactagcaggtgcattgga

SEQ ID NO: 4909743 - DNA, 25 bp, Homo sapien
ggaagataggtcacatttatgctgt

SEQ ID NO: 4909744 - DNA, 25 bp, Homo sapien
ggctaatctgatacccagtttgaaa

SEQ ID NO: 4909745 - DNA, 25 bp, Homo sapien
taggaatttagattagatacactcc

SEQ ID NO: 4909746 - DNA, 25 bp, Homo sapien
gatacactcctagagatgtataagc

SEQ ID NO: 4909747 - DNA, 25 bp, Homo sapien
ttgctttgtcgccctggccagagca

SEQ ID NO: 4909748 - DNA, 25 bp, Homo sapien
tcttgctttgtcgccctggccagag

SEQ ID NO: 4909749 - DNA, 25 bp, Homo sapien
ctttgtcgccctggccagagcatag

SEQ ID NO: 4909750 - DNA, 25 bp, Homo sapien
gctttgtcgccctggccagagcata

SEQ ID NO: 4909751 - DNA, 25 bp, Homo sapien
gaagaaaagcttattcccacttgga

SEQ ID NO: 4909752 - DNA, 25 bp, Homo sapien
gctagcttacgaacacttgaaggca

SEQ ID NO: 4909753 - DNA, 25 bp, Homo sapien
tgactgcgcgagaagaagctagctt

SEQ ID NO: 4909754 - DNA, 25 bp, Homo sapien
cccacttggaactggatggtcagta

SEQ ID NO: 4909755 - DNA, 25 bp, Homo sapien
cccagccaagatattcgtaatgtta

SEQ ID NO: 4909756 - DNA, 25 bp, Homo sapien
catatttatgaggtaaattctctcc

SEQ ID NO: 4909757 - DNA, 25 bp, Homo sapien
gccaagatattcgtaatgttagaaa

SEQ ID NO: 4909758 - DNA, 25 bp, Homo sapien
aatttagtagttttgtacaatgtat

SEQ ID NO: 4909759 - DNA, 25 bp, Homo sapien
ggctttttagactaggcttcaggac

SEQ ID NO: 4909760 - DNA, 25 bp, Homo sapien
aggactgttgtgcttcattgtgcca

SEQ ID NO: 4909761 - DNA, 25 bp, Homo sapien
tgcacagtctgccaaattgctggaa

SEQ ID NO: 4909762 - DNA, 25 bp, Homo sapien
aatgctgcaaaaccggaaactttct

SEQ ID NO: 4909763 - DNA, 25 bp, Homo sapien
gtcagaaaatacgatgactccaggc

SEQ ID NO: 4909764 - DNA, 25 bp, Homo sapien
gcagccaaggtggtatctcctcagt

SEQ ID NO: 4909765 - DNA, 25 bp, Homo sapien
ccaggcaagcctttacgaagaaatg

SEQ ID NO: 4909766 - DNA, 25 bp, Homo sapien
aaactctgaatcttagcagccaagg

SEQ ID NO: 4909767 - DNA, 25 bp, Homo sapien
caaactcagggctgccggttgaaca

SEQ ID NO: 4909768 - DNA, 25 bp, Homo sapien
ccgggcagtaggaagtccacagact

SEQ ID NO: 4909769 - DNA, 25 bp, Homo sapien
gagtcttattatccacgccgggcag

SEQ ID NO: 4909770 - DNA, 25 bp, Homo sapien
gaatttgccgaagatttcactgcag

SEQ ID NO: 4909771 - DNA, 25 bp, Homo sapien
tgtgcattgctgaccctatccctgt

SEQ ID NO: 4909772 - DNA, 25 bp, Homo sapien
agcatcaagtagcagaagtgggacc

SEQ ID NO: 4909773 - DNA, 25 bp, Homo sapien
ctaatggctgccgtattggacaccg

SEQ ID NO: 4909774 - DNA, 25 bp, Homo sapien
tggacaccgccaatatagaacgttg

SEQ ID NO: 4909775 - DNA, 25 bp, Homo sapien
gaatttttagagctctttcagcagt

SEQ ID NO: 4909776 - DNA, 25 bp, Homo sapien
gattatgtagtaagtagctcaggcg

SEQ ID NO: 4909777 - DNA, 25 bp, Homo sapien
gcccggccacaagtgttatatctta

SEQ ID NO: 4909778 - DNA, 25 bp, Homo sapien
ggcgatgtcattccctagtttttaa

SEQ ID NO: 4909779 - DNA, 25 bp, Homo sapien
ttcccgccggcagactcgagttatt

SEQ ID NO: 4909780 - DNA, 25 bp, Homo sapien
gcatctgtcattccagaggagctga

SEQ ID NO: 4909781 - DNA, 25 bp, Homo sapien
caatatttagaagccgctggagttc

SEQ ID NO: 4909782 - DNA, 25 bp, Homo sapien
cgagttattcggacaggacgggatc

SEQ ID NO: 4909783 - DNA, 25 bp, Homo sapien
gggtagacctcttagcaatattcgg

SEQ ID NO: 4909784 - DNA, 25 bp, Homo sapien
gcatagctgagaccattgacacgtt

SEQ ID NO: 4909785 - DNA, 25 bp, Homo sapien
tgggcttgcctcagattccatgtga

SEQ ID NO: 4909786 - DNA, 25 bp, Homo sapien
aactgttttggctgtctgggcttgc

SEQ ID NO: 4909787 - DNA, 25 bp, Homo sapien
cccagcctatggttttagattgaca

SEQ ID NO: 4909788 - DNA, 25 bp, Homo sapien
tgagtggtgatactaaagtcatcca

SEQ ID NO: 4909789 - DNA, 25 bp, Homo sapien
tacaggcgtgaacccagcctatggt

SEQ ID NO: 4909790 - DNA, 25 bp, Homo sapien
aatgttagtatggtacatgtgttac

SEQ ID NO: 4909791 - DNA, 25 bp, Homo sapien
tgaccttgaacagtctgcctgcccc

SEQ ID NO: 4909792 - DNA, 25 bp, Homo sapien
cactctactggtttgcatatctgca

SEQ ID NO: 4909793 - DNA, 25 bp, Homo sapien
tcttcctcagggtgaactcaatgca

SEQ ID NO: 4909794 - DNA, 25 bp, Homo sapien
gcttctaggatgaacccagctctgg

SEQ ID NO: 4909795 - DNA, 25 bp, Homo sapien
tgactgtcgacaatcagggttggtg

SEQ ID NO: 4909796 - DNA, 25 bp, Homo sapien
ttgttactacgcatgaagcactgtg

SEQ ID NO: 4909797 - DNA, 25 bp, Homo sapien
caatttgagttgaaggaggtactgt

SEQ ID NO: 4909798 - DNA, 25 bp, Homo sapien
gtgagttttataatcgatacagaag

SEQ ID NO: 4909799 - DNA, 25 bp, Homo sapien
taggtaaatcatgaggtttgcacat

SEQ ID NO: 4909800 - DNA, 25 bp, Homo sapien
cagcttctcgctagtgacgcgcggt

SEQ ID NO: 4909801 - DNA, 25 bp, Homo sapien
gcggcagcttctcgctagtgacgcg

SEQ ID NO: 4909802 - DNA, 25 bp, Homo sapien
ggcagcttctcgctagtgacgcgcg

SEQ ID NO: 4909803 - DNA, 25 bp, Homo sapien
cttctcgctagtgacgcgcggtgcg

SEQ ID NO: 4909804 - DNA, 25 bp, Homo sapien
gaggagtgctgacgttctctccttt

SEQ ID NO: 4909805 - DNA, 25 bp, Homo sapien
catgcatgttgtcaggtctgagagc

SEQ ID NO: 4909806 - DNA, 25 bp, Homo sapien
tccttgtcaagaggagtgctgacgt

SEQ ID NO: 4909807 - DNA, 25 bp, Homo sapien
aacaacatgtttagatgccatgaag

SEQ ID NO: 4909808 - DNA, 25 bp, Homo sapien
ggaagacccattctggattcattgt

SEQ ID NO: 4909809 - DNA, 25 bp, Homo sapien
tggaattccattgactggtctcttg

SEQ ID NO: 4909810 - DNA, 25 bp, Homo sapien
gaagacccattctggattcattgtc

SEQ ID NO: 4909811 - DNA, 25 bp, Homo sapien
tttccagcaaataattatataaccc

SEQ ID NO: 4909812 - DNA, 25 bp, Homo sapien
cactctgttaacttttcactcatgt

SEQ ID NO: 4909813 - DNA, 25 bp, Homo sapien
ttcactcatgttagcagcagtatct

SEQ ID NO: 4909814 - DNA, 25 bp, Homo sapien
tacacttgactacaacactctgtta

SEQ ID NO: 4909815 - DNA, 25 bp, Homo sapien
tcttgggcataattttgtgccttat

SEQ ID NO: 4909816 - DNA, 25 bp, Homo sapien
cttccctcattagaagcaccgagag

SEQ ID NO: 4909817 - DNA, 25 bp, Homo sapien
tccccagacaggatccttctcatga

SEQ ID NO: 4909818 - DNA, 25 bp, Homo sapien
tcttccccagacaggatccttctca

SEQ ID NO: 4909819 - DNA, 25 bp, Homo sapien
ttggagtcaggttctcattggcaca

SEQ ID NO: 4909820 - DNA, 25 bp, Homo sapien
ttgtaggtctcgttttttgagctga

SEQ ID NO: 4909821 - DNA, 25 bp, Homo sapien
tgaactcttcatcttcgcaggtgga

SEQ ID NO: 4909822 - DNA, 25 bp, Homo sapien
tagtaactggctgggactttgaact

SEQ ID NO: 4909823 - DNA, 25 bp, Homo sapien
actcttcatcttcgcaggtggaagg

SEQ ID NO: 4909824 - DNA, 25 bp, Homo sapien
tcagcgattaactcggccatggagt

SEQ ID NO: 4909825 - DNA, 25 bp, Homo sapien
gctccatcagcgattaactcggcca

SEQ ID NO: 4909826 - DNA, 25 bp, Homo sapien
tcaggctccatcagcgattaactcg

SEQ ID NO: 4909827 - DNA, 25 bp, Homo sapien
catcagcgattaactcggccatgga

SEQ ID NO: 4909828 - DNA, 25 bp, Homo sapien
tcacctctgcgggtatgtgtctcca

SEQ ID NO: 4909829 - DNA, 25 bp, Homo sapien
gcccagggatagctctcggctcagc

SEQ ID NO: 4909830 - DNA, 25 bp, Homo sapien
tctttcctcgctagctcatcacatg

SEQ ID NO: 4909831 - DNA, 25 bp, Homo sapien
tcatcacatgccatggtactgctga

SEQ ID NO: 4909832 - DNA, 25 bp, Homo sapien
acaggcagcccgaaccagatgacca

SEQ ID NO: 4909833 - DNA, 25 bp, Homo sapien
aggcagcccgaaccagatgaccagg

SEQ ID NO: 4909834 - DNA, 25 bp, Homo sapien
gtacccacgcaggtaaggagcacag

SEQ ID NO: 4909835 - DNA, 25 bp, Homo sapien
tggagccagagtacccacgcaggta

SEQ ID NO: 4909836 - DNA, 25 bp, Homo sapien
atcacttcatctctgactgcatgag

SEQ ID NO: 4909837 - DNA, 25 bp, Homo sapien
gactgcatgagctgtctgtgccttc

SEQ ID NO: 4909838 - DNA, 25 bp, Homo sapien
tgccaccatcacttcatctctgact

SEQ ID NO: 4909839 - DNA, 25 bp, Homo sapien
tgactgcatgagctgtctgtgcctt

SEQ ID NO: 4909840 - DNA, 25 bp, Homo sapien
ttcctgcaggcaatcggaacaccat

SEQ ID NO: 4909841 - DNA, 25 bp, Homo sapien
tgagagcagccaagaagtgttttcc

SEQ ID NO: 4909842 - DNA, 25 bp, Homo sapien
gaagttcctgcaggcaatcggaaca

SEQ ID NO: 4909843 - DNA, 25 bp, Homo sapien
aataagagaagttcctgcaggcaat

SEQ ID NO: 4909844 - DNA, 25 bp, Homo sapien
cagctgaatcttcaatgcacccaag

SEQ ID NO: 4909845 - DNA, 25 bp, Homo sapien
gccctcgcctcccacaactgggtag

SEQ ID NO: 4909846 - DNA, 25 bp, Homo sapien
aaagcagtattaatgcccacgatgc

SEQ ID NO: 4909847 - DNA, 25 bp, Homo sapien
gcccacgatgcctccaatagcaatg

SEQ ID NO: 4909848 - DNA, 25 bp, Homo sapien
gccattatggatgagagtggtcagc

SEQ ID NO: 4909849 - DNA, 25 bp, Homo sapien
cattatggatgagagtggtcagcac

SEQ ID NO: 4909850 - DNA, 25 bp, Homo sapien
aggccattatggatgagagtggtca

SEQ ID NO: 4909851 - DNA, 25 bp, Homo sapien
ccattatggatgagagtggtcagca

SEQ ID NO: 4909852 - DNA, 25 bp, Homo sapien
taagacagacagctttcagaattac

SEQ ID NO: 4909853 - DNA, 25 bp, Homo sapien
tctaagacagacagctttcagaatt

SEQ ID NO: 4909854 - DNA, 25 bp, Homo sapien
ttgtctaagacagacagctttcaga

SEQ ID NO: 4909855 - DNA, 25 bp, Homo sapien
gtctaagacagacagctttcagaat

SEQ ID NO: 4909856 - DNA, 25 bp, Homo sapien
caggtggcagctccttccctttgga

SEQ ID NO: 4909857 - DNA, 25 bp, Homo sapien
gcatcttgatagtatgaggcttcag

SEQ ID NO: 4909858 - DNA, 25 bp, Homo sapien
tttgccctggacattctatcctgtc

SEQ ID NO: 4909859 - DNA, 25 bp, Homo sapien
caagggcttcattgtgaccctccgg

SEQ ID NO: 4909860 - DNA, 25 bp, Homo sapien
gagcttctcgtcaagcaagcttgtt

SEQ ID NO: 4909861 - DNA, 25 bp, Homo sapien
gttggagtgacgaactgccagcacc

SEQ ID NO: 4909862 - DNA, 25 bp, Homo sapien
ctgttgagttggagtgacgaactgc

SEQ ID NO: 4909863 - DNA, 25 bp, Homo sapien
ccagagcactgagcttctcgtcaag

SEQ ID NO: 4909864 - DNA, 25 bp, Homo sapien
gatgctttggccgtaggcctctgga

SEQ ID NO: 4909865 - DNA, 25 bp, Homo sapien
gctttggccgtaggcctctggaaat

SEQ ID NO: 4909866 - DNA, 25 bp, Homo sapien
tgctttggccgtaggcctctggaaa

SEQ ID NO: 4909867 - DNA, 25 bp, Homo sapien
ttggccgtaggcctctggaaattct

SEQ ID NO: 4909868 - DNA, 25 bp, Homo sapien
tttgaaaccgtaatggaagaccaca

SEQ ID NO: 4909869 - DNA, 25 bp, Homo sapien
tacggctcaggcaagcattctcctt

SEQ ID NO: 4909870 - DNA, 25 bp, Homo sapien
cagagtttatcatatttgcagcacc

SEQ ID NO: 4909871 - DNA, 25 bp, Homo sapien
tcagggcatgtctgctacggctcag

SEQ ID NO: 4909872 - DNA, 25 bp, Homo sapien
ccatccccctaagcaggccattggg

SEQ ID NO: 4909873 - DNA, 25 bp, Homo sapien
atggacatctggaatttggtctgtc

SEQ ID NO: 4909874 - DNA, 25 bp, Homo sapien
tctggaatttggtctgtccatcatc

SEQ ID NO: 4909875 - DNA, 25 bp, Homo sapien
cctccaccattaagtgctgccagta

SEQ ID NO: 4909876 - DNA, 25 bp, Homo sapien
caaatgttggtctttgatgttcttg

SEQ ID NO: 4909877 - DNA, 25 bp, Homo sapien
tcttgtagccaaccgcctgaagatg

SEQ ID NO: 4909878 - DNA, 25 bp, Homo sapien
tgcatccaagcctccggatgtcttg

SEQ ID NO: 4909879 - DNA, 25 bp, Homo sapien
catcaactacacctttggtcttgca

SEQ ID NO: 4909880 - DNA, 25 bp, Homo sapien
gtcctgcccattctgcgccagctgt

SEQ ID NO: 4909881 - DNA, 25 bp, Homo sapien
tgtggtcatggctgttcgggaacct

SEQ ID NO: 4909882 - DNA, 25 bp, Homo sapien
accaagtcatcctcaagtcagccat

SEQ ID NO: 4909883 - DNA, 25 bp, Homo sapien
tgaccttctgagttacaagtctctg

SEQ ID NO: 4909884 - DNA, 25 bp, Homo sapien
ttgaacttggtgcaggcgaaggcag

SEQ ID NO: 4909885 - DNA, 25 bp, Homo sapien
tgcaggcgaaggcaggagctgccca

SEQ ID NO: 4909886 - DNA, 25 bp, Homo sapien
cttggtgcaggcgaaggcaggagct

SEQ ID NO: 4909887 - DNA, 25 bp, Homo sapien
agctgcccacgcctttctccatgac

SEQ ID NO: 4909888 - DNA, 25 bp, Homo sapien
ggtctcccaagcgagcatagctcat

SEQ ID NO: 4909889 - DNA, 25 bp, Homo sapien
gatgggtctcccaagcgagcatagc

SEQ ID NO: 4909890 - DNA, 25 bp, Homo sapien
catggggctggccactaacatcctt

SEQ ID NO: 4909891 - DNA, 25 bp, Homo sapien
tcccaagcgagcatagctcatcggg

SEQ ID NO: 4909892 - DNA, 25 bp, Homo sapien
tcagaaccatactcgtgttgagatt

SEQ ID NO: 4909893 - DNA, 25 bp, Homo sapien
tctggttaccatgtgaactgtacac

SEQ ID NO: 4909894 - DNA, 25 bp, Homo sapien
aaagcttgtgttctatgacctcacc

SEQ ID NO: 4909895 - DNA, 25 bp, Homo sapien
ggtctccagagaccatcctcagagt

SEQ ID NO: 4909896 - DNA, 25 bp, Homo sapien
tcacacctgattgttctgtgagtac

SEQ ID NO: 4909897 - DNA, 25 bp, Homo sapien
tggtcacacctgattgttctgtgag

SEQ ID NO: 4909898 - DNA, 25 bp, Homo sapien
ggtcacacctgattgttctgtgagt

SEQ ID NO: 4909899 - DNA, 25 bp, Homo sapien
tatggtcacacctgattgttctgtg

SEQ ID NO: 4909900 - DNA, 25 bp, Homo sapien
tccaccttctttatgtcccttctga

SEQ ID NO: 4909901 - DNA, 25 bp, Homo sapien
tctcagttgccttagttctctgtcc

SEQ ID NO: 4909902 - DNA, 25 bp, Homo sapien
tgtccaccttctttatgtcccttct

SEQ ID NO: 4909903 - DNA, 25 bp, Homo sapien
ctaaattcgtcgatgcatctcagtt

SEQ ID NO: 4909904 - DNA, 25 bp, Homo sapien
caataggggtgcatatacaagtcgc

SEQ ID NO: 4909905 - DNA, 25 bp, Homo sapien
gccgcaagagcgtgatcgcttggaa

SEQ ID NO: 4909906 - DNA, 25 bp, Homo sapien
gatatgggtgcaagtcacagcagca

SEQ ID NO: 4909907 - DNA, 25 bp, Homo sapien
ttggaatagcacaagcagtacggat

SEQ ID NO: 4909908 - DNA, 25 bp, Homo sapien
cagacagtaaagcttataatcacac

SEQ ID NO: 4909909 - DNA, 25 bp, Homo sapien
catcttctatggctctgatggcttt

SEQ ID NO: 4909910 - DNA, 25 bp, Homo sapien
ccaaacttctgagagatggtcgcag

SEQ ID NO: 4909911 - DNA, 25 bp, Homo sapien
ttggcaagctctcgcttctcatctt

SEQ ID NO: 4909912 - DNA, 25 bp, Homo sapien
agagtggattcagtgaaaacctcat

SEQ ID NO: 4909913 - DNA, 25 bp, Homo sapien
atcagcctcaccaagcaagagtgga

SEQ ID NO: 4909914 - DNA, 25 bp, Homo sapien
gcctcaccaagcaagagtggattca

SEQ ID NO: 4909915 - DNA, 25 bp, Homo sapien
catgaggcctgactgtcatcagcct

SEQ ID NO: 4909916 - DNA, 25 bp, Homo sapien
gaagccagaattctatttgttgttc

SEQ ID NO: 4909917 - DNA, 25 bp, Homo sapien
gcaggaggaagccagaattctattt

SEQ ID NO: 4909918 - DNA, 25 bp, Homo sapien
ctgctacagcaggaggaagccagaa

SEQ ID NO: 4909919 - DNA, 25 bp, Homo sapien
tgctacagcaggaggaagccagaat

SEQ ID NO: 4909920 - DNA, 25 bp, Homo sapien
tgacttgatcgggttcaaaaccgca

SEQ ID NO: 4909921 - DNA, 25 bp, Homo sapien
tacattcaccgatcctaaaatgtta

SEQ ID NO: 4909922 - DNA, 25 bp, Homo sapien
ctttccatccttcactcgaactttg

SEQ ID NO: 4909923 - DNA, 25 bp, Homo sapien
tccatccttcactcgaactttgact

SEQ ID NO: 4909924 - DNA, 25 bp, Homo sapien
tctcccgctcagccgacacacatac

SEQ ID NO: 4909925 - DNA, 25 bp, Homo sapien
gttctcccgctcagccgacacacat

SEQ ID NO: 4909926 - DNA, 25 bp, Homo sapien
ctgttctcccgctcagccgacacac

SEQ ID NO: 4909927 - DNA, 25 bp, Homo sapien
ttctcccgctcagccgacacacata

SEQ ID NO: 4909928 - DNA, 25 bp, Homo sapien
ggcggcaagctgaactctttgcaga

SEQ ID NO: 4909929 - DNA, 25 bp, Homo sapien
acacagggcggcaagctgaactctt

SEQ ID NO: 4909930 - DNA, 25 bp, Homo sapien
gcagatgttcatgtagctgtacttt

SEQ ID NO: 4909931 - DNA, 25 bp, Homo sapien
ctttttcgatccaaggcagtcgtac

SEQ ID NO: 4909932 - DNA, 25 bp, Homo sapien
gacacagctgccgagcccataggag

SEQ ID NO: 4909933 - DNA, 25 bp, Homo sapien
agctgccgagcccataggagtatgt

SEQ ID NO: 4909934 - DNA, 25 bp, Homo sapien
cacagctgccgagcccataggagta

SEQ ID NO: 4909935 - DNA, 25 bp, Homo sapien
cttgacacagctgccgagcccatag

SEQ ID NO: 4909936 - DNA, 25 bp, Homo sapien
ctgcaaggagaagtgcaagggtagc

SEQ ID NO: 4909937 - DNA, 25 bp, Homo sapien
agaagtgcaagggtagcaaggagac

SEQ ID NO: 4909938 - DNA, 25 bp, Homo sapien
aggagaagtgcaagggtagcaagga

SEQ ID NO: 4909939 - DNA, 25 bp, Homo sapien
caaggagaagtgcaagggtagcaag

SEQ ID NO: 4909940 - DNA, 25 bp, Homo sapien
tccacagggataacacgggttgcaa

SEQ ID NO: 4909941 - DNA, 25 bp, Homo sapien
tcctacaggaaaatcggcttccaca

SEQ ID NO: 4909942 - DNA, 25 bp, Homo sapien
gatcatatgggctgcacgggttgca

SEQ ID NO: 4909943 - DNA, 25 bp, Homo sapien
cacgggttgcaaggatcatatgggc

SEQ ID NO: 4909944 - DNA, 25 bp, Homo sapien
agtttcctacgtacttcaacaacag

SEQ ID NO: 4909945 - DNA, 25 bp, Homo sapien
gcagttatgtattcagtttcctacg

SEQ ID NO: 4909946 - DNA, 25 bp, Homo sapien
ggagtaactgacttctattaagtaa

SEQ ID NO: 4909947 - DNA, 25 bp, Homo sapien
taagtaatgggttcctatgcgcact

SEQ ID NO: 4909948 - DNA, 25 bp, Homo sapien
aggatcattggagcccaggagatca

SEQ ID NO: 4909949 - DNA, 25 bp, Homo sapien
gcctgtaatcccagcactttgggag

SEQ ID NO: 4909950 - DNA, 25 bp, Homo sapien
cttcgtgacagagcaagaccctgtc

SEQ ID NO: 4909951 - DNA, 25 bp, Homo sapien
aggctgcagtaagccatgattgcac

SEQ ID NO: 4909952 - DNA, 25 bp, Homo sapien
gctcttgtacattcagtttctttgg

SEQ ID NO: 4909953 - DNA, 25 bp, Homo sapien
gagcacggtatctggcattcaaaat

SEQ ID NO: 4909954 - DNA, 25 bp, Homo sapien
caaaatgataaagtctagctggcag

SEQ ID NO: 4909955 - DNA, 25 bp, Homo sapien
ccttgagtctagtgtgaggcatttg

SEQ ID NO: 4909956 - DNA, 25 bp, Homo sapien
tgagattggagggcacttcactccc

SEQ ID NO: 4909957 - DNA, 25 bp, Homo sapien
atttacttcttgatcccacactgtc

SEQ ID NO: 4909958 - DNA, 25 bp, Homo sapien
cctccccgcactttctctgagattg

SEQ ID NO: 4909959 - DNA, 25 bp, Homo sapien
tcactcccacactgtttgatttact

SEQ ID NO: 4909960 - DNA, 25 bp, Homo sapien
tcagtatccattttagcttaacttt

SEQ ID NO: 4909961 - DNA, 25 bp, Homo sapien
cataatgtcctcagccaaagagcta

SEQ ID NO: 4909962 - DNA, 25 bp, Homo sapien
tagcttaacttttagcataatgtcc

SEQ ID NO: 4909963 - DNA, 25 bp, Homo sapien
aagagctaaatgagagtgtcccaaa

SEQ ID NO: 4909964 - DNA, 25 bp, Homo sapien
cagctctgtgttgagcaacctcctg

SEQ ID NO: 4909965 - DNA, 25 bp, Homo sapien
ggtgtctgcccgtgtggcctttagc

SEQ ID NO: 4909966 - DNA, 25 bp, Homo sapien
gatgcataggcaggttgtggaccac

SEQ ID NO: 4909967 - DNA, 25 bp, Homo sapien
gggttctagcagtcctcagttgatt

SEQ ID NO: 4909968 - DNA, 25 bp, Homo sapien
tccatcacaagaaagaagtttcggg

SEQ ID NO: 4909969 - DNA, 25 bp, Homo sapien
tcaagtggatgacctttgtccttcc

SEQ ID NO: 4909970 - DNA, 25 bp, Homo sapien
aatagcatcaacctctgagggctac

SEQ ID NO: 4909971 - DNA, 25 bp, Homo sapien
cacactgacagtttcggcctggcat

SEQ ID NO: 4909972 - DNA, 25 bp, Homo sapien
agcagatacagactcacacatggag

SEQ ID NO: 4909973 - DNA, 25 bp, Homo sapien
gaatcctgagaaacggtgttagggc

SEQ ID NO: 4909974 - DNA, 25 bp, Homo sapien
gacacatgcttaaagcccgtaccct

SEQ ID NO: 4909975 - DNA, 25 bp, Homo sapien
tttggacacatgcttaaagcccgta

SEQ ID NO: 4909976 - DNA, 25 bp, Homo sapien
tggacacatgcttaaagcccgtacc

SEQ ID NO: 4909977 - DNA, 25 bp, Homo sapien
cacatgcttaaagcccgtacccttt

SEQ ID NO: 4909978 - DNA, 25 bp, Homo sapien
ctgacttctgacacaccactgcgct

SEQ ID NO: 4909979 - DNA, 25 bp, Homo sapien
agtccagatggtttgtgttgtcact

SEQ ID NO: 4909980 - DNA, 25 bp, Homo sapien
gtgttgtcactaacaagcgttgttc

SEQ ID NO: 4909981 - DNA, 25 bp, Homo sapien
ctaacaagcgttgttccaccagcaa

SEQ ID NO: 4909982 - DNA, 25 bp, Homo sapien
caccaagataggggcaggcagacct

SEQ ID NO: 4909983 - DNA, 25 bp, Homo sapien
gggcaggcagacctgtctggactct

SEQ ID NO: 4909984 - DNA, 25 bp, Homo sapien
gacctgtctggactctgaggcaacc

SEQ ID NO: 4909985 - DNA, 25 bp, Homo sapien
ggcaccaagataggggcaggcagac

SEQ ID NO: 4909986 - DNA, 25 bp, Homo sapien
cagcatgagtgcctcgagagtccat

SEQ ID NO: 4909987 - DNA, 25 bp, Homo sapien
actccagccagcatgagtgcctcga

SEQ ID NO: 4909988 - DNA, 25 bp, Homo sapien
ggcagttgtcataccctgactccag

SEQ ID NO: 4909989 - DNA, 25 bp, Homo sapien
agggcagttgtcataccctgactcc

SEQ ID NO: 4909990 - DNA, 25 bp, Homo sapien
gaaggaatagttggtgtggaacaaa

SEQ ID NO: 4909991 - DNA, 25 bp, Homo sapien
tggaacaaaggagtaatggatcccc

SEQ ID NO: 4909992 - DNA, 25 bp, Homo sapien
ccggtaggcaagtgacccatgttct

SEQ ID NO: 4909993 - DNA, 25 bp, Homo sapien
cacacagtgactgtatggggaagga

SEQ ID NO: 4909994 - DNA, 25 bp, Homo sapien
caacaccgagaggcattgagcccct

SEQ ID NO: 4909995 - DNA, 25 bp, Homo sapien
taagaaaggcatcctagggttagat

SEQ ID NO: 4909996 - DNA, 25 bp, Homo sapien
cctgcagaagtttcccgctttaata

SEQ ID NO: 4909997 - DNA, 25 bp, Homo sapien
acgctgacatcggagcgcagccaag

SEQ ID NO: 4909998 - DNA, 25 bp, Homo sapien
ggaagcatgttccaaatggcagagc

SEQ ID NO: 4909999 - DNA, 25 bp, Homo sapien
cagagccttgaagattctcttttgc

SEQ ID NO: 4910000 - DNA, 25 bp, Homo sapien
cgctctggccttagtcacagctgca

SEQ ID NO: 4910001 - DNA, 25 bp, Homo sapien
ctcttttgctaaagatgaggctctt

SEQ ID NO: 4910002 - DNA, 25 bp, Homo sapien
tttacttctatggttcttccatctc

SEQ ID NO: 4910003 - DNA, 25 bp, Homo sapien
ctgctttttacttctatggttcttc

SEQ ID NO: 4910004 - DNA, 25 bp, Homo sapien
ctatggttcttccatctcccgccct

SEQ ID NO: 4910005 - DNA, 25 bp, Homo sapien
atgggtttctgctttttacttctat

SEQ ID NO: 4910006 - DNA, 25 bp, Homo sapien
ggaacccggaaaattcagcaacatg

SEQ ID NO: 4910007 - DNA, 25 bp, Homo sapien
ggttcacattgggtaagcctctgac

SEQ ID NO: 4910008 - DNA, 25 bp, Homo sapien
tgagagccaacaatttccctttagg

SEQ ID NO: 4910009 - DNA, 25 bp, Homo sapien
gagcctgaagtatctcatcactaag

SEQ ID NO: 4910010 - DNA, 25 bp, Homo sapien
ggcagctcttggtctgaagctcttt

SEQ ID NO: 4910011 - DNA, 25 bp, Homo sapien
caaggtgaggagcttctggatggca

SEQ ID NO: 4910012 - DNA, 25 bp, Homo sapien
ctggatggcagctcttggtctgaag

SEQ ID NO: 4910013 - DNA, 25 bp, Homo sapien
gaagctctttacaccagccagtgtc

SEQ ID NO: 4910014 - DNA, 25 bp, Homo sapien
tccaggacagctgttttgccaccag

SEQ ID NO: 4910015 - DNA, 25 bp, Homo sapien
aacttggtgagatgcagcctctgag

SEQ ID NO: 4910016 - DNA, 25 bp, Homo sapien
tgctgccttcctggatgtgctggtt

SEQ ID NO: 4910017 - DNA, 25 bp, Homo sapien
aaggtgaaatgttttgcctggccgg

SEQ ID NO: 4910018 - DNA, 25 bp, Homo sapien
cacatacaactcctgttgatgatta

SEQ ID NO: 4910019 - DNA, 25 bp, Homo sapien
aactcctgttgatgattaatgccca

SEQ ID NO: 4910020 - DNA, 25 bp, Homo sapien
acacatacaactcctgttgatgatt

SEQ ID NO: 4910021 - DNA, 25 bp, Homo sapien
tacaactcctgttgatgattaatgc

SEQ ID NO: 4910022 - DNA, 25 bp, Homo sapien
cattacggtacagacatggagatgt

SEQ ID NO: 4910023 - DNA, 25 bp, Homo sapien
gactgtatattgctaagagggccca

SEQ ID NO: 4910024 - DNA, 25 bp, Homo sapien
tagtggatgatatacacagtggcaa

SEQ ID NO: 4910025 - DNA, 25 bp, Homo sapien
cactggtttcaagaatatggaggct

SEQ ID NO: 4910026 - DNA, 25 bp, Homo sapien
cacagtgacagaccggaaagtgaag

SEQ ID NO: 4910027 - DNA, 25 bp, Homo sapien
caaactggcagatggaagtgagcaa

SEQ ID NO: 4910028 - DNA, 25 bp, Homo sapien
taggtgactaaaagggcttcggcca

SEQ ID NO: 4910029 - DNA, 25 bp, Homo sapien
gaaggtttcagatgaggtcaacaca

SEQ ID NO: 4910030 - DNA, 25 bp, Homo sapien
gcctcattgaggttagggcggcccc

SEQ ID NO: 4910031 - DNA, 25 bp, Homo sapien
gatttcaacacgaaggcatcatgca

SEQ ID NO: 4910032 - DNA, 25 bp, Homo sapien
cagcttacataaaggcgggcgcgat

SEQ ID NO: 4910033 - DNA, 25 bp, Homo sapien
tctactttgaccaaacgagtctgga

SEQ ID NO: 4910034 - DNA, 25 bp, Homo sapien
agctcaaactcgattccgcagccga

SEQ ID NO: 4910035 - DNA, 25 bp, Homo sapien
caggcaggacgcttccagaggtctt

SEQ ID NO: 4910036 - DNA, 25 bp, Homo sapien
agtgtcggcgccagagaaggataaa

SEQ ID NO: 4910037 - DNA, 25 bp, Homo sapien
taaacttcagctacaccgagctcaa

SEQ ID NO: 4910038 - DNA, 25 bp, Homo sapien
ttcagcctgtccaaatcggataaga

SEQ ID NO: 4910039 - DNA, 25 bp, Homo sapien
gctttaagccccgttatcactgcct

SEQ ID NO: 4910040 - DNA, 25 bp, Homo sapien
gatctccgatttgctttaagccccg

SEQ ID NO: 4910041 - DNA, 25 bp, Homo sapien
gacgtgagtgctcgaaggagagaca

SEQ ID NO: 4910042 - DNA, 25 bp, Homo sapien
tacagtgctcggagtacagtgctca

SEQ ID NO: 4910043 - DNA, 25 bp, Homo sapien
catgtctacatccaatcgattaccg

SEQ ID NO: 4910044 - DNA, 25 bp, Homo sapien
aatcgattaccgaatcctgcttgct

SEQ ID NO: 4910045 - DNA, 25 bp, Homo sapien
gcagaaacctggcagttctcgatac

SEQ ID NO: 4910046 - DNA, 25 bp, Homo sapien
aatgacactcctgtggacagaagcg

SEQ ID NO: 4910047 - DNA, 25 bp, Homo sapien
gacagaagcgggaccgtggagtgga

SEQ ID NO: 4910048 - DNA, 25 bp, Homo sapien
tctcttgcagtatagcaaaccaccc

SEQ ID NO: 4910049 - DNA, 25 bp, Homo sapien
gaaaactgtagctgtccctccagaa

SEQ ID NO: 4910050 - DNA, 25 bp, Homo sapien
ttttattacagcagcctgaaaagat

SEQ ID NO: 4910051 - DNA, 25 bp, Homo sapien
ttaaaagcaggttaagcaggggtgc

SEQ ID NO: 4910052 - DNA, 25 bp, Homo sapien
cagccagaccttcactcggtgtgag

SEQ ID NO: 4910053 - DNA, 25 bp, Homo sapien
gttattagtgggtctctcctttgag

SEQ ID NO: 4910054 - DNA, 25 bp, Homo sapien
ctgggcctgctctgccagggcgtct

SEQ ID NO: 4910055 - DNA, 25 bp, Homo sapien
gctctgccagggcgtctgaggccat

SEQ ID NO: 4910056 - DNA, 25 bp, Homo sapien
cgctgtcccaggcaacctctgcttg

SEQ ID NO: 4910057 - DNA, 25 bp, Homo sapien
cagccgctgtcccaggcaacctctg

SEQ ID NO: 4910058 - DNA, 25 bp, Homo sapien
gtaaatgcagggaattaaggcagcc

SEQ ID NO: 4910059 - DNA, 25 bp, Homo sapien
aaatgcagggaattaaggcagcctc

SEQ ID NO: 4910060 - DNA, 25 bp, Homo sapien
taaatgcagggaattaaggcagcct

SEQ ID NO: 4910061 - DNA, 25 bp, Homo sapien
gaagactagccactggcaccagggc

SEQ ID NO: 4910062 - DNA, 25 bp, Homo sapien
ggctttgggacaccccacggcgatc

SEQ ID NO: 4910063 - DNA, 25 bp, Homo sapien
caggggaactggcaagcatttggaa

SEQ ID NO: 4910064 - DNA, 25 bp, Homo sapien
cacggcgatcgctccggtaagtgaa

SEQ ID NO: 4910065 - DNA, 25 bp, Homo sapien
cctgccctatcatcccttcactgtc

SEQ ID NO: 4910066 - DNA, 25 bp, Homo sapien
agccctgccctatcatcccttcact

SEQ ID NO: 4910067 - DNA, 25 bp, Homo sapien
ggagccctgccctatcatcccttca

SEQ ID NO: 4910068 - DNA, 25 bp, Homo sapien
ttggagccctgccctatcatccctt

SEQ ID NO: 4910069 - DNA, 25 bp, Homo sapien
cttcccagcaggacagcgccagacc

SEQ ID NO: 4910070 - DNA, 25 bp, Homo sapien
ctcccaacctgccaagccttcccag

SEQ ID NO: 4910071 - DNA, 25 bp, Homo sapien
cctgccaagccttcccagcaggaca

SEQ ID NO: 4910072 - DNA, 25 bp, Homo sapien
aggacagcgccagacccctgagcat

SEQ ID NO: 4910073 - DNA, 25 bp, Homo sapien
aataaatggcatagagccctcagga

SEQ ID NO: 4910074 - DNA, 25 bp, Homo sapien
taacgaccgtgagagtggacacttg

SEQ ID NO: 4910075 - DNA, 25 bp, Homo sapien
gaattgaaggagacataacgaccgt

SEQ ID NO: 4910076 - DNA, 25 bp, Homo sapien
cgtggcggagcttttctggtaacct

SEQ ID NO: 4910077 - DNA, 25 bp, Homo sapien
ctgtgtgcatacagagctcaggggc

SEQ ID NO: 4910078 - DNA, 25 bp, Homo sapien
ctgaagacagccctcccaccgttcc

SEQ ID NO: 4910079 - DNA, 25 bp, Homo sapien
ctctgaagacagccctcccaccgtt

SEQ ID NO: 4910080 - DNA, 25 bp, Homo sapien
tgaagacagccctcccaccgttccc

SEQ ID NO: 4910081 - DNA, 25 bp, Homo sapien
agctcagagcaccagtctgcaacat

SEQ ID NO: 4910082 - DNA, 25 bp, Homo sapien
cacggagccacagggtgttcttttt

SEQ ID NO: 4910083 - DNA, 25 bp, Homo sapien
gctctgatgtgacagcatggtggca

SEQ ID NO: 4910084 - DNA, 25 bp, Homo sapien
agggaaggagccagcaccgccttca

SEQ ID NO: 4910085 - DNA, 25 bp, Homo sapien
tcccaggcacggctgatccacacac

SEQ ID NO: 4910086 - DNA, 25 bp, Homo sapien
gagtcccaggcacggctgatccaca

SEQ ID NO: 4910087 - DNA, 25 bp, Homo sapien
gtcccaggcacggctgatccacaca

SEQ ID NO: 4910088 - DNA, 25 bp, Homo sapien
agtcccaggcacggctgatccacac

SEQ ID NO: 4910089 - DNA, 25 bp, Homo sapien
ctgccccgccacgcggtgcgtctgg

SEQ ID NO: 4910090 - DNA, 25 bp, Homo sapien
tgccccgccacgcggtgcgtctggg

SEQ ID NO: 4910091 - DNA, 25 bp, Homo sapien
gaggtgctgccagcaatcacagcca

SEQ ID NO: 4910092 - DNA, 25 bp, Homo sapien
cctcttggagtcttgaggtgctgcc

SEQ ID NO: 4910093 - DNA, 25 bp, Homo sapien
acaaccaacccgaggcctgcagtaa

SEQ ID NO: 4910094 - DNA, 25 bp, Homo sapien
atcacagccacaaccaacccgaggc

SEQ ID NO: 4910095 - DNA, 25 bp, Homo sapien
gaggtaagggccttggtcaccagca

SEQ ID NO: 4910096 - DNA, 25 bp, Homo sapien
caagcctgattggagcagactctgc

SEQ ID NO: 4910097 - DNA, 25 bp, Homo sapien
cagcaatgaagatgtcctggagagc

SEQ ID NO: 4910098 - DNA, 25 bp, Homo sapien
tctcaaacacgggacaaggcagagc

SEQ ID NO: 4910099 - DNA, 25 bp, Homo sapien
gaagccatgaggggagtcgtatcca

SEQ ID NO: 4910100 - DNA, 25 bp, Homo sapien
actctccagactaggcagaggctca

SEQ ID NO: 4910101 - DNA, 25 bp, Homo sapien
agccatgaggggagtcgtatccaca

SEQ ID NO: 4910102 - DNA, 25 bp, Homo sapien
ccaggaagccatgaggggagtcgta

SEQ ID NO: 4910103 - DNA, 25 bp, Homo sapien
cctcgcctgacagacaggccttggt

SEQ ID NO: 4910104 - DNA, 25 bp, Homo sapien
cttggtgctcctgaatccctcggca

SEQ ID NO: 4910105 - DNA, 25 bp, Homo sapien
ttggtgctcctgaatccctcggcac

SEQ ID NO: 4910106 - DNA, 25 bp, Homo sapien
tgacaccaccctcgcctgacagaca

SEQ ID NO: 4910107 - DNA, 25 bp, Homo sapien
gagttgaagacaccgctgagactct

SEQ ID NO: 4910108 - DNA, 25 bp, Homo sapien
ctgagttgaagacaccgctgagact

SEQ ID NO: 4910109 - DNA, 25 bp, Homo sapien
ttgaagacaccgctgagactcttgg

SEQ ID NO: 4910110 - DNA, 25 bp, Homo sapien
gctgctggccttaggggtggtgtca

SEQ ID NO: 4910111 - DNA, 25 bp, Homo sapien
ttttcctcacgatgctccactctga

SEQ ID NO: 4910112 - DNA, 25 bp, Homo sapien
ccttttcctcacgatgctccactct

SEQ ID NO: 4910113 - DNA, 25 bp, Homo sapien
tcctcacgatgctccactctgatga

SEQ ID NO: 4910114 - DNA, 25 bp, Homo sapien
tccccttttcctcacgatgctccac

SEQ ID NO: 4910115 - DNA, 25 bp, Homo sapien
tcagactttctctcgaagatctcct

SEQ ID NO: 4910116 - DNA, 25 bp, Homo sapien
gactttctctcgaagatctccttgg

SEQ ID NO: 4910117 - DNA, 25 bp, Homo sapien
cagactttctctcgaagatctcctt

SEQ ID NO: 4910118 - DNA, 25 bp, Homo sapien
agactttctctcgaagatctccttg

SEQ ID NO: 4910119 - DNA, 25 bp, Homo sapien
ttccagcaggacagaactcgccttg

SEQ ID NO: 4910120 - DNA, 25 bp, Homo sapien
tcgccttgccaaggtgtcgggacaa

SEQ ID NO: 4910121 - DNA, 25 bp, Homo sapien
ttccaactatgcctcttccagcagg

SEQ ID NO: 4910122 - DNA, 25 bp, Homo sapien
tcagggagcatgttctcaccaggta

SEQ ID NO: 4910123 - DNA, 25 bp, Homo sapien
tcgtgatgaagccagcacccctgtc

SEQ ID NO: 4910124 - DNA, 25 bp, Homo sapien
acccctgtccctacgctgctctcgt

SEQ ID NO: 4910125 - DNA, 25 bp, Homo sapien
acgctgctctcgtccccatgctggt

SEQ ID NO: 4910126 - DNA, 25 bp, Homo sapien
ctgtcgtgatgaagccagcacccct

SEQ ID NO: 4910127 - DNA, 25 bp, Homo sapien
cagctgcaatccatctggccccaga

SEQ ID NO: 4910128 - DNA, 25 bp, Homo sapien
cagcagctgcaatccatctggcccc

SEQ ID NO: 4910129 - DNA, 25 bp, Homo sapien
agagtgaactctctaggccctctcc

SEQ ID NO: 4910130 - DNA, 25 bp, Homo sapien
tctggccccagagtgaactctctag

SEQ ID NO: 4910131 - DNA, 25 bp, Homo sapien
tgttcgcagacgacatgcagacctg

SEQ ID NO: 4910132 - DNA, 25 bp, Homo sapien
ggcacgtcgtgctgaactacctctt

SEQ ID NO: 4910133 - DNA, 25 bp, Homo sapien
gaaaagctcagtaatgcctccagga

SEQ ID NO: 4910134 - DNA, 25 bp, Homo sapien
gacagagtttgtgttcgtcaaggca

SEQ ID NO: 4910135 - DNA, 25 bp, Homo sapien
ttaggctgttctcacgctccggccc

SEQ ID NO: 4910136 - DNA, 25 bp, Homo sapien
gctgttctcacgctccggccctctg

SEQ ID NO: 4910137 - DNA, 25 bp, Homo sapien
aaccagacccgctccttcctgggca

SEQ ID NO: 4910138 - DNA, 25 bp, Homo sapien
ctgatttggaaaccagacccgctcc

SEQ ID NO: 4910139 - DNA, 25 bp, Homo sapien
aatttcaaacttggaagcacaggga

SEQ ID NO: 4910140 - DNA, 25 bp, Homo sapien
tgcagtagatgagaataaatccagc

SEQ ID NO: 4910141 - DNA, 25 bp, Homo sapien
tagctttgcagtggattttggagga

SEQ ID NO: 4910142 - DNA, 25 bp, Homo sapien
ctctgtgagagctgacggtagcttt

SEQ ID NO: 4910143 - DNA, 25 bp, Homo sapien
gataatttcagagtgccgtcaggat

SEQ ID NO: 4910144 - DNA, 25 bp, Homo sapien
tgccattccgagaacgcagtctgct

SEQ ID NO: 4910145 - DNA, 25 bp, Homo sapien
cacggcgccttgtggttagcagtca

SEQ ID NO: 4910146 - DNA, 25 bp, Homo sapien
tttctgatgagtcagcgggagcccg

SEQ ID NO: 4910147 - DNA, 25 bp, Homo sapien
gaatcctaggctcttagcgctgaaa

SEQ ID NO: 4910148 - DNA, 25 bp, Homo sapien
tggtgctctgctcgggagtctcctg

SEQ ID NO: 4910149 - DNA, 25 bp, Homo sapien
aaccgatgtcatttcccttgcagca

SEQ ID NO: 4910150 - DNA, 25 bp, Homo sapien
taggcgcggcttttgtaggactctg

SEQ ID NO: 4910151 - DNA, 25 bp, Homo sapien
agacgtgactgccacggctcgggct

SEQ ID NO: 4910152 - DNA, 25 bp, Homo sapien
acaccagcagagagcgctgtgcccg

SEQ ID NO: 4910153 - DNA, 25 bp, Homo sapien
ttagtctcatgcagttctcaaccca

SEQ ID NO: 4910154 - DNA, 25 bp, Homo sapien
gcggctgcggctggctcttactttg

SEQ ID NO: 4910155 - DNA, 25 bp, Homo sapien
tctgcctctcggaactaaatttggg

SEQ ID NO: 4910156 - DNA, 25 bp, Homo sapien
ggtatgcatttccaatccaccagtg

SEQ ID NO: 4910157 - DNA, 25 bp, Homo sapien
tgatggtacaggtaaccaacaaccc

SEQ ID NO: 4910158 - DNA, 25 bp, Homo sapien
gattatgtgcccctcaatatgtacc

SEQ ID NO: 4910159 - DNA, 25 bp, Homo sapien
tgccatatctgcaggagagctgttc

SEQ ID NO: 4910160 - DNA, 25 bp, Homo sapien
gaaaattctacctgtgctacatagg

SEQ ID NO: 4910161 - DNA, 25 bp, Homo sapien
tggcttgactatacaggccttgaac

SEQ ID NO: 4910162 - DNA, 25 bp, Homo sapien
gtctcccaagaggaaatgtgacttc

SEQ ID NO: 4910163 - DNA, 25 bp, Homo sapien
gaagttgcaggttaagcttgtctgg

SEQ ID NO: 4910164 - DNA, 25 bp, Homo sapien
gaagggctacatctttatccagaaa

SEQ ID NO: 4910165 - DNA, 25 bp, Homo sapien
tccgctgaagcttaaacaggcatta

SEQ ID NO: 4910166 - DNA, 25 bp, Homo sapien
tatttgggaccagacaaaatcagct

SEQ ID NO: 4910167 - DNA, 25 bp, Homo sapien
ccctggttcaactgattcttccgcc

SEQ ID NO: 4910168 - DNA, 25 bp, Homo sapien
tccctggttcaactgattcttccgc

SEQ ID NO: 4910169 - DNA, 25 bp, Homo sapien
ctccctggttcaactgattcttccg

SEQ ID NO: 4910170 - DNA, 25 bp, Homo sapien
gaactctgcttgaactggtccacta

SEQ ID NO: 4910171 - DNA, 25 bp, Homo sapien
gctctattggacaccgaaatcctgg

SEQ ID NO: 4910172 - DNA, 25 bp, Homo sapien
taggattcccgtgcaggtagtctga

SEQ ID NO: 4910173 - DNA, 25 bp, Homo sapien
caatatcaaagattaatgggcccct

SEQ ID NO: 4910174 - DNA, 25 bp, Homo sapien
tatacaactacccagagggcctagg

SEQ ID NO: 4910175 - DNA, 25 bp, Homo sapien
tcgacttcaacgctgagccaccttg

SEQ ID NO: 4910176 - DNA, 25 bp, Homo sapien
gctgtatagagagcagttcgacttc

SEQ ID NO: 4910177 - DNA, 25 bp, Homo sapien
gccaccttgggaacctagctgatga

SEQ ID NO: 4910178 - DNA, 25 bp, Homo sapien
cagtcacctcctggagcctgaggat

SEQ ID NO: 4910179 - DNA, 25 bp, Homo sapien
ccagtcacctcctggagcctgagga

SEQ ID NO: 4910180 - DNA, 25 bp, Homo sapien
cctggagcctgaggattagtcacca

SEQ ID NO: 4910181 - DNA, 25 bp, Homo sapien
acctcctggagcctgaggattagtc

SEQ ID NO: 4910182 - DNA, 25 bp, Homo sapien
gcggcggcggctgtctgtgcccccg

SEQ ID NO: 4910183 - DNA, 25 bp, Homo sapien
tggcggcggcggctgtctgtgcccc

SEQ ID NO: 4910184 - DNA, 25 bp, Homo sapien
gcggcggctgtctgtgcccccggcg

SEQ ID NO: 4910185 - DNA, 25 bp, Homo sapien
ggcggctgtctgtgcccccggcggc

SEQ ID NO: 4910186 - DNA, 25 bp, Homo sapien
agccgaggagcgcgggaggggccag

SEQ ID NO: 4910187 - DNA, 25 bp, Homo sapien
gtgagtaccgagccgaggagcgcgg

SEQ ID NO: 4910188 - DNA, 25 bp, Homo sapien
cgccgcccttaagacgtccccgcag

SEQ ID NO: 4910189 - DNA, 25 bp, Homo sapien
gcccttaagacgtccccgcagcgcc

SEQ ID NO: 4910190 - DNA, 25 bp, Homo sapien
cccgactctttgggccgttatctca

SEQ ID NO: 4910191 - DNA, 25 bp, Homo sapien
attccgccgaaaaagagaagacgct

SEQ ID NO: 4910192 - DNA, 25 bp, Homo sapien
agagaagacgctttacccgactctt

SEQ ID NO: 4910193 - DNA, 25 bp, Homo sapien
ccgactctttgggccgttatctcac

SEQ ID NO: 4910194 - DNA, 25 bp, Homo sapien
atggcccaggccgccttgggtattt

SEQ ID NO: 4910195 - DNA, 25 bp, Homo sapien
ctatggcccaggccgccttgggtat

SEQ ID NO: 4910196 - DNA, 25 bp, Homo sapien
tatggcccaggccgccttgggtatt

SEQ ID NO: 4910197 - DNA, 25 bp, Homo sapien
cacacagctggtgtcggtgccgcgc

SEQ ID NO: 4910198 - DNA, 25 bp, Homo sapien
ccagcccgcgcctttcttcttttgc

SEQ ID NO: 4910199 - DNA, 25 bp, Homo sapien
tttgcctgcgctgttctatttctcc

SEQ ID NO: 4910200 - DNA, 25 bp, Homo sapien
gctggtgtcggtgccgcgcttttac

SEQ ID NO: 4910201 - DNA, 25 bp, Homo sapien
ttctgccgtcgccttctctgcctct

SEQ ID NO: 4910202 - DNA, 25 bp, Homo sapien
gtgacgagtccgaatcctcttccca

SEQ ID NO: 4910203 - DNA, 25 bp, Homo sapien
ctctgcagtgtgacgagtccgaatc

SEQ ID NO: 4910204 - DNA, 25 bp, Homo sapien
tcaggctctgatcgcggccgcagtt

SEQ ID NO: 4910205 - DNA, 25 bp, Homo sapien
tctccgggctgcaaccgggttccgc

SEQ ID NO: 4910206 - DNA, 25 bp, Homo sapien
gccacgccccctaatataaatactg

SEQ ID NO: 4910207 - DNA, 25 bp, Homo sapien
gctgtgatgtcaccaggccacgccc

SEQ ID NO: 4910208 - DNA, 25 bp, Homo sapien
ataaatactggcgtcgctggcgccg

SEQ ID NO: 4910209 - DNA, 25 bp, Homo sapien
gcgcggccgcccttcgcctgccggg

SEQ ID NO: 4910210 - DNA, 25 bp, Homo sapien
ggcgggaagcgaccggccagtctgc

SEQ ID NO: 4910211 - DNA, 25 bp, Homo sapien
cgggaagcgaccggccagtctgcac

SEQ ID NO: 4910212 - DNA, 25 bp, Homo sapien
gaagcgaccggccagtctgcacctg

SEQ ID NO: 4910213 - DNA, 25 bp, Homo sapien
cgtggagctcgacccggctcacaat

SEQ ID NO: 4910214 - DNA, 25 bp, Homo sapien
gctcacaatgcgctgggccccgcag

SEQ ID NO: 4910215 - DNA, 25 bp, Homo sapien
tctaggccgcacagggttcgcgcca

SEQ ID NO: 4910216 - DNA, 25 bp, Homo sapien
aggacagctctcagacgctgccagc

SEQ ID NO: 4910217 - DNA, 25 bp, Homo sapien
cctttctggccacgaggaactcgct

SEQ ID NO: 4910218 - DNA, 25 bp, Homo sapien
tattgcaacgttcgagcactgagga

SEQ ID NO: 4910219 - DNA, 25 bp, Homo sapien
gggtaaactacaggcctcacaaagc

SEQ ID NO: 4910220 - DNA, 25 bp, Homo sapien
gcttccctaaaggagtaccgcatca

SEQ ID NO: 4910221 - DNA, 25 bp, Homo sapien
tgtgcgcttgtaacatcagtaatcc

SEQ ID NO: 4910222 - DNA, 25 bp, Homo sapien
tctccaacgcgggtcctgcttggga

SEQ ID NO: 4910223 - DNA, 25 bp, Homo sapien
gggattgaagtaatgtgcgcttgta

SEQ ID NO: 4910224 - DNA, 25 bp, Homo sapien
gtaacatcagtaatcccctctccaa

SEQ ID NO: 4910225 - DNA, 25 bp, Homo sapien
ctgatcatgatcattagtgctgagg

SEQ ID NO: 4910226 - DNA, 25 bp, Homo sapien
agcgtagcagcacgagagaactcgg

SEQ ID NO: 4910227 - DNA, 25 bp, Homo sapien
ctatgtgttgcgaagcgtagcagca

SEQ ID NO: 4910228 - DNA, 25 bp, Homo sapien
gatcatgatcattagtgctgaggca

SEQ ID NO: 4910229 - DNA, 25 bp, Homo sapien
tacacagagggttcggaagaatgaa

SEQ ID NO: 4910230 - DNA, 25 bp, Homo sapien
aacttcagaggggtgtgtcaacaca

SEQ ID NO: 4910231 - DNA, 25 bp, Homo sapien
cagggtcttaatatcaaagatctta

SEQ ID NO: 4910232 - DNA, 25 bp, Homo sapien
aaaagtcagggtcttaatatcaaag

SEQ ID NO: 4910233 - DNA, 25 bp, Homo sapien
cacattccctcagacaagaagagga

SEQ ID NO: 4910234 - DNA, 25 bp, Homo sapien
gagttcgagattagctctgacaaca

SEQ ID NO: 4910235 - DNA, 25 bp, Homo sapien
tatactcccaactgttaagactgca

SEQ ID NO: 4910236 - DNA, 25 bp, Homo sapien
tatcaagaaggtgagatacgcttgg

SEQ ID NO: 4910237 - DNA, 25 bp, Homo sapien
catctggaagaacaccgattttgcc

SEQ ID NO: 4910238 - DNA, 25 bp, Homo sapien
tctgctaccagtgggttcggtgcct

SEQ ID NO: 4910239 - DNA, 25 bp, Homo sapien
caagatctaagcaaccagagggcag

SEQ ID NO: 4910240 - DNA, 25 bp, Homo sapien
tggaggccccaagtaataccatctg

SEQ ID NO: 4910241 - DNA, 25 bp, Homo sapien
tagtaaggccatcattgtagaacat

SEQ ID NO: 4910242 - DNA, 25 bp, Homo sapien
acttcaaataagcaggtttggcagt

SEQ ID NO: 4910243 - DNA, 25 bp, Homo sapien
agggcttctctcctaatagtaaggc

SEQ ID NO: 4910244 - DNA, 25 bp, Homo sapien
cagtttcccgaaatggcaaaaatga

SEQ ID NO: 4910245 - DNA, 25 bp, Homo sapien
tgccagatcttgacagccattttac

SEQ ID NO: 4910246 - DNA, 25 bp, Homo sapien
tagaatgcatctaggaaaaacacaa

SEQ ID NO: 4910247 - DNA, 25 bp, Homo sapien
tttttatgagcacaatgaccaacta

SEQ ID NO: 4910248 - DNA, 25 bp, Homo sapien
gccatgatgtaaggcagtctgccag

SEQ ID NO: 4910249 - DNA, 25 bp, Homo sapien
ttccaagctcattcacaaggcttgc

SEQ ID NO: 4910250 - DNA, 25 bp, Homo sapien
atgcaggcccttccagagagtactc

SEQ ID NO: 4910251 - DNA, 25 bp, Homo sapien
aggcttgcagttcttgctggctgct

SEQ ID NO: 4910252 - DNA, 25 bp, Homo sapien
caagctcattcacaaggcttgcagt

SEQ ID NO: 4910253 - DNA, 25 bp, Homo sapien
gacactttgcatctggccatgtgga

SEQ ID NO: 4910254 - DNA, 25 bp, Homo sapien
gatgaggaaatcttgagtttgagtg

SEQ ID NO: 4910255 - DNA, 25 bp, Homo sapien
tgcatctggccatgtggaacaacta

SEQ ID NO: 4910256 - DNA, 25 bp, Homo sapien
ggaaatcttgagtttgagtgacagg

SEQ ID NO: 4910257 - DNA, 25 bp, Homo sapien
cacacaaagtggattgggccaggaa

SEQ ID NO: 4910258 - DNA, 25 bp, Homo sapien
cagttaatcaagaacatgggcaggc

SEQ ID NO: 4910259 - DNA, 25 bp, Homo sapien
caagagcaagccagatagactgaag

SEQ ID NO: 4910260 - DNA, 25 bp, Homo sapien
caggaaaaactggacactctgtcgg

SEQ ID NO: 4910261 - DNA, 25 bp, Homo sapien
tagattcgagactgcagtttcagaa

SEQ ID NO: 4910262 - DNA, 25 bp, Homo sapien
taagccctctaatacagaatagttg

SEQ ID NO: 4910263 - DNA, 25 bp, Homo sapien
ccacaaagacaatgacctctaaagt

SEQ ID NO: 4910264 - DNA, 25 bp, Homo sapien
agcagataaaagtgcaggaagggta

SEQ ID NO: 4910265 - DNA, 25 bp, Homo sapien
taccttaaaagcaggtatggggaca

SEQ ID NO: 4910266 - DNA, 25 bp, Homo sapien
ccttaaaagcaggtatggggacagc

SEQ ID NO: 4910267 - DNA, 25 bp, Homo sapien
tataccttaaaagcaggtatgggga

SEQ ID NO: 4910268 - DNA, 25 bp, Homo sapien
cttaaaagcaggtatggggacagca

SEQ ID NO: 4910269 - DNA, 25 bp, Homo sapien
tgcagactggctagtatttacacag

SEQ ID NO: 4910270 - DNA, 25 bp, Homo sapien
gactggctagtatttacacagcact

SEQ ID NO: 4910271 - DNA, 25 bp, Homo sapien
tctgcagactggctagtatttacac

SEQ ID NO: 4910272 - DNA, 25 bp, Homo sapien
gaatctgcagactggctagtattta

SEQ ID NO: 4910273 - DNA, 25 bp, Homo sapien
acaaagattgtccttttcccattga

SEQ ID NO: 4910274 - DNA, 25 bp, Homo sapien
tgtctttggtatcacatcaaacaaa

SEQ ID NO: 4910275 - DNA, 25 bp, Homo sapien
gatagtgtctttcggcacacaaaag

SEQ ID NO: 4910276 - DNA, 25 bp, Homo sapien
tggtctatatgtcctcacactagta

SEQ ID NO: 4910277 - DNA, 25 bp, Homo sapien
ttagtccagtgaggtaaaaaggagc

SEQ ID NO: 4910278 - DNA, 25 bp, Homo sapien
tgactggacatggtacacggcagag

SEQ ID NO: 4910279 - DNA, 25 bp, Homo sapien
tagagagacctcacagtatcgacgg

SEQ ID NO: 4910280 - DNA, 25 bp, Homo sapien
tatcgacggatggaacacaaagagt

SEQ ID NO: 4910281 - DNA, 25 bp, Homo sapien
ctgaggcctctccagccatgcagaa

SEQ ID NO: 4910282 - DNA, 25 bp, Homo sapien
cctgaggcctctccagccatgcaga

SEQ ID NO: 4910283 - DNA, 25 bp, Homo sapien
taaaagtgccctgtgttctgcctat

SEQ ID NO: 4910284 - DNA, 25 bp, Homo sapien
aagtgccactgagattcaccccagg

SEQ ID NO: 4910285 - DNA, 25 bp, Homo sapien
cactgggcaatcacgtggcaatctc

SEQ ID NO: 4910286 - DNA, 25 bp, Homo sapien
caagctacaagaagtgagacaccac

SEQ ID NO: 4910287 - DNA, 25 bp, Homo sapien
aaatttgttccttagttgggcatgg

SEQ ID NO: 4910288 - DNA, 25 bp, Homo sapien
ccatatatttcctaacagcaaggac

SEQ ID NO: 4910289 - DNA, 25 bp, Homo sapien
gtgtcattcggttttctatccccag

SEQ ID NO: 4910290 - DNA, 25 bp, Homo sapien
tacctcaggattgtaattgtctgtg

SEQ ID NO: 4910291 - DNA, 25 bp, Homo sapien
tggctcagcactcccaatcagtggg

SEQ ID NO: 4910292 - DNA, 25 bp, Homo sapien
tctgacaagcgattctgggaggact

SEQ ID NO: 4910293 - DNA, 25 bp, Homo sapien
tggactccaatcaccagtgaggctg

SEQ ID NO: 4910294 - DNA, 25 bp, Homo sapien
cattcactcagttgggaggccatgg

SEQ ID NO: 4910295 - DNA, 25 bp, Homo sapien
tctaaactttttgctcagaggacca

SEQ ID NO: 4910296 - DNA, 25 bp, Homo sapien
tagacaatgtgtcccaacccaagaa

SEQ ID NO: 4910297 - DNA, 25 bp, Homo sapien
tgaaagtcctgtgaagttcaaacag

SEQ ID NO: 4910298 - DNA, 25 bp, Homo sapien
gaggaccaaacttgaacttcaattg

SEQ ID NO: 4910299 - DNA, 25 bp, Homo sapien
tgacaatcttcagactagtctcctt

SEQ ID NO: 4910300 - DNA, 25 bp, Homo sapien
tcagactagtctccttgtcccaagc

SEQ ID NO: 4910301 - DNA, 25 bp, Homo sapien
tcttcagactagtctccttgtccca

SEQ ID NO: 4910302 - DNA, 25 bp, Homo sapien
aatcttcagactagtctccttgtcc

SEQ ID NO: 4910303 - DNA, 25 bp, Homo sapien
ggaaatggatggatgcagggtggct

SEQ ID NO: 4910304 - DNA, 25 bp, Homo sapien
ggcccatccagtggttaccttttgc

SEQ ID NO: 4910305 - DNA, 25 bp, Homo sapien
cagtggttaccttttgcaggttggg

SEQ ID NO: 4910306 - DNA, 25 bp, Homo sapien
caccgggcccatccagtggttacct

SEQ ID NO: 4910307 - DNA, 25 bp, Homo sapien
tccccatgttacctaggctggtctt

SEQ ID NO: 4910308 - DNA, 25 bp, Homo sapien
ttccccatgttacctaggctggtct

SEQ ID NO: 4910309 - DNA, 25 bp, Homo sapien
catggaagaatcgtcactgagagtg

SEQ ID NO: 4910310 - DNA, 25 bp, Homo sapien
gtggaggagtcacatctaattacag

SEQ ID NO: 4910311 - DNA, 25 bp, Homo sapien
gagtgtaggccctcttggctgtgga

SEQ ID NO: 4910312 - DNA, 25 bp, Homo sapien
gggaaagtgcctgaatgtcatggaa

SEQ ID NO: 4910313 - DNA, 25 bp, Homo sapien
ggctgagatcggctggcaagaaata

SEQ ID NO: 4910314 - DNA, 25 bp, Homo sapien
gccacccatgtttgcaagaggcaaa

SEQ ID NO: 4910315 - DNA, 25 bp, Homo sapien
gagctcagtccccatcacgtgagat

SEQ ID NO: 4910316 - DNA, 25 bp, Homo sapien
gatgaagaacctatctatgtcccca

SEQ ID NO: 4910317 - DNA, 25 bp, Homo sapien
acatattattgtatagatgcaccac

SEQ ID NO: 4910318 - DNA, 25 bp, Homo sapien
gtcacaaagaacataggagttcaga

SEQ ID NO: 4910319 - DNA, 25 bp, Homo sapien
gagttcagatatctttacaaggtgt

SEQ ID NO: 4910320 - DNA, 25 bp, Homo sapien
gaataacatattattgtatagatgc

SEQ ID NO: 4910321 - DNA, 25 bp, Homo sapien
cagatcaacaggataagaatttttc

SEQ ID NO: 4910322 - DNA, 25 bp, Homo sapien
acagatcaacaggataagaattttt

SEQ ID NO: 4910323 - DNA, 25 bp, Homo sapien
tcacagatcaacaggataagaattt

SEQ ID NO: 4910324 - DNA, 25 bp, Homo sapien
ggtcacagatcaacaggataagaat

SEQ ID NO: 4910325 - DNA, 25 bp, Homo sapien
tggcctcctaactggacatgatgtt

SEQ ID NO: 4910326 - DNA, 25 bp, Homo sapien
agtagcagcacataactggccctag

SEQ ID NO: 4910327 - DNA, 25 bp, Homo sapien
cattagaaggagatcacaaagcaga

SEQ ID NO: 4910328 - DNA, 25 bp, Homo sapien
ggatgatgcaaacgaaatctctcca

SEQ ID NO: 4910329 - DNA, 25 bp, Homo sapien
ggacattcctagcttctgccctcat

SEQ ID NO: 4910330 - DNA, 25 bp, Homo sapien
caggcctggagtctaggaagtctaa

SEQ ID NO: 4910331 - DNA, 25 bp, Homo sapien
tccacgtgtcgagaaagggaagtga

SEQ ID NO: 4910332 - DNA, 25 bp, Homo sapien
actgagtggatactctattccaggc

SEQ ID NO: 4910333 - DNA, 25 bp, Homo sapien
tggcctctgatagctctggacttcc

SEQ ID NO: 4910334 - DNA, 25 bp, Homo sapien
tattgcaagacagctccttcacggg

SEQ ID NO: 4910335 - DNA, 25 bp, Homo sapien
cattgcacccagctcaaaagggaga

SEQ ID NO: 4910336 - DNA, 25 bp, Homo sapien
gaagggtgaatttgacagctgagcc

SEQ ID NO: 4910337 - DNA, 25 bp, Homo sapien
atgctcccctgaggcgaagactggt

SEQ ID NO: 4910338 - DNA, 25 bp, Homo sapien
tcaggaagaccttttttgactgtgg

SEQ ID NO: 4910339 - DNA, 25 bp, Homo sapien
gcttgaccttcagaactcaggaaga

SEQ ID NO: 4910340 - DNA, 25 bp, Homo sapien
tctacaagcctgagaaaattctaat

SEQ ID NO: 4910341 - DNA, 25 bp, Homo sapien
gggatgtaatcgataagccagtgta

SEQ ID NO: 4910342 - DNA, 25 bp, Homo sapien
tttctattgtgggatgtaatcgata

SEQ ID NO: 4910343 - DNA, 25 bp, Homo sapien
aatcgataagccagtgtagccagtg

SEQ ID NO: 4910344 - DNA, 25 bp, Homo sapien
tattgtgggatgtaatcgataagcc

SEQ ID NO: 4910345 - DNA, 25 bp, Homo sapien
tatacgtgagatttctgttgattga

SEQ ID NO: 4910346 - DNA, 25 bp, Homo sapien
tgattgatagttcagatgtcttctg

SEQ ID NO: 4910347 - DNA, 25 bp, Homo sapien
cttcaactatacgtgagatttctgt

SEQ ID NO: 4910348 - DNA, 25 bp, Homo sapien
tctgtctcaatagcccatgtttctg

SEQ ID NO: 4910349 - DNA, 25 bp, Homo sapien
ggacatggcctagccgatgtgaatt

SEQ ID NO: 4910350 - DNA, 25 bp, Homo sapien
ggaggtagtaacatctgaactgaac

SEQ ID NO: 4910351 - DNA, 25 bp, Homo sapien
tgaactgaacctttacgtttgagta

SEQ ID NO: 4910352 - DNA, 25 bp, Homo sapien
gctaatgttgtggtaggtatatgcc

SEQ ID NO: 4910353 - DNA, 25 bp, Homo sapien
cagacacaagaaacagggttatgcg

SEQ ID NO: 4910354 - DNA, 25 bp, Homo sapien
gaaacagggttatgcgtgactctga

SEQ ID NO: 4910355 - DNA, 25 bp, Homo sapien
tttctgtagagaagcttaaagcatt

SEQ ID NO: 4910356 - DNA, 25 bp, Homo sapien
cattttagggtgattctacagacac

SEQ ID NO: 4910357 - DNA, 25 bp, Homo sapien
taaaatttgcaatgccttaggcaag

SEQ ID NO: 4910358 - DNA, 25 bp, Homo sapien
tggagaaatctggtttacacagctt

SEQ ID NO: 4910359 - DNA, 25 bp, Homo sapien
attgggatagcaaagccttggagaa

SEQ ID NO: 4910360 - DNA, 25 bp, Homo sapien
ccaccgtgcctggtcgagtttgcag

SEQ ID NO: 4910361 - DNA, 25 bp, Homo sapien
cgtgcctggcccaaaaacaggattt

SEQ ID NO: 4910362 - DNA, 25 bp, Homo sapien
caggattttttttggtacatctgaa

SEQ ID NO: 4910363 - DNA, 25 bp, Homo sapien
ttttttttggtacatctgaaacatg

SEQ ID NO: 4910364 - DNA, 25 bp, Homo sapien
aacaggattttttttggtacatctg

SEQ ID NO: 4910365 - DNA, 25 bp, Homo sapien
tagtgtctgcagatcccatactgac

SEQ ID NO: 4910366 - DNA, 25 bp, Homo sapien
aagatgtgcatgtgatagtgtctgc

SEQ ID NO: 4910367 - DNA, 25 bp, Homo sapien
taggtacaggcatctacccgtggga

SEQ ID NO: 4910368 - DNA, 25 bp, Homo sapien
gctgcaggtttctgtgatcgttttg

SEQ ID NO: 4910369 - DNA, 25 bp, Homo sapien
cacagtttctcaggtctcctgcttc

SEQ ID NO: 4910370 - DNA, 25 bp, Homo sapien
cttctgtatttgacactggcggcat

SEQ ID NO: 4910371 - DNA, 25 bp, Homo sapien
ccacagtttctcaggtctcctgctt

SEQ ID NO: 4910372 - DNA, 25 bp, Homo sapien
ctgcttctgtatttgacactggcgg

SEQ ID NO: 4910373 - DNA, 25 bp, Homo sapien
ttgctcagaagttcttggactctat

SEQ ID NO: 4910374 - DNA, 25 bp, Homo sapien
agttcttggactctatgaaacttcc

SEQ ID NO: 4910375 - DNA, 25 bp, Homo sapien
tgaagaacttccaagttgagaacaa

SEQ ID NO: 4910376 - DNA, 25 bp, Homo sapien
gtgaagaacttccaagttgagaaca

SEQ ID NO: 4910377 - DNA, 25 bp, Homo sapien
atttttcacagcttgggctgccaca

SEQ ID NO: 4910378 - DNA, 25 bp, Homo sapien
ccctttgcctggaaacacagctcac

SEQ ID NO: 4910379 - DNA, 25 bp, Homo sapien
tcctgtcctcccctttgcctggaaa

SEQ ID NO: 4910380 - DNA, 25 bp, Homo sapien
gggctgccacaaggcgtcctgtcct

SEQ ID NO: 4910381 - DNA, 25 bp, Homo sapien
ggtagacctaccctacaagagagtc

SEQ ID NO: 4910382 - DNA, 25 bp, Homo sapien
ctggtagacctaccctacaagagag

SEQ ID NO: 4910383 - DNA, 25 bp, Homo sapien
gctggtagacctaccctacaagaga

SEQ ID NO: 4910384 - DNA, 25 bp, Homo sapien
cagctggtagacctaccctacaaga

SEQ ID NO: 4910385 - DNA, 25 bp, Homo sapien
gacccagacaactcctattaggcct

SEQ ID NO: 4910386 - DNA, 25 bp, Homo sapien
cttcatgacccagacaactcctatt

SEQ ID NO: 4910387 - DNA, 25 bp, Homo sapien
agacaactcctattaggcctcacct

SEQ ID NO: 4910388 - DNA, 25 bp, Homo sapien
atccgccttcatgacccagacaact

SEQ ID NO: 4910389 - DNA, 25 bp, Homo sapien
gctaaagaacttatctatggaacca

SEQ ID NO: 4910390 - DNA, 25 bp, Homo sapien
ttcagatggctggaaagttaacgat

SEQ ID NO: 4910391 - DNA, 25 bp, Homo sapien
cttatgagtgggtgctaagctctga

SEQ ID NO: 4910392 - DNA, 25 bp, Homo sapien
tgcatacagtgtatactgtttgggt

SEQ ID NO: 4910393 - DNA, 25 bp, Homo sapien
cacctcaaagatgttcgtgtcctaa

SEQ ID NO: 4910394 - DNA, 25 bp, Homo sapien
cagccaactattcttaggcatacag

SEQ ID NO: 4910395 - DNA, 25 bp, Homo sapien
aatggcacctcaaagatgttcgtgt

SEQ ID NO: 4910396 - DNA, 25 bp, Homo sapien
ctattcttaggcatacagctcaact

SEQ ID NO: 4910397 - DNA, 25 bp, Homo sapien
catccacgatacagtttatgctcca

SEQ ID NO: 4910398 - DNA, 25 bp, Homo sapien
gtttgtttcatctcgtgtgccttgc

SEQ ID NO: 4910399 - DNA, 25 bp, Homo sapien
tctcaccctatgtgcagttctaaca

SEQ ID NO: 4910400 - DNA, 25 bp, Homo sapien
cactcggagttatcagggttctacc

SEQ ID NO: 4910401 - DNA, 25 bp, Homo sapien
tgaaaaccaccctagtgagtgaggc

SEQ ID NO: 4910402 - DNA, 25 bp, Homo sapien
taccctgttcggtatgggctgtacg

SEQ ID NO: 4910403 - DNA, 25 bp, Homo sapien
tgaggcatgggcatactaatcgtgc

SEQ ID NO: 4910404 - DNA, 25 bp, Homo sapien
ttcaggcgatcctcttgcagcagcc

SEQ ID NO: 4910405 - DNA, 25 bp, Homo sapien
ggaatacaaaacgtacactgtgaaa

SEQ ID NO: 4910406 - DNA, 25 bp, Homo sapien
ctggaatacaaaacgtacactgtga

SEQ ID NO: 4910407 - DNA, 25 bp, Homo sapien
gaatacaaaacgtacactgtgaaag

SEQ ID NO: 4910408 - DNA, 25 bp, Homo sapien
tggaatacaaaacgtacactgtgaa

SEQ ID NO: 4910409 - DNA, 25 bp, Homo sapien
ttaaggccatattggaagctggcaa

SEQ ID NO: 4910410 - DNA, 25 bp, Homo sapien
cagctctttgcagagaaccatgatc

SEQ ID NO: 4910411 - DNA, 25 bp, Homo sapien
gttggtaagtaaacacagcctgctt

SEQ ID NO: 4910412 - DNA, 25 bp, Homo sapien
gatcccactgagtcctggttggtaa

SEQ ID NO: 4910413 - DNA, 25 bp, Homo sapien
caaggattcaggtggtggaaaataa

SEQ ID NO: 4910414 - DNA, 25 bp, Homo sapien
ttaatagattgattagatacacact

SEQ ID NO: 4910415 - DNA, 25 bp, Homo sapien
gatacacactacactcactgcaagg

SEQ ID NO: 4910416 - DNA, 25 bp, Homo sapien
tcactgcaaggattcaggtggtgga

SEQ ID NO: 4910417 - DNA, 25 bp, Homo sapien
tgtgcagtggccaatcattagtgga

SEQ ID NO: 4910418 - DNA, 25 bp, Homo sapien
actaggatttgtgcatattgggacc

SEQ ID NO: 4910419 - DNA, 25 bp, Homo sapien
tatcctcttgaatgatgcagtggcc

SEQ ID NO: 4910420 - DNA, 25 bp, Homo sapien
ggaccgcttcctctgagacagcatg

SEQ ID NO: 4910421 - DNA, 25 bp, Homo sapien
caaccatagaataggatggccaggt

SEQ ID NO: 4910422 - DNA, 25 bp, Homo sapien
accatagaataggatggccaggtct

SEQ ID NO: 4910423 - DNA, 25 bp, Homo sapien
aaccatagaataggatggccaggtc

SEQ ID NO: 4910424 - DNA, 25 bp, Homo sapien
taaaataccaaggagggcatgcctg

SEQ ID NO: 4910425 - DNA, 25 bp, Homo sapien
gtgggtccaccaccgaaaatgagcc

SEQ ID NO: 4910426 - DNA, 25 bp, Homo sapien
tatctcagggcaaatcagacaacat

SEQ ID NO: 4910427 - DNA, 25 bp, Homo sapien
gacaatgccttagtggacttccatg

SEQ ID NO: 4910428 - DNA, 25 bp, Homo sapien
tatcgtgaatactgcaaagcaatct

SEQ ID NO: 4910429 - DNA, 25 bp, Homo sapien
tgtgtatacatcacagcgtctttat

SEQ ID NO: 4910430 - DNA, 25 bp, Homo sapien
tctctttcacaatggactgctgtag

SEQ ID NO: 4910431 - DNA, 25 bp, Homo sapien
tacgtgtcctatagattcacccatg

SEQ ID NO: 4910432 - DNA, 25 bp, Homo sapien
cattgcctggcacgactttctgagc

SEQ ID NO: 4910433 - DNA, 25 bp, Homo sapien
caaattacatctatcgtctggtggt

SEQ ID NO: 4910434 - DNA, 25 bp, Homo sapien
tccacctgaaagaggatgagcactg

SEQ ID NO: 4910435 - DNA, 25 bp, Homo sapien
tgctagcagtcaaaatgccatatct

SEQ ID NO: 4910436 - DNA, 25 bp, Homo sapien
tccaagctccctggagtaccaagct

SEQ ID NO: 4910437 - DNA, 25 bp, Homo sapien
tacgtaaggtcgctctttgcctcct

SEQ ID NO: 4910438 - DNA, 25 bp, Homo sapien
taccaagcttccaaaattagaccca

SEQ ID NO: 4910439 - DNA, 25 bp, Homo sapien
gtaatcttgttaggcatgactccaa

SEQ ID NO: 4910440 - DNA, 25 bp, Homo sapien
cgccaggctgtctgcttgtgaattc

SEQ ID NO: 4910441 - DNA, 25 bp, Homo sapien
ctaccagacccagagtgtggcgcca

SEQ ID NO: 4910442 - DNA, 25 bp, Homo sapien
caggacaagctactgacaaaacccc

SEQ ID NO: 4910443 - DNA, 25 bp, Homo sapien
caaccgagctccctgaataagcaat

SEQ ID NO: 4910444 - DNA, 25 bp, Homo sapien
cagcaaagggaaatagggataaggc

SEQ ID NO: 4910445 - DNA, 25 bp, Homo sapien
caaagggaaatagggataaggccat

SEQ ID NO: 4910446 - DNA, 25 bp, Homo sapien
gtcagcaaagggaaatagggataag

SEQ ID NO: 4910447 - DNA, 25 bp, Homo sapien
gaaatagggataaggccattttata

SEQ ID NO: 4910448 - DNA, 25 bp, Homo sapien
gtcggtccttgaactaatagaaatc

SEQ ID NO: 4910449 - DNA, 25 bp, Homo sapien
cggtccttgaactaatagaaatcat

SEQ ID NO: 4910450 - DNA, 25 bp, Homo sapien
gtccttgaactaatagaaatcatca

SEQ ID NO: 4910451 - DNA, 25 bp, Homo sapien
agtgtcggtccttgaactaatagaa

SEQ ID NO: 4910452 - DNA, 25 bp, Homo sapien
tcagtaagggtagctgaatagattt

SEQ ID NO: 4910453 - DNA, 25 bp, Homo sapien
gtaagcattcagtaagggtagctga

SEQ ID NO: 4910454 - DNA, 25 bp, Homo sapien
caaacattttatgacagaggatgag

SEQ ID NO: 4910455 - DNA, 25 bp, Homo sapien
ggaagaggtactgtgttgtctgagt

SEQ ID NO: 4910456 - DNA, 25 bp, Homo sapien
caggaggctgatgtccatgtccgtc

SEQ ID NO: 4910457 - DNA, 25 bp, Homo sapien
tcaggaggctgatgtccatgtccgt

SEQ ID NO: 4910458 - DNA, 25 bp, Homo sapien
aggctgatgtccatgtccgtcaaat

SEQ ID NO: 4910459 - DNA, 25 bp, Homo sapien
ggaggctgatgtccatgtccgtcaa

SEQ ID NO: 4910460 - DNA, 25 bp, Homo sapien
tggactgccttcatagttcattact

SEQ ID NO: 4910461 - DNA, 25 bp, Homo sapien
catagttcattacttctgcttcaac

SEQ ID NO: 4910462 - DNA, 25 bp, Homo sapien
caatataaaatccatcctttctacc

SEQ ID NO: 4910463 - DNA, 25 bp, Homo sapien
caacaatataaaatccatcctttct

SEQ ID NO: 4910464 - DNA, 25 bp, Homo sapien
tgtaaggccacaggcaatgttattt

SEQ ID NO: 4910465 - DNA, 25 bp, Homo sapien
aagataaaccattgactgtacatac

SEQ ID NO: 4910466 - DNA, 25 bp, Homo sapien
ccccaagataaaccattgactgtac

SEQ ID NO: 4910467 - DNA, 25 bp, Homo sapien
tgagtgtaaggccacaggcaatgtt

SEQ ID NO: 4910468 - DNA, 25 bp, Homo sapien
tgctgtgtactcatatgcccaggcc

SEQ ID NO: 4910469 - DNA, 25 bp, Homo sapien
tgtatcttccttcatacctgttaag

SEQ ID NO: 4910470 - DNA, 25 bp, Homo sapien
aagtgctgtgtactcatatgcccag

SEQ ID NO: 4910471 - DNA, 25 bp, Homo sapien
tatcttccttcatacctgttaagtg

SEQ ID NO: 4910472 - DNA, 25 bp, Homo sapien
cactttccagatatactgaaaagtc

SEQ ID NO: 4910473 - DNA, 25 bp, Homo sapien
ttccagatatactgaaaagtctcac

SEQ ID NO: 4910474 - DNA, 25 bp, Homo sapien
tcactttccagatatactgaaaagt

SEQ ID NO: 4910475 - DNA, 25 bp, Homo sapien
ctttccagatatactgaaaagtctc

SEQ ID NO: 4910476 - DNA, 25 bp, Homo sapien
gagtatcctgtataaatttcatcac

SEQ ID NO: 4910477 - DNA, 25 bp, Homo sapien
gatggagtatcctgtataaatttca

SEQ ID NO: 4910478 - DNA, 25 bp, Homo sapien
ttggatggagtatcctgtataaatt

SEQ ID NO: 4910479 - DNA, 25 bp, Homo sapien
tggagtatcctgtataaatttcatc

SEQ ID NO: 4910480 - DNA, 25 bp, Homo sapien
gacaatatttatccaacgtgctagg

SEQ ID NO: 4910481 - DNA, 25 bp, Homo sapien
tatttatccaacgtgctagggaact

SEQ ID NO: 4910482 - DNA, 25 bp, Homo sapien
tccaacgtgctagggaacttctcac

SEQ ID NO: 4910483 - DNA, 25 bp, Homo sapien
acctggacaatatttatccaacgtg

SEQ ID NO: 4910484 - DNA, 25 bp, Homo sapien
ggcagacagcctagcggacgctatc

SEQ ID NO: 4910485 - DNA, 25 bp, Homo sapien
gacgctatcggctcagcgatccatc

SEQ ID NO: 4910486 - DNA, 25 bp, Homo sapien
cccaagcgaacacagaacaagtcac

SEQ ID NO: 4910487 - DNA, 25 bp, Homo sapien
ctaagctccggcctcacggcttcct

SEQ ID NO: 4910488 - DNA, 25 bp, Homo sapien
gaaggtgtcaaacgaggaagtagca

SEQ ID NO: 4910489 - DNA, 25 bp, Homo sapien
ggtgtcaaacgaggaagtagcagca

SEQ ID NO: 4910490 - DNA, 25 bp, Homo sapien
tcaaacgaggaagtagcagcagtaa

SEQ ID NO: 4910491 - DNA, 25 bp, Homo sapien
caggaaggtgtcaaacgaggaagta

SEQ ID NO: 4910492 - DNA, 25 bp, Homo sapien
caaatctaggctaaaagactggagt

SEQ ID NO: 4910493 - DNA, 25 bp, Homo sapien
cattaataggctaggtgaagtggct

SEQ ID NO: 4910494 - DNA, 25 bp, Homo sapien
acagctgcagcttgaataaatgtct

SEQ ID NO: 4910495 - DNA, 25 bp, Homo sapien
caggactgacaacaataaatgccaa

SEQ ID NO: 4910496 - DNA, 25 bp, Homo sapien
gcctatcccaaggtcacaagtattt

SEQ ID NO: 4910497 - DNA, 25 bp, Homo sapien
catgagatctgactgttaccttccc

SEQ ID NO: 4910498 - DNA, 25 bp, Homo sapien
taaaccacttgatactgctccacag

SEQ ID NO: 4910499 - DNA, 25 bp, Homo sapien
tctgtagcatgtgaaaaacctgcct

SEQ ID NO: 4910500 - DNA, 25 bp, Homo sapien
atttcctcaaaaatcaagagagatt

SEQ ID NO: 4910501 - DNA, 25 bp, Homo sapien
gtatttcctcaaaaatcaagagaga

SEQ ID NO: 4910502 - DNA, 25 bp, Homo sapien
ttactaggtatttcctcaaaaatca

SEQ ID NO: 4910503 - DNA, 25 bp, Homo sapien
aggtatttcctcaaaaatcaagaga

SEQ ID NO: 4910504 - DNA, 25 bp, Homo sapien
tgttctttgaagttgccgcatgcaa

SEQ ID NO: 4910505 - DNA, 25 bp, Homo sapien
gttgccgcatgcaatttctcccatg

SEQ ID NO: 4910506 - DNA, 25 bp, Homo sapien
cccaggagcagatataagccagaac

SEQ ID NO: 4910507 - DNA, 25 bp, Homo sapien
ggaagtgacagcaagattattgttc

SEQ ID NO: 4910508 - DNA, 25 bp, Homo sapien
aagccaaccaagacatccaacgtgc

SEQ ID NO: 4910509 - DNA, 25 bp, Homo sapien
cagttcatctgacaagccaaccaag

SEQ ID NO: 4910510 - DNA, 25 bp, Homo sapien
gcatccagtttagccagttcatctg

SEQ ID NO: 4910511 - DNA, 25 bp, Homo sapien
ccttctacaaatgcatccagtttag

SEQ ID NO: 4910512 - DNA, 25 bp, Homo sapien
gctaagtggccttcttgactccaat

SEQ ID NO: 4910513 - DNA, 25 bp, Homo sapien
gacctcagtctctattgccacagca

SEQ ID NO: 4910514 - DNA, 25 bp, Homo sapien
cccttaaagcttcaatcaaatgtac

SEQ ID NO: 4910515 - DNA, 25 bp, Homo sapien
acagcatcgctttcaggtggttcta

SEQ ID NO: 4910516 - DNA, 25 bp, Homo sapien
taaacaagagccaatatgagccagg

SEQ ID NO: 4910517 - DNA, 25 bp, Homo sapien
tacttcagagtgtagaatcacctgg

SEQ ID NO: 4910518 - DNA, 25 bp, Homo sapien
gaaccatttgctacgaacattctaa

SEQ ID NO: 4910519 - DNA, 25 bp, Homo sapien
taaatgacaatcctatgctgagtgg

SEQ ID NO: 4910520 - DNA, 25 bp, Homo sapien
ctcttgaactttgtctttgctatct

SEQ ID NO: 4910521 - DNA, 25 bp, Homo sapien
tacatcagccatgtattgagctact

SEQ ID NO: 4910522 - DNA, 25 bp, Homo sapien
tccaatacatcagccatgtattgag

SEQ ID NO: 4910523 - DNA, 25 bp, Homo sapien
gccatgtattgagctactttcttaa

SEQ ID NO: 4910524 - DNA, 25 bp, Homo sapien
aatatttttcagggactgcttgatt

SEQ ID NO: 4910525 - DNA, 25 bp, Homo sapien
tgtcccactggaaccttgttatata

SEQ ID NO: 4910526 - DNA, 25 bp, Homo sapien
cccactggaaccttgttatataagt

SEQ ID NO: 4910527 - DNA, 25 bp, Homo sapien
catgtcccactggaaccttgttata

SEQ ID NO: 4910528 - DNA, 25 bp, Homo sapien
tttcaggtcattatcaatctgagtt

SEQ ID NO: 4910529 - DNA, 25 bp, Homo sapien
tttcaggttattgtatgcagatgct

SEQ ID NO: 4910530 - DNA, 25 bp, Homo sapien
atgcagatgctcgagatttcaggtc

SEQ ID NO: 4910531 - DNA, 25 bp, Homo sapien
ttgtatgcagatgctcgagatttca

SEQ ID NO: 4910532 - DNA, 25 bp, Homo sapien
tactctgaatcaagaacaaagtcat

SEQ ID NO: 4910533 - DNA, 25 bp, Homo sapien
ttcacaatttctgctagacttctag

SEQ ID NO: 4910534 - DNA, 25 bp, Homo sapien
ctagacttctagttagcaaacttcc

SEQ ID NO: 4910535 - DNA, 25 bp, Homo sapien
gaactactaccagtaatgtgacgag

SEQ ID NO: 4910536 - DNA, 25 bp, Homo sapien
gcttaatccagtcgttgtggtttaa

SEQ ID NO: 4910537 - DNA, 25 bp, Homo sapien
catttcggctagtgtttcatactgc

SEQ ID NO: 4910538 - DNA, 25 bp, Homo sapien
ttgctagaccttggaactaccattt

SEQ ID NO: 4910539 - DNA, 25 bp, Homo sapien
catactgcttaatccagtcgttgtg

SEQ ID NO: 4910540 - DNA, 25 bp, Homo sapien
caggtaactgtcttggtcctctgaa

SEQ ID NO: 4910541 - DNA, 25 bp, Homo sapien
caaggtgacattacacaggtaactg

SEQ ID NO: 4910542 - DNA, 25 bp, Homo sapien
aagtcatcaactgccttcctaaaca

SEQ ID NO: 4910543 - DNA, 25 bp, Homo sapien
tttctctggctttgtgtctgaagtc

SEQ ID NO: 4910544 - DNA, 25 bp, Homo sapien
tatactggaagtcacgaacaatgaa

SEQ ID NO: 4910545 - DNA, 25 bp, Homo sapien
tcttatcagtagaaagcctgttcat

SEQ ID NO: 4910546 - DNA, 25 bp, Homo sapien
ttcattatactggaagtcacgaaca

SEQ ID NO: 4910547 - DNA, 25 bp, Homo sapien
cattatactggaagtcacgaacaat

SEQ ID NO: 4910548 - DNA, 25 bp, Homo sapien
gataaacagttatgtaggcaagtca

SEQ ID NO: 4910549 - DNA, 25 bp, Homo sapien
gattcagctaacacttccttggata

SEQ ID NO: 4910550 - DNA, 25 bp, Homo sapien
ggagttggtctagacatctaaaacc

SEQ ID NO: 4910551 - DNA, 25 bp, Homo sapien
gattaagcggatttcaaatacctcc

SEQ ID NO: 4910552 - DNA, 25 bp, Homo sapien
tcacgtgaatccatgcaataaatgc

SEQ ID NO: 4910553 - DNA, 25 bp, Homo sapien
gaaaacccgtaatgctttcacgtga

SEQ ID NO: 4910554 - DNA, 25 bp, Homo sapien
cagactcaacgaaaacccgtaatgc

SEQ ID NO: 4910555 - DNA, 25 bp, Homo sapien
ctttcagccaccgtacaagtggtcc

SEQ ID NO: 4910556 - DNA, 25 bp, Homo sapien
gaggttacccacatatagtttgaaa

SEQ ID NO: 4910557 - DNA, 25 bp, Homo sapien
aggtcagcagatacttttatggtaa

SEQ ID NO: 4910558 - DNA, 25 bp, Homo sapien
tcctcaggaaataagaagaagtaag

SEQ ID NO: 4910559 - DNA, 25 bp, Homo sapien
cagtggtgcaatagtgcagtggcac

SEQ ID NO: 4910560 - DNA, 25 bp, Homo sapien
gctgtctagatgtttatacaattca

SEQ ID NO: 4910561 - DNA, 25 bp, Homo sapien
agtagcattgcttggaagttcactg

SEQ ID NO: 4910562 - DNA, 25 bp, Homo sapien
cactgctgtctagatgtttatacaa

SEQ ID NO: 4910563 - DNA, 25 bp, Homo sapien
tttcttattgggctgaagtagcatt

SEQ ID NO: 4910564 - DNA, 25 bp, Homo sapien
agttgctgggactaccaacatgtcc

SEQ ID NO: 4910565 - DNA, 25 bp, Homo sapien
gatacacagcaagataattactagc

SEQ ID NO: 4910566 - DNA, 25 bp, Homo sapien
ttcaattcttactctactgggctaa

SEQ ID NO: 4910567 - DNA, 25 bp, Homo sapien
gcccagctacgccattttagaaaaa

SEQ ID NO: 4910568 - DNA, 25 bp, Homo sapien
acaagtaactctgtttatatcttct

SEQ ID NO: 4910569 - DNA, 25 bp, Homo sapien
cacaagtaactctgtttatatcttc

SEQ ID NO: 4910570 - DNA, 25 bp, Homo sapien
taaatcttggacttagaatactgag

SEQ ID NO: 4910571 - DNA, 25 bp, Homo sapien
tgtatttagcatgatcccaccaacc

SEQ ID NO: 4910572 - DNA, 25 bp, Homo sapien
ggttcaagcattctgactgcatatg

SEQ ID NO: 4910573 - DNA, 25 bp, Homo sapien
gagttgatgggatacaagacttaca

SEQ ID NO: 4910574 - DNA, 25 bp, Homo sapien
caggtttaaacctggaatatccata

SEQ ID NO: 4910575 - DNA, 25 bp, Homo sapien
tgaattccagcaagttgcaatcaat

SEQ ID NO: 4910576 - DNA, 25 bp, Homo sapien
taggggtagtattcttgttgactca

SEQ ID NO: 4910577 - DNA, 25 bp, Homo sapien
tcttgtagtacacataggggtagta

SEQ ID NO: 4910578 - DNA, 25 bp, Homo sapien
ctcctgtgggtgttgacagtgctca

SEQ ID NO: 4910579 - DNA, 25 bp, Homo sapien
gagttaaaagtacgaccatactgca

SEQ ID NO: 4910580 - DNA, 25 bp, Homo sapien
gaaagggcgtaagaagcaagcaaag

SEQ ID NO: 4910581 - DNA, 25 bp, Homo sapien
gtttacaccattcccctgtgaacag

SEQ ID NO: 4910582 - DNA, 25 bp, Homo sapien
gaactgtaatcttaagttacacaca

SEQ ID NO: 4910583 - DNA, 25 bp, Homo sapien
aacagaactgtaatcttaagttaca

SEQ ID NO: 4910584 - DNA, 25 bp, Homo sapien
tgtaatcttaagttacacacaccac

SEQ ID NO: 4910585 - DNA, 25 bp, Homo sapien
taatcttaagttacacacaccacaa

SEQ ID NO: 4910586 - DNA, 25 bp, Homo sapien
taaatcatacgaaagtcagacaaca

SEQ ID NO: 4910587 - DNA, 25 bp, Homo sapien
caaatggttacacctcagcatataa

SEQ ID NO: 4910588 - DNA, 25 bp, Homo sapien
taaatacccatcatatactgaaaag

SEQ ID NO: 4910589 - DNA, 25 bp, Homo sapien
tcctggaagcagcatagcaagtgag

SEQ ID NO: 4910590 - DNA, 25 bp, Homo sapien
gccacgcagccagttaaaagaatga

SEQ ID NO: 4910591 - DNA, 25 bp, Homo sapien
tctcggactcaggttaagcaatgtg

SEQ ID NO: 4910592 - DNA, 25 bp, Homo sapien
cctttccaggaatggtgaccgccac

SEQ ID NO: 4910593 - DNA, 25 bp, Homo sapien
gaaatcacagtgaaagtcccgtcgt

SEQ ID NO: 4910594 - DNA, 25 bp, Homo sapien
taaaggtactactggatatgcactc

SEQ ID NO: 4910595 - DNA, 25 bp, Homo sapien
tgttccacaaagattggttccacaa

SEQ ID NO: 4910596 - DNA, 25 bp, Homo sapien
gaaattggcatgcaaacaactagac

SEQ ID NO: 4910597 - DNA, 25 bp, Homo sapien
tctcctaggttgaataactgaggct

SEQ ID NO: 4910598 - DNA, 25 bp, Homo sapien
gaaaccatgccaggcggcagtctct

SEQ ID NO: 4910599 - DNA, 25 bp, Homo sapien
tactctaagggtaaatccactggtg

SEQ ID NO: 4910600 - DNA, 25 bp, Homo sapien
ggcaggcaaggttttcattataagc

SEQ ID NO: 4910601 - DNA, 25 bp, Homo sapien
caagccccggtgtacacaataagca

SEQ ID NO: 4910602 - DNA, 25 bp, Homo sapien
tcaacttgatattctatggccttcc

SEQ ID NO: 4910603 - DNA, 25 bp, Homo sapien
gattacaactaacccctagcctctg

SEQ ID NO: 4910604 - DNA, 25 bp, Homo sapien
tctaaatcaacaccccaatctgagg

SEQ ID NO: 4910605 - DNA, 25 bp, Homo sapien
gaaaaagctgatttacccatgatga

SEQ ID NO: 4910606 - DNA, 25 bp, Homo sapien
aatgagtgttcaagggctgctgagc

SEQ ID NO: 4910607 - DNA, 25 bp, Homo sapien
tgagcagggacaacattgtgtacca

SEQ ID NO: 4910608 - DNA, 25 bp, Homo sapien
tggcaggttcattggaaaggagtcc

SEQ ID NO: 4910609 - DNA, 25 bp, Homo sapien
aaatgttactatctccttgcagctc

SEQ ID NO: 4910610 - DNA, 25 bp, Homo sapien
tcagtgccttactttagtggactga

SEQ ID NO: 4910611 - DNA, 25 bp, Homo sapien
tactttagtggactgagctacatcg

SEQ ID NO: 4910612 - DNA, 25 bp, Homo sapien
ccttactttagtggactgagctaca

SEQ ID NO: 4910613 - DNA, 25 bp, Homo sapien
tttagtggactgagctacatcgact

SEQ ID NO: 4910614 - DNA, 25 bp, Homo sapien
caggcataagccaggtgccttgagt

SEQ ID NO: 4910615 - DNA, 25 bp, Homo sapien
aaagtggtcagattaatatgaaatc

SEQ ID NO: 4910616 - DNA, 25 bp, Homo sapien
tgccttgagttaaactacactttgg

SEQ ID NO: 4910617 - DNA, 25 bp, Homo sapien
atatgaaatcttccaggcataagcc

SEQ ID NO: 4910618 - DNA, 25 bp, Homo sapien
tgttaagaaggagttgagctgattg

SEQ ID NO: 4910619 - DNA, 25 bp, Homo sapien
ttaagaaggagttgagctgattgta

SEQ ID NO: 4910620 - DNA, 25 bp, Homo sapien
aagaaggagttgagctgattgtaaa

SEQ ID NO: 4910621 - DNA, 25 bp, Homo sapien
taagaaggagttgagctgattgtaa

SEQ ID NO: 4910622 - DNA, 25 bp, Homo sapien
ttactctctttaactattttatcag

SEQ ID NO: 4910623 - DNA, 25 bp, Homo sapien
tggaaataagaggacttaaatctct

SEQ ID NO: 4910624 - DNA, 25 bp, Homo sapien
gaggacttaaatctctatcatttac

SEQ ID NO: 4910625 - DNA, 25 bp, Homo sapien
aataagaggacttaaatctctatca

SEQ ID NO: 4910626 - DNA, 25 bp, Homo sapien
ggggatatgggcctggtagcttatt

SEQ ID NO: 4910627 - DNA, 25 bp, Homo sapien
tgtttttggggatatgggcctggta

SEQ ID NO: 4910628 - DNA, 25 bp, Homo sapien
tagtatggaaagaatataaaccaat

SEQ ID NO: 4910629 - DNA, 25 bp, Homo sapien
ataaaccaatgtttttggggatatg

SEQ ID NO: 4910630 - DNA, 25 bp, Homo sapien
tgcttagagctttgaagtctcttag

SEQ ID NO: 4910631 - DNA, 25 bp, Homo sapien
caagaattaagtatagggtacttgc

SEQ ID NO: 4910632 - DNA, 25 bp, Homo sapien
ttagtctatctaacctaaatcgcta

SEQ ID NO: 4910633 - DNA, 25 bp, Homo sapien
agtatagggtacttgcttagagctt

SEQ ID NO: 4910634 - DNA, 25 bp, Homo sapien
tgatgccatttctatgaggcctcca

SEQ ID NO: 4910635 - DNA, 25 bp, Homo sapien
aatgtgctgccacataatatgtttt

SEQ ID NO: 4910636 - DNA, 25 bp, Homo sapien
gatgccatttctatgaggcctccaa

SEQ ID NO: 4910637 - DNA, 25 bp, Homo sapien
tgttttgtgaagagcaatgtctagc

SEQ ID NO: 4910638 - DNA, 25 bp, Homo sapien
taactttgccaaagttatgtaatta

SEQ ID NO: 4910639 - DNA, 25 bp, Homo sapien
tgccaaagttatgtaattatttttc

SEQ ID NO: 4910640 - DNA, 25 bp, Homo sapien
ctttgccaaagttatgtaattattt

SEQ ID NO: 4910641 - DNA, 25 bp, Homo sapien
attaactttgccaaagttatgtaat

SEQ ID NO: 4910642 - DNA, 25 bp, Homo sapien
gacgatatagtcctcttgttgcaca

SEQ ID NO: 4910643 - DNA, 25 bp, Homo sapien
tctgaaatgggttcatctcttcaag

SEQ ID NO: 4910644 - DNA, 25 bp, Homo sapien
tatgcaggtgatcccttgctgggtc

SEQ ID NO: 4910645 - DNA, 25 bp, Homo sapien
caaggtttttactgagacgatatag

SEQ ID NO: 4910646 - DNA, 25 bp, Homo sapien
ccttgtgtcaatggtgaggatattt

SEQ ID NO: 4910647 - DNA, 25 bp, Homo sapien
acatttactgggtttacgccttgtg

SEQ ID NO: 4910648 - DNA, 25 bp, Homo sapien
ctgtctcaccccgggcagacgtggg

SEQ ID NO: 4910649 - DNA, 25 bp, Homo sapien
ggtttacgccttgtgtcaatggtga

SEQ ID NO: 4910650 - DNA, 25 bp, Homo sapien
tcacagtccgggtggagagcctgtg

SEQ ID NO: 4910651 - DNA, 25 bp, Homo sapien
gtcacagtccgggtggagagcctgt

SEQ ID NO: 4910652 - DNA, 25 bp, Homo sapien
ggtctatatgacagcgaagtccaca

SEQ ID NO: 4910653 - DNA, 25 bp, Homo sapien
tgtccccgtctctgtataataagca

SEQ ID NO: 4910654 - DNA, 25 bp, Homo sapien
tatgtagcacttacatgtccccgtc

SEQ ID NO: 4910655 - DNA, 25 bp, Homo sapien
gctggctatccagaaacatccaagg

SEQ ID NO: 4910656 - DNA, 25 bp, Homo sapien
tgcacagatgcagctgcattttgaa

SEQ ID NO: 4910657 - DNA, 25 bp, Homo sapien
gcacagatgcagctgcattttgaac

SEQ ID NO: 4910658 - DNA, 25 bp, Homo sapien
caacacctggtttctgcacagatgc

SEQ ID NO: 4910659 - DNA, 25 bp, Homo sapien
aggcaacacctggtttctgcacaga

SEQ ID NO: 4910660 - DNA, 25 bp, Homo sapien
agcaagacaaaaagagtgggggcaa

SEQ ID NO: 4910661 - DNA, 25 bp, Homo sapien
ccttaaagtcctggcatcctcagag

SEQ ID NO: 4910662 - DNA, 25 bp, Homo sapien
gggctctggaagtatggaggcccct

SEQ ID NO: 4910663 - DNA, 25 bp, Homo sapien
tgacaatgtccttaaagtcctggca

SEQ ID NO: 4910664 - DNA, 25 bp, Homo sapien
tacgatgccaggagccttggagtgc

SEQ ID NO: 4910665 - DNA, 25 bp, Homo sapien
tatagcacaaagcagtccagatgac

SEQ ID NO: 4910666 - DNA, 25 bp, Homo sapien
gagctctaatcccactcacgagggc

SEQ ID NO: 4910667 - DNA, 25 bp, Homo sapien
cactttccaaaaggccgcagctgtt

SEQ ID NO: 4910668 - DNA, 25 bp, Homo sapien
caggtcctcgatcttggctagttga

SEQ ID NO: 4910669 - DNA, 25 bp, Homo sapien
caagatccaatttcgttccccacat

SEQ ID NO: 4910670 - DNA, 25 bp, Homo sapien
cattgatccacaaattgtcatttag

SEQ ID NO: 4910671 - DNA, 25 bp, Homo sapien
ggctagttgacacatcctcattgat

SEQ ID NO: 4910672 - DNA, 25 bp, Homo sapien
tgctttcctcagttctacggcacag

SEQ ID NO: 4910673 - DNA, 25 bp, Homo sapien
gaatacttaacatctctagcagagc

SEQ ID NO: 4910674 - DNA, 25 bp, Homo sapien
ggcacagtgctcctttcataaccag

SEQ ID NO: 4910675 - DNA, 25 bp, Homo sapien
cagttatccgggaagtggtggcttc

SEQ ID NO: 4910676 - DNA, 25 bp, Homo sapien
aggctttgcttctccttttgagatg

SEQ ID NO: 4910677 - DNA, 25 bp, Homo sapien
tccataatgtggaagggagcaaaga

SEQ ID NO: 4910678 - DNA, 25 bp, Homo sapien
aaagattcatggaactgtggccagg

SEQ ID NO: 4910679 - DNA, 25 bp, Homo sapien
tgagatggccttgacaggactcttc

SEQ ID NO: 4910680 - DNA, 25 bp, Homo sapien
cacgtagcatccaataggtagggca

SEQ ID NO: 4910681 - DNA, 25 bp, Homo sapien
ccagttgagggtagagctgtcagac

SEQ ID NO: 4910682 - DNA, 25 bp, Homo sapien
taatttgggctaaagatgatccagt

SEQ ID NO: 4910683 - DNA, 25 bp, Homo sapien
ggcaaaagactgttctagtagacat

SEQ ID NO: 4910684 - DNA, 25 bp, Homo sapien
tccaagaatccagaacaggtggtga

SEQ ID NO: 4910685 - DNA, 25 bp, Homo sapien
tagagctcagacttgcgtaggccaa

SEQ ID NO: 4910686 - DNA, 25 bp, Homo sapien
tacaaaagcaatggaactgggagca

SEQ ID NO: 4910687 - DNA, 25 bp, Homo sapien
cattcccgggatccagttgtcagcc

SEQ ID NO: 4910688 - DNA, 25 bp, Homo sapien
catgcgggttcagacctagagctca

SEQ ID NO: 4910689 - DNA, 25 bp, Homo sapien
gaggcgctcggacccgtctggccgg

SEQ ID NO: 4910690 - DNA, 25 bp, Homo sapien
tggccggcattaccgttcccagtct

SEQ ID NO: 4910691 - DNA, 25 bp, Homo sapien
atccatccgctcacccgctcattca

SEQ ID NO: 4910692 - DNA, 25 bp, Homo sapien
gcagccgcgcggagctcctgcggtg

SEQ ID NO: 4910693 - DNA, 25 bp, Homo sapien
gcggcggcgacatcgcgtccccgct

SEQ ID NO: 4910694 - DNA, 25 bp, Homo sapien
ggcggcgacatcgcgtccccgctcc

SEQ ID NO: 4910695 - DNA, 25 bp, Homo sapien
ggcggcggcgacatcgcgtccccgc

SEQ ID NO: 4910696 - DNA, 25 bp, Homo sapien
cggcggcgacatcgcgtccccgctc

SEQ ID NO: 4910697 - DNA, 25 bp, Homo sapien
ccgggtccagctctcgtagtagcgg

SEQ ID NO: 4910698 - DNA, 25 bp, Homo sapien
gccaggtggattctgtctcccgggt

SEQ ID NO: 4910699 - DNA, 25 bp, Homo sapien
ggctcgatggcatccgcccggctcc

SEQ ID NO: 4910700 - DNA, 25 bp, Homo sapien
cgtccgagtcggtgtaggtgagcca

SEQ ID NO: 4910701 - DNA, 25 bp, Homo sapien
gccaagaggaccctgatacttttag

SEQ ID NO: 4910702 - DNA, 25 bp, Homo sapien
tgccaagaggaccctgatactttta

SEQ ID NO: 4910703 - DNA, 25 bp, Homo sapien
caagaggaccctgatacttttaggg

SEQ ID NO: 4910704 - DNA, 25 bp, Homo sapien
aagaagtgaccactctgctggcagc

SEQ ID NO: 4910705 - DNA, 25 bp, Homo sapien
gttcctggaaatcttctctcctctc

SEQ ID NO: 4910706 - DNA, 25 bp, Homo sapien
cccttcttgttcctggaaatcttct

SEQ ID NO: 4910707 - DNA, 25 bp, Homo sapien
ccttcttgttcctggaaatcttctc

SEQ ID NO: 4910708 - DNA, 25 bp, Homo sapien
cttgttcctggaaatcttctctcct

SEQ ID NO: 4910709 - DNA, 25 bp, Homo sapien
tgcttccattgtaaccgctgccatg

SEQ ID NO: 4910710 - DNA, 25 bp, Homo sapien
caaacatgccagttgtttattgagg

SEQ ID NO: 4910711 - DNA, 25 bp, Homo sapien
ggtgcttaagcctgaatcattcctc

SEQ ID NO: 4910712 - DNA, 25 bp, Homo sapien
ggtgcacaggcggtctctgcttcca

SEQ ID NO: 4910713 - DNA, 25 bp, Homo sapien
tctggatcgtctatgggtgaaggcc

SEQ ID NO: 4910714 - DNA, 25 bp, Homo sapien
aatgtgacagtcagcaaattcctgg

SEQ ID NO: 4910715 - DNA, 25 bp, Homo sapien
caaggaccgtgacgaattttgcact

SEQ ID NO: 4910716 - DNA, 25 bp, Homo sapien
gactacaagtctgtgggcaaggacc

SEQ ID NO: 4910717 - DNA, 25 bp, Homo sapien
acttgctgaattaatttaacagtgc

SEQ ID NO: 4910718 - DNA, 25 bp, Homo sapien
taaaaagttagcaccttgatcagcg

SEQ ID NO: 4910719 - DNA, 25 bp, Homo sapien
tgtatgcgtgagagagcctttcttg

SEQ ID NO: 4910720 - DNA, 25 bp, Homo sapien
gcctagcacatcataagtgccagta

SEQ ID NO: 4910721 - DNA, 25 bp, Homo sapien
ctgtaactgccacaacatgtgaggt

SEQ ID NO: 4910722 - DNA, 25 bp, Homo sapien
tccctggtgagtcacgaggaacgag

SEQ ID NO: 4910723 - DNA, 25 bp, Homo sapien
aaatatcttggaagcagctcctgtg

SEQ ID NO: 4910724 - DNA, 25 bp, Homo sapien
caagggcttgaaggatgctaaagtt

SEQ ID NO: 4910725 - DNA, 25 bp, Homo sapien
tgtctctccaggcaagtgcaaaggc

SEQ ID NO: 4910726 - DNA, 25 bp, Homo sapien
tgctagcaattccacggcagtcata

SEQ ID NO: 4910727 - DNA, 25 bp, Homo sapien
agtcatactgaagcctgagtgtcca

SEQ ID NO: 4910728 - DNA, 25 bp, Homo sapien
ttgttggaaaagaactgaccactgc

SEQ ID NO: 4910729 - DNA, 25 bp, Homo sapien
tgaccactgctagcaattccacggc

SEQ ID NO: 4910730 - DNA, 25 bp, Homo sapien
cctggtcgttagcagctgaacagtc

SEQ ID NO: 4910731 - DNA, 25 bp, Homo sapien
tgcatcctggtcgttagcagctgaa

SEQ ID NO: 4910732 - DNA, 25 bp, Homo sapien
aatcaacagaataaacgacagctct

SEQ ID NO: 4910733 - DNA, 25 bp, Homo sapien
tctgcggtttagtccacatggttct

SEQ ID NO: 4910734 - DNA, 25 bp, Homo sapien
tttgggagactttgcaaaagggcta

SEQ ID NO: 4910735 - DNA, 25 bp, Homo sapien
ctttgggagactttgcaaaagggct

SEQ ID NO: 4910736 - DNA, 25 bp, Homo sapien
tgggagactttgcaaaagggctaag

SEQ ID NO: 4910737 - DNA, 25 bp, Homo sapien
gagactttgcaaaagggctaaggtc

SEQ ID NO: 4910738 - DNA, 25 bp, Homo sapien
ctgcatctggtccaaacacctctgt

SEQ ID NO: 4910739 - DNA, 25 bp, Homo sapien
atctggtccaaacacctctgtctgg

SEQ ID NO: 4910740 - DNA, 25 bp, Homo sapien
catctggtccaaacacctctgtctg

SEQ ID NO: 4910741 - DNA, 25 bp, Homo sapien
gcatctggtccaaacacctctgtct

SEQ ID NO: 4910742 - DNA, 25 bp, Homo sapien
ctggggactcacagaggcataaact

SEQ ID NO: 4910743 - DNA, 25 bp, Homo sapien
gctctggggactcacagaggcataa

SEQ ID NO: 4910744 - DNA, 25 bp, Homo sapien
gggactcacagaggcataaactgcc

SEQ ID NO: 4910745 - DNA, 25 bp, Homo sapien
gactcacagaggcataaactgccat

SEQ ID NO: 4910746 - DNA, 25 bp, Homo sapien
tttgccgactctctatacacgccag

SEQ ID NO: 4910747 - DNA, 25 bp, Homo sapien
ccattcgttcatctcaactgggatt

SEQ ID NO: 4910748 - DNA, 25 bp, Homo sapien
gactctctatacacgccagcaattt

SEQ ID NO: 4910749 - DNA, 25 bp, Homo sapien
caactgggatttgccgactctctat

SEQ ID NO: 4910750 - DNA, 25 bp, Homo sapien
cagaagttctgcttggtttggcacg

SEQ ID NO: 4910751 - DNA, 25 bp, Homo sapien
tcatccgtaaagtccgtaacctgct

SEQ ID NO: 4910752 - DNA, 25 bp, Homo sapien
taacctgcttgtgtgatctgacccc

SEQ ID NO: 4910753 - DNA, 25 bp, Homo sapien
gatctgaccccactctaaatgcatg

SEQ ID NO: 4910754 - DNA, 25 bp, Homo sapien
cagagtcatatagggctttccttcc

SEQ ID NO: 4910755 - DNA, 25 bp, Homo sapien
catgtagaccagagtcatatagggc

SEQ ID NO: 4910756 - DNA, 25 bp, Homo sapien
gtgagggttcatgtagaccagagtc

SEQ ID NO: 4910757 - DNA, 25 bp, Homo sapien
cctcttgccacagatggctacttcg

SEQ ID NO: 4910758 - DNA, 25 bp, Homo sapien
cttcttctggcctgatgggcttatg

SEQ ID NO: 4910759 - DNA, 25 bp, Homo sapien
cctgcaaggctctttgtgagctctc

SEQ ID NO: 4910760 - DNA, 25 bp, Homo sapien
ctgcaaggctctttgtgagctctcc

SEQ ID NO: 4910761 - DNA, 25 bp, Homo sapien
gggcttatgcacttctctctgtcct

SEQ ID NO: 4910762 - DNA, 25 bp, Homo sapien
cccatgtcagggatacagccagctg

SEQ ID NO: 4910763 - DNA, 25 bp, Homo sapien
agccagctggtgttggtcaatctct

SEQ ID NO: 4910764 - DNA, 25 bp, Homo sapien
tcagaagccaccacgaggctcattt

SEQ ID NO: 4910765 - DNA, 25 bp, Homo sapien
gaggctcattttctgcactcagcag

SEQ ID NO: 4910766 - DNA, 25 bp, Homo sapien
tcaatggttgggatgcccaactttc

SEQ ID NO: 4910767 - DNA, 25 bp, Homo sapien
gttgggatgcccaactttctgtagg

SEQ ID NO: 4910768 - DNA, 25 bp, Homo sapien
gtagggcagtcagatggtaatgttc

SEQ ID NO: 4910769 - DNA, 25 bp, Homo sapien
ctttctgtagggcagtcagatggta

SEQ ID NO: 4910770 - DNA, 25 bp, Homo sapien
acagcaagaggtgccatctttgaag

SEQ ID NO: 4910771 - DNA, 25 bp, Homo sapien
cagcaagaggtgccatctttgaagc

SEQ ID NO: 4910772 - DNA, 25 bp, Homo sapien
aagagcaccacagagcagattcttc

SEQ ID NO: 4910773 - DNA, 25 bp, Homo sapien
tcagaggtgcctcccttccttgaaa

SEQ ID NO: 4910774 - DNA, 25 bp, Homo sapien
gattcttcaaggcaggtactgccat

SEQ ID NO: 4910775 - DNA, 25 bp, Homo sapien
tccttgaaacttcttcacctttgct

SEQ ID NO: 4910776 - DNA, 25 bp, Homo sapien
cactggtggccaaacaaaaattaca

SEQ ID NO: 4910777 - DNA, 25 bp, Homo sapien
gcctaagcgctgctagaaacacagt

SEQ ID NO: 4910778 - DNA, 25 bp, Homo sapien
cataactgaggtgccgatggccagt

SEQ ID NO: 4910779 - DNA, 25 bp, Homo sapien
tggagataatactgccaccttcatg

SEQ ID NO: 4910780 - DNA, 25 bp, Homo sapien
agtcacagtggaaagtatctggtcc

SEQ ID NO: 4910781 - DNA, 25 bp, Homo sapien
cagtggaaagtatctggtccagagc

SEQ ID NO: 4910782 - DNA, 25 bp, Homo sapien
gctaatgagctttcaactgtgacca

SEQ ID NO: 4910783 - DNA, 25 bp, Homo sapien
ctgtgaccatgggatagaaatcaga

SEQ ID NO: 4910784 - DNA, 25 bp, Homo sapien
ctcacagttcgtcttcttctctggg

SEQ ID NO: 4910785 - DNA, 25 bp, Homo sapien
ggcacaccattggagggcagtccat

SEQ ID NO: 4910786 - DNA, 25 bp, Homo sapien
gatttgggcactgggtctcacagtt

SEQ ID NO: 4910787 - DNA, 25 bp, Homo sapien
ggtctgaaggccattctgtttctgg

SEQ ID NO: 4910788 - DNA, 25 bp, Homo sapien
ccacctggttggagggcctgagtaa

SEQ ID NO: 4910789 - DNA, 25 bp, Homo sapien
ttctgctatgagagccacccttggg

SEQ ID NO: 4910790 - DNA, 25 bp, Homo sapien
tgagtaaaatgcgaggcttgtttcc

SEQ ID NO: 4910791 - DNA, 25 bp, Homo sapien
gaggcttgtttccaaccactctggt

SEQ ID NO: 4910792 - DNA, 25 bp, Homo sapien
ccctcctgtacccataagaggatct

SEQ ID NO: 4910793 - DNA, 25 bp, Homo sapien
tacccataagaggatcttcccaaca

SEQ ID NO: 4910794 - DNA, 25 bp, Homo sapien
taagaggatcttcccaacaatagct

SEQ ID NO: 4910795 - DNA, 25 bp, Homo sapien
tcctgtacccataagaggatcttcc

SEQ ID NO: 4910796 - DNA, 25 bp, Homo sapien
gtccagactgtcttgagagatggca

SEQ ID NO: 4910797 - DNA, 25 bp, Homo sapien
tagaagacaaatatctgggcctgtg

SEQ ID NO: 4910798 - DNA, 25 bp, Homo sapien
gatgattaggtctctagaaggccac

SEQ ID NO: 4910799 - DNA, 25 bp, Homo sapien
tagagcagtcatcaagcttttgaac

SEQ ID NO: 4910800 - DNA, 25 bp, Homo sapien
tttaaagtgatggatgggggggcag

SEQ ID NO: 4910801 - DNA, 25 bp, Homo sapien
ccttgccaatgatgttgaccagaca

SEQ ID NO: 4910802 - DNA, 25 bp, Homo sapien
ggccttgccaatgatgttgaccaga

SEQ ID NO: 4910803 - DNA, 25 bp, Homo sapien
gccttgccaatgatgttgaccagac

SEQ ID NO: 4910804 - DNA, 25 bp, Homo sapien
caaccacagaacagtcatcacagga

SEQ ID NO: 4910805 - DNA, 25 bp, Homo sapien
gtcatcacaggatagtggtgcagag

SEQ ID NO: 4910806 - DNA, 25 bp, Homo sapien
aacagtcatcacaggatagtggtgc

SEQ ID NO: 4910807 - DNA, 25 bp, Homo sapien
cacagaacagtcatcacaggatagt

SEQ ID NO: 4910808 - DNA, 25 bp, Homo sapien
ctgggagtttgtatcgagtgccaaa

SEQ ID NO: 4910809 - DNA, 25 bp, Homo sapien
gatagaagatcagacattaggaagg

SEQ ID NO: 4910810 - DNA, 25 bp, Homo sapien
tcgagtgccaaaaggagttgttgct

SEQ ID NO: 4910811 - DNA, 25 bp, Homo sapien
tcagatagaagatcagacattagga

SEQ ID NO: 4910812 - DNA, 25 bp, Homo sapien
cctctgatgtagtttccagccagcc

SEQ ID NO: 4910813 - DNA, 25 bp, Homo sapien
tctgtccatctgttggatgctatct

SEQ ID NO: 4910814 - DNA, 25 bp, Homo sapien
tagttgacacagttctttgtgattc

SEQ ID NO: 4910815 - DNA, 25 bp, Homo sapien
tatctgttacattaatggtgacttc

SEQ ID NO: 4910816 - DNA, 25 bp, Homo sapien
tgtgattcttcgacttctgtccatc

SEQ ID NO: 4910817 - DNA, 25 bp, Homo sapien
cagtagaattcaggtccagcaaggg

SEQ ID NO: 4910818 - DNA, 25 bp, Homo sapien
gaaggtcccaacaaatcaggcagca

SEQ ID NO: 4910819 - DNA, 25 bp, Homo sapien
gacactgaagaagtccatctgccct

SEQ ID NO: 4910820 - DNA, 25 bp, Homo sapien
gacagtcttgccagggactcagtag

SEQ ID NO: 4910821 - DNA, 25 bp, Homo sapien
gatctgtctcataccaagctaagga

SEQ ID NO: 4910822 - DNA, 25 bp, Homo sapien
aaaattgcaatgtctagctgagccc

SEQ ID NO: 4910823 - DNA, 25 bp, Homo sapien
gaatacactatcatgggcaggagag

SEQ ID NO: 4910824 - DNA, 25 bp, Homo sapien
ttaaggactggaggccaacatggac

SEQ ID NO: 4910825 - DNA, 25 bp, Homo sapien
gcgtatctgacttttgacctgcatg

SEQ ID NO: 4910826 - DNA, 25 bp, Homo sapien
tgctgtctccgtgaaatccagattg

SEQ ID NO: 4910827 - DNA, 25 bp, Homo sapien
tagattcaggatagatagtcacgac

SEQ ID NO: 4910828 - DNA, 25 bp, Homo sapien
ggaaaaatgacactacccacttgtg

SEQ ID NO: 4910829 - DNA, 25 bp, Homo sapien
acaaatcacatctttacatccaaag

SEQ ID NO: 4910830 - DNA, 25 bp, Homo sapien
tcacatctttacatccaaagtcatg

SEQ ID NO: 4910831 - DNA, 25 bp, Homo sapien
ctaacaaatcacatctttacatcca

SEQ ID NO: 4910832 - DNA, 25 bp, Homo sapien
acatctttacatccaaagtcatgtc

SEQ ID NO: 4910833 - DNA, 25 bp, Homo sapien
ccggtttatctcaagcattggagca

SEQ ID NO: 4910834 - DNA, 25 bp, Homo sapien
ctttgcgtttatattgcaagaaccc

SEQ ID NO: 4910835 - DNA, 25 bp, Homo sapien
tttgcgtttatattgcaagaaccct

SEQ ID NO: 4910836 - DNA, 25 bp, Homo sapien
gtttctttgcgtttatattgcaaga

SEQ ID NO: 4910837 - DNA, 25 bp, Homo sapien
ttctttgcgtttatattgcaagaac

SEQ ID NO: 4910838 - DNA, 25 bp, Homo sapien
cagagctgccatgttcagggaactg

SEQ ID NO: 4910839 - DNA, 25 bp, Homo sapien
atgaactctggtacagctccacaga

SEQ ID NO: 4910840 - DNA, 25 bp, Homo sapien
ctcccacgaatgaactctggtacag

SEQ ID NO: 4910841 - DNA, 25 bp, Homo sapien
ccacagagctgccatgttcagggaa

SEQ ID NO: 4910842 - DNA, 25 bp, Homo sapien
tcactctgcagggtattcttctggt

SEQ ID NO: 4910843 - DNA, 25 bp, Homo sapien
ctctgcagggtattcttctggttgc

SEQ ID NO: 4910844 - DNA, 25 bp, Homo sapien
ttctttccattgagctcactctgca

SEQ ID NO: 4910845 - DNA, 25 bp, Homo sapien
ttaacaaacccaagtccacaatggc

SEQ ID NO: 4910846 - DNA, 25 bp, Homo sapien
gctctaaaagaacccacttccttgc

SEQ ID NO: 4910847 - DNA, 25 bp, Homo sapien
gtcaagaatccttaaacggagccaa

SEQ ID NO: 4910848 - DNA, 25 bp, Homo sapien
tcttggcgctggctctaaaagaacc

SEQ ID NO: 4910849 - DNA, 25 bp, Homo sapien
cggagccaatttgctttgtaaagcc

SEQ ID NO: 4910850 - DNA, 25 bp, Homo sapien
gggcaggtccgggctcgcggcggcg

SEQ ID NO: 4910851 - DNA, 25 bp, Homo sapien
tgcgccgccaggtcgggcgggcagg

SEQ ID NO: 4910852 - DNA, 25 bp, Homo sapien
gtcgggcgggcaggtccgggctcgc

SEQ ID NO: 4910853 - DNA, 25 bp, Homo sapien
gcgccgccaggtcgggcgggcaggt

SEQ ID NO: 4910854 - DNA, 25 bp, Homo sapien
tggagctgcctcgagagccgcacgg

SEQ ID NO: 4910855 - DNA, 25 bp, Homo sapien
ctcggggggcggtcgaaggccgctg

SEQ ID NO: 4910856 - DNA, 25 bp, Homo sapien
cccagggacctgagacggctccggg

SEQ ID NO: 4910857 - DNA, 25 bp, Homo sapien
ggttgcgtccgggactggagctgcc

SEQ ID NO: 4910858 - DNA, 25 bp, Homo sapien
tgcatcctcagaagatccccatcca

SEQ ID NO: 4910859 - DNA, 25 bp, Homo sapien
ggatgaatcactctttgcatcctca

SEQ ID NO: 4910860 - DNA, 25 bp, Homo sapien
tcctcagaagatccccatccaaaga

SEQ ID NO: 4910861 - DNA, 25 bp, Homo sapien
ctgaaaatgagtcctgggtcaatta

SEQ ID NO: 4910862 - DNA, 25 bp, Homo sapien
agaaaaatacacgtcaacaaaaatg

SEQ ID NO: 4910863 - DNA, 25 bp, Homo sapien
tgtgccctcttaggaggggtagaaa

SEQ ID NO: 4910864 - DNA, 25 bp, Homo sapien
gaacagtaattggttcacaggtgaa

SEQ ID NO: 4910865 - DNA, 25 bp, Homo sapien
agactgtgccctcttaggaggggta

SEQ ID NO: 4910866 - DNA, 25 bp, Homo sapien
cccatcagattagggaaaaacgtca

SEQ ID NO: 4910867 - DNA, 25 bp, Homo sapien
tttccaccgcggcaatactctggtc

SEQ ID NO: 4910868 - DNA, 25 bp, Homo sapien
gcaatactctggtcataatgaccca

SEQ ID NO: 4910869 - DNA, 25 bp, Homo sapien
taatgacccatcagattagggaaaa

SEQ ID NO: 4910870 - DNA, 25 bp, Homo sapien
caatgcatgtgtctagtttccttca

SEQ ID NO: 4910871 - DNA, 25 bp, Homo sapien
tgaggcagtcagacaactattcaac

SEQ ID NO: 4910872 - DNA, 25 bp, Homo sapien
taacaaatctgtatgggaaggcagg

SEQ ID NO: 4910873 - DNA, 25 bp, Homo sapien
gctttcctattccagacatgagtcc

SEQ ID NO: 4910874 - DNA, 25 bp, Homo sapien
tgcagaacaaagctagttgctacca

SEQ ID NO: 4910875 - DNA, 25 bp, Homo sapien
gatgcatctctcttgagtctaggtg

SEQ ID NO: 4910876 - DNA, 25 bp, Homo sapien
gttgctaccatcttataattacagg

SEQ ID NO: 4910877 - DNA, 25 bp, Homo sapien
caaacttaaaatggtcagccaggtg

SEQ ID NO: 4910878 - DNA, 25 bp, Homo sapien
gcttgaattctagcccacctggcga

SEQ ID NO: 4910879 - DNA, 25 bp, Homo sapien
ttataactccattcagaggtggccc

SEQ ID NO: 4910880 - DNA, 25 bp, Homo sapien
caagtagaccatacctgtgccagca

SEQ ID NO: 4910881 - DNA, 25 bp, Homo sapien
ccagtataggcttaacaggctcagg

SEQ ID NO: 4910882 - DNA, 25 bp, Homo sapien
ggagtgcaaacagcacagtactttt

SEQ ID NO: 4910883 - DNA, 25 bp, Homo sapien
cagcacagtacttttctcagtttcc

SEQ ID NO: 4910884 - DNA, 25 bp, Homo sapien
ttggagtgcaaacagcacagtactt

SEQ ID NO: 4910885 - DNA, 25 bp, Homo sapien
caaacagcacagtacttttctcagt

SEQ ID NO: 4910886 - DNA, 25 bp, Homo sapien
tacttcccacacttgctaatcttac

SEQ ID NO: 4910887 - DNA, 25 bp, Homo sapien
caggctggtcttacaacttattctt

SEQ ID NO: 4910888 - DNA, 25 bp, Homo sapien
ctttcacctcaactactaaaatggc

SEQ ID NO: 4910889 - DNA, 25 bp, Homo sapien
cacccagtctaagccactattatct

SEQ ID NO: 4910890 - DNA, 25 bp, Homo sapien
tctatgcaggttggtacaaatgctt

SEQ ID NO: 4910891 - DNA, 25 bp, Homo sapien
gtttacgacaaggtggaaccacatg

SEQ ID NO: 4910892 - DNA, 25 bp, Homo sapien
accacatgaatttgttctatgcagg

SEQ ID NO: 4910893 - DNA, 25 bp, Homo sapien
tcaggccatcggatcccaaaagtgt

SEQ ID NO: 4910894 - DNA, 25 bp, Homo sapien
cagcattttgatcttaacgcagtag

SEQ ID NO: 4910895 - DNA, 25 bp, Homo sapien
taaaatctgtcatagcatagtggct

SEQ ID NO: 4910896 - DNA, 25 bp, Homo sapien
caaggcagctatacctttgaggaga

SEQ ID NO: 4910897 - DNA, 25 bp, Homo sapien
catagtggctgagatatggaaaggc

SEQ ID NO: 4910898 - DNA, 25 bp, Homo sapien
caaaagttacaggaacagtctcatc

SEQ ID NO: 4910899 - DNA, 25 bp, Homo sapien
tgtgtgtggatcaaaagttacagga

SEQ ID NO: 4910900 - DNA, 25 bp, Homo sapien
agttacaggaacagtctcatcacag

SEQ ID NO: 4910901 - DNA, 25 bp, Homo sapien
aattctgtgtgtggatcaaaagtta

SEQ ID NO: 4910902 - DNA, 25 bp, Homo sapien
catggaggcgcacactggtcaattc

SEQ ID NO: 4910903 - DNA, 25 bp, Homo sapien
gggtatctgaatcttctaacatcaa

SEQ ID NO: 4910904 - DNA, 25 bp, Homo sapien
gaagtcttaagatgccttggacacc

SEQ ID NO: 4910905 - DNA, 25 bp, Homo sapien
tataattggtctctctgggtatctg

SEQ ID NO: 4910906 - DNA, 25 bp, Homo sapien
gtaagaatcacccaccacacagtgc

SEQ ID NO: 4910907 - DNA, 25 bp, Homo sapien
ccttattttgagagcctaggacaac

SEQ ID NO: 4910908 - DNA, 25 bp, Homo sapien
tattgcaggctgtgctatcgcctag

SEQ ID NO: 4910909 - DNA, 25 bp, Homo sapien
gcatgaacaaaacggtgcaagcctt

SEQ ID NO: 4910910 - DNA, 25 bp, Homo sapien
taatggcacaagatacaagccgctg

SEQ ID NO: 4910911 - DNA, 25 bp, Homo sapien
gaaacctggtgttccccatgcaaca

SEQ ID NO: 4910912 - DNA, 25 bp, Homo sapien
gacgacaatgatcagagacccaagt

SEQ ID NO: 4910913 - DNA, 25 bp, Homo sapien
caaagtagcgagaagcatccaggtc

SEQ ID NO: 4910914 - DNA, 25 bp, Homo sapien
acataatccaagtgatagcttttac

SEQ ID NO: 4910915 - DNA, 25 bp, Homo sapien
tagagacataatccaagtgatagct

SEQ ID NO: 4910916 - DNA, 25 bp, Homo sapien
aaatagagacataatccaagtgata

SEQ ID NO: 4910917 - DNA, 25 bp, Homo sapien
ttaaatgtaaatagagacataatcc

SEQ ID NO: 4910918 - DNA, 25 bp, Homo sapien
atccatgacaagtatatttccatga

SEQ ID NO: 4910919 - DNA, 25 bp, Homo sapien
gatgagtcaggcaaaaagcaaattc

SEQ ID NO: 4910920 - DNA, 25 bp, Homo sapien
ggaaatccttacctatggctcttgt

SEQ ID NO: 4910921 - DNA, 25 bp, Homo sapien
tgccaatgcgacaaaagtgacttct

SEQ ID NO: 4910922 - DNA, 25 bp, Homo sapien
ccaatgtcaaggtctgttcttctga

SEQ ID NO: 4910923 - DNA, 25 bp, Homo sapien
taaaactagtatccccacataccaa

SEQ ID NO: 4910924 - DNA, 25 bp, Homo sapien
tatggacaacgtataaggcaagtaa

SEQ ID NO: 4910925 - DNA, 25 bp, Homo sapien
tcttaaacttgaaaaccatagatct

SEQ ID NO: 4910926 - DNA, 25 bp, Homo sapien
aagacacagcctcttattaagtata

SEQ ID NO: 4910927 - DNA, 25 bp, Homo sapien
caacagaaggttgaactaactctta

SEQ ID NO: 4910928 - DNA, 25 bp, Homo sapien
taccgcgaaattgcttcaacagaag

SEQ ID NO: 4910929 - DNA, 25 bp, Homo sapien
gaagggcagtatcagtgtacacaca

SEQ ID NO: 4910930 - DNA, 25 bp, Homo sapien
gctgttgcattgtgtgagtgaacca

SEQ ID NO: 4910931 - DNA, 25 bp, Homo sapien
ataaagccaattctggtcgagcttt

SEQ ID NO: 4910932 - DNA, 25 bp, Homo sapien
aagccaattctggtcgagcttttgc

SEQ ID NO: 4910933 - DNA, 25 bp, Homo sapien
ccaattctggtcgagcttttgcttt

SEQ ID NO: 4910934 - DNA, 25 bp, Homo sapien
gccaattctggtcgagcttttgctt

SEQ ID NO: 4910935 - DNA, 25 bp, Homo sapien
taaactggcaagaaattaaggcaag

SEQ ID NO: 4910936 - DNA, 25 bp, Homo sapien
tgagggcaaggaggctcaaaacagc

SEQ ID NO: 4910937 - DNA, 25 bp, Homo sapien
cgttaaaaattagcaagttacactg

SEQ ID NO: 4910938 - DNA, 25 bp, Homo sapien
ttaaggcaagaatcaaaggatgagg

SEQ ID NO: 4910939 - DNA, 25 bp, Homo sapien
tactcttcgactttcactgattgga

SEQ ID NO: 4910940 - DNA, 25 bp, Homo sapien
tgtagtactcttcgactttcactga

SEQ ID NO: 4910941 - DNA, 25 bp, Homo sapien
ttcctgtagtactcttcgactttca

SEQ ID NO: 4910942 - DNA, 25 bp, Homo sapien
agtactcttcgactttcactgattg

SEQ ID NO: 4910943 - DNA, 25 bp, Homo sapien
ctactgcagaagtgccatgatttgc

SEQ ID NO: 4910944 - DNA, 25 bp, Homo sapien
ggttcccatggatttggaaatgacc

SEQ ID NO: 4910945 - DNA, 25 bp, Homo sapien
caaagtttcttgtcctaggtaatca

SEQ ID NO: 4910946 - DNA, 25 bp, Homo sapien
catggctagtaattgctactgcaga

SEQ ID NO: 4910947 - DNA, 25 bp, Homo sapien
cactttcagatacactgcctgcctg

SEQ ID NO: 4910948 - DNA, 25 bp, Homo sapien
gcgaggcaggttcaccacagtcctg

SEQ ID NO: 4910949 - DNA, 25 bp, Homo sapien
ttcccgtcgacctgttccccagaga

SEQ ID NO: 4910950 - DNA, 25 bp, Homo sapien
ttcactccgcgcactttcagataca

SEQ ID NO: 4910951 - DNA, 25 bp, Homo sapien
gatcagtaccatgtaagaaactggg

SEQ ID NO: 4910952 - DNA, 25 bp, Homo sapien
taagactttagctctcccattgaga

SEQ ID NO: 4910953 - DNA, 25 bp, Homo sapien
tgcatttagcctagtctgagaggac

SEQ ID NO: 4910954 - DNA, 25 bp, Homo sapien
tatatgaaagctgccataggatcac

SEQ ID NO: 4910955 - DNA, 25 bp, Homo sapien
acatccacaaacacaaatatgatgc

SEQ ID NO: 4910956 - DNA, 25 bp, Homo sapien
aaaaaagttgacacacacacatcca

SEQ ID NO: 4910957 - DNA, 25 bp, Homo sapien
atccacaaacacaaatatgatgcca

SEQ ID NO: 4910958 - DNA, 25 bp, Homo sapien
cacacatccacaaacacaaatatga

SEQ ID NO: 4910959 - DNA, 25 bp, Homo sapien
agagatgtggaacctttgaggctgc

SEQ ID NO: 4910960 - DNA, 25 bp, Homo sapien
cctgcaaattgttgctctgtgccag

SEQ ID NO: 4910961 - DNA, 25 bp, Homo sapien
gaaaccgggtgaacaagcagagatg

SEQ ID NO: 4910962 - DNA, 25 bp, Homo sapien
gaacctttgaggctgcttggttctg

SEQ ID NO: 4910963 - DNA, 25 bp, Homo sapien
caagtatctgaatgacaaccacctc

SEQ ID NO: 4910964 - DNA, 25 bp, Homo sapien
agtatctgaatgacaaccacctccc

SEQ ID NO: 4910965 - DNA, 25 bp, Homo sapien
tcaagtatctgaatgacaaccacct

SEQ ID NO: 4910966 - DNA, 25 bp, Homo sapien
aagtatctgaatgacaaccacctcc

SEQ ID NO: 4910967 - DNA, 25 bp, Homo sapien
cacaaatttgcttctgagtaacgag

SEQ ID NO: 4910968 - DNA, 25 bp, Homo sapien
caaaacagtgcataggtcacttcca

SEQ ID NO: 4910969 - DNA, 25 bp, Homo sapien
tcctagtgagctgccgaaatgaatt

SEQ ID NO: 4910970 - DNA, 25 bp, Homo sapien
tcagtgtaaaagctaccaaagtgct

SEQ ID NO: 4910971 - DNA, 25 bp, Homo sapien
tgtggtaagtttctgagaagatcaa

SEQ ID NO: 4910972 - DNA, 25 bp, Homo sapien
tggtaagtttctgagaagatcaaag

SEQ ID NO: 4910973 - DNA, 25 bp, Homo sapien
ctgtggtaagtttctgagaagatca

SEQ ID NO: 4910974 - DNA, 25 bp, Homo sapien
gtggtaagtttctgagaagatcaaa

SEQ ID NO: 4910975 - DNA, 25 bp, Homo sapien
ctccctgcctcgtcccacattcagc

SEQ ID NO: 4910976 - DNA, 25 bp, Homo sapien
tccctgcctcgtcccacattcagcc

SEQ ID NO: 4910977 - DNA, 25 bp, Homo sapien
cctgcctcgtcccacattcagccct

SEQ ID NO: 4910978 - DNA, 25 bp, Homo sapien
agaggtggccgcctctggtcctctc

SEQ ID NO: 4910979 - DNA, 25 bp, Homo sapien
gcttggctgaccaaagccatcttga

SEQ ID NO: 4910980 - DNA, 25 bp, Homo sapien
tcaacagatatgctggtttccaagt

SEQ ID NO: 4910981 - DNA, 25 bp, Homo sapien
catgtctgcataccagcagtcaggc

SEQ ID NO: 4910982 - DNA, 25 bp, Homo sapien
caagttgcctatccaaagtaagggt

SEQ ID NO: 4910983 - DNA, 25 bp, Homo sapien
gacagcctgctgcaaagatattttc

SEQ ID NO: 4910984 - DNA, 25 bp, Homo sapien
aatccaaatcacacgacagcctgct

SEQ ID NO: 4910985 - DNA, 25 bp, Homo sapien
tctgagatttttggacttcgcatct

SEQ ID NO: 4910986 - DNA, 25 bp, Homo sapien
tcgcatctgaagcaataatccaaat

SEQ ID NO: 4910987 - DNA, 25 bp, Homo sapien
tcacctacaactttctttctcctta

SEQ ID NO: 4910988 - DNA, 25 bp, Homo sapien
ctttctttctccttacaacttgtca

SEQ ID NO: 4910989 - DNA, 25 bp, Homo sapien
tttctttctccttacaacttgtcac

SEQ ID NO: 4910990 - DNA, 25 bp, Homo sapien
caactttctttctccttacaacttg

SEQ ID NO: 4910991 - DNA, 25 bp, Homo sapien
catggctctgggtaatcttttgaac

SEQ ID NO: 4910992 - DNA, 25 bp, Homo sapien
gaacaaaggcttactggaattgcca

SEQ ID NO: 4910993 - DNA, 25 bp, Homo sapien
tagtacagtgttgattaaggtcccc

SEQ ID NO: 4910994 - DNA, 25 bp, Homo sapien
tgtaaaaatcgctttggctgtggca

SEQ ID NO: 4910995 - DNA, 25 bp, Homo sapien
cccaggaatcccctccatagcgtct

SEQ ID NO: 4910996 - DNA, 25 bp, Homo sapien
atagcgtctgtgtctctccacccat

SEQ ID NO: 4910997 - DNA, 25 bp, Homo sapien
gaatcccctccatagcgtctgtgtc

SEQ ID NO: 4910998 - DNA, 25 bp, Homo sapien
caggaatcccctccatagcgtctgt

SEQ ID NO: 4910999 - DNA, 25 bp, Homo sapien
gccatcactgtacgtaacactcact

SEQ ID NO: 4911000 - DNA, 25 bp, Homo sapien
agggtgattaactgaccccgccaat

SEQ ID NO: 4911001 - DNA, 25 bp, Homo sapien
tctccttctgaatgccgattgtaac

SEQ ID NO: 4911002 - DNA, 25 bp, Homo sapien
actgaccccgccaatgatagtaggg

SEQ ID NO: 4911003 - DNA, 25 bp, Homo sapien
tggaaactgcccacgatctgaagtc

SEQ ID NO: 4911004 - DNA, 25 bp, Homo sapien
tgttgatggccatagagtgccctgc

SEQ ID NO: 4911005 - DNA, 25 bp, Homo sapien
ccacagtgctgtgtctgatcagtct

SEQ ID NO: 4911006 - DNA, 25 bp, Homo sapien
ctgtttcatcagtgctgcatgttga

SEQ ID NO: 4911007 - DNA, 25 bp, Homo sapien
gagaggaacgtggtcagcgtctggc

SEQ ID NO: 4911008 - DNA, 25 bp, Homo sapien
aggaacgtggtcagcgtctggctcc

SEQ ID NO: 4911009 - DNA, 25 bp, Homo sapien
atcaatgcgcctttcacccgcgcgc

SEQ ID NO: 4911010 - DNA, 25 bp, Homo sapien
aggctgcatcaatgcgcctttcacc

SEQ ID NO: 4911011 - DNA, 25 bp, Homo sapien
aggcggcggggccctggggtcgcat

SEQ ID NO: 4911012 - DNA, 25 bp, Homo sapien
ctgcggggaggcggcggggccctgg

SEQ ID NO: 4911013 - DNA, 25 bp, Homo sapien
cgctgcggggaggcggcggggccct

SEQ ID NO: 4911014 - DNA, 25 bp, Homo sapien
gaggcggcggggccctggggtcgca

SEQ ID NO: 4911015 - DNA, 25 bp, Homo sapien
gggatctcagaggcgctcgacggcg

SEQ ID NO: 4911016 - DNA, 25 bp, Homo sapien
atctcagaggcgctcgacggcgcgg

SEQ ID NO: 4911017 - DNA, 25 bp, Homo sapien
agaggcgctcgacggcgcgggcagc

SEQ ID NO: 4911018 - DNA, 25 bp, Homo sapien
tcagaggcgctcgacggcgcgggca

SEQ ID NO: 4911019 - DNA, 25 bp, Homo sapien
aggtccaccacctccctctgccgga

SEQ ID NO: 4911020 - DNA, 25 bp, Homo sapien
ggtccaccacctccctctgccggag

SEQ ID NO: 4911021 - DNA, 25 bp, Homo sapien
caggtccaccacctccctctgccgg

SEQ ID NO: 4911022 - DNA, 25 bp, Homo sapien
gccagactgacgccctgcccgtggg

SEQ ID NO: 4911023 - DNA, 25 bp, Homo sapien
cagccagactgacgccctgcccgtg

SEQ ID NO: 4911024 - DNA, 25 bp, Homo sapien
acagccagactgacgccctgcccgt

SEQ ID NO: 4911025 - DNA, 25 bp, Homo sapien
aacagccagactgacgccctgcccg

SEQ ID NO: 4911026 - DNA, 25 bp, Homo sapien
gacaccccggcgcagcaagacacac

SEQ ID NO: 4911027 - DNA, 25 bp, Homo sapien
aaaaagcatgacaccccggcgcagc

SEQ ID NO: 4911028 - DNA, 25 bp, Homo sapien
tgacaccccggcgcagcaagacaca

SEQ ID NO: 4911029 - DNA, 25 bp, Homo sapien
aataaaaagcatgacaccccggcgc

SEQ ID NO: 4911030 - DNA, 25 bp, Homo sapien
cacgcataaccaggtccttcttcac

SEQ ID NO: 4911031 - DNA, 25 bp, Homo sapien
tgcacgcataaccaggtccttcttc

SEQ ID NO: 4911032 - DNA, 25 bp, Homo sapien
gcacgcataaccaggtccttcttca

SEQ ID NO: 4911033 - DNA, 25 bp, Homo sapien
ctccacgatggcctcccattttggt

SEQ ID NO: 4911034 - DNA, 25 bp, Homo sapien
ccattttggtctcccctctgagttc

SEQ ID NO: 4911035 - DNA, 25 bp, Homo sapien
gggcccatatcgcatgtccgctcca

SEQ ID NO: 4911036 - DNA, 25 bp, Homo sapien
catatcgcatgtccgctccacgatg

SEQ ID NO: 4911037 - DNA, 25 bp, Homo sapien
acaggtccttagagggttagcgccg

SEQ ID NO: 4911038 - DNA, 25 bp, Homo sapien
caggtccttagagggttagcgccgg

SEQ ID NO: 4911039 - DNA, 25 bp, Homo sapien
aagacccagggtgtgtgtaatgaca

SEQ ID NO: 4911040 - DNA, 25 bp, Homo sapien
atgaagacccagggtgtgtgtaatg

SEQ ID NO: 4911041 - DNA, 25 bp, Homo sapien
gaagacccagggtgtgtgtaatgac

SEQ ID NO: 4911042 - DNA, 25 bp, Homo sapien
gacccagggtgtgtgtaatgacaga

SEQ ID NO: 4911043 - DNA, 25 bp, Homo sapien
ctcccgtagcttgactgtgatgctc

SEQ ID NO: 4911044 - DNA, 25 bp, Homo sapien
ccctggaaagcactcgggccgttca

SEQ ID NO: 4911045 - DNA, 25 bp, Homo sapien
cactcgggccgttcatttccagttt

SEQ ID NO: 4911046 - DNA, 25 bp, Homo sapien
ttctcccgtagcttgactgtgatgc

SEQ ID NO: 4911047 - DNA, 25 bp, Homo sapien
cctttgaatccatcccgacctggga

SEQ ID NO: 4911048 - DNA, 25 bp, Homo sapien
aggtgtacccggaatgccattggcc

SEQ ID NO: 4911049 - DNA, 25 bp, Homo sapien
cttgtagttgggtgtccaggactcc

SEQ ID NO: 4911050 - DNA, 25 bp, Homo sapien
tgaactccatgaacactgcttgtag

SEQ ID NO: 4911051 - DNA, 25 bp, Homo sapien
tacttgaggccaggggttagagaca

SEQ ID NO: 4911052 - DNA, 25 bp, Homo sapien
gcactttagcctgggcaaaaaagtg

SEQ ID NO: 4911053 - DNA, 25 bp, Homo sapien
cactttagcctgggcaaaaaagtga

SEQ ID NO: 4911054 - DNA, 25 bp, Homo sapien
ccaggggttagagacaagcctggcc

SEQ ID NO: 4911055 - DNA, 25 bp, Homo sapien
gtgaaataccaacgctgacagcatg

SEQ ID NO: 4911056 - DNA, 25 bp, Homo sapien
tgcattttagccgaagtgagccact

SEQ ID NO: 4911057 - DNA, 25 bp, Homo sapien
cttagagcactatttgaacgcatct

SEQ ID NO: 4911058 - DNA, 25 bp, Homo sapien
cttcaatgggaagaggtcctgaaca

SEQ ID NO: 4911059 - DNA, 25 bp, Homo sapien
atcttaaaatagaacaaacaggcca

SEQ ID NO: 4911060 - DNA, 25 bp, Homo sapien
gaatcttaaaatagaacaaacaggc

SEQ ID NO: 4911061 - DNA, 25 bp, Homo sapien
cttaaaatagaacaaacaggccagg

SEQ ID NO: 4911062 - DNA, 25 bp, Homo sapien
atgaatcttaaaatagaacaaacag

SEQ ID NO: 4911063 - DNA, 25 bp, Homo sapien
tcctgggcctaagggcttacattag

SEQ ID NO: 4911064 - DNA, 25 bp, Homo sapien
gactatttcttagatgggaagcact

SEQ ID NO: 4911065 - DNA, 25 bp, Homo sapien
tgaacgctgattctactgtcccgtg

SEQ ID NO: 4911066 - DNA, 25 bp, Homo sapien
tcaacgactgtctgaacatatcact

SEQ ID NO: 4911067 - DNA, 25 bp, Homo sapien
ctgcaagacaaagatgaaagttaca

SEQ ID NO: 4911068 - DNA, 25 bp, Homo sapien
tgcaagacaaagatgaaagttacat

SEQ ID NO: 4911069 - DNA, 25 bp, Homo sapien
gcaagacaaagatgaaagttacatc

SEQ ID NO: 4911070 - DNA, 25 bp, Homo sapien
tgaattccatccagtagaagcatct

SEQ ID NO: 4911071 - DNA, 25 bp, Homo sapien
gatagcaacatccactaatccagca

SEQ ID NO: 4911072 - DNA, 25 bp, Homo sapien
taatgatgcgagaaactgaattcca

SEQ ID NO: 4911073 - DNA, 25 bp, Homo sapien
gaacaagtaccaacccagatagcaa

SEQ ID NO: 4911074 - DNA, 25 bp, Homo sapien
tacaaattgtacaaagattggtagc

SEQ ID NO: 4911075 - DNA, 25 bp, Homo sapien
gaaatcacactttggtctgtaaaca

SEQ ID NO: 4911076 - DNA, 25 bp, Homo sapien
tgaaaccacttttgattgaagcaaa

SEQ ID NO: 4911077 - DNA, 25 bp, Homo sapien
catttaagtgaaccattccaaggca

SEQ ID NO: 4911078 - DNA, 25 bp, Homo sapien
tattcttaacaactatccccatttg

SEQ ID NO: 4911079 - DNA, 25 bp, Homo sapien
tatttcatctagactccccttctac

SEQ ID NO: 4911080 - DNA, 25 bp, Homo sapien
cattacttaagctcaacccacctaa

SEQ ID NO: 4911081 - DNA, 25 bp, Homo sapien
tactaatgttgttgcctctaccaaa

SEQ ID NO: 4911082 - DNA, 25 bp, Homo sapien
ttatcgtaaacatccacgagtgctg

SEQ ID NO: 4911083 - DNA, 25 bp, Homo sapien
ggccagaccattttagaattgggaa

SEQ ID NO: 4911084 - DNA, 25 bp, Homo sapien
gatgcactacctagcgaaaattgag

SEQ ID NO: 4911085 - DNA, 25 bp, Homo sapien
aatagatcaccttttacagatgctg

SEQ ID NO: 4911086 - DNA, 25 bp, Homo sapien
gggtcggcctgcgatcttccccgct

SEQ ID NO: 4911087 - DNA, 25 bp, Homo sapien
atcttccccgctcctcaagactaag

SEQ ID NO: 4911088 - DNA, 25 bp, Homo sapien
ccccgctcctcaagactaagagagg

SEQ ID NO: 4911089 - DNA, 25 bp, Homo sapien
tttgaggaaatggtgcttggtggag

SEQ ID NO: 4911090 - DNA, 25 bp, Homo sapien
cgaactggatctcctccgtcttttc

SEQ ID NO: 4911091 - DNA, 25 bp, Homo sapien
tctcactgtcagcccgaactggatc

SEQ ID NO: 4911092 - DNA, 25 bp, Homo sapien
cttcgccggtaagagcccgcccaga

SEQ ID NO: 4911093 - DNA, 25 bp, Homo sapien
taagagcccgcccagacaccgggct

SEQ ID NO: 4911094 - DNA, 25 bp, Homo sapien
atccgctcgacctcgtgaagatccg

SEQ ID NO: 4911095 - DNA, 25 bp, Homo sapien
tgcatccgctcgacctcgtgaagat

SEQ ID NO: 4911096 - DNA, 25 bp, Homo sapien
gctgcatccgctcgacctcgtgaag

SEQ ID NO: 4911097 - DNA, 25 bp, Homo sapien
cttgcgctgcatccgctcgacctcg

SEQ ID NO: 4911098 - DNA, 25 bp, Homo sapien
tcgtcggcgtggagcacggtattcc

SEQ ID NO: 4911099 - DNA, 25 bp, Homo sapien
gcgtgagcggcggcgtcttatccaa

SEQ ID NO: 4911100 - DNA, 25 bp, Homo sapien
tatgagaacctgatagcgggcgtga

SEQ ID NO: 4911101 - DNA, 25 bp, Homo sapien
tattccgccacgtccggtatgagaa

SEQ ID NO: 4911102 - DNA, 25 bp, Homo sapien
gccgtggtgtcgacgggccccgagc

SEQ ID NO: 4911103 - DNA, 25 bp, Homo sapien
ccctgggcgccgtggtgtcgacggg

SEQ ID NO: 4911104 - DNA, 25 bp, Homo sapien
gcgccgtggtgtcgacgggccccga

SEQ ID NO: 4911105 - DNA, 25 bp, Homo sapien
tgggcgccgtggtgtcgacgggccc

SEQ ID NO: 4911106 - DNA, 25 bp, Homo sapien
gtcgccacggtggcggccactgcat

SEQ ID NO: 4911107 - DNA, 25 bp, Homo sapien
cgtcgccacggtggcggccactgca

SEQ ID NO: 4911108 - DNA, 25 bp, Homo sapien
ccttgggcataagagtcctctcgtt

SEQ ID NO: 4911109 - DNA, 25 bp, Homo sapien
cccggaggtggggttgcgctcacaa

SEQ ID NO: 4911110 - DNA, 25 bp, Homo sapien
cataagagtcctctcgttggtcccg

SEQ ID NO: 4911111 - DNA, 25 bp, Homo sapien
aagagtcctctcgttggtcccggag

SEQ ID NO: 4911112 - DNA, 25 bp, Homo sapien
tttccgccggcgtgacgtagtgtct

SEQ ID NO: 4911113 - DNA, 25 bp, Homo sapien
gtactagagtctccggcttcgctca

SEQ ID NO: 4911114 - DNA, 25 bp, Homo sapien
cgttcttgccccctcagtactagag

SEQ ID NO: 4911115 - DNA, 25 bp, Homo sapien
tggagcatttgtgggcgaggcaggg

SEQ ID NO: 4911116 - DNA, 25 bp, Homo sapien
gatcctgcgccgctccgtagttttg

SEQ ID NO: 4911117 - DNA, 25 bp, Homo sapien
ggcgacttccgcttttcccagacta

SEQ ID NO: 4911118 - DNA, 25 bp, Homo sapien
acgaggtgtccgctaggagttccgc

SEQ ID NO: 4911119 - DNA, 25 bp, Homo sapien
tctttagctgtgcagtcgcttccgc

SEQ ID NO: 4911120 - DNA, 25 bp, Homo sapien
gtccggattccggctcagcatcttc

SEQ ID NO: 4911121 - DNA, 25 bp, Homo sapien
tgtccggattccggctcagcatctt

SEQ ID NO: 4911122 - DNA, 25 bp, Homo sapien
gcagcgactccgtaagcacaaagtt

SEQ ID NO: 4911123 - DNA, 25 bp, Homo sapien
tctgcttacgcatggttggtccctt

SEQ ID NO: 4911124 - DNA, 25 bp, Homo sapien
tgctatccatccagttccgcagcga

SEQ ID NO: 4911125 - DNA, 25 bp, Homo sapien
tttactccgcgaaagccgaggctag

SEQ ID NO: 4911126 - DNA, 25 bp, Homo sapien
taaagcaggatcatagtttcttgga

SEQ ID NO: 4911127 - DNA, 25 bp, Homo sapien
gtaaagcaggatcatagtttcttgg

SEQ ID NO: 4911128 - DNA, 25 bp, Homo sapien
aaagcaggatcatagtttcttggaa

SEQ ID NO: 4911129 - DNA, 25 bp, Homo sapien
tgccaagcaattgactccatcacgg

SEQ ID NO: 4911130 - DNA, 25 bp, Homo sapien
tcacggtgaccatccagcgaagcaa

SEQ ID NO: 4911131 - DNA, 25 bp, Homo sapien
cacggtgaccatccagcgaagcaag

SEQ ID NO: 4911132 - DNA, 25 bp, Homo sapien
agcaattgactccatcacggtgacc

SEQ ID NO: 4911133 - DNA, 25 bp, Homo sapien
tagttgaaaatatcatctagattga

SEQ ID NO: 4911134 - DNA, 25 bp, Homo sapien
ttagttgaaaatatcatctagattg

SEQ ID NO: 4911135 - DNA, 25 bp, Homo sapien
agttgaaaatatcatctagattgac

SEQ ID NO: 4911136 - DNA, 25 bp, Homo sapien
tgtattgtacggatacaattccgct

SEQ ID NO: 4911137 - DNA, 25 bp, Homo sapien
atattcctcgtacaaagccttcatg

SEQ ID NO: 4911138 - DNA, 25 bp, Homo sapien
caattccgctgagttagattccaaa

SEQ ID NO: 4911139 - DNA, 25 bp, Homo sapien
ccacaaaagcgagtacatattcctc

SEQ ID NO: 4911140 - DNA, 25 bp, Homo sapien
aatgacttaatggtattatacttac

SEQ ID NO: 4911141 - DNA, 25 bp, Homo sapien
gatcaaatttaatgacttaatggta

SEQ ID NO: 4911142 - DNA, 25 bp, Homo sapien
tattcttacctatgttgatcaaatt

SEQ ID NO: 4911143 - DNA, 25 bp, Homo sapien
cctatgttgatcaaatttaatgact

SEQ ID NO: 4911144 - DNA, 25 bp, Homo sapien
cacaggcacaaaacttcgatgattc

SEQ ID NO: 4911145 - DNA, 25 bp, Homo sapien
caaaaatcctccagagtaagccaaa

SEQ ID NO: 4911146 - DNA, 25 bp, Homo sapien
gaatgtactggatgccaccaaactg

SEQ ID NO: 4911147 - DNA, 25 bp, Homo sapien
ttccggatatcttgccacacacagg

SEQ ID NO: 4911148 - DNA, 25 bp, Homo sapien
gctccagacctgcatctgtaaaggt

SEQ ID NO: 4911149 - DNA, 25 bp, Homo sapien
gcccattagcagtccagtttgtcac

SEQ ID NO: 4911150 - DNA, 25 bp, Homo sapien
cagaggtgggcattccccaaggcta

SEQ ID NO: 4911151 - DNA, 25 bp, Homo sapien
taggacactatgctcattcacagat

SEQ ID NO: 4911152 - DNA, 25 bp, Homo sapien
ttcctaatattgtatgtaatggctc

SEQ ID NO: 4911153 - DNA, 25 bp, Homo sapien
aatggctcttcctcgtctccatagc

SEQ ID NO: 4911154 - DNA, 25 bp, Homo sapien
actgcttcacagttttgtcatcacc

SEQ ID NO: 4911155 - DNA, 25 bp, Homo sapien
atgtaatggctcttcctcgtctcca

SEQ ID NO: 4911156 - DNA, 25 bp, Homo sapien
gcttctttccagtgatgatcaatcc

SEQ ID NO: 4911157 - DNA, 25 bp, Homo sapien
cagcttctttccagtgatgatcaat

SEQ ID NO: 4911158 - DNA, 25 bp, Homo sapien
tctttccagtgatgatcaatcccag

SEQ ID NO: 4911159 - DNA, 25 bp, Homo sapien
tttccagtgatgatcaatcccagta

SEQ ID NO: 4911160 - DNA, 25 bp, Homo sapien
tttactaaatagttgcatggccagc

SEQ ID NO: 4911161 - DNA, 25 bp, Homo sapien
tgtacgcaagagaacatggctgtct

SEQ ID NO: 4911162 - DNA, 25 bp, Homo sapien
aaataagccctctatcatccagtgg

SEQ ID NO: 4911163 - DNA, 25 bp, Homo sapien
taaacagacgacatgtagtggccaa

SEQ ID NO: 4911164 - DNA, 25 bp, Homo sapien
tgcctcatatcgtacagtactatat

SEQ ID NO: 4911165 - DNA, 25 bp, Homo sapien
ttcctgtcagatgcacaacttccca

SEQ ID NO: 4911166 - DNA, 25 bp, Homo sapien
cagtactatattcctgtcagatgca

SEQ ID NO: 4911167 - DNA, 25 bp, Homo sapien
tcaaaggagtagcttgcctcatatc

SEQ ID NO: 4911168 - DNA, 25 bp, Homo sapien
aaatgaaagcttccatagggttcca

SEQ ID NO: 4911169 - DNA, 25 bp, Homo sapien
tatttgttctcatatctaagataac

SEQ ID NO: 4911170 - DNA, 25 bp, Homo sapien
ttcatttgctgctgtaaaaatgaaa

SEQ ID NO: 4911171 - DNA, 25 bp, Homo sapien
aaagcttccatagggttccaacaga

SEQ ID NO: 4911172 - DNA, 25 bp, Homo sapien
tattctaaccctcaccttacagatg

SEQ ID NO: 4911173 - DNA, 25 bp, Homo sapien
tatcaatttgtgtacatggaaaacc

SEQ ID NO: 4911174 - DNA, 25 bp, Homo sapien
tcagctaggtttgcttggttccagc

SEQ ID NO: 4911175 - DNA, 25 bp, Homo sapien
tagtagtaagacattgacaactgct

SEQ ID NO: 4911176 - DNA, 25 bp, Homo sapien
cccagtgggagagtaatccacatca

SEQ ID NO: 4911177 - DNA, 25 bp, Homo sapien
gagagtaatccacatcaagcactgc

SEQ ID NO: 4911178 - DNA, 25 bp, Homo sapien
tgggagagtaatccacatcaagcac

SEQ ID NO: 4911179 - DNA, 25 bp, Homo sapien
agtgggagagtaatccacatcaagc

SEQ ID NO: 4911180 - DNA, 25 bp, Homo sapien
gaagcaacaggccatatcatatgac

SEQ ID NO: 4911181 - DNA, 25 bp, Homo sapien
tataaatggcttactggtaggcaca

SEQ ID NO: 4911182 - DNA, 25 bp, Homo sapien
cagcctaggtgtgcaacacgttata

SEQ ID NO: 4911183 - DNA, 25 bp, Homo sapien
cacagtaacatgctgaacagattcg

SEQ ID NO: 4911184 - DNA, 25 bp, Homo sapien
taattcagcctgaactcagctgctg

SEQ ID NO: 4911185 - DNA, 25 bp, Homo sapien
tactacctttggaagttgtggtgcc

SEQ ID NO: 4911186 - DNA, 25 bp, Homo sapien
gatcataggtaactacacagtcctg

SEQ ID NO: 4911187 - DNA, 25 bp, Homo sapien
tgccttgggcctaagtgaataatgc

SEQ ID NO: 4911188 - DNA, 25 bp, Homo sapien
aaagagtacctcctgatatgctgaa

SEQ ID NO: 4911189 - DNA, 25 bp, Homo sapien
aataaggttccgtgttaagtgctgg

SEQ ID NO: 4911190 - DNA, 25 bp, Homo sapien
taaccactgcctattaagtatcagg

SEQ ID NO: 4911191 - DNA, 25 bp, Homo sapien
ttaattaattagaccagcctgccca

SEQ ID NO: 4911192 - DNA, 25 bp, Homo sapien
cacccaatttttcagaagcattagc

SEQ ID NO: 4911193 - DNA, 25 bp, Homo sapien
cattctctttgtatgatatacctcc

SEQ ID NO: 4911194 - DNA, 25 bp, Homo sapien
gataacatgttgcattctctttgta

SEQ ID NO: 4911195 - DNA, 25 bp, Homo sapien
agcattagctttccacaggcgaatg

SEQ ID NO: 4911196 - DNA, 25 bp, Homo sapien
tagggccacgtggatcactgagttg

SEQ ID NO: 4911197 - DNA, 25 bp, Homo sapien
tagatagatgccacccagtagaaag

SEQ ID NO: 4911198 - DNA, 25 bp, Homo sapien
tttaggcaacacactcgccatgtag

SEQ ID NO: 4911199 - DNA, 25 bp, Homo sapien
taatgatggacctaggcacaatgca

SEQ ID NO: 4911200 - DNA, 25 bp, Homo sapien
agatgtcgatgacgagctatacgtt

SEQ ID NO: 4911201 - DNA, 25 bp, Homo sapien
cgttttatatgaggataatgctgaa

SEQ ID NO: 4911202 - DNA, 25 bp, Homo sapien
tatacgttttatatgaggataatgc

SEQ ID NO: 4911203 - DNA, 25 bp, Homo sapien
gacgagctatacgttttatatgagg

SEQ ID NO: 4911204 - DNA, 25 bp, Homo sapien
gtagtagctctgctctatatccaaa

SEQ ID NO: 4911205 - DNA, 25 bp, Homo sapien
taaactactcccttgaatggcagtt

SEQ ID NO: 4911206 - DNA, 25 bp, Homo sapien
tataagcaagttatgggaactcatc

SEQ ID NO: 4911207 - DNA, 25 bp, Homo sapien
ggaagctagtaccaagaaatcaact

SEQ ID NO: 4911208 - DNA, 25 bp, Homo sapien
gcttgctgtgtttaatacgattcac

SEQ ID NO: 4911209 - DNA, 25 bp, Homo sapien
gctgtgtttaatacgattcacttcc

SEQ ID NO: 4911210 - DNA, 25 bp, Homo sapien
tttgtagagttctcaaatcaaaagt

SEQ ID NO: 4911211 - DNA, 25 bp, Homo sapien
tgtagagttctcaaatcaaaagtaa

SEQ ID NO: 4911212 - DNA, 25 bp, Homo sapien
atttgtagagttctcaaatcaaaag

SEQ ID NO: 4911213 - DNA, 25 bp, Homo sapien
ttgtagagttctcaaatcaaaagta

SEQ ID NO: 4911214 - DNA, 25 bp, Homo sapien
ccaactaggccacctttaaggatca

SEQ ID NO: 4911215 - DNA, 25 bp, Homo sapien
ggaagaaacatcattgcaatcatta

SEQ ID NO: 4911216 - DNA, 25 bp, Homo sapien
gataaaacagtcttaccaactaggc

SEQ ID NO: 4911217 - DNA, 25 bp, Homo sapien
agagatgtttggtcttaaatgtcaa

SEQ ID NO: 4911218 - DNA, 25 bp, Homo sapien
cctagctgggactcaatacatgttg

SEQ ID NO: 4911219 - DNA, 25 bp, Homo sapien
cagtgcttgtgaagacatctggcca

SEQ ID NO: 4911220 - DNA, 25 bp, Homo sapien
tactaggagtgtcacaataccccaa

SEQ ID NO: 4911221 - DNA, 25 bp, Homo sapien
catctggccacgaagctggtattgc

SEQ ID NO: 4911222 - DNA, 25 bp, Homo sapien
cattaaggttgagagatacacaggg

SEQ ID NO: 4911223 - DNA, 25 bp, Homo sapien
tctaatcagctagccaaagggcaca

SEQ ID NO: 4911224 - DNA, 25 bp, Homo sapien
tacacagggtcttcataaagttctt

SEQ ID NO: 4911225 - DNA, 25 bp, Homo sapien
cacactatgtacagctgggtaatgc

SEQ ID NO: 4911226 - DNA, 25 bp, Homo sapien
tcaaaattcattgccaggtcagctg

SEQ ID NO: 4911227 - DNA, 25 bp, Homo sapien
taagtgcaccttgacctacctcagt

SEQ ID NO: 4911228 - DNA, 25 bp, Homo sapien
gaagatataatgttccccgcaacct

SEQ ID NO: 4911229 - DNA, 25 bp, Homo sapien
tcctcctcagtactagacatgggca

SEQ ID NO: 4911230 - DNA, 25 bp, Homo sapien
tcaaaaatctcaccttgggcgaagg

SEQ ID NO: 4911231 - DNA, 25 bp, Homo sapien
gctgtggacaagaagaagatacctg

SEQ ID NO: 4911232 - DNA, 25 bp, Homo sapien
tagggagctacaactatcagaggac

SEQ ID NO: 4911233 - DNA, 25 bp, Homo sapien
catcttaggaacctgctgagagcag

SEQ ID NO: 4911234 - DNA, 25 bp, Homo sapien
cccctatactcatactattcctaag

SEQ ID NO: 4911235 - DNA, 25 bp, Homo sapien
ttcatcccctatactcatactattc

SEQ ID NO: 4911236 - DNA, 25 bp, Homo sapien
tactcatactattcctaagtctttc

SEQ ID NO: 4911237 - DNA, 25 bp, Homo sapien
acttcatcccctatactcatactat

SEQ ID NO: 4911238 - DNA, 25 bp, Homo sapien
gattatatttattcctccatcagta

SEQ ID NO: 4911239 - DNA, 25 bp, Homo sapien
gtggcacctgggaaaacatattcta

SEQ ID NO: 4911240 - DNA, 25 bp, Homo sapien
tcctttggatctatcaaagtgtttt

SEQ ID NO: 4911241 - DNA, 25 bp, Homo sapien
tcagtagcttttttagccttgaaaa

SEQ ID NO: 4911242 - DNA, 25 bp, Homo sapien
tcacgttggcttgatccagtggctc

SEQ ID NO: 4911243 - DNA, 25 bp, Homo sapien
ccagggctttctaacttacttgcat

SEQ ID NO: 4911244 - DNA, 25 bp, Homo sapien
cagcagtaagacaggcttcacgttg

SEQ ID NO: 4911245 - DNA, 25 bp, Homo sapien
tgtacccatctaaatcagaaggctt

SEQ ID NO: 4911246 - DNA, 25 bp, Homo sapien
ttaagatgtaggatgaataggactt

SEQ ID NO: 4911247 - DNA, 25 bp, Homo sapien
tgaataggacttggtgaccaggcac

SEQ ID NO: 4911248 - DNA, 25 bp, Homo sapien
gatgaataggacttggtgaccaggc

SEQ ID NO: 4911249 - DNA, 25 bp, Homo sapien
gtaggatgaataggacttggtgacc

SEQ ID NO: 4911250 - DNA, 25 bp, Homo sapien
tacttcactatctttctgattagca

SEQ ID NO: 4911251 - DNA, 25 bp, Homo sapien
cactatctttctgattagcatcata

SEQ ID NO: 4911252 - DNA, 25 bp, Homo sapien
ggtactgcatccctaattacttcac

SEQ ID NO: 4911253 - DNA, 25 bp, Homo sapien
tcagctgtgtactgatggtactgca

SEQ ID NO: 4911254 - DNA, 25 bp, Homo sapien
gacaaatacatacaaatcaatggcc

SEQ ID NO: 4911255 - DNA, 25 bp, Homo sapien
tacatacaaatcaatggccttcaat

SEQ ID NO: 4911256 - DNA, 25 bp, Homo sapien
cagcctccagcgctgggacaaatac

SEQ ID NO: 4911257 - DNA, 25 bp, Homo sapien
gcgctgggacaaatacatacaaatc

SEQ ID NO: 4911258 - DNA, 25 bp, Homo sapien
agaggccgccgggatgggagccagg

SEQ ID NO: 4911259 - DNA, 25 bp, Homo sapien
aggccgccgggatgggagccaggcg

SEQ ID NO: 4911260 - DNA, 25 bp, Homo sapien
ggccgccgggatgggagccaggcgg

SEQ ID NO: 4911261 - DNA, 25 bp, Homo sapien
ctgagaggccgccgggatgggagcc

SEQ ID NO: 4911262 - DNA, 25 bp, Homo sapien
ctgctctcagacacccctaaaacag

SEQ ID NO: 4911263 - DNA, 25 bp, Homo sapien
tctcagacacccctaaaacagcccg

SEQ ID NO: 4911264 - DNA, 25 bp, Homo sapien
gctctcagacacccctaaaacagcc

SEQ ID NO: 4911265 - DNA, 25 bp, Homo sapien
ctcagacacccctaaaacagcccgg

SEQ ID NO: 4911266 - DNA, 25 bp, Homo sapien
caaaagcttggcattgttagtatac

SEQ ID NO: 4911267 - DNA, 25 bp, Homo sapien
tatctgaaggctgttaataaataac

SEQ ID NO: 4911268 - DNA, 25 bp, Homo sapien
cagtaagaagtatgctcaaaaagct

SEQ ID NO: 4911269 - DNA, 25 bp, Homo sapien
tattcaacgccagaaattagctttc

SEQ ID NO: 4911270 - DNA, 25 bp, Homo sapien
ttaattttcaatgtaatgaacagca

SEQ ID NO: 4911271 - DNA, 25 bp, Homo sapien
tgcttagagaacaatctgcccagct

SEQ ID NO: 4911272 - DNA, 25 bp, Homo sapien
gactgaatcacgtgctcctcttgta

SEQ ID NO: 4911273 - DNA, 25 bp, Homo sapien
tcatttgagattcagcctagatggc

SEQ ID NO: 4911274 - DNA, 25 bp, Homo sapien
tccctggagggcatgaactatttct

SEQ ID NO: 4911275 - DNA, 25 bp, Homo sapien
gagtagagacccaaagagatccaga

SEQ ID NO: 4911276 - DNA, 25 bp, Homo sapien
gactatgcatacatccaggaatgac

SEQ ID NO: 4911277 - DNA, 25 bp, Homo sapien
taccctgagttaggtaggcatgatc

SEQ ID NO: 4911278 - DNA, 25 bp, Homo sapien
gagacaacttaggattcactgcagc

SEQ ID NO: 4911279 - DNA, 25 bp, Homo sapien
ccagagcacttgccgactgcaggca

SEQ ID NO: 4911280 - DNA, 25 bp, Homo sapien
gttttctacatgtggaatcacgtga

SEQ ID NO: 4911281 - DNA, 25 bp, Homo sapien
gaagctggctaagtgtctcattgta

SEQ ID NO: 4911282 - DNA, 25 bp, Homo sapien
taagagtttctcgtcaatggtgacc

SEQ ID NO: 4911283 - DNA, 25 bp, Homo sapien
cacgtgaaaaaggttaggaagcatt

SEQ ID NO: 4911284 - DNA, 25 bp, Homo sapien
gagccagcctgagtctaaaccgtaa

SEQ ID NO: 4911285 - DNA, 25 bp, Homo sapien
gacccagagttgactaatgccaaag

SEQ ID NO: 4911286 - DNA, 25 bp, Homo sapien
gaaattcccctaagctctaaccaga

SEQ ID NO: 4911287 - DNA, 25 bp, Homo sapien
taaagccacgaaaacatgtactgag

SEQ ID NO: 4911288 - DNA, 25 bp, Homo sapien
gagaaatgctactaatgcagctgcc

SEQ ID NO: 4911289 - DNA, 25 bp, Homo sapien
tgcagctgcctgatatgagtacaac

SEQ ID NO: 4911290 - DNA, 25 bp, Homo sapien
cacatttggcatgacaccggagcaa

SEQ ID NO: 4911291 - DNA, 25 bp, Homo sapien
tgaaaactagaatggagaggaaccc

SEQ ID NO: 4911292 - DNA, 25 bp, Homo sapien
taccatggttatggactgtattaca

SEQ ID NO: 4911293 - DNA, 25 bp, Homo sapien
tcagggagaattagaagttaacact

SEQ ID NO: 4911294 - DNA, 25 bp, Homo sapien
tgcctggctcagcattttgacataa

SEQ ID NO: 4911295 - DNA, 25 bp, Homo sapien
caggtacaaagtctgctgagatagt

SEQ ID NO: 4911296 - DNA, 25 bp, Homo sapien
ggtcacaagtgtgccacatatagtc

SEQ ID NO: 4911297 - DNA, 25 bp, Homo sapien
gtacagctatattcatggcactcaa

SEQ ID NO: 4911298 - DNA, 25 bp, Homo sapien
gtgaagtgtgccacatttggtcaca

SEQ ID NO: 4911299 - DNA, 25 bp, Homo sapien
gcagtggaccaaacagcagtgtaaa

SEQ ID NO: 4911300 - DNA, 25 bp, Homo sapien
ggctgttggccttactgtaactacg

SEQ ID NO: 4911301 - DNA, 25 bp, Homo sapien
actgaatctgattggaactccctga

SEQ ID NO: 4911302 - DNA, 25 bp, Homo sapien
aggatcctctctgcgtctttgatgg

SEQ ID NO: 4911303 - DNA, 25 bp, Homo sapien
tctgaagaacagctttgtgggtaaa

SEQ ID NO: 4911304 - DNA, 25 bp, Homo sapien
caattccttttgacgtcttcctcat

SEQ ID NO: 4911305 - DNA, 25 bp, Homo sapien
tttgctatgcagaagtactttagat

SEQ ID NO: 4911306 - DNA, 25 bp, Homo sapien
gcaattccttttgacgtcttcctca

SEQ ID NO: 4911307 - DNA, 25 bp, Homo sapien
ttgcaattccttttgacgtcttcct

SEQ ID NO: 4911308 - DNA, 25 bp, Homo sapien
gatatatacttggttaaacgactgc

SEQ ID NO: 4911309 - DNA, 25 bp, Homo sapien
tatctcgggaattgcgaataatgcc

SEQ ID NO: 4911310 - DNA, 25 bp, Homo sapien
gttgggattaccagcattaaccacc

SEQ ID NO: 4911311 - DNA, 25 bp, Homo sapien
taagggttaccttctctcaacataa

SEQ ID NO: 4911312 - DNA, 25 bp, Homo sapien
gagaaggaagttatggggaggcaga

SEQ ID NO: 4911313 - DNA, 25 bp, Homo sapien
ggaagttatggggaggcagaaaatg

SEQ ID NO: 4911314 - DNA, 25 bp, Homo sapien
actggcatgctccaccgtgaagcag

SEQ ID NO: 4911315 - DNA, 25 bp, Homo sapien
tgctccaccgtgaagcagccgtgga

SEQ ID NO: 4911316 - DNA, 25 bp, Homo sapien
tgcagcttgatcaccagagtccctg

SEQ ID NO: 4911317 - DNA, 25 bp, Homo sapien
gctccgagatcaccaccaagggcat

SEQ ID NO: 4911318 - DNA, 25 bp, Homo sapien
gaaaagatacaaagtgcacttgctg

SEQ ID NO: 4911319 - DNA, 25 bp, Homo sapien
gcaattaacaaagaccagccagcta

SEQ ID NO: 4911320 - DNA, 25 bp, Homo sapien
ggctactcccttatgtaagctagaa

SEQ ID NO: 4911321 - DNA, 25 bp, Homo sapien
aaccctacagaagaatatgctcagc

SEQ ID NO: 4911322 - DNA, 25 bp, Homo sapien
gaatacatagtatgtaccaaacaca

SEQ ID NO: 4911323 - DNA, 25 bp, Homo sapien
acttcaaggaggcttgtgtgtgtta

SEQ ID NO: 4911324 - DNA, 25 bp, Homo sapien
caatactagagcatagacacatcac

SEQ ID NO: 4911325 - DNA, 25 bp, Homo sapien
gtttttgagatcataagtgacattc

SEQ ID NO: 4911326 - DNA, 25 bp, Homo sapien
taacactgaaacaacgcagggagtc

SEQ ID NO: 4911327 - DNA, 25 bp, Homo sapien
ggctgtgaacaatatcggtctgtga

SEQ ID NO: 4911328 - DNA, 25 bp, Homo sapien
tcatgaaaatgtctaccagccaagt

SEQ ID NO: 4911329 - DNA, 25 bp, Homo sapien
tagtggaaactacacaaagactggt

SEQ ID NO: 4911330 - DNA, 25 bp, Homo sapien
cctggccgatatgttagttgcttct

SEQ ID NO: 4911331 - DNA, 25 bp, Homo sapien
gttgccagacaaaatggagctcctt

SEQ ID NO: 4911332 - DNA, 25 bp, Homo sapien
tcagccatggtattcttaaaacagc

SEQ ID NO: 4911333 - DNA, 25 bp, Homo sapien
cactcccctcctggaatgtatgatt

SEQ ID NO: 4911334 - DNA, 25 bp, Homo sapien
tattcccttctcggccaggtgtggt

SEQ ID NO: 4911335 - DNA, 25 bp, Homo sapien
gaggagtttgagtagacatggtatt

SEQ ID NO: 4911336 - DNA, 25 bp, Homo sapien
agacatggtattagttcatctttaa

SEQ ID NO: 4911337 - DNA, 25 bp, Homo sapien
tcttcagtttctttgaggagtttga

SEQ ID NO: 4911338 - DNA, 25 bp, Homo sapien
ttcagccagtcaatacttttgattg

SEQ ID NO: 4911339 - DNA, 25 bp, Homo sapien
agttagttgctcagataaatggatc

SEQ ID NO: 4911340 - DNA, 25 bp, Homo sapien
tcaaaataatttgagtagaactggt

SEQ ID NO: 4911341 - DNA, 25 bp, Homo sapien
ggttcacagacctttctttactgaa

SEQ ID NO: 4911342 - DNA, 25 bp, Homo sapien
aaaataaacacagccagagccagga

SEQ ID NO: 4911343 - DNA, 25 bp, Homo sapien
gaaaacaagtagaacctgaagcagg

SEQ ID NO: 4911344 - DNA, 25 bp, Homo sapien
gcagagactggaaaataaacacagc

SEQ ID NO: 4911345 - DNA, 25 bp, Homo sapien
tgtgctgacaaaggaagcagagact

SEQ ID NO: 4911346 - DNA, 25 bp, Homo sapien
tccgggagttattctataccactgc

SEQ ID NO: 4911347 - DNA, 25 bp, Homo sapien
gcttcatgcattgtctgttcaggga

SEQ ID NO: 4911348 - DNA, 25 bp, Homo sapien
cgaagtcaatctaaaatccgggagt

SEQ ID NO: 4911349 - DNA, 25 bp, Homo sapien
gagggtctatccacaatctgttggc

SEQ ID NO: 4911350 - DNA, 25 bp, Homo sapien
taagcctgtggtgacaaatgttctt

SEQ ID NO: 4911351 - DNA, 25 bp, Homo sapien
cattcttttagagtaagcctgtggt

SEQ ID NO: 4911352 - DNA, 25 bp, Homo sapien
tctagtgattctcctattatttcct

SEQ ID NO: 4911353 - DNA, 25 bp, Homo sapien
gcatttcaccttaactcttgaagga

SEQ ID NO: 4911354 - DNA, 25 bp, Homo sapien
tgtcagttgtggtttgtgttcttct

SEQ ID NO: 4911355 - DNA, 25 bp, Homo sapien
tgtgtcagttgtggtttgtgttctt

SEQ ID NO: 4911356 - DNA, 25 bp, Homo sapien
ttgtggtttgtgttcttctttgacc

SEQ ID NO: 4911357 - DNA, 25 bp, Homo sapien
tcagttgtggtttgtgttcttcttt

SEQ ID NO: 4911358 - DNA, 25 bp, Homo sapien
gttcagtgattccactaaagggaaa

SEQ ID NO: 4911359 - DNA, 25 bp, Homo sapien
cagtgattccactaaagggaaacca

SEQ ID NO: 4911360 - DNA, 25 bp, Homo sapien
gctgaagaacgttatttaccagttc

SEQ ID NO: 4911361 - DNA, 25 bp, Homo sapien
agaacgttatttaccagttcagtga

SEQ ID NO: 4911362 - DNA, 25 bp, Homo sapien
cgggttggtggccagcattttctct

SEQ ID NO: 4911363 - DNA, 25 bp, Homo sapien
ccgggttggtggccagcattttctc

SEQ ID NO: 4911364 - DNA, 25 bp, Homo sapien
cagggatgcactccgactgctgaag

SEQ ID NO: 4911365 - DNA, 25 bp, Homo sapien
tctccactttgaggtgtctgagggc

SEQ ID NO: 4911366 - DNA, 25 bp, Homo sapien
aattcttcgtgttgatctggcctgg

SEQ ID NO: 4911367 - DNA, 25 bp, Homo sapien
ggtgttgccaacagacccagaaggt

SEQ ID NO: 4911368 - DNA, 25 bp, Homo sapien
tgattttttggaagtgccactgcca

SEQ ID NO: 4911369 - DNA, 25 bp, Homo sapien
gttgattttttggaagtgccactgc

SEQ ID NO: 4911370 - DNA, 25 bp, Homo sapien
ttttttggaagtgccactgccaatc

SEQ ID NO: 4911371 - DNA, 25 bp, Homo sapien
cttgttgattttttggaagtgccac

SEQ ID NO: 4911372 - DNA, 25 bp, Homo sapien
gcccacatcaatggagaagtagtca

SEQ ID NO: 4911373 - DNA, 25 bp, Homo sapien
ccaggcatccacagacaccgtgtgc

SEQ ID NO: 4911374 - DNA, 25 bp, Homo sapien
cccacatcaatggagaagtagtcat

SEQ ID NO: 4911375 - DNA, 25 bp, Homo sapien
ctgcctcattgccatcccaggcatc

SEQ ID NO: 4911376 - DNA, 25 bp, Homo sapien
cccagggagcaattgcagaaggaca

SEQ ID NO: 4911377 - DNA, 25 bp, Homo sapien
gcccagggagcaattgcagaaggac

SEQ ID NO: 4911378 - DNA, 25 bp, Homo sapien
agcccagggagcaattgcagaagga

SEQ ID NO: 4911379 - DNA, 25 bp, Homo sapien
cacggcagcaggcagggcccagggc

SEQ ID NO: 4911380 - DNA, 25 bp, Homo sapien
ctgaggacacggcagcaggcagggc

SEQ ID NO: 4911381 - DNA, 25 bp, Homo sapien
cggcagcaggcagggcccagggcac

SEQ ID NO: 4911382 - DNA, 25 bp, Homo sapien
gacacggcagcaggcagggcccagg

SEQ ID NO: 4911383 - DNA, 25 bp, Homo sapien
gaaggacagttccaccagacactgg

SEQ ID NO: 4911384 - DNA, 25 bp, Homo sapien
gagccatgatatgcagtggccagct

SEQ ID NO: 4911385 - DNA, 25 bp, Homo sapien
cagctcctcaacatccaggtaattg

SEQ ID NO: 4911386 - DNA, 25 bp, Homo sapien
gacgtggaagacctgctcttcagag

SEQ ID NO: 4911387 - DNA, 25 bp, Homo sapien
gaacatctcaaatgagcgttaaaca

SEQ ID NO: 4911388 - DNA, 25 bp, Homo sapien
aatgagcgttaaacacccaatcaca

SEQ ID NO: 4911389 - DNA, 25 bp, Homo sapien
caaacataataccaaggtttgaggg

SEQ ID NO: 4911390 - DNA, 25 bp, Homo sapien
tcagatgtgtaatgtgcaaacataa

SEQ ID NO: 4911391 - DNA, 25 bp, Homo sapien
ctttacctgctctttatacatttca

SEQ ID NO: 4911392 - DNA, 25 bp, Homo sapien
tacatttcaaactgctgatgcagtt

SEQ ID NO: 4911393 - DNA, 25 bp, Homo sapien
ttatacatttcaaactgctgatgca

SEQ ID NO: 4911394 - DNA, 25 bp, Homo sapien
cttctttacctgctctttatacatt

SEQ ID NO: 4911395 - DNA, 25 bp, Homo sapien
tgctgttgctgtgattcttctccca

SEQ ID NO: 4911396 - DNA, 25 bp, Homo sapien
cacccttctgttcttgctgttgctg

SEQ ID NO: 4911397 - DNA, 25 bp, Homo sapien
tcttgctgttgctgtgattcttctc

SEQ ID NO: 4911398 - DNA, 25 bp, Homo sapien
gctgttgctgtgattcttctcccat

SEQ ID NO: 4911399 - DNA, 25 bp, Homo sapien
aatgacactcgacctccacaacgag

SEQ ID NO: 4911400 - DNA, 25 bp, Homo sapien
tgagcgtaatgacactcgacctcca

SEQ ID NO: 4911401 - DNA, 25 bp, Homo sapien
ctccacaacgagcacagaactttgt

SEQ ID NO: 4911402 - DNA, 25 bp, Homo sapien
cttgtttgagcgtaatgacactcga

SEQ ID NO: 4911403 - DNA, 25 bp, Homo sapien
tcttacacagctctccaggttgcta

SEQ ID NO: 4911404 - DNA, 25 bp, Homo sapien
cacagctctccaggttgctaaacat

SEQ ID NO: 4911405 - DNA, 25 bp, Homo sapien
tacacagctctccaggttgctaaac

SEQ ID NO: 4911406 - DNA, 25 bp, Homo sapien
ttacacagctctccaggttgctaaa

SEQ ID NO: 4911407 - DNA, 25 bp, Homo sapien
gttttcggcacaaattacataccca

SEQ ID NO: 4911408 - DNA, 25 bp, Homo sapien
caggttgctgtggtgtattagatcc

SEQ ID NO: 4911409 - DNA, 25 bp, Homo sapien
ggtccttggaactgggtctgctcat

SEQ ID NO: 4911410 - DNA, 25 bp, Homo sapien
aaaccatgctcctgatttagtgagg

SEQ ID NO: 4911411 - DNA, 25 bp, Homo sapien
gaatgctgtcttgtgagcccatgag

SEQ ID NO: 4911412 - DNA, 25 bp, Homo sapien
tccactgcaggtacagataagtcac

SEQ ID NO: 4911413 - DNA, 25 bp, Homo sapien
cactggcaatgtgatgcttcacgcc

SEQ ID NO: 4911414 - DNA, 25 bp, Homo sapien
tgtctgaagctatgtcactggcaat

SEQ ID NO: 4911415 - DNA, 25 bp, Homo sapien
ctgggaaagagatgtccagcttcat

SEQ ID NO: 4911416 - DNA, 25 bp, Homo sapien
cataaaaagtgcagagtttgcgttt

SEQ ID NO: 4911417 - DNA, 25 bp, Homo sapien
agtgcagagtttgcgtttatcatcc

SEQ ID NO: 4911418 - DNA, 25 bp, Homo sapien
aaaaagtgcagagtttgcgtttatc

SEQ ID NO: 4911419 - DNA, 25 bp, Homo sapien
gagtttgcgtttatcatccacttca

SEQ ID NO: 4911420 - DNA, 25 bp, Homo sapien
gggaaccattgtttgtcattcccac

SEQ ID NO: 4911421 - DNA, 25 bp, Homo sapien
ggaaccattgtttgtcattcccacc

SEQ ID NO: 4911422 - DNA, 25 bp, Homo sapien
ggggaaccattgtttgtcattccca

SEQ ID NO: 4911423 - DNA, 25 bp, Homo sapien
tggggaaccattgtttgtcattccc

SEQ ID NO: 4911424 - DNA, 25 bp, Homo sapien
ggcggacacggccatgaatcaagac

SEQ ID NO: 4911425 - DNA, 25 bp, Homo sapien
agcaggcggacacggccatgaatca

SEQ ID NO: 4911426 - DNA, 25 bp, Homo sapien
cattagcaggcggacacggccatga

SEQ ID NO: 4911427 - DNA, 25 bp, Homo sapien
ttagcaggcggacacggccatgaat

SEQ ID NO: 4911428 - DNA, 25 bp, Homo sapien
aataaccaagttagagcactccgat

SEQ ID NO: 4911429 - DNA, 25 bp, Homo sapien
agagcactccgattggcatccacaa

SEQ ID NO: 4911430 - DNA, 25 bp, Homo sapien
taaccaagttagagcactccgattg

SEQ ID NO: 4911431 - DNA, 25 bp, Homo sapien
caagttagagcactccgattggcat

SEQ ID NO: 4911432 - DNA, 25 bp, Homo sapien
tcgtagtatcagtcaatcctggaat

SEQ ID NO: 4911433 - DNA, 25 bp, Homo sapien
tagtatcagtcaatcctggaatatt

SEQ ID NO: 4911434 - DNA, 25 bp, Homo sapien
ggcatcgtagtatcagtcaatcctg

SEQ ID NO: 4911435 - DNA, 25 bp, Homo sapien
tgaggcatcgtagtatcagtcaatc

SEQ ID NO: 4911436 - DNA, 25 bp, Homo sapien
tgctgcttctccagagcaatatggc

SEQ ID NO: 4911437 - DNA, 25 bp, Homo sapien
tctccagagcaatatggcaccattt

SEQ ID NO: 4911438 - DNA, 25 bp, Homo sapien
gcttctccagagcaatatggcacca

SEQ ID NO: 4911439 - DNA, 25 bp, Homo sapien
gctgcttctccagagcaatatggca

SEQ ID NO: 4911440 - DNA, 25 bp, Homo sapien
agcaatttgttcctgacgcttctgt

SEQ ID NO: 4911441 - DNA, 25 bp, Homo sapien
tatctgtaaaacactgtaccaaaac

SEQ ID NO: 4911442 - DNA, 25 bp, Homo sapien
ctatctgtaaaacactgtaccaaaa

SEQ ID NO: 4911443 - DNA, 25 bp, Homo sapien
taatatgaatggagataatcctgca

SEQ ID NO: 4911444 - DNA, 25 bp, Homo sapien
catacaactaccagttatgggagga

SEQ ID NO: 4911445 - DNA, 25 bp, Homo sapien
aagtttatctcatggccgaggagct

SEQ ID NO: 4911446 - DNA, 25 bp, Homo sapien
gagaacagggcctaggtcttctgac

SEQ ID NO: 4911447 - DNA, 25 bp, Homo sapien
tgagttgtatgatccctgtacacag

SEQ ID NO: 4911448 - DNA, 25 bp, Homo sapien
tcaggtagtgttatgcctctaacta

SEQ ID NO: 4911449 - DNA, 25 bp, Homo sapien
gaagaagttatcctctagttcctcc

SEQ ID NO: 4911450 - DNA, 25 bp, Homo sapien
tagttcctcctacaagctttacagt

SEQ ID NO: 4911451 - DNA, 25 bp, Homo sapien
agctcagatgaccactttgaataag

SEQ ID NO: 4911452 - DNA, 25 bp, Homo sapien
cacatagctcagatgaccactttga

SEQ ID NO: 4911453 - DNA, 25 bp, Homo sapien
catagctcagatgaccactttgaat

SEQ ID NO: 4911454 - DNA, 25 bp, Homo sapien
ctcagatgaccactttgaataagag

SEQ ID NO: 4911455 - DNA, 25 bp, Homo sapien
ctctgtgttagtgccagtatcatgc

SEQ ID NO: 4911456 - DNA, 25 bp, Homo sapien
attccattgggaattttcaataggt

SEQ ID NO: 4911457 - DNA, 25 bp, Homo sapien
taatatttgctgcagtatgattcca

SEQ ID NO: 4911458 - DNA, 25 bp, Homo sapien
gtaatatttgctgcagtatgattcc

SEQ ID NO: 4911459 - DNA, 25 bp, Homo sapien
gattccattgggaattttcaatagg

SEQ ID NO: 4911460 - DNA, 25 bp, Homo sapien
tcttgtccacatacaatccaatact

SEQ ID NO: 4911461 - DNA, 25 bp, Homo sapien
ataatcttgtccacatacaatccaa

SEQ ID NO: 4911462 - DNA, 25 bp, Homo sapien
aatcttgtccacatacaatccaata

SEQ ID NO: 4911463 - DNA, 25 bp, Homo sapien
atataatcttgtccacatacaatcc

SEQ ID NO: 4911464 - DNA, 25 bp, Homo sapien
taaaaacacgccaatcaagttccat

SEQ ID NO: 4911465 - DNA, 25 bp, Homo sapien
gcagtaagctttttgggcattccca

SEQ ID NO: 4911466 - DNA, 25 bp, Homo sapien
tagaagattcagtacccgtgcagct

SEQ ID NO: 4911467 - DNA, 25 bp, Homo sapien
tctcctgactgtagcaagaattcta

SEQ ID NO: 4911468 - DNA, 25 bp, Homo sapien
aattgcagacctggcgcaatgtctc

SEQ ID NO: 4911469 - DNA, 25 bp, Homo sapien
agaattgcagacctggcgcaatgtc

SEQ ID NO: 4911470 - DNA, 25 bp, Homo sapien
gcagacctggcgcaatgtctcaaat

SEQ ID NO: 4911471 - DNA, 25 bp, Homo sapien
acctggcgcaatgtctcaaattgca

SEQ ID NO: 4911472 - DNA, 25 bp, Homo sapien
catattgagttagaccttgaaagcg

SEQ ID NO: 4911473 - DNA, 25 bp, Homo sapien
gccatatgagtaaccgtaagtcctg

SEQ ID NO: 4911474 - DNA, 25 bp, Homo sapien
tcttagaaccaaacatgggtcccat

SEQ ID NO: 4911475 - DNA, 25 bp, Homo sapien
cagctggacgttagtttgttcaaga

SEQ ID NO: 4911476 - DNA, 25 bp, Homo sapien
aggttttgctcttgaaccgtttcat

SEQ ID NO: 4911477 - DNA, 25 bp, Homo sapien
ctgaagctacaatgaaaagatgagc

SEQ ID NO: 4911478 - DNA, 25 bp, Homo sapien
aaagatgagctttttgctttgcagc

SEQ ID NO: 4911479 - DNA, 25 bp, Homo sapien
gaaaagatgagctttttgctttgca

SEQ ID NO: 4911480 - DNA, 25 bp, Homo sapien
gaagctacaatgaaaagatgagctt

SEQ ID NO: 4911481 - DNA, 25 bp, Homo sapien
cctttggtcgtatcttctattctga

SEQ ID NO: 4911482 - DNA, 25 bp, Homo sapien
gtatccgaagtagcatactgtgaat

SEQ ID NO: 4911483 - DNA, 25 bp, Homo sapien
tgcggtatccgaagtagcatactgt

SEQ ID NO: 4911484 - DNA, 25 bp, Homo sapien
ttcttccctttggtcgtatcttcta

SEQ ID NO: 4911485 - DNA, 25 bp, Homo sapien
tatctatgggtagtggactcctcct

SEQ ID NO: 4911486 - DNA, 25 bp, Homo sapien
caaattcggatcacttcggtagcgt

SEQ ID NO: 4911487 - DNA, 25 bp, Homo sapien
acttgtatattcaggcgtggaagcc

SEQ ID NO: 4911488 - DNA, 25 bp, Homo sapien
tgaactgctcaacgaaatctggcgc

SEQ ID NO: 4911489 - DNA, 25 bp, Homo sapien
tccaaccagttgtaatccatgtctc

SEQ ID NO: 4911490 - DNA, 25 bp, Homo sapien
tgccaagacgtatgatccaaccagt

SEQ ID NO: 4911491 - DNA, 25 bp, Homo sapien
tgctatgccaagacgtatgatccaa

SEQ ID NO: 4911492 - DNA, 25 bp, Homo sapien
agacgtatgatccaaccagttgtaa

SEQ ID NO: 4911493 - DNA, 25 bp, Homo sapien
gctactacacgtatctaccccagag

SEQ ID NO: 4911494 - DNA, 25 bp, Homo sapien
cagacctggtgttagagtccgacaa

SEQ ID NO: 4911495 - DNA, 25 bp, Homo sapien
tcctcgttaagggttgtgctactac

SEQ ID NO: 4911496 - DNA, 25 bp, Homo sapien
tccgacaaaactgcctgctcactag

SEQ ID NO: 4911497 - DNA, 25 bp, Homo sapien
tatgttctgttttaatgagtgacag

SEQ ID NO: 4911498 - DNA, 25 bp, Homo sapien
ccttgagatgccctgtccttttatt

SEQ ID NO: 4911499 - DNA, 25 bp, Homo sapien
tgagtgacagagagcaaacgaagac

SEQ ID NO: 4911500 - DNA, 25 bp, Homo sapien
aaaggcaggctccacaatctcagta

SEQ ID NO: 4911501 - DNA, 25 bp, Homo sapien
cacttccatcttttagacgcttatt

SEQ ID NO: 4911502 - DNA, 25 bp, Homo sapien
taaacgatctccatctttagatggt

SEQ ID NO: 4911503 - DNA, 25 bp, Homo sapien
aaaatgcgaccaattaaacgatctc

SEQ ID NO: 4911504 - DNA, 25 bp, Homo sapien
cattgctcctgaatctcgaggtaca

SEQ ID NO: 4911505 - DNA, 25 bp, Homo sapien
ctggtctaagatgtcctacagtatc

SEQ ID NO: 4911506 - DNA, 25 bp, Homo sapien
gtctaagatgtcctacagtatcagc

SEQ ID NO: 4911507 - DNA, 25 bp, Homo sapien
ataaatgcacaaagccgacctgatt

SEQ ID NO: 4911508 - DNA, 25 bp, Homo sapien
gacctgattcagtcatctttcctcc

SEQ ID NO: 4911509 - DNA, 25 bp, Homo sapien
tccttgcagtagtcttccattccat

SEQ ID NO: 4911510 - DNA, 25 bp, Homo sapien
cttgtggttcaggtttggattctag

SEQ ID NO: 4911511 - DNA, 25 bp, Homo sapien
aataggccttgaaactacaagttct

SEQ ID NO: 4911512 - DNA, 25 bp, Homo sapien
acttcctcaaatgtggctccttgca

SEQ ID NO: 4911513 - DNA, 25 bp, Homo sapien
gctatcaggtattcgcggtatatct

SEQ ID NO: 4911514 - DNA, 25 bp, Homo sapien
tgtgctatcaggtattcgcggtata

SEQ ID NO: 4911515 - DNA, 25 bp, Homo sapien
tgtgcatgtgtgctatcaggtattc

SEQ ID NO: 4911516 - DNA, 25 bp, Homo sapien
catgtgtgctatcaggtattcgcgg

SEQ ID NO: 4911517 - DNA, 25 bp, Homo sapien
ttcacattactagttaaatacttca

SEQ ID NO: 4911518 - DNA, 25 bp, Homo sapien
acttgataacaaggttatcatattt

SEQ ID NO: 4911519 - DNA, 25 bp, Homo sapien
tctctgatgaatgcaattataaata

SEQ ID NO: 4911520 - DNA, 25 bp, Homo sapien
tttcttacttcacattactagttaa

SEQ ID NO: 4911521 - DNA, 25 bp, Homo sapien
tgagccaccacgctaggccaggaag

SEQ ID NO: 4911522 - DNA, 25 bp, Homo sapien
gagccaccacgctaggccaggaaga

SEQ ID NO: 4911523 - DNA, 25 bp, Homo sapien
agccaccacgctaggccaggaagac

SEQ ID NO: 4911524 - DNA, 25 bp, Homo sapien
tccctcaacattccaggactcatgg

SEQ ID NO: 4911525 - DNA, 25 bp, Homo sapien
agaaatagaaggacgatccattttt

SEQ ID NO: 4911526 - DNA, 25 bp, Homo sapien
gtgggacatccctcaacattccagg

SEQ ID NO: 4911527 - DNA, 25 bp, Homo sapien
atagaaggacgatccattttttgag

SEQ ID NO: 4911528 - DNA, 25 bp, Homo sapien
tctaactcttaataaatgaagcagt

SEQ ID NO: 4911529 - DNA, 25 bp, Homo sapien
tgaagcagtatgataaataatcaaa

SEQ ID NO: 4911530 - DNA, 25 bp, Homo sapien
tgggaggttaaaagcacaattatgt

SEQ ID NO: 4911531 - DNA, 25 bp, Homo sapien
attatgttctaggaataacttggtt

SEQ ID NO: 4911532 - DNA, 25 bp, Homo sapien
caaaaggcgttgttcttctactaag

SEQ ID NO: 4911533 - DNA, 25 bp, Homo sapien
aaggcgttgttcttctactaaggct

SEQ ID NO: 4911534 - DNA, 25 bp, Homo sapien
ttgccattactttaccatataaggg

SEQ ID NO: 4911535 - DNA, 25 bp, Homo sapien
tagttcctgttcagccccaatttca

SEQ ID NO: 4911536 - DNA, 25 bp, Homo sapien
tttcctaagtaggacctaagcagca

SEQ ID NO: 4911537 - DNA, 25 bp, Homo sapien
gcaaggagagcataatactacttaa

SEQ ID NO: 4911538 - DNA, 25 bp, Homo sapien
tttgctcccaaaattgtaactatta

SEQ ID NO: 4911539 - DNA, 25 bp, Homo sapien
caaccttgtcaaaccatagttttat

SEQ ID NO: 4911540 - DNA, 25 bp, Homo sapien
tattaattggtgaccaaccttgtca

SEQ ID NO: 4911541 - DNA, 25 bp, Homo sapien
ccaaaattgtaactattaattggtg

SEQ ID NO: 4911542 - DNA, 25 bp, Homo sapien
cgaaattctcttcggtggactggag

SEQ ID NO: 4911543 - DNA, 25 bp, Homo sapien
gtaatctctagcattcgttcccgaa

SEQ ID NO: 4911544 - DNA, 25 bp, Homo sapien
cgaacacgagcttgatcccaaaggg

SEQ ID NO: 4911545 - DNA, 25 bp, Homo sapien
tttcttcctctcgaacacgagcttg

SEQ ID NO: 4911546 - DNA, 25 bp, Homo sapien
tccatggagctgtcttcgtggcata

SEQ ID NO: 4911547 - DNA, 25 bp, Homo sapien
ttgtaccaatgtggctcatcatcta

SEQ ID NO: 4911548 - DNA, 25 bp, Homo sapien
aatgaagagacatcatgcgtctgaa

SEQ ID NO: 4911549 - DNA, 25 bp, Homo sapien
gagctgtcttcgtggcatatatgga

SEQ ID NO: 4911550 - DNA, 25 bp, Homo sapien
tacaatctaatgttggaatatctcc

SEQ ID NO: 4911551 - DNA, 25 bp, Homo sapien
tgttcacacccattttcagtcagtg

SEQ ID NO: 4911552 - DNA, 25 bp, Homo sapien
tctgtctcaatagatttgtcacttc

SEQ ID NO: 4911553 - DNA, 25 bp, Homo sapien
cagtcagtgtctattgctacttcca

SEQ ID NO: 4911554 - DNA, 25 bp, Homo sapien
tactacaccaattccatcatcacag

SEQ ID NO: 4911555 - DNA, 25 bp, Homo sapien
tgatactacaccaattccatcatca

SEQ ID NO: 4911556 - DNA, 25 bp, Homo sapien
catcacagtcatagtcagagacttc

SEQ ID NO: 4911557 - DNA, 25 bp, Homo sapien
gacttcactatcacttattctcttt

SEQ ID NO: 4911558 - DNA, 25 bp, Homo sapien
tctggcactgataatgttgagcttt

SEQ ID NO: 4911559 - DNA, 25 bp, Homo sapien
cactgggtgaccatgatctagtcct

SEQ ID NO: 4911560 - DNA, 25 bp, Homo sapien
tgagctttgaagatctcgaccatca

SEQ ID NO: 4911561 - DNA, 25 bp, Homo sapien
taacatctactcgatgaggagaccc

SEQ ID NO: 4911562 - DNA, 25 bp, Homo sapien
tggaacttgcaccagtggcttgctg

SEQ ID NO: 4911563 - DNA, 25 bp, Homo sapien
gcttgcagaaattctatggtgggac

SEQ ID NO: 4911564 - DNA, 25 bp, Homo sapien
gactcacacttggactaagccacta

SEQ ID NO: 4911565 - DNA, 25 bp, Homo sapien
cttggacatccaacactaggttctt

SEQ ID NO: 4911566 - DNA, 25 bp, Homo sapien
taagacctgtagctgcagattttct

SEQ ID NO: 4911567 - DNA, 25 bp, Homo sapien
gatttccagtaagcttaagacctgt

SEQ ID NO: 4911568 - DNA, 25 bp, Homo sapien
tgtataagtgtgtcattctaactgg

SEQ ID NO: 4911569 - DNA, 25 bp, Homo sapien
ccattaagcttgtctgtacttaacc

SEQ ID NO: 4911570 - DNA, 25 bp, Homo sapien
tattctattgataagtgtatcacat

SEQ ID NO: 4911571 - DNA, 25 bp, Homo sapien
tgtttgtcaacttaatatgtcagat

SEQ ID NO: 4911572 - DNA, 25 bp, Homo sapien
ccatgtttgtcaacttaatatgtca

SEQ ID NO: 4911573 - DNA, 25 bp, Homo sapien
ttaaatttcagattacacgttattc

SEQ ID NO: 4911574 - DNA, 25 bp, Homo sapien
gctaatgattactaagggtgggtcc

SEQ ID NO: 4911575 - DNA, 25 bp, Homo sapien
taggaccagtctacagagctacaga

SEQ ID NO: 4911576 - DNA, 25 bp, Homo sapien
tgtcttgagttcctaaaaccatcgg

SEQ ID NO: 4911577 - DNA, 25 bp, Homo sapien
tactgacctacagaaagagggttga

SEQ ID NO: 4911578 - DNA, 25 bp, Homo sapien
gatatgaatggtgcacgtattcccc

SEQ ID NO: 4911579 - DNA, 25 bp, Homo sapien
ccagtttacctaggactccagagca

SEQ ID NO: 4911580 - DNA, 25 bp, Homo sapien
tcccactgtggcgtagcttgctaag

SEQ ID NO: 4911581 - DNA, 25 bp, Homo sapien
gtcatgtgccatcctagtcctctgg

SEQ ID NO: 4911582 - DNA, 25 bp, Homo sapien
gcaatgttcactgaaagcccaaggt

SEQ ID NO: 4911583 - DNA, 25 bp, Homo sapien
tgctttttgctctaacccactgtgg

SEQ ID NO: 4911584 - DNA, 25 bp, Homo sapien
taagttcccctaggccctgatcaga

SEQ ID NO: 4911585 - DNA, 25 bp, Homo sapien
taagcttgtactcagggactccatg

SEQ ID NO: 4911586 - DNA, 25 bp, Homo sapien
tggagaataatggtcatccatgaca

SEQ ID NO: 4911587 - DNA, 25 bp, Homo sapien
tgtattataatgtccggtcatagtg

SEQ ID NO: 4911588 - DNA, 25 bp, Homo sapien
cacgatgtctgtccattcggctaat

SEQ ID NO: 4911589 - DNA, 25 bp, Homo sapien
gtcatagtgcgggtccctcgaagcc

SEQ ID NO: 4911590 - DNA, 25 bp, Homo sapien
ctcttccaaatacagcaaacaatct

SEQ ID NO: 4911591 - DNA, 25 bp, Homo sapien
cagagagctcttccaaatacagcaa

SEQ ID NO: 4911592 - DNA, 25 bp, Homo sapien
gagctcttccaaatacagcaaacaa

SEQ ID NO: 4911593 - DNA, 25 bp, Homo sapien
gagagctcttccaaatacagcaaac

SEQ ID NO: 4911594 - DNA, 25 bp, Homo sapien
tgatgatggtcaatggtctgactgt

SEQ ID NO: 4911595 - DNA, 25 bp, Homo sapien
caatggtctgactgtatctggagcg

SEQ ID NO: 4911596 - DNA, 25 bp, Homo sapien
tatctggagcgaggtagagtaagaa

SEQ ID NO: 4911597 - DNA, 25 bp, Homo sapien
tctgactgtatctggagcgaggtag

SEQ ID NO: 4911598 - DNA, 25 bp, Homo sapien
gttgcattacatacaaaggtacaag

SEQ ID NO: 4911599 - DNA, 25 bp, Homo sapien
gattactaggtcagcattcacatgt

SEQ ID NO: 4911600 - DNA, 25 bp, Homo sapien
ccaagaatctcaaagtggattggga

SEQ ID NO: 4911601 - DNA, 25 bp, Homo sapien
cacaaggatataacaggcaaggaga

SEQ ID NO: 4911602 - DNA, 25 bp, Homo sapien
ccagggttctagttatgttacccat

SEQ ID NO: 4911603 - DNA, 25 bp, Homo sapien
tgactccactagctttgtcagaatc

SEQ ID NO: 4911604 - DNA, 25 bp, Homo sapien
cactagctttgtcagaatcctttct

SEQ ID NO: 4911605 - DNA, 25 bp, Homo sapien
catgactccactagctttgtcagaa

SEQ ID NO: 4911606 - DNA, 25 bp, Homo sapien
gggcagatcttccagtcattaatga

SEQ ID NO: 4911607 - DNA, 25 bp, Homo sapien
tccgctcaaggagaggccgttgttc

SEQ ID NO: 4911608 - DNA, 25 bp, Homo sapien
taatgaaggcatcgacctcatgagg

SEQ ID NO: 4911609 - DNA, 25 bp, Homo sapien
catgaggtttgtatcaggacgttca

SEQ ID NO: 4911610 - DNA, 25 bp, Homo sapien
aagctgtggaagctgtcggcccctt

SEQ ID NO: 4911611 - DNA, 25 bp, Homo sapien
cgtcctgcgactggagtacttgatg

SEQ ID NO: 4911612 - DNA, 25 bp, Homo sapien
gacagacccagtacgaggatgagac

SEQ ID NO: 4911613 - DNA, 25 bp, Homo sapien
tctatccaacgttccctttggtgga

SEQ ID NO: 4911614 - DNA, 25 bp, Homo sapien
taaggttctatctccttgactccat

SEQ ID NO: 4911615 - DNA, 25 bp, Homo sapien
ccaaaaaggctgttagcacaaaaca

SEQ ID NO: 4911616 - DNA, 25 bp, Homo sapien
cacatgctcagtttcttcattaact

SEQ ID NO: 4911617 - DNA, 25 bp, Homo sapien
cccctgctcttccacatgctcagtt

SEQ ID NO: 4911618 - DNA, 25 bp, Homo sapien
ccacatgctcagtttcttcattaac

SEQ ID NO: 4911619 - DNA, 25 bp, Homo sapien
gctcttccacatgctcagtttcttc

SEQ ID NO: 4911620 - DNA, 25 bp, Homo sapien
ctgactgcacctgctacaacaatat

SEQ ID NO: 4911621 - DNA, 25 bp, Homo sapien
tagcttcaactatccttctgactgc

SEQ ID NO: 4911622 - DNA, 25 bp, Homo sapien
tatgagtcacccctctagcttcaac

SEQ ID NO: 4911623 - DNA, 25 bp, Homo sapien
tactttaacatatccacgaaatgct

SEQ ID NO: 4911624 - DNA, 25 bp, Homo sapien
ctttttcggcaatggtttgtcatca

SEQ ID NO: 4911625 - DNA, 25 bp, Homo sapien
ctggtgtttctttttcggcaatggt

SEQ ID NO: 4911626 - DNA, 25 bp, Homo sapien
tcatcacttattgtaccattcacct

SEQ ID NO: 4911627 - DNA, 25 bp, Homo sapien
tttctgctggtcttcccatgtaact

SEQ ID NO: 4911628 - DNA, 25 bp, Homo sapien
tcatatggtttccaaaccctgacaa

SEQ ID NO: 4911629 - DNA, 25 bp, Homo sapien
gctttcatatggtttccaaaccctg

SEQ ID NO: 4911630 - DNA, 25 bp, Homo sapien
catatggtttccaaaccctgacaaa

SEQ ID NO: 4911631 - DNA, 25 bp, Homo sapien
tcatgctttcatatggtttccaaac

SEQ ID NO: 4911632 - DNA, 25 bp, Homo sapien
tgacatttagggtttcaatttccag

SEQ ID NO: 4911633 - DNA, 25 bp, Homo sapien
atgacatttagggtttcaatttcca

SEQ ID NO: 4911634 - DNA, 25 bp, Homo sapien
tcatgacatttagggtttcaatttc

SEQ ID NO: 4911635 - DNA, 25 bp, Homo sapien
catgacatttagggtttcaatttcc

SEQ ID NO: 4911636 - DNA, 25 bp, Homo sapien
ggtaaaaatactgcaagtagggctg

SEQ ID NO: 4911637 - DNA, 25 bp, Homo sapien
taacaatagctgtgtcaattcaaga

SEQ ID NO: 4911638 - DNA, 25 bp, Homo sapien
caagattttcctagatgtagcataa

SEQ ID NO: 4911639 - DNA, 25 bp, Homo sapien
gagcacgttatggtttcagttgcaa

SEQ ID NO: 4911640 - DNA, 25 bp, Homo sapien
tgcatatcttctccttgtagagtcc

SEQ ID NO: 4911641 - DNA, 25 bp, Homo sapien
ctgcatatcttctccttgtagagtc

SEQ ID NO: 4911642 - DNA, 25 bp, Homo sapien
tatacactcacactaggaaacgcct

SEQ ID NO: 4911643 - DNA, 25 bp, Homo sapien
caaacttgtgtgaagctactggcca

SEQ ID NO: 4911644 - DNA, 25 bp, Homo sapien
gaaacgcctgcaaggatagggagct

SEQ ID NO: 4911645 - DNA, 25 bp, Homo sapien
cagtgaccaggacttgtaggttcta

SEQ ID NO: 4911646 - DNA, 25 bp, Homo sapien
aaatttccccaagccatcaagaagc

SEQ ID NO: 4911647 - DNA, 25 bp, Homo sapien
tggtttctacctacaacttgactga

SEQ ID NO: 4911648 - DNA, 25 bp, Homo sapien
catccgaagtgtgctaatgagccaa

SEQ ID NO: 4911649 - DNA, 25 bp, Homo sapien
caatcttagagaaccaatgccatca

SEQ ID NO: 4911650 - DNA, 25 bp, Homo sapien
ggccaatttaccttcttatatatta

SEQ ID NO: 4911651 - DNA, 25 bp, Homo sapien
gcacgatctataatctataactatg

SEQ ID NO: 4911652 - DNA, 25 bp, Homo sapien
tatgttcttcccataagttatgcaa

SEQ ID NO: 4911653 - DNA, 25 bp, Homo sapien
gttatgcaacataatgtattaatca

SEQ ID NO: 4911654 - DNA, 25 bp, Homo sapien
aaaaagagtggaatcataaatggat

SEQ ID NO: 4911655 - DNA, 25 bp, Homo sapien
tcaaaaagagtggaatcataaatgg

SEQ ID NO: 4911656 - DNA, 25 bp, Homo sapien
caaaaagagtggaatcataaatgga

SEQ ID NO: 4911657 - DNA, 25 bp, Homo sapien
aaagagtggaatcataaatggattc

SEQ ID NO: 4911658 - DNA, 25 bp, Homo sapien
catttggcgatttctctcctctata

SEQ ID NO: 4911659 - DNA, 25 bp, Homo sapien
ttttcatttggcgatttctctcctc

SEQ ID NO: 4911660 - DNA, 25 bp, Homo sapien
gttaattttcatttggcgatttctc

SEQ ID NO: 4911661 - DNA, 25 bp, Homo sapien
taattttcatttggcgatttctctc

SEQ ID NO: 4911662 - DNA, 25 bp, Homo sapien
gttccagtctgggatctgatccggc

SEQ ID NO: 4911663 - DNA, 25 bp, Homo sapien
cttcgaatggtaatcttgttccagt

SEQ ID NO: 4911664 - DNA, 25 bp, Homo sapien
tgttccagtctgggatctgatccgg

SEQ ID NO: 4911665 - DNA, 25 bp, Homo sapien
ccagtctgggatctgatccggctac

SEQ ID NO: 4911666 - DNA, 25 bp, Homo sapien
ctgtgaatgggtgcctaaaagacta

SEQ ID NO: 4911667 - DNA, 25 bp, Homo sapien
aagtgcctagggtcaggcatgcaca

SEQ ID NO: 4911668 - DNA, 25 bp, Homo sapien
ctcattgcctgtgccttgaaagtca

SEQ ID NO: 4911669 - DNA, 25 bp, Homo sapien
tcagtgttgagaagcgcataagtgc

SEQ ID NO: 4911670 - DNA, 25 bp, Homo sapien
gggattctgctataggacctgaagt

SEQ ID NO: 4911671 - DNA, 25 bp, Homo sapien
atatcagcaggttcactgatttcca

SEQ ID NO: 4911672 - DNA, 25 bp, Homo sapien
tcagcaggttcactgatttccagat

SEQ ID NO: 4911673 - DNA, 25 bp, Homo sapien
ctcttgggattctgctataggacct

SEQ ID NO: 4911674 - DNA, 25 bp, Homo sapien
cttctgcctcagccttctaactagc

SEQ ID NO: 4911675 - DNA, 25 bp, Homo sapien
gcagcgatctcggctcattgcaacc

SEQ ID NO: 4911676 - DNA, 25 bp, Homo sapien
ctgccttggcctcccgaagtgctgg

SEQ ID NO: 4911677 - DNA, 25 bp, Homo sapien
tgcagcgatctcggctcattgcaac

SEQ ID NO: 4911678 - DNA, 25 bp, Homo sapien
ttgatactaaggaaagttaaactga

SEQ ID NO: 4911679 - DNA, 25 bp, Homo sapien
ccatgcctggtcacagttagttttt

SEQ ID NO: 4911680 - DNA, 25 bp, Homo sapien
caatctatcaccataacacattatt

SEQ ID NO: 4911681 - DNA, 25 bp, Homo sapien
tatataacattaacacttagctgtg

SEQ ID NO: 4911682 - DNA, 25 bp, Homo sapien
tagtcaattatgaccttccctaagg

SEQ ID NO: 4911683 - DNA, 25 bp, Homo sapien
tcagagatagaagtgccagcgctgc

SEQ ID NO: 4911684 - DNA, 25 bp, Homo sapien
tttacagaggaagaattattgccag

SEQ ID NO: 4911685 - DNA, 25 bp, Homo sapien
aaaccccaggtttagagatctcagg

SEQ ID NO: 4911686 - DNA, 25 bp, Homo sapien
tcaacaatgagagagaagctaaatt

SEQ ID NO: 4911687 - DNA, 25 bp, Homo sapien
gaatatagctgatggatgaacaatg

SEQ ID NO: 4911688 - DNA, 25 bp, Homo sapien
tataccaaggtaatgagctacgaat

SEQ ID NO: 4911689 - DNA, 25 bp, Homo sapien
tgaacaatgaatggcctgttaacca

SEQ ID NO: 4911690 - DNA, 25 bp, Homo sapien
tagaaccttatcctgacatccaaag

SEQ ID NO: 4911691 - DNA, 25 bp, Homo sapien
gtactcgtgtatcccagctttcctg

SEQ ID NO: 4911692 - DNA, 25 bp, Homo sapien
tatgacacttcttggctgacataga

SEQ ID NO: 4911693 - DNA, 25 bp, Homo sapien
tactgattcccgactgcaggatgaa

SEQ ID NO: 4911694 - DNA, 25 bp, Homo sapien
cagtagatccgatataagtgatctg

SEQ ID NO: 4911695 - DNA, 25 bp, Homo sapien
cattttggccaagataaattgagtg

SEQ ID NO: 4911696 - DNA, 25 bp, Homo sapien
gcaacagagcataaacagtagatcc

SEQ ID NO: 4911697 - DNA, 25 bp, Homo sapien
tattcaaattacgtgagaattggcc

SEQ ID NO: 4911698 - DNA, 25 bp, Homo sapien
cgtaaatgctttaggttaatgacct

SEQ ID NO: 4911699 - DNA, 25 bp, Homo sapien
aacttcctggaattgaaatagtcag

SEQ ID NO: 4911700 - DNA, 25 bp, Homo sapien
aaatagtcagatagttaactggcac

SEQ ID NO: 4911701 - DNA, 25 bp, Homo sapien
ttttgatgaatcctagaaatactag

SEQ ID NO: 4911702 - DNA, 25 bp, Homo sapien
tagtagaaacattatctgcccctct

SEQ ID NO: 4911703 - DNA, 25 bp, Homo sapien
tatctgcccctctatgaggatccca

SEQ ID NO: 4911704 - DNA, 25 bp, Homo sapien
atcactgtccgaagatttagtagaa

SEQ ID NO: 4911705 - DNA, 25 bp, Homo sapien
tttagtagaaacattatctgcccct

SEQ ID NO: 4911706 - DNA, 25 bp, Homo sapien
ccttgaaaccgcagatatatcactt

SEQ ID NO: 4911707 - DNA, 25 bp, Homo sapien
gagaagcactactagtccttgaaac

SEQ ID NO: 4911708 - DNA, 25 bp, Homo sapien
tactagtccttgaaaccgcagatat

SEQ ID NO: 4911709 - DNA, 25 bp, Homo sapien
gcactactagtccttgaaaccgcag

SEQ ID NO: 4911710 - DNA, 25 bp, Homo sapien
ttggacagacatgtagcttgtgctg

SEQ ID NO: 4911711 - DNA, 25 bp, Homo sapien
tcctcctgggcgttctgattggaca

SEQ ID NO: 4911712 - DNA, 25 bp, Homo sapien
tcttgtttcctcctgggcgttctga

SEQ ID NO: 4911713 - DNA, 25 bp, Homo sapien
cgttctgattggacagacatgtagc

SEQ ID NO: 4911714 - DNA, 25 bp, Homo sapien
aacttacttcagtgtatactagaga

SEQ ID NO: 4911715 - DNA, 25 bp, Homo sapien
tagagaagcactgtataaatagcac

SEQ ID NO: 4911716 - DNA, 25 bp, Homo sapien
aagttgtgatctccctgttataaaa

SEQ ID NO: 4911717 - DNA, 25 bp, Homo sapien
gcactgtataaatagcacttaattg

SEQ ID NO: 4911718 - DNA, 25 bp, Homo sapien
tatctcttcatgcttatccccttct

SEQ ID NO: 4911719 - DNA, 25 bp, Homo sapien
atctcttcatgcttatccccttctt

SEQ ID NO: 4911720 - DNA, 25 bp, Homo sapien
tctcttcatgcttatccccttcttt

SEQ ID NO: 4911721 - DNA, 25 bp, Homo sapien
actatctcttcatgcttatcccctt

SEQ ID NO: 4911722 - DNA, 25 bp, Homo sapien
ttcccttgctcgtgtatatcttgtg

SEQ ID NO: 4911723 - DNA, 25 bp, Homo sapien
cccttgctcgtgtatatcttgtgtt

SEQ ID NO: 4911724 - DNA, 25 bp, Homo sapien
ctttcccttgctcgtgtatatcttg

SEQ ID NO: 4911725 - DNA, 25 bp, Homo sapien
gctcgtgtatatcttgtgttttttc

SEQ ID NO: 4911726 - DNA, 25 bp, Homo sapien
ggtgcgtgaatcattgaaaaatcca

SEQ ID NO: 4911727 - DNA, 25 bp, Homo sapien
ttcctgtttgttgcatactatcatc

SEQ ID NO: 4911728 - DNA, 25 bp, Homo sapien
gcatactatcatctaagctatggaa

SEQ ID NO: 4911729 - DNA, 25 bp, Homo sapien
taagctatggaaaggtgcgtgaatc

SEQ ID NO: 4911730 - DNA, 25 bp, Homo sapien
gaatggagggaagaaattgtgccca

SEQ ID NO: 4911731 - DNA, 25 bp, Homo sapien
atttcagaggcaattaagcattaga

SEQ ID NO: 4911732 - DNA, 25 bp, Homo sapien
ggtctcttgactgctgccgtgtaag

SEQ ID NO: 4911733 - DNA, 25 bp, Homo sapien
gcattagaatcaacaagacttggtg

SEQ ID NO: 4911734 - DNA, 25 bp, Homo sapien
tttacttagcgtaagttttgcaagc

SEQ ID NO: 4911735 - DNA, 25 bp, Homo sapien
caccactatctattttgacaacatt

SEQ ID NO: 4911736 - DNA, 25 bp, Homo sapien
cagtggttcaatcctttttacagct

SEQ ID NO: 4911737 - DNA, 25 bp, Homo sapien
cattgtttacctatttaccaaagca

SEQ ID NO: 4911738 - DNA, 25 bp, Homo sapien
aattcctgcagtcaagctatttaac

SEQ ID NO: 4911739 - DNA, 25 bp, Homo sapien
tgcagcctttgcctcactagccaaa

SEQ ID NO: 4911740 - DNA, 25 bp, Homo sapien
catttatacaagcactctcagtttc

SEQ ID NO: 4911741 - DNA, 25 bp, Homo sapien
tcactagccaaagggatcctcccat

SEQ ID NO: 4911742 - DNA, 25 bp, Homo sapien
caattatcccaaacttacataaatc

SEQ ID NO: 4911743 - DNA, 25 bp, Homo sapien
gcccaattatcccaaacttacataa

SEQ ID NO: 4911744 - DNA, 25 bp, Homo sapien
ccaattatcccaaacttacataaat

SEQ ID NO: 4911745 - DNA, 25 bp, Homo sapien
ccgcccaattatcccaaacttacat

SEQ ID NO: 4911746 - DNA, 25 bp, Homo sapien
gctggcttagacttttcttcaattc

SEQ ID NO: 4911747 - DNA, 25 bp, Homo sapien
ctgaagtccttgagagctggcttag

SEQ ID NO: 4911748 - DNA, 25 bp, Homo sapien
gagagctggcttagacttttcttca

SEQ ID NO: 4911749 - DNA, 25 bp, Homo sapien
tccttgagagctggcttagactttt

SEQ ID NO: 4911750 - DNA, 25 bp, Homo sapien
caccctgaaagtgtggtgacaccaa

SEQ ID NO: 4911751 - DNA, 25 bp, Homo sapien
tgaacatgctgtttcccctgaggtt

SEQ ID NO: 4911752 - DNA, 25 bp, Homo sapien
gacaactggctatgctaacttatac

SEQ ID NO: 4911753 - DNA, 25 bp, Homo sapien
tatcagttagtagaaatgatcaccc

SEQ ID NO: 4911754 - DNA, 25 bp, Homo sapien
caaagggttgaagtcaagatatggc

SEQ ID NO: 4911755 - DNA, 25 bp, Homo sapien
gacaagatcctggaaagagaagggt

SEQ ID NO: 4911756 - DNA, 25 bp, Homo sapien
cgtgaacatacgtgcaaggaacaaa

SEQ ID NO: 4911757 - DNA, 25 bp, Homo sapien
cttaaaatcctaaagtctcaggcca

SEQ ID NO: 4911758 - DNA, 25 bp, Homo sapien
ctgacctattgatctgtccgcctcg

SEQ ID NO: 4911759 - DNA, 25 bp, Homo sapien
agggtttcaccatgttagccaagat

SEQ ID NO: 4911760 - DNA, 25 bp, Homo sapien
atctcctgacctattgatctgtccg

SEQ ID NO: 4911761 - DNA, 25 bp, Homo sapien
tcgatctcctgacctattgatctgt

SEQ ID NO: 4911762 - DNA, 25 bp, Homo sapien
tacttgattcatagaccctgttggg

SEQ ID NO: 4911763 - DNA, 25 bp, Homo sapien
tcacggagcgtcagcctggtagtac

SEQ ID NO: 4911764 - DNA, 25 bp, Homo sapien
agaatagtaaattggccctcacgga

SEQ ID NO: 4911765 - DNA, 25 bp, Homo sapien
tgttcaagcaacaagatgtgtccct

SEQ ID NO: 4911766 - DNA, 25 bp, Homo sapien
ggtagtctgctgcttaccacctcca

SEQ ID NO: 4911767 - DNA, 25 bp, Homo sapien
gctactccccactcactaagatttg

SEQ ID NO: 4911768 - DNA, 25 bp, Homo sapien
ttagtctttcctctaccgctgattc

SEQ ID NO: 4911769 - DNA, 25 bp, Homo sapien
gcagcacaacacaattctatatact

SEQ ID NO: 4911770 - DNA, 25 bp, Homo sapien
tgagagagaacatggtctagacatc

SEQ ID NO: 4911771 - DNA, 25 bp, Homo sapien
tatgtatgcagacatagtcctttac

SEQ ID NO: 4911772 - DNA, 25 bp, Homo sapien
tagacatccagatttatatgtatgc

SEQ ID NO: 4911773 - DNA, 25 bp, Homo sapien
catggtctagacatccagatttata

SEQ ID NO: 4911774 - DNA, 25 bp, Homo sapien
tccatgctctggcatacggggactg

SEQ ID NO: 4911775 - DNA, 25 bp, Homo sapien
ggtgttaggtcccaaggcagcaagt

SEQ ID NO: 4911776 - DNA, 25 bp, Homo sapien
ttggtgttaggtcccaaggcagcaa

SEQ ID NO: 4911777 - DNA, 25 bp, Homo sapien
tgaaatggtacctgccctccatgct

SEQ ID NO: 4911778 - DNA, 25 bp, Homo sapien
cctagattcatgagatgatgcgcca

SEQ ID NO: 4911779 - DNA, 25 bp, Homo sapien
gatatactgtgaccagtctgctaaa

SEQ ID NO: 4911780 - DNA, 25 bp, Homo sapien
caacccacattagttcttgtcatgg

SEQ ID NO: 4911781 - DNA, 25 bp, Homo sapien
caaacgaaaagagcaatcaaggtcc

SEQ ID NO: 4911782 - DNA, 25 bp, Homo sapien
tatgaatagtagcactagagtggtg

SEQ ID NO: 4911783 - DNA, 25 bp, Homo sapien
tcaccagggatgagtttatgaatag

SEQ ID NO: 4911784 - DNA, 25 bp, Homo sapien
ccttgaaacttagagatcaccaggg

SEQ ID NO: 4911785 - DNA, 25 bp, Homo sapien
ttttgatgagagaaagattgcagcg

SEQ ID NO: 4911786 - DNA, 25 bp, Homo sapien
tccactgatgctggtgctttttgtc

SEQ ID NO: 4911787 - DNA, 25 bp, Homo sapien
tctccactgatgctggtgctttttg

SEQ ID NO: 4911788 - DNA, 25 bp, Homo sapien
cactgatgctggtgctttttgtcat

SEQ ID NO: 4911789 - DNA, 25 bp, Homo sapien
gtctccactgatgctggtgcttttt

SEQ ID NO: 4911790 - DNA, 25 bp, Homo sapien
gcaccaaggctagagcgccgctttt

SEQ ID NO: 4911791 - DNA, 25 bp, Homo sapien
gatagctaccattttggcaccaagg

SEQ ID NO: 4911792 - DNA, 25 bp, Homo sapien
gagaagcactgcgacttttccgtga

SEQ ID NO: 4911793 - DNA, 25 bp, Homo sapien
ttttccgtgacagaccaacgatagc

SEQ ID NO: 4911794 - DNA, 25 bp, Homo sapien
gattatctttacaaaggatcagcag

SEQ ID NO: 4911795 - DNA, 25 bp, Homo sapien
tcagattatctttacaaaggatcag

SEQ ID NO: 4911796 - DNA, 25 bp, Homo sapien
caattgggtgtcacagcgtaactcc

SEQ ID NO: 4911797 - DNA, 25 bp, Homo sapien
ttgggtgtcacagcgtaactcctcc

SEQ ID NO: 4911798 - DNA, 25 bp, Homo sapien
tttcctcatcagaacatttccccat

SEQ ID NO: 4911799 - DNA, 25 bp, Homo sapien
gtttcctcatcagaacatttcccca

SEQ ID NO: 4911800 - DNA, 25 bp, Homo sapien
ggtattacatctacccacatgcttt

SEQ ID NO: 4911801 - DNA, 25 bp, Homo sapien
tagatgatgccctaactgagagctc

SEQ ID NO: 4911802 - DNA, 25 bp, Homo sapien
gctgggacctctgtctaccattggg

SEQ ID NO: 4911803 - DNA, 25 bp, Homo sapien
tcctccagctaccttcatcaaggct

SEQ ID NO: 4911804 - DNA, 25 bp, Homo sapien
tattaaagctttgacatcttctttc

SEQ ID NO: 4911805 - DNA, 25 bp, Homo sapien
gtctgcttccatatggtagacacca

SEQ ID NO: 4911806 - DNA, 25 bp, Homo sapien
catcattagagttctttattaaagc

SEQ ID NO: 4911807 - DNA, 25 bp, Homo sapien
tgcttccatatggtagacaccatca

SEQ ID NO: 4911808 - DNA, 25 bp, Homo sapien
cagtaatactgaattatgtgagttg

SEQ ID NO: 4911809 - DNA, 25 bp, Homo sapien
cttgcatatcagaggttcttaaatc

SEQ ID NO: 4911810 - DNA, 25 bp, Homo sapien
tatgtgagttgtcttgcatatcaga

SEQ ID NO: 4911811 - DNA, 25 bp, Homo sapien
gtttctcacaccaagcttcagtaat

SEQ ID NO: 4911812 - DNA, 25 bp, Homo sapien
accctaggcttatggtcccagcagc

SEQ ID NO: 4911813 - DNA, 25 bp, Homo sapien
ccaagtaggacccaggttcatcata

SEQ ID NO: 4911814 - DNA, 25 bp, Homo sapien
atttccagcgccacccagttcaagt

SEQ ID NO: 4911815 - DNA, 25 bp, Homo sapien
tcccagcagccttgcatatacggag

SEQ ID NO: 4911816 - DNA, 25 bp, Homo sapien
cagcatcatgttaagacaggttttc

SEQ ID NO: 4911817 - DNA, 25 bp, Homo sapien
ggcagaggaagaacaccatatgcaa

SEQ ID NO: 4911818 - DNA, 25 bp, Homo sapien
cccacattcaggactaaaggtttat

SEQ ID NO: 4911819 - DNA, 25 bp, Homo sapien
aaagcagccatctcaagttaatccc

SEQ ID NO: 4911820 - DNA, 25 bp, Homo sapien
ttaatactgtccatagaaatttaac

SEQ ID NO: 4911821 - DNA, 25 bp, Homo sapien
ctgtccatagaaatttaacaccagc

SEQ ID NO: 4911822 - DNA, 25 bp, Homo sapien
gtccatagaaatttaacaccagctt

SEQ ID NO: 4911823 - DNA, 25 bp, Homo sapien
ttaacaccagcttctgtacaacacc

SEQ ID NO: 4911824 - DNA, 25 bp, Homo sapien
tcctgagtactagctttgtcatagc

SEQ ID NO: 4911825 - DNA, 25 bp, Homo sapien
gtttttaaatcaggtgctctagagg

SEQ ID NO: 4911826 - DNA, 25 bp, Homo sapien
tatttttatgagcactctctgtaaa

SEQ ID NO: 4911827 - DNA, 25 bp, Homo sapien
aggttgaggaattgaggtcagtttt

SEQ ID NO: 4911828 - DNA, 25 bp, Homo sapien
agcggctgctcgcagtgaacgtccg

SEQ ID NO: 4911829 - DNA, 25 bp, Homo sapien
tccaatttattggagaggggtccag

SEQ ID NO: 4911830 - DNA, 25 bp, Homo sapien
agacgtggctttcctggccgccggg

SEQ ID NO: 4911831 - DNA, 25 bp, Homo sapien
tgaacgtccgaggtctcgcccggga

SEQ ID NO: 4911832 - DNA, 25 bp, Homo sapien
cgtccgcagcggttccgggaccagt

SEQ ID NO: 4911833 - DNA, 25 bp, Homo sapien
gggccagaagccaggttggtgccac

SEQ ID NO: 4911834 - DNA, 25 bp, Homo sapien
tggtgccacgggaccctgaggctct

SEQ ID NO: 4911835 - DNA, 25 bp, Homo sapien
agccaggttggtgccacgggaccct

SEQ ID NO: 4911836 - DNA, 25 bp, Homo sapien
gcttttcccgcggtacaagatacgc

SEQ ID NO: 4911837 - DNA, 25 bp, Homo sapien
catcttggacgaggacccgcttttc

SEQ ID NO: 4911838 - DNA, 25 bp, Homo sapien
aggcagacaggctactccggctctg

SEQ ID NO: 4911839 - DNA, 25 bp, Homo sapien
agttcatgcagggaaagtagccggc

SEQ ID NO: 4911840 - DNA, 25 bp, Homo sapien
gacactgctacgtggagttctctct

SEQ ID NO: 4911841 - DNA, 25 bp, Homo sapien
cgaatgctaatacccggactgcgaa

SEQ ID NO: 4911842 - DNA, 25 bp, Homo sapien
tctgctcagctgacgtgctctaggg

SEQ ID NO: 4911843 - DNA, 25 bp, Homo sapien
aacagatagagacaccaactacggg

SEQ ID NO: 4911844 - DNA, 25 bp, Homo sapien
gatcttgggttttcataggctgaca

SEQ ID NO: 4911845 - DNA, 25 bp, Homo sapien
ctaactgtctgtccactgtgtaacc

SEQ ID NO: 4911846 - DNA, 25 bp, Homo sapien
tgtttcaaagttttgctgctgcatt

SEQ ID NO: 4911847 - DNA, 25 bp, Homo sapien
ttcggtactagcaaccctctaactg

SEQ ID NO: 4911848 - DNA, 25 bp, Homo sapien
agagattgtgccttgagcacaaact

SEQ ID NO: 4911849 - DNA, 25 bp, Homo sapien
ccagagattgtgccttgagcacaaa

SEQ ID NO: 4911850 - DNA, 25 bp, Homo sapien
cagagattgtgccttgagcacaaac

SEQ ID NO: 4911851 - DNA, 25 bp, Homo sapien
tactatttaccagtcaattatcatt

SEQ ID NO: 4911852 - DNA, 25 bp, Homo sapien
cactacttactatttaccagtcaat

SEQ ID NO: 4911853 - DNA, 25 bp, Homo sapien
tcaaaactttacgaactccaaatca

SEQ ID NO: 4911854 - DNA, 25 bp, Homo sapien
ggacactacttactatttaccagtc

SEQ ID NO: 4911855 - DNA, 25 bp, Homo sapien
tacatctaaaaatgaacacagtttg

SEQ ID NO: 4911856 - DNA, 25 bp, Homo sapien
gatatacatctaaaaatgaacacag

SEQ ID NO: 4911857 - DNA, 25 bp, Homo sapien
tatacatctaaaaatgaacacagtt

SEQ ID NO: 4911858 - DNA, 25 bp, Homo sapien
atctaaaaatgaacacagtttgcaa

SEQ ID NO: 4911859 - DNA, 25 bp, Homo sapien
tgggttcaaacgctggctctattac

SEQ ID NO: 4911860 - DNA, 25 bp, Homo sapien
tgttgtgggcctaaaagaatacacg

SEQ ID NO: 4911861 - DNA, 25 bp, Homo sapien
tgaataggttgtgttgctgaatgcc

SEQ ID NO: 4911862 - DNA, 25 bp, Homo sapien
tcatgtttatatagggaagtcccct

SEQ ID NO: 4911863 - DNA, 25 bp, Homo sapien
tgtgtgagccatagttaagcaaacg

SEQ ID NO: 4911864 - DNA, 25 bp, Homo sapien
tatgtattttcaggcacaagtggtt

SEQ ID NO: 4911865 - DNA, 25 bp, Homo sapien
gagtgtctcctctctagttactagt

SEQ ID NO: 4911866 - DNA, 25 bp, Homo sapien
tttgtcttggcagcttaagaagcca

SEQ ID NO: 4911867 - DNA, 25 bp, Homo sapien
tacaatcctgcagagtatgttgaaa

SEQ ID NO: 4911868 - DNA, 25 bp, Homo sapien
tcctgaatatgttaaccacatgacc

SEQ ID NO: 4911869 - DNA, 25 bp, Homo sapien
catgaccttcatgtatcctgtgtgg

SEQ ID NO: 4911870 - DNA, 25 bp, Homo sapien
aagcactgctttaggccaatgattt

SEQ ID NO: 4911871 - DNA, 25 bp, Homo sapien
gaaactgagagttatcactgacacc

SEQ ID NO: 4911872 - DNA, 25 bp, Homo sapien
tggagagcatctacctggaatacac

SEQ ID NO: 4911873 - DNA, 25 bp, Homo sapien
tggactcagtgtcgagcccaagtag

SEQ ID NO: 4911874 - DNA, 25 bp, Homo sapien
cctacattagggaggtggactcagt

SEQ ID NO: 4911875 - DNA, 25 bp, Homo sapien
gcatgccggcacaaaatctaaattt

SEQ ID NO: 4911876 - DNA, 25 bp, Homo sapien
cctttggtgatgtctacgaagctca

SEQ ID NO: 4911877 - DNA, 25 bp, Homo sapien
tggtgatccagacaaaagcagacac

SEQ ID NO: 4911878 - DNA, 25 bp, Homo sapien
caaatcctttgttcttggtgatcca

SEQ ID NO: 4911879 - DNA, 25 bp, Homo sapien
ggccatagagaataaacaacgaaga

SEQ ID NO: 4911880 - DNA, 25 bp, Homo sapien
tcgtggccatagagaataaacaacg

SEQ ID NO: 4911881 - DNA, 25 bp, Homo sapien
cttcgtggccatagagaataaacaa

SEQ ID NO: 4911882 - DNA, 25 bp, Homo sapien
catagagaataaacaacgaagaaac

SEQ ID NO: 4911883 - DNA, 25 bp, Homo sapien
tccaaacctgtactagaaagaagca

SEQ ID NO: 4911884 - DNA, 25 bp, Homo sapien
ggcgtttggctgaagagactcacac

SEQ ID NO: 4911885 - DNA, 25 bp, Homo sapien
tgagtagggcacagaggctagaaac

SEQ ID NO: 4911886 - DNA, 25 bp, Homo sapien
gaagcaggctatgacagcaatgaag

SEQ ID NO: 4911887 - DNA, 25 bp, Homo sapien
tgccatagagtatacaacacgtagt

SEQ ID NO: 4911888 - DNA, 25 bp, Homo sapien
caaattttgggcaggtaacttatct

SEQ ID NO: 4911889 - DNA, 25 bp, Homo sapien
tctgtaggtcagagttctttggtgc

SEQ ID NO: 4911890 - DNA, 25 bp, Homo sapien
ggatgaacacgccattttagaatca

SEQ ID NO: 4911891 - DNA, 25 bp, Homo sapien
tagattatgcgtaacaaccaaatgc

SEQ ID NO: 4911892 - DNA, 25 bp, Homo sapien
tgaatcctggattaaggagaaaaac

SEQ ID NO: 4911893 - DNA, 25 bp, Homo sapien
aaatacataccacgtgtatgtggtg

SEQ ID NO: 4911894 - DNA, 25 bp, Homo sapien
tgctcaaatggtcggtaaaaataca

SEQ ID NO: 4911895 - DNA, 25 bp, Homo sapien
gcccatcggcagattttataacttc

SEQ ID NO: 4911896 - DNA, 25 bp, Homo sapien
gtaaatagtgcccatcggcagattt

SEQ ID NO: 4911897 - DNA, 25 bp, Homo sapien
aatagtgcccatcggcagattttat

SEQ ID NO: 4911898 - DNA, 25 bp, Homo sapien
agtgcccatcggcagattttataac

SEQ ID NO: 4911899 - DNA, 25 bp, Homo sapien
catcaacctctgtggtagactctgt

SEQ ID NO: 4911900 - DNA, 25 bp, Homo sapien
caacctctgtggtagactctgtgga

SEQ ID NO: 4911901 - DNA, 25 bp, Homo sapien
acctctgtggtagactctgtggaca

SEQ ID NO: 4911902 - DNA, 25 bp, Homo sapien
tcaacctctgtggtagactctgtgg

SEQ ID NO: 4911903 - DNA, 25 bp, Homo sapien
aatgcattgtcaaacttaatgtcat

SEQ ID NO: 4911904 - DNA, 25 bp, Homo sapien
ggtctgactctaccactaacttgtg

SEQ ID NO: 4911905 - DNA, 25 bp, Homo sapien
aatgctgtaactgcatatggaaggc

SEQ ID NO: 4911906 - DNA, 25 bp, Homo sapien
tatggagattttactgtgctaatgc

SEQ ID NO: 4911907 - DNA, 25 bp, Homo sapien
agtctccactctaccatttacaagg

SEQ ID NO: 4911908 - DNA, 25 bp, Homo sapien
gcttcgtaagcaagggaaacagcat

SEQ ID NO: 4911909 - DNA, 25 bp, Homo sapien
acatgaaacataggcagattgggac

SEQ ID NO: 4911910 - DNA, 25 bp, Homo sapien
ttgagaggctaccaaagctcgagca

SEQ ID NO: 4911911 - DNA, 25 bp, Homo sapien
tcgagcaagagggtgatagtccaaa

SEQ ID NO: 4911912 - DNA, 25 bp, Homo sapien
acaaaaagtgtaacagctttgtaat

SEQ ID NO: 4911913 - DNA, 25 bp, Homo sapien
aaaaagtgtaacagctttgtaatca

SEQ ID NO: 4911914 - DNA, 25 bp, Homo sapien
agatagaaacaaaaagtgtaacagc

SEQ ID NO: 4911915 - DNA, 25 bp, Homo sapien
atagaaacaaaaagtgtaacagctt

SEQ ID NO: 4911916 - DNA, 25 bp, Homo sapien
cacggccaggcctgtttctgtactt

SEQ ID NO: 4911917 - DNA, 25 bp, Homo sapien
acggccaggcctgtttctgtacttc

SEQ ID NO: 4911918 - DNA, 25 bp, Homo sapien
ttggacagtgctccttagtttttta

SEQ ID NO: 4911919 - DNA, 25 bp, Homo sapien
tgctccttagttttttacctcctgc

SEQ ID NO: 4911920 - DNA, 25 bp, Homo sapien
catctgtagactctcggcttgcctg

SEQ ID NO: 4911921 - DNA, 25 bp, Homo sapien
ctaccatctgtagactctcggcttg

SEQ ID NO: 4911922 - DNA, 25 bp, Homo sapien
gcttgcctgtcgagtcatccagttc

SEQ ID NO: 4911923 - DNA, 25 bp, Homo sapien
tcggcttgcctgtcgagtcatccag

SEQ ID NO: 4911924 - DNA, 25 bp, Homo sapien
tggcgtcccactagctgagcagggc

SEQ ID NO: 4911925 - DNA, 25 bp, Homo sapien
cactgaactggctatcagaggccaa

SEQ ID NO: 4911926 - DNA, 25 bp, Homo sapien
caaggccatccaggaaatcactgaa

SEQ ID NO: 4911927 - DNA, 25 bp, Homo sapien
gccaagcgaacaccagggaaaatca

SEQ ID NO: 4911928 - DNA, 25 bp, Homo sapien
aacaaggccacgggcccggatgatt

SEQ ID NO: 4911929 - DNA, 25 bp, Homo sapien
aaggccacgggcccggatgatttct

SEQ ID NO: 4911930 - DNA, 25 bp, Homo sapien
tgatttctacctccagctgtccctt

SEQ ID NO: 4911931 - DNA, 25 bp, Homo sapien
cacgggcccggatgatttctacctc

SEQ ID NO: 4911932 - DNA, 25 bp, Homo sapien
tggcagtgtcttggaacctggtttt

SEQ ID NO: 4911933 - DNA, 25 bp, Homo sapien
ggcagtgtcttggaacctggtttta

SEQ ID NO: 4911934 - DNA, 25 bp, Homo sapien
caatgtatttggagcactgtagcac

SEQ ID NO: 4911935 - DNA, 25 bp, Homo sapien
tatagcagagtgagttgactagctc

SEQ ID NO: 4911936 - DNA, 25 bp, Homo sapien
tccagtcctgagagatgtcctgctc

SEQ ID NO: 4911937 - DNA, 25 bp, Homo sapien
tcaccagtgccaggttatacaacag

SEQ ID NO: 4911938 - DNA, 25 bp, Homo sapien
aacacagaggagaatgagcaataaa

SEQ ID NO: 4911939 - DNA, 25 bp, Homo sapien
aaaacacagaggagaatgagcaata

SEQ ID NO: 4911940 - DNA, 25 bp, Homo sapien
aaacacagaggagaatgagcaataa

SEQ ID NO: 4911941 - DNA, 25 bp, Homo sapien
gactctcttcgaaagataatagctg

SEQ ID NO: 4911942 - DNA, 25 bp, Homo sapien
gcagactccgttatctaatagatac

SEQ ID NO: 4911943 - DNA, 25 bp, Homo sapien
ttgtggactctcttcgaaagataat

SEQ ID NO: 4911944 - DNA, 25 bp, Homo sapien
ggctatgcagactccgttatctaat

SEQ ID NO: 4911945 - DNA, 25 bp, Homo sapien
gggccactcccataaaagatttgtg

SEQ ID NO: 4911946 - DNA, 25 bp, Homo sapien
tggatagctctagttcatctaaaag

SEQ ID NO: 4911947 - DNA, 25 bp, Homo sapien
aagatttgtgatccatgcggccata

SEQ ID NO: 4911948 - DNA, 25 bp, Homo sapien
ggccataatctccccagacgatgat

SEQ ID NO: 4911949 - DNA, 25 bp, Homo sapien
ccaaggttggatctactagggagga

SEQ ID NO: 4911950 - DNA, 25 bp, Homo sapien
ttgggaagctcttcttgtcagaggg

SEQ ID NO: 4911951 - DNA, 25 bp, Homo sapien
tgggaaaagtttgaaccatccgatc

SEQ ID NO: 4911952 - DNA, 25 bp, Homo sapien
ctatgaacgagagtaagaaggtcca

SEQ ID NO: 4911953 - DNA, 25 bp, Homo sapien
taccagggtttgcaacctgtgattt

SEQ ID NO: 4911954 - DNA, 25 bp, Homo sapien
tgtaacgctggttgctgtgacaaca

SEQ ID NO: 4911955 - DNA, 25 bp, Homo sapien
caacattaagcatgcagtgttacca

SEQ ID NO: 4911956 - DNA, 25 bp, Homo sapien
caggctcagaagacacaacattaag

SEQ ID NO: 4911957 - DNA, 25 bp, Homo sapien
taacaccgcttcatggctgtatagc

SEQ ID NO: 4911958 - DNA, 25 bp, Homo sapien
ttagtaattgacgtgcccatggagc

SEQ ID NO: 4911959 - DNA, 25 bp, Homo sapien
tgattcccgcccagaggagggctga

SEQ ID NO: 4911960 - DNA, 25 bp, Homo sapien
ccatggcttcagattggaccagaac

SEQ ID NO: 4911961 - DNA, 25 bp, Homo sapien
tataaggttcactctggcagggaga

SEQ ID NO: 4911962 - DNA, 25 bp, Homo sapien
taacaactttacctgggtccatcag

SEQ ID NO: 4911963 - DNA, 25 bp, Homo sapien
tgtacagggcaacaacggtcactgg

SEQ ID NO: 4911964 - DNA, 25 bp, Homo sapien
taaaccacaagtcgaggtgcagatg

SEQ ID NO: 4911965 - DNA, 25 bp, Homo sapien
ttatgttatcgagaagtaggagacg

SEQ ID NO: 4911966 - DNA, 25 bp, Homo sapien
gaaatgctctactgagggccgctgc

SEQ ID NO: 4911967 - DNA, 25 bp, Homo sapien
ctaagaccagcagtccacttatgtt

SEQ ID NO: 4911968 - DNA, 25 bp, Homo sapien
cttttcatagtgtgagcagaaatcc

SEQ ID NO: 4911969 - DNA, 25 bp, Homo sapien
gaagcagactcccatgagaactctg

SEQ ID NO: 4911970 - DNA, 25 bp, Homo sapien
ttctcccagttgaggaatcgcccca

SEQ ID NO: 4911971 - DNA, 25 bp, Homo sapien
gctagtctccggacaggttgttaca

SEQ ID NO: 4911972 - DNA, 25 bp, Homo sapien
tatccacacgtagaagctagtctcc

SEQ ID NO: 4911973 - DNA, 25 bp, Homo sapien
caaggtttacatcagtagtaggcag

SEQ ID NO: 4911974 - DNA, 25 bp, Homo sapien
tccagaggtggatgtgtgaactcct

SEQ ID NO: 4911975 - DNA, 25 bp, Homo sapien
accctgagggcatcacgagctgagg

SEQ ID NO: 4911976 - DNA, 25 bp, Homo sapien
gatactgaagatacggtctctgccc

SEQ ID NO: 4911977 - DNA, 25 bp, Homo sapien
attaagtgggtatctggcagtcggc

SEQ ID NO: 4911978 - DNA, 25 bp, Homo sapien
aacactctgcgcctctgaactgcag

SEQ ID NO: 4911979 - DNA, 25 bp, Homo sapien
cactctgctggacatgctcgggact

SEQ ID NO: 4911980 - DNA, 25 bp, Homo sapien
ccattggtccaatgggatccattaa

SEQ ID NO: 4911981 - DNA, 25 bp, Homo sapien
gggggcacagagaaatttatccaca

SEQ ID NO: 4911982 - DNA, 25 bp, Homo sapien
tagtgggggcacagagaaatttatc

SEQ ID NO: 4911983 - DNA, 25 bp, Homo sapien
ctaatttagtgggggcacagagaaa

SEQ ID NO: 4911984 - DNA, 25 bp, Homo sapien
atttagtgggggcacagagaaattt

SEQ ID NO: 4911985 - DNA, 25 bp, Homo sapien
acagctgcgtgtcctcttacctggg

SEQ ID NO: 4911986 - DNA, 25 bp, Homo sapien
caaatgtggagactggctgccagag

SEQ ID NO: 4911987 - DNA, 25 bp, Homo sapien
tggagcagccgctaacataggcagc

SEQ ID NO: 4911988 - DNA, 25 bp, Homo sapien
taatctgcgttctgtgctgtggagc

SEQ ID NO: 4911989 - DNA, 25 bp, Homo sapien
catcatatccagcaaccagggtagg

SEQ ID NO: 4911990 - DNA, 25 bp, Homo sapien
ccagcaaccagggtaggaaatgcta

SEQ ID NO: 4911991 - DNA, 25 bp, Homo sapien
ccagggtaggaaatgctataatcat

SEQ ID NO: 4911992 - DNA, 25 bp, Homo sapien
gctgcctgttggcatcatatccagc

SEQ ID NO: 4911993 - DNA, 25 bp, Homo sapien
accaagccctgtacaaggtccctgg

SEQ ID NO: 4911994 - DNA, 25 bp, Homo sapien
caagccctgtacaaggtccctgggc

SEQ ID NO: 4911995 - DNA, 25 bp, Homo sapien
tcaagcacggctgtgcaccaagccc

SEQ ID NO: 4911996 - DNA, 25 bp, Homo sapien
agccctgtacaaggtccctgggctc

SEQ ID NO: 4911997 - DNA, 25 bp, Homo sapien
gaagaggcagatggttcgtaggagc

SEQ ID NO: 4911998 - DNA, 25 bp, Homo sapien
gatggttcgtaggagccgcctctgc

SEQ ID NO: 4911999 - DNA, 25 bp, Homo sapien
tgaccccagacaggtcgaataattg

SEQ ID NO: 4912000 - DNA, 25 bp, Homo sapien
cagacaggtcgaataattggtttca

SEQ ID NO: 4912001 - DNA, 25 bp, Homo sapien
attcttcttcgaatgcagaaatgca

SEQ ID NO: 4912002 - DNA, 25 bp, Homo sapien
ttcttcttcgaatgcagaaatgcac

SEQ ID NO: 4912003 - DNA, 25 bp, Homo sapien
gattcttcttcgaatgcagaaatgc

SEQ ID NO: 4912004 - DNA, 25 bp, Homo sapien
agattcttcttcgaatgcagaaatg

SEQ ID NO: 4912005 - DNA, 25 bp, Homo sapien
tctcagactgccaaaatagcttgag

SEQ ID NO: 4912006 - DNA, 25 bp, Homo sapien
tagagagaactcctcatgactttgt

SEQ ID NO: 4912007 - DNA, 25 bp, Homo sapien
aatgtggttcagaatgtactgttct

SEQ ID NO: 4912008 - DNA, 25 bp, Homo sapien
ggagctgcggccttcatttgaggta

SEQ ID NO: 4912009 - DNA, 25 bp, Homo sapien
tgtcagtgggagcattgagagcccc

SEQ ID NO: 4912010 - DNA, 25 bp, Homo sapien
tgcatgggatctcagtgtcagtggg

SEQ ID NO: 4912011 - DNA, 25 bp, Homo sapien
gaaggagaccggcattcctgagcac

SEQ ID NO: 4912012 - DNA, 25 bp, Homo sapien
tgatgagtgaaggagaccggcattc

SEQ ID NO: 4912013 - DNA, 25 bp, Homo sapien
ctttcatgcagggccaagctgttgc

SEQ ID NO: 4912014 - DNA, 25 bp, Homo sapien
tttcatgcagggccaagctgttgcc

SEQ ID NO: 4912015 - DNA, 25 bp, Homo sapien
ctgctttcatgcagggccaagctgt

SEQ ID NO: 4912016 - DNA, 25 bp, Homo sapien
tgctttcatgcagggccaagctgtt

SEQ ID NO: 4912017 - DNA, 25 bp, Homo sapien
ttgagccatctaaagctgactgcag

SEQ ID NO: 4912018 - DNA, 25 bp, Homo sapien
cctctgccagcatagctttattgag

SEQ ID NO: 4912019 - DNA, 25 bp, Homo sapien
gagctgtcctgcgttgtcaaccaca

SEQ ID NO: 4912020 - DNA, 25 bp, Homo sapien
gatgagctgtcctgcgttgtcaacc

SEQ ID NO: 4912021 - DNA, 25 bp, Homo sapien
tctttcctcttaggcaaatcagtaa

SEQ ID NO: 4912022 - DNA, 25 bp, Homo sapien
gcctcctttagacatctgctgattt

SEQ ID NO: 4912023 - DNA, 25 bp, Homo sapien
tgatcttccttcagatatttcaatt

SEQ ID NO: 4912024 - DNA, 25 bp, Homo sapien
gctcctgtggaggtgcagccattct

SEQ ID NO: 4912025 - DNA, 25 bp, Homo sapien
aggtgtacaaccctccaggcacggt

SEQ ID NO: 4912026 - DNA, 25 bp, Homo sapien
gtgtacaaccctccaggcacggtga

SEQ ID NO: 4912027 - DNA, 25 bp, Homo sapien
caaggtgtacaaccctccaggcacg

SEQ ID NO: 4912028 - DNA, 25 bp, Homo sapien
ctccaaggtgtacaaccctccaggc

SEQ ID NO: 4912029 - DNA, 25 bp, Homo sapien
ctgccacagaaaatgaagaatgtcc

SEQ ID NO: 4912030 - DNA, 25 bp, Homo sapien
cagaaaatgaagaatgtccattctc

SEQ ID NO: 4912031 - DNA, 25 bp, Homo sapien
cacagaaaatgaagaatgtccattc

SEQ ID NO: 4912032 - DNA, 25 bp, Homo sapien
gaaaatgaagaatgtccattctctg

SEQ ID NO: 4912033 - DNA, 25 bp, Homo sapien
cttagcaagcaccttaagactctct

SEQ ID NO: 4912034 - DNA, 25 bp, Homo sapien
gcaagcaccttaagactctctggat

SEQ ID NO: 4912035 - DNA, 25 bp, Homo sapien
agcaccttaagactctctggataaa

SEQ ID NO: 4912036 - DNA, 25 bp, Homo sapien
atgaggggaaccttagcaagcacct

SEQ ID NO: 4912037 - DNA, 25 bp, Homo sapien
tggcattacagaccgagtcagacag

SEQ ID NO: 4912038 - DNA, 25 bp, Homo sapien
accttccctggcattacagaccgag

SEQ ID NO: 4912039 - DNA, 25 bp, Homo sapien
ccctgtgctgctgaaccttccctgg

SEQ ID NO: 4912040 - DNA, 25 bp, Homo sapien
ttacagaccgagtcagacaggctcc

SEQ ID NO: 4912041 - DNA, 25 bp, Homo sapien
gggcttcttggagacacgtaaatct

SEQ ID NO: 4912042 - DNA, 25 bp, Homo sapien
gaagatatcagtgcctgaggtccag

SEQ ID NO: 4912043 - DNA, 25 bp, Homo sapien
gctggataaagtccatccatccggg

SEQ ID NO: 4912044 - DNA, 25 bp, Homo sapien
gcagcggccgctatgattgatggca

SEQ ID NO: 4912045 - DNA, 25 bp, Homo sapien
tgccatctggtacaagacgctcagg

SEQ ID NO: 4912046 - DNA, 25 bp, Homo sapien
tacacttagtggagtggcaaggcca

SEQ ID NO: 4912047 - DNA, 25 bp, Homo sapien
caagatgacgatccctgtgccagct

SEQ ID NO: 4912048 - DNA, 25 bp, Homo sapien
caagtgaacctcaaaccctggcaag

SEQ ID NO: 4912049 - DNA, 25 bp, Homo sapien
ctggcataagggcagggcatcgtca

SEQ ID NO: 4912050 - DNA, 25 bp, Homo sapien
gcatcgtcagtcatgcagaagctgg

SEQ ID NO: 4912051 - DNA, 25 bp, Homo sapien
atcgtcagtcatgcagaagctggct

SEQ ID NO: 4912052 - DNA, 25 bp, Homo sapien
cagggcatcgtcagtcatgcagaag

SEQ ID NO: 4912053 - DNA, 25 bp, Homo sapien
caaatgtgaggcaatggtgaagaca

SEQ ID NO: 4912054 - DNA, 25 bp, Homo sapien
cactaagcaatgaatggaggccagg

SEQ ID NO: 4912055 - DNA, 25 bp, Homo sapien
tctcttaagtaaacaatttgttggc

SEQ ID NO: 4912056 - DNA, 25 bp, Homo sapien
tcctgaaaagttaatgcagccaagt

SEQ ID NO: 4912057 - DNA, 25 bp, Homo sapien
cacagagctagctctacctgggtca

SEQ ID NO: 4912058 - DNA, 25 bp, Homo sapien
gatagagactcagccgtcttttgac

SEQ ID NO: 4912059 - DNA, 25 bp, Homo sapien
gtcttttgacttctcccagcggctg

SEQ ID NO: 4912060 - DNA, 25 bp, Homo sapien
cataaggatagaggacaacagtccc

SEQ ID NO: 4912061 - DNA, 25 bp, Homo sapien
aaagaataacactgagaggaaccca

SEQ ID NO: 4912062 - DNA, 25 bp, Homo sapien
tcatgacttgtctgcacttgccatg

SEQ ID NO: 4912063 - DNA, 25 bp, Homo sapien
gcttcttcctaatcattttcaggac

SEQ ID NO: 4912064 - DNA, 25 bp, Homo sapien
tgtctgcacttgccatgtccatttg

SEQ ID NO: 4912065 - DNA, 25 bp, Homo sapien
ctaatcattttcaggactggaagcc

SEQ ID NO: 4912066 - DNA, 25 bp, Homo sapien
ttatccggcatgaatagtgactgcc

SEQ ID NO: 4912067 - DNA, 25 bp, Homo sapien
cataaccaggtgctgcaagttggct

SEQ ID NO: 4912068 - DNA, 25 bp, Homo sapien
catggaagacattaaggacggaaga

SEQ ID NO: 4912069 - DNA, 25 bp, Homo sapien
tcctgagaggactgcgtcacatagt

SEQ ID NO: 4912070 - DNA, 25 bp, Homo sapien
gtggtgcaaacaccttctgccttaa

SEQ ID NO: 4912071 - DNA, 25 bp, Homo sapien
gcaaacaccttctgccttaattgca

SEQ ID NO: 4912072 - DNA, 25 bp, Homo sapien
gggtaggggcacttccttcatcaca

SEQ ID NO: 4912073 - DNA, 25 bp, Homo sapien
gaaagtggtgcaaacaccttctgcc

SEQ ID NO: 4912074 - DNA, 25 bp, Homo sapien
tttggtcagtgtgcgtgctcttctc

SEQ ID NO: 4912075 - DNA, 25 bp, Homo sapien
taagtcctctaaacctgtccaccac

SEQ ID NO: 4912076 - DNA, 25 bp, Homo sapien
caaggccctgcgtctttgtctcagt

SEQ ID NO: 4912077 - DNA, 25 bp, Homo sapien
cacctgagccctacgctttggtcag

SEQ ID NO: 4912078 - DNA, 25 bp, Homo sapien
gagaaacttaatggctcagcaacag

SEQ ID NO: 4912079 - DNA, 25 bp, Homo sapien
cccatgaagttccttagggtgcaga

SEQ ID NO: 4912080 - DNA, 25 bp, Homo sapien
ggcttgccacaattctctaaaccag

SEQ ID NO: 4912081 - DNA, 25 bp, Homo sapien
tatacaagtaagtgagttggactgc

SEQ ID NO: 4912082 - DNA, 25 bp, Homo sapien
ctgatcgcaggtgctgcaactgcca

SEQ ID NO: 4912083 - DNA, 25 bp, Homo sapien
ggggatgaggtggagcccaagaaaa

SEQ ID NO: 4912084 - DNA, 25 bp, Homo sapien
ggatgaggtggagcccaagaaaatc

SEQ ID NO: 4912085 - DNA, 25 bp, Homo sapien
caggtgctgcaactgccatggggat

SEQ ID NO: 4912086 - DNA, 25 bp, Homo sapien
ggatgagactgcaagcaacgcgacc

SEQ ID NO: 4912087 - DNA, 25 bp, Homo sapien
cagctggtaaatgacggcgactgca

SEQ ID NO: 4912088 - DNA, 25 bp, Homo sapien
gaaaacaggagcgtcgtcagaagtg

SEQ ID NO: 4912089 - DNA, 25 bp, Homo sapien
gcaggttcctcgctggaaaacagga

SEQ ID NO: 4912090 - DNA, 25 bp, Homo sapien
ccattcgcttctctcaactccacta

SEQ ID NO: 4912091 - DNA, 25 bp, Homo sapien
caccaaccaccccattcgcttctct

SEQ ID NO: 4912092 - DNA, 25 bp, Homo sapien
tcaactccactaccttctccccact

SEQ ID NO: 4912093 - DNA, 25 bp, Homo sapien
aaccaccccattcgcttctctcaac

SEQ ID NO: 4912094 - DNA, 25 bp, Homo sapien
tcagtggtagacagattcaaccttg

SEQ ID NO: 4912095 - DNA, 25 bp, Homo sapien
cagattcaaccttgtctctttctct

SEQ ID NO: 4912096 - DNA, 25 bp, Homo sapien
atcacgactgccactcttttcgttc

SEQ ID NO: 4912097 - DNA, 25 bp, Homo sapien
gttcccatctatccaatacagagcc

SEQ ID NO: 4912098 - DNA, 25 bp, Homo sapien
agcaattgctgtctttctcactgtg

SEQ ID NO: 4912099 - DNA, 25 bp, Homo sapien
tcaactccctaggatcctttagaaa

SEQ ID NO: 4912100 - DNA, 25 bp, Homo sapien
tcacagccaaacattgtcaacccat

SEQ ID NO: 4912101 - DNA, 25 bp, Homo sapien
agaagcaggccttattcaactccct

SEQ ID NO: 4912102 - DNA, 25 bp, Homo sapien
tctgaagtgcctcgtatcatcatcc

SEQ ID NO: 4912103 - DNA, 25 bp, Homo sapien
tgaagtgcctcgtatcatcatcctt

SEQ ID NO: 4912104 - DNA, 25 bp, Homo sapien
tttctgaagtgcctcgtatcatcat

SEQ ID NO: 4912105 - DNA, 25 bp, Homo sapien
cttttctgaagtgcctcgtatcatc

SEQ ID NO: 4912106 - DNA, 25 bp, Homo sapien
ccttatctggagaaatgaatcttca

SEQ ID NO: 4912107 - DNA, 25 bp, Homo sapien
cactaaggaggctgataacatacag

SEQ ID NO: 4912108 - DNA, 25 bp, Homo sapien
cagagggaactacttaagacaggga

SEQ ID NO: 4912109 - DNA, 25 bp, Homo sapien
catattgtaaatacaacggtgttct

SEQ ID NO: 4912110 - DNA, 25 bp, Homo sapien
tgacaaaagaagatgccacagcagg

SEQ ID NO: 4912111 - DNA, 25 bp, Homo sapien
tgtggagcgtgcaccctataaggga

SEQ ID NO: 4912112 - DNA, 25 bp, Homo sapien
tataagggagaagtcgccacactga

SEQ ID NO: 4912113 - DNA, 25 bp, Homo sapien
gttctgctgcatagtcggtcaccaa

SEQ ID NO: 4912114 - DNA, 25 bp, Homo sapien
caaagactgagtagacagtgagcca

SEQ ID NO: 4912115 - DNA, 25 bp, Homo sapien
tgcacacccgatgcagtgcttcaag

SEQ ID NO: 4912116 - DNA, 25 bp, Homo sapien
gatcctcggtgtttggtgtactctc

SEQ ID NO: 4912117 - DNA, 25 bp, Homo sapien
tggaaattctccactatctgagaga

SEQ ID NO: 4912118 - DNA, 25 bp, Homo sapien
gaaatataccatcggctttgctgag

SEQ ID NO: 4912119 - DNA, 25 bp, Homo sapien
aaatcttggtttgctcagacgggcc

SEQ ID NO: 4912120 - DNA, 25 bp, Homo sapien
gtcagttcccaagacggagtccagg

SEQ ID NO: 4912121 - DNA, 25 bp, Homo sapien
tgctcagttaggtcacatgctccag

SEQ ID NO: 4912122 - DNA, 25 bp, Homo sapien
taaactgggttgtatctttgcaatg

SEQ ID NO: 4912123 - DNA, 25 bp, Homo sapien
gctgctttggtccttgagatgggta

SEQ ID NO: 4912124 - DNA, 25 bp, Homo sapien
aagataaaattgagtggatggctgc

SEQ ID NO: 4912125 - DNA, 25 bp, Homo sapien
gaaacaggaatagcttcatggagtg

SEQ ID NO: 4912126 - DNA, 25 bp, Homo sapien
cacactgctaaggtctctgtcacta

SEQ ID NO: 4912127 - DNA, 25 bp, Homo sapien
tataagaatcctaggatcctcggtg

SEQ ID NO: 4912128 - DNA, 25 bp, Homo sapien
gcttactgaatgcaagacacactgc

SEQ ID NO: 4912129 - DNA, 25 bp, Homo sapien
tatatgctcagtcaaaataggtggt

SEQ ID NO: 4912130 - DNA, 25 bp, Homo sapien
ggagcatcctggaacaccctacagt

SEQ ID NO: 4912131 - DNA, 25 bp, Homo sapien
caattgtgttagtcagggtcctcca

SEQ ID NO: 4912132 - DNA, 25 bp, Homo sapien
gctggaaaagattgggagagccctc

SEQ ID NO: 4912133 - DNA, 25 bp, Homo sapien
caagaggcagacaccaagatggata

SEQ ID NO: 4912134 - DNA, 25 bp, Homo sapien
gctcacagatggaaggcacagtccc

SEQ ID NO: 4912135 - DNA, 25 bp, Homo sapien
tgcaaaccctggtaactaacctgtg

SEQ ID NO: 4912136 - DNA, 25 bp, Homo sapien
gcaattgcccatctcttggttaggg

SEQ ID NO: 4912137 - DNA, 25 bp, Homo sapien
cagtcagggactttggttgcaaacc

SEQ ID NO: 4912138 - DNA, 25 bp, Homo sapien
tctctgacttttaaaggagtgcttc

SEQ ID NO: 4912139 - DNA, 25 bp, Homo sapien
tttactaacatacctcactccctgg

SEQ ID NO: 4912140 - DNA, 25 bp, Homo sapien
tactggcggcagagatccttgctcc

SEQ ID NO: 4912141 - DNA, 25 bp, Homo sapien
caacccttaaattgagagccctcct

SEQ ID NO: 4912142 - DNA, 25 bp, Homo sapien
tgatccttggctgtccgtatgttga

SEQ ID NO: 4912143 - DNA, 25 bp, Homo sapien
acgggacagttcagttggtcagtgt

SEQ ID NO: 4912144 - DNA, 25 bp, Homo sapien
ccttggctgtccgtatgttgacggg

SEQ ID NO: 4912145 - DNA, 25 bp, Homo sapien
tccgtatgttgacgggacagttcag

SEQ ID NO: 4912146 - DNA, 25 bp, Homo sapien
aagctcgtcctgcccggaggcatcg

SEQ ID NO: 4912147 - DNA, 25 bp, Homo sapien
ggtcaacgatgacttctcggaggtg

SEQ ID NO: 4912148 - DNA, 25 bp, Homo sapien
tggtgcgggcactcgggcacgacct

SEQ ID NO: 4912149 - DNA, 25 bp, Homo sapien
gcacatgcagttccccttcatgggc

SEQ ID NO: 4912150 - DNA, 25 bp, Homo sapien
tgcttcagggacagtatccactggg

SEQ ID NO: 4912151 - DNA, 25 bp, Homo sapien
tgtagtgggccagctctctccatgg

SEQ ID NO: 4912152 - DNA, 25 bp, Homo sapien
ttctgcccaggagcggtgcttcagg

SEQ ID NO: 4912153 - DNA, 25 bp, Homo sapien
tgtgtagtgggccagctctctccat

SEQ ID NO: 4912154 - DNA, 25 bp, Homo sapien
tattgagatgactaaatgaaccagc

SEQ ID NO: 4912155 - DNA, 25 bp, Homo sapien
gagcaaacacatagactgcctctac

SEQ ID NO: 4912156 - DNA, 25 bp, Homo sapien
gaacactgatgacattgatcacctg

SEQ ID NO: 4912157 - DNA, 25 bp, Homo sapien
actgatgacattgatcacctgagca

SEQ ID NO: 4912158 - DNA, 25 bp, Homo sapien
tctgcattataggaattttcaaagc

SEQ ID NO: 4912159 - DNA, 25 bp, Homo sapien
atgacagcaacttgataggacctgc

SEQ ID NO: 4912160 - DNA, 25 bp, Homo sapien
gcaacttgataggacctgctttact

SEQ ID NO: 4912161 - DNA, 25 bp, Homo sapien
acttgataggacctgctttactcag

SEQ ID NO: 4912162 - DNA, 25 bp, Homo sapien
taggacctgctttactcaggaaggt

SEQ ID NO: 4912163 - DNA, 25 bp, Homo sapien
caaaaggagctgttatcagaaggga

SEQ ID NO: 4912164 - DNA, 25 bp, Homo sapien
tcagagcaccaatattagtagggaa

SEQ ID NO: 4912165 - DNA, 25 bp, Homo sapien
cctttgtcttgtcagtcagagcacc

SEQ ID NO: 4912166 - DNA, 25 bp, Homo sapien
cagaagggatctatgggccagaagc

SEQ ID NO: 4912167 - DNA, 25 bp, Homo sapien
tgcatcaacgtcgtaagtagctggg

SEQ ID NO: 4912168 - DNA, 25 bp, Homo sapien
ccgcttggatgtctctattctgtaa

SEQ ID NO: 4912169 - DNA, 25 bp, Homo sapien
tgataaaggtagctaacagtttacc

SEQ ID NO: 4912170 - DNA, 25 bp, Homo sapien
ttccccaaaccgcttggatgtctct

SEQ ID NO: 4912171 - DNA, 25 bp, Homo sapien
taaaccatggtgcactatctaaaaa

SEQ ID NO: 4912172 - DNA, 25 bp, Homo sapien
tagtgcatgtaaaggccaattattt

SEQ ID NO: 4912173 - DNA, 25 bp, Homo sapien
ggagtatcaactaatccctagtctt

SEQ ID NO: 4912174 - DNA, 25 bp, Homo sapien
tttctacctggctacctgattccat

SEQ ID NO: 4912175 - DNA, 25 bp, Homo sapien
ccctaatacagggttgcgcttgcat

SEQ ID NO: 4912176 - DNA, 25 bp, Homo sapien
tggaccctagggatttgcactaaaa

SEQ ID NO: 4912177 - DNA, 25 bp, Homo sapien
gcactaaaattatatcaaggtctca

SEQ ID NO: 4912178 - DNA, 25 bp, Homo sapien
attgtacaagataagttccacctgg

SEQ ID NO: 4912179 - DNA, 25 bp, Homo sapien
taggcagagttcgataaattactgg

SEQ ID NO: 4912180 - DNA, 25 bp, Homo sapien
tgcttttgccaacacatcttgtaac

SEQ ID NO: 4912181 - DNA, 25 bp, Homo sapien
cttgtcagtgggaaacaaactgtct

SEQ ID NO: 4912182 - DNA, 25 bp, Homo sapien
taattgaaacgtttatgcttttgcc

SEQ ID NO: 4912183 - DNA, 25 bp, Homo sapien
gagagaaatcatactcacagaagtt

SEQ ID NO: 4912184 - DNA, 25 bp, Homo sapien
cagaagtttgttttccgtggagtct

SEQ ID NO: 4912185 - DNA, 25 bp, Homo sapien
tagtcagagtaccagtagagaacct

SEQ ID NO: 4912186 - DNA, 25 bp, Homo sapien
agtccctcccacaacggcagtagaa

SEQ ID NO: 4912187 - DNA, 25 bp, Homo sapien
tatacttgtgtccatgaaattcaga

SEQ ID NO: 4912188 - DNA, 25 bp, Homo sapien
aactgatacttgcatgcccatggat

SEQ ID NO: 4912189 - DNA, 25 bp, Homo sapien
taactattgtatttgagcgcacagt

SEQ ID NO: 4912190 - DNA, 25 bp, Homo sapien
gaatgctatccctaggattagagcc

SEQ ID NO: 4912191 - DNA, 25 bp, Homo sapien
tgtggccctgacagatattacaccg

SEQ ID NO: 4912192 - DNA, 25 bp, Homo sapien
tacaccgacttgtggctgatttgga

SEQ ID NO: 4912193 - DNA, 25 bp, Homo sapien
gaaagccacctggtatcttacgaag

SEQ ID NO: 4912194 - DNA, 25 bp, Homo sapien
ttcaggagtgtcaactggtaagtca

SEQ ID NO: 4912195 - DNA, 25 bp, Homo sapien
tgttttccttgacaaggttgggcat

SEQ ID NO: 4912196 - DNA, 25 bp, Homo sapien
gcctatcatcgtattccattttgtt

SEQ ID NO: 4912197 - DNA, 25 bp, Homo sapien
tattccattttgttttccttgacaa

SEQ ID NO: 4912198 - DNA, 25 bp, Homo sapien
cattttgttttccttgacaaggttg

SEQ ID NO: 4912199 - DNA, 25 bp, Homo sapien
cctctgagccccagttacaagcccc

SEQ ID NO: 4912200 - DNA, 25 bp, Homo sapien
agccccacagtgtgaaagatcttgc

SEQ ID NO: 4912201 - DNA, 25 bp, Homo sapien
ccccacagtgtgaaagatcttgccc

SEQ ID NO: 4912202 - DNA, 25 bp, Homo sapien
acaagccccacagtgtgaaagatct

SEQ ID NO: 4912203 - DNA, 25 bp, Homo sapien
catttagtaattgtattggccattt

SEQ ID NO: 4912204 - DNA, 25 bp, Homo sapien
gcaggaggctcttcccctaaggctc

SEQ ID NO: 4912205 - DNA, 25 bp, Homo sapien
aaggcatttagtaattgtattggcc

SEQ ID NO: 4912206 - DNA, 25 bp, Homo sapien
caaaggcatttagtaattgtattgg

SEQ ID NO: 4912207 - DNA, 25 bp, Homo sapien
ctgtgcggacagctttatattgcgt

SEQ ID NO: 4912208 - DNA, 25 bp, Homo sapien
tttattccagtcgatggatcgggtt

SEQ ID NO: 4912209 - DNA, 25 bp, Homo sapien
atcgggttagagataactcctttcg

SEQ ID NO: 4912210 - DNA, 25 bp, Homo sapien
gcggacagctttatattgcgttggg

SEQ ID NO: 4912211 - DNA, 25 bp, Homo sapien
ctcagtctctcctgttagggtgtac

SEQ ID NO: 4912212 - DNA, 25 bp, Homo sapien
tctctcctgttagggtgtacacatc

SEQ ID NO: 4912213 - DNA, 25 bp, Homo sapien
tcctgttagggtgtacacatctgtc

SEQ ID NO: 4912214 - DNA, 25 bp, Homo sapien
ctgactcctagttcaattgtaattt

SEQ ID NO: 4912215 - DNA, 25 bp, Homo sapien
aatccgggcgtgcagggtcctgttg

SEQ ID NO: 4912216 - DNA, 25 bp, Homo sapien
gggcaagggctctgccgaatccggg

SEQ ID NO: 4912217 - DNA, 25 bp, Homo sapien
ctgaaaaggcttcccgctgacttct

SEQ ID NO: 4912218 - DNA, 25 bp, Homo sapien
gtcctactcgattccctgaaaaggc

SEQ ID NO: 4912219 - DNA, 25 bp, Homo sapien
tatggcctgtcgctggagcacaaaa

SEQ ID NO: 4912220 - DNA, 25 bp, Homo sapien
gagcacaaaagagtctccgcggtgg

SEQ ID NO: 4912221 - DNA, 25 bp, Homo sapien
tctgctgtggttatggcctgtcgct

SEQ ID NO: 4912222 - DNA, 25 bp, Homo sapien
ggaggtctgcgttgctcttgctttt

SEQ ID NO: 4912223 - DNA, 25 bp, Homo sapien
tcgcacgctctgtcatcgattggcg

SEQ ID NO: 4912224 - DNA, 25 bp, Homo sapien
cttgggctcccgtcgcgtggaaatc

SEQ ID NO: 4912225 - DNA, 25 bp, Homo sapien
tcgattggcgctgccttgctccttg

SEQ ID NO: 4912226 - DNA, 25 bp, Homo sapien
gattgccgatcgcacggatgggcgc

SEQ ID NO: 4912227 - DNA, 25 bp, Homo sapien
ctgcttgtggcctgttcttaacaca

SEQ ID NO: 4912228 - DNA, 25 bp, Homo sapien
gctctcatggaagcgcaatttagag

SEQ ID NO: 4912229 - DNA, 25 bp, Homo sapien
tctgcttgtggcctgttcttaacac

SEQ ID NO: 4912230 - DNA, 25 bp, Homo sapien
ccgtagagtccactggacttaagta

SEQ ID NO: 4912231 - DNA, 25 bp, Homo sapien
ctgttatataggtgggttctggtcc

SEQ ID NO: 4912232 - DNA, 25 bp, Homo sapien
caaatattgatggtatgaaacctgc

SEQ ID NO: 4912233 - DNA, 25 bp, Homo sapien
cctgcatataggaaggctgctgtta

SEQ ID NO: 4912234 - DNA, 25 bp, Homo sapien
gaaaactatggcttcaataccagat

SEQ ID NO: 4912235 - DNA, 25 bp, Homo sapien
taagaccaggcatcaaagattcact

SEQ ID NO: 4912236 - DNA, 25 bp, Homo sapien
gcatctatttggtgacaggccctct

SEQ ID NO: 4912237 - DNA, 25 bp, Homo sapien
ggccactcgggcactaatgtccaga

SEQ ID NO: 4912238 - DNA, 25 bp, Homo sapien
ctctctcctcttattgtaggttcct

SEQ ID NO: 4912239 - DNA, 25 bp, Homo sapien
ttggtgtctacaataccagactttt

SEQ ID NO: 4912240 - DNA, 25 bp, Homo sapien
tctctcctcttattgtaggttcctc

SEQ ID NO: 4912241 - DNA, 25 bp, Homo sapien
taccagacttttcttcgtctcttcc

SEQ ID NO: 4912242 - DNA, 25 bp, Homo sapien
atctggtatcgtattctaattatat

SEQ ID NO: 4912243 - DNA, 25 bp, Homo sapien
aatctggtatcgtattctaattata

SEQ ID NO: 4912244 - DNA, 25 bp, Homo sapien
aaatctggtatcgtattctaattat

SEQ ID NO: 4912245 - DNA, 25 bp, Homo sapien
tctggtatcgtattctaattatatt

SEQ ID NO: 4912246 - DNA, 25 bp, Homo sapien
atgcagtagtagctaagctcttgtt

SEQ ID NO: 4912247 - DNA, 25 bp, Homo sapien
gcagtagtagctaagctcttgtttc

SEQ ID NO: 4912248 - DNA, 25 bp, Homo sapien
tgcagtagtagctaagctcttgttt

SEQ ID NO: 4912249 - DNA, 25 bp, Homo sapien
gatgcagtagtagctaagctcttgt

SEQ ID NO: 4912250 - DNA, 25 bp, Homo sapien
tatccagaatggactgattccaaca

SEQ ID NO: 4912251 - DNA, 25 bp, Homo sapien
ttttcagtttccttgcgaggcttct

SEQ ID NO: 4912252 - DNA, 25 bp, Homo sapien
ttgtttcgatgataagctcctgcac

SEQ ID NO: 4912253 - DNA, 25 bp, Homo sapien
tagaatgtcaatacactctgaagag

SEQ ID NO: 4912254 - DNA, 25 bp, Homo sapien
cagaacaatccaacggctggcaaag

SEQ ID NO: 4912255 - DNA, 25 bp, Homo sapien
aatccaacggctggcaaagaaagga

SEQ ID NO: 4912256 - DNA, 25 bp, Homo sapien
tcagccagaacaatccaacggctgg

SEQ ID NO: 4912257 - DNA, 25 bp, Homo sapien
actcagccagaacaatccaacggct

SEQ ID NO: 4912258 - DNA, 25 bp, Homo sapien
actgagttgtcagcccgcgatttcc

SEQ ID NO: 4912259 - DNA, 25 bp, Homo sapien
gaaaagagggtaaatgggctgcaat

SEQ ID NO: 4912260 - DNA, 25 bp, Homo sapien
gcaatggtaagcacagtctgccgac

SEQ ID NO: 4912261 - DNA, 25 bp, Homo sapien
ggctcagaaaaccacatagacactg

SEQ ID NO: 4912262 - DNA, 25 bp, Homo sapien
gagagcattattttcagtctgacct

SEQ ID NO: 4912263 - DNA, 25 bp, Homo sapien
catctgtgtggcaactcaggctgaa

SEQ ID NO: 4912264 - DNA, 25 bp, Homo sapien
tagaccaaggatactgcatctgtga

SEQ ID NO: 4912265 - DNA, 25 bp, Homo sapien
gaagtcatatgggttatagttccct

SEQ ID NO: 4912266 - DNA, 25 bp, Homo sapien
ttcaatgttctaagataatcaggca

SEQ ID NO: 4912267 - DNA, 25 bp, Homo sapien
caggatttgggtcagtcttacagga

SEQ ID NO: 4912268 - DNA, 25 bp, Homo sapien
tctaagataatcaggcaactgggag

SEQ ID NO: 4912269 - DNA, 25 bp, Homo sapien
caggatattcatacatctcagatgt

SEQ ID NO: 4912270 - DNA, 25 bp, Homo sapien
caagattgtgcgttccctggattca

SEQ ID NO: 4912271 - DNA, 25 bp, Homo sapien
ttatagcagaaaatcgatactgcac

SEQ ID NO: 4912272 - DNA, 25 bp, Homo sapien
tatgactagtaaactgcacaaacac

SEQ ID NO: 4912273 - DNA, 25 bp, Homo sapien
tttgagactgagaacaagattgtgc

SEQ ID NO: 4912274 - DNA, 25 bp, Homo sapien
tcccagtcacgctctggtggtaagg

SEQ ID NO: 4912275 - DNA, 25 bp, Homo sapien
gtactccagcgatcctgagcagcct

SEQ ID NO: 4912276 - DNA, 25 bp, Homo sapien
tctggtggtaaggaacctgctgctg

SEQ ID NO: 4912277 - DNA, 25 bp, Homo sapien
tgaaaacaggctcttaaccaggtac

SEQ ID NO: 4912278 - DNA, 25 bp, Homo sapien
tcttccatccaacatgtgttccata

SEQ ID NO: 4912279 - DNA, 25 bp, Homo sapien
catgtgttccatacgggagctgcca

SEQ ID NO: 4912280 - DNA, 25 bp, Homo sapien
tccaacatgtgttccatacgggagc

SEQ ID NO: 4912281 - DNA, 25 bp, Homo sapien
tccatccaacatgtgttccatacgg

SEQ ID NO: 4912282 - DNA, 25 bp, Homo sapien
gtgttctgttcatagtgattctccc

SEQ ID NO: 4912283 - DNA, 25 bp, Homo sapien
gttctgttcatagtgattctcccca

SEQ ID NO: 4912284 - DNA, 25 bp, Homo sapien
gagtaggtgttctgttcatagtgat

SEQ ID NO: 4912285 - DNA, 25 bp, Homo sapien
aatttggagtaggtgttctgttcat

SEQ ID NO: 4912286 - DNA, 25 bp, Homo sapien
aaagtcgagtgttgtgcccaaggtc

SEQ ID NO: 4912287 - DNA, 25 bp, Homo sapien
taagcaaagcagctaggagacagcc

SEQ ID NO: 4912288 - DNA, 25 bp, Homo sapien
gcccaagagaagctgtaaaaagctg

SEQ ID NO: 4912289 - DNA, 25 bp, Homo sapien
ccctggagcatgtggtaagcaaagc

SEQ ID NO: 4912290 - DNA, 25 bp, Homo sapien
tatcttgcatgcagtaggccctcaa

SEQ ID NO: 4912291 - DNA, 25 bp, Homo sapien
taggccctcaatgaattaaatcgac

SEQ ID NO: 4912292 - DNA, 25 bp, Homo sapien
tgtctgcacctatatcttgcatgca

SEQ ID NO: 4912293 - DNA, 25 bp, Homo sapien
ccaaaccgaacattgcagaaggcca

SEQ ID NO: 4912294 - DNA, 25 bp, Homo sapien
agtagtcgaggtgcatgggggtgca

SEQ ID NO: 4912295 - DNA, 25 bp, Homo sapien
tagtcgaggtgcatgggggtgcatt

SEQ ID NO: 4912296 - DNA, 25 bp, Homo sapien
catagtagtcgaggtgcatgggggt

SEQ ID NO: 4912297 - DNA, 25 bp, Homo sapien
tagtagtcgaggtgcatgggggtgc

SEQ ID NO: 4912298 - DNA, 25 bp, Homo sapien
tcagtttgcttgtcaagagtcagga

SEQ ID NO: 4912299 - DNA, 25 bp, Homo sapien
gtcaagagtcaggaagaagcaggcc

SEQ ID NO: 4912300 - DNA, 25 bp, Homo sapien
tttgcttgtcaagagtcaggaagaa

SEQ ID NO: 4912301 - DNA, 25 bp, Homo sapien
cctctcagtttgcttgtcaagagtc

SEQ ID NO: 4912302 - DNA, 25 bp, Homo sapien
tggttgccctgtgggtaggaactat

SEQ ID NO: 4912303 - DNA, 25 bp, Homo sapien
gaagtgaagtccatagtattcttta

SEQ ID NO: 4912304 - DNA, 25 bp, Homo sapien
acaaacgacagtgtgacagcccagg

SEQ ID NO: 4912305 - DNA, 25 bp, Homo sapien
taggaactatggcagggacaaggac

SEQ ID NO: 4912306 - DNA, 25 bp, Homo sapien
ttgaaaattggcatcgcttctccat

SEQ ID NO: 4912307 - DNA, 25 bp, Homo sapien
gtttgaaaattggcatcgcttctcc

SEQ ID NO: 4912308 - DNA, 25 bp, Homo sapien
tttgaaaattggcatcgcttctcca

SEQ ID NO: 4912309 - DNA, 25 bp, Homo sapien
tgcgatatcctggcatttgcattat

SEQ ID NO: 4912310 - DNA, 25 bp, Homo sapien
gctcttattccagtggacttcaatt

SEQ ID NO: 4912311 - DNA, 25 bp, Homo sapien
tgtggttgctgatagtgattcacta

SEQ ID NO: 4912312 - DNA, 25 bp, Homo sapien
tataccataatgcagctcttattcc

SEQ ID NO: 4912313 - DNA, 25 bp, Homo sapien
gatagaagggtgaccatcccctggc

SEQ ID NO: 4912314 - DNA, 25 bp, Homo sapien
gggatagaagggtgaccatcccctg

SEQ ID NO: 4912315 - DNA, 25 bp, Homo sapien
agaagggtgaccatcccctggccca

SEQ ID NO: 4912316 - DNA, 25 bp, Homo sapien
atagaagggtgaccatcccctggcc

SEQ ID NO: 4912317 - DNA, 25 bp, Homo sapien
tgccacccttgttcgagccactggt

SEQ ID NO: 4912318 - DNA, 25 bp, Homo sapien
tgcccgccaacctactgttctctgt

SEQ ID NO: 4912319 - DNA, 25 bp, Homo sapien
ttgttcgagccactggtgactgctt

SEQ ID NO: 4912320 - DNA, 25 bp, Homo sapien
ctgttccttctagcatgcccatctc

SEQ ID NO: 4912321 - DNA, 25 bp, Homo sapien
tctcatccctaaggcctatcaattt

SEQ ID NO: 4912322 - DNA, 25 bp, Homo sapien
catccctaaggcctatcaatttcac

SEQ ID NO: 4912323 - DNA, 25 bp, Homo sapien
gttctcatccctaaggcctatcaat

SEQ ID NO: 4912324 - DNA, 25 bp, Homo sapien
agttctcatccctaaggcctatcaa

SEQ ID NO: 4912325 - DNA, 25 bp, Homo sapien
ctgagtgaatcctactttcagattt

SEQ ID NO: 4912326 - DNA, 25 bp, Homo sapien
gcaatagaaacttgatcttcaaatt

SEQ ID NO: 4912327 - DNA, 25 bp, Homo sapien
tcagaatctgagtgaatcctacttt

SEQ ID NO: 4912328 - DNA, 25 bp, Homo sapien
ccactgaaaaatcggaattggtttg

SEQ ID NO: 4912329 - DNA, 25 bp, Homo sapien
tccagaaatcccctagaacatttta

SEQ ID NO: 4912330 - DNA, 25 bp, Homo sapien
gtgagctccagaaatcccctagaac

SEQ ID NO: 4912331 - DNA, 25 bp, Homo sapien
ttatgtgagctccagaaatccccta

SEQ ID NO: 4912332 - DNA, 25 bp, Homo sapien
ctccagaaatcccctagaacatttt

SEQ ID NO: 4912333 - DNA, 25 bp, Homo sapien
tgaggaagaagacttgaagccaaga

SEQ ID NO: 4912334 - DNA, 25 bp, Homo sapien
cttgaagccaagaagacttgtaggc

SEQ ID NO: 4912335 - DNA, 25 bp, Homo sapien
agccaagaagacttgtaggcccagc

SEQ ID NO: 4912336 - DNA, 25 bp, Homo sapien
gaagaagacttgaagccaagaagac

SEQ ID NO: 4912337 - DNA, 25 bp, Homo sapien
ccagccttggtgacagagtgagacc

SEQ ID NO: 4912338 - DNA, 25 bp, Homo sapien
gatcgcagcaccactgcactccagc

SEQ ID NO: 4912339 - DNA, 25 bp, Homo sapien
gatcgcttgggccttggaggtggaa

SEQ ID NO: 4912340 - DNA, 25 bp, Homo sapien
ggaggtggaagttgcagtgagccga

SEQ ID NO: 4912341 - DNA, 25 bp, Homo sapien
atacatgaaacacgagtatacaaat

SEQ ID NO: 4912342 - DNA, 25 bp, Homo sapien
gtaattggaatcatcactgatacat

SEQ ID NO: 4912343 - DNA, 25 bp, Homo sapien
tgtaattggaatcatcactgataca

SEQ ID NO: 4912344 - DNA, 25 bp, Homo sapien
ctgatacatgaaacacgagtataca

SEQ ID NO: 4912345 - DNA, 25 bp, Homo sapien
aaatgtagcctctaatgtctctgtt

SEQ ID NO: 4912346 - DNA, 25 bp, Homo sapien
gaaaaatgtagcctctaatgtctct

SEQ ID NO: 4912347 - DNA, 25 bp, Homo sapien
agaaaaatgtagcctctaatgtctc

SEQ ID NO: 4912348 - DNA, 25 bp, Homo sapien
aaaaatgtagcctctaatgtctctg

SEQ ID NO: 4912349 - DNA, 25 bp, Homo sapien
cttcttgttgatactttcttcccac

SEQ ID NO: 4912350 - DNA, 25 bp, Homo sapien
acttcttgttgatactttcttccca

SEQ ID NO: 4912351 - DNA, 25 bp, Homo sapien
tcaatgtcaaagcatgacaccttgc

SEQ ID NO: 4912352 - DNA, 25 bp, Homo sapien
ccataatatctatagcatctactga

SEQ ID NO: 4912353 - DNA, 25 bp, Homo sapien
ttgaaatatagtttcccaaatacca

SEQ ID NO: 4912354 - DNA, 25 bp, Homo sapien
ctgaaatgactataggaaagcccac

SEQ ID NO: 4912355 - DNA, 25 bp, Homo sapien
tttcattttgtctttactcccatcc

SEQ ID NO: 4912356 - DNA, 25 bp, Homo sapien
ttcattttgtctttactcccatccc

SEQ ID NO: 4912357 - DNA, 25 bp, Homo sapien
tagcaggattgtttccactccacac

SEQ ID NO: 4912358 - DNA, 25 bp, Homo sapien
taaaagttgtcttgagatctgtcct

SEQ ID NO: 4912359 - DNA, 25 bp, Homo sapien
ttgtttccactccacaccgagacag

SEQ ID NO: 4912360 - DNA, 25 bp, Homo sapien
ggcatttctcttattctttagttaa

SEQ ID NO: 4912361 - DNA, 25 bp, Homo sapien
tcagtatatagagtttcgcacattg

SEQ ID NO: 4912362 - DNA, 25 bp, Homo sapien
ctcagtatatagagtttcgcacatt

SEQ ID NO: 4912363 - DNA, 25 bp, Homo sapien
gtctcagtatatagagtttcgcaca

SEQ ID NO: 4912364 - DNA, 25 bp, Homo sapien
tctcagtatatagagtttcgcacat

SEQ ID NO: 4912365 - DNA, 25 bp, Homo sapien
tgtggccctgcaatccctaatttgg

SEQ ID NO: 4912366 - DNA, 25 bp, Homo sapien
aaagggagtgccacaggcctagact

SEQ ID NO: 4912367 - DNA, 25 bp, Homo sapien
aaagctggagcccattgactgaagg

SEQ ID NO: 4912368 - DNA, 25 bp, Homo sapien
ctagactgtggaattgcaagccctt

SEQ ID NO: 4912369 - DNA, 25 bp, Homo sapien
gccatgagaggtcctagcttttgaa

SEQ ID NO: 4912370 - DNA, 25 bp, Homo sapien
atttatatgagccatgagaggtcct

SEQ ID NO: 4912371 - DNA, 25 bp, Homo sapien
tttatatgagccatgagaggtccta

SEQ ID NO: 4912372 - DNA, 25 bp, Homo sapien
tatgagccatgagaggtcctagctt

SEQ ID NO: 4912373 - DNA, 25 bp, Homo sapien
tactgacaatcggtagtacaattgc

SEQ ID NO: 4912374 - DNA, 25 bp, Homo sapien
ggtagtacaattgcctgtcctctat

SEQ ID NO: 4912375 - DNA, 25 bp, Homo sapien
caatcggtagtacaattgcctgtcc

SEQ ID NO: 4912376 - DNA, 25 bp, Homo sapien
ttctcctactgacaatcggtagtac

SEQ ID NO: 4912377 - DNA, 25 bp, Homo sapien
cttaggagtaggattccagtggttg

SEQ ID NO: 4912378 - DNA, 25 bp, Homo sapien
ttaggagtaggattccagtggttgt

SEQ ID NO: 4912379 - DNA, 25 bp, Homo sapien
tctctgtgaactactcccaacatca

SEQ ID NO: 4912380 - DNA, 25 bp, Homo sapien
ctttctctgtgaactactcccaaca

SEQ ID NO: 4912381 - DNA, 25 bp, Homo sapien
ctctgtgaactactcccaacatcac

SEQ ID NO: 4912382 - DNA, 25 bp, Homo sapien
tttctctgtgaactactcccaacat

SEQ ID NO: 4912383 - DNA, 25 bp, Homo sapien
gaaaggtcaccaataggtttatcca

SEQ ID NO: 4912384 - DNA, 25 bp, Homo sapien
tgaaccacaatcagtagtttagtat

SEQ ID NO: 4912385 - DNA, 25 bp, Homo sapien
caaaactgtccaagatctgaactct

SEQ ID NO: 4912386 - DNA, 25 bp, Homo sapien
gaagggatatacaccatgtcttagt

SEQ ID NO: 4912387 - DNA, 25 bp, Homo sapien
gggaatcttattccttagaggacaa

SEQ ID NO: 4912388 - DNA, 25 bp, Homo sapien
tggaaagggaatcttattccttaga

SEQ ID NO: 4912389 - DNA, 25 bp, Homo sapien
catcgatcaatcaaaactggaaagg

SEQ ID NO: 4912390 - DNA, 25 bp, Homo sapien
ccttagaggacaaatattggcaaat

SEQ ID NO: 4912391 - DNA, 25 bp, Homo sapien
tgcctcctaaaagtaagtcaggaat

SEQ ID NO: 4912392 - DNA, 25 bp, Homo sapien
ctttgcctcctaaaagtaagtcagg

SEQ ID NO: 4912393 - DNA, 25 bp, Homo sapien
gatatgctactaatatgggcagggc

SEQ ID NO: 4912394 - DNA, 25 bp, Homo sapien
tcttcatgaccgttgagaaaatgcc

SEQ ID NO: 4912395 - DNA, 25 bp, Homo sapien
ggtacaaagaatggtgctcggtgca

SEQ ID NO: 4912396 - DNA, 25 bp, Homo sapien
tcataggtgagtgaaggacagcaat

SEQ ID NO: 4912397 - DNA, 25 bp, Homo sapien
ctccaactctcctagcacttcattt

SEQ ID NO: 4912398 - DNA, 25 bp, Homo sapien
cctccaactctcctagcacttcatt

SEQ ID NO: 4912399 - DNA, 25 bp, Homo sapien
tcctccaactctcctagcacttcat

SEQ ID NO: 4912400 - DNA, 25 bp, Homo sapien
ttcctccaactctcctagcacttca

SEQ ID NO: 4912401 - DNA, 25 bp, Homo sapien
gccttggcaagtgcactcatggcct

SEQ ID NO: 4912402 - DNA, 25 bp, Homo sapien
tagccttggcaagtgcactcatggc

SEQ ID NO: 4912403 - DNA, 25 bp, Homo sapien
ttgatagccttggcaagtgcactca

SEQ ID NO: 4912404 - DNA, 25 bp, Homo sapien
gccttgatagccttggcaagtgcac

SEQ ID NO: 4912405 - DNA, 25 bp, Homo sapien
tcaatcgaacttgcagctgacactc

SEQ ID NO: 4912406 - DNA, 25 bp, Homo sapien
cactctttgggatcttgggcttaac

SEQ ID NO: 4912407 - DNA, 25 bp, Homo sapien
ctgacactctttgggatcttgggct

SEQ ID NO: 4912408 - DNA, 25 bp, Homo sapien
caatcgaacttgcagctgacactct

SEQ ID NO: 4912409 - DNA, 25 bp, Homo sapien
actctgaagcttttataggggactg

SEQ ID NO: 4912410 - DNA, 25 bp, Homo sapien
ctctgaagcttttataggggactgg

SEQ ID NO: 4912411 - DNA, 25 bp, Homo sapien
cagcatcatctgtgtctcctatctc

SEQ ID NO: 4912412 - DNA, 25 bp, Homo sapien
gcttgtttcctattatgtattcgtg

SEQ ID NO: 4912413 - DNA, 25 bp, Homo sapien
tattcgtgggtactgacctttcttg

SEQ ID NO: 4912414 - DNA, 25 bp, Homo sapien
tatctcagaccatgcttgtttccta

SEQ ID NO: 4912415 - DNA, 25 bp, Homo sapien
tactcagtgatactgcctcgggcag

SEQ ID NO: 4912416 - DNA, 25 bp, Homo sapien
cctcgggcagggtagaagcaagtct

SEQ ID NO: 4912417 - DNA, 25 bp, Homo sapien
caagtctctctaggggaaattgcgg

SEQ ID NO: 4912418 - DNA, 25 bp, Homo sapien
ttggatgatgatgagctttcaaata

SEQ ID NO: 4912419 - DNA, 25 bp, Homo sapien
gcagcagcagcagcgggagggaggg

SEQ ID NO: 4912420 - DNA, 25 bp, Homo sapien
agcagcagcagcgggagggagggag

SEQ ID NO: 4912421 - DNA, 25 bp, Homo sapien
cagcagcagcgggagggagggaggg

SEQ ID NO: 4912422 - DNA, 25 bp, Homo sapien
aagaagaagaagaagcagcagcagc

SEQ ID NO: 4912423 - DNA, 25 bp, Homo sapien
gtgtgatgagtttggactactgcca

SEQ ID NO: 4912424 - DNA, 25 bp, Homo sapien
agtgtgatgagtttggactactgcc

SEQ ID NO: 4912425 - DNA, 25 bp, Homo sapien
tgtgatgagtttggactactgccat

SEQ ID NO: 4912426 - DNA, 25 bp, Homo sapien
ccagtgtgatgagtttggactactg

SEQ ID NO: 4912427 - DNA, 25 bp, Homo sapien
tactgagcattgtcaaggggctcac

SEQ ID NO: 4912428 - DNA, 25 bp, Homo sapien
ttctgtcgcattgccagagacatga

SEQ ID NO: 4912429 - DNA, 25 bp, Homo sapien
agctccttagtactcccacacaatg

SEQ ID NO: 4912430 - DNA, 25 bp, Homo sapien
gggatgacagatggattctgtcgca

SEQ ID NO: 4912431 - DNA, 25 bp, Homo sapien
cacacaatgtaagagcttgtttcca

SEQ ID NO: 4912432 - DNA, 25 bp, Homo sapien
cagcttgcacaatatggtgaagaaa

SEQ ID NO: 4912433 - DNA, 25 bp, Homo sapien
gaaatcccagaacttgctcaacagt

SEQ ID NO: 4912434 - DNA, 25 bp, Homo sapien
actcatctggataaaacatagcttt

SEQ ID NO: 4912435 - DNA, 25 bp, Homo sapien
tctggataaaacatagctttctgca

SEQ ID NO: 4912436 - DNA, 25 bp, Homo sapien
tctgaagtatgacaatgggccgcag

SEQ ID NO: 4912437 - DNA, 25 bp, Homo sapien
gccgcagaaatgactgatggtatct

SEQ ID NO: 4912438 - DNA, 25 bp, Homo sapien
gatttttatcaaacgctcttcaccg

SEQ ID NO: 4912439 - DNA, 25 bp, Homo sapien
gaatgcctgagtgattcattacagc

SEQ ID NO: 4912440 - DNA, 25 bp, Homo sapien
cagcgttctggacccaattctgcaa

SEQ ID NO: 4912441 - DNA, 25 bp, Homo sapien
caaagtctagcaaaacgttgaaagt

SEQ ID NO: 4912442 - DNA, 25 bp, Homo sapien
gaaatgttatcaagcattagcaggc

SEQ ID NO: 4912443 - DNA, 25 bp, Homo sapien
tctgcaaacatggagacgctttcaa

SEQ ID NO: 4912444 - DNA, 25 bp, Homo sapien
tattacattctgcagtttggtgagg

SEQ ID NO: 4912445 - DNA, 25 bp, Homo sapien
aatattacattctgcagtttggtga

SEQ ID NO: 4912446 - DNA, 25 bp, Homo sapien
tggtgaggggcttcagttgtaccat

SEQ ID NO: 4912447 - DNA, 25 bp, Homo sapien
tttggtgaggggcttcagttgtacc

SEQ ID NO: 4912448 - DNA, 25 bp, Homo sapien
tccctttgatagagggcaggacagc

SEQ ID NO: 4912449 - DNA, 25 bp, Homo sapien
gtggcagtagaataaggagcctcct

SEQ ID NO: 4912450 - DNA, 25 bp, Homo sapien
gaggaaagtacccaagctgccaaca

SEQ ID NO: 4912451 - DNA, 25 bp, Homo sapien
cctgtctagaacctctcagagagaa

SEQ ID NO: 4912452 - DNA, 25 bp, Homo sapien
tctacaaccaaagggttgagtgaat

SEQ ID NO: 4912453 - DNA, 25 bp, Homo sapien
ttctacaaccaaagggttgagtgaa

SEQ ID NO: 4912454 - DNA, 25 bp, Homo sapien
tttctacaaccaaagggttgagtga

SEQ ID NO: 4912455 - DNA, 25 bp, Homo sapien
caagatgtggtctatagtcactgga

SEQ ID NO: 4912456 - DNA, 25 bp, Homo sapien
tgtggctttcagcatggagagcgtc

SEQ ID NO: 4912457 - DNA, 25 bp, Homo sapien
agttcaaagtacagctcctcttcag

SEQ ID NO: 4912458 - DNA, 25 bp, Homo sapien
ctcttcagacacaagtctccactgg

SEQ ID NO: 4912459 - DNA, 25 bp, Homo sapien
tcttagaagccagtccagaaaccat

SEQ ID NO: 4912460 - DNA, 25 bp, Homo sapien
ctttcttagaagccagtccagaaac

SEQ ID NO: 4912461 - DNA, 25 bp, Homo sapien
tttcttagaagccagtccagaaacc

SEQ ID NO: 4912462 - DNA, 25 bp, Homo sapien
ttcttagaagccagtccagaaacca

SEQ ID NO: 4912463 - DNA, 25 bp, Homo sapien
tgccacatcaaaatgatccttactg

SEQ ID NO: 4912464 - DNA, 25 bp, Homo sapien
taacccatacatgagtgccccctgc

SEQ ID NO: 4912465 - DNA, 25 bp, Homo sapien
ccctgccacatcaaaatgatcctta

SEQ ID NO: 4912466 - DNA, 25 bp, Homo sapien
cacatcaaaatgatccttactgaaa

SEQ ID NO: 4912467 - DNA, 25 bp, Homo sapien
tcactcctctttgatggcccttgat

SEQ ID NO: 4912468 - DNA, 25 bp, Homo sapien
cactcctctttgatggcccttgatt

SEQ ID NO: 4912469 - DNA, 25 bp, Homo sapien
cagctcctgttctgcggcgggaggc

SEQ ID NO: 4912470 - DNA, 25 bp, Homo sapien
tccatcagccaaaggaggattggct

SEQ ID NO: 4912471 - DNA, 25 bp, Homo sapien
catccaaatccagtccggatgcaaa

SEQ ID NO: 4912472 - DNA, 25 bp, Homo sapien
gggaggggagactattccatcagcc

SEQ ID NO: 4912473 - DNA, 25 bp, Homo sapien
gaggagagcgacggggggagaatgg

SEQ ID NO: 4912474 - DNA, 25 bp, Homo sapien
agagcgacggggggagaatgggaat

SEQ ID NO: 4912475 - DNA, 25 bp, Homo sapien
tgggaatgtacaagcgaacggtcag

SEQ ID NO: 4912476 - DNA, 25 bp, Homo sapien
atgtacaagcgaacggtcagggaga

SEQ ID NO: 4912477 - DNA, 25 bp, Homo sapien
ctccgggagccgcggattcacgttc

SEQ ID NO: 4912478 - DNA, 25 bp, Homo sapien
gccgcggattcacgttcggagatga

SEQ ID NO: 4912479 - DNA, 25 bp, Homo sapien
gagccgcggattcacgttcggagat

SEQ ID NO: 4912480 - DNA, 25 bp, Homo sapien
gcggattcacgttcggagatgagca

SEQ ID NO: 4912481 - DNA, 25 bp, Homo sapien
ggctcccgcggtgcccgcggtcgcg

SEQ ID NO: 4912482 - DNA, 25 bp, Homo sapien
gcggtgcccgcggtcgcggctgccg

SEQ ID NO: 4912483 - DNA, 25 bp, Homo sapien
cgcggtcgcggctgccgctccctcg

SEQ ID NO: 4912484 - DNA, 25 bp, Homo sapien
tgcccgcggtcgcggctgccgctcc

SEQ ID NO: 4912485 - DNA, 25 bp, Homo sapien
gtttgctttgctttcgccgggacat

SEQ ID NO: 4912486 - DNA, 25 bp, Homo sapien
caactcccggccccgcgcgcaaact

SEQ ID NO: 4912487 - DNA, 25 bp, Homo sapien
taatggtaataatcgggtttctgat

SEQ ID NO: 4912488 - DNA, 25 bp, Homo sapien
tttgccttatcatccaaagtggtgg

SEQ ID NO: 4912489 - DNA, 25 bp, Homo sapien
gaattatcaggcttctgcagattgc

SEQ ID NO: 4912490 - DNA, 25 bp, Homo sapien
ggtttctgatggtatatcttctccg

SEQ ID NO: 4912491 - DNA, 25 bp, Homo sapien
tgtcataaattttgcactgcagccc

SEQ ID NO: 4912492 - DNA, 25 bp, Homo sapien
gaacaatctgggcaatttattggca

SEQ ID NO: 4912493 - DNA, 25 bp, Homo sapien
cccgtcctatcagggctttttatca

SEQ ID NO: 4912494 - DNA, 25 bp, Homo sapien
gctgatagcatgatatggctcccac

SEQ ID NO: 4912495 - DNA, 25 bp, Homo sapien
ataaacaaatgtgctatctttatgc

SEQ ID NO: 4912496 - DNA, 25 bp, Homo sapien
ctgatttggaagcataataaacaaa

SEQ ID NO: 4912497 - DNA, 25 bp, Homo sapien
gttacctgtggcagagatactagga

SEQ ID NO: 4912498 - DNA, 25 bp, Homo sapien
cctgaaaagtcaattgttacctgtg

SEQ ID NO: 4912499 - DNA, 25 bp, Homo sapien
ctatgcacagataagataaactttc

SEQ ID NO: 4912500 - DNA, 25 bp, Homo sapien
tgatattttgctgatgtaacaacaa

SEQ ID NO: 4912501 - DNA, 25 bp, Homo sapien
ttgccatgacgatcagagagtccac

SEQ ID NO: 4912502 - DNA, 25 bp, Homo sapien
cagagagtccactttctatattgat

SEQ ID NO: 4912503 - DNA, 25 bp, Homo sapien
gaacattgaaattggctactgacct

SEQ ID NO: 4912504 - DNA, 25 bp, Homo sapien
cacaaatgtagttatactggcccat

SEQ ID NO: 4912505 - DNA, 25 bp, Homo sapien
tgtgtgataaatcccatgactccta

SEQ ID NO: 4912506 - DNA, 25 bp, Homo sapien
tatgggtacgtttctgagtgatgat

SEQ ID NO: 4912507 - DNA, 25 bp, Homo sapien
taatatggtaaacatgtccaacggc

SEQ ID NO: 4912508 - DNA, 25 bp, Homo sapien
tcaaaccaactgtgcggtagggcca

SEQ ID NO: 4912509 - DNA, 25 bp, Homo sapien
cctttaaagccttgagtatgtcggg

SEQ ID NO: 4912510 - DNA, 25 bp, Homo sapien
ggtagggccaagcactctgacatat

SEQ ID NO: 4912511 - DNA, 25 bp, Homo sapien
gaattaggcggctgaagtccaggcc

SEQ ID NO: 4912512 - DNA, 25 bp, Homo sapien
gaccacattactcgggccctcagaa

SEQ ID NO: 4912513 - DNA, 25 bp, Homo sapien
actgaatgggaattaggcggctgaa

SEQ ID NO: 4912514 - DNA, 25 bp, Homo sapien
taaggtttgtatacaattacagacc

SEQ ID NO: 4912515 - DNA, 25 bp, Homo sapien
catgatgcagagtttctagaaggtc

SEQ ID NO: 4912516 - DNA, 25 bp, Homo sapien
ggagctacacaacgtatgcaatgaa

SEQ ID NO: 4912517 - DNA, 25 bp, Homo sapien
ggatacccatcagttaagctcaatt

SEQ ID NO: 4912518 - DNA, 25 bp, Homo sapien
taaaacagagttactggatacccat

SEQ ID NO: 4912519 - DNA, 25 bp, Homo sapien
gatgggaacatagaagaggtcagct

SEQ ID NO: 4912520 - DNA, 25 bp, Homo sapien
tacaagccaatgtgttaggtgccat

SEQ ID NO: 4912521 - DNA, 25 bp, Homo sapien
gctttataggaagtgcaggcctgaa

SEQ ID NO: 4912522 - DNA, 25 bp, Homo sapien
gaggtcagctgacaacttccccaag

SEQ ID NO: 4912523 - DNA, 25 bp, Homo sapien
tctgctcctataacctaaagctctt

SEQ ID NO: 4912524 - DNA, 25 bp, Homo sapien
cagctgaatccattaactctgctcc

SEQ ID NO: 4912525 - DNA, 25 bp, Homo sapien
ggaccttgtgcctcattctaataga

SEQ ID NO: 4912526 - DNA, 25 bp, Homo sapien
agaatttgttggttgaagtgaaagt

SEQ ID NO: 4912527 - DNA, 25 bp, Homo sapien
tgtaaatatctcactcctacttgcc

SEQ ID NO: 4912528 - DNA, 25 bp, Homo sapien
tgtcaagcagtttagttacaatgaa

SEQ ID NO: 4912529 - DNA, 25 bp, Homo sapien
aatgtctttaatggactctgacaca

SEQ ID NO: 4912530 - DNA, 25 bp, Homo sapien
taattgccctatttcttgacctagt

SEQ ID NO: 4912531 - DNA, 25 bp, Homo sapien
tataaactcaagaggataaaaattc

SEQ ID NO: 4912532 - DNA, 25 bp, Homo sapien
tgctggttcactgatgagttgtaaa

SEQ ID NO: 4912533 - DNA, 25 bp, Homo sapien
ggccactggtttgctggttcactga

SEQ ID NO: 4912534 - DNA, 25 bp, Homo sapien
tctcaagtccacaagcatctcatat

SEQ ID NO: 4912535 - DNA, 25 bp, Homo sapien
agcgcttgcgggtcagtgccagttc

SEQ ID NO: 4912536 - DNA, 25 bp, Homo sapien
tgtgccggacttctcgccgggcctt

SEQ ID NO: 4912537 - DNA, 25 bp, Homo sapien
gctctgtaaacacagtttgagtggg

SEQ ID NO: 4912538 - DNA, 25 bp, Homo sapien
ttttccagggcgaatacaggttgtc

SEQ ID NO: 4912539 - DNA, 25 bp, Homo sapien
tagtttcttgaaagatgtcttgaat

SEQ ID NO: 4912540 - DNA, 25 bp, Homo sapien
ttggtggtctcaaatatatttatag

SEQ ID NO: 4912541 - DNA, 25 bp, Homo sapien
gggcaggagtattcatcacatatca

SEQ ID NO: 4912542 - DNA, 25 bp, Homo sapien
gccactgatttcacagtactgcagt

SEQ ID NO: 4912543 - DNA, 25 bp, Homo sapien
caaagtgagggcaacgatagaaatc

SEQ ID NO: 4912544 - DNA, 25 bp, Homo sapien
caaagcattgttgtagatcccgcat

SEQ ID NO: 4912545 - DNA, 25 bp, Homo sapien
tgatgaatattctcgctaagcctgt

SEQ ID NO: 4912546 - DNA, 25 bp, Homo sapien
ggccctccttgtgggtttgacacag

SEQ ID NO: 4912547 - DNA, 25 bp, Homo sapien
gaccgagctccatgtgccctcatgg

SEQ ID NO: 4912548 - DNA, 25 bp, Homo sapien
gcaagtgtgaggaaatctgaatttc

SEQ ID NO: 4912549 - DNA, 25 bp, Homo sapien
taatatctactcagaaaaggctcac

SEQ ID NO: 4912550 - DNA, 25 bp, Homo sapien
gctacaccatcaaatcaggctttgg

SEQ ID NO: 4912551 - DNA, 25 bp, Homo sapien
taatcggtggccataaactaacatt

SEQ ID NO: 4912552 - DNA, 25 bp, Homo sapien
cagggaaaaccttacagataatcgg

SEQ ID NO: 4912553 - DNA, 25 bp, Homo sapien
gtgtcagaagttataacacagaaag

SEQ ID NO: 4912554 - DNA, 25 bp, Homo sapien
ctatgatgaaagatccaaggaaacc

SEQ ID NO: 4912555 - DNA, 25 bp, Homo sapien
taacacagaaagcaacctgcatctc

SEQ ID NO: 4912556 - DNA, 25 bp, Homo sapien
aacacagaaagcaacctgcatctcc

SEQ ID NO: 4912557 - DNA, 25 bp, Homo sapien
tgttacaaaagtattccacttcttc

SEQ ID NO: 4912558 - DNA, 25 bp, Homo sapien
caaaagtattccacttcttcgcagc

SEQ ID NO: 4912559 - DNA, 25 bp, Homo sapien
tattccacttcttcgcagctcagat

SEQ ID NO: 4912560 - DNA, 25 bp, Homo sapien
cacttcttcgcagctcagattttca

SEQ ID NO: 4912561 - DNA, 25 bp, Homo sapien
tcatgaggaaccttaaactgactta

SEQ ID NO: 4912562 - DNA, 25 bp, Homo sapien
gctgtgatatgtctcaagtgcttct

SEQ ID NO: 4912563 - DNA, 25 bp, Homo sapien
aacaaatgagtatatatgctccatg

SEQ ID NO: 4912564 - DNA, 25 bp, Homo sapien
tatataagaatcatgaggaacctta

SEQ ID NO: 4912565 - DNA, 25 bp, Homo sapien
aaaacggtacattggtgcaggagga

SEQ ID NO: 4912566 - DNA, 25 bp, Homo sapien
gaaagtgatccaagcatttgtgaaa

SEQ ID NO: 4912567 - DNA, 25 bp, Homo sapien
aagcagctgttctaaaccaagaaag

SEQ ID NO: 4912568 - DNA, 25 bp, Homo sapien
aaaagcagctgttctaaaccaagaa

SEQ ID NO: 4912569 - DNA, 25 bp, Homo sapien
ggcactcttgatttgagactatgaa

SEQ ID NO: 4912570 - DNA, 25 bp, Homo sapien
ctatgaagtctgattaacaaattca

SEQ ID NO: 4912571 - DNA, 25 bp, Homo sapien
tggccaccaagatatgtgaattgac

SEQ ID NO: 4912572 - DNA, 25 bp, Homo sapien
ttttttgagaagctacattggcact

SEQ ID NO: 4912573 - DNA, 25 bp, Homo sapien
ccaagaatatgtttactctcataag

SEQ ID NO: 4912574 - DNA, 25 bp, Homo sapien
tccgattccatcaaaaccaagaata

SEQ ID NO: 4912575 - DNA, 25 bp, Homo sapien
accaagaatatgtttactctcataa

SEQ ID NO: 4912576 - DNA, 25 bp, Homo sapien
cttccgattccatcaaaaccaagaa

SEQ ID NO: 4912577 - DNA, 25 bp, Homo sapien
caagccaaagagtcctgtggccact

SEQ ID NO: 4912578 - DNA, 25 bp, Homo sapien
tctgggaacctactgtaacagctgc

SEQ ID NO: 4912579 - DNA, 25 bp, Homo sapien
cagctgcacctaatcctaacagagt

SEQ ID NO: 4912580 - DNA, 25 bp, Homo sapien
tctagcttccaacaccagagacagt

SEQ ID NO: 4912581 - DNA, 25 bp, Homo sapien
tcaaagtcgactacatggcaagcaa

SEQ ID NO: 4912582 - DNA, 25 bp, Homo sapien
tgatctgacagctgctttatcctta

SEQ ID NO: 4912583 - DNA, 25 bp, Homo sapien
gacagctgctttatccttatcatgt

SEQ ID NO: 4912584 - DNA, 25 bp, Homo sapien
cgtcaaagtcgactacatggcaagc

SEQ ID NO: 4912585 - DNA, 25 bp, Homo sapien
tggtccatcccagtcgtctgtctca

SEQ ID NO: 4912586 - DNA, 25 bp, Homo sapien
ccggtttctctgactgtgtgtcccc

SEQ ID NO: 4912587 - DNA, 25 bp, Homo sapien
caggttgccccggtttctctgactg

SEQ ID NO: 4912588 - DNA, 25 bp, Homo sapien
ggtccatcccagtcgtctgtctcaa

SEQ ID NO: 4912589 - DNA, 25 bp, Homo sapien
gcaagctaactgatgttcaagaaaa

SEQ ID NO: 4912590 - DNA, 25 bp, Homo sapien
tctcatgtaaccagcacacacaaaa

SEQ ID NO: 4912591 - DNA, 25 bp, Homo sapien
aaaatgtgtatttctaacagtacta

SEQ ID NO: 4912592 - DNA, 25 bp, Homo sapien
tctaacagtactaaagacggttgaa

SEQ ID NO: 4912593 - DNA, 25 bp, Homo sapien
tacggctaaaactatctcagaactc

SEQ ID NO: 4912594 - DNA, 25 bp, Homo sapien
tgttactgctttggaaattacggct

SEQ ID NO: 4912595 - DNA, 25 bp, Homo sapien
cagaaacttcaagcagaggtagcac

SEQ ID NO: 4912596 - DNA, 25 bp, Homo sapien
cagaaaattactgctggagttcctc

SEQ ID NO: 4912597 - DNA, 25 bp, Homo sapien
gaatgtaccttttcgcaagcaggca

SEQ ID NO: 4912598 - DNA, 25 bp, Homo sapien
aagaaaagaactgtaagaggctggg

SEQ ID NO: 4912599 - DNA, 25 bp, Homo sapien
tttccccatcataagagtaagccag

SEQ ID NO: 4912600 - DNA, 25 bp, Homo sapien
tatgaataaggaactatcgccgggc

SEQ ID NO: 4912601 - DNA, 25 bp, Homo sapien
ctccgagggccatgacgaagtatcg

SEQ ID NO: 4912602 - DNA, 25 bp, Homo sapien
cttggcatgtagaagtatcactggg

SEQ ID NO: 4912603 - DNA, 25 bp, Homo sapien
tcaacggcaatggttccctccgagg

SEQ ID NO: 4912604 - DNA, 25 bp, Homo sapien
gacgaagtatcggttccatgtctct

SEQ ID NO: 4912605 - DNA, 25 bp, Homo sapien
aataacacccaaggtccaaatgtgc

SEQ ID NO: 4912606 - DNA, 25 bp, Homo sapien
tgataaaccaaagttattgagagac

SEQ ID NO: 4912607 - DNA, 25 bp, Homo sapien
ccaaatgtgctactgaggttaaaac

SEQ ID NO: 4912608 - DNA, 25 bp, Homo sapien
acatactggctgttatctgtttggc

SEQ ID NO: 4912609 - DNA, 25 bp, Homo sapien
tgtattttccctcgtctttcagaga

SEQ ID NO: 4912610 - DNA, 25 bp, Homo sapien
ggaggacagtgccttccaggtagca

SEQ ID NO: 4912611 - DNA, 25 bp, Homo sapien
gagagtctgtcctttcctcaggtat

SEQ ID NO: 4912612 - DNA, 25 bp, Homo sapien
tctgcctgcaggaaactgtattttc

SEQ ID NO: 4912613 - DNA, 25 bp, Homo sapien
tccagggttcagagatttcctagac

SEQ ID NO: 4912614 - DNA, 25 bp, Homo sapien
tcacaaagtgacaaagcaccctccc

SEQ ID NO: 4912615 - DNA, 25 bp, Homo sapien
gcctgagtgtctaatgcaagccctc

SEQ ID NO: 4912616 - DNA, 25 bp, Homo sapien
gcctgcgatgctggaatgccttttc

SEQ ID NO: 4912617 - DNA, 25 bp, Homo sapien
ttatactgctcagacaaagcaaggt

SEQ ID NO: 4912618 - DNA, 25 bp, Homo sapien
gatgtggacacctttcattttaccc

SEQ ID NO: 4912619 - DNA, 25 bp, Homo sapien
tccgttttaagatcgagagctccag

SEQ ID NO: 4912620 - DNA, 25 bp, Homo sapien
cagcttgagggcgttcaatcagcac

SEQ ID NO: 4912621 - DNA, 25 bp, Homo sapien
ccagactgaccaatctttgaggcag

SEQ ID NO: 4912622 - DNA, 25 bp, Homo sapien
cactgctttgatctcggctggaact

SEQ ID NO: 4912623 - DNA, 25 bp, Homo sapien
aaaataggaatcttaactcaatggc

SEQ ID NO: 4912624 - DNA, 25 bp, Homo sapien
tctgtggcatagctgattcttttct

SEQ ID NO: 4912625 - DNA, 25 bp, Homo sapien
gaattgaatagatctcgaatcacta

SEQ ID NO: 4912626 - DNA, 25 bp, Homo sapien
tctcttaacccaccagaattgaata

SEQ ID NO: 4912627 - DNA, 25 bp, Homo sapien
tgggctctggactttaagaggtaaa

SEQ ID NO: 4912628 - DNA, 25 bp, Homo sapien
caatgtataaagttaccagggaagc

SEQ ID NO: 4912629 - DNA, 25 bp, Homo sapien
ccagggaagcttgtttgtcttgaac

SEQ ID NO: 4912630 - DNA, 25 bp, Homo sapien
tcttgaactgggctctggactttaa

SEQ ID NO: 4912631 - DNA, 25 bp, Homo sapien
ctgacaagccactgtgagtacttca

SEQ ID NO: 4912632 - DNA, 25 bp, Homo sapien
tgacaagccactgtgagtacttcat

SEQ ID NO: 4912633 - DNA, 25 bp, Homo sapien
aaggattctgatgctttccatatcc

SEQ ID NO: 4912634 - DNA, 25 bp, Homo sapien
catctttcttcaagggtttagtctg

SEQ ID NO: 4912635 - DNA, 25 bp, Homo sapien
tagtctggaaataactgtcactttc

SEQ ID NO: 4912636 - DNA, 25 bp, Homo sapien
aaaattgtggacttcatcatctttc

SEQ ID NO: 4912637 - DNA, 25 bp, Homo sapien
aaattgtggacttcatcatctttct

SEQ ID NO: 4912638 - DNA, 25 bp, Homo sapien
aaggtggtacctacctgtgcagcag

SEQ ID NO: 4912639 - DNA, 25 bp, Homo sapien
gcttataggcttccaaacatgctga

SEQ ID NO: 4912640 - DNA, 25 bp, Homo sapien
gcagctcccatgagacagatattag

SEQ ID NO: 4912641 - DNA, 25 bp, Homo sapien
cataatggcttcttatcacgtgcag

SEQ ID NO: 4912642 - DNA, 25 bp, Homo sapien
aattcattactaacttatcataaag

SEQ ID NO: 4912643 - DNA, 25 bp, Homo sapien
aaattcattactaacttatcataaa

SEQ ID NO: 4912644 - DNA, 25 bp, Homo sapien
aaaattcattactaacttatcataa

SEQ ID NO: 4912645 - DNA, 25 bp, Homo sapien
aaaaattcattactaacttatcata

SEQ ID NO: 4912646 - DNA, 25 bp, Homo sapien
attcagttatttctggaccattaca

SEQ ID NO: 4912647 - DNA, 25 bp, Homo sapien
cgagttgctccctttatgtgtggtt

SEQ ID NO: 4912648 - DNA, 25 bp, Homo sapien
gattaatataaaagccctcttctac

SEQ ID NO: 4912649 - DNA, 25 bp, Homo sapien
tctggaccattacatatcaacattc

SEQ ID NO: 4912650 - DNA, 25 bp, Homo sapien
tcacgcaggctaggaactgaaaatc

SEQ ID NO: 4912651 - DNA, 25 bp, Homo sapien
tcaaactaaaaaagcgcgatggcct

SEQ ID NO: 4912652 - DNA, 25 bp, Homo sapien
tatacggtgtcagaacatggttgcg

SEQ ID NO: 4912653 - DNA, 25 bp, Homo sapien
catggttgcgaaatacaagttaacg

SEQ ID NO: 4912654 - DNA, 25 bp, Homo sapien
tgtggacaggctgattggaatcttt

SEQ ID NO: 4912655 - DNA, 25 bp, Homo sapien
gacaggctgattggaatctttcctg

SEQ ID NO: 4912656 - DNA, 25 bp, Homo sapien
tggacaggctgattggaatctttcc

SEQ ID NO: 4912657 - DNA, 25 bp, Homo sapien
cagtgtggacaggctgattggaatc

SEQ ID NO: 4912658 - DNA, 25 bp, Homo sapien
gaaagttgacacttgtgcagccaaa

SEQ ID NO: 4912659 - DNA, 25 bp, Homo sapien
tacagaggaagcatacgaacagcat

SEQ ID NO: 4912660 - DNA, 25 bp, Homo sapien
taggcaaccacataagggcactcgt

SEQ ID NO: 4912661 - DNA, 25 bp, Homo sapien
tgccatcagcgagacgaaaagaaca

SEQ ID NO: 4912662 - DNA, 25 bp, Homo sapien
ctgtgtctaacattcttcttgcatt

SEQ ID NO: 4912663 - DNA, 25 bp, Homo sapien
tgtgtctaacattcttcttgcattt

SEQ ID NO: 4912664 - DNA, 25 bp, Homo sapien
tgaattaatcactggcacgactggg

SEQ ID NO: 4912665 - DNA, 25 bp, Homo sapien
gaagatgctttcactggaggagact

SEQ ID NO: 4912666 - DNA, 25 bp, Homo sapien
gagacttttgatttgaccactgtga

SEQ ID NO: 4912667 - DNA, 25 bp, Homo sapien
tctcctacaggttccaaaagggagc

SEQ ID NO: 4912668 - DNA, 25 bp, Homo sapien
gggacttacaatcaatatgtgcaga

SEQ ID NO: 4912669 - DNA, 25 bp, Homo sapien
gccctgggtatggttgggacttaca

SEQ ID NO: 4912670 - DNA, 25 bp, Homo sapien
tgtgcagactgtaccaaacgacact

SEQ ID NO: 4912671 - DNA, 25 bp, Homo sapien
cgtcaagaagaagtaaagcctgggt

SEQ ID NO: 4912672 - DNA, 25 bp, Homo sapien
aaagagatagtaacgacatttcaac

SEQ ID NO: 4912673 - DNA, 25 bp, Homo sapien
tcaacagtgttctaaacataacgtc

SEQ ID NO: 4912674 - DNA, 25 bp, Homo sapien
cataacgtctaccagccaagataaa

SEQ ID NO: 4912675 - DNA, 25 bp, Homo sapien
gatagtaacgacatttcaacagtgt

SEQ ID NO: 4912676 - DNA, 25 bp, Homo sapien
tacagcactgtagcatgcgtgtgca

SEQ ID NO: 4912677 - DNA, 25 bp, Homo sapien
tatgtggttcatgacggaaagtatc

SEQ ID NO: 4912678 - DNA, 25 bp, Homo sapien
cctaagatgtagtattacgcctgga

SEQ ID NO: 4912679 - DNA, 25 bp, Homo sapien
taatgtcaacgttaaggtctggcca

SEQ ID NO: 4912680 - DNA, 25 bp, Homo sapien
ccagcactaaaggtcagagaggtga

SEQ ID NO: 4912681 - DNA, 25 bp, Homo sapien
gatcctgaaagttatcgcctccagc

SEQ ID NO: 4912682 - DNA, 25 bp, Homo sapien
tatcgcctccagcactaaaggtcag

SEQ ID NO: 4912683 - DNA, 25 bp, Homo sapien
gaaattaatataaggatcctgaaag

SEQ ID NO: 4912684 - DNA, 25 bp, Homo sapien
ctgtggtcgttggagacttttcagc

SEQ ID NO: 4912685 - DNA, 25 bp, Homo sapien
ggagggagcaggtcaccactctttt

SEQ ID NO: 4912686 - DNA, 25 bp, Homo sapien
ctggagtgtgactagctcttgcaaa

SEQ ID NO: 4912687 - DNA, 25 bp, Homo sapien
ctcttgcaaatgttcggaaaagtca

SEQ ID NO: 4912688 - DNA, 25 bp, Homo sapien
tgcattggaatgacagaccctttat

SEQ ID NO: 4912689 - DNA, 25 bp, Homo sapien
tgatgcttatccagtgtccagaaac

SEQ ID NO: 4912690 - DNA, 25 bp, Homo sapien
tcagtgggacaacacgactcaatat

SEQ ID NO: 4912691 - DNA, 25 bp, Homo sapien
gaccctttatagaaacaccctcaga

SEQ ID NO: 4912692 - DNA, 25 bp, Homo sapien
tctcatactctttctttaccacttg

SEQ ID NO: 4912693 - DNA, 25 bp, Homo sapien
cttctcatactctttctttaccact

SEQ ID NO: 4912694 - DNA, 25 bp, Homo sapien
ttcttctcatactctttctttacca

SEQ ID NO: 4912695 - DNA, 25 bp, Homo sapien
ccttcttctcatactctttctttac

SEQ ID NO: 4912696 - DNA, 25 bp, Homo sapien
gactctgaatttttcgttccccatc

SEQ ID NO: 4912697 - DNA, 25 bp, Homo sapien
ttattattcaagtccatcttcccag

SEQ ID NO: 4912698 - DNA, 25 bp, Homo sapien
actggaagttgctgtcgactctgaa

SEQ ID NO: 4912699 - DNA, 25 bp, Homo sapien
tattattcaagtccatcttcccagg

SEQ ID NO: 4912700 - DNA, 25 bp, Homo sapien
gccacaatttagtatgagtaacctg

SEQ ID NO: 4912701 - DNA, 25 bp, Homo sapien
caagttttgctgtccacgaaaaagc

SEQ ID NO: 4912702 - DNA, 25 bp, Homo sapien
ggcaaaatactaacagtcgatgaca

SEQ ID NO: 4912703 - DNA, 25 bp, Homo sapien
gaacagtcttggtctggctaagcag

SEQ ID NO: 4912704 - DNA, 25 bp, Homo sapien
tttcttaacattcattagcttgaga

SEQ ID NO: 4912705 - DNA, 25 bp, Homo sapien
taattagtgagctgaatctcccgag

SEQ ID NO: 4912706 - DNA, 25 bp, Homo sapien
caatttaagagagtgcgctaatcca

SEQ ID NO: 4912707 - DNA, 25 bp, Homo sapien
taaatgcctggtctgcaaaggcttc

SEQ ID NO: 4912708 - DNA, 25 bp, Homo sapien
caccatgagtttgagcagagtaaca

SEQ ID NO: 4912709 - DNA, 25 bp, Homo sapien
tgaatcctcttttcccttatcaggc

SEQ ID NO: 4912710 - DNA, 25 bp, Homo sapien
cttatcaggctgatacagacctgca

SEQ ID NO: 4912711 - DNA, 25 bp, Homo sapien
ctgcatcatcctcggagccttctga

SEQ ID NO: 4912712 - DNA, 25 bp, Homo sapien
tccactcccacggagtctctccaaa

SEQ ID NO: 4912713 - DNA, 25 bp, Homo sapien
ggtctttttataacgctctatgtgg

SEQ ID NO: 4912714 - DNA, 25 bp, Homo sapien
tacctattagagtacttaaagtatc

SEQ ID NO: 4912715 - DNA, 25 bp, Homo sapien
catcctacagatgaaatgctctaca

SEQ ID NO: 4912716 - DNA, 25 bp, Homo sapien
acacttgttctatattacctattag

SEQ ID NO: 4912717 - DNA, 25 bp, Homo sapien
taagccactctagtgaaaagtcact

SEQ ID NO: 4912718 - DNA, 25 bp, Homo sapien
ggtgaagtggccatggaatctaaca

SEQ ID NO: 4912719 - DNA, 25 bp, Homo sapien
cctgtggagttatgaaggtacctct

SEQ ID NO: 4912720 - DNA, 25 bp, Homo sapien
cacaatgttaggttcactaggtaaa

SEQ ID NO: 4912721 - DNA, 25 bp, Homo sapien
agaaacctgaaaagagacctaccag

SEQ ID NO: 4912722 - DNA, 25 bp, Homo sapien
tttggattatgttgtgcctgctagt

SEQ ID NO: 4912723 - DNA, 25 bp, Homo sapien
cagaaacctgaaaagagacctacca

SEQ ID NO: 4912724 - DNA, 25 bp, Homo sapien
tgtgcctgctagtacttttacaatg

SEQ ID NO: 4912725 - DNA, 25 bp, Homo sapien
taattgtggatttcaccgcatcaga

SEQ ID NO: 4912726 - DNA, 25 bp, Homo sapien
tgtctctgcccgatatatgtagcca

SEQ ID NO: 4912727 - DNA, 25 bp, Homo sapien
tggaaggccctactgcaaaagaata

SEQ ID NO: 4912728 - DNA, 25 bp, Homo sapien
aggctgcacaaggacccaaagggtc

SEQ ID NO: 4912729 - DNA, 25 bp, Homo sapien
tccctcctttcttatccaaatgaca

SEQ ID NO: 4912730 - DNA, 25 bp, Homo sapien
ctccctcctttcttatccaaatgac

SEQ ID NO: 4912731 - DNA, 25 bp, Homo sapien
gcttacatggtaataagatgactcc

SEQ ID NO: 4912732 - DNA, 25 bp, Homo sapien
gagaaactggcattagcttacatgg

SEQ ID NO: 4912733 - DNA, 25 bp, Homo sapien
gacactggtatcatgtatgtaacaa

SEQ ID NO: 4912734 - DNA, 25 bp, Homo sapien
gttaacacttcatgtaaattccaga

SEQ ID NO: 4912735 - DNA, 25 bp, Homo sapien
tttttgggtgtaattcctccactga

SEQ ID NO: 4912736 - DNA, 25 bp, Homo sapien
gctcttttggataatagctctttct

SEQ ID NO: 4912737 - DNA, 25 bp, Homo sapien
agcatctggtccagctcttttggat

SEQ ID NO: 4912738 - DNA, 25 bp, Homo sapien
ttgctgtttatggatggccagcatc

SEQ ID NO: 4912739 - DNA, 25 bp, Homo sapien
ttctcccttttcttgctgacttcct

SEQ ID NO: 4912740 - DNA, 25 bp, Homo sapien
tttcttgctgacttcctcttcattg

SEQ ID NO: 4912741 - DNA, 25 bp, Homo sapien
ttttcttgctgacttcctcttcatt

SEQ ID NO: 4912742 - DNA, 25 bp, Homo sapien
tcccttttcttgctgacttcctctt

SEQ ID NO: 4912743 - DNA, 25 bp, Homo sapien
taaaaatgaagtgtccagccttggg

SEQ ID NO: 4912744 - DNA, 25 bp, Homo sapien
gaatctaagtgatgggaaacagcct

SEQ ID NO: 4912745 - DNA, 25 bp, Homo sapien
ggtcccgcgttccaataagactcga

SEQ ID NO: 4912746 - DNA, 25 bp, Homo sapien
tatttctgagttaagcctgcacaag

SEQ ID NO: 4912747 - DNA, 25 bp, Homo sapien
cagcaaccacttgggaccagcagtc

SEQ ID NO: 4912748 - DNA, 25 bp, Homo sapien
cacaatgcagttgtttttgttgtct

SEQ ID NO: 4912749 - DNA, 25 bp, Homo sapien
agtcacatccagcaaccacttggga

SEQ ID NO: 4912750 - DNA, 25 bp, Homo sapien
ctgtacacaatgcagttgtttttgt

SEQ ID NO: 4912751 - DNA, 25 bp, Homo sapien
ggaaactggctagaatgtagagcct

SEQ ID NO: 4912752 - DNA, 25 bp, Homo sapien
ttgcaaaggtttcatttccagctat

SEQ ID NO: 4912753 - DNA, 25 bp, Homo sapien
ggtttcatttccagctatcctctca

SEQ ID NO: 4912754 - DNA, 25 bp, Homo sapien
aaaggtttcatttccagctatcctc

SEQ ID NO: 4912755 - DNA, 25 bp, Homo sapien
gcaaaggtttcatttccagctatcc

SEQ ID NO: 4912756 - DNA, 25 bp, Homo sapien
gtgcagctacatgacacagtctggg

SEQ ID NO: 4912757 - DNA, 25 bp, Homo sapien
atcagcttcctctttagagtttgcc

SEQ ID NO: 4912758 - DNA, 25 bp, Homo sapien
tcctttgtagccagggtgcagctac

SEQ ID NO: 4912759 - DNA, 25 bp, Homo sapien
aaatcaaaggcaatgccctgcaagt

SEQ ID NO: 4912760 - DNA, 25 bp, Homo sapien
cctcttataagtgtacaaattgtaa

SEQ ID NO: 4912761 - DNA, 25 bp, Homo sapien
atcctcttataagtgtacaaattgt

SEQ ID NO: 4912762 - DNA, 25 bp, Homo sapien
tgtttcaactttcaaaggcttatgg

SEQ ID NO: 4912763 - DNA, 25 bp, Homo sapien
ctggtgtttcaactttcaaaggctt

SEQ ID NO: 4912764 - DNA, 25 bp, Homo sapien
caacaagcttaagattgaatcccaa

SEQ ID NO: 4912765 - DNA, 25 bp, Homo sapien
tagaacagtgtctagaatagaacaa

SEQ ID NO: 4912766 - DNA, 25 bp, Homo sapien
gcaagaaaatgtacgtaaagtgatt

SEQ ID NO: 4912767 - DNA, 25 bp, Homo sapien
gggaaaagcactgtttcgatatcat

SEQ ID NO: 4912768 - DNA, 25 bp, Homo sapien
gggttttcggcatcgcgttatcctg

SEQ ID NO: 4912769 - DNA, 25 bp, Homo sapien
tagaacgtaaccagaaaaagcctca

SEQ ID NO: 4912770 - DNA, 25 bp, Homo sapien
tgcaatttgcaacagacagctctat

SEQ ID NO: 4912771 - DNA, 25 bp, Homo sapien
gacacaaggctcactatttgcagaa

SEQ ID NO: 4912772 - DNA, 25 bp, Homo sapien
tatagtactcattgtggaccagaca

SEQ ID NO: 4912773 - DNA, 25 bp, Homo sapien
gaaagtggagagctggattaactag

SEQ ID NO: 4912774 - DNA, 25 bp, Homo sapien
ttacctaatatctgctgcttggatg

SEQ ID NO: 4912775 - DNA, 25 bp, Homo sapien
taactagaatgaggaattaccaggc

SEQ ID NO: 4912776 - DNA, 25 bp, Homo sapien
actggtttatccacttgtttattca

SEQ ID NO: 4912777 - DNA, 25 bp, Homo sapien
gtccttatagaactcccattctaag

SEQ ID NO: 4912778 - DNA, 25 bp, Homo sapien
tagaactcccattctaaggataaaa

SEQ ID NO: 4912779 - DNA, 25 bp, Homo sapien
aaaaactgcatcatactggtttatc

SEQ ID NO: 4912780 - DNA, 25 bp, Homo sapien
ttcaccacctcgatcagcataaatc

SEQ ID NO: 4912781 - DNA, 25 bp, Homo sapien
tataaatattcctcctatagcttct

SEQ ID NO: 4912782 - DNA, 25 bp, Homo sapien
gtatatttcaccacctcgatcagca

SEQ ID NO: 4912783 - DNA, 25 bp, Homo sapien
tattcctcctatagcttctgtatat

SEQ ID NO: 4912784 - DNA, 25 bp, Homo sapien
ttgaacacgtgtcccatagagaagc

SEQ ID NO: 4912785 - DNA, 25 bp, Homo sapien
gacaggataggaggtcagatatgcc

SEQ ID NO: 4912786 - DNA, 25 bp, Homo sapien
tgggagactgctaaccacagagtgg

SEQ ID NO: 4912787 - DNA, 25 bp, Homo sapien
taaaggttaaacagaatgactcact

SEQ ID NO: 4912788 - DNA, 25 bp, Homo sapien
cgtatatttattgtggtgctattca

SEQ ID NO: 4912789 - DNA, 25 bp, Homo sapien
caacaaaagaaactactatcggagt

SEQ ID NO: 4912790 - DNA, 25 bp, Homo sapien
tattgtggtgctattcacaacagca

SEQ ID NO: 4912791 - DNA, 25 bp, Homo sapien
cacacgtatatttattgtggtgcta

SEQ ID NO: 4912792 - DNA, 25 bp, Homo sapien
caactgggttgtgtaaaactcaatt

SEQ ID NO: 4912793 - DNA, 25 bp, Homo sapien
cttgcagcgctactcccaactgggt

SEQ ID NO: 4912794 - DNA, 25 bp, Homo sapien
aacgtgtccccattgaatactgcat

SEQ ID NO: 4912795 - DNA, 25 bp, Homo sapien
aaacgtgtccccattgaatactgca

SEQ ID NO: 4912796 - DNA, 25 bp, Homo sapien
tcagtataagtgtaatgaaagtgat

SEQ ID NO: 4912797 - DNA, 25 bp, Homo sapien
tcaaaacaaccaatgcataagagag

SEQ ID NO: 4912798 - DNA, 25 bp, Homo sapien
gagaccaatgaattgtaatgcaatg

SEQ ID NO: 4912799 - DNA, 25 bp, Homo sapien
tgcaatggagtacaaaagtcatcga

SEQ ID NO: 4912800 - DNA, 25 bp, Homo sapien
gcctattactaatcaggtccctctg

SEQ ID NO: 4912801 - DNA, 25 bp, Homo sapien
actgagaactgccatcagattagta

SEQ ID NO: 4912802 - DNA, 25 bp, Homo sapien
gataaggtctctgcctattactaat

SEQ ID NO: 4912803 - DNA, 25 bp, Homo sapien
gtacttcagcctttatactcttcca

SEQ ID NO: 4912804 - DNA, 25 bp, Homo sapien
ctcaatgttgtaatgccaaagcaat

SEQ ID NO: 4912805 - DNA, 25 bp, Homo sapien
ctttgttagagacatgctgtcattc

SEQ ID NO: 4912806 - DNA, 25 bp, Homo sapien
tttaatggtgaaaagctgggatctc

SEQ ID NO: 4912807 - DNA, 25 bp, Homo sapien
tctcaagccacggaaacctgtattt

SEQ ID NO: 4912808 - DNA, 25 bp, Homo sapien
gaattccggctccacattttgctaa

SEQ ID NO: 4912809 - DNA, 25 bp, Homo sapien
ctgtatttgaattccggctccacat

SEQ ID NO: 4912810 - DNA, 25 bp, Homo sapien
tacatggacatggtattagaactcc

SEQ ID NO: 4912811 - DNA, 25 bp, Homo sapien
cagacttagtacacagcagcttatc

SEQ ID NO: 4912812 - DNA, 25 bp, Homo sapien
tcatatgtggtgtccagatggtcct

SEQ ID NO: 4912813 - DNA, 25 bp, Homo sapien
tagcttgactgtcacaacctgaggg

SEQ ID NO: 4912814 - DNA, 25 bp, Homo sapien
cagtacgtttccatgatttacccaa

SEQ ID NO: 4912815 - DNA, 25 bp, Homo sapien
tcttcaagctccaaattgagtgact

SEQ ID NO: 4912816 - DNA, 25 bp, Homo sapien
ccagtacgtttccatgatttaccca

SEQ ID NO: 4912817 - DNA, 25 bp, Homo sapien
gaaccagtatttgaaagctcgtctt

SEQ ID NO: 4912818 - DNA, 25 bp, Homo sapien
gacttaaacatgtcataagcagctt

SEQ ID NO: 4912819 - DNA, 25 bp, Homo sapien
gatgtgttccaaaggatttcctgtg

SEQ ID NO: 4912820 - DNA, 25 bp, Homo sapien
ccattgtacagatcatcagaactcc

SEQ ID NO: 4912821 - DNA, 25 bp, Homo sapien
tagacttattgtctgagccttgaaa

SEQ ID NO: 4912822 - DNA, 25 bp, Homo sapien
aaaatgtaacttaggatgcagctgc

SEQ ID NO: 4912823 - DNA, 25 bp, Homo sapien
cttgtcagaagtcccaacgcgagtt

SEQ ID NO: 4912824 - DNA, 25 bp, Homo sapien
tgcaccaatgcacgtacacttgacc

SEQ ID NO: 4912825 - DNA, 25 bp, Homo sapien
agctgcggaatagcctgcaccaatg

SEQ ID NO: 4912826 - DNA, 25 bp, Homo sapien
ctgatcaatatttgatcacagttac

SEQ ID NO: 4912827 - DNA, 25 bp, Homo sapien
cagttacagcgcattaattcaaagt

SEQ ID NO: 4912828 - DNA, 25 bp, Homo sapien
taattttcagtggaatcattgccat

SEQ ID NO: 4912829 - DNA, 25 bp, Homo sapien
caaagttaattttcagtggaatcat

SEQ ID NO: 4912830 - DNA, 25 bp, Homo sapien
gggttgaggatgaacaaccaatttc

SEQ ID NO: 4912831 - DNA, 25 bp, Homo sapien
gatccgatttttctagggtcaggca

SEQ ID NO: 4912832 - DNA, 25 bp, Homo sapien
gggcactgaggtagaatcccaactc

SEQ ID NO: 4912833 - DNA, 25 bp, Homo sapien
aatcccaactcccttatacacgtgt

SEQ ID NO: 4912834 - DNA, 25 bp, Homo sapien
tggttgtcaaaactgagagcaaggc

SEQ ID NO: 4912835 - DNA, 25 bp, Homo sapien
tgtcacacaatctgttctcatgctg

SEQ ID NO: 4912836 - DNA, 25 bp, Homo sapien
ctagcatccatgtcacacaatctgt

SEQ ID NO: 4912837 - DNA, 25 bp, Homo sapien
catgctgcataacactgagattctg

SEQ ID NO: 4912838 - DNA, 25 bp, Homo sapien
ctcatgctgcataacactgagattc

SEQ ID NO: 4912839 - DNA, 25 bp, Homo sapien
tagaactctagccacggaagaggcc

SEQ ID NO: 4912840 - DNA, 25 bp, Homo sapien
taattaaatgcaacacacccgctac

SEQ ID NO: 4912841 - DNA, 25 bp, Homo sapien
gccatgacatttcagacagcgtcag

SEQ ID NO: 4912842 - DNA, 25 bp, Homo sapien
ggctagcttgaatcgcccacatatt

SEQ ID NO: 4912843 - DNA, 25 bp, Homo sapien
cagtggtaagatgtgtgatttcacc

SEQ ID NO: 4912844 - DNA, 25 bp, Homo sapien
tttggttaatatgatcccagaagct

SEQ ID NO: 4912845 - DNA, 25 bp, Homo sapien
tgacccagtggttccattttggtta

SEQ ID NO: 4912846 - DNA, 25 bp, Homo sapien
atatgatcccagaagctccaagcag

SEQ ID NO: 4912847 - DNA, 25 bp, Homo sapien
tctctgacccagtggttccattttg

SEQ ID NO: 4912848 - DNA, 25 bp, Homo sapien
gcctctaaccagtagtcaagataag

SEQ ID NO: 4912849 - DNA, 25 bp, Homo sapien
caagataagtgttgaactgagaagt

SEQ ID NO: 4912850 - DNA, 25 bp, Homo sapien
gtattgatccagtaatagcagttca

SEQ ID NO: 4912851 - DNA, 25 bp, Homo sapien
gactgtgagtccttaaccctccaga

SEQ ID NO: 4912852 - DNA, 25 bp, Homo sapien
gagagtacaagcttattttatcatt

SEQ ID NO: 4912853 - DNA, 25 bp, Homo sapien
ggagattaagaaggagagagtacaa

SEQ ID NO: 4912854 - DNA, 25 bp, Homo sapien
aagccttttaagtgataacgtatgc

SEQ ID NO: 4912855 - DNA, 25 bp, Homo sapien
tgaatatgtagtgatcatacgaatg

SEQ ID NO: 4912856 - DNA, 25 bp, Homo sapien
gtatttcggagatgaggctccaagg

SEQ ID NO: 4912857 - DNA, 25 bp, Homo sapien
cacattcattcgcatgtatttcgga

SEQ ID NO: 4912858 - DNA, 25 bp, Homo sapien
catgtatttcggagatgaggctcca

SEQ ID NO: 4912859 - DNA, 25 bp, Homo sapien
cattcgcatgtatttcggagatgag

SEQ ID NO: 4912860 - DNA, 25 bp, Homo sapien
aggtcaaatctaccacagcaccatc

SEQ ID NO: 4912861 - DNA, 25 bp, Homo sapien
aaagctacataaacgtagccctcca

SEQ ID NO: 4912862 - DNA, 25 bp, Homo sapien
taaaagctacataaacgtagccctc

SEQ ID NO: 4912863 - DNA, 25 bp, Homo sapien
ctaaggtcaaatctaccacagcacc

SEQ ID NO: 4912864 - DNA, 25 bp, Homo sapien
ttaaatcttctacagcttgggccaa

SEQ ID NO: 4912865 - DNA, 25 bp, Homo sapien
gcttgggccaattttgcaaccgtca

SEQ ID NO: 4912866 - DNA, 25 bp, Homo sapien
aatcttctacagcttgggccaattt

SEQ ID NO: 4912867 - DNA, 25 bp, Homo sapien
cttgggccaattttgcaaccgtcat

SEQ ID NO: 4912868 - DNA, 25 bp, Homo sapien
agagctttttcgcttttcatccagc

SEQ ID NO: 4912869 - DNA, 25 bp, Homo sapien
gagctttttcgcttttcatccagct

SEQ ID NO: 4912870 - DNA, 25 bp, Homo sapien
cagagctttttcgcttttcatccag

SEQ ID NO: 4912871 - DNA, 25 bp, Homo sapien
tgccccaggtatcacggcatcgcca

SEQ ID NO: 4912872 - DNA, 25 bp, Homo sapien
ccatctgcacccgacatctgtctct

SEQ ID NO: 4912873 - DNA, 25 bp, Homo sapien
tgtcattctggcaggcccgcgctgc

SEQ ID NO: 4912874 - DNA, 25 bp, Homo sapien
aggtatcacggcatcgccatctgca

SEQ ID NO: 4912875 - DNA, 25 bp, Homo sapien
gacttgtatggccttctgttgcaca

SEQ ID NO: 4912876 - DNA, 25 bp, Homo sapien
aatcagggtacaggaaggagtgaca

SEQ ID NO: 4912877 - DNA, 25 bp, Homo sapien
gagcacaccattgtttccaatagga

SEQ ID NO: 4912878 - DNA, 25 bp, Homo sapien
cacatcattgtgcagtttggaagga

SEQ ID NO: 4912879 - DNA, 25 bp, Homo sapien
tactgtgattttgtcacggactgag

SEQ ID NO: 4912880 - DNA, 25 bp, Homo sapien
cttctcccatctgttactgtgattt

SEQ ID NO: 4912881 - DNA, 25 bp, Homo sapien
gaatttaactctgccttgcatatta

SEQ ID NO: 4912882 - DNA, 25 bp, Homo sapien
tttgtcacggactgagtgcttttcc

SEQ ID NO: 4912883 - DNA, 25 bp, Homo sapien
gatggcgctcagtgcattccttgaa

SEQ ID NO: 4912884 - DNA, 25 bp, Homo sapien
aagtaacaaccagcagatggcgctc

SEQ ID NO: 4912885 - DNA, 25 bp, Homo sapien
tgaaacagggtaagaacagaagcct

SEQ ID NO: 4912886 - DNA, 25 bp, Homo sapien
gaagcctgggttcctgaagtataac

SEQ ID NO: 4912887 - DNA, 25 bp, Homo sapien
catatcatgatttaggtaaaaccag

SEQ ID NO: 4912888 - DNA, 25 bp, Homo sapien
ctgaaaggttactagatttctatcc

SEQ ID NO: 4912889 - DNA, 25 bp, Homo sapien
tctatcctaaggcaaattttgaatt

SEQ ID NO: 4912890 - DNA, 25 bp, Homo sapien
atactgtgcttattacttctacatc

SEQ ID NO: 4912891 - DNA, 25 bp, Homo sapien
gaagtgctaagtagctggcaggacc

SEQ ID NO: 4912892 - DNA, 25 bp, Homo sapien
ggctgggtggatccaagggatggaa

SEQ ID NO: 4912893 - DNA, 25 bp, Homo sapien
gtggcttccatcttcgcgtccccct

SEQ ID NO: 4912894 - DNA, 25 bp, Homo sapien
ttgccaccacagatgggtggcttcc

SEQ ID NO: 4912895 - DNA, 25 bp, Homo sapien
ttccacactttcattacgacttgtg

SEQ ID NO: 4912896 - DNA, 25 bp, Homo sapien
gtgtgttgggtatgcttaattttca

SEQ ID NO: 4912897 - DNA, 25 bp, Homo sapien
ctttcattacgacttgtgtgttggg

SEQ ID NO: 4912898 - DNA, 25 bp, Homo sapien
taagcttatgaataatctgattgca

SEQ ID NO: 4912899 - DNA, 25 bp, Homo sapien
gtggagtagtggaaggaatagaact

SEQ ID NO: 4912900 - DNA, 25 bp, Homo sapien
ttgtgccttggcaaatacagtagga

SEQ ID NO: 4912901 - DNA, 25 bp, Homo sapien
cttataaattatgggtgccccttct

SEQ ID NO: 4912902 - DNA, 25 bp, Homo sapien
tacagtaggaatatgaggtattgtg

SEQ ID NO: 4912903 - DNA, 25 bp, Homo sapien
ttgtttggtcattaacttctttcat

SEQ ID NO: 4912904 - DNA, 25 bp, Homo sapien
ttccatgtgttatgtctatacatgt

SEQ ID NO: 4912905 - DNA, 25 bp, Homo sapien
tctgtgtgattgatagacgcttgct

SEQ ID NO: 4912906 - DNA, 25 bp, Homo sapien
ttttccatgtgttatgtctatacat

SEQ ID NO: 4912907 - DNA, 25 bp, Homo sapien
tgtgtgattgatagacgcttgcttt

SEQ ID NO: 4912908 - DNA, 25 bp, Homo sapien
gcaaaatgtatccagaataaaagct

SEQ ID NO: 4912909 - DNA, 25 bp, Homo sapien
tatagagttctgtataagcaaaatg

SEQ ID NO: 4912910 - DNA, 25 bp, Homo sapien
tgtatccagaataaaagcttttaac

SEQ ID NO: 4912911 - DNA, 25 bp, Homo sapien
ctatagagttctgtataagcaaaat

SEQ ID NO: 4912912 - DNA, 25 bp, Homo sapien
tctttgtctgtctcttatgctgcaa

SEQ ID NO: 4912913 - DNA, 25 bp, Homo sapien
tatgctgcaaacatagtcactctcc

SEQ ID NO: 4912914 - DNA, 25 bp, Homo sapien
ttcatactcacaataccactccctt

SEQ ID NO: 4912915 - DNA, 25 bp, Homo sapien
tactcacaataccactcccttcaca

SEQ ID NO: 4912916 - DNA, 25 bp, Homo sapien
tgaacttagaacgtacaacttgagg

SEQ ID NO: 4912917 - DNA, 25 bp, Homo sapien
tgtttgggcaatggaaccaggctgc

SEQ ID NO: 4912918 - DNA, 25 bp, Homo sapien
tctgcattcatgtggtaacccaggg

SEQ ID NO: 4912919 - DNA, 25 bp, Homo sapien
tatgtgaaagcttaagaacagcacc

SEQ ID NO: 4912920 - DNA, 25 bp, Homo sapien
gcatagtagagacccaactgctgaa

SEQ ID NO: 4912921 - DNA, 25 bp, Homo sapien
ttgagacagtacctaaaaaccagca

SEQ ID NO: 4912922 - DNA, 25 bp, Homo sapien
cacactggtttctactggagtggag

SEQ ID NO: 4912923 - DNA, 25 bp, Homo sapien
aaactagattgatgtccatagcacc

SEQ ID NO: 4912924 - DNA, 25 bp, Homo sapien
tgagtcaaaatccaccacaaaggca

SEQ ID NO: 4912925 - DNA, 25 bp, Homo sapien
tcaccctcagagatggccttcgtag

SEQ ID NO: 4912926 - DNA, 25 bp, Homo sapien
tcgtagttgtacaccaaagctgacc

SEQ ID NO: 4912927 - DNA, 25 bp, Homo sapien
tgaattgagtccagcaggcgtgcag

SEQ ID NO: 4912928 - DNA, 25 bp, Homo sapien
cccatcacctctaaagctgggctac

SEQ ID NO: 4912929 - DNA, 25 bp, Homo sapien
catcacctctaaagctgggctacac

SEQ ID NO: 4912930 - DNA, 25 bp, Homo sapien
ccatcacctctaaagctgggctaca

SEQ ID NO: 4912931 - DNA, 25 bp, Homo sapien
ctgattggtgtatctgaaagtgatg

SEQ ID NO: 4912932 - DNA, 25 bp, Homo sapien
aaatctacgtctgattggtgtatct

SEQ ID NO: 4912933 - DNA, 25 bp, Homo sapien
ccaaatctacgtctgattggtgtat

SEQ ID NO: 4912934 - DNA, 25 bp, Homo sapien
tctacgtctgattggtgtatctgaa

SEQ ID NO: 4912935 - DNA, 25 bp, Homo sapien
tcctatgcccacggaccctcactga

SEQ ID NO: 4912936 - DNA, 25 bp, Homo sapien
tatgcccacggaccctcactgattg

SEQ ID NO: 4912937 - DNA, 25 bp, Homo sapien
gattatatcctgcaccgggcttgga

SEQ ID NO: 4912938 - DNA, 25 bp, Homo sapien
ttatatcctgcaccgggcttggagg

SEQ ID NO: 4912939 - DNA, 25 bp, Homo sapien
tttgctgctgtccatttgaaaccaa

SEQ ID NO: 4912940 - DNA, 25 bp, Homo sapien
aaatgggcctgcagattccgctcac

SEQ ID NO: 4912941 - DNA, 25 bp, Homo sapien
tctagagctcgagcatttgaaaagc

SEQ ID NO: 4912942 - DNA, 25 bp, Homo sapien
tgcctcccactgcagtagtacatca

SEQ ID NO: 4912943 - DNA, 25 bp, Homo sapien
ctgcagtagtacatcaaatgggcct

SEQ ID NO: 4912944 - DNA, 25 bp, Homo sapien
tacgctgatgtgcagtaaccgggca

SEQ ID NO: 4912945 - DNA, 25 bp, Homo sapien
taaatgacgggagggtagctactac

SEQ ID NO: 4912946 - DNA, 25 bp, Homo sapien
tacagacggtgcattttagactagc

SEQ ID NO: 4912947 - DNA, 25 bp, Homo sapien
aatctctgctgaaccagtggaggcc

SEQ ID NO: 4912948 - DNA, 25 bp, Homo sapien
tatctttgtgatcaccaggtgcagt

SEQ ID NO: 4912949 - DNA, 25 bp, Homo sapien
tatacagtgcaaaccatatgtgcta

SEQ ID NO: 4912950 - DNA, 25 bp, Homo sapien
tctggactggttagaacaacatact

SEQ ID NO: 4912951 - DNA, 25 bp, Homo sapien
gaaaatggacggaaacatacagcta

SEQ ID NO: 4912952 - DNA, 25 bp, Homo sapien
tgtgaggtgcaaagtgatgatgtaa

SEQ ID NO: 4912953 - DNA, 25 bp, Homo sapien
tcagatgacagtgaacccactgcag

SEQ ID NO: 4912954 - DNA, 25 bp, Homo sapien
tgatgatgtaacctcccaggctatg

SEQ ID NO: 4912955 - DNA, 25 bp, Homo sapien
ctctcagtcacataggaacaggtgg

SEQ ID NO: 4912956 - DNA, 25 bp, Homo sapien
cttgcgaggcacttcagagattttc

SEQ ID NO: 4912957 - DNA, 25 bp, Homo sapien
gaccttagtgccctgaatcttgcga

SEQ ID NO: 4912958 - DNA, 25 bp, Homo sapien
tgcagaaatctccagggtgatcagc

SEQ ID NO: 4912959 - DNA, 25 bp, Homo sapien
ggtgatcagcaatgggagtctcact

SEQ ID NO: 4912960 - DNA, 25 bp, Homo sapien
agtatccaaagcaaccttggaattc

SEQ ID NO: 4912961 - DNA, 25 bp, Homo sapien
gtatccaaagcaaccttggaattca

SEQ ID NO: 4912962 - DNA, 25 bp, Homo sapien
tatccaaagcaaccttggaattcat

SEQ ID NO: 4912963 - DNA, 25 bp, Homo sapien
gataatatcggtagccttgatggtc

SEQ ID NO: 4912964 - DNA, 25 bp, Homo sapien
gaatagttgcctgcccttttactga

SEQ ID NO: 4912965 - DNA, 25 bp, Homo sapien
tgaagcctgcatccactggtaacat

SEQ ID NO: 4912966 - DNA, 25 bp, Homo sapien
tcttggtcactgaagcctgcatcca

SEQ ID NO: 4912967 - DNA, 25 bp, Homo sapien
agtccttcctgcaactgtctttctt

SEQ ID NO: 4912968 - DNA, 25 bp, Homo sapien
cagtcagtccttcctgcaactgtct

SEQ ID NO: 4912969 - DNA, 25 bp, Homo sapien
cttcctgcaactgtctttctttctc

SEQ ID NO: 4912970 - DNA, 25 bp, Homo sapien
tcagtccttcctgcaactgtctttc

SEQ ID NO: 4912971 - DNA, 25 bp, Homo sapien
agggacagttgtggatttggcctct

SEQ ID NO: 4912972 - DNA, 25 bp, Homo sapien
cagggacagttgtggatttggcctc

SEQ ID NO: 4912973 - DNA, 25 bp, Homo sapien
gggacagttgtggatttggcctctg

SEQ ID NO: 4912974 - DNA, 25 bp, Homo sapien
tcagggacagttgtggatttggcct

SEQ ID NO: 4912975 - DNA, 25 bp, Homo sapien
ttcacttttgatgcgccaaatccca

SEQ ID NO: 4912976 - DNA, 25 bp, Homo sapien
cttttgatgcgccaaatcccattgc

SEQ ID NO: 4912977 - DNA, 25 bp, Homo sapien
ttttgatgcgccaaatcccattgcc

SEQ ID NO: 4912978 - DNA, 25 bp, Homo sapien
acattcacttttgatgcgccaaatc

SEQ ID NO: 4912979 - DNA, 25 bp, Homo sapien
cttggacataaacttttccagaaga

SEQ ID NO: 4912980 - DNA, 25 bp, Homo sapien
tggacataaacttttccagaagatg

SEQ ID NO: 4912981 - DNA, 25 bp, Homo sapien
ggacataaacttttccagaagatgg

SEQ ID NO: 4912982 - DNA, 25 bp, Homo sapien
ttggacataaacttttccagaagat

SEQ ID NO: 4912983 - DNA, 25 bp, Homo sapien
tctgctcttgttccggctgggtatt

SEQ ID NO: 4912984 - DNA, 25 bp, Homo sapien
ttgttccggctgggtattgctgcat

SEQ ID NO: 4912985 - DNA, 25 bp, Homo sapien
gagctctgctcttgttccggctggg

SEQ ID NO: 4912986 - DNA, 25 bp, Homo sapien
ctcttgttccggctgggtattgctg

SEQ ID NO: 4912987 - DNA, 25 bp, Homo sapien
ccagcggacattgttgcctctgtgc

SEQ ID NO: 4912988 - DNA, 25 bp, Homo sapien
cagcctccagcggacattgttgcct

SEQ ID NO: 4912989 - DNA, 25 bp, Homo sapien
gcctccagcggacattgttgcctct

SEQ ID NO: 4912990 - DNA, 25 bp, Homo sapien
gctgcagcctccagcggacattgtt

SEQ ID NO: 4912991 - DNA, 25 bp, Homo sapien
tagcctgttaaagggaattgctgcg

SEQ ID NO: 4912992 - DNA, 25 bp, Homo sapien
gatacacacagaatacggacacttt

SEQ ID NO: 4912993 - DNA, 25 bp, Homo sapien
gcatggtatgctagtgatcctctct

SEQ ID NO: 4912994 - DNA, 25 bp, Homo sapien
gaaggtttgcctggaataagcagca

SEQ ID NO: 4912995 - DNA, 25 bp, Homo sapien
cacagaatcaagcacattcctcatg

SEQ ID NO: 4912996 - DNA, 25 bp, Homo sapien
cagaatcaagcacattcctcatggt

SEQ ID NO: 4912997 - DNA, 25 bp, Homo sapien
tcaagcacattcctcatggtgctcc

SEQ ID NO: 4912998 - DNA, 25 bp, Homo sapien
gaatcaagcacattcctcatggtgc

SEQ ID NO: 4912999 - DNA, 25 bp, Homo sapien
tggctcagagtcttatccgtacttg

SEQ ID NO: 4913000 - DNA, 25 bp, Homo sapien
cattttgctgcacagttgtcttctg

SEQ ID NO: 4913001 - DNA, 25 bp, Homo sapien
tatactttgctacatgaagacactc

SEQ ID NO: 4913002 - DNA, 25 bp, Homo sapien
ttggccatccgctgaagaagctgtt

SEQ ID NO: 4913003 - DNA, 25 bp, Homo sapien
tcaaagatctccatgccaattcctt

SEQ ID NO: 4913004 - DNA, 25 bp, Homo sapien
aagatctccatgccaattcctttag

SEQ ID NO: 4913005 - DNA, 25 bp, Homo sapien
caaagatctccatgccaattccttt

SEQ ID NO: 4913006 - DNA, 25 bp, Homo sapien
ttcaaagatctccatgccaattcct

SEQ ID NO: 4913007 - DNA, 25 bp, Homo sapien
tcaggcagacatcctggaccagcct

SEQ ID NO: 4913008 - DNA, 25 bp, Homo sapien
gaccagcctggggaatagatgccat

SEQ ID NO: 4913009 - DNA, 25 bp, Homo sapien
tttcctctggagctcaggcagacat

SEQ ID NO: 4913010 - DNA, 25 bp, Homo sapien
tggagctcaggcagacatcctggac

SEQ ID NO: 4913011 - DNA, 25 bp, Homo sapien
cctcgtgaacatattaccaagggag

SEQ ID NO: 4913012 - DNA, 25 bp, Homo sapien
gaatgggccgctatatcaatcagaa

SEQ ID NO: 4913013 - DNA, 25 bp, Homo sapien
gagttaagcatcctgactgtcgctg

SEQ ID NO: 4913014 - DNA, 25 bp, Homo sapien
gaagtaaggcaactaatctgtgtca

SEQ ID NO: 4913015 - DNA, 25 bp, Homo sapien
taccatatgctactatcacttttct

SEQ ID NO: 4913016 - DNA, 25 bp, Homo sapien
tatcccacacgaaatggtagcattt

SEQ ID NO: 4913017 - DNA, 25 bp, Homo sapien
tgaaggtgacttttcatcatgaata

SEQ ID NO: 4913018 - DNA, 25 bp, Homo sapien
tcatcatgaatatcccacacgaaat

SEQ ID NO: 4913019 - DNA, 25 bp, Homo sapien
taactccaaatggtatgggcaaaag

SEQ ID NO: 4913020 - DNA, 25 bp, Homo sapien
ggattactgatcttacagcccaaga

SEQ ID NO: 4913021 - DNA, 25 bp, Homo sapien
tagtggagactcaggaatcgctgct

SEQ ID NO: 4913022 - DNA, 25 bp, Homo sapien
atgactcttctgcattggacttggg

SEQ ID NO: 4913023 - DNA, 25 bp, Homo sapien
tactttcccaaatggatccggtggc

SEQ ID NO: 4913024 - DNA, 25 bp, Homo sapien
tctctagcagtttggtagcatcctg

SEQ ID NO: 4913025 - DNA, 25 bp, Homo sapien
tagcatcctgtttccctttcctcag

SEQ ID NO: 4913026 - DNA, 25 bp, Homo sapien
ggatccggtggcattccggtttcaa

SEQ ID NO: 4913027 - DNA, 25 bp, Homo sapien
tcctgctcctactgaagattgcttg

SEQ ID NO: 4913028 - DNA, 25 bp, Homo sapien
taacattcctgctcctactgaagat

SEQ ID NO: 4913029 - DNA, 25 bp, Homo sapien
cagctaacattcctgctcctactga

SEQ ID NO: 4913030 - DNA, 25 bp, Homo sapien
tgctcctactgaagattgcttgcag

SEQ ID NO: 4913031 - DNA, 25 bp, Homo sapien
ctgggccagcttgatgctaatgaac

SEQ ID NO: 4913032 - DNA, 25 bp, Homo sapien
tgctgggccagcttgatgctaatga

SEQ ID NO: 4913033 - DNA, 25 bp, Homo sapien
cctcccactctctgttgaaaagagt

SEQ ID NO: 4913034 - DNA, 25 bp, Homo sapien
tgatgctgggccagcttgatgctaa

SEQ ID NO: 4913035 - DNA, 25 bp, Homo sapien
aagaatgttcattctgggccgggta

SEQ ID NO: 4913036 - DNA, 25 bp, Homo sapien
attcagcttctgctattttgggtag

SEQ ID NO: 4913037 - DNA, 25 bp, Homo sapien
cagcttctgctattttgggtagaat

SEQ ID NO: 4913038 - DNA, 25 bp, Homo sapien
aaagaatgttcattctgggccgggt

SEQ ID NO: 4913039 - DNA, 25 bp, Homo sapien
gacagcctcagtgtaagatcagaga

SEQ ID NO: 4913040 - DNA, 25 bp, Homo sapien
tagaaggttctcactagctgcagaa

SEQ ID NO: 4913041 - DNA, 25 bp, Homo sapien
tcctagtggagaaaactggtatcgg

SEQ ID NO: 4913042 - DNA, 25 bp, Homo sapien
cctggaatgcagctggagataacca

SEQ ID NO: 4913043 - DNA, 25 bp, Homo sapien
gtaagtggctttgccattgacaact

SEQ ID NO: 4913044 - DNA, 25 bp, Homo sapien
cttgtaagtggctttgccattgaca

SEQ ID NO: 4913045 - DNA, 25 bp, Homo sapien
tgcttgtaagtggctttgccattga

SEQ ID NO: 4913046 - DNA, 25 bp, Homo sapien
tgtaagtggctttgccattgacaac

SEQ ID NO: 4913047 - DNA, 25 bp, Homo sapien
tttgtgggatgactctgcacatttg

SEQ ID NO: 4913048 - DNA, 25 bp, Homo sapien
ctttgtgggatgactctgcacattt

SEQ ID NO: 4913049 - DNA, 25 bp, Homo sapien
gacattattcccattctaaaaccta

SEQ ID NO: 4913050 - DNA, 25 bp, Homo sapien
tgaactgcagttctagagatactgg

SEQ ID NO: 4913051 - DNA, 25 bp, Homo sapien
tgccctcgtgaataagctccaactt

SEQ ID NO: 4913052 - DNA, 25 bp, Homo sapien
gcttctagccgggtctgctctgaca

SEQ ID NO: 4913053 - DNA, 25 bp, Homo sapien
ctcctgggctattggcttggccctt

SEQ ID NO: 4913054 - DNA, 25 bp, Homo sapien
catgggcaccaggcacaactttcat

SEQ ID NO: 4913055 - DNA, 25 bp, Homo sapien
ttcatgggcaccaggcacaactttc

SEQ ID NO: 4913056 - DNA, 25 bp, Homo sapien
cttcatgggcaccaggcacaacttt

SEQ ID NO: 4913057 - DNA, 25 bp, Homo sapien
tcatgggcaccaggcacaactttca

SEQ ID NO: 4913058 - DNA, 25 bp, Homo sapien
ctgaaagctcgacgcctcagtccag

SEQ ID NO: 4913059 - DNA, 25 bp, Homo sapien
ggagctgaaagctcgacgcctcagt

SEQ ID NO: 4913060 - DNA, 25 bp, Homo sapien
aaagctcgacgcctcagtccaggtg

SEQ ID NO: 4913061 - DNA, 25 bp, Homo sapien
aagctcgacgcctcagtccaggtgg

SEQ ID NO: 4913062 - DNA, 25 bp, Homo sapien
tgtcgcctatcatcctggagacgcg

SEQ ID NO: 4913063 - DNA, 25 bp, Homo sapien
gcaatgtcgcctatcatcctggaga

SEQ ID NO: 4913064 - DNA, 25 bp, Homo sapien
ttgcaatgtcgcctatcatcctgga

SEQ ID NO: 4913065 - DNA, 25 bp, Homo sapien
gcctatcatcctggagacgcgggtg

SEQ ID NO: 4913066 - DNA, 25 bp, Homo sapien
ggtgttaatgaacgagccattgaaa

SEQ ID NO: 4913067 - DNA, 25 bp, Homo sapien
caggtgttaatgaacgagccattga

SEQ ID NO: 4913068 - DNA, 25 bp, Homo sapien
tgttaatgaacgagccattgaaagg

SEQ ID NO: 4913069 - DNA, 25 bp, Homo sapien
aggtgttaatgaacgagccattgaa

SEQ ID NO: 4913070 - DNA, 25 bp, Homo sapien
ccagctgccgctccaaaagtaatga

SEQ ID NO: 4913071 - DNA, 25 bp, Homo sapien
tcggaaatacctgctcacccacgat

SEQ ID NO: 4913072 - DNA, 25 bp, Homo sapien
ggaaatacctgctcacccacgatga

SEQ ID NO: 4913073 - DNA, 25 bp, Homo sapien
cttcggaaatacctgctcacccacg

SEQ ID NO: 4913074 - DNA, 25 bp, Homo sapien
gaaatacctgctcacccacgatgac

SEQ ID NO: 4913075 - DNA, 25 bp, Homo sapien
tgtccatttgacattacagactctg

SEQ ID NO: 4913076 - DNA, 25 bp, Homo sapien
gagtgcgcgggcaggacgcgcagat

SEQ ID NO: 4913077 - DNA, 25 bp, Homo sapien
ggtctcctcgttcccagacccgcca

SEQ ID NO: 4913078 - DNA, 25 bp, Homo sapien
gacgcgcagatctttctcttctggg

SEQ ID NO: 4913079 - DNA, 25 bp, Homo sapien
cagaaccggaaagcgcacatgatct

SEQ ID NO: 4913080 - DNA, 25 bp, Homo sapien
tcttcagaaccggaaagcgcacatg

SEQ ID NO: 4913081 - DNA, 25 bp, Homo sapien
cggaaagcgcacatgatctggcctg

SEQ ID NO: 4913082 - DNA, 25 bp, Homo sapien
aaccggaaagcgcacatgatctggc

SEQ ID NO: 4913083 - DNA, 25 bp, Homo sapien
tagcctgagtaccaatcctcgaagc

SEQ ID NO: 4913084 - DNA, 25 bp, Homo sapien
gagtaccaatcctcgaagcccttct

SEQ ID NO: 4913085 - DNA, 25 bp, Homo sapien
aatagcctgagtaccaatcctcgaa

SEQ ID NO: 4913086 - DNA, 25 bp, Homo sapien
ccaaaatagcctgagtaccaatcct

SEQ ID NO: 4913087 - DNA, 25 bp, Homo sapien
gatgcaaggtaagtcagctatgacg

SEQ ID NO: 4913088 - DNA, 25 bp, Homo sapien
ccaaacactgatgcaaggtaagtca

SEQ ID NO: 4913089 - DNA, 25 bp, Homo sapien
cttcgtttgctccaataagttatac

SEQ ID NO: 4913090 - DNA, 25 bp, Homo sapien
accttcgtttgctccaataagttat

SEQ ID NO: 4913091 - DNA, 25 bp, Homo sapien
tgtcagtgtgcagatgaccaccagg

SEQ ID NO: 4913092 - DNA, 25 bp, Homo sapien
accaccaggccagcgtacatatgca

SEQ ID NO: 4913093 - DNA, 25 bp, Homo sapien
gatgaccaccaggccagcgtacata

SEQ ID NO: 4913094 - DNA, 25 bp, Homo sapien
tgaccaccaggccagcgtacatatg

SEQ ID NO: 4913095 - DNA, 25 bp, Homo sapien
ctatgggcattagggagaaataacc

SEQ ID NO: 4913096 - DNA, 25 bp, Homo sapien
tatgggcattagggagaaataaccg

SEQ ID NO: 4913097 - DNA, 25 bp, Homo sapien
gatgccattagcacagatgatgatg

SEQ ID NO: 4913098 - DNA, 25 bp, Homo sapien
cagagatgccattagcacagatgat

SEQ ID NO: 4913099 - DNA, 25 bp, Homo sapien
atgatgatgccgtaggcattggcca

SEQ ID NO: 4913100 - DNA, 25 bp, Homo sapien
acagatgatgatgccgtaggcattg

SEQ ID NO: 4913101 - DNA, 25 bp, Homo sapien
atatgcactatgaactcttaaaacc

SEQ ID NO: 4913102 - DNA, 25 bp, Homo sapien
cgtatctatatgcactatgaactct

SEQ ID NO: 4913103 - DNA, 25 bp, Homo sapien
tatctatatgcactatgaactctta

SEQ ID NO: 4913104 - DNA, 25 bp, Homo sapien
tctatatgcactatgaactcttaaa

SEQ ID NO: 4913105 - DNA, 25 bp, Homo sapien
atttgaaatgctgttgataaaatta

SEQ ID NO: 4913106 - DNA, 25 bp, Homo sapien
cttttctgccctgcgtttcctggga

SEQ ID NO: 4913107 - DNA, 25 bp, Homo sapien
ccaaccagctgcgttgtgtgcatct

SEQ ID NO: 4913108 - DNA, 25 bp, Homo sapien
ccagctgcgttgtgtgcatctgata

SEQ ID NO: 4913109 - DNA, 25 bp, Homo sapien
cctgggatttcactgttaacatctc

SEQ ID NO: 4913110 - DNA, 25 bp, Homo sapien
aaaatgtcatttctgcgtccgtttg

SEQ ID NO: 4913111 - DNA, 25 bp, Homo sapien
tctttagagctatagctttaaaggt

SEQ ID NO: 4913112 - DNA, 25 bp, Homo sapien
tctgcgtccgtttgcatgttcagag

SEQ ID NO: 4913113 - DNA, 25 bp, Homo sapien
gagctatagctttaaaggtagaata

SEQ ID NO: 4913114 - DNA, 25 bp, Homo sapien
tgggtctctttagtccagatgaggt

SEQ ID NO: 4913115 - DNA, 25 bp, Homo sapien
tgccatcatcttgctggcactgcat

SEQ ID NO: 4913116 - DNA, 25 bp, Homo sapien
ttgctgggtctctttagtccagatg

SEQ ID NO: 4913117 - DNA, 25 bp, Homo sapien
tttctctagcactctggttcaagta

SEQ ID NO: 4913118 - DNA, 25 bp, Homo sapien
tcagtttgaagcattgattctcaac

SEQ ID NO: 4913119 - DNA, 25 bp, Homo sapien
gtttgaagcattgattctcaacatt

SEQ ID NO: 4913120 - DNA, 25 bp, Homo sapien
ctttgtgatcagtttgaagcattga

SEQ ID NO: 4913121 - DNA, 25 bp, Homo sapien
tgatcagtttgaagcattgattctc

SEQ ID NO: 4913122 - DNA, 25 bp, Homo sapien
ggtatacttccaggtattggcactg

SEQ ID NO: 4913123 - DNA, 25 bp, Homo sapien
tacactgccaagcatctggtatact

SEQ ID NO: 4913124 - DNA, 25 bp, Homo sapien
tggcactgaccactgagcatattct

SEQ ID NO: 4913125 - DNA, 25 bp, Homo sapien
tcactgagatctatgctacactgcc

SEQ ID NO: 4913126 - DNA, 25 bp, Homo sapien
gagttcgggatgtatcccagatctc

SEQ ID NO: 4913127 - DNA, 25 bp, Homo sapien
gtcctgttgccgagttcgggatgta

SEQ ID NO: 4913128 - DNA, 25 bp, Homo sapien
tctgtaaccctgaggaaaggagctg

SEQ ID NO: 4913129 - DNA, 25 bp, Homo sapien
gcaaacacttcaagcgtaggagcct

SEQ ID NO: 4913130 - DNA, 25 bp, Homo sapien
gggcagctctaatactaggctctcc

SEQ ID NO: 4913131 - DNA, 25 bp, Homo sapien
ccgcctgtcgggcagctctaatact

SEQ ID NO: 4913132 - DNA, 25 bp, Homo sapien
cagagctgccccgatttcggggtcc

SEQ ID NO: 4913133 - DNA, 25 bp, Homo sapien
gggtcccgcctgtcgggcagctcta

SEQ ID NO: 4913134 - DNA, 25 bp, Homo sapien
caggcgcccactcgaatagcctgga

SEQ ID NO: 4913135 - DNA, 25 bp, Homo sapien
tcaggcgcccactcgaatagcctgg

SEQ ID NO: 4913136 - DNA, 25 bp, Homo sapien
gcgcggcgccggcgctgagctcctg

SEQ ID NO: 4913137 - DNA, 25 bp, Homo sapien
gcggcgagtgcgcccctctcggcgg

SEQ ID NO: 4913138 - DNA, 25 bp, Homo sapien
cgcggcgccggcgctgagctcctgt

SEQ ID NO: 4913139 - DNA, 25 bp, Homo sapien
ggccccgcggcggcgagtgcgcccc

SEQ ID NO: 4913140 - DNA, 25 bp, Homo sapien
cttagagtgccgaatcagagaagac

SEQ ID NO: 4913141 - DNA, 25 bp, Homo sapien
tgccgaatcagagaagacccgcatc

SEQ ID NO: 4913142 - DNA, 25 bp, Homo sapien
gagaagacccgcatcaggtttggga

SEQ ID NO: 4913143 - DNA, 25 bp, Homo sapien
cccgcatcaggtttgggatgtaagt

SEQ ID NO: 4913144 - DNA, 25 bp, Homo sapien
catagagggagtccacggtggtcgc

SEQ ID NO: 4913145 - DNA, 25 bp, Homo sapien
tggatttgggaacccctctgacggc

SEQ ID NO: 4913146 - DNA, 25 bp, Homo sapien
tggagtgacgccttggagatggacc

SEQ ID NO: 4913147 - DNA, 25 bp, Homo sapien
gggcagcaaagtgaaccgcggaccc

SEQ ID NO: 4913148 - DNA, 25 bp, Homo sapien
ccgctggccttttggagccatcgtg

SEQ ID NO: 4913149 - DNA, 25 bp, Homo sapien
ggccccgctggccttttggagccat

SEQ ID NO: 4913150 - DNA, 25 bp, Homo sapien
gtgcttcccagtccgcaggcaacaa

SEQ ID NO: 4913151 - DNA, 25 bp, Homo sapien
agccatcgtgcttcccagtccgcag

SEQ ID NO: 4913152 - DNA, 25 bp, Homo sapien
gaactatttctgacggttgcacaca

SEQ ID NO: 4913153 - DNA, 25 bp, Homo sapien
tgtgaaaccgacgacagaacatggc

SEQ ID NO: 4913154 - DNA, 25 bp, Homo sapien
tagttatgagaccagccctcttaga

SEQ ID NO: 4913155 - DNA, 25 bp, Homo sapien
gacagtaggtacagtgcttgctctc

SEQ ID NO: 4913156 - DNA, 25 bp, Homo sapien
cttgcaagacaactcgtgccactgt

SEQ ID NO: 4913157 - DNA, 25 bp, Homo sapien
cacgggacagacatcaccttgcaag

SEQ ID NO: 4913158 - DNA, 25 bp, Homo sapien
gaaccatgctgtcctcgctcttgtg

SEQ ID NO: 4913159 - DNA, 25 bp, Homo sapien
aaaacgtactagcaactcagccagc

SEQ ID NO: 4913160 - DNA, 25 bp, Homo sapien
gttttatttgaacagcattctgtgc

SEQ ID NO: 4913161 - DNA, 25 bp, Homo sapien
ttttatttgaacagcattctgtgca

SEQ ID NO: 4913162 - DNA, 25 bp, Homo sapien
tgttttatttgaacagcattctgtg

SEQ ID NO: 4913163 - DNA, 25 bp, Homo sapien
caagatctatccctaaagtgagaga

SEQ ID NO: 4913164 - DNA, 25 bp, Homo sapien
gaatcactgctctaagcctatcaac

SEQ ID NO: 4913165 - DNA, 25 bp, Homo sapien
tggacttccaataggaatatttgaa

SEQ ID NO: 4913166 - DNA, 25 bp, Homo sapien
gctggataattgcagaaggctgtcc

SEQ ID NO: 4913167 - DNA, 25 bp, Homo sapien
gtcaaacctggtcaaaacactgttg

SEQ ID NO: 4913168 - DNA, 25 bp, Homo sapien
cagaccaaggtcaagcaacatgcat

SEQ ID NO: 4913169 - DNA, 25 bp, Homo sapien
gatgcagagtgactactgacctcag

SEQ ID NO: 4913170 - DNA, 25 bp, Homo sapien
caggagtgccagatttgactgcaaa

SEQ ID NO: 4913171 - DNA, 25 bp, Homo sapien
gaagagagctaatgggcactgctgt

SEQ ID NO: 4913172 - DNA, 25 bp, Homo sapien
tgtgtacccagccagtctaatgatg

SEQ ID NO: 4913173 - DNA, 25 bp, Homo sapien
tgcccatgtttgtagatactaagac

SEQ ID NO: 4913174 - DNA, 25 bp, Homo sapien
tacatgatgacagctcctgactttt

SEQ ID NO: 4913175 - DNA, 25 bp, Homo sapien
tctattgaagtcagtgaaggaactc

SEQ ID NO: 4913176 - DNA, 25 bp, Homo sapien
gacatcagtctaatgtgcctgccca

SEQ ID NO: 4913177 - DNA, 25 bp, Homo sapien
gatattatcctgtccaaggtcctgc

SEQ ID NO: 4913178 - DNA, 25 bp, Homo sapien
gcccagcaggcacattatcatttat

SEQ ID NO: 4913179 - DNA, 25 bp, Homo sapien
cagtggtgaggtctataaaattccc

SEQ ID NO: 4913180 - DNA, 25 bp, Homo sapien
tttggataagcgcagaaccgtgggc

SEQ ID NO: 4913181 - DNA, 25 bp, Homo sapien
caaccttagtcttaggccccatgga

SEQ ID NO: 4913182 - DNA, 25 bp, Homo sapien
tatcctcagtgatcaccggtacagt

SEQ ID NO: 4913183 - DNA, 25 bp, Homo sapien
ggtagaacctgccaatatatgttcc

SEQ ID NO: 4913184 - DNA, 25 bp, Homo sapien
ctgagctgtccaatagggtaccact

SEQ ID NO: 4913185 - DNA, 25 bp, Homo sapien
ggacttctgcccatatattagctaa

SEQ ID NO: 4913186 - DNA, 25 bp, Homo sapien
tttaaactaggcatgtggacttctg

SEQ ID NO: 4913187 - DNA, 25 bp, Homo sapien
gagctggctcctccctattacctgc

SEQ ID NO: 4913188 - DNA, 25 bp, Homo sapien
aagatataatggataccggaagctt

SEQ ID NO: 4913189 - DNA, 25 bp, Homo sapien
atataatggataccggaagctttaa

SEQ ID NO: 4913190 - DNA, 25 bp, Homo sapien
ctgctttctagtcacaggttaagtg

SEQ ID NO: 4913191 - DNA, 25 bp, Homo sapien
gctcagtatctaaatgactctaggt

SEQ ID NO: 4913192 - DNA, 25 bp, Homo sapien
tagaaaactgactaagcatagctgc

SEQ ID NO: 4913193 - DNA, 25 bp, Homo sapien
tctaggtaatgccataagccatggg

SEQ ID NO: 4913194 - DNA, 25 bp, Homo sapien
gcatagctgcttgatgttacattta

SEQ ID NO: 4913195 - DNA, 25 bp, Homo sapien
tcacaggcttttctacttccttaga

SEQ ID NO: 4913196 - DNA, 25 bp, Homo sapien
ggcttttctacttccttagaagaca

SEQ ID NO: 4913197 - DNA, 25 bp, Homo sapien
cttcacaggcttttctacttcctta

SEQ ID NO: 4913198 - DNA, 25 bp, Homo sapien
acaggcttttctacttccttagaag

SEQ ID NO: 4913199 - DNA, 25 bp, Homo sapien
tagctttgcttctggaatgatgcac

SEQ ID NO: 4913200 - DNA, 25 bp, Homo sapien
gaaattagcaggtcaagtcgacaac

SEQ ID NO: 4913201 - DNA, 25 bp, Homo sapien
gaggagtcttctctcgattccagaa

SEQ ID NO: 4913202 - DNA, 25 bp, Homo sapien
tagacacagacattgcagcaacttg

SEQ ID NO: 4913203 - DNA, 25 bp, Homo sapien
aaactgagattcttagcacccaggc

SEQ ID NO: 4913204 - DNA, 25 bp, Homo sapien
tatggagctaagttgagccagtaac

SEQ ID NO: 4913205 - DNA, 25 bp, Homo sapien
gcacccaggccaaaagatccaagga

SEQ ID NO: 4913206 - DNA, 25 bp, Homo sapien
tagggagtccatgaacagtgggtcc

SEQ ID NO: 4913207 - DNA, 25 bp, Homo sapien
tactcatattatctcacagctaagc

SEQ ID NO: 4913208 - DNA, 25 bp, Homo sapien
aattgttcaagtccacaaatgggtg

SEQ ID NO: 4913209 - DNA, 25 bp, Homo sapien
tctcagtaccgtaatggaacagtca

SEQ ID NO: 4913210 - DNA, 25 bp, Homo sapien
cattcaacatgaacttaccactgag

SEQ ID NO: 4913211 - DNA, 25 bp, Homo sapien
tggtataagacaaagttgccctctc

SEQ ID NO: 4913212 - DNA, 25 bp, Homo sapien
ggtataagacaaagttgccctctct

SEQ ID NO: 4913213 - DNA, 25 bp, Homo sapien
actggtataagacaaagttgccctc

SEQ ID NO: 4913214 - DNA, 25 bp, Homo sapien
gtataagacaaagttgccctctctc

SEQ ID NO: 4913215 - DNA, 25 bp, Homo sapien
gacgcatacatgctaccaagactaa

SEQ ID NO: 4913216 - DNA, 25 bp, Homo sapien
ctggacgcatacatgctaccaagac

SEQ ID NO: 4913217 - DNA, 25 bp, Homo sapien
ggacgcatacatgctaccaagacta

SEQ ID NO: 4913218 - DNA, 25 bp, Homo sapien
gcatacatgctaccaagactaaacc

SEQ ID NO: 4913219 - DNA, 25 bp, Homo sapien
tcaggaactctaagaggtgacccaa

SEQ ID NO: 4913220 - DNA, 25 bp, Homo sapien
gaacagtaaaggtataacctgtgtg

SEQ ID NO: 4913221 - DNA, 25 bp, Homo sapien
tgtttagatcccacatctgagcaag

SEQ ID NO: 4913222 - DNA, 25 bp, Homo sapien
ctgagcaaggttcaggaactctaag

SEQ ID NO: 4913223 - DNA, 25 bp, Homo sapien
ttcgaaatatacctaagatagctcc

SEQ ID NO: 4913224 - DNA, 25 bp, Homo sapien
ccctgatttcgaaatatacctaaga

SEQ ID NO: 4913225 - DNA, 25 bp, Homo sapien
aaagataagagcttcccctgatttc

SEQ ID NO: 4913226 - DNA, 25 bp, Homo sapien
gagcttcccctgatttcgaaatata

SEQ ID NO: 4913227 - DNA, 25 bp, Homo sapien
tagacgtctgaatctgcttggcaga

SEQ ID NO: 4913228 - DNA, 25 bp, Homo sapien
taatgccaaagaccagaccagcatg

SEQ ID NO: 4913229 - DNA, 25 bp, Homo sapien
aagtacccatcacatgtctttgctg

SEQ ID NO: 4913230 - DNA, 25 bp, Homo sapien
tgctgccatgcccgtacctcatttt

SEQ ID NO: 4913231 - DNA, 25 bp, Homo sapien
ctgcccagccctagaattagccatt

SEQ ID NO: 4913232 - DNA, 25 bp, Homo sapien
tacaatctaggcattgggtctgctc

SEQ ID NO: 4913233 - DNA, 25 bp, Homo sapien
ggtctgtcttgtatcttccctgccc

SEQ ID NO: 4913234 - DNA, 25 bp, Homo sapien
gaatgctgagtccttttattggaga

SEQ ID NO: 4913235 - DNA, 25 bp, Homo sapien
cttattggcaaatcttgtactttca

SEQ ID NO: 4913236 - DNA, 25 bp, Homo sapien
tgctgattatttttatcgtcttcac

SEQ ID NO: 4913237 - DNA, 25 bp, Homo sapien
tatttttatcgtcttcacttattgg

SEQ ID NO: 4913238 - DNA, 25 bp, Homo sapien
tcttcacttattggcaaatcttgta

SEQ ID NO: 4913239 - DNA, 25 bp, Homo sapien
tccagaagaaatctaagaccacact

SEQ ID NO: 4913240 - DNA, 25 bp, Homo sapien
aagaaatctaagaccacactgaagc

SEQ ID NO: 4913241 - DNA, 25 bp, Homo sapien
attccagaagaaatctaagaccaca

SEQ ID NO: 4913242 - DNA, 25 bp, Homo sapien
ccagaagaaatctaagaccacactg

SEQ ID NO: 4913243 - DNA, 25 bp, Homo sapien
tagaagaaactgttaactctggagg

SEQ ID NO: 4913244 - DNA, 25 bp, Homo sapien
ctctggaggagcatatgatagtctt

SEQ ID NO: 4913245 - DNA, 25 bp, Homo sapien
tatgatagtcttgggccggcatcct

SEQ ID NO: 4913246 - DNA, 25 bp, Homo sapien
gaaactgttaactctggaggagcat

SEQ ID NO: 4913247 - DNA, 25 bp, Homo sapien
tagtccttgtgtccctaccttgatc

SEQ ID NO: 4913248 - DNA, 25 bp, Homo sapien
tacaatgtacgtgtgaacagtccct

SEQ ID NO: 4913249 - DNA, 25 bp, Homo sapien
agtccctaaagatctgcactggtca

SEQ ID NO: 4913250 - DNA, 25 bp, Homo sapien
tctatgctgatacccatggacacaa

SEQ ID NO: 4913251 - DNA, 25 bp, Homo sapien
caggcaaccttatagctgtgtggga

SEQ ID NO: 4913252 - DNA, 25 bp, Homo sapien
cctgggctgtttttgtccttcgtca

SEQ ID NO: 4913253 - DNA, 25 bp, Homo sapien
gtccttcgtcatttctgtgcaggca

SEQ ID NO: 4913254 - DNA, 25 bp, Homo sapien
ggcaaccttatagctgtgtgggagc

SEQ ID NO: 4913255 - DNA, 25 bp, Homo sapien
ccttgataggttctataggagtgca

SEQ ID NO: 4913256 - DNA, 25 bp, Homo sapien
ttctcggttcccaatttgcagtgag

SEQ ID NO: 4913257 - DNA, 25 bp, Homo sapien
gagagtcaggctcaacatctttagc

SEQ ID NO: 4913258 - DNA, 25 bp, Homo sapien
tcactgaatatcacagtttgctgct

SEQ ID NO: 4913259 - DNA, 25 bp, Homo sapien
caagagcatattgttttacactaaa

SEQ ID NO: 4913260 - DNA, 25 bp, Homo sapien
cacctcaagagcatattgttttaca

SEQ ID NO: 4913261 - DNA, 25 bp, Homo sapien
tcttgtcctcacctcaagagcatat

SEQ ID NO: 4913262 - DNA, 25 bp, Homo sapien
ctcaggtgacggccttcttgtcctc

SEQ ID NO: 4913263 - DNA, 25 bp, Homo sapien
gattccaggtagtctagaatggaat

SEQ ID NO: 4913264 - DNA, 25 bp, Homo sapien
tgattccaggtagtctagaatggaa

SEQ ID NO: 4913265 - DNA, 25 bp, Homo sapien
ttccaggtagtctagaatggaatgt

SEQ ID NO: 4913266 - DNA, 25 bp, Homo sapien
attccaggtagtctagaatggaatg

SEQ ID NO: 4913267 - DNA, 25 bp, Homo sapien
aatggagaatactgtgtggaaaaac

SEQ ID NO: 4913268 - DNA, 25 bp, Homo sapien
aaatgcttcaactctaatactcctg

SEQ ID NO: 4913269 - DNA, 25 bp, Homo sapien
gatttgcaggtagaaagagattcat

SEQ ID NO: 4913270 - DNA, 25 bp, Homo sapien
gaggtcaggcaacccacttgcctaa

SEQ ID NO: 4913271 - DNA, 25 bp, Homo sapien
accaagatgcggaagtatagaaagg

SEQ ID NO: 4913272 - DNA, 25 bp, Homo sapien
caagatgcggaagtatagaaaggcc

SEQ ID NO: 4913273 - DNA, 25 bp, Homo sapien
ccaagatgcggaagtatagaaaggc

SEQ ID NO: 4913274 - DNA, 25 bp, Homo sapien
gacatatgatatgaagcgtcttttc

SEQ ID NO: 4913275 - DNA, 25 bp, Homo sapien
tttccttgatgacatatgatatgaa

SEQ ID NO: 4913276 - DNA, 25 bp, Homo sapien
gatgacatatgatatgaagcgtctt

SEQ ID NO: 4913277 - DNA, 25 bp, Homo sapien
ccttgatgacatatgatatgaagcg

SEQ ID NO: 4913278 - DNA, 25 bp, Homo sapien
atttccatcttcagtccttctcacc

SEQ ID NO: 4913279 - DNA, 25 bp, Homo sapien
ttccatcttcagtccttctcaccat

SEQ ID NO: 4913280 - DNA, 25 bp, Homo sapien
tttccatcttcagtccttctcacca

SEQ ID NO: 4913281 - DNA, 25 bp, Homo sapien
gtagacagtaacttaaaagcttgta

SEQ ID NO: 4913282 - DNA, 25 bp, Homo sapien
ctgtagacagtaacttaaaagcttg

SEQ ID NO: 4913283 - DNA, 25 bp, Homo sapien
tagacagtaacttaaaagcttgtaa

SEQ ID NO: 4913284 - DNA, 25 bp, Homo sapien
tgtagacagtaacttaaaagcttgt

SEQ ID NO: 4913285 - DNA, 25 bp, Homo sapien
aacacattgggccacactagttcac

SEQ ID NO: 4913286 - DNA, 25 bp, Homo sapien
cacagattgcatggaacacattggg

SEQ ID NO: 4913287 - DNA, 25 bp, Homo sapien
ctccgtcacagattgcatggaacac

SEQ ID NO: 4913288 - DNA, 25 bp, Homo sapien
tagttcacccactgtctcagctgat

SEQ ID NO: 4913289 - DNA, 25 bp, Homo sapien
ttaaaacacgaactatttacatgga

SEQ ID NO: 4913290 - DNA, 25 bp, Homo sapien
tgcattaaaacacgaactatttaca

SEQ ID NO: 4913291 - DNA, 25 bp, Homo sapien
cacgaactatttacatggaaaggat

SEQ ID NO: 4913292 - DNA, 25 bp, Homo sapien
aaacacgaactatttacatggaaag

SEQ ID NO: 4913293 - DNA, 25 bp, Homo sapien
ttcaaaataacctccatgtggagaa

SEQ ID NO: 4913294 - DNA, 25 bp, Homo sapien
tttcaaaataacctccatgtggaga

SEQ ID NO: 4913295 - DNA, 25 bp, Homo sapien
aagcactgacagtcccaagccctgc

SEQ ID NO: 4913296 - DNA, 25 bp, Homo sapien
tgacagtcccaagccctgcaacagg

SEQ ID NO: 4913297 - DNA, 25 bp, Homo sapien
tactcaccggatggcagctctttac

SEQ ID NO: 4913298 - DNA, 25 bp, Homo sapien
tttgccccgcaggtttcagcatact

SEQ ID NO: 4913299 - DNA, 25 bp, Homo sapien
caagactctttcaggccagttctct

SEQ ID NO: 4913300 - DNA, 25 bp, Homo sapien
acatcttgccaacacgaaacattct

SEQ ID NO: 4913301 - DNA, 25 bp, Homo sapien
tgatttgtaacacgctattgccaca

SEQ ID NO: 4913302 - DNA, 25 bp, Homo sapien
gatggagtgatttgtaacacgctat

SEQ ID NO: 4913303 - DNA, 25 bp, Homo sapien
ttgtaacacgctattgccacatcga

SEQ ID NO: 4913304 - DNA, 25 bp, Homo sapien
ctttgatggagtgatttgtaacacg

SEQ ID NO: 4913305 - DNA, 25 bp, Homo sapien
tttagaatactgctagtaggttttc

SEQ ID NO: 4913306 - DNA, 25 bp, Homo sapien
gactcgaagggcatcacgtttttgt

SEQ ID NO: 4913307 - DNA, 25 bp, Homo sapien
tcccaaccaagactcgaagggcatc

SEQ ID NO: 4913308 - DNA, 25 bp, Homo sapien
ggcttgcataagacaagacttccat

SEQ ID NO: 4913309 - DNA, 25 bp, Homo sapien
caattgtgtagaacctcttcagttc

SEQ ID NO: 4913310 - DNA, 25 bp, Homo sapien
gcaccagccaaagggttgaaccctg

SEQ ID NO: 4913311 - DNA, 25 bp, Homo sapien
tggagcattaatatccaccgactgg

SEQ ID NO: 4913312 - DNA, 25 bp, Homo sapien
ctgagtatttgctgcattgttctgc

SEQ ID NO: 4913313 - DNA, 25 bp, Homo sapien
ctattcacttgcataaaacatctgg

SEQ ID NO: 4913314 - DNA, 25 bp, Homo sapien
cacttgcataaaacatctggtgctc

SEQ ID NO: 4913315 - DNA, 25 bp, Homo sapien
cttgcataaaacatctggtgctcac

SEQ ID NO: 4913316 - DNA, 25 bp, Homo sapien
ttcacttgcataaaacatctggtgc

SEQ ID NO: 4913317 - DNA, 25 bp, Homo sapien
gaccgtgatatatgaattccagctc

SEQ ID NO: 4913318 - DNA, 25 bp, Homo sapien
tttactaatagttgcagaagctgga

SEQ ID NO: 4913319 - DNA, 25 bp, Homo sapien
ccagcaaaagtcctccatatagaaa

SEQ ID NO: 4913320 - DNA, 25 bp, Homo sapien
tgtccagcaaaagtcctccatatag

SEQ ID NO: 4913321 - DNA, 25 bp, Homo sapien
caacctggatgacactgagacttca

SEQ ID NO: 4913322 - DNA, 25 bp, Homo sapien
ctctccaacctggatgacactgaga

SEQ ID NO: 4913323 - DNA, 25 bp, Homo sapien
tccaacctggatgacactgagactt

SEQ ID NO: 4913324 - DNA, 25 bp, Homo sapien
aacctggatgacactgagacttcat

SEQ ID NO: 4913325 - DNA, 25 bp, Homo sapien
ccttgacaatatggaacgggcatgt

SEQ ID NO: 4913326 - DNA, 25 bp, Homo sapien
ttccttagcaatatgtttaccgagc

SEQ ID NO: 4913327 - DNA, 25 bp, Homo sapien
gtaagactaagtgcataattgggct

SEQ ID NO: 4913328 - DNA, 25 bp, Homo sapien
catgttcaatgcttcagtggcagta

SEQ ID NO: 4913329 - DNA, 25 bp, Homo sapien
taactgagacatttggcccgttaac

SEQ ID NO: 4913330 - DNA, 25 bp, Homo sapien
gtgccttttaactgagacatttggc

SEQ ID NO: 4913331 - DNA, 25 bp, Homo sapien
cttttaactgagacatttggcccgt

SEQ ID NO: 4913332 - DNA, 25 bp, Homo sapien
actgagacatttggcccgttaacat

SEQ ID NO: 4913333 - DNA, 25 bp, Homo sapien
gctgcactacagtcccttcttagag

SEQ ID NO: 4913334 - DNA, 25 bp, Homo sapien
ggtttcccattctagtgtccaaata

SEQ ID NO: 4913335 - DNA, 25 bp, Homo sapien
tagattctcaagtcttcacagtaga

SEQ ID NO: 4913336 - DNA, 25 bp, Homo sapien
tcaactgatggagaacattcaagga

SEQ ID NO: 4913337 - DNA, 25 bp, Homo sapien
taggagctttgagaggacattccca

SEQ ID NO: 4913338 - DNA, 25 bp, Homo sapien
cctcaggtaagatgaaaggacacac

SEQ ID NO: 4913339 - DNA, 25 bp, Homo sapien
cagagctaatccagggcctcaggta

SEQ ID NO: 4913340 - DNA, 25 bp, Homo sapien
tcccagtcagcaataaagaaggtgg

SEQ ID NO: 4913341 - DNA, 25 bp, Homo sapien
caaatgttcttgctatttcaccgga

SEQ ID NO: 4913342 - DNA, 25 bp, Homo sapien
tcaccggattatttccatccaaaat

SEQ ID NO: 4913343 - DNA, 25 bp, Homo sapien
cctccatctttagcagactattgaa

SEQ ID NO: 4913344 - DNA, 25 bp, Homo sapien
ggatattgggcatatttccttggaa

SEQ ID NO: 4913345 - DNA, 25 bp, Homo sapien
tcactgggagtaaaaactctagccc

SEQ ID NO: 4913346 - DNA, 25 bp, Homo sapien
gtctaattgggagtaaaagcttcta

SEQ ID NO: 4913347 - DNA, 25 bp, Homo sapien
caggaaaatgtgtccgctctatctt

SEQ ID NO: 4913348 - DNA, 25 bp, Homo sapien
tagcccagaattagagtaaaaagtc

SEQ ID NO: 4913349 - DNA, 25 bp, Homo sapien
gccagctgagctagacccaggtgag

SEQ ID NO: 4913350 - DNA, 25 bp, Homo sapien
ccttgggctgacttttgataggcca

SEQ ID NO: 4913351 - DNA, 25 bp, Homo sapien
gcccttgggctgacttttgataggc

SEQ ID NO: 4913352 - DNA, 25 bp, Homo sapien
tcacccgccagctgagctagaccca

SEQ ID NO: 4913353 - DNA, 25 bp, Homo sapien
cacacagtagtttgttgacttttaa

SEQ ID NO: 4913354 - DNA, 25 bp, Homo sapien
gagttatgtaagtgcaaagatcttg

SEQ ID NO: 4913355 - DNA, 25 bp, Homo sapien
gagtacttctacgtaggcacacagt

SEQ ID NO: 4913356 - DNA, 25 bp, Homo sapien
tctactatccatgtcatccagatca

SEQ ID NO: 4913357 - DNA, 25 bp, Homo sapien
tcagttctgagtcttagcagcaata

SEQ ID NO: 4913358 - DNA, 25 bp, Homo sapien
tcttatcagtatccctgtgctccag

SEQ ID NO: 4913359 - DNA, 25 bp, Homo sapien
agtcttgctggtcgcctcctcttat

SEQ ID NO: 4913360 - DNA, 25 bp, Homo sapien
gattccatgcctcacagtcttgctg

SEQ ID NO: 4913361 - DNA, 25 bp, Homo sapien
taactgcttgtaatctgaggtggct

SEQ ID NO: 4913362 - DNA, 25 bp, Homo sapien
tacaggcttttgcacacagataaac

SEQ ID NO: 4913363 - DNA, 25 bp, Homo sapien
caaaggaacgattttgccccagtgc

SEQ ID NO: 4913364 - DNA, 25 bp, Homo sapien
tcacaggcatatacacgtgcccagg

SEQ ID NO: 4913365 - DNA, 25 bp, Homo sapien
tttgcgtgggacaaacactttgatc

SEQ ID NO: 4913366 - DNA, 25 bp, Homo sapien
tactgtatctaggtcagcaccctgt

SEQ ID NO: 4913367 - DNA, 25 bp, Homo sapien
gacaagcgctgccaatttgcgtggg

SEQ ID NO: 4913368 - DNA, 25 bp, Homo sapien
gatgctctctttcgatcacccttga

SEQ ID NO: 4913369 - DNA, 25 bp, Homo sapien
gaggtccttccttcgaaccttgctc

SEQ ID NO: 4913370 - DNA, 25 bp, Homo sapien
gctggcagaacatttctgaggtcct

SEQ ID NO: 4913371 - DNA, 25 bp, Homo sapien
ctttgcgctggcagaacatttctga

SEQ ID NO: 4913372 - DNA, 25 bp, Homo sapien
gaacatttctgaggtccttccttcg

SEQ ID NO: 4913373 - DNA, 25 bp, Homo sapien
cctatggatgggtacaatgaagcaa

SEQ ID NO: 4913374 - DNA, 25 bp, Homo sapien
ccactgattgtgagacgcatgacca

SEQ ID NO: 4913375 - DNA, 25 bp, Homo sapien
aagagggatctaattgaaccaggag

SEQ ID NO: 4913376 - DNA, 25 bp, Homo sapien
actgcagagggtatgaaaagtctca

SEQ ID NO: 4913377 - DNA, 25 bp, Homo sapien
gctggagtgaattggtgccgtcata

SEQ ID NO: 4913378 - DNA, 25 bp, Homo sapien
gagtgaattggtgccgtcatagctc

SEQ ID NO: 4913379 - DNA, 25 bp, Homo sapien
tctcacttttaaatggaaagaatca

SEQ ID NO: 4913380 - DNA, 25 bp, Homo sapien
gtctcacttttaaatggaaagaatc

SEQ ID NO: 4913381 - DNA, 25 bp, Homo sapien
cccgcagcactattccttaaaggaa

SEQ ID NO: 4913382 - DNA, 25 bp, Homo sapien
tgtcttagacacctttccatatcaa

SEQ ID NO: 4913383 - DNA, 25 bp, Homo sapien
tcactggaaagcaactattaataag

SEQ ID NO: 4913384 - DNA, 25 bp, Homo sapien
gaaacttgtgcactactatatgtag

SEQ ID NO: 4913385 - DNA, 25 bp, Homo sapien
taactgggtacatgcatatgggaaa

SEQ ID NO: 4913386 - DNA, 25 bp, Homo sapien
caaatgggaacatattgtgtccaca

SEQ ID NO: 4913387 - DNA, 25 bp, Homo sapien
ttcctgaatcaacctccacagcttt

SEQ ID NO: 4913388 - DNA, 25 bp, Homo sapien
cagctttgtgtatatccttctgtaa

SEQ ID NO: 4913389 - DNA, 25 bp, Homo sapien
tacatccaacatttgcaggaagctt

SEQ ID NO: 4913390 - DNA, 25 bp, Homo sapien
catccaacatttgcaggaagcttca

SEQ ID NO: 4913391 - DNA, 25 bp, Homo sapien
ctgattagatctgcacttttacatc

SEQ ID NO: 4913392 - DNA, 25 bp, Homo sapien
gatctgcacttttacatccaacatt

SEQ ID NO: 4913393 - DNA, 25 bp, Homo sapien
ctcggaccggactttcaggactgca

SEQ ID NO: 4913394 - DNA, 25 bp, Homo sapien
cttttaagcaagctggacgggtcct

SEQ ID NO: 4913395 - DNA, 25 bp, Homo sapien
aatgaggcagaacttagcttgtcac

SEQ ID NO: 4913396 - DNA, 25 bp, Homo sapien
ggcttctaaatgcaaaatgaggcag

SEQ ID NO: 4913397 - DNA, 25 bp, Homo sapien
ccactcttctcggtgaacgtcgtca

SEQ ID NO: 4913398 - DNA, 25 bp, Homo sapien
tcggtgaacgtcgtcaggtagtcca

SEQ ID NO: 4913399 - DNA, 25 bp, Homo sapien
tcgtcaggtagtccatgctgccgcg

SEQ ID NO: 4913400 - DNA, 25 bp, Homo sapien
aacaggcggttggccgtgccccgca

SEQ ID NO: 4913401 - DNA, 25 bp, Homo sapien
ccctcaggtaatcttcgaagcgcac

SEQ ID NO: 4913402 - DNA, 25 bp, Homo sapien
gctccctcaggtaatcttcgaagcg

SEQ ID NO: 4913403 - DNA, 25 bp, Homo sapien
tggctccctcaggtaatcttcgaag

SEQ ID NO: 4913404 - DNA, 25 bp, Homo sapien
tccctcaggtaatcttcgaagcgca

SEQ ID NO: 4913405 - DNA, 25 bp, Homo sapien
aacacggacgtcataactggttcag

SEQ ID NO: 4913406 - DNA, 25 bp, Homo sapien
gctggcacgcagctgaaagtcttcc

SEQ ID NO: 4913407 - DNA, 25 bp, Homo sapien
gaatccaagactgaaaacacggacg

SEQ ID NO: 4913408 - DNA, 25 bp, Homo sapien
gatcgtccccttgaaatacttggcg

SEQ ID NO: 4913409 - DNA, 25 bp, Homo sapien
gacaagcagcaattctaaaacaggc

SEQ ID NO: 4913410 - DNA, 25 bp, Homo sapien
tcagctatcctgtgagacaagcagc

SEQ ID NO: 4913411 - DNA, 25 bp, Homo sapien
gcccactgaggttgccgatcaagta

SEQ ID NO: 4913412 - DNA, 25 bp, Homo sapien
ggagttaccactagagcccactgag

SEQ ID NO: 4913413 - DNA, 25 bp, Homo sapien
gacactgtgatttatggctgattac

SEQ ID NO: 4913414 - DNA, 25 bp, Homo sapien
tgcctaagcaacaggtttatcttta

SEQ ID NO: 4913415 - DNA, 25 bp, Homo sapien
cacattcctttttgtactagtatca

SEQ ID NO: 4913416 - DNA, 25 bp, Homo sapien
tatctttatcctagggacactgtga

SEQ ID NO: 4913417 - DNA, 25 bp, Homo sapien
ctttcaggattcatatgtatatgta

SEQ ID NO: 4913418 - DNA, 25 bp, Homo sapien
gcccattctatctctcatctacttt

SEQ ID NO: 4913419 - DNA, 25 bp, Homo sapien
atgcttttgcccattctatctctca

SEQ ID NO: 4913420 - DNA, 25 bp, Homo sapien
tttgcccattctatctctcatctac

SEQ ID NO: 4913421 - DNA, 25 bp, Homo sapien
tcgtcttccatctttcttgtctagg

SEQ ID NO: 4913422 - DNA, 25 bp, Homo sapien
ttgtctagggtcttcttttggccag

SEQ ID NO: 4913423 - DNA, 25 bp, Homo sapien
tctagggtcttcttttggccagtgt

SEQ ID NO: 4913424 - DNA, 25 bp, Homo sapien
catctttcttgtctagggtcttctt

SEQ ID NO: 4913425 - DNA, 25 bp, Homo sapien
tcaatagtccctttaggtttctgaa

SEQ ID NO: 4913426 - DNA, 25 bp, Homo sapien
agtatactcaatagtccctttaggt

SEQ ID NO: 4913427 - DNA, 25 bp, Homo sapien
actcaatagtccctttaggtttctg

SEQ ID NO: 4913428 - DNA, 25 bp, Homo sapien
ctcaatagtccctttaggtttctga

SEQ ID NO: 4913429 - DNA, 25 bp, Homo sapien
gttgtatcaaacttcagggctatgc

SEQ ID NO: 4913430 - DNA, 25 bp, Homo sapien
caactgctcgggagaataacttatt

SEQ ID NO: 4913431 - DNA, 25 bp, Homo sapien
ccagtaacaactgctcgggagaata

SEQ ID NO: 4913432 - DNA, 25 bp, Homo sapien
aattgaacaagttcgttaggtgttg

SEQ ID NO: 4913433 - DNA, 25 bp, Homo sapien
gatggagagctctcaacactggaga

SEQ ID NO: 4913434 - DNA, 25 bp, Homo sapien
tctcaacactggagacatattcagg

SEQ ID NO: 4913435 - DNA, 25 bp, Homo sapien
ggagacatattcaggatcaggaaca

SEQ ID NO: 4913436 - DNA, 25 bp, Homo sapien
tattcaggatcaggaacatacagaa

SEQ ID NO: 4913437 - DNA, 25 bp, Homo sapien
agtggtcttatcaaattcagcctca

SEQ ID NO: 4913438 - DNA, 25 bp, Homo sapien
atgatgttggtgacagaggacttac

SEQ ID NO: 4913439 - DNA, 25 bp, Homo sapien
agatgatgttggtgacagaggactt

SEQ ID NO: 4913440 - DNA, 25 bp, Homo sapien
ttcagcctcagatgatgttggtgac

SEQ ID NO: 4913441 - DNA, 25 bp, Homo sapien
gccatctttgcaaagcagagatact

SEQ ID NO: 4913442 - DNA, 25 bp, Homo sapien
tcatcgccatctttgcaaagcagag

SEQ ID NO: 4913443 - DNA, 25 bp, Homo sapien
atctttgcaaagcagagatacttac

SEQ ID NO: 4913444 - DNA, 25 bp, Homo sapien
catcgccatctttgcaaagcagaga

SEQ ID NO: 4913445 - DNA, 25 bp, Homo sapien
caggctaaattaacctaaggctacg

SEQ ID NO: 4913446 - DNA, 25 bp, Homo sapien
tctagtcaggcatgatgctacagct

SEQ ID NO: 4913447 - DNA, 25 bp, Homo sapien
aggcagatttaggttaaagccgagg

SEQ ID NO: 4913448 - DNA, 25 bp, Homo sapien
ttactttgtcattgccccttatgag

SEQ ID NO: 4913449 - DNA, 25 bp, Homo sapien
tatcctggagcctggtaatgaatat

SEQ ID NO: 4913450 - DNA, 25 bp, Homo sapien
ttatcctggagcctggtaatgaata

SEQ ID NO: 4913451 - DNA, 25 bp, Homo sapien
ctggagcctggtaatgaatataatc

SEQ ID NO: 4913452 - DNA, 25 bp, Homo sapien
tcctggagcctggtaatgaatataa

SEQ ID NO: 4913453 - DNA, 25 bp, Homo sapien
aaatcttcgcaaacactaagtccta

SEQ ID NO: 4913454 - DNA, 25 bp, Homo sapien
ctgggaccaagaacttaagaatgtt

SEQ ID NO: 4913455 - DNA, 25 bp, Homo sapien
tccaatatatacgatgattgccatt

SEQ ID NO: 4913456 - DNA, 25 bp, Homo sapien
aataatctctacttcctgggaccaa

SEQ ID NO: 4913457 - DNA, 25 bp, Homo sapien
gaagttgaagatacaactcgtgcag

SEQ ID NO: 4913458 - DNA, 25 bp, Homo sapien
gcaggtcgaataccagtgaaagtag

SEQ ID NO: 4913459 - DNA, 25 bp, Homo sapien
gatacaactcgtgcaggtcgaatac

SEQ ID NO: 4913460 - DNA, 25 bp, Homo sapien
taccagtgaaagtagatgagggagt

SEQ ID NO: 4913461 - DNA, 25 bp, Homo sapien
tacaacagatcaccagactctaagt

SEQ ID NO: 4913462 - DNA, 25 bp, Homo sapien
gaaatatcctaccaacagcaactta

SEQ ID NO: 4913463 - DNA, 25 bp, Homo sapien
gcaacttagctgtgccttagtgaat

SEQ ID NO: 4913464 - DNA, 25 bp, Homo sapien
gactctaagttataagcaacatcca

SEQ ID NO: 4913465 - DNA, 25 bp, Homo sapien
cagctgagcgctatggcattaacac

SEQ ID NO: 4913466 - DNA, 25 bp, Homo sapien
ttctctggggatcccaactggttcc

SEQ ID NO: 4913467 - DNA, 25 bp, Homo sapien
tgtgtgcagcggacgctgaggaatc

SEQ ID NO: 4913468 - DNA, 25 bp, Homo sapien
gttcctgcaagcagctgagcgctat

SEQ ID NO: 4913469 - DNA, 25 bp, Homo sapien
gccattctcttgaaccaaagggtca

SEQ ID NO: 4913470 - DNA, 25 bp, Homo sapien
tcttccattggacacatgatgccat

SEQ ID NO: 4913471 - DNA, 25 bp, Homo sapien
tgtacattgcagctgacatcacctc

SEQ ID NO: 4913472 - DNA, 25 bp, Homo sapien
tatattatttggtgtaactagcagc

SEQ ID NO: 4913473 - DNA, 25 bp, Homo sapien
tttcacacactgaacacagaattag

SEQ ID NO: 4913474 - DNA, 25 bp, Homo sapien
cactgaacacagaattagtatcact

SEQ ID NO: 4913475 - DNA, 25 bp, Homo sapien
tgaacacagaattagtatcactaaa

SEQ ID NO: 4913476 - DNA, 25 bp, Homo sapien
acactgaacacagaattagtatcac

SEQ ID NO: 4913477 - DNA, 25 bp, Homo sapien
tgaatggcagaagtcccttcctgat

SEQ ID NO: 4913478 - DNA, 25 bp, Homo sapien
cagaagtcccttcctgatagctgat

SEQ ID NO: 4913479 - DNA, 25 bp, Homo sapien
ccttcctgatagctgatctatatct

SEQ ID NO: 4913480 - DNA, 25 bp, Homo sapien
gtcccttcctgatagctgatctata

SEQ ID NO: 4913481 - DNA, 25 bp, Homo sapien
ctatttcctcagtgttacttcctgt

SEQ ID NO: 4913482 - DNA, 25 bp, Homo sapien
tatttcctcagtgttacttcctgtc

SEQ ID NO: 4913483 - DNA, 25 bp, Homo sapien
tttcctcagtgttacttcctgtcat

SEQ ID NO: 4913484 - DNA, 25 bp, Homo sapien
atttcctcagtgttacttcctgtca

SEQ ID NO: 4913485 - DNA, 25 bp, Homo sapien
cattacctgcatctcggattcttga

SEQ ID NO: 4913486 - DNA, 25 bp, Homo sapien
gcagtgctggcactatcattacctg

SEQ ID NO: 4913487 - DNA, 25 bp, Homo sapien
tgcacagattctgatgacgcaccag

SEQ ID NO: 4913488 - DNA, 25 bp, Homo sapien
agatacaagctcctctcgtataggg

SEQ ID NO: 4913489 - DNA, 25 bp, Homo sapien
attctgatttgactgtcagactttc

SEQ ID NO: 4913490 - DNA, 25 bp, Homo sapien
ctgatttgactgtcagactttctac

SEQ ID NO: 4913491 - DNA, 25 bp, Homo sapien
gatttgactgtcagactttctactt

SEQ ID NO: 4913492 - DNA, 25 bp, Homo sapien
tctgatttgactgtcagactttcta

SEQ ID NO: 4913493 - DNA, 25 bp, Homo sapien
taaattctgctgtttccccacaagg

SEQ ID NO: 4913494 - DNA, 25 bp, Homo sapien
gaaaagaatcctggtctgaattacc

SEQ ID NO: 4913495 - DNA, 25 bp, Homo sapien
tgcaatctgatcttccttaatggcc

SEQ ID NO: 4913496 - DNA, 25 bp, Homo sapien
tcttggtgtaacgaattctcatgaa

SEQ ID NO: 4913497 - DNA, 25 bp, Homo sapien
ttttccaaagtttgcgtagctcttc

SEQ ID NO: 4913498 - DNA, 25 bp, Homo sapien
tccaaagtttgcgtagctcttctgc

SEQ ID NO: 4913499 - DNA, 25 bp, Homo sapien
gtttgcgtagctcttctgcctctgt

SEQ ID NO: 4913500 - DNA, 25 bp, Homo sapien
aaagtttgcgtagctcttctgcctc

SEQ ID NO: 4913501 - DNA, 25 bp, Homo sapien
tccatcagcagatgtaattttatgc

SEQ ID NO: 4913502 - DNA, 25 bp, Homo sapien
gcttctttttgtgacacttgttgaa

SEQ ID NO: 4913503 - DNA, 25 bp, Homo sapien
ccctttgctgtttagtttgttgcat

SEQ ID NO: 4913504 - DNA, 25 bp, Homo sapien
cttgttgaatattttccctttgctg

SEQ ID NO: 4913505 - DNA, 25 bp, Homo sapien
tgaggaaagacggagacaccataca

SEQ ID NO: 4913506 - DNA, 25 bp, Homo sapien
gacaccatacaattggatgaactaa

SEQ ID NO: 4913507 - DNA, 25 bp, Homo sapien
ggatgaactaacttcatttactcta

SEQ ID NO: 4913508 - DNA, 25 bp, Homo sapien
ggtacagcggcttttgagtcagtga

SEQ ID NO: 4913509 - DNA, 25 bp, Homo sapien
tccacctgtgggataagaaaagaca

SEQ ID NO: 4913510 - DNA, 25 bp, Homo sapien
gatgaaacttctcgatacgtggaag

SEQ ID NO: 4913511 - DNA, 25 bp, Homo sapien
taatgatacgatgtagtgagccaag

SEQ ID NO: 4913512 - DNA, 25 bp, Homo sapien
acttgtccccagagaatcaccggtc

SEQ ID NO: 4913513 - DNA, 25 bp, Homo sapien
atgtactaatgccactgcattgtag

SEQ ID NO: 4913514 - DNA, 25 bp, Homo sapien
aagctctggaaatggacagtagtga

SEQ ID NO: 4913515 - DNA, 25 bp, Homo sapien
tagtgatgatctgcataacaatgtg

SEQ ID NO: 4913516 - DNA, 25 bp, Homo sapien
gaatgtactaatgccactgcattgt

SEQ ID NO: 4913517 - DNA, 25 bp, Homo sapien
cttatgtaatcgatgcctttgcttt

SEQ ID NO: 4913518 - DNA, 25 bp, Homo sapien
tgcttgagatacaaacgttttcctc

SEQ ID NO: 4913519 - DNA, 25 bp, Homo sapien
agaacttatgtaatcgatgcctttg

SEQ ID NO: 4913520 - DNA, 25 bp, Homo sapien
gagatacaaacgttttcctcattgg

SEQ ID NO: 4913521 - DNA, 25 bp, Homo sapien
ctttcttgtggcacagcaaaccaat

SEQ ID NO: 4913522 - DNA, 25 bp, Homo sapien
tcttgtggcacagcaaaccaatatt

SEQ ID NO: 4913523 - DNA, 25 bp, Homo sapien
tatctctctgtgcatactgttgcat

SEQ ID NO: 4913524 - DNA, 25 bp, Homo sapien
tggcacagcaaaccaatattcatgt

SEQ ID NO: 4913525 - DNA, 25 bp, Homo sapien
tggtatattcgccagtatcttctgc

SEQ ID NO: 4913526 - DNA, 25 bp, Homo sapien
gctgcttgattactagaatcctcaa

SEQ ID NO: 4913527 - DNA, 25 bp, Homo sapien
aatccaggttctctggtatattcgc

SEQ ID NO: 4913528 - DNA, 25 bp, Homo sapien
ctactataaatccaggttctctggt

SEQ ID NO: 4913529 - DNA, 25 bp, Homo sapien
tgttaaatgactgccgtacctcctc

SEQ ID NO: 4913530 - DNA, 25 bp, Homo sapien
taaagtcactattcagattcattca

SEQ ID NO: 4913531 - DNA, 25 bp, Homo sapien
tcctcttttgtggaaacatcactta

SEQ ID NO: 4913532 - DNA, 25 bp, Homo sapien
cacggatagtgaacctgacctttaa

SEQ ID NO: 4913533 - DNA, 25 bp, Homo sapien
tacatgttaagtgcatgcaagatac

SEQ ID NO: 4913534 - DNA, 25 bp, Homo sapien
gacaagccatgtataccttcaatta

SEQ ID NO: 4913535 - DNA, 25 bp, Homo sapien
tgcttaggtctgaaacatagaaagg

SEQ ID NO: 4913536 - DNA, 25 bp, Homo sapien
gagtcacagtagaaactgatgctgt

SEQ ID NO: 4913537 - DNA, 25 bp, Homo sapien
cgtatctttgatcacctgggctatt

SEQ ID NO: 4913538 - DNA, 25 bp, Homo sapien
tgccttagttaggtacgtatctttg

SEQ ID NO: 4913539 - DNA, 25 bp, Homo sapien
gatcacctgggctattttaagtacc

SEQ ID NO: 4913540 - DNA, 25 bp, Homo sapien
aactgttgctgccttagttaggtac

SEQ ID NO: 4913541 - DNA, 25 bp, Homo sapien
tatgacacttacatagggaaaggga

SEQ ID NO: 4913542 - DNA, 25 bp, Homo sapien
taactgatgcccaagttggtagcca

SEQ ID NO: 4913543 - DNA, 25 bp, Homo sapien
taaaaaacatcacggcacattctga

SEQ ID NO: 4913544 - DNA, 25 bp, Homo sapien
tctgcttgagtaacagtcagggata

SEQ ID NO: 4913545 - DNA, 25 bp, Homo sapien
cttgtagtatctctgagtacacaac

SEQ ID NO: 4913546 - DNA, 25 bp, Homo sapien
gtatctctgagtacacaacatgatg

SEQ ID NO: 4913547 - DNA, 25 bp, Homo sapien
tctctgagtacacaacatgatggaa

SEQ ID NO: 4913548 - DNA, 25 bp, Homo sapien
cctggtatgttttttgatcttcctc

SEQ ID NO: 4913549 - DNA, 25 bp, Homo sapien
ttgacctcccaaaatgctgggatta

SEQ ID NO: 4913550 - DNA, 25 bp, Homo sapien
ccacgcctggcctagataaagattt

SEQ ID NO: 4913551 - DNA, 25 bp, Homo sapien
caggtgtgagccaccacgcctggcc

SEQ ID NO: 4913552 - DNA, 25 bp, Homo sapien
cctcaggtaatctgcttgccttgac

SEQ ID NO: 4913553 - DNA, 25 bp, Homo sapien
tataatttaccctactcactattta

SEQ ID NO: 4913554 - DNA, 25 bp, Homo sapien
tactttattcgaactgaagttatta

SEQ ID NO: 4913555 - DNA, 25 bp, Homo sapien
tcttcctatttgagttgggaatggt

SEQ ID NO: 4913556 - DNA, 25 bp, Homo sapien
gggaatggtatgatagaagctataa

SEQ ID NO: 4913557 - DNA, 25 bp, Homo sapien
tcacgtaagaactgttttcaaaagc

SEQ ID NO: 4913558 - DNA, 25 bp, Homo sapien
ctttccagggcaaattaagttacat

SEQ ID NO: 4913559 - DNA, 25 bp, Homo sapien
cataaaatcacgtaagaactgtttt

SEQ ID NO: 4913560 - DNA, 25 bp, Homo sapien
aagataaatttccagcactagagcc

SEQ ID NO: 4913561 - DNA, 25 bp, Homo sapien
gattaattggttgatgtcttctccc

SEQ ID NO: 4913562 - DNA, 25 bp, Homo sapien
tcccataccagagacgagacatttc

SEQ ID NO: 4913563 - DNA, 25 bp, Homo sapien
tatttatgattaattggttgatgtc

SEQ ID NO: 4913564 - DNA, 25 bp, Homo sapien
ttttttcccataccagagacgagac

SEQ ID NO: 4913565 - DNA, 25 bp, Homo sapien
ttctataaatatcctctatgcttaa

SEQ ID NO: 4913566 - DNA, 25 bp, Homo sapien
cttcaaggtactttgtacaatcata

SEQ ID NO: 4913567 - DNA, 25 bp, Homo sapien
caccatgaaaagactagtatatata

SEQ ID NO: 4913568 - DNA, 25 bp, Homo sapien
tttcataatgtcaccatgaaaagac

SEQ ID NO: 4913569 - DNA, 25 bp, Homo sapien
caattttcttaagagctgcctgccc

SEQ ID NO: 4913570 - DNA, 25 bp, Homo sapien
caggcaaaatcttacagggctctca

SEQ ID NO: 4913571 - DNA, 25 bp, Homo sapien
gggctctcaatctacaaagcaggta

SEQ ID NO: 4913572 - DNA, 25 bp, Homo sapien
caatatgtgctagggtcaagctgtc

SEQ ID NO: 4913573 - DNA, 25 bp, Homo sapien
ctaatattgggtagtggtacatcac

SEQ ID NO: 4913574 - DNA, 25 bp, Homo sapien
tggttaccaatatgagggtgacaca

SEQ ID NO: 4913575 - DNA, 25 bp, Homo sapien
aaatgtcctttaccaggtgaatggg

SEQ ID NO: 4913576 - DNA, 25 bp, Homo sapien
cagacagatgcagctacattagtga

SEQ ID NO: 4913577 - DNA, 25 bp, Homo sapien
gcgtctgcagagtgtgcgcagttct

SEQ ID NO: 4913578 - DNA, 25 bp, Homo sapien
tgcgcagttcttcagtatttagagc

SEQ ID NO: 4913579 - DNA, 25 bp, Homo sapien
tcctgcggtgatactcagccactga

SEQ ID NO: 4913580 - DNA, 25 bp, Homo sapien
tatttagagcatcgatcctgcggtg

SEQ ID NO: 4913581 - DNA, 25 bp, Homo sapien
taggtttggtcgaaaagattcagac

SEQ ID NO: 4913582 - DNA, 25 bp, Homo sapien
tctgctttcactgtagcaacctgct

SEQ ID NO: 4913583 - DNA, 25 bp, Homo sapien
gatcacttaggtttggtcgaaaaga

SEQ ID NO: 4913584 - DNA, 25 bp, Homo sapien
gatctggcagtaaaagttcactggg

SEQ ID NO: 4913585 - DNA, 25 bp, Homo sapien
accatcagcactggggtgtctaaac

SEQ ID NO: 4913586 - DNA, 25 bp, Homo sapien
gggtgtctaaacctgtcattgttcg

SEQ ID NO: 4913587 - DNA, 25 bp, Homo sapien
cattgttcgataaagagttttcaag

SEQ ID NO: 4913588 - DNA, 25 bp, Homo sapien
ccaattgttcttggtggaagatgct

SEQ ID NO: 4913589 - DNA, 25 bp, Homo sapien
gtctctccagtaccataaaagccat

SEQ ID NO: 4913590 - DNA, 25 bp, Homo sapien
acaaaggtctctccagtaccataaa

SEQ ID NO: 4913591 - DNA, 25 bp, Homo sapien
aaaggtctctccagtaccataaaag

SEQ ID NO: 4913592 - DNA, 25 bp, Homo sapien
tctccagtaccataaaagccatcac

SEQ ID NO: 4913593 - DNA, 25 bp, Homo sapien
cataatttgtgtttggtgccatccc

SEQ ID NO: 4913594 - DNA, 25 bp, Homo sapien
acttgcatgactccaaagtgcatgg

SEQ ID NO: 4913595 - DNA, 25 bp, Homo sapien
tctatctacaggaaagttgaagttc

SEQ ID NO: 4913596 - DNA, 25 bp, Homo sapien
taccagggagtaaaaggcaaagata

SEQ ID NO: 4913597 - DNA, 25 bp, Homo sapien
gaaagctagtgaatccatgtctcct

SEQ ID NO: 4913598 - DNA, 25 bp, Homo sapien
atattatctcctgtccacttaaaga

SEQ ID NO: 4913599 - DNA, 25 bp, Homo sapien
aaaaacatattatctcctgtccact

SEQ ID NO: 4913600 - DNA, 25 bp, Homo sapien
cctccaccaccgaaagctagtgaat

SEQ ID NO: 4913601 - DNA, 25 bp, Homo sapien
atggtagagatctccatcaagccaa

SEQ ID NO: 4913602 - DNA, 25 bp, Homo sapien
ggtagagatctccatcaagccaaag

SEQ ID NO: 4913603 - DNA, 25 bp, Homo sapien
catggtagagatctccatcaagcca

SEQ ID NO: 4913604 - DNA, 25 bp, Homo sapien
tggtagagatctccatcaagccaaa

SEQ ID NO: 4913605 - DNA, 25 bp, Homo sapien
gcaacctggcaatcaacactttctg

SEQ ID NO: 4913606 - DNA, 25 bp, Homo sapien
cttaaagtgctataagcaacctggc

SEQ ID NO: 4913607 - DNA, 25 bp, Homo sapien
tatgcccaaacctgcagatcatatg

SEQ ID NO: 4913608 - DNA, 25 bp, Homo sapien
tatacctgacacagtatgttgagga

SEQ ID NO: 4913609 - DNA, 25 bp, Homo sapien
ccactatgaccttattttagtagaa

SEQ ID NO: 4913610 - DNA, 25 bp, Homo sapien
tgccactatgaccttattttagtag

SEQ ID NO: 4913611 - DNA, 25 bp, Homo sapien
tatgccactatgaccttattttagt

SEQ ID NO: 4913612 - DNA, 25 bp, Homo sapien
tatatgccactatgaccttatttta

SEQ ID NO: 4913613 - DNA, 25 bp, Homo sapien
tactcatcataatacaggaagccag

SEQ ID NO: 4913614 - DNA, 25 bp, Homo sapien
gggtaccagaatgttatatgcagca

SEQ ID NO: 4913615 - DNA, 25 bp, Homo sapien
ttccccaaatcaggctggcacatgg

SEQ ID NO: 4913616 - DNA, 25 bp, Homo sapien
taatgtgttgaaatgcctacgcttg

SEQ ID NO: 4913617 - DNA, 25 bp, Homo sapien
aaaagtgctgcttatacccttgcaa

SEQ ID NO: 4913618 - DNA, 25 bp, Homo sapien
taaacaaagataccttcccacacag

SEQ ID NO: 4913619 - DNA, 25 bp, Homo sapien
ttttcagtaatctttcccagacagg

SEQ ID NO: 4913620 - DNA, 25 bp, Homo sapien
tagctacaaatagctcctccctgga

SEQ ID NO: 4913621 - DNA, 25 bp, Homo sapien
atcttgtggcaggcaatatcctcca

SEQ ID NO: 4913622 - DNA, 25 bp, Homo sapien
cacacaatcgccaaatgagctagag

SEQ ID NO: 4913623 - DNA, 25 bp, Homo sapien
cagagtcttgtatcccatggtgaaa

SEQ ID NO: 4913624 - DNA, 25 bp, Homo sapien
taatcaaacctctcaggtagagaaa

SEQ ID NO: 4913625 - DNA, 25 bp, Homo sapien
actgctgcatcattggtaggctatc

SEQ ID NO: 4913626 - DNA, 25 bp, Homo sapien
ctttggttgtgtgctacccgtgacg

SEQ ID NO: 4913627 - DNA, 25 bp, Homo sapien
aactgcctccacagcgctgtttcgt

SEQ ID NO: 4913628 - DNA, 25 bp, Homo sapien
cgctgtttcgtctttggttgtgtgc

SEQ ID NO: 4913629 - DNA, 25 bp, Homo sapien
ggttgtgtgctacccgtgacgtcat

SEQ ID NO: 4913630 - DNA, 25 bp, Homo sapien
cataccttgcactctcatccttcct

SEQ ID NO: 4913631 - DNA, 25 bp, Homo sapien
ccagcaattaatcttcacatttgtc

SEQ ID NO: 4913632 - DNA, 25 bp, Homo sapien
tctcatccttcctccagcaattaat

SEQ ID NO: 4913633 - DNA, 25 bp, Homo sapien
cttcataccttgcactctcatcctt

SEQ ID NO: 4913634 - DNA, 25 bp, Homo sapien
tgtctctggcaggtgtagcgagttt

SEQ ID NO: 4913635 - DNA, 25 bp, Homo sapien
gctgaccctagaccatcattttgaa

SEQ ID NO: 4913636 - DNA, 25 bp, Homo sapien
caggtgtagcgagtttagacagaga

SEQ ID NO: 4913637 - DNA, 25 bp, Homo sapien
gacagagatgtcttgcataggcatc

SEQ ID NO: 4913638 - DNA, 25 bp, Homo sapien
cagagtagacaaatctttgccacac

SEQ ID NO: 4913639 - DNA, 25 bp, Homo sapien
tttcattgacatgctccattaactg

SEQ ID NO: 4913640 - DNA, 25 bp, Homo sapien
cagccagcctaaaaatggaaaatcc

SEQ ID NO: 4913641 - DNA, 25 bp, Homo sapien
cattgacatgctccattaactgcat

SEQ ID NO: 4913642 - DNA, 25 bp, Homo sapien
tggaaaatccttttcattgacatgc

SEQ ID NO: 4913643 - DNA, 25 bp, Homo sapien
gaccttcgcaggatgttcaaagcaa

SEQ ID NO: 4913644 - DNA, 25 bp, Homo sapien
gtatgtgtatccgttcaaaacttat

SEQ ID NO: 4913645 - DNA, 25 bp, Homo sapien
caagtgactccagaccttcgcagga

SEQ ID NO: 4913646 - DNA, 25 bp, Homo sapien
ttacgatcacccaaatacaagtgac

SEQ ID NO: 4913647 - DNA, 25 bp, Homo sapien
ttctctgttaagcagggggctttct

SEQ ID NO: 4913648 - DNA, 25 bp, Homo sapien
gccctctgtaaatgaactcatccct

SEQ ID NO: 4913649 - DNA, 25 bp, Homo sapien
tctctgttaagcagggggctttctg

SEQ ID NO: 4913650 - DNA, 25 bp, Homo sapien
ccctctgtaaatgaactcatccctt

SEQ ID NO: 4913651 - DNA, 25 bp, Homo sapien
ggtctggagctagaaaaaatctcca

SEQ ID NO: 4913652 - DNA, 25 bp, Homo sapien
aaatctccagttcactatctatgga

SEQ ID NO: 4913653 - DNA, 25 bp, Homo sapien
tgcaagcttccctatgttcacaaat

SEQ ID NO: 4913654 - DNA, 25 bp, Homo sapien
tcagctacattgaagggtctggagc

SEQ ID NO: 4913655 - DNA, 25 bp, Homo sapien
acagttcttaggtgccctgtggagg

SEQ ID NO: 4913656 - DNA, 25 bp, Homo sapien
aactggttctttccgagaagcagga

SEQ ID NO: 4913657 - DNA, 25 bp, Homo sapien
agcagcctgcacactatgtagaagg

SEQ ID NO: 4913658 - DNA, 25 bp, Homo sapien
tagaaggtatccacagttcttaggt

SEQ ID NO: 4913659 - DNA, 25 bp, Homo sapien
aagctggcgaagagggattccaatc

SEQ ID NO: 4913660 - DNA, 25 bp, Homo sapien
gcttagggcatagtgaattagggtg

SEQ ID NO: 4913661 - DNA, 25 bp, Homo sapien
gggattccaatcagactccactgag

SEQ ID NO: 4913662 - DNA, 25 bp, Homo sapien
gaagagggattccaatcagactcca

SEQ ID NO: 4913663 - DNA, 25 bp, Homo sapien
gagcatgccccagaaggctggaaga

SEQ ID NO: 4913664 - DNA, 25 bp, Homo sapien
ctcaaagggaatattgtggaaccta

SEQ ID NO: 4913665 - DNA, 25 bp, Homo sapien
ggaatattgtggaacctagccccat

SEQ ID NO: 4913666 - DNA, 25 bp, Homo sapien
tggaagatctactccctcaaaggga

SEQ ID NO: 4913667 - DNA, 25 bp, Homo sapien
cacatcaggtcctactgagggtctt

SEQ ID NO: 4913668 - DNA, 25 bp, Homo sapien
gaagttcctactggtgcattcagca

SEQ ID NO: 4913669 - DNA, 25 bp, Homo sapien
caggtcttggtagcataggaagttc

SEQ ID NO: 4913670 - DNA, 25 bp, Homo sapien
agtctgacaaaggaagggctatcat

SEQ ID NO: 4913671 - DNA, 25 bp, Homo sapien
tttcctttaatgaggaaaatctctc

SEQ ID NO: 4913672 - DNA, 25 bp, Homo sapien
ttcctttaatgaggaaaatctctcc

SEQ ID NO: 4913673 - DNA, 25 bp, Homo sapien
tcctttaatgaggaaaatctctcca

SEQ ID NO: 4913674 - DNA, 25 bp, Homo sapien
ttgttctctgtcgtataggctccat

SEQ ID NO: 4913675 - DNA, 25 bp, Homo sapien
gagatcattgttctctgtcgtatag

SEQ ID NO: 4913676 - DNA, 25 bp, Homo sapien
cattgttctctgtcgtataggctcc

SEQ ID NO: 4913677 - DNA, 25 bp, Homo sapien
gtggtgagatcattgttctctgtcg

SEQ ID NO: 4913678 - DNA, 25 bp, Homo sapien
acatagtaccctgtgctgactgaca

SEQ ID NO: 4913679 - DNA, 25 bp, Homo sapien
gattagcaatccctttgaggcaaga

SEQ ID NO: 4913680 - DNA, 25 bp, Homo sapien
gacccttgtggtatatagcccttta

SEQ ID NO: 4913681 - DNA, 25 bp, Homo sapien
tagccctttagcaagaatgctgcag

SEQ ID NO: 4913682 - DNA, 25 bp, Homo sapien
cagatactgaacctcgatggcatta

SEQ ID NO: 4913683 - DNA, 25 bp, Homo sapien
tagagaataaggcacagatactgaa

SEQ ID NO: 4913684 - DNA, 25 bp, Homo sapien
taaggcacagatactgaacctcgat

SEQ ID NO: 4913685 - DNA, 25 bp, Homo sapien
actgaacctcgatggcattaagtac

SEQ ID NO: 4913686 - DNA, 25 bp, Homo sapien
tggtggagggagccacttttgtttc

SEQ ID NO: 4913687 - DNA, 25 bp, Homo sapien
gagtccactgttgtagccttgtgat

SEQ ID NO: 4913688 - DNA, 25 bp, Homo sapien
ttgtggagtccactgttgtagcctt

SEQ ID NO: 4913689 - DNA, 25 bp, Homo sapien
tctgaaatggtgctccagtgcccaa

SEQ ID NO: 4913690 - DNA, 25 bp, Homo sapien
agtgggttggagggcaatgatctac

SEQ ID NO: 4913691 - DNA, 25 bp, Homo sapien
aagtgggttggagggcaatgatcta

SEQ ID NO: 4913692 - DNA, 25 bp, Homo sapien
ttaagttctcggaggtgtccaactg

SEQ ID NO: 4913693 - DNA, 25 bp, Homo sapien
ttgtatcaggactattaaattcata

SEQ ID NO: 4913694 - DNA, 25 bp, Homo sapien
tctcggaggtgtccaactggatttg

SEQ ID NO: 4913695 - DNA, 25 bp, Homo sapien
tccaactggatttgtatcaggacta

SEQ ID NO: 4913696 - DNA, 25 bp, Homo sapien
gggccagtcataggtcttcaaatac

SEQ ID NO: 4913697 - DNA, 25 bp, Homo sapien
tgctgctggacagggccagtcatag

SEQ ID NO: 4913698 - DNA, 25 bp, Homo sapien
gctggacagggccagtcataggtct

SEQ ID NO: 4913699 - DNA, 25 bp, Homo sapien
ggtcttcaaatactcacaagaaaaa

SEQ ID NO: 4913700 - DNA, 25 bp, Homo sapien
agtttgttgcccacacatctcaatg

SEQ ID NO: 4913701 - DNA, 25 bp, Homo sapien
caatgtaagtaagggcttcacttgg

SEQ ID NO: 4913702 - DNA, 25 bp, Homo sapien
taagtaagggcttcacttggagggc

SEQ ID NO: 4913703 - DNA, 25 bp, Homo sapien
cacacatctcaatgtaagtaagggc

SEQ ID NO: 4913704 - DNA, 25 bp, Homo sapien
gatctaatttagcaaggcctgttca

SEQ ID NO: 4913705 - DNA, 25 bp, Homo sapien
gaaatactcaaaatgccaaggtgcc

SEQ ID NO: 4913706 - DNA, 25 bp, Homo sapien
ggagcgtacctctcacatgagtgtt

SEQ ID NO: 4913707 - DNA, 25 bp, Homo sapien
caagatgcttctttcctatgggtag

SEQ ID NO: 4913708 - DNA, 25 bp, Homo sapien
gatgtcatccaatcctgaacccagt

SEQ ID NO: 4913709 - DNA, 25 bp, Homo sapien
ggtctcttagtggtcccagtccatt

SEQ ID NO: 4913710 - DNA, 25 bp, Homo sapien
ctgctgaaggtctcttagtggtccc

SEQ ID NO: 4913711 - DNA, 25 bp, Homo sapien
tcttctagtaaccttctctgctgaa

SEQ ID NO: 4913712 - DNA, 25 bp, Homo sapien
tttggtttgttctcgattctcgaac

SEQ ID NO: 4913713 - DNA, 25 bp, Homo sapien
tctcgaacttcttgaggtgtgacct

SEQ ID NO: 4913714 - DNA, 25 bp, Homo sapien
ctcgattctcgaacttcttgaggtg

SEQ ID NO: 4913715 - DNA, 25 bp, Homo sapien
tgttctcgattctcgaacttcttga

SEQ ID NO: 4913716 - DNA, 25 bp, Homo sapien
caatacaagtaggtatggacatagg

SEQ ID NO: 4913717 - DNA, 25 bp, Homo sapien
ggaatttattcagctcaaacaccag

SEQ ID NO: 4913718 - DNA, 25 bp, Homo sapien
ggacataggatgcatcatttgcaag

SEQ ID NO: 4913719 - DNA, 25 bp, Homo sapien
gaatctagtaaaggctctgctcttt

SEQ ID NO: 4913720 - DNA, 25 bp, Homo sapien
cagtggttcccaccatgtggctgac

SEQ ID NO: 4913721 - DNA, 25 bp, Homo sapien
ctccactctgttgctgcagattctt

SEQ ID NO: 4913722 - DNA, 25 bp, Homo sapien
gtggctgacactgatagctttcacc

SEQ ID NO: 4913723 - DNA, 25 bp, Homo sapien
tgtgctggtatcctctggagagcag

SEQ ID NO: 4913724 - DNA, 25 bp, Homo sapien
cctggcaggaatggctgttggttac

SEQ ID NO: 4913725 - DNA, 25 bp, Homo sapien
ttccctggcaggaatggctgttggt

SEQ ID NO: 4913726 - DNA, 25 bp, Homo sapien
tatggaattccctggcaggaatggc

SEQ ID NO: 4913727 - DNA, 25 bp, Homo sapien
ctatggaattccctggcaggaatgg

SEQ ID NO: 4913728 - DNA, 25 bp, Homo sapien
tattactgaatccagacactttaga

SEQ ID NO: 4913729 - DNA, 25 bp, Homo sapien
tgaatccagacactttagaaggtcc

SEQ ID NO: 4913730 - DNA, 25 bp, Homo sapien
cttgaagtgggttattactgaatcc

SEQ ID NO: 4913731 - DNA, 25 bp, Homo sapien
tgtgtttgtaccttgaagtgggtta

SEQ ID NO: 4913732 - DNA, 25 bp, Homo sapien
tttctggtgttcattggctccacct

SEQ ID NO: 4913733 - DNA, 25 bp, Homo sapien
acctgcatttggctgatgccccgtc

SEQ ID NO: 4913734 - DNA, 25 bp, Homo sapien
gtccttttctggtgttcattggctc

SEQ ID NO: 4913735 - DNA, 25 bp, Homo sapien
catttggctgatgccccgtcaagtg

SEQ ID NO: 4913736 - DNA, 25 bp, Homo sapien
ctggagggatgacagggagacccag

SEQ ID NO: 4913737 - DNA, 25 bp, Homo sapien
tcacgtaggagccaagagggcaggt

SEQ ID NO: 4913738 - DNA, 25 bp, Homo sapien
ttggtgtgtctgagatggtaactct

SEQ ID NO: 4913739 - DNA, 25 bp, Homo sapien
ctttggtgtgtctgagatggtaact

SEQ ID NO: 4913740 - DNA, 25 bp, Homo sapien
tgtgtctgagatggtaactctcctc

SEQ ID NO: 4913741 - DNA, 25 bp, Homo sapien
ggtgtgtctgagatggtaactctcc

SEQ ID NO: 4913742 - DNA, 25 bp, Homo sapien
cctgatagcaagataagagatagag

SEQ ID NO: 4913743 - DNA, 25 bp, Homo sapien
ataagagatagagggtctctccagt

SEQ ID NO: 4913744 - DNA, 25 bp, Homo sapien
ttcactgtacctgatagcaagataa

SEQ ID NO: 4913745 - DNA, 25 bp, Homo sapien
gagatagagggtctctccagtgaaa

SEQ ID NO: 4913746 - DNA, 25 bp, Homo sapien
caagatccttaagtaaaggatggca

SEQ ID NO: 4913747 - DNA, 25 bp, Homo sapien
atcttcgtataatcacacttcgcta

SEQ ID NO: 4913748 - DNA, 25 bp, Homo sapien
ttgcaagatccttaagtaaaggatg

SEQ ID NO: 4913749 - DNA, 25 bp, Homo sapien
tcttgcctacttttagaaaggtgga

SEQ ID NO: 4913750 - DNA, 25 bp, Homo sapien
tactgataggaagcagtcagacatt

SEQ ID NO: 4913751 - DNA, 25 bp, Homo sapien
ttttatactgataggaagcagtcag

SEQ ID NO: 4913752 - DNA, 25 bp, Homo sapien
atttttatactgataggaagcagtc

SEQ ID NO: 4913753 - DNA, 25 bp, Homo sapien
tatactgataggaagcagtcagaca

SEQ ID NO: 4913754 - DNA, 25 bp, Homo sapien
tttttgttggtagggcaagctgtgt

SEQ ID NO: 4913755 - DNA, 25 bp, Homo sapien
tgtttttgttggtagggcaagctgt

SEQ ID NO: 4913756 - DNA, 25 bp, Homo sapien
ttgttggtagggcaagctgtgtaat

SEQ ID NO: 4913757 - DNA, 25 bp, Homo sapien
gtgtttttgttggtagggcaagctg

SEQ ID NO: 4913758 - DNA, 25 bp, Homo sapien
ccaagggctccaagtcaatctgcat

SEQ ID NO: 4913759 - DNA, 25 bp, Homo sapien
catcagcaatgaagagggaacagac

SEQ ID NO: 4913760 - DNA, 25 bp, Homo sapien
gagcagagagctgaaaccctgctga

SEQ ID NO: 4913761 - DNA, 25 bp, Homo sapien
aagcactcactcgtctctcacttgt

SEQ ID NO: 4913762 - DNA, 25 bp, Homo sapien
gcagagtgtcttacagtttatcccc

SEQ ID NO: 4913763 - DNA, 25 bp, Homo sapien
gaaagagctcaaaaaccactgttga

SEQ ID NO: 4913764 - DNA, 25 bp, Homo sapien
gaagaaaccacactcatacgattgg

SEQ ID NO: 4913765 - DNA, 25 bp, Homo sapien
ggcaatcgcatcaagtttgtgaaac

SEQ ID NO: 4913766 - DNA, 25 bp, Homo sapien
tgagttgcctagacacagcttgaaa

SEQ ID NO: 4913767 - DNA, 25 bp, Homo sapien
tgcctagacacagcttgaaatttaa

SEQ ID NO: 4913768 - DNA, 25 bp, Homo sapien
tgaaagtgaagacaggtgagttgcc

SEQ ID NO: 4913769 - DNA, 25 bp, Homo sapien
tctgaaagtgaagacaggtgagttg

SEQ ID NO: 4913770 - DNA, 25 bp, Homo sapien
gggtgtgaagtctctcagcagcagt

SEQ ID NO: 4913771 - DNA, 25 bp, Homo sapien
acggtgctacacaaaaatctatgca

SEQ ID NO: 4913772 - DNA, 25 bp, Homo sapien
tctgatctgactgtaacggtgctac

SEQ ID NO: 4913773 - DNA, 25 bp, Homo sapien
gaggtgtagataatcaagttcccaa

SEQ ID NO: 4913774 - DNA, 25 bp, Homo sapien
cttgatccctgagacacccattgtt

SEQ ID NO: 4913775 - DNA, 25 bp, Homo sapien
ttgatccctgagacacccattgttc

SEQ ID NO: 4913776 - DNA, 25 bp, Homo sapien
caacagcaacatgagggagttacca

SEQ ID NO: 4913777 - DNA, 25 bp, Homo sapien
caaatattgctcagactactgggaa

SEQ ID NO: 4913778 - DNA, 25 bp, Homo sapien
tggacccgagcaaagctcacagaga

SEQ ID NO: 4913779 - DNA, 25 bp, Homo sapien
tgctagaagtgagcctagggtgcct

SEQ ID NO: 4913780 - DNA, 25 bp, Homo sapien
taacgtccctcgtccactcttcttg

SEQ ID NO: 4913781 - DNA, 25 bp, Homo sapien
tatggagcctggctaacgtccctcg

SEQ ID NO: 4913782 - DNA, 25 bp, Homo sapien
agtcctaaaccaatatggagcctgg

SEQ ID NO: 4913783 - DNA, 25 bp, Homo sapien
aaaccaatatggagcctggctaacg

SEQ ID NO: 4913784 - DNA, 25 bp, Homo sapien
gaggtctcttcccataggccctttc

SEQ ID NO: 4913785 - DNA, 25 bp, Homo sapien
ctagaacaatgattgaccatatagc

SEQ ID NO: 4913786 - DNA, 25 bp, Homo sapien
tacaaatccaattgggtcatattct

SEQ ID NO: 4913787 - DNA, 25 bp, Homo sapien
gaaagcaagaggtctcttcccatag

SEQ ID NO: 4913788 - DNA, 25 bp, Homo sapien
ttcagtttcaggtgtacatccagcc

SEQ ID NO: 4913789 - DNA, 25 bp, Homo sapien
gctgagacccacacaaccattgatt

SEQ ID NO: 4913790 - DNA, 25 bp, Homo sapien
ctaaaaatacaagctgcttcatact

SEQ ID NO: 4913791 - DNA, 25 bp, Homo sapien
gatgaagtccaaaggagccatttct

SEQ ID NO: 4913792 - DNA, 25 bp, Homo sapien
ccaaagaactgctatccttgagcat

SEQ ID NO: 4913793 - DNA, 25 bp, Homo sapien
cccaaagaactgctatccttgagca

SEQ ID NO: 4913794 - DNA, 25 bp, Homo sapien
tcccaaagaactgctatccttgagc

SEQ ID NO: 4913795 - DNA, 25 bp, Homo sapien
tatagctccgttataattactttgc

SEQ ID NO: 4913796 - DNA, 25 bp, Homo sapien
ctccgttataattactttgcaaggg

SEQ ID NO: 4913797 - DNA, 25 bp, Homo sapien
gctccgttataattactttgcaagg

SEQ ID NO: 4913798 - DNA, 25 bp, Homo sapien
tagctccgttataattactttgcaa

SEQ ID NO: 4913799 - DNA, 25 bp, Homo sapien
tgccttgcttagtctaaggactgtc

SEQ ID NO: 4913800 - DNA, 25 bp, Homo sapien
ggagcctagccttcccaaagtcctg

SEQ ID NO: 4913801 - DNA, 25 bp, Homo sapien
ggactgtcttcccaatttcagcatt

SEQ ID NO: 4913802 - DNA, 25 bp, Homo sapien
tgtcttcccaatttcagcattctgt

SEQ ID NO: 4913803 - DNA, 25 bp, Homo sapien
tgtcattattgattagtgacaccca

SEQ ID NO: 4913804 - DNA, 25 bp, Homo sapien
agcctttggaaacttcggcttcaag

SEQ ID NO: 4913805 - DNA, 25 bp, Homo sapien
tcagaaagcaagctccttgggagtg

SEQ ID NO: 4913806 - DNA, 25 bp, Homo sapien
gtgacacccattcttttagtaaagc

SEQ ID NO: 4913807 - DNA, 25 bp, Homo sapien
aggtccttgagcttattcccctgga

SEQ ID NO: 4913808 - DNA, 25 bp, Homo sapien
aatccctagcatgcattgagtccag

SEQ ID NO: 4913809 - DNA, 25 bp, Homo sapien
agttgtccacgcaatgatgtccaaa

SEQ ID NO: 4913810 - DNA, 25 bp, Homo sapien
taatcagggttagagctaggccagc

SEQ ID NO: 4913811 - DNA, 25 bp, Homo sapien
tgtactgcttaagagatggcagtga

SEQ ID NO: 4913812 - DNA, 25 bp, Homo sapien
ttatgttcgtgctacccagacacaa

SEQ ID NO: 4913813 - DNA, 25 bp, Homo sapien
tgctacccagacacaatctgtactg

SEQ ID NO: 4913814 - DNA, 25 bp, Homo sapien
gacacaatctgtactgcttaagaga

SEQ ID NO: 4913815 - DNA, 25 bp, Homo sapien
ttaaataattcttggcaatcgaacc

SEQ ID NO: 4913816 - DNA, 25 bp, Homo sapien
tttcaaatgaattattccgcagaag

SEQ ID NO: 4913817 - DNA, 25 bp, Homo sapien
tcttggcaatcgaacctgattttca

SEQ ID NO: 4913818 - DNA, 25 bp, Homo sapien
gaattattccgcagaagtttaatat

SEQ ID NO: 4913819 - DNA, 25 bp, Homo sapien
gatataaccggattcaacatgggca

SEQ ID NO: 4913820 - DNA, 25 bp, Homo sapien
tcagcgccgaagtccagaaaacagt

SEQ ID NO: 4913821 - DNA, 25 bp, Homo sapien
gccaatttgtaagacgatcccgccg

SEQ ID NO: 4913822 - DNA, 25 bp, Homo sapien
gatcgaggtcatgcgcatctagcca

SEQ ID NO: 4913823 - DNA, 25 bp, Homo sapien
tcaatgaggagacacgcaaaagttc

SEQ ID NO: 4913824 - DNA, 25 bp, Homo sapien
gcagttgtctaaaagccctcccagt

SEQ ID NO: 4913825 - DNA, 25 bp, Homo sapien
ccaagacatgggagatgacagctgt

SEQ ID NO: 4913826 - DNA, 25 bp, Homo sapien
aaatgcccatctctaaccactacgg

SEQ ID NO: 4913827 - DNA, 25 bp, Homo sapien
cctggtggtttgaaacaggctctga

SEQ ID NO: 4913828 - DNA, 25 bp, Homo sapien
atttccaaaagcaggctggcctggt

SEQ ID NO: 4913829 - DNA, 25 bp, Homo sapien
tggtggtttgaaacaggctctgagt

SEQ ID NO: 4913830 - DNA, 25 bp, Homo sapien
tggcctggtggtttgaaacaggctc

SEQ ID NO: 4913831 - DNA, 25 bp, Homo sapien
tttgaaagtcaagtctcagccggga

SEQ ID NO: 4913832 - DNA, 25 bp, Homo sapien
gcaagaaagttttactgagccctcc

SEQ ID NO: 4913833 - DNA, 25 bp, Homo sapien
tgcacgcacgcaaacagatttaaag

SEQ ID NO: 4913834 - DNA, 25 bp, Homo sapien
gcatcttagtgggtagacaggttac

SEQ ID NO: 4913835 - DNA, 25 bp, Homo sapien
gtgtttttgtatgtatatggcacat

SEQ ID NO: 4913836 - DNA, 25 bp, Homo sapien
tgtatgtatatggcacattttaatt

SEQ ID NO: 4913837 - DNA, 25 bp, Homo sapien
tgtatatggcacattttaattaatt

SEQ ID NO: 4913838 - DNA, 25 bp, Homo sapien
gtttttgtatgtatatggcacattt

SEQ ID NO: 4913839 - DNA, 25 bp, Homo sapien
caagttgaaacatacagtgaatatt

SEQ ID NO: 4913840 - DNA, 25 bp, Homo sapien
ttgaaacatacagtgaatattagaa

SEQ ID NO: 4913841 - DNA, 25 bp, Homo sapien
gcaagttgaaacatacagtgaatat

SEQ ID NO: 4913842 - DNA, 25 bp, Homo sapien
agttgaaacatacagtgaatattag

SEQ ID NO: 4913843 - DNA, 25 bp, Homo sapien
ttatgataaattttaaccagagtta

SEQ ID NO: 4913844 - DNA, 25 bp, Homo sapien
aaattatgataaattttaaccagag

SEQ ID NO: 4913845 - DNA, 25 bp, Homo sapien
aattatgataaattttaaccagagt

SEQ ID NO: 4913846 - DNA, 25 bp, Homo sapien
attatgataaattttaaccagagtt

SEQ ID NO: 4913847 - DNA, 25 bp, Homo sapien
tactactcatttagtctgattctct

SEQ ID NO: 4913848 - DNA, 25 bp, Homo sapien
gaatgggccttactactcatttagt

SEQ ID NO: 4913849 - DNA, 25 bp, Homo sapien
aaactagaatgggccttactactca

SEQ ID NO: 4913850 - DNA, 25 bp, Homo sapien
gggccttactactcatttagtctga

SEQ ID NO: 4913851 - DNA, 25 bp, Homo sapien
caagatgataccatgaacccaggat

SEQ ID NO: 4913852 - DNA, 25 bp, Homo sapien
tctgtaagaccctaaagtgcatgct

SEQ ID NO: 4913853 - DNA, 25 bp, Homo sapien
gaggagtccctagctggtttcataa

SEQ ID NO: 4913854 - DNA, 25 bp, Homo sapien
gaaacctttgagcagccataggaga

SEQ ID NO: 4913855 - DNA, 25 bp, Homo sapien
ggttttgcctctgctaataagtgca

SEQ ID NO: 4913856 - DNA, 25 bp, Homo sapien
gcaatgaagcatgctgctcccctca

SEQ ID NO: 4913857 - DNA, 25 bp, Homo sapien
ccttccagatggctttgccatgatt

SEQ ID NO: 4913858 - DNA, 25 bp, Homo sapien
ttttacttgccatctcatttccact

SEQ ID NO: 4913859 - DNA, 25 bp, Homo sapien
ttccttcaaatgtggcttcctttat

SEQ ID NO: 4913860 - DNA, 25 bp, Homo sapien
ccgttctgttgtctagatggcttcc

SEQ ID NO: 4913861 - DNA, 25 bp, Homo sapien
aaagtgtccgttctgttgtctagat

SEQ ID NO: 4913862 - DNA, 25 bp, Homo sapien
tccttcaaatgtggcttcctttata

SEQ ID NO: 4913863 - DNA, 25 bp, Homo sapien
tggaatcactgagcagtccaaggga

SEQ ID NO: 4913864 - DNA, 25 bp, Homo sapien
tgtggaatcactgagcagtccaagg

SEQ ID NO: 4913865 - DNA, 25 bp, Homo sapien
cttcaattagacagtactgccggag

SEQ ID NO: 4913866 - DNA, 25 bp, Homo sapien
agtactgccggagaaaacattctgt

SEQ ID NO: 4913867 - DNA, 25 bp, Homo sapien
tggctccagcaacgccccaccctac

SEQ ID NO: 4913868 - DNA, 25 bp, Homo sapien
gctccagcaacgccccaccctactc

SEQ ID NO: 4913869 - DNA, 25 bp, Homo sapien
ctggctccagcaacgccccacccta

SEQ ID NO: 4913870 - DNA, 25 bp, Homo sapien
gagctggctccagcaacgccccacc

SEQ ID NO: 4913871 - DNA, 25 bp, Homo sapien
tgaattttggtctcttcctcaaggt

SEQ ID NO: 4913872 - DNA, 25 bp, Homo sapien
aagccactttgtgaattttggtctc

SEQ ID NO: 4913873 - DNA, 25 bp, Homo sapien
tcaagccactttgtgaattttggtc

SEQ ID NO: 4913874 - DNA, 25 bp, Homo sapien
ttgtgaattttggtctcttcctcaa

SEQ ID NO: 4913875 - DNA, 25 bp, Homo sapien
tactgacatccaaagagggtttctg

SEQ ID NO: 4913876 - DNA, 25 bp, Homo sapien
gaagaccccatgtgagagaataatc

SEQ ID NO: 4913877 - DNA, 25 bp, Homo sapien
gaataatcaggaatgtaatccacag

SEQ ID NO: 4913878 - DNA, 25 bp, Homo sapien
tttgtgtactgacatccaaagaggg

SEQ ID NO: 4913879 - DNA, 25 bp, Homo sapien
ggccaagacctcagactagcagagg

SEQ ID NO: 4913880 - DNA, 25 bp, Homo sapien
cacttgcttcaaacagggccaagac

SEQ ID NO: 4913881 - DNA, 25 bp, Homo sapien
acttgcttcaaacagggccaagacc

SEQ ID NO: 4913882 - DNA, 25 bp, Homo sapien
ccagtcaaatttctgactagtttgc

SEQ ID NO: 4913883 - DNA, 25 bp, Homo sapien
caaatttctgactagtttgccagtc

SEQ ID NO: 4913884 - DNA, 25 bp, Homo sapien
gtcaaatttctgactagtttgccag

SEQ ID NO: 4913885 - DNA, 25 bp, Homo sapien
cagtcaaatttctgactagtttgcc

SEQ ID NO: 4913886 - DNA, 25 bp, Homo sapien
tctaactcatagacaataggaatac

SEQ ID NO: 4913887 - DNA, 25 bp, Homo sapien
attcatggtctcttcgttccctagg

SEQ ID NO: 4913888 - DNA, 25 bp, Homo sapien
gaataccagttgacaggctgtgctc

SEQ ID NO: 4913889 - DNA, 25 bp, Homo sapien
taggaactgcataggcttgatggat

SEQ ID NO: 4913890 - DNA, 25 bp, Homo sapien
catgatgtttgataatatattgaga

SEQ ID NO: 4913891 - DNA, 25 bp, Homo sapien
tctgtcccatgacacgacgttcatg

SEQ ID NO: 4913892 - DNA, 25 bp, Homo sapien
gtcccatgacacgacgttcatgttc

SEQ ID NO: 4913893 - DNA, 25 bp, Homo sapien
ccaaacatgatgtttgataatatat

SEQ ID NO: 4913894 - DNA, 25 bp, Homo sapien
gccttccctgtaggaacatttctgc

SEQ ID NO: 4913895 - DNA, 25 bp, Homo sapien
ttcctttatttggatactgccccag

SEQ ID NO: 4913896 - DNA, 25 bp, Homo sapien
tatttggatactgccccagggttta

SEQ ID NO: 4913897 - DNA, 25 bp, Homo sapien
tggatactgccccagggtttaggca

SEQ ID NO: 4913898 - DNA, 25 bp, Homo sapien
tactgccccagggtttaggcagctg

SEQ ID NO: 4913899 - DNA, 25 bp, Homo sapien
gtctctgcacgtgaagaaagccttt

SEQ ID NO: 4913900 - DNA, 25 bp, Homo sapien
tctctgcacgtgaagaaagcctttc

SEQ ID NO: 4913901 - DNA, 25 bp, Homo sapien
ctctgcacgtgaagaaagcctttca

SEQ ID NO: 4913902 - DNA, 25 bp, Homo sapien
cacacataacaatattaactttaaa

SEQ ID NO: 4913903 - DNA, 25 bp, Homo sapien
aatatcataatgacaagaccaaatt

SEQ ID NO: 4913904 - DNA, 25 bp, Homo sapien
cagctaatatcataatgacaagacc

SEQ ID NO: 4913905 - DNA, 25 bp, Homo sapien
tcacacataacaatattaactttaa

SEQ ID NO: 4913906 - DNA, 25 bp, Homo sapien
tagtctgcatgacaaattcctgttg

SEQ ID NO: 4913907 - DNA, 25 bp, Homo sapien
aagaaactcagcaaaccagatggag

SEQ ID NO: 4913908 - DNA, 25 bp, Homo sapien
caaattcctgttgctgccctaagaa

SEQ ID NO: 4913909 - DNA, 25 bp, Homo sapien
agtttcatcaactccatgtatcaga

SEQ ID NO: 4913910 - DNA, 25 bp, Homo sapien
tggagcaagtgccttgacaggccct

SEQ ID NO: 4913911 - DNA, 25 bp, Homo sapien
tgcatgtaaaacagcagtagcacag

SEQ ID NO: 4913912 - DNA, 25 bp, Homo sapien
tagcacagactggagcaagtgcctt

SEQ ID NO: 4913913 - DNA, 25 bp, Homo sapien
gcaagtgccttgacaggccctccat

SEQ ID NO: 4913914 - DNA, 25 bp, Homo sapien
gaaagatacatgtcccaagaaccct

SEQ ID NO: 4913915 - DNA, 25 bp, Homo sapien
cttgaaagatacatgtcccaagaac

SEQ ID NO: 4913916 - DNA, 25 bp, Homo sapien
tgaaagatacatgtcccaagaaccc

SEQ ID NO: 4913917 - DNA, 25 bp, Homo sapien
aaagatacatgtcccaagaaccctg

SEQ ID NO: 4913918 - DNA, 25 bp, Homo sapien
tggataatttacgacctgcaagttt

SEQ ID NO: 4913919 - DNA, 25 bp, Homo sapien
agttttcctctagctgtcctaatgc

SEQ ID NO: 4913920 - DNA, 25 bp, Homo sapien
gataatttacgacctgcaagttttc

SEQ ID NO: 4913921 - DNA, 25 bp, Homo sapien
taatgccaattacttctaatgttcc

SEQ ID NO: 4913922 - DNA, 25 bp, Homo sapien
tcccaaatcaactcggtgcctctgg

SEQ ID NO: 4913923 - DNA, 25 bp, Homo sapien
ttcccaaatcaactcggtgcctctg

SEQ ID NO: 4913924 - DNA, 25 bp, Homo sapien
ccaaatcaactcggtgcctctggtc

SEQ ID NO: 4913925 - DNA, 25 bp, Homo sapien
cccaaatcaactcggtgcctctggt

SEQ ID NO: 4913926 - DNA, 25 bp, Homo sapien
gatttgtctttctgcacagactgca

SEQ ID NO: 4913927 - DNA, 25 bp, Homo sapien
tcaattcctgctcttgtcctctgct

SEQ ID NO: 4913928 - DNA, 25 bp, Homo sapien
tctgcacagactgcagtagatgtac

SEQ ID NO: 4913929 - DNA, 25 bp, Homo sapien
tctgctgtcctgaagtgcttgttga

SEQ ID NO: 4913930 - DNA, 25 bp, Homo sapien
aattcctgccagtaagcttttctga

SEQ ID NO: 4913931 - DNA, 25 bp, Homo sapien
gaatagcactctgaaatctagccag

SEQ ID NO: 4913932 - DNA, 25 bp, Homo sapien
tccagtgcgttaattatatcatttc

SEQ ID NO: 4913933 - DNA, 25 bp, Homo sapien
agttcatagaattcgagggctccag

SEQ ID NO: 4913934 - DNA, 25 bp, Homo sapien
tttctttctgtgttcctactcctct

SEQ ID NO: 4913935 - DNA, 25 bp, Homo sapien
tctttctgtgttcctactcctctgc

SEQ ID NO: 4913936 - DNA, 25 bp, Homo sapien
ttctttctgtgttcctactcctctg

SEQ ID NO: 4913937 - DNA, 25 bp, Homo sapien
agagacactgattctgctttgggag

SEQ ID NO: 4913938 - DNA, 25 bp, Homo sapien
tggcttaggatgactccccagagac

SEQ ID NO: 4913939 - DNA, 25 bp, Homo sapien
gattttccgaaaggccaagttatca

SEQ ID NO: 4913940 - DNA, 25 bp, Homo sapien
ccagagacccatcgtggattccaaa

SEQ ID NO: 4913941 - DNA, 25 bp, Homo sapien
gaacttgtgattttcatcactcttt

SEQ ID NO: 4913942 - DNA, 25 bp, Homo sapien
tatagaacttgtgattttcatcact

SEQ ID NO: 4913943 - DNA, 25 bp, Homo sapien
aaatatagaacttgtgattttcatc

SEQ ID NO: 4913944 - DNA, 25 bp, Homo sapien
tcaaatatagaacttgtgattttca

SEQ ID NO: 4913945 - DNA, 25 bp, Homo sapien
gcagggagttgtgtagcctgcttat

SEQ ID NO: 4913946 - DNA, 25 bp, Homo sapien
tgcagggagttgtgtagcctgctta

SEQ ID NO: 4913947 - DNA, 25 bp, Homo sapien
ctgcagggagttgtgtagcctgctt

SEQ ID NO: 4913948 - DNA, 25 bp, Homo sapien
gagtcatcctctggaataatgacca

SEQ ID NO: 4913949 - DNA, 25 bp, Homo sapien
agtcatcctctggaataatgaccat

SEQ ID NO: 4913950 - DNA, 25 bp, Homo sapien
gattggctcacagttgcctgaatgt

SEQ ID NO: 4913951 - DNA, 25 bp, Homo sapien
gctcacagttgcctgaatgtacagc

SEQ ID NO: 4913952 - DNA, 25 bp, Homo sapien
ctgtgattggctcacagttgcctga

SEQ ID NO: 4913953 - DNA, 25 bp, Homo sapien
agttgcctgaatgtacagctgtccc

SEQ ID NO: 4913954 - DNA, 25 bp, Homo sapien
tcataaatctgagcagcagacattg

SEQ ID NO: 4913955 - DNA, 25 bp, Homo sapien
gcagcagacattgtacagtgtttta

SEQ ID NO: 4913956 - DNA, 25 bp, Homo sapien
tctgagcagcagacattgtacagtg

SEQ ID NO: 4913957 - DNA, 25 bp, Homo sapien
cataaatctgagcagcagacattgt

SEQ ID NO: 4913958 - DNA, 25 bp, Homo sapien
ggctctgacactcagctctttaatt

SEQ ID NO: 4913959 - DNA, 25 bp, Homo sapien
tctgacactcagctctttaatttgg

SEQ ID NO: 4913960 - DNA, 25 bp, Homo sapien
ctctgacactcagctctttaatttg

SEQ ID NO: 4913961 - DNA, 25 bp, Homo sapien
gctctgacactcagctctttaattt

SEQ ID NO: 4913962 - DNA, 25 bp, Homo sapien
tggaacagagtgtctaaatgtgtct

SEQ ID NO: 4913963 - DNA, 25 bp, Homo sapien
tggttgaacttctcgctggaacaga

SEQ ID NO: 4913964 - DNA, 25 bp, Homo sapien
agatctgagttgtgtgtgctgctga

SEQ ID NO: 4913965 - DNA, 25 bp, Homo sapien
cttcagatctgagttgtgtgtgctg

SEQ ID NO: 4913966 - DNA, 25 bp, Homo sapien
tagaacagggatccatcatctgttt

SEQ ID NO: 4913967 - DNA, 25 bp, Homo sapien
atagaacagggatccatcatctgtt

SEQ ID NO: 4913968 - DNA, 25 bp, Homo sapien
ggtaatcaacacaagatctgcagag

SEQ ID NO: 4913969 - DNA, 25 bp, Homo sapien
gagggtaatcaacacaagatctgca

SEQ ID NO: 4913970 - DNA, 25 bp, Homo sapien
taatcaacacaagatctgcagagag

SEQ ID NO: 4913971 - DNA, 25 bp, Homo sapien
aatcaacacaagatctgcagagagc

SEQ ID NO: 4913972 - DNA, 25 bp, Homo sapien
tagcctccagcatcttttccaccat

SEQ ID NO: 4913973 - DNA, 25 bp, Homo sapien
ttttctgatcctccatagcctccag

SEQ ID NO: 4913974 - DNA, 25 bp, Homo sapien
cttttctgatcctccatagcctcca

SEQ ID NO: 4913975 - DNA, 25 bp, Homo sapien
ccatagcctccagcatcttttccac

SEQ ID NO: 4913976 - DNA, 25 bp, Homo sapien
ttctcagcaaactacttgcttgcat

SEQ ID NO: 4913977 - DNA, 25 bp, Homo sapien
gagcagaatgtggcaggagcccttt

SEQ ID NO: 4913978 - DNA, 25 bp, Homo sapien
tgggaaggagcagaatgtggcagga

SEQ ID NO: 4913979 - DNA, 25 bp, Homo sapien
aaggagcagaatgtggcaggagccc

SEQ ID NO: 4913980 - DNA, 25 bp, Homo sapien
ctgcatgggaaggagcagaatgtgg

SEQ ID NO: 4913981 - DNA, 25 bp, Homo sapien
ctacttcatcctcaggacaccactg

SEQ ID NO: 4913982 - DNA, 25 bp, Homo sapien
ttctacttcatcctcaggacaccac

SEQ ID NO: 4913983 - DNA, 25 bp, Homo sapien
tacttcatcctcaggacaccactgc

SEQ ID NO: 4913984 - DNA, 25 bp, Homo sapien
tctacttcatcctcaggacaccact

SEQ ID NO: 4913985 - DNA, 25 bp, Homo sapien
ggtaaggagttctatggctgccatt

SEQ ID NO: 4913986 - DNA, 25 bp, Homo sapien
tggggaggtaaggagttctatggct

SEQ ID NO: 4913987 - DNA, 25 bp, Homo sapien
gaggtaaggagttctatggctgcca

SEQ ID NO: 4913988 - DNA, 25 bp, Homo sapien
gggaggtaaggagttctatggctgc

SEQ ID NO: 4913989 - DNA, 25 bp, Homo sapien
tgggcaggaaagatttgagtcaagc

SEQ ID NO: 4913990 - DNA, 25 bp, Homo sapien
tgctgttctcctttggtcaccccat

SEQ ID NO: 4913991 - DNA, 25 bp, Homo sapien
catctgcggttctatgggatgacgg

SEQ ID NO: 4913992 - DNA, 25 bp, Homo sapien
gatttgagtcaagccaagaacctgc

SEQ ID NO: 4913993 - DNA, 25 bp, Homo sapien
ttttccaaatctcatccaaggtcat

SEQ ID NO: 4913994 - DNA, 25 bp, Homo sapien
tctttttccaaatctcatccaaggt

SEQ ID NO: 4913995 - DNA, 25 bp, Homo sapien
gaggaaatctttttccaaatctcat

SEQ ID NO: 4913996 - DNA, 25 bp, Homo sapien
aaatctttttccaaatctcatccaa

SEQ ID NO: 4913997 - DNA, 25 bp, Homo sapien
gactctctctaaatttctacggaca

SEQ ID NO: 4913998 - DNA, 25 bp, Homo sapien
taaatttctacggacaagagaccag

SEQ ID NO: 4913999 - DNA, 25 bp, Homo sapien
gaggaatgtacaggtatgaaactcc

SEQ ID NO: 4914000 - DNA, 25 bp, Homo sapien
ctgcccttgcaagttctgagactct

SEQ ID NO: 4914001 - DNA, 25 bp, Homo sapien
ggaatggccacaaacaaactatctt

SEQ ID NO: 4914002 - DNA, 25 bp, Homo sapien
gaatggccacaaacaaactatcttc

SEQ ID NO: 4914003 - DNA, 25 bp, Homo sapien
ccttttgtacaaggatactgaaatc

SEQ ID NO: 4914004 - DNA, 25 bp, Homo sapien
actgagtggtgaatattgttgcggc

SEQ ID NO: 4914005 - DNA, 25 bp, Homo sapien
taaactgagtggtgaatattgttgc

SEQ ID NO: 4914006 - DNA, 25 bp, Homo sapien
attccccttttgtacaaggatactg

SEQ ID NO: 4914007 - DNA, 25 bp, Homo sapien
caaaaccactttatgagtgtgtggc

SEQ ID NO: 4914008 - DNA, 25 bp, Homo sapien
gcacgttaatgacaccagtgcccag

SEQ ID NO: 4914009 - DNA, 25 bp, Homo sapien
gcccaggtggccaaatttatgtcca

SEQ ID NO: 4914010 - DNA, 25 bp, Homo sapien
caggaggatgaattggtaatgaacc

SEQ ID NO: 4914011 - DNA, 25 bp, Homo sapien
gcagtctaccatgcaagtactaata

SEQ ID NO: 4914012 - DNA, 25 bp, Homo sapien
gagagcaggtgagatcaggcacgtt

SEQ ID NO: 4914013 - DNA, 25 bp, Homo sapien
tctaccatgcaagtactaataggcc

SEQ ID NO: 4914014 - DNA, 25 bp, Homo sapien
accatgcaagtactaataggcctaa

SEQ ID NO: 4914015 - DNA, 25 bp, Homo sapien
cccaaggctggtcctctttgtctct

SEQ ID NO: 4914016 - DNA, 25 bp, Homo sapien
cagatcttaacaggtttctgttgag

SEQ ID NO: 4914017 - DNA, 25 bp, Homo sapien
gatcttaacaggtttctgttgagcc

SEQ ID NO: 4914018 - DNA, 25 bp, Homo sapien
aacactatggaaacttcccaggtga

SEQ ID NO: 4914019 - DNA, 25 bp, Homo sapien
ctatggaaacttcccaggtgacttt

SEQ ID NO: 4914020 - DNA, 25 bp, Homo sapien
ccagcatggcccctgtgttatttat

SEQ ID NO: 4914021 - DNA, 25 bp, Homo sapien
ttcccagtaacatggtgaaaggaag

SEQ ID NO: 4914022 - DNA, 25 bp, Homo sapien
ggcccctgtgttatttatgctttga

SEQ ID NO: 4914023 - DNA, 25 bp, Homo sapien
aatgtgcacaaagctactctccact

SEQ ID NO: 4914024 - DNA, 25 bp, Homo sapien
ccatcctgaagtgaatttatctcct

SEQ ID NO: 4914025 - DNA, 25 bp, Homo sapien
ggcatgtaacttgccattggtcccc

SEQ ID NO: 4914026 - DNA, 25 bp, Homo sapien
tttcagctgctaaacagggggcatg

SEQ ID NO: 4914027 - DNA, 25 bp, Homo sapien
ccaactgcgagaattgtggatgtaa

SEQ ID NO: 4914028 - DNA, 25 bp, Homo sapien
aacataagacctggatatcccaaga

SEQ ID NO: 4914029 - DNA, 25 bp, Homo sapien
gaaccgctacgtgaaatttctccac

SEQ ID NO: 4914030 - DNA, 25 bp, Homo sapien
tggatatcccaagaaccgctacgtg

SEQ ID NO: 4914031 - DNA, 25 bp, Homo sapien
caagaaccgctacgtgaaatttctc

SEQ ID NO: 4914032 - DNA, 25 bp, Homo sapien
tagtaatgtacaacgccaatgtggg

SEQ ID NO: 4914033 - DNA, 25 bp, Homo sapien
aatgtggggaataagaactgtggtc

SEQ ID NO: 4914034 - DNA, 25 bp, Homo sapien
actgtagtaatgtacaacgccaatg

SEQ ID NO: 4914035 - DNA, 25 bp, Homo sapien
tttcaaactgtagtaatgtacaacg

SEQ ID NO: 4914036 - DNA, 25 bp, Homo sapien
gccactcctcactggacccgtcact

SEQ ID NO: 4914037 - DNA, 25 bp, Homo sapien
cctcactggacccgtcacttgccat

SEQ ID NO: 4914038 - DNA, 25 bp, Homo sapien
cactcctcactggacccgtcacttg

SEQ ID NO: 4914039 - DNA, 25 bp, Homo sapien
ctcctcactggacccgtcacttgcc

SEQ ID NO: 4914040 - DNA, 25 bp, Homo sapien
ggaaacatggtgatgttatgctcat

SEQ ID NO: 4914041 - DNA, 25 bp, Homo sapien
gaggaaacatggtgatgttatgctc

SEQ ID NO: 4914042 - DNA, 25 bp, Homo sapien
aggaaacatggtgatgttatgctca

SEQ ID NO: 4914043 - DNA, 25 bp, Homo sapien
tgaggaaacatggtgatgttatgct

SEQ ID NO: 4914044 - DNA, 25 bp, Homo sapien
tccaacatttggaaaaatccaacta

SEQ ID NO: 4914045 - DNA, 25 bp, Homo sapien
ttagttgggtggagagatctgcatt

SEQ ID NO: 4914046 - DNA, 25 bp, Homo sapien
tctgaagctgattaaaccgctctac

SEQ ID NO: 4914047 - DNA, 25 bp, Homo sapien
ccatttagttgggtggagagatctg

SEQ ID NO: 4914048 - DNA, 25 bp, Homo sapien
gcctgttgtgagacgtaaaccctgt

SEQ ID NO: 4914049 - DNA, 25 bp, Homo sapien
tggtccacagttgcaatgcagtagc

SEQ ID NO: 4914050 - DNA, 25 bp, Homo sapien
actcaaagggcattctttctcctaa

SEQ ID NO: 4914051 - DNA, 25 bp, Homo sapien
tccattaccctttatggaaaactca

SEQ ID NO: 4914052 - DNA, 25 bp, Homo sapien
ggactgcaggggagcgtgacacagc

SEQ ID NO: 4914053 - DNA, 25 bp, Homo sapien
gagtagtggtgccagggaacatgga

SEQ ID NO: 4914054 - DNA, 25 bp, Homo sapien
tccttcattacttccatagaccctg

SEQ ID NO: 4914055 - DNA, 25 bp, Homo sapien
cacagccgcagagactgtggcccct

SEQ ID NO: 4914056 - DNA, 25 bp, Homo sapien
tatttgcctacagctaataaacggt

SEQ ID NO: 4914057 - DNA, 25 bp, Homo sapien
gaaatagcctcttcgtatttgccta

SEQ ID NO: 4914058 - DNA, 25 bp, Homo sapien
gcctcttcgtatttgcctacagcta

SEQ ID NO: 4914059 - DNA, 25 bp, Homo sapien
gtatttgcctacagctaataaacgg

SEQ ID NO: 4914060 - DNA, 25 bp, Homo sapien
gagcctgctcagactgtgtcagctt

SEQ ID NO: 4914061 - DNA, 25 bp, Homo sapien
ttacttccaatacatggctctgctg

SEQ ID NO: 4914062 - DNA, 25 bp, Homo sapien
gaatctcaggcagacatttctctgt

SEQ ID NO: 4914063 - DNA, 25 bp, Homo sapien
gctttcaatcttgcttcaccctggg

SEQ ID NO: 4914064 - DNA, 25 bp, Homo sapien
tgaatgtggtggcaagctccataac

SEQ ID NO: 4914065 - DNA, 25 bp, Homo sapien
gcaagctccataactctgatgtttc

SEQ ID NO: 4914066 - DNA, 25 bp, Homo sapien
aatgtggtggcaagctccataactc

SEQ ID NO: 4914067 - DNA, 25 bp, Homo sapien
ggtggcaagctccataactctgatg

SEQ ID NO: 4914068 - DNA, 25 bp, Homo sapien
gaatgtccttggctttcccagtatt

SEQ ID NO: 4914069 - DNA, 25 bp, Homo sapien
tccttggctttcccagtatttgctg

SEQ ID NO: 4914070 - DNA, 25 bp, Homo sapien
ggaatgtccttggctttcccagtat

SEQ ID NO: 4914071 - DNA, 25 bp, Homo sapien
tgtccttggctttcccagtatttgc

SEQ ID NO: 4914072 - DNA, 25 bp, Homo sapien
atatcctcagagagctccataagag

SEQ ID NO: 4914073 - DNA, 25 bp, Homo sapien
tcagagagctccataagaggaagtt

SEQ ID NO: 4914074 - DNA, 25 bp, Homo sapien
tcctttcagaatatcctcagagagc

SEQ ID NO: 4914075 - DNA, 25 bp, Homo sapien
aaatcctttcagaatatcctcagag

SEQ ID NO: 4914076 - DNA, 25 bp, Homo sapien
aaggagcacccctggatgctgctgc

SEQ ID NO: 4914077 - DNA, 25 bp, Homo sapien
ttgcagctatcttcttgtgtttccc

SEQ ID NO: 4914078 - DNA, 25 bp, Homo sapien
tctgggatgaaggagcacccctgga

SEQ ID NO: 4914079 - DNA, 25 bp, Homo sapien
tgcttccttgggctttgcagctatc

SEQ ID NO: 4914080 - DNA, 25 bp, Homo sapien
tgccaggtttgtgtgggttgtaaat

SEQ ID NO: 4914081 - DNA, 25 bp, Homo sapien
ggagcctgatccaatgtagcaagac

SEQ ID NO: 4914082 - DNA, 25 bp, Homo sapien
cattaggctctgatctgtgccaggt

SEQ ID NO: 4914083 - DNA, 25 bp, Homo sapien
gtagcaagacccattaggctctgat

SEQ ID NO: 4914084 - DNA, 25 bp, Homo sapien
cattctttccacagcatatcccttg

SEQ ID NO: 4914085 - DNA, 25 bp, Homo sapien
tctttccacagcatatcccttggtg

SEQ ID NO: 4914086 - DNA, 25 bp, Homo sapien
cacagcatatcccttggtgtcatca

SEQ ID NO: 4914087 - DNA, 25 bp, Homo sapien
tatcccttggtgtcatcatcagaaa

SEQ ID NO: 4914088 - DNA, 25 bp, Homo sapien
tctaaagtgtctttctttctcttca

SEQ ID NO: 4914089 - DNA, 25 bp, Homo sapien
ttcttgtctaaagtgtctttctttc

SEQ ID NO: 4914090 - DNA, 25 bp, Homo sapien
ttgtctaaagtgtctttctttctct

SEQ ID NO: 4914091 - DNA, 25 bp, Homo sapien
ctaaagtgtctttctttctcttcat

SEQ ID NO: 4914092 - DNA, 25 bp, Homo sapien
gaagggaagggctgcttctcattac

SEQ ID NO: 4914093 - DNA, 25 bp, Homo sapien
cttgaagggaagggctgcttctcat

SEQ ID NO: 4914094 - DNA, 25 bp, Homo sapien
aagggctgcttctcattactctgta

SEQ ID NO: 4914095 - DNA, 25 bp, Homo sapien
gggaagggctgcttctcattactct

SEQ ID NO: 4914096 - DNA, 25 bp, Homo sapien
gagctgtaatgagacttgggttgca

SEQ ID NO: 4914097 - DNA, 25 bp, Homo sapien
gcacggcacgggtattgagctgtaa

SEQ ID NO: 4914098 - DNA, 25 bp, Homo sapien
agactgctcgtctcatatctccgga

SEQ ID NO: 4914099 - DNA, 25 bp, Homo sapien
taatcatgactcttttctggaatct

SEQ ID NO: 4914100 - DNA, 25 bp, Homo sapien
tttaccctgttgattcagctggcag

SEQ ID NO: 4914101 - DNA, 25 bp, Homo sapien
agcactcctgcggccagaagggata

SEQ ID NO: 4914102 - DNA, 25 bp, Homo sapien
tacagcactcctgcggccagaaggg

SEQ ID NO: 4914103 - DNA, 25 bp, Homo sapien
ttacagcactcctgcggccagaagg

SEQ ID NO: 4914104 - DNA, 25 bp, Homo sapien
cagcactcctgcggccagaagggat

SEQ ID NO: 4914105 - DNA, 25 bp, Homo sapien
aactgcgacgagatgggaactttct

SEQ ID NO: 4914106 - DNA, 25 bp, Homo sapien
tagtgcgtatttctgtctcggagtc

SEQ ID NO: 4914107 - DNA, 25 bp, Homo sapien
aattaagcagcaattcccgcgctgg

SEQ ID NO: 4914108 - DNA, 25 bp, Homo sapien
tccatcacttgtgcgtagcggagaa

SEQ ID NO: 4914109 - DNA, 25 bp, Homo sapien
gcgtgtgtctgtattccggagcttg

SEQ ID NO: 4914110 - DNA, 25 bp, Homo sapien
cgtgtgtctgtattccggagcttgg

SEQ ID NO: 4914111 - DNA, 25 bp, Homo sapien
agcttgggaggggtaccaagtcgag

SEQ ID NO: 4914112 - DNA, 25 bp, Homo sapien
tgtgtctgtattccggagcttggga

SEQ ID NO: 4914113 - DNA, 25 bp, Homo sapien
aaacccggcctcagatctcttcgga

SEQ ID NO: 4914114 - DNA, 25 bp, Homo sapien
tttatcttccccatccacgtgcgcc

SEQ ID NO: 4914115 - DNA, 25 bp, Homo sapien
aaccatcttccctgtagctcatttg

SEQ ID NO: 4914116 - DNA, 25 bp, Homo sapien
tcggacttgacctagcatagtgtgt

SEQ ID NO: 4914117 - DNA, 25 bp, Homo sapien
caaccgatggagacgcagtaagcga

SEQ ID NO: 4914118 - DNA, 25 bp, Homo sapien
actgccaaggcaaccgatggagacg

SEQ ID NO: 4914119 - DNA, 25 bp, Homo sapien
cgcagtaagcgaggtgggtccctct

SEQ ID NO: 4914120 - DNA, 25 bp, Homo sapien
ccaaggcaaccgatggagacgcagt

SEQ ID NO: 4914121 - DNA, 25 bp, Homo sapien
atgctgatcgcgctgaactgaccgg

SEQ ID NO: 4914122 - DNA, 25 bp, Homo sapien
tcttgtctctcaggttcgtggcgga

SEQ ID NO: 4914123 - DNA, 25 bp, Homo sapien
gaccgcccagatgcagtttcgcctt

SEQ ID NO: 4914124 - DNA, 25 bp, Homo sapien
cagttcctagactttgagaggcgtc

SEQ ID NO: 4914125 - DNA, 25 bp, Homo sapien
gggacgtgcgaaggcgcagctgcct

SEQ ID NO: 4914126 - DNA, 25 bp, Homo sapien
ttgggacgtgcgaaggcgcagctgc

SEQ ID NO: 4914127 - DNA, 25 bp, Homo sapien
ctttaaattgggacgtgcgaaggcg

SEQ ID NO: 4914128 - DNA, 25 bp, Homo sapien
ttaaattgggacgtgcgaaggcgca

SEQ ID NO: 4914129 - DNA, 25 bp, Homo sapien
ctaggcagtgggttcgcttcctcct

SEQ ID NO: 4914130 - DNA, 25 bp, Homo sapien
taggcagtgggttcgcttcctcctt

SEQ ID NO: 4914131 - DNA, 25 bp, Homo sapien
aggcagtgggttcgcttcctccttc

SEQ ID NO: 4914132 - DNA, 25 bp, Homo sapien
gcagaggttgctaattcactgatta

SEQ ID NO: 4914133 - DNA, 25 bp, Homo sapien
tcactgattataatcaccttcctct

SEQ ID NO: 4914134 - DNA, 25 bp, Homo sapien
ggattaagccgctccgcggctcgtg

SEQ ID NO: 4914135 - DNA, 25 bp, Homo sapien
gcagctgcccgctctggattaagcc

SEQ ID NO: 4914136 - DNA, 25 bp, Homo sapien
cgcaggaagcgacacaattggttag

SEQ ID NO: 4914137 - DNA, 25 bp, Homo sapien
tcttagctgtgaagtgaccgtggag

SEQ ID NO: 4914138 - DNA, 25 bp, Homo sapien
tggactccaaatggcctaagagcgt

SEQ ID NO: 4914139 - DNA, 25 bp, Homo sapien
taagagcgttcttttagccctgcgc

SEQ ID NO: 4914140 - DNA, 25 bp, Homo sapien
ggtctgcatctccatcggaaagtgc

SEQ ID NO: 4914141 - DNA, 25 bp, Homo sapien
tcagccggtctgcatctccatcgga

SEQ ID NO: 4914142 - DNA, 25 bp, Homo sapien
ccatcggaaagtgcgcttgccacat

SEQ ID NO: 4914143 - DNA, 25 bp, Homo sapien
gcatctccatcggaaagtgcgcttg

SEQ ID NO: 4914144 - DNA, 25 bp, Homo sapien
tctggaaagcccgaagaggattcgc

SEQ ID NO: 4914145 - DNA, 25 bp, Homo sapien
ttggaactgaccctagagggctgga

SEQ ID NO: 4914146 - DNA, 25 bp, Homo sapien
aagttaggcgcgctgttggctgtca

SEQ ID NO: 4914147 - DNA, 25 bp, Homo sapien
tccgaggcagcctagacttagatgc

SEQ ID NO: 4914148 - DNA, 25 bp, Homo sapien
cttctttctggaagttctggcctac

SEQ ID NO: 4914149 - DNA, 25 bp, Homo sapien
tctttctggaagttctggcctactc

SEQ ID NO: 4914150 - DNA, 25 bp, Homo sapien
tctggaagttctggcctactcttca

SEQ ID NO: 4914151 - DNA, 25 bp, Homo sapien
tttctggaagttctggcctactctt

SEQ ID NO: 4914152 - DNA, 25 bp, Homo sapien
tggtgcatcattgtaaacaaagact

SEQ ID NO: 4914153 - DNA, 25 bp, Homo sapien
acaaagactagcctttccaaagcca

SEQ ID NO: 4914154 - DNA, 25 bp, Homo sapien
tggaggcaaagctgatacaactgtt

SEQ ID NO: 4914155 - DNA, 25 bp, Homo sapien
cactttgctgcgtaatggtgcatca

SEQ ID NO: 4914156 - DNA, 25 bp, Homo sapien
atgtggttgtagttggaaggaccac

SEQ ID NO: 4914157 - DNA, 25 bp, Homo sapien
acctgatgtggttgtagttggaagg

SEQ ID NO: 4914158 - DNA, 25 bp, Homo sapien
tgatgtggttgtagttggaaggacc

SEQ ID NO: 4914159 - DNA, 25 bp, Homo sapien
ctgatgtggttgtagttggaaggac

SEQ ID NO: 4914160 - DNA, 25 bp, Homo sapien
tcacactaggtaggaagcagattct

SEQ ID NO: 4914161 - DNA, 25 bp, Homo sapien
agcagattctcccatcaacttgggc

SEQ ID NO: 4914162 - DNA, 25 bp, Homo sapien
cagattctcccatcaacttgggccc

SEQ ID NO: 4914163 - DNA, 25 bp, Homo sapien
acactaggtaggaagcagattctcc

SEQ ID NO: 4914164 - DNA, 25 bp, Homo sapien
tccactcactgccatgacaatcttg

SEQ ID NO: 4914165 - DNA, 25 bp, Homo sapien
tgttctagctggactggccctttcc

SEQ ID NO: 4914166 - DNA, 25 bp, Homo sapien
cactgccatgacaatcttgttctag

SEQ ID NO: 4914167 - DNA, 25 bp, Homo sapien
gaagctgtgtccagtctgtaccact

SEQ ID NO: 4914168 - DNA, 25 bp, Homo sapien
gaggtggcagatgctctgatgtact

SEQ ID NO: 4914169 - DNA, 25 bp, Homo sapien
gaaagttgccgacttcggctgccct

SEQ ID NO: 4914170 - DNA, 25 bp, Homo sapien
gaagaaggtgactcccagacatgaa

SEQ ID NO: 4914171 - DNA, 25 bp, Homo sapien
cagataatctactctcagggcttga

SEQ ID NO: 4914172 - DNA, 25 bp, Homo sapien
aagaagtctataaagttcactgtgc

SEQ ID NO: 4914173 - DNA, 25 bp, Homo sapien
gagtgattcactatctcttcctaca

SEQ ID NO: 4914174 - DNA, 25 bp, Homo sapien
cctggaattatctggtggttaagaa

SEQ ID NO: 4914175 - DNA, 25 bp, Homo sapien
tctcttcctacatctaaagaatttt

SEQ ID NO: 4914176 - DNA, 25 bp, Homo sapien
tgattcattttcattgcgttcccaa

SEQ ID NO: 4914177 - DNA, 25 bp, Homo sapien
gaactgactgcattgagaaggtact

SEQ ID NO: 4914178 - DNA, 25 bp, Homo sapien
gaaggtacttaaaaatgcgaagcaa

SEQ ID NO: 4914179 - DNA, 25 bp, Homo sapien
cttggtgtaaagaaggactggaaag

SEQ ID NO: 4914180 - DNA, 25 bp, Homo sapien
ctgccatcttttcatatttcttcat

SEQ ID NO: 4914181 - DNA, 25 bp, Homo sapien
gccattttatatcatctgccatctt

SEQ ID NO: 4914182 - DNA, 25 bp, Homo sapien
ccatcttttcatatttcttcatcat

SEQ ID NO: 4914183 - DNA, 25 bp, Homo sapien
cttgccattttatatcatctgccat

SEQ ID NO: 4914184 - DNA, 25 bp, Homo sapien
gacgagtttgctggcacattgaatg

SEQ ID NO: 4914185 - DNA, 25 bp, Homo sapien
cttgcaggaaactctccctagagcc

SEQ ID NO: 4914186 - DNA, 25 bp, Homo sapien
cttgacgagtttgctggcacattga

SEQ ID NO: 4914187 - DNA, 25 bp, Homo sapien
ctccttgcaggaaactctccctaga

SEQ ID NO: 4914188 - DNA, 25 bp, Homo sapien
tcatatagtaaaacacagtgctctg

SEQ ID NO: 4914189 - DNA, 25 bp, Homo sapien
taaaacacagtgctctgtaaccctg

SEQ ID NO: 4914190 - DNA, 25 bp, Homo sapien
catggttctgagcaccaactagcac

SEQ ID NO: 4914191 - DNA, 25 bp, Homo sapien
ctgcatggttctgagcaccaactag

SEQ ID NO: 4914192 - DNA, 25 bp, Homo sapien
gggtcaccacggagggtattgaatc

SEQ ID NO: 4914193 - DNA, 25 bp, Homo sapien
tccagagataagtaatgaaagtcat

SEQ ID NO: 4914194 - DNA, 25 bp, Homo sapien
cccactaagcttaagaatctcacct

SEQ ID NO: 4914195 - DNA, 25 bp, Homo sapien
gcatccaattggttgctccctccat

SEQ ID NO: 4914196 - DNA, 25 bp, Homo sapien
agatatatactgtgtttatggatta

SEQ ID NO: 4914197 - DNA, 25 bp, Homo sapien
ttattaagatgttgatgctttccaa

SEQ ID NO: 4914198 - DNA, 25 bp, Homo sapien
tatactgtgtttatggattaacaaa

SEQ ID NO: 4914199 - DNA, 25 bp, Homo sapien
tattaagatgttgatgctttccaaa

SEQ ID NO: 4914200 - DNA, 25 bp, Homo sapien
tcagaagatggcttgcacataaacc

SEQ ID NO: 4914201 - DNA, 25 bp, Homo sapien
ttgtccagcatatgacatagaccca

SEQ ID NO: 4914202 - DNA, 25 bp, Homo sapien
agaagatggcttgcacataaaccac

SEQ ID NO: 4914203 - DNA, 25 bp, Homo sapien
gcatatgacatagacccattgtttt

SEQ ID NO: 4914204 - DNA, 25 bp, Homo sapien
tggcactaaacgaaaaatacatgag

SEQ ID NO: 4914205 - DNA, 25 bp, Homo sapien
gaagtggttattcaccagaactcac

SEQ ID NO: 4914206 - DNA, 25 bp, Homo sapien
tctctcgactgggaatgggaccatg

SEQ ID NO: 4914207 - DNA, 25 bp, Homo sapien
ccatggtgttatggtatggcactaa

SEQ ID NO: 4914208 - DNA, 25 bp, Homo sapien
aaatgtaatgtgtttgcgggcaagt

SEQ ID NO: 4914209 - DNA, 25 bp, Homo sapien
gaacttacagacttctggttggcca

SEQ ID NO: 4914210 - DNA, 25 bp, Homo sapien
attaactcctaattgagaggctcaa

SEQ ID NO: 4914211 - DNA, 25 bp, Homo sapien
gtaccatgggcattgaggcttaaag

SEQ ID NO: 4914212 - DNA, 25 bp, Homo sapien
aaggtgaattgcttgagtttgggag

SEQ ID NO: 4914213 - DNA, 25 bp, Homo sapien
tgaggaaggtgaattgcttgagttt

SEQ ID NO: 4914214 - DNA, 25 bp, Homo sapien
aggaaggtgaattgcttgagtttgg

SEQ ID NO: 4914215 - DNA, 25 bp, Homo sapien
ctgaggaaggtgaattgcttgagtt

SEQ ID NO: 4914216 - DNA, 25 bp, Homo sapien
tctaaactttatagattacagtggc

SEQ ID NO: 4914217 - DNA, 25 bp, Homo sapien
gtggcaatattagctcatgttactt

SEQ ID NO: 4914218 - DNA, 25 bp, Homo sapien
ttgcagtagcaattttagcagttgc

SEQ ID NO: 4914219 - DNA, 25 bp, Homo sapien
taatatagcctaagattgcagtagc

SEQ ID NO: 4914220 - DNA, 25 bp, Homo sapien
taacaaatcttgtgctggaactcaa

SEQ ID NO: 4914221 - DNA, 25 bp, Homo sapien
tgtataaattaaagctgtgtgaccc

SEQ ID NO: 4914222 - DNA, 25 bp, Homo sapien
tcctgtctgagccacaaaacatttg

SEQ ID NO: 4914223 - DNA, 25 bp, Homo sapien
tggcatattggcaggctaacagtgc

SEQ ID NO: 4914224 - DNA, 25 bp, Homo sapien
tataatattatacagcacagtgagt

SEQ ID NO: 4914225 - DNA, 25 bp, Homo sapien
tttcaacagtcattggcaaaagaga

SEQ ID NO: 4914226 - DNA, 25 bp, Homo sapien
gcattaacagaatcgtatcatgtaa

SEQ ID NO: 4914227 - DNA, 25 bp, Homo sapien
ggagggtgatttaacttgtccttga

SEQ ID NO: 4914228 - DNA, 25 bp, Homo sapien
attggaccttcttagtgataccaac

SEQ ID NO: 4914229 - DNA, 25 bp, Homo sapien
aattggaccttcttagtgataccaa

SEQ ID NO: 4914230 - DNA, 25 bp, Homo sapien
ttggaccttcttagtgataccaaca

SEQ ID NO: 4914231 - DNA, 25 bp, Homo sapien
tggaccttcttagtgataccaacat

SEQ ID NO: 4914232 - DNA, 25 bp, Homo sapien
gagattggaaatcataccttagagc

SEQ ID NO: 4914233 - DNA, 25 bp, Homo sapien
tccttagccagaacctagagaatag

SEQ ID NO: 4914234 - DNA, 25 bp, Homo sapien
aaaatgatatccaaactaaggcaga

SEQ ID NO: 4914235 - DNA, 25 bp, Homo sapien
aacattttgtagtcatccttagcca

SEQ ID NO: 4914236 - DNA, 25 bp, Homo sapien
atcgcgcactttttggatcggcatc

SEQ ID NO: 4914237 - DNA, 25 bp, Homo sapien
catcgcgcactttttggatcggcat

SEQ ID NO: 4914238 - DNA, 25 bp, Homo sapien
tacttgagtcctggcggttgaggct

SEQ ID NO: 4914239 - DNA, 25 bp, Homo sapien
gattacttgagtcctggcggttgag

SEQ ID NO: 4914240 - DNA, 25 bp, Homo sapien
caggtcaagctgataccatgctgct

SEQ ID NO: 4914241 - DNA, 25 bp, Homo sapien
ggctgcaggtcaagctgataccatg

SEQ ID NO: 4914242 - DNA, 25 bp, Homo sapien
ctctgagatactcccaattactgga

SEQ ID NO: 4914243 - DNA, 25 bp, Homo sapien
gggattaaagttctccaaaggcatc

SEQ ID NO: 4914244 - DNA, 25 bp, Homo sapien
acttcacatattacgaggcctcaga

SEQ ID NO: 4914245 - DNA, 25 bp, Homo sapien
gattctttaatgaggatgacagcag

SEQ ID NO: 4914246 - DNA, 25 bp, Homo sapien
cacttatcaacttctgtagagggtc

SEQ ID NO: 4914247 - DNA, 25 bp, Homo sapien
tatcaacttctgtagagggtctttc

SEQ ID NO: 4914248 - DNA, 25 bp, Homo sapien
tttccacttatcaacttctgtagag

SEQ ID NO: 4914249 - DNA, 25 bp, Homo sapien
ttgcctttccacttatcaacttctg

SEQ ID NO: 4914250 - DNA, 25 bp, Homo sapien
tagaacgactcgtgttccatttgtg

SEQ ID NO: 4914251 - DNA, 25 bp, Homo sapien
aacctttctcttagaacgactcgtg

SEQ ID NO: 4914252 - DNA, 25 bp, Homo sapien
gactcgtgttccatttgtggagtac

SEQ ID NO: 4914253 - DNA, 25 bp, Homo sapien
cattgaccaagctgtttctccatga

SEQ ID NO: 4914254 - DNA, 25 bp, Homo sapien
ttattccactgacagcatgtaagag

SEQ ID NO: 4914255 - DNA, 25 bp, Homo sapien
gtgcttattccactgacagcatgta

SEQ ID NO: 4914256 - DNA, 25 bp, Homo sapien
tccactgacagcatgtaagagacat

SEQ ID NO: 4914257 - DNA, 25 bp, Homo sapien
tattccactgacagcatgtaagaga

SEQ ID NO: 4914258 - DNA, 25 bp, Homo sapien
tgtatctcttctgtgacgcttttct

SEQ ID NO: 4914259 - DNA, 25 bp, Homo sapien
tctcttctgtgacgcttttctagaa

SEQ ID NO: 4914260 - DNA, 25 bp, Homo sapien
caccagtcagatataaccacttttt

SEQ ID NO: 4914261 - DNA, 25 bp, Homo sapien
ttttctagaacacaccagtcagata

SEQ ID NO: 4914262 - DNA, 25 bp, Homo sapien
tactagctccgtggatatcacagtc

SEQ ID NO: 4914263 - DNA, 25 bp, Homo sapien
agagacagtggttttacagagacta

SEQ ID NO: 4914264 - DNA, 25 bp, Homo sapien
ctatggctagcacaaggaggatgag

SEQ ID NO: 4914265 - DNA, 25 bp, Homo sapien
gaaaacttctgcatgcttcagagac

SEQ ID NO: 4914266 - DNA, 25 bp, Homo sapien
gtaataaatggtcaagtcagaacac

SEQ ID NO: 4914267 - DNA, 25 bp, Homo sapien
taataaatggtcaagtcagaacact

SEQ ID NO: 4914268 - DNA, 25 bp, Homo sapien
aaagtaataaatggtcaagtcagaa

SEQ ID NO: 4914269 - DNA, 25 bp, Homo sapien
aaatggtcaagtcagaacactaaaa

SEQ ID NO: 4914270 - DNA, 25 bp, Homo sapien
ttctagagttgtagcataggaatga

SEQ ID NO: 4914271 - DNA, 25 bp, Homo sapien
gtagcataggaatgaatggcttcct

SEQ ID NO: 4914272 - DNA, 25 bp, Homo sapien
gagttgtagcataggaatgaatggc

SEQ ID NO: 4914273 - DNA, 25 bp, Homo sapien
ttgtagcataggaatgaatggcttc

SEQ ID NO: 4914274 - DNA, 25 bp, Homo sapien
caccttgtgagatttagattgaaag

SEQ ID NO: 4914275 - DNA, 25 bp, Homo sapien
aaggtgagtttgggggagccttgat

SEQ ID NO: 4914276 - DNA, 25 bp, Homo sapien
gtgagtttgggggagccttgatgca

SEQ ID NO: 4914277 - DNA, 25 bp, Homo sapien
ccaccttgtgagatttagattgaaa

SEQ ID NO: 4914278 - DNA, 25 bp, Homo sapien
tgggattcttcctttgcgctctgaa

SEQ ID NO: 4914279 - DNA, 25 bp, Homo sapien
tcattaacgctcgtcgtgcctgtca

SEQ ID NO: 4914280 - DNA, 25 bp, Homo sapien
taatcgactaaacggataaactcca

SEQ ID NO: 4914281 - DNA, 25 bp, Homo sapien
aagttcccttgaatgccctcgcgct

SEQ ID NO: 4914282 - DNA, 25 bp, Homo sapien
ttctcattggccaagagagcagagg

SEQ ID NO: 4914283 - DNA, 25 bp, Homo sapien
acgcacgtgcacgcggctctgcgga

SEQ ID NO: 4914284 - DNA, 25 bp, Homo sapien
caccgggcggtggagagttacgtag

SEQ ID NO: 4914285 - DNA, 25 bp, Homo sapien
gcagtcacgtgacccgccaccgggc

SEQ ID NO: 4914286 - DNA, 25 bp, Homo sapien
gtgacatcgtaaagctctgagacct

SEQ ID NO: 4914287 - DNA, 25 bp, Homo sapien
cgtaaagctctgagaccttcgccat

SEQ ID NO: 4914288 - DNA, 25 bp, Homo sapien
cttcccaagtgacatcgtaaagctc

SEQ ID NO: 4914289 - DNA, 25 bp, Homo sapien
caagtgacatcgtaaagctctgaga

SEQ ID NO: 4914290 - DNA, 25 bp, Homo sapien
gagcagacaccgtgggaaacgctgc

SEQ ID NO: 4914291 - DNA, 25 bp, Homo sapien
gaaacgctgcagagtacgcgtccgg

SEQ ID NO: 4914292 - DNA, 25 bp, Homo sapien
tcagcttggcccgtacagtgagggc

SEQ ID NO: 4914293 - DNA, 25 bp, Homo sapien
cagcaaccagttagcgtgcgacaac

SEQ ID NO: 4914294 - DNA, 25 bp, Homo sapien
gaaaagtgaccatcacacgtaagca

SEQ ID NO: 4914295 - DNA, 25 bp, Homo sapien
gcaaattagctactgaagtctcctg

SEQ ID NO: 4914296 - DNA, 25 bp, Homo sapien
taagcacacagaattgatccaaggt

SEQ ID NO: 4914297 - DNA, 25 bp, Homo sapien
taagcacttacgtagcccagagtta

SEQ ID NO: 4914298 - DNA, 25 bp, Homo sapien
gcccttgagtttaggacaccaaaca

SEQ ID NO: 4914299 - DNA, 25 bp, Homo sapien
cttcacaggcaccactattgtcttt

SEQ ID NO: 4914300 - DNA, 25 bp, Homo sapien
tctgcttggcccttgagtttaggac

SEQ ID NO: 4914301 - DNA, 25 bp, Homo sapien
cttggcccttgagtttaggacacca

SEQ ID NO: 4914302 - DNA, 25 bp, Homo sapien
tctcccagcttagaagcatattcat

SEQ ID NO: 4914303 - DNA, 25 bp, Homo sapien
tatcatctcccagcttagaagcata

SEQ ID NO: 4914304 - DNA, 25 bp, Homo sapien
ccagcttagaagcatattcattaat

SEQ ID NO: 4914305 - DNA, 25 bp, Homo sapien
tcatctcccagcttagaagcatatt

SEQ ID NO: 4914306 - DNA, 25 bp, Homo sapien
gctgcaatcatcacctgttcatata

SEQ ID NO: 4914307 - DNA, 25 bp, Homo sapien
gaccatagtctagtgctgcaatcat

SEQ ID NO: 4914308 - DNA, 25 bp, Homo sapien
catcacctgttcatatatgatccaa

SEQ ID NO: 4914309 - DNA, 25 bp, Homo sapien
caatgccaagtcatcccgaccatag

SEQ ID NO: 4914310 - DNA, 25 bp, Homo sapien
gcctgttaatcgcttgactctgtga

SEQ ID NO: 4914311 - DNA, 25 bp, Homo sapien
atgcctgttaatcgcttgactctgt

SEQ ID NO: 4914312 - DNA, 25 bp, Homo sapien
cctgttaatcgcttgactctgtgac

SEQ ID NO: 4914313 - DNA, 25 bp, Homo sapien
tcatgcctgttaatcgcttgactct

SEQ ID NO: 4914314 - DNA, 25 bp, Homo sapien
catataacagtaaacgtttactaca

SEQ ID NO: 4914315 - DNA, 25 bp, Homo sapien
aacagagatggaaactctaaaaaag

SEQ ID NO: 4914316 - DNA, 25 bp, Homo sapien
gcatttataatcgttaccgaagtct

SEQ ID NO: 4914317 - DNA, 25 bp, Homo sapien
taaaaactagccacacaagttgaag

SEQ ID NO: 4914318 - DNA, 25 bp, Homo sapien
aaatcctatcatatagctgtatagc

SEQ ID NO: 4914319 - DNA, 25 bp, Homo sapien
taagacctagttccttatgtatcta

SEQ ID NO: 4914320 - DNA, 25 bp, Homo sapien
cctagttccttatgtatctattatt

SEQ ID NO: 4914321 - DNA, 25 bp, Homo sapien
ataagacctagttccttatgtatct

SEQ ID NO: 4914322 - DNA, 25 bp, Homo sapien
tataagacctagttccttatgtatc

SEQ ID NO: 4914323 - DNA, 25 bp, Homo sapien
gcaaatcctgggactcctgaatctg

SEQ ID NO: 4914324 - DNA, 25 bp, Homo sapien
gaatctgttcatgtctcttttttgc

SEQ ID NO: 4914325 - DNA, 25 bp, Homo sapien
tctgttcatgtctcttttttgccat

SEQ ID NO: 4914326 - DNA, 25 bp, Homo sapien
attgcaaatcctgggactcctgaat

SEQ ID NO: 4914327 - DNA, 25 bp, Homo sapien
gtatctactgcagatcggtagctat

SEQ ID NO: 4914328 - DNA, 25 bp, Homo sapien
aaacagtactggacactgaaggaag

SEQ ID NO: 4914329 - DNA, 25 bp, Homo sapien
gaaggaagtatctactgcagatcgg

SEQ ID NO: 4914330 - DNA, 25 bp, Homo sapien
aacagtactggacactgaaggaagt

SEQ ID NO: 4914331 - DNA, 25 bp, Homo sapien
tccagatactcattcagctcccgaa

SEQ ID NO: 4914332 - DNA, 25 bp, Homo sapien
cagatactcattcagctcccgaatg

SEQ ID NO: 4914333 - DNA, 25 bp, Homo sapien
tgttccagatactcattcagctccc

SEQ ID NO: 4914334 - DNA, 25 bp, Homo sapien
gatactcattcagctcccgaatggc

SEQ ID NO: 4914335 - DNA, 25 bp, Homo sapien
catgccaggcttcttggtctccaac

SEQ ID NO: 4914336 - DNA, 25 bp, Homo sapien
catgttcattgatgtaaagttctgc

SEQ ID NO: 4914337 - DNA, 25 bp, Homo sapien
caagttcatgccaggcttcttggtc

SEQ ID NO: 4914338 - DNA, 25 bp, Homo sapien
taaagttctgcaagttcatgccagg

SEQ ID NO: 4914339 - DNA, 25 bp, Homo sapien
gactacctcaatcctctagatcaca

SEQ ID NO: 4914340 - DNA, 25 bp, Homo sapien
catcagttgtttgtagtatgagaac

SEQ ID NO: 4914341 - DNA, 25 bp, Homo sapien
tattttagctcccactttccttaga

SEQ ID NO: 4914342 - DNA, 25 bp, Homo sapien
tttccttagacttatgcaaatagac

SEQ ID NO: 4914343 - DNA, 25 bp, Homo sapien
tctagatataggctaccaaagctgc

SEQ ID NO: 4914344 - DNA, 25 bp, Homo sapien
tctgacattttcgaaactgctacgt

SEQ ID NO: 4914345 - DNA, 25 bp, Homo sapien
caagtctagcctgggaaatgttgta

SEQ ID NO: 4914346 - DNA, 25 bp, Homo sapien
ggaagagtactttagcccaggagct

SEQ ID NO: 4914347 - DNA, 25 bp, Homo sapien
caactgtgacactggtgcataaagc

SEQ ID NO: 4914348 - DNA, 25 bp, Homo sapien
cagagatgtaaactgaatcccaggc

SEQ ID NO: 4914349 - DNA, 25 bp, Homo sapien
taaatgggttgagcacaactgtgac

SEQ ID NO: 4914350 - DNA, 25 bp, Homo sapien
taaaatgggcaggtagtagcagctc

SEQ ID NO: 4914351 - DNA, 25 bp, Homo sapien
aaaaacacatcaagaggagaaatta

SEQ ID NO: 4914352 - DNA, 25 bp, Homo sapien
ctgacagtataagtggttgtgtgga

SEQ ID NO: 4914353 - DNA, 25 bp, Homo sapien
aagtggttgtgtggattagtcatca

SEQ ID NO: 4914354 - DNA, 25 bp, Homo sapien
cagtataagtggttgtgtggattag

SEQ ID NO: 4914355 - DNA, 25 bp, Homo sapien
ctgctgacagtataagtggttgtgt

SEQ ID NO: 4914356 - DNA, 25 bp, Homo sapien
ttcaatgcctgtgcaaaatactttc

SEQ ID NO: 4914357 - DNA, 25 bp, Homo sapien
tcaatgcctgtgcaaaatactttct

SEQ ID NO: 4914358 - DNA, 25 bp, Homo sapien
tttcaatgcctgtgcaaaatacttt

SEQ ID NO: 4914359 - DNA, 25 bp, Homo sapien
gtttcaatgcctgtgcaaaatactt

SEQ ID NO: 4914360 - DNA, 25 bp, Homo sapien
cttcctatttccatttcttcactca

SEQ ID NO: 4914361 - DNA, 25 bp, Homo sapien
ttcttcactcagttccttttcactg

SEQ ID NO: 4914362 - DNA, 25 bp, Homo sapien
atttcttcactcagttccttttcac

SEQ ID NO: 4914363 - DNA, 25 bp, Homo sapien
cttcactcagttccttttcactgag

SEQ ID NO: 4914364 - DNA, 25 bp, Homo sapien
gattagaagcaatatgacttgccga

SEQ ID NO: 4914365 - DNA, 25 bp, Homo sapien
tttttgcacttgcttttggattaga

SEQ ID NO: 4914366 - DNA, 25 bp, Homo sapien
tttgcacttgcttttggattagaag

SEQ ID NO: 4914367 - DNA, 25 bp, Homo sapien
gcttttggattagaagcaatatgac

SEQ ID NO: 4914368 - DNA, 25 bp, Homo sapien
tctgtttatttgactagctgcccaa

SEQ ID NO: 4914369 - DNA, 25 bp, Homo sapien
taagctctgtttatttgactagctg

SEQ ID NO: 4914370 - DNA, 25 bp, Homo sapien
ccaactagcatatttcatgttgtcc

SEQ ID NO: 4914371 - DNA, 25 bp, Homo sapien
gactagctgcccaactagcatattt

SEQ ID NO: 4914372 - DNA, 25 bp, Homo sapien
gagcagcatgaccaacaaaagatta

SEQ ID NO: 4914373 - DNA, 25 bp, Homo sapien
caagcctactctgtgtggaactcca

SEQ ID NO: 4914374 - DNA, 25 bp, Homo sapien
tggaactccattacagatctgagct

SEQ ID NO: 4914375 - DNA, 25 bp, Homo sapien
tgactatgtcatcaagagcagcatg

SEQ ID NO: 4914376 - DNA, 25 bp, Homo sapien
gtgtcaacattactcacaaccagtg

SEQ ID NO: 4914377 - DNA, 25 bp, Homo sapien
cagatttaccagtgcaacaaagaag

SEQ ID NO: 4914378 - DNA, 25 bp, Homo sapien
cctaattgacgagcaaatagtagcc

SEQ ID NO: 4914379 - DNA, 25 bp, Homo sapien
tcactgagatcccaaagatttacct

SEQ ID NO: 4914380 - DNA, 25 bp, Homo sapien
cacttccacttgtctgatgtctaaa

SEQ ID NO: 4914381 - DNA, 25 bp, Homo sapien
tgcaaagagctgtcaagtaaaaacc

SEQ ID NO: 4914382 - DNA, 25 bp, Homo sapien
taaggtcttaccttcagctgaagtg

SEQ ID NO: 4914383 - DNA, 25 bp, Homo sapien
taaatgatatggttctgcaaagagc

SEQ ID NO: 4914384 - DNA, 25 bp, Homo sapien
aattaggctcaatttcagtggcagg

SEQ ID NO: 4914385 - DNA, 25 bp, Homo sapien
taggctcaatttcagtggcaggtta

SEQ ID NO: 4914386 - DNA, 25 bp, Homo sapien
taatgaaacttaacattgactattt

SEQ ID NO: 4914387 - DNA, 25 bp, Homo sapien
cattgactattttatcactagtagg

SEQ ID NO: 4914388 - DNA, 25 bp, Homo sapien
tccaacatgtcttcgacagccttaa

SEQ ID NO: 4914389 - DNA, 25 bp, Homo sapien
catgtcttcgacagccttaagagaa

SEQ ID NO: 4914390 - DNA, 25 bp, Homo sapien
gtttccaacatgtcttcgacagcct

SEQ ID NO: 4914391 - DNA, 25 bp, Homo sapien
aacatgtcttcgacagccttaagag

SEQ ID NO: 4914392 - DNA, 25 bp, Homo sapien
taagttacaggccaataagttcaat

SEQ ID NO: 4914393 - DNA, 25 bp, Homo sapien
tcaattgtgcagttgtgaaatctaa

SEQ ID NO: 4914394 - DNA, 25 bp, Homo sapien
taacaaggttatactacattagagt

SEQ ID NO: 4914395 - DNA, 25 bp, Homo sapien
tccccacttagcagtaaaaggcatt

SEQ ID NO: 4914396 - DNA, 25 bp, Homo sapien
taaaacaattcaaatagcccactgg

SEQ ID NO: 4914397 - DNA, 25 bp, Homo sapien
tcatcagaaggatattacagcagat

SEQ ID NO: 4914398 - DNA, 25 bp, Homo sapien
tgctatcaccagtaaggagttaact

SEQ ID NO: 4914399 - DNA, 25 bp, Homo sapien
tcaaaataatctgcttcggtcagct

SEQ ID NO: 4914400 - DNA, 25 bp, Homo sapien
aaggtagcataatggttgtttatta

SEQ ID NO: 4914401 - DNA, 25 bp, Homo sapien
taaggtaatgatagaataggaaaat

SEQ ID NO: 4914402 - DNA, 25 bp, Homo sapien
agcataatggttgtttattatgaaa

SEQ ID NO: 4914403 - DNA, 25 bp, Homo sapien
actaaggtaatgatagaataggaaa

SEQ ID NO: 4914404 - DNA, 25 bp, Homo sapien
cagcaatgacaagtctgtagatgcc

SEQ ID NO: 4914405 - DNA, 25 bp, Homo sapien
taaacacttctagattgtcaattcc

SEQ ID NO: 4914406 - DNA, 25 bp, Homo sapien
ggttaaaagaagctgatattgacaa

SEQ ID NO: 4914407 - DNA, 25 bp, Homo sapien
taccataaatatttgcggtgaacag

SEQ ID NO: 4914408 - DNA, 25 bp, Homo sapien
ggttagtagctaccacaatagagag

SEQ ID NO: 4914409 - DNA, 25 bp, Homo sapien
aacaatgccatatcagggacccagg

SEQ ID NO: 4914410 - DNA, 25 bp, Homo sapien
cacctttaggcatgctgttggccag

SEQ ID NO: 4914411 - DNA, 25 bp, Homo sapien
tctttgaggaagagggatccttgcc

SEQ ID NO: 4914412 - DNA, 25 bp, Homo sapien
taggagctgagctgcactaagacat

SEQ ID NO: 4914413 - DNA, 25 bp, Homo sapien
tataatccctgatctgctaacaagc

SEQ ID NO: 4914414 - DNA, 25 bp, Homo sapien
acttggaaacccctgacatcctggg

SEQ ID NO: 4914415 - DNA, 25 bp, Homo sapien
cacctctgttggcttagaatgctag

SEQ ID NO: 4914416 - DNA, 25 bp, Homo sapien
aaacagcaagagttttaacgatggg

SEQ ID NO: 4914417 - DNA, 25 bp, Homo sapien
aaatattttgaaatcgttctcatat

SEQ ID NO: 4914418 - DNA, 25 bp, Homo sapien
gaaatcgttctcatatttactgtaa

SEQ ID NO: 4914419 - DNA, 25 bp, Homo sapien
tggaaaacagcaagagttttaacga

SEQ ID NO: 4914420 - DNA, 25 bp, Homo sapien
cacacaatcagtaccaatatcacag

SEQ ID NO: 4914421 - DNA, 25 bp, Homo sapien
cgtctatcactgagctatgtgtcta

SEQ ID NO: 4914422 - DNA, 25 bp, Homo sapien
cacagtcccgattactgtacttatg

SEQ ID NO: 4914423 - DNA, 25 bp, Homo sapien
aattgcttatgtacctttgtcagac

SEQ ID NO: 4914424 - DNA, 25 bp, Homo sapien
ccaggtagctaaacctgtggtggaa

SEQ ID NO: 4914425 - DNA, 25 bp, Homo sapien
ctattctaataggtgttcaatggta

SEQ ID NO: 4914426 - DNA, 25 bp, Homo sapien
tgtgcttattatctgtacagcttct

SEQ ID NO: 4914427 - DNA, 25 bp, Homo sapien
aaatgtctgaaagtggctctgcata

SEQ ID NO: 4914428 - DNA, 25 bp, Homo sapien
tacttggtctattgcaggtagatgt

SEQ ID NO: 4914429 - DNA, 25 bp, Homo sapien
tatttgcaagattaatgtctccaag

SEQ ID NO: 4914430 - DNA, 25 bp, Homo sapien
aggtagatgtttccccagtagtgac

SEQ ID NO: 4914431 - DNA, 25 bp, Homo sapien
ctccaagtttattgctggtggcagc

SEQ ID NO: 4914432 - DNA, 25 bp, Homo sapien
cacaatggtataggtgatgatagtt

SEQ ID NO: 4914433 - DNA, 25 bp, Homo sapien
aacttacacaatggtataggtgatg

SEQ ID NO: 4914434 - DNA, 25 bp, Homo sapien
taaaacttacacaatggtataggtg

SEQ ID NO: 4914435 - DNA, 25 bp, Homo sapien
cttacacaatggtataggtgatgat

SEQ ID NO: 4914436 - DNA, 25 bp, Homo sapien
taccccataatgcaccagtacagtg

SEQ ID NO: 4914437 - DNA, 25 bp, Homo sapien
tcccagggtgccatcatcctttgag

SEQ ID NO: 4914438 - DNA, 25 bp, Homo sapien
caaaatttctgcgaccccacttagt

SEQ ID NO: 4914439 - DNA, 25 bp, Homo sapien
gcattactgacccatgtggctacaa

SEQ ID NO: 4914440 - DNA, 25 bp, Homo sapien
tttagaaaccacaaccagagaatgt

SEQ ID NO: 4914441 - DNA, 25 bp, Homo sapien
ggcagaagacccaagttttgtgaag

SEQ ID NO: 4914442 - DNA, 25 bp, Homo sapien
tgtttacttaatgaatggagcccaa

SEQ ID NO: 4914443 - DNA, 25 bp, Homo sapien
caaggcagaggcataataaggaaca

SEQ ID NO: 4914444 - DNA, 25 bp, Homo sapien
aagggaaataacacgtcctgcaggg

SEQ ID NO: 4914445 - DNA, 25 bp, Homo sapien
gaaaaccaaggtagacagtgaactc

SEQ ID NO: 4914446 - DNA, 25 bp, Homo sapien
taaattcgacaagctgagggacaga

SEQ ID NO: 4914447 - DNA, 25 bp, Homo sapien
gatctggtaaccatcgctgcactga

SEQ ID NO: 4914448 - DNA, 25 bp, Homo sapien
cagaacaagagcagggttgccacca

SEQ ID NO: 4914449 - DNA, 25 bp, Homo sapien
agaacaagagcagggttgccaccat

SEQ ID NO: 4914450 - DNA, 25 bp, Homo sapien
tctgcacagtgcaagaggtttcaaa

SEQ ID NO: 4914451 - DNA, 25 bp, Homo sapien
aattcagttcaagtagaccaggtga

SEQ ID NO: 4914452 - DNA, 25 bp, Homo sapien
tattcttatcctcttggaaataggc

SEQ ID NO: 4914453 - DNA, 25 bp, Homo sapien
tatctgctttcctaacaaccgcatc

SEQ ID NO: 4914454 - DNA, 25 bp, Homo sapien
gtgtttccgatgcttggtaacagac

SEQ ID NO: 4914455 - DNA, 25 bp, Homo sapien
gcagctggccccaccatgtgtttcc

SEQ ID NO: 4914456 - DNA, 25 bp, Homo sapien
gctggccccaccatgtgtttccgat

SEQ ID NO: 4914457 - DNA, 25 bp, Homo sapien
ggccccaccatgtgtttccgatgct

SEQ ID NO: 4914458 - DNA, 25 bp, Homo sapien
ttactatgagatgtaaactcttcca

SEQ ID NO: 4914459 - DNA, 25 bp, Homo sapien
tccagtgagttgaacaatagctgtg

SEQ ID NO: 4914460 - DNA, 25 bp, Homo sapien
agctcctgtcatgcaattattacat

SEQ ID NO: 4914461 - DNA, 25 bp, Homo sapien
ttgaattgtagattactatgagatg

SEQ ID NO: 4914462 - DNA, 25 bp, Homo sapien
ttctaatatcctcagttgaggcatg

SEQ ID NO: 4914463 - DNA, 25 bp, Homo sapien
ccaccaaagactcagttcctttgga

SEQ ID NO: 4914464 - DNA, 25 bp, Homo sapien
ggttggtccaccaaagactcagttc

SEQ ID NO: 4914465 - DNA, 25 bp, Homo sapien
gtccaccaaagactcagttcctttg

SEQ ID NO: 4914466 - DNA, 25 bp, Homo sapien
tggtccaccaaagactcagttcctt

SEQ ID NO: 4914467 - DNA, 25 bp, Homo sapien
tgctgcttgcatgagatgtgtgcca

SEQ ID NO: 4914468 - DNA, 25 bp, Homo sapien
catttgggctgggagagttccaatt

SEQ ID NO: 4914469 - DNA, 25 bp, Homo sapien
aattgagcgtactttgtacagtcag

SEQ ID NO: 4914470 - DNA, 25 bp, Homo sapien
gatgttaattggtgttgaatacaac

SEQ ID NO: 4914471 - DNA, 25 bp, Homo sapien
ctatgctcgttcacaagcaggcagg

SEQ ID NO: 4914472 - DNA, 25 bp, Homo sapien
caggcagggctacttttcttcacag

SEQ ID NO: 4914473 - DNA, 25 bp, Homo sapien
gctcgttcacaagcaggcagggcta

SEQ ID NO: 4914474 - DNA, 25 bp, Homo sapien
tcgttcacaagcaggcagggctact

SEQ ID NO: 4914475 - DNA, 25 bp, Homo sapien
tggacaagtgttggaagactcacac

SEQ ID NO: 4914476 - DNA, 25 bp, Homo sapien
tgtggaggtgatgcatcatctgtgc

SEQ ID NO: 4914477 - DNA, 25 bp, Homo sapien
ggtgtggaggtgatgcatcatctgt

SEQ ID NO: 4914478 - DNA, 25 bp, Homo sapien
gtggaggtgatgcatcatctgtgcc

SEQ ID NO: 4914479 - DNA, 25 bp, Homo sapien
ctttgagcctatggctgtcccttcc

SEQ ID NO: 4914480 - DNA, 25 bp, Homo sapien
ttggaattggtctttgccctctctg

SEQ ID NO: 4914481 - DNA, 25 bp, Homo sapien
tccttggaattggtctttgccctct

SEQ ID NO: 4914482 - DNA, 25 bp, Homo sapien
ctaggcctttgagcctatggctgtc

SEQ ID NO: 4914483 - DNA, 25 bp, Homo sapien
agattgtcaatgattttccagtcct

SEQ ID NO: 4914484 - DNA, 25 bp, Homo sapien
gaagaacgataacgttgtgtgtagc

SEQ ID NO: 4914485 - DNA, 25 bp, Homo sapien
gaacgataacgttgtgtgtagccat

SEQ ID NO: 4914486 - DNA, 25 bp, Homo sapien
gagccaggaagaacgataacgttgt

SEQ ID NO: 4914487 - DNA, 25 bp, Homo sapien
ccaggaagaacgataacgttgtgtg

SEQ ID NO: 4914488 - DNA, 25 bp, Homo sapien
ctgccatagcctcttatcttcactt

SEQ ID NO: 4914489 - DNA, 25 bp, Homo sapien
gaaatctcactgccatagcctctta

SEQ ID NO: 4914490 - DNA, 25 bp, Homo sapien
actgccatagcctcttatcttcact

SEQ ID NO: 4914491 - DNA, 25 bp, Homo sapien
tctcactgccatagcctcttatctt

SEQ ID NO: 4914492 - DNA, 25 bp, Homo sapien
ttctttacaacaaccataggcggtc

SEQ ID NO: 4914493 - DNA, 25 bp, Homo sapien
gctggataccatatgacagagccct

SEQ ID NO: 4914494 - DNA, 25 bp, Homo sapien
cacagctcaactatggtgaagcaag

SEQ ID NO: 4914495 - DNA, 25 bp, Homo sapien
catttcccagatggcatagatgccc

SEQ ID NO: 4914496 - DNA, 25 bp, Homo sapien
tactaacagagctccccagttgtga

SEQ ID NO: 4914497 - DNA, 25 bp, Homo sapien
cttttccttctgctaagtgccatct

SEQ ID NO: 4914498 - DNA, 25 bp, Homo sapien
gctaagtgccatctttctctgatct

SEQ ID NO: 4914499 - DNA, 25 bp, Homo sapien
tcattgatggttggtcgggaccacc

SEQ ID NO: 4914500 - DNA, 25 bp, Homo sapien
catttggctgcattagctgaatgtg

SEQ ID NO: 4914501 - DNA, 25 bp, Homo sapien
tgcagtcagcatttggctgcattag

SEQ ID NO: 4914502 - DNA, 25 bp, Homo sapien
gttctactttcacacccaagtatga

SEQ ID NO: 4914503 - DNA, 25 bp, Homo sapien
cacagttctactttcacacccaagt

SEQ ID NO: 4914504 - DNA, 25 bp, Homo sapien
tcccttccctattcccgatcgagga

SEQ ID NO: 4914505 - DNA, 25 bp, Homo sapien
ccacatgcatttggtattaaatcca

SEQ ID NO: 4914506 - DNA, 25 bp, Homo sapien
aaattctaagagtggttctctgctg

SEQ ID NO: 4914507 - DNA, 25 bp, Homo sapien
tattcccgatcgaggaaacttcgga

SEQ ID NO: 4914508 - DNA, 25 bp, Homo sapien
tccaaaggtcttggggtgagatata

SEQ ID NO: 4914509 - DNA, 25 bp, Homo sapien
gtctgctcactgtagtccaaaggtc

SEQ ID NO: 4914510 - DNA, 25 bp, Homo sapien
aaaggtcttggggtgagatatactt

SEQ ID NO: 4914511 - DNA, 25 bp, Homo sapien
tgctcactgtagtccaaaggtcttg

SEQ ID NO: 4914512 - DNA, 25 bp, Homo sapien
tgtctggtcatgtatccctggaatg

SEQ ID NO: 4914513 - DNA, 25 bp, Homo sapien
tttcatccacaagtccatcaaagat

SEQ ID NO: 4914514 - DNA, 25 bp, Homo sapien
tcctgaaagagtattcctgggcctt

SEQ ID NO: 4914515 - DNA, 25 bp, Homo sapien
ctggaatgacagacaagtgggctgt

SEQ ID NO: 4914516 - DNA, 25 bp, Homo sapien
cagcatctctatctccctctgccat

SEQ ID NO: 4914517 - DNA, 25 bp, Homo sapien
ctcagcatctctatctccctctgcc

SEQ ID NO: 4914518 - DNA, 25 bp, Homo sapien
tcagcatctctatctccctctgcca

SEQ ID NO: 4914519 - DNA, 25 bp, Homo sapien
tgctttaggaccaagcagaaacaca

SEQ ID NO: 4914520 - DNA, 25 bp, Homo sapien
gaataagcttctccaatgctttagg

SEQ ID NO: 4914521 - DNA, 25 bp, Homo sapien
tctccaatgctttaggaccaagcag

SEQ ID NO: 4914522 - DNA, 25 bp, Homo sapien
gcttctccaatgctttaggaccaag

SEQ ID NO: 4914523 - DNA, 25 bp, Homo sapien
ggcacaggggtcattagccatgtga

SEQ ID NO: 4914524 - DNA, 25 bp, Homo sapien
acaggggtcattagccatgtgaaca

SEQ ID NO: 4914525 - DNA, 25 bp, Homo sapien
cagggggccttctaaccttggcaag

SEQ ID NO: 4914526 - DNA, 25 bp, Homo sapien
caggacagttgcttttgccccaggg

SEQ ID NO: 4914527 - DNA, 25 bp, Homo sapien
tggagtttttccacccacagtgtca

SEQ ID NO: 4914528 - DNA, 25 bp, Homo sapien
tcagttggacggcaactgccgtagc

SEQ ID NO: 4914529 - DNA, 25 bp, Homo sapien
ggcaactgccgtagccgtgtgcctg

SEQ ID NO: 4914530 - DNA, 25 bp, Homo sapien
gtgcctgcccgctccaaattcatga

SEQ ID NO: 4914531 - DNA, 25 bp, Homo sapien
ggtcgcacaaatggacattgatttt

SEQ ID NO: 4914532 - DNA, 25 bp, Homo sapien
caataaactggaatccaaagccaac

SEQ ID NO: 4914533 - DNA, 25 bp, Homo sapien
aaagccatatgtgttggtcgcacaa

SEQ ID NO: 4914534 - DNA, 25 bp, Homo sapien
catatgtgttggtcgcacaaatgga

SEQ ID NO: 4914535 - DNA, 25 bp, Homo sapien
tgttgaacccttcagaaacccactg

SEQ ID NO: 4914536 - DNA, 25 bp, Homo sapien
gactttcatcatacggggcaggttc

SEQ ID NO: 4914537 - DNA, 25 bp, Homo sapien
ctttcacaagctcccggtttaggtg

SEQ ID NO: 4914538 - DNA, 25 bp, Homo sapien
tgctcgtctgactgcagatgacttt

SEQ ID NO: 4914539 - DNA, 25 bp, Homo sapien
agtgtgacctctcagtgttttaggc

SEQ ID NO: 4914540 - DNA, 25 bp, Homo sapien
tggccatggcatagagtgtgacctc

SEQ ID NO: 4914541 - DNA, 25 bp, Homo sapien
ggccatggcatagagtgtgacctct

SEQ ID NO: 4914542 - DNA, 25 bp, Homo sapien
tgtgacctctcagtgttttaggcat

SEQ ID NO: 4914543 - DNA, 25 bp, Homo sapien
tatcaccattattaggaacaccatc

SEQ ID NO: 4914544 - DNA, 25 bp, Homo sapien
caccattattaggaacaccatcaca

SEQ ID NO: 4914545 - DNA, 25 bp, Homo sapien
gtcgttggatgctcatcaaggccat

SEQ ID NO: 4914546 - DNA, 25 bp, Homo sapien
catattctcttttagtcgttggatg

SEQ ID NO: 4914547 - DNA, 25 bp, Homo sapien
tcagagctcgagcagtatgaggagg

SEQ ID NO: 4914548 - DNA, 25 bp, Homo sapien
acaaggaggcccatctgccatggtg

SEQ ID NO: 4914549 - DNA, 25 bp, Homo sapien
gagctcgagcagtatgaggaggaca

SEQ ID NO: 4914550 - DNA, 25 bp, Homo sapien
cacaaggaggcccatctgccatggt

SEQ ID NO: 4914551 - DNA, 25 bp, Homo sapien
tactcagggagcagcctgatatgcg

SEQ ID NO: 4914552 - DNA, 25 bp, Homo sapien
ttactcagggagcagcctgatatgc

SEQ ID NO: 4914553 - DNA, 25 bp, Homo sapien
tcagggagcagcctgatatgcgtac

SEQ ID NO: 4914554 - DNA, 25 bp, Homo sapien
actcagggagcagcctgatatgcgt

SEQ ID NO: 4914555 - DNA, 25 bp, Homo sapien
tttagccaaattgccaaaatctgtt

SEQ ID NO: 4914556 - DNA, 25 bp, Homo sapien
cagtggttcccaaatagatgttcaa

SEQ ID NO: 4914557 - DNA, 25 bp, Homo sapien
tcttcttatatgctatttcagttgc

SEQ ID NO: 4914558 - DNA, 25 bp, Homo sapien
gttaaggatccataaaagacagtgg

SEQ ID NO: 4914559 - DNA, 25 bp, Homo sapien
ggaaacgcgggtgtgaaagtctaca

SEQ ID NO: 4914560 - DNA, 25 bp, Homo sapien
tgaagagagttgtgctatgacaggg

SEQ ID NO: 4914561 - DNA, 25 bp, Homo sapien
gaaagtctacaacacttgggttaca

SEQ ID NO: 4914562 - DNA, 25 bp, Homo sapien
ggtggtattgctgtcagagacaaca

SEQ ID NO: 4914563 - DNA, 25 bp, Homo sapien
ccatgatccttagggaaacaggtga

SEQ ID NO: 4914564 - DNA, 25 bp, Homo sapien
agctgatggtagcagaaaagcggac

SEQ ID NO: 4914565 - DNA, 25 bp, Homo sapien
aaaagcggaccctcatatgcactgg

SEQ ID NO: 4914566 - DNA, 25 bp, Homo sapien
aaacaggtgaaggtttgagccagac

SEQ ID NO: 4914567 - DNA, 25 bp, Homo sapien
aaggctgtccatgagccacttggta

SEQ ID NO: 4914568 - DNA, 25 bp, Homo sapien
tcctcctctctgtatttggtcatat

SEQ ID NO: 4914569 - DNA, 25 bp, Homo sapien
catattcacaaaggctgtccatgag

SEQ ID NO: 4914570 - DNA, 25 bp, Homo sapien
catgagccacttggtaggtgggaac

SEQ ID NO: 4914571 - DNA, 25 bp, Homo sapien
ctttcttctcagacttgaataagcc

SEQ ID NO: 4914572 - DNA, 25 bp, Homo sapien
ttcttctcagacttgaataagccga

SEQ ID NO: 4914573 - DNA, 25 bp, Homo sapien
tttcttctcagacttgaataagccg

SEQ ID NO: 4914574 - DNA, 25 bp, Homo sapien
aggggacccagtctgatgcagccac

SEQ ID NO: 4914575 - DNA, 25 bp, Homo sapien
tctctcgctatatgacccttgcagg

SEQ ID NO: 4914576 - DNA, 25 bp, Homo sapien
tacatttccacagtctctcgctata

SEQ ID NO: 4914577 - DNA, 25 bp, Homo sapien
tatgacccttgcaggtcagcagtca

SEQ ID NO: 4914578 - DNA, 25 bp, Homo sapien
tatatttgagtatagagattctcta

SEQ ID NO: 4914579 - DNA, 25 bp, Homo sapien
ccatgcctcacggtggcatgagcca

SEQ ID NO: 4914580 - DNA, 25 bp, Homo sapien
aagctagccattgaaggagttcagg

SEQ ID NO: 4914581 - DNA, 25 bp, Homo sapien
caagtatgcttgaatagctcattaa

SEQ ID NO: 4914582 - DNA, 25 bp, Homo sapien
tattttctgctctcgatccagagtc

SEQ ID NO: 4914583 - DNA, 25 bp, Homo sapien
cactgagatacatgagcctcatatt

SEQ ID NO: 4914584 - DNA, 25 bp, Homo sapien
caaggtgtgcctcagtagaggcaaa

SEQ ID NO: 4914585 - DNA, 25 bp, Homo sapien
ggcaaaaggaatccagtccccagtc

SEQ ID NO: 4914586 - DNA, 25 bp, Homo sapien
gggtctgactagtttctggcataca

SEQ ID NO: 4914587 - DNA, 25 bp, Homo sapien
tgaagattcaaggacgcccagatgt

SEQ ID NO: 4914588 - DNA, 25 bp, Homo sapien
ggaaggagatctaaactggagatac

SEQ ID NO: 4914589 - DNA, 25 bp, Homo sapien
tgaacatgaatgtgggcggcagatt

SEQ ID NO: 4914590 - DNA, 25 bp, Homo sapien
tggtgtgtttctagatcaggctgca

SEQ ID NO: 4914591 - DNA, 25 bp, Homo sapien
tgactagctgcatgacgccctgaaa

SEQ ID NO: 4914592 - DNA, 25 bp, Homo sapien
cttaagcttgactagctgcatgacg

SEQ ID NO: 4914593 - DNA, 25 bp, Homo sapien
catgacgccctgaaatggtggtctc

SEQ ID NO: 4914594 - DNA, 25 bp, Homo sapien
taagtcactgacatcgtcttctgag

SEQ ID NO: 4914595 - DNA, 25 bp, Homo sapien
tccttgctgtaagtcactgacatcg

SEQ ID NO: 4914596 - DNA, 25 bp, Homo sapien
gctgtaagtcactgacatcgtcttc

SEQ ID NO: 4914597 - DNA, 25 bp, Homo sapien
aaaatttccttgctgtaagtcactg

SEQ ID NO: 4914598 - DNA, 25 bp, Homo sapien
tcattccttttttgacgattttggc

SEQ ID NO: 4914599 - DNA, 25 bp, Homo sapien
tcagtgtaaaatttaacatcatttc

SEQ ID NO: 4914600 - DNA, 25 bp, Homo sapien
ttcagtgtaaaatttaacatcattt

SEQ ID NO: 4914601 - DNA, 25 bp, Homo sapien
cattccttttttgacgattttggca

SEQ ID NO: 4914602 - DNA, 25 bp, Homo sapien
gagaaatgtagagggcatgagcttt

SEQ ID NO: 4914603 - DNA, 25 bp, Homo sapien
acacatcttggaggtagatgcttct

SEQ ID NO: 4914604 - DNA, 25 bp, Homo sapien
tgttggttatttcggagaacacatc

SEQ ID NO: 4914605 - DNA, 25 bp, Homo sapien
aaatggagaaatgtagagggcatga

SEQ ID NO: 4914606 - DNA, 25 bp, Homo sapien
ttgagcctggattcaggttagggac

SEQ ID NO: 4914607 - DNA, 25 bp, Homo sapien
tgttgagcctggattcaggttaggg

SEQ ID NO: 4914608 - DNA, 25 bp, Homo sapien
ctgttgagcctggattcaggttagg

SEQ ID NO: 4914609 - DNA, 25 bp, Homo sapien
gttgagcctggattcaggttaggga

SEQ ID NO: 4914610 - DNA, 25 bp, Homo sapien
caccaggctgcggaaacttgccttc

SEQ ID NO: 4914611 - DNA, 25 bp, Homo sapien
ttccagatttccatagacagaggtc

SEQ ID NO: 4914612 - DNA, 25 bp, Homo sapien
gacagaggtcagagctcgatccact

SEQ ID NO: 4914613 - DNA, 25 bp, Homo sapien
acaattggagtcactttcaccaggc

SEQ ID NO: 4914614 - DNA, 25 bp, Homo sapien
tgtttagttcctggattgtggcaag

SEQ ID NO: 4914615 - DNA, 25 bp, Homo sapien
ctgtttagttcctggattgtggcaa

SEQ ID NO: 4914616 - DNA, 25 bp, Homo sapien
ctaagaaaccaataagccaacaact

SEQ ID NO: 4914617 - DNA, 25 bp, Homo sapien
aactctaagggttcccccatcatct

SEQ ID NO: 4914618 - DNA, 25 bp, Homo sapien
ccaataagccaacaactctaagggt

SEQ ID NO: 4914619 - DNA, 25 bp, Homo sapien
tcacaaaaggatcagcgggggcaag

SEQ ID NO: 4914620 - DNA, 25 bp, Homo sapien
gagggagaccacttagcagtgctca

SEQ ID NO: 4914621 - DNA, 25 bp, Homo sapien
acaaaccatacagccgcggcagaag

SEQ ID NO: 4914622 - DNA, 25 bp, Homo sapien
gtctactctatttgagagggagacc

SEQ ID NO: 4914623 - DNA, 25 bp, Homo sapien
cttatcctctgtagcgctgcctgat

SEQ ID NO: 4914624 - DNA, 25 bp, Homo sapien
aaacactgacttctcaaaacatctt

SEQ ID NO: 4914625 - DNA, 25 bp, Homo sapien
aacactgacttctcaaaacatcttc

SEQ ID NO: 4914626 - DNA, 25 bp, Homo sapien
gaaacactgacttctcaaaacatct

SEQ ID NO: 4914627 - DNA, 25 bp, Homo sapien
tgcccaggccacaaataatgagtac

SEQ ID NO: 4914628 - DNA, 25 bp, Homo sapien
tatgaatccatagaggacggtagcc

SEQ ID NO: 4914629 - DNA, 25 bp, Homo sapien
tagccatagacccaggaaccgtaga

SEQ ID NO: 4914630 - DNA, 25 bp, Homo sapien
tgatgttgcctacaatgcccaggcc

SEQ ID NO: 4914631 - DNA, 25 bp, Homo sapien
caatcccatatttctaactcctcca

SEQ ID NO: 4914632 - DNA, 25 bp, Homo sapien
tcctccataaaactcctcctcttga

SEQ ID NO: 4914633 - DNA, 25 bp, Homo sapien
gtctctctgtaatctctcccttaca

SEQ ID NO: 4914634 - DNA, 25 bp, Homo sapien
tcaataattctaccattttctgttt

SEQ ID NO: 4914635 - DNA, 25 bp, Homo sapien
cactgattaggaagaagatttcgta

SEQ ID NO: 4914636 - DNA, 25 bp, Homo sapien
aacaagggagacagaactccttcat

SEQ ID NO: 4914637 - DNA, 25 bp, Homo sapien
cccaaacaggagtgctacattcaga

SEQ ID NO: 4914638 - DNA, 25 bp, Homo sapien
tacattcagaaagcactgattagga

SEQ ID NO: 4914639 - DNA, 25 bp, Homo sapien
tcctgtagggcatccataaaagggc

SEQ ID NO: 4914640 - DNA, 25 bp, Homo sapien
caccgggttgatggcactgttgaga

SEQ ID NO: 4914641 - DNA, 25 bp, Homo sapien
gaaggctgcacggaatttctgggac

SEQ ID NO: 4914642 - DNA, 25 bp, Homo sapien
tgatgacgctgtaatttagggccac

SEQ ID NO: 4914643 - DNA, 25 bp, Homo sapien
tttgttagagcattgacaaagactg

SEQ ID NO: 4914644 - DNA, 25 bp, Homo sapien
cttcacatatgactattggccatgt

SEQ ID NO: 4914645 - DNA, 25 bp, Homo sapien
cattgacaaagactgatctgctctg

SEQ ID NO: 4914646 - DNA, 25 bp, Homo sapien
cacatatgactattggccatgttct

SEQ ID NO: 4914647 - DNA, 25 bp, Homo sapien
aaatgaggtttgctgttgagtgatg

SEQ ID NO: 4914648 - DNA, 25 bp, Homo sapien
ttggaatattagaagcagaaccctg

SEQ ID NO: 4914649 - DNA, 25 bp, Homo sapien
catatcggaaaaatagtacagggtc

SEQ ID NO: 4914650 - DNA, 25 bp, Homo sapien
tacttatagactgaacatatcggaa

SEQ ID NO: 4914651 - DNA, 25 bp, Homo sapien
aatagacgcgataacattgtacaca

SEQ ID NO: 4914652 - DNA, 25 bp, Homo sapien
ccagttgagagcctgtagtatggac

SEQ ID NO: 4914653 - DNA, 25 bp, Homo sapien
tgctggatccatgtttgaaaattct

SEQ ID NO: 4914654 - DNA, 25 bp, Homo sapien
cacattcatgatccctcttgtcaaa

SEQ ID NO: 4914655 - DNA, 25 bp, Homo sapien
tcttgaggaagttcatactctctct

SEQ ID NO: 4914656 - DNA, 25 bp, Homo sapien
atcagtccacggcattcttgaggaa

SEQ ID NO: 4914657 - DNA, 25 bp, Homo sapien
taagttcattattctgtgaggaatg

SEQ ID NO: 4914658 - DNA, 25 bp, Homo sapien
gaggaatgaaataaccacttatggg

SEQ ID NO: 4914659 - DNA, 25 bp, Homo sapien
tctgctgccttgtatttatttctgt

SEQ ID NO: 4914660 - DNA, 25 bp, Homo sapien
ttgtatttatttctgtttttatcca

SEQ ID NO: 4914661 - DNA, 25 bp, Homo sapien
ttctgtttttatccaaagcctccat

SEQ ID NO: 4914662 - DNA, 25 bp, Homo sapien
tatttctgtttttatccaaagcctc

SEQ ID NO: 4914663 - DNA, 25 bp, Homo sapien
aaggtgtgctcagaagactattggc

SEQ ID NO: 4914664 - DNA, 25 bp, Homo sapien
gagaatttcttagggcaagaccaaa

SEQ ID NO: 4914665 - DNA, 25 bp, Homo sapien
ttcagatctctggtgagatggagtc

SEQ ID NO: 4914666 - DNA, 25 bp, Homo sapien
tatttggcctccttactagggcatc

SEQ ID NO: 4914667 - DNA, 25 bp, Homo sapien
gaattatgtgataagtaagagcctt

SEQ ID NO: 4914668 - DNA, 25 bp, Homo sapien
tcaaggatctttccgtttagttgct

SEQ ID NO: 4914669 - DNA, 25 bp, Homo sapien
agccttgaaggctctatatgagggc

SEQ ID NO: 4914670 - DNA, 25 bp, Homo sapien
gttgcttattaagaattatgtgata

SEQ ID NO: 4914671 - DNA, 25 bp, Homo sapien
catgagagtaccattgaaattgtca

SEQ ID NO: 4914672 - DNA, 25 bp, Homo sapien
tctgagctgggattgatttcattca

SEQ ID NO: 4914673 - DNA, 25 bp, Homo sapien
catacataagggattgttctgacta

SEQ ID NO: 4914674 - DNA, 25 bp, Homo sapien
tgactatcatctggcatacttcatg

SEQ ID NO: 4914675 - DNA, 25 bp, Homo sapien
caaagccctccttaacgactccaag

SEQ ID NO: 4914676 - DNA, 25 bp, Homo sapien
tacaaagccctccttaacgactcca

SEQ ID NO: 4914677 - DNA, 25 bp, Homo sapien
cctccttaacgactccaagccccat

SEQ ID NO: 4914678 - DNA, 25 bp, Homo sapien
aatctatccttgaaggacgtcctac

SEQ ID NO: 4914679 - DNA, 25 bp, Homo sapien
gctgccttccttaatcaatccctga

SEQ ID NO: 4914680 - DNA, 25 bp, Homo sapien
caatccctgatgaattggatttgct

SEQ ID NO: 4914681 - DNA, 25 bp, Homo sapien
tggatttgctctggatatacattct

SEQ ID NO: 4914682 - DNA, 25 bp, Homo sapien
caatgttatcacagtagcctgaagc

SEQ ID NO: 4914683 - DNA, 25 bp, Homo sapien
catacaatattggaacagacacaca

SEQ ID NO: 4914684 - DNA, 25 bp, Homo sapien
tcatgaagggcataggtccctgagc

SEQ ID NO: 4914685 - DNA, 25 bp, Homo sapien
ccagagtcatttaggacccctgaat

SEQ ID NO: 4914686 - DNA, 25 bp, Homo sapien
cctcttccttggctgttcatttgcc

SEQ ID NO: 4914687 - DNA, 25 bp, Homo sapien
tcctctttgttgcaaacaataccca

SEQ ID NO: 4914688 - DNA, 25 bp, Homo sapien
tgttgcaaacaatacccaagtaagg

SEQ ID NO: 4914689 - DNA, 25 bp, Homo sapien
ccctggtatgttgggttccatttgc

SEQ ID NO: 4914690 - DNA, 25 bp, Homo sapien
agtgtactcaaagaagtatgcttgg

SEQ ID NO: 4914691 - DNA, 25 bp, Homo sapien
tcatgattccttattaagtgataag

SEQ ID NO: 4914692 - DNA, 25 bp, Homo sapien
aatctggggaagaagtgtactcaaa

SEQ ID NO: 4914693 - DNA, 25 bp, Homo sapien
agtgataagacttgccaaacaccag

SEQ ID NO: 4914694 - DNA, 25 bp, Homo sapien
tcagtctagaacctgccagcttcat

SEQ ID NO: 4914695 - DNA, 25 bp, Homo sapien
gcagaggacacctttaccctaattc

SEQ ID NO: 4914696 - DNA, 25 bp, Homo sapien
ggattgcagaggacacctttaccct

SEQ ID NO: 4914697 - DNA, 25 bp, Homo sapien
taattcctgagagtgtgatcagtct

SEQ ID NO: 4914698 - DNA, 25 bp, Homo sapien
gaaggaaactcttgtcctgagtccc

SEQ ID NO: 4914699 - DNA, 25 bp, Homo sapien
agtgtgtagcacgttcttctgaagg

SEQ ID NO: 4914700 - DNA, 25 bp, Homo sapien
gatgcattcatattcctgagtgaca

SEQ ID NO: 4914701 - DNA, 25 bp, Homo sapien
catactcctcccagggacataagtg

SEQ ID NO: 4914702 - DNA, 25 bp, Homo sapien
gaaataaccagcatttttcgagtac

SEQ ID NO: 4914703 - DNA, 25 bp, Homo sapien
gagaaataaccagcatttttcgagt

SEQ ID NO: 4914704 - DNA, 25 bp, Homo sapien
ttgagaaataaccagcatttttcga

SEQ ID NO: 4914705 - DNA, 25 bp, Homo sapien
ccatttgagaaataaccagcatttt

SEQ ID NO: 4914706 - DNA, 25 bp, Homo sapien
tccaaagcagcatcggacctggttt

SEQ ID NO: 4914707 - DNA, 25 bp, Homo sapien
tgtcaaatgacggtagagttttcca

SEQ ID NO: 4914708 - DNA, 25 bp, Homo sapien
cggacctggtttctcagaccttcct

SEQ ID NO: 4914709 - DNA, 25 bp, Homo sapien
tgccaagctgtcaaatgacggtaga

SEQ ID NO: 4914710 - DNA, 25 bp, Homo sapien
ctgaggcttcgcatctcgtactgct

SEQ ID NO: 4914711 - DNA, 25 bp, Homo sapien
gtgccttgtgctagcaggtcctgag

SEQ ID NO: 4914712 - DNA, 25 bp, Homo sapien
aggtcctgaggcttcgcatctcgta

SEQ ID NO: 4914713 - DNA, 25 bp, Homo sapien
cttgtctgtactgatgggtgccttg

SEQ ID NO: 4914714 - DNA, 25 bp, Homo sapien
catgaagtgggtgacatgaagatcc

SEQ ID NO: 4914715 - DNA, 25 bp, Homo sapien
tgggtgacatgaagatccaagatca

SEQ ID NO: 4914716 - DNA, 25 bp, Homo sapien
ctatgtaacatcatgaagtgggtga

SEQ ID NO: 4914717 - DNA, 25 bp, Homo sapien
taacatcatgaagtgggtgacatga

SEQ ID NO: 4914718 - DNA, 25 bp, Homo sapien
tctccttgagaggtgtctggaatta

SEQ ID NO: 4914719 - DNA, 25 bp, Homo sapien
tccttgagaggtgtctggaattagg

SEQ ID NO: 4914720 - DNA, 25 bp, Homo sapien
ggtgtctggaattaggggagattct

SEQ ID NO: 4914721 - DNA, 25 bp, Homo sapien
tgtctggaattaggggagattctgc

SEQ ID NO: 4914722 - DNA, 25 bp, Homo sapien
ttgaatgtcttctacacactgcggg

SEQ ID NO: 4914723 - DNA, 25 bp, Homo sapien
ggatatgggtacaaactgcttcctt

SEQ ID NO: 4914724 - DNA, 25 bp, Homo sapien
tcattactgaaactaggctgcttcc

SEQ ID NO: 4914725 - DNA, 25 bp, Homo sapien
tgagctcattactgaaactaggctg

SEQ ID NO: 4914726 - DNA, 25 bp, Homo sapien
gctgctgcttgaacgtacaattgct

SEQ ID NO: 4914727 - DNA, 25 bp, Homo sapien
taatttcgacctgctgttgccatgc

SEQ ID NO: 4914728 - DNA, 25 bp, Homo sapien
tgctccattaatttcgacctgctgt

SEQ ID NO: 4914729 - DNA, 25 bp, Homo sapien
cagaggtagctaaggctttgtaaat

SEQ ID NO: 4914730 - DNA, 25 bp, Homo sapien
gaggctgtccacagacaaggttgtc

SEQ ID NO: 4914731 - DNA, 25 bp, Homo sapien
tctgttcatcgtgtaatacaggtaa

SEQ ID NO: 4914732 - DNA, 25 bp, Homo sapien
cagttgtgtggtctgttcatcgtgt

SEQ ID NO: 4914733 - DNA, 25 bp, Homo sapien
catcgtgtaatacaggtaatatgta

SEQ ID NO: 4914734 - DNA, 25 bp, Homo sapien
tgtagacttgggtaaccacccgata

SEQ ID NO: 4914735 - DNA, 25 bp, Homo sapien
catgcctgcaggtaccagtgttggg

SEQ ID NO: 4914736 - DNA, 25 bp, Homo sapien
cacccgatattgaaggcaccagggc

SEQ ID NO: 4914737 - DNA, 25 bp, Homo sapien
gacagttggtgatactggagccaga

SEQ ID NO: 4914738 - DNA, 25 bp, Homo sapien
gagactagataccaaacatcacgag

SEQ ID NO: 4914739 - DNA, 25 bp, Homo sapien
ggtcctgaggactggtattgacaat

SEQ ID NO: 4914740 - DNA, 25 bp, Homo sapien
taacatatcttttgcctgtctgggc

SEQ ID NO: 4914741 - DNA, 25 bp, Homo sapien
cctttgtcagattgcagtttcctag

SEQ ID NO: 4914742 - DNA, 25 bp, Homo sapien
tgatttattcctgcagtcattctgg

SEQ ID NO: 4914743 - DNA, 25 bp, Homo sapien
acatattagccctgggttatattta

SEQ ID NO: 4914744 - DNA, 25 bp, Homo sapien
gcagtcattctggagcaaaaaatca

SEQ ID NO: 4914745 - DNA, 25 bp, Homo sapien
aatcatgatgcgaggctccacaggc

SEQ ID NO: 4914746 - DNA, 25 bp, Homo sapien
tagagacgaaggcaaagtgtcccct

SEQ ID NO: 4914747 - DNA, 25 bp, Homo sapien
cacgtgcacaaatcctagacaggct

SEQ ID NO: 4914748 - DNA, 25 bp, Homo sapien
tgtccctcggaaagaagtgtgctaa

SEQ ID NO: 4914749 - DNA, 25 bp, Homo sapien
tatgggacccaacacttgaaagcca

SEQ ID NO: 4914750 - DNA, 25 bp, Homo sapien
caagaacttgatgcaatgaggctta

SEQ ID NO: 4914751 - DNA, 25 bp, Homo sapien
ggcaccttggctacctgaaacactg

SEQ ID NO: 4914752 - DNA, 25 bp, Homo sapien
cacaaacctttgatgggcaccttgg

SEQ ID NO: 4914753 - DNA, 25 bp, Homo sapien
gatagtgaagcataattgaggcgct

SEQ ID NO: 4914754 - DNA, 25 bp, Homo sapien
tgtacagctgcaggatatcaggtgc

SEQ ID NO: 4914755 - DNA, 25 bp, Homo sapien
gatgtacagctgcaggatatcaggt

SEQ ID NO: 4914756 - DNA, 25 bp, Homo sapien
catttcatcagcgttaatcttagat

SEQ ID NO: 4914757 - DNA, 25 bp, Homo sapien
taatcttagattctgtgtttgggat

SEQ ID NO: 4914758 - DNA, 25 bp, Homo sapien
gatttccggtcattcagtgtttccc

SEQ ID NO: 4914759 - DNA, 25 bp, Homo sapien
tgctggagcaaaacgtctgggaaag

SEQ ID NO: 4914760 - DNA, 25 bp, Homo sapien
taggttgtatgctggacatccttgc

SEQ ID NO: 4914761 - DNA, 25 bp, Homo sapien
tcagctgctgtagttctgccaactt

SEQ ID NO: 4914762 - DNA, 25 bp, Homo sapien
ccgtaacaaaagaggactattagct

SEQ ID NO: 4914763 - DNA, 25 bp, Homo sapien
aaggcgtcttggaggagttaatatc

SEQ ID NO: 4914764 - DNA, 25 bp, Homo sapien
gactaggatgagagaggataagctt

SEQ ID NO: 4914765 - DNA, 25 bp, Homo sapien
cagtcaccccatgtcagtagatggt

SEQ ID NO: 4914766 - DNA, 25 bp, Homo sapien
cctgtttcctctgaccgagagccgt

SEQ ID NO: 4914767 - DNA, 25 bp, Homo sapien
ttgtgaacgtgtgcgttgagaaacc

SEQ ID NO: 4914768 - DNA, 25 bp, Homo sapien
cgcttgtgaacgtgtgcgttgagaa

SEQ ID NO: 4914769 - DNA, 25 bp, Homo sapien
tgtttcctctgaccgagagccgttt

SEQ ID NO: 4914770 - DNA, 25 bp, Homo sapien
cgcgctcttcggtaacgggaccctg

SEQ ID NO: 4914771 - DNA, 25 bp, Homo sapien
gtgggagccgccttcgcgcgctctt

SEQ ID NO: 4914772 - DNA, 25 bp, Homo sapien
cttctggggaatgatgcccatccca

SEQ ID NO: 4914773 - DNA, 25 bp, Homo sapien
aggtctgagggctggcgtgcgggta

SEQ ID NO: 4914774 - DNA, 25 bp, Homo sapien
ccaccgtggcggcttgcgtggactc

SEQ ID NO: 4914775 - DNA, 25 bp, Homo sapien
ctggcaagcgaagccaccgtggcgg

SEQ ID NO: 4914776 - DNA, 25 bp, Homo sapien
accgtggcggcttgcgtggactcac

SEQ ID NO: 4914777 - DNA, 25 bp, Homo sapien
caagcgaagccaccgtggcggcttg

SEQ ID NO: 4914778 - DNA, 25 bp, Homo sapien
gctgcctccggcctgacccttcccg

SEQ ID NO: 4914779 - DNA, 25 bp, Homo sapien
cggcctgacccttcccgcaatttct

SEQ ID NO: 4914780 - DNA, 25 bp, Homo sapien
cagctggagcttgacgcaggtggga

SEQ ID NO: 4914781 - DNA, 25 bp, Homo sapien
agcggcggcgcccttcgtactccgt

SEQ ID NO: 4914782 - DNA, 25 bp, Homo sapien
gtgaagagacctctgttggatcccc

SEQ ID NO: 4914783 - DNA, 25 bp, Homo sapien
agctctctcttgagccgctgccttg

SEQ ID NO: 4914784 - DNA, 25 bp, Homo sapien
ttggatccccgcttcgagggttaca

SEQ ID NO: 4914785 - DNA, 25 bp, Homo sapien
ccgcttcgagggttacaagctctct

SEQ ID NO: 4914786 - DNA, 25 bp, Homo sapien
tgtgagaatttaaccagcgcgggcc

SEQ ID NO: 4914787 - DNA, 25 bp, Homo sapien
tttattaattctcacgctgcggccc

SEQ ID NO: 4914788 - DNA, 25 bp, Homo sapien
ggagaactacatagcccagcatgca

SEQ ID NO: 4914789 - DNA, 25 bp, Homo sapien
taacagagttcagaccttgccgtcg

SEQ ID NO: 4914790 - DNA, 25 bp, Homo sapien
ggcgagggccgtcccttcccagcga

SEQ ID NO: 4914791 - DNA, 25 bp, Homo sapien
tcccagcgacgaaatgacccttgcg

SEQ ID NO: 4914792 - DNA, 25 bp, Homo sapien
cttcccagcgacgaaatgacccttg

SEQ ID NO: 4914793 - DNA, 25 bp, Homo sapien
ccgtcccttcccagcgacgaaatga

SEQ ID NO: 4914794 - DNA, 25 bp, Homo sapien
agacagtacatcgaaaggagcctgg

SEQ ID NO: 4914795 - DNA, 25 bp, Homo sapien
aaagacagtacatcgaaaggagcct

SEQ ID NO: 4914796 - DNA, 25 bp, Homo sapien
gaaagacagtacatcgaaaggagcc

SEQ ID NO: 4914797 - DNA, 25 bp, Homo sapien
acagtacatcgaaaggagcctgggc

SEQ ID NO: 4914798 - DNA, 25 bp, Homo sapien
aactccggtagcacgccctgtcgga

SEQ ID NO: 4914799 - DNA, 25 bp, Homo sapien
aggccaactccggtagcacgccctg

SEQ ID NO: 4914800 - DNA, 25 bp, Homo sapien
acgccctgtcggagagccctacagg

SEQ ID NO: 4914801 - DNA, 25 bp, Homo sapien
gtagcacgccctgtcggagagccct

SEQ ID NO: 4914802 - DNA, 25 bp, Homo sapien
aggtctagtcagtaccactcctgga

SEQ ID NO: 4914803 - DNA, 25 bp, Homo sapien
caagtactttgaccctaggagctcc

SEQ ID NO: 4914804 - DNA, 25 bp, Homo sapien
caactgctaaacctaagtgtgtgga

SEQ ID NO: 4914805 - DNA, 25 bp, Homo sapien
gcagagactgcatccaaaaattggg

SEQ ID NO: 4914806 - DNA, 25 bp, Homo sapien
tttctgctaaatcctctaggcaggc

SEQ ID NO: 4914807 - DNA, 25 bp, Homo sapien
gctaaatcctctaggcaggcatcct

SEQ ID NO: 4914808 - DNA, 25 bp, Homo sapien
catcaacatgtactttcagatatag

SEQ ID NO: 4914809 - DNA, 25 bp, Homo sapien
tggacatcaacatgtactttcagat

SEQ ID NO: 4914810 - DNA, 25 bp, Homo sapien
caacttttggttaatcgctgctctc

SEQ ID NO: 4914811 - DNA, 25 bp, Homo sapien
cttttggttaatcgctgctctcatc

SEQ ID NO: 4914812 - DNA, 25 bp, Homo sapien
tctatcaacttttggttaatcgctg

SEQ ID NO: 4914813 - DNA, 25 bp, Homo sapien
ttctccagtttctatcaacttttgg

SEQ ID NO: 4914814 - DNA, 25 bp, Homo sapien
taatctcaattgtaattctttccag

SEQ ID NO: 4914815 - DNA, 25 bp, Homo sapien
ccagatgttcggaatagaaactttt

SEQ ID NO: 4914816 - DNA, 25 bp, Homo sapien
ctattaaaggcggtgaaatgtaatt

SEQ ID NO: 4914817 - DNA, 25 bp, Homo sapien
tacaagctaactattaaaggcggtg

SEQ ID NO: 4914818 - DNA, 25 bp, Homo sapien
taacgattcagtaattggcatgccc

SEQ ID NO: 4914819 - DNA, 25 bp, Homo sapien
ttctctcgatggcaaaaaagtggca

SEQ ID NO: 4914820 - DNA, 25 bp, Homo sapien
gcagctgcacctcgaaatcttcaaa

SEQ ID NO: 4914821 - DNA, 25 bp, Homo sapien
tctaccaacaggaatatcatgggtc

SEQ ID NO: 4914822 - DNA, 25 bp, Homo sapien
cattcaattaatttagctctcagca

SEQ ID NO: 4914823 - DNA, 25 bp, Homo sapien
agccacattcaattaatttagctct

SEQ ID NO: 4914824 - DNA, 25 bp, Homo sapien
caattaatttagctctcagcaactc

SEQ ID NO: 4914825 - DNA, 25 bp, Homo sapien
cacattcaattaatttagctctcag

SEQ ID NO: 4914826 - DNA, 25 bp, Homo sapien
taggtctacatatgccaccaagagg

SEQ ID NO: 4914827 - DNA, 25 bp, Homo sapien
ttcacgatgatctaatgggctaggc

SEQ ID NO: 4914828 - DNA, 25 bp, Homo sapien
taaaagttgttcgtaagtctcagct

SEQ ID NO: 4914829 - DNA, 25 bp, Homo sapien
gaggctccccttagtgacatgtata

SEQ ID NO: 4914830 - DNA, 25 bp, Homo sapien
caaaagcaaaaaacaaatcatatca

SEQ ID NO: 4914831 - DNA, 25 bp, Homo sapien
aaagcaaaaaacaaatcatatcatt

SEQ ID NO: 4914832 - DNA, 25 bp, Homo sapien
agcaaaaaacaaatcatatcattta

SEQ ID NO: 4914833 - DNA, 25 bp, Homo sapien
gcaaaagcaaaaaacaaatcatatc

SEQ ID NO: 4914834 - DNA, 25 bp, Homo sapien
atttcagccaccaagtcatcaacag

SEQ ID NO: 4914835 - DNA, 25 bp, Homo sapien
gtcatcaacagtaacgtgttctagt

SEQ ID NO: 4914836 - DNA, 25 bp, Homo sapien
tgatttcagccaccaagtcatcaac

SEQ ID NO: 4914837 - DNA, 25 bp, Homo sapien
caacagtaacgtgttctagtccttt

SEQ ID NO: 4914838 - DNA, 25 bp, Homo sapien
tctaacttgtatagctggttcctaa

SEQ ID NO: 4914839 - DNA, 25 bp, Homo sapien
ttgtaaacaggcctaaagagatggc

SEQ ID NO: 4914840 - DNA, 25 bp, Homo sapien
tcctttccccgagacatacttgaag

SEQ ID NO: 4914841 - DNA, 25 bp, Homo sapien
tggctgacaaggaccatgggattct

SEQ ID NO: 4914842 - DNA, 25 bp, Homo sapien
tatcctgacggtggtagctacacga

SEQ ID NO: 4914843 - DNA, 25 bp, Homo sapien
ttcacatatatacactccgagctag

SEQ ID NO: 4914844 - DNA, 25 bp, Homo sapien
tggcaagactaagggagcactctca

SEQ ID NO: 4914845 - DNA, 25 bp, Homo sapien
ctataaaggaataccatgagggagg

SEQ ID NO: 4914846 - DNA, 25 bp, Homo sapien
cctaaatgcactgcatgttgatgag

SEQ ID NO: 4914847 - DNA, 25 bp, Homo sapien
ggtaccaattaatacatgagaattt

SEQ ID NO: 4914848 - DNA, 25 bp, Homo sapien
tgctcagggtaaacaacataagaat

SEQ ID NO: 4914849 - DNA, 25 bp, Homo sapien
gaatttaagatctgacattttgctc

SEQ ID NO: 4914850 - DNA, 25 bp, Homo sapien
tattctttgtaggagctccttcttt

SEQ ID NO: 4914851 - DNA, 25 bp, Homo sapien
ttattctttgtaggagctccttctt

SEQ ID NO: 4914852 - DNA, 25 bp, Homo sapien
ataaaaccacaacaacacaatctaa

SEQ ID NO: 4914853 - DNA, 25 bp, Homo sapien
accatcatacaaaaaaggattttat

SEQ ID NO: 4914854 - DNA, 25 bp, Homo sapien
taccatcatacaaaaaaggatttta

SEQ ID NO: 4914855 - DNA, 25 bp, Homo sapien
gagatatttattaaaataacacatt

SEQ ID NO: 4914856 - DNA, 25 bp, Homo sapien
catgagatatttattaaaataacac

SEQ ID NO: 4914857 - DNA, 25 bp, Homo sapien
ttcatgagatatttattaaaataac

SEQ ID NO: 4914858 - DNA, 25 bp, Homo sapien
cattcatgagatatttattaaaata

SEQ ID NO: 4914859 - DNA, 25 bp, Homo sapien
cacgatgtcagatcaagaagggcct

SEQ ID NO: 4914860 - DNA, 25 bp, Homo sapien
gcaccagttgggtactcgccagaaa

SEQ ID NO: 4914861 - DNA, 25 bp, Homo sapien
gaactaagacaattacgagggcacg

SEQ ID NO: 4914862 - DNA, 25 bp, Homo sapien
cacggtctgacgcaagtttcctggg

SEQ ID NO: 4914863 - DNA, 25 bp, Homo sapien
cccgcccctgctgtcgggctgctcc

SEQ ID NO: 4914864 - DNA, 25 bp, Homo sapien
tccgctcgcagctggctctagtgct

SEQ ID NO: 4914865 - DNA, 25 bp, Homo sapien
tgaaaagccagttctgcggagttgg

SEQ ID NO: 4914866 - DNA, 25 bp, Homo sapien
agttggtgccctccgctcgcagctg

SEQ ID NO: 4914867 - DNA, 25 bp, Homo sapien
gctcctgggactgcgactcgctggc

SEQ ID NO: 4914868 - DNA, 25 bp, Homo sapien
ggatccgcggcacacaggagcagcc

SEQ ID NO: 4914869 - DNA, 25 bp, Homo sapien
agaggccccaaatacccaggagcca

SEQ ID NO: 4914870 - DNA, 25 bp, Homo sapien
tgggatccgcggcacacaggagcag

SEQ ID NO: 4914871 - DNA, 25 bp, Homo sapien
tgctgggatccgcggcacacaggag

SEQ ID NO: 4914872 - DNA, 25 bp, Homo sapien
tatagtcagccttgttgctccattt

SEQ ID NO: 4914873 - DNA, 25 bp, Homo sapien
agccttgttgctccatttatactgc

SEQ ID NO: 4914874 - DNA, 25 bp, Homo sapien
cttatagtcagccttgttgctccat

SEQ ID NO: 4914875 - DNA, 25 bp, Homo sapien
ccctcttatagtcagccttgttgct

SEQ ID NO: 4914876 - DNA, 25 bp, Homo sapien
aaaggatgaggcttcggatggaaat

SEQ ID NO: 4914877 - DNA, 25 bp, Homo sapien
ggcttcggatggaaattcctgacat

SEQ ID NO: 4914878 - DNA, 25 bp, Homo sapien
gatgaggcttcggatggaaattcct

SEQ ID NO: 4914879 - DNA, 25 bp, Homo sapien
gaggcttcggatggaaattcctgac

SEQ ID NO: 4914880 - DNA, 25 bp, Homo sapien
ctagtatagcatgtaatttgagttg

SEQ ID NO: 4914881 - DNA, 25 bp, Homo sapien
caactcagcgttatcaactccatag

SEQ ID NO: 4914882 - DNA, 25 bp, Homo sapien
taattgcacactgtttcccaactca

SEQ ID NO: 4914883 - DNA, 25 bp, Homo sapien
cacaagtaattgactggaaagaaga

SEQ ID NO: 4914884 - DNA, 25 bp, Homo sapien
cagctgttgatgtgacctttgcagg

SEQ ID NO: 4914885 - DNA, 25 bp, Homo sapien
gtaacaggaaccccgtccacactga

SEQ ID NO: 4914886 - DNA, 25 bp, Homo sapien
ttgaaggtacattcccagctgttga

SEQ ID NO: 4914887 - DNA, 25 bp, Homo sapien
tccacactgactctaacagtgtagg

SEQ ID NO: 4914888 - DNA, 25 bp, Homo sapien
ccagataaaggtgtgatgcttctta

SEQ ID NO: 4914889 - DNA, 25 bp, Homo sapien
gttccagataaaggtgtgatgcttc

SEQ ID NO: 4914890 - DNA, 25 bp, Homo sapien
ggagttccagataaaggtgtgatgc

SEQ ID NO: 4914891 - DNA, 25 bp, Homo sapien
aggtgtgatgcttcttattgttggg

SEQ ID NO: 4914892 - DNA, 25 bp, Homo sapien
ctgccttggattgttattagtgtac

SEQ ID NO: 4914893 - DNA, 25 bp, Homo sapien
tagacatcagtgaagattctgcctt

SEQ ID NO: 4914894 - DNA, 25 bp, Homo sapien
tttttcccatttgagcttagtgcaa

SEQ ID NO: 4914895 - DNA, 25 bp, Homo sapien
tgagcttagtgcaatattacttcca

SEQ ID NO: 4914896 - DNA, 25 bp, Homo sapien
aattatcagattgtggtatgagaag

SEQ ID NO: 4914897 - DNA, 25 bp, Homo sapien
aaattatcagattgtggtatgagaa

SEQ ID NO: 4914898 - DNA, 25 bp, Homo sapien
attatcagattgtggtatgagaagc

SEQ ID NO: 4914899 - DNA, 25 bp, Homo sapien
ttatcagattgtggtatgagaagct

SEQ ID NO: 4914900 - DNA, 25 bp, Homo sapien
tagaacccatatctccatttggatg

SEQ ID NO: 4914901 - DNA, 25 bp, Homo sapien
tccatttggatgatccagttttaga

SEQ ID NO: 4914902 - DNA, 25 bp, Homo sapien
tggatgatccagttttagaccatat

SEQ ID NO: 4914903 - DNA, 25 bp, Homo sapien
gaacccatatctccatttggatgat

SEQ ID NO: 4914904 - DNA, 25 bp, Homo sapien
cattatctaagatgaagctgacatt

SEQ ID NO: 4914905 - DNA, 25 bp, Homo sapien
tctaagatgaagctgacattgtgat

SEQ ID NO: 4914906 - DNA, 25 bp, Homo sapien
ataatcattatctaagatgaagctg

SEQ ID NO: 4914907 - DNA, 25 bp, Homo sapien
tatctaagatgaagctgacattgtg

SEQ ID NO: 4914908 - DNA, 25 bp, Homo sapien
tatgggtacttatcaatcacgttca

SEQ ID NO: 4914909 - DNA, 25 bp, Homo sapien
aatcctgttgccgtgtcttatcaag

SEQ ID NO: 4914910 - DNA, 25 bp, Homo sapien
ccttgggaaggttgctactaagagc

SEQ ID NO: 4914911 - DNA, 25 bp, Homo sapien
tttctctgagagacatatgatggat

SEQ ID NO: 4914912 - DNA, 25 bp, Homo sapien
tatgtttgaaacattgcaattttat

SEQ ID NO: 4914913 - DNA, 25 bp, Homo sapien
aaaatatgccattttctgtggaaaa

SEQ ID NO: 4914914 - DNA, 25 bp, Homo sapien
tttgaaacattgcaattttattgag

SEQ ID NO: 4914915 - DNA, 25 bp, Homo sapien
tgaaacattgcaattttattgagag

SEQ ID NO: 4914916 - DNA, 25 bp, Homo sapien
attccatgaggaccaggctttagtg

SEQ ID NO: 4914917 - DNA, 25 bp, Homo sapien
cacgaaggcaggtagaaccacctct

SEQ ID NO: 4914918 - DNA, 25 bp, Homo sapien
gcaacattggtaatgcgagcattaa

SEQ ID NO: 4914919 - DNA, 25 bp, Homo sapien
taatgcgagcattaaagaagtaagg

SEQ ID NO: 4914920 - DNA, 25 bp, Homo sapien
tgccacctcgaatgcttccttgtga

SEQ ID NO: 4914921 - DNA, 25 bp, Homo sapien
caactagaactctgacggggaaatc

SEQ ID NO: 4914922 - DNA, 25 bp, Homo sapien
cacttattgtcagcgtggtgccacc

SEQ ID NO: 4914923 - DNA, 25 bp, Homo sapien
tgtctgatcaaagaaacgcccactt

SEQ ID NO: 4914924 - DNA, 25 bp, Homo sapien
cagttttgagaatatgaggtttggg

SEQ ID NO: 4914925 - DNA, 25 bp, Homo sapien
ggtgtcttgcaacatatactatttt

SEQ ID NO: 4914926 - DNA, 25 bp, Homo sapien
ttggggggtgtcttgcaacatatac

SEQ ID NO: 4914927 - DNA, 25 bp, Homo sapien
acagttttgagaatatgaggtttgg

SEQ ID NO: 4914928 - DNA, 25 bp, Homo sapien
caaacgtattggacggctattattc

SEQ ID NO: 4914929 - DNA, 25 bp, Homo sapien
agtatctcttccaaacgtattggac

SEQ ID NO: 4914930 - DNA, 25 bp, Homo sapien
tattggacggctattattccacacc

SEQ ID NO: 4914931 - DNA, 25 bp, Homo sapien
ctattattccacacctcaagcttca

SEQ ID NO: 4914932 - DNA, 25 bp, Homo sapien
taaatagcataacggtcatcaccct

SEQ ID NO: 4914933 - DNA, 25 bp, Homo sapien
taggaagctgaatctacccaactgg

SEQ ID NO: 4914934 - DNA, 25 bp, Homo sapien
tcagaatctggagccaccaaaaatc

SEQ ID NO: 4914935 - DNA, 25 bp, Homo sapien
gttccatgagccaaatataggaagc

SEQ ID NO: 4914936 - DNA, 25 bp, Homo sapien
gatgaatatcatctgatctttgtgt

SEQ ID NO: 4914937 - DNA, 25 bp, Homo sapien
gatctttgtgttggactggaaaaat

SEQ ID NO: 4914938 - DNA, 25 bp, Homo sapien
tctgatctttgtgttggactggaaa

SEQ ID NO: 4914939 - DNA, 25 bp, Homo sapien
tcatctgatctttgtgttggactgg

SEQ ID NO: 4914940 - DNA, 25 bp, Homo sapien
tacttcctggaggattgtcgactgg

SEQ ID NO: 4914941 - DNA, 25 bp, Homo sapien
acaaatgcacttaatctgtactcct

SEQ ID NO: 4914942 - DNA, 25 bp, Homo sapien
taaacatttcgatactggtacagtc

SEQ ID NO: 4914943 - DNA, 25 bp, Homo sapien
tggtacagtccaacatcaacaaatg

SEQ ID NO: 4914944 - DNA, 25 bp, Homo sapien
atctatattggtaaagtgaacatga

SEQ ID NO: 4914945 - DNA, 25 bp, Homo sapien
gcattagttgtttcccagttttcca

SEQ ID NO: 4914946 - DNA, 25 bp, Homo sapien
tccacacatgggctggttaccttga

SEQ ID NO: 4914947 - DNA, 25 bp, Homo sapien
tgaacctcattaattgcattagttg

SEQ ID NO: 4914948 - DNA, 25 bp, Homo sapien
ggtcattcaaggctgattgcagtat

SEQ ID NO: 4914949 - DNA, 25 bp, Homo sapien
gaccagaggtcattcaaggctgatt

SEQ ID NO: 4914950 - DNA, 25 bp, Homo sapien
caaggctgattgcagtatgaattca

SEQ ID NO: 4914951 - DNA, 25 bp, Homo sapien
ccggttttatagaccagaggtcatt

SEQ ID NO: 4914952 - DNA, 25 bp, Homo sapien
agtgagtggcttagaagcgatccca

SEQ ID NO: 4914953 - DNA, 25 bp, Homo sapien
gcgatcccatcccaattcagtgtga

SEQ ID NO: 4914954 - DNA, 25 bp, Homo sapien
ttctgatgaccatagagtgagtggc

SEQ ID NO: 4914955 - DNA, 25 bp, Homo sapien
tcagtgtgaatgtctccaagttggg

SEQ ID NO: 4914956 - DNA, 25 bp, Homo sapien
ttctctcctcactacgggtaggctc

SEQ ID NO: 4914957 - DNA, 25 bp, Homo sapien
tatggagatacattaggccctgttg

SEQ ID NO: 4914958 - DNA, 25 bp, Homo sapien
tgtcaaaatgttgtaactcacaagc

SEQ ID NO: 4914959 - DNA, 25 bp, Homo sapien
cgcttagaattaagggcttgagaca

SEQ ID NO: 4914960 - DNA, 25 bp, Homo sapien
taaaatcagtttcatagtctctgaa

SEQ ID NO: 4914961 - DNA, 25 bp, Homo sapien
ggacacttagtgctaaccatttctt

SEQ ID NO: 4914962 - DNA, 25 bp, Homo sapien
ttaaaatcagtttcatagtctctga

SEQ ID NO: 4914963 - DNA, 25 bp, Homo sapien
attaaaatcagtttcatagtctctg

SEQ ID NO: 4914964 - DNA, 25 bp, Homo sapien
catatggtcgtctgtttggtttaac

SEQ ID NO: 4914965 - DNA, 25 bp, Homo sapien
ttttcagggaataacgaccacagta

SEQ ID NO: 4914966 - DNA, 25 bp, Homo sapien
aaaatatctccatatggtcgtctgt

SEQ ID NO: 4914967 - DNA, 25 bp, Homo sapien
aagcatcggtttcagctgtcttctg

SEQ ID NO: 4914968 - DNA, 25 bp, Homo sapien
ctgtgtatcagtgcttctagtaatc

SEQ ID NO: 4914969 - DNA, 25 bp, Homo sapien
tatgtaaactgtgtatcagtgcttc

SEQ ID NO: 4914970 - DNA, 25 bp, Homo sapien
tatcagtgcttctagtaatcttgct

SEQ ID NO: 4914971 - DNA, 25 bp, Homo sapien
caaagttgtatgtaaactgtgtatc

SEQ ID NO: 4914972 - DNA, 25 bp, Homo sapien
aaaagatttagcattgtatacaaat

SEQ ID NO: 4914973 - DNA, 25 bp, Homo sapien
gatccagaaggtctatgcaagtgta

SEQ ID NO: 4914974 - DNA, 25 bp, Homo sapien
gtatttcgttcttacgagatccaga

SEQ ID NO: 4914975 - DNA, 25 bp, Homo sapien
aaggtctatgcaagtgtaagtccag

SEQ ID NO: 4914976 - DNA, 25 bp, Homo sapien
cgttcttacgagatccagaaggtct

SEQ ID NO: 4914977 - DNA, 25 bp, Homo sapien
gtacactacatccacatagaaggac

SEQ ID NO: 4914978 - DNA, 25 bp, Homo sapien
aggactgtgattctgatgctttatg

SEQ ID NO: 4914979 - DNA, 25 bp, Homo sapien
tccaatgttgagattgtagatgtgt

SEQ ID NO: 4914980 - DNA, 25 bp, Homo sapien
tagatgtgtgtccaatgtacactac

SEQ ID NO: 4914981 - DNA, 25 bp, Homo sapien
ggtctgattcacctgaaagtgctct

SEQ ID NO: 4914982 - DNA, 25 bp, Homo sapien
taactgcaattgtatgaagtcatgg

SEQ ID NO: 4914983 - DNA, 25 bp, Homo sapien
aatattggtttgtcatagttggccc

SEQ ID NO: 4914984 - DNA, 25 bp, Homo sapien
catcatgggtatattgtaactgcaa

SEQ ID NO: 4914985 - DNA, 25 bp, Homo sapien
gggagaattttgacacagatgcttt

SEQ ID NO: 4914986 - DNA, 25 bp, Homo sapien
ttgagaatacagagccttgaattag

SEQ ID NO: 4914987 - DNA, 25 bp, Homo sapien
aattttgacacagatgctttgagaa

SEQ ID NO: 4914988 - DNA, 25 bp, Homo sapien
ttgacacagatgctttgagaataca

SEQ ID NO: 4914989 - DNA, 25 bp, Homo sapien
tatgaatttttgactcgcctggcca

SEQ ID NO: 4914990 - DNA, 25 bp, Homo sapien
cctggccaattatttcctctgtaga

SEQ ID NO: 4914991 - DNA, 25 bp, Homo sapien
tcaaagctgccacttagaggtggag

SEQ ID NO: 4914992 - DNA, 25 bp, Homo sapien
agaatatgtccataagcttgaatgt

SEQ ID NO: 4914993 - DNA, 25 bp, Homo sapien
ttccctctcgtgtaactgagattct

SEQ ID NO: 4914994 - DNA, 25 bp, Homo sapien
tgttccacgcgtagccagcacaggt

SEQ ID NO: 4914995 - DNA, 25 bp, Homo sapien
agcacaggttccctctcgtgtaact

SEQ ID NO: 4914996 - DNA, 25 bp, Homo sapien
gttccacgcgtagccagcacaggtt

SEQ ID NO: 4914997 - DNA, 25 bp, Homo sapien
agattctgctttccgcaggtgcttc

SEQ ID NO: 4914998 - DNA, 25 bp, Homo sapien
gaagattctgctttccgcaggtgct

SEQ ID NO: 4914999 - DNA, 25 bp, Homo sapien
tagaagattctgctttccgcaggtg

SEQ ID NO: 4915000 - DNA, 25 bp, Homo sapien
ctgtagaagattctgctttccgcag

SEQ ID NO: 4915001 - DNA, 25 bp, Homo sapien
tgactgggtgtacgaagtaggtctc

SEQ ID NO: 4915002 - DNA, 25 bp, Homo sapien
tatccttgtaactgtcatattagcc

SEQ ID NO: 4915003 - DNA, 25 bp, Homo sapien
aagtacatgttgtctgaataagcca

SEQ ID NO: 4915004 - DNA, 25 bp, Homo sapien
tgttgtctgaataagccaccttcct

SEQ ID NO: 4915005 - DNA, 25 bp, Homo sapien
tgagaagggcttatcgccaagacta

SEQ ID NO: 4915006 - DNA, 25 bp, Homo sapien
ggaatcccatgtaaatccacagtca

SEQ ID NO: 4915007 - DNA, 25 bp, Homo sapien
gaacatttagctggaattccattga

SEQ ID NO: 4915008 - DNA, 25 bp, Homo sapien
tccacagtcacctgaacatttagct

SEQ ID NO: 4915009 - DNA, 25 bp, Homo sapien
tacagctgaactaggagaaaatcca

SEQ ID NO: 4915010 - DNA, 25 bp, Homo sapien
cacagaaagaagagaacaacctact

SEQ ID NO: 4915011 - DNA, 25 bp, Homo sapien
ggtccaactgagactgttacagctg

SEQ ID NO: 4915012 - DNA, 25 bp, Homo sapien
cactatggttagaattgtgccttct

SEQ ID NO: 4915013 - DNA, 25 bp, Homo sapien
attctgtgctagtccaacatcagcc

SEQ ID NO: 4915014 - DNA, 25 bp, Homo sapien
tccattcagaatctggcacttgagc

SEQ ID NO: 4915015 - DNA, 25 bp, Homo sapien
ccagaatcaggccagatatgtgaga

SEQ ID NO: 4915016 - DNA, 25 bp, Homo sapien
gagatctgactctgataaacaaagt

SEQ ID NO: 4915017 - DNA, 25 bp, Homo sapien
tcatttccaactaatacctttgaat

SEQ ID NO: 4915018 - DNA, 25 bp, Homo sapien
ccaaatccagataaagtcagtagag

SEQ ID NO: 4915019 - DNA, 25 bp, Homo sapien
aaatccccttcaatcacattgcagg

SEQ ID NO: 4915020 - DNA, 25 bp, Homo sapien
tggtgtcctgcaggttatcctattc

SEQ ID NO: 4915021 - DNA, 25 bp, Homo sapien
tggtgtctgtaaacaattataacta

SEQ ID NO: 4915022 - DNA, 25 bp, Homo sapien
tgttcgtacttttggactaaaatca

SEQ ID NO: 4915023 - DNA, 25 bp, Homo sapien
ttataactaaaagcatcccttgctg

SEQ ID NO: 4915024 - DNA, 25 bp, Homo sapien
tggcttgaaatccattggtagtaac

SEQ ID NO: 4915025 - DNA, 25 bp, Homo sapien
gagttcatttccaaaattatagccc

SEQ ID NO: 4915026 - DNA, 25 bp, Homo sapien
catttccaaaattatagcccttaat

SEQ ID NO: 4915027 - DNA, 25 bp, Homo sapien
ttcatttccaaaattatagccctta

SEQ ID NO: 4915028 - DNA, 25 bp, Homo sapien
gttttgtgtgagttcatttccaaaa

SEQ ID NO: 4915029 - DNA, 25 bp, Homo sapien
ttctgacttctacatagatatcatg

SEQ ID NO: 4915030 - DNA, 25 bp, Homo sapien
ggcatctaatatctgtgaagttcca

SEQ ID NO: 4915031 - DNA, 25 bp, Homo sapien
gatatcatgttttccaggagacaac

SEQ ID NO: 4915032 - DNA, 25 bp, Homo sapien
ttccagtgaagaatctggcaggttt

SEQ ID NO: 4915033 - DNA, 25 bp, Homo sapien
tattctcagctggtattgtgctgaa

SEQ ID NO: 4915034 - DNA, 25 bp, Homo sapien
ctaacagcacggtattctcagctgg

SEQ ID NO: 4915035 - DNA, 25 bp, Homo sapien
gctgaatccaaaaccccttatggtg

SEQ ID NO: 4915036 - DNA, 25 bp, Homo sapien
ttgtggaaacatgctggtcacttct

SEQ ID NO: 4915037 - DNA, 25 bp, Homo sapien
cccattgttggtaatcctgaatata

SEQ ID NO: 4915038 - DNA, 25 bp, Homo sapien
gatgtaacattgcaagggatggacc

SEQ ID NO: 4915039 - DNA, 25 bp, Homo sapien
gaatctttcccattgttggtaatcc

SEQ ID NO: 4915040 - DNA, 25 bp, Homo sapien
ctgatgatgatgtaacattgcaagg

SEQ ID NO: 4915041 - DNA, 25 bp, Homo sapien
gtttgccaatgccatgccactgtgt

SEQ ID NO: 4915042 - DNA, 25 bp, Homo sapien
ccctctaagaaacggatgtgtttgc

SEQ ID NO: 4915043 - DNA, 25 bp, Homo sapien
ggtgaccaggcataacctaatccat

SEQ ID NO: 4915044 - DNA, 25 bp, Homo sapien
gacacatttaggactggtggtgacc

SEQ ID NO: 4915045 - DNA, 25 bp, Homo sapien
ctcatcaacatacccgctgctataa

SEQ ID NO: 4915046 - DNA, 25 bp, Homo sapien
tccaggagaagtaaattggtaagaa

SEQ ID NO: 4915047 - DNA, 25 bp, Homo sapien
gctataataatggattccaggagaa

SEQ ID NO: 4915048 - DNA, 25 bp, Homo sapien
gaaaaatggagtgagcctcatcaac

SEQ ID NO: 4915049 - DNA, 25 bp, Homo sapien
tgtgtctggtttcagctggtaaaac

SEQ ID NO: 4915050 - DNA, 25 bp, Homo sapien
ggaatgtgtctggtttcagctggta

SEQ ID NO: 4915051 - DNA, 25 bp, Homo sapien
aagcatatgtggcttcagagcgacc

SEQ ID NO: 4915052 - DNA, 25 bp, Homo sapien
ttcagagcgacccacaaacaggtgc

SEQ ID NO: 4915053 - DNA, 25 bp, Homo sapien
acagagtttccatctttaaccatct

SEQ ID NO: 4915054 - DNA, 25 bp, Homo sapien
agcttcccaagtgcaaattctcagg

SEQ ID NO: 4915055 - DNA, 25 bp, Homo sapien
gcttcccaagtgcaaattctcaggt

SEQ ID NO: 4915056 - DNA, 25 bp, Homo sapien
tagcccatgggagattactaaagcc

SEQ ID NO: 4915057 - DNA, 25 bp, Homo sapien
tactaaagccatgtccaataattgt

SEQ ID NO: 4915058 - DNA, 25 bp, Homo sapien
ccagtggacggagtaatgttgctta

SEQ ID NO: 4915059 - DNA, 25 bp, Homo sapien
tatagatggtgaaaaacaacttgaa

SEQ ID NO: 4915060 - DNA, 25 bp, Homo sapien
tttacacctgcagaagaaacggcaa

SEQ ID NO: 4915061 - DNA, 25 bp, Homo sapien
tcctccagggcatatgtaaaaagca

SEQ ID NO: 4915062 - DNA, 25 bp, Homo sapien
tccaactgggagaggagtcacaaga

SEQ ID NO: 4915063 - DNA, 25 bp, Homo sapien
caacgtattgatagcagtgcccagg

SEQ ID NO: 4915064 - DNA, 25 bp, Homo sapien
gatactataatatcaagataataag

SEQ ID NO: 4915065 - DNA, 25 bp, Homo sapien
cgatactataatatcaagataataa

SEQ ID NO: 4915066 - DNA, 25 bp, Homo sapien
gccaaagttggatccagtgatctca

SEQ ID NO: 4915067 - DNA, 25 bp, Homo sapien
gcgggtactcaaatacaactgtgga

SEQ ID NO: 4915068 - DNA, 25 bp, Homo sapien
cattggccatggttacattacactg

SEQ ID NO: 4915069 - DNA, 25 bp, Homo sapien
gatgcactgcaccacactatcattg

SEQ ID NO: 4915070 - DNA, 25 bp, Homo sapien
gatggaatttcacataatagtgttg

SEQ ID NO: 4915071 - DNA, 25 bp, Homo sapien
cataatagtgttgtgtaatcagatc

SEQ ID NO: 4915072 - DNA, 25 bp, Homo sapien
gatctaagcctgtcaattgcacatt

SEQ ID NO: 4915073 - DNA, 25 bp, Homo sapien
gattaaatccggtgcctgtcacagt

SEQ ID NO: 4915074 - DNA, 25 bp, Homo sapien
gaatcctgatcccacgactgtcagt

SEQ ID NO: 4915075 - DNA, 25 bp, Homo sapien
cagtgatgagtggagtcagtgacac

SEQ ID NO: 4915076 - DNA, 25 bp, Homo sapien
aaatctttcccattaaccacactca

SEQ ID NO: 4915077 - DNA, 25 bp, Homo sapien
cgtaaacggagtcatggactgtgac

SEQ ID NO: 4915078 - DNA, 25 bp, Homo sapien
gctatggtgatatgaacatcctcca

SEQ ID NO: 4915079 - DNA, 25 bp, Homo sapien
ttggccatgccgacacctctgatgt

SEQ ID NO: 4915080 - DNA, 25 bp, Homo sapien
cctctgatgtggacacaaactggag

SEQ ID NO: 4915081 - DNA, 25 bp, Homo sapien
ccaccctgatagagtatgggcatct

SEQ ID NO: 4915082 - DNA, 25 bp, Homo sapien
tgatccagcagaatggtctgtcctt

SEQ ID NO: 4915083 - DNA, 25 bp, Homo sapien
catgagaaattggaggaccaggcat

SEQ ID NO: 4915084 - DNA, 25 bp, Homo sapien
gggtgctttgatccagcagaatggt

SEQ ID NO: 4915085 - DNA, 25 bp, Homo sapien
aacaacaagagatccttcttctggg

SEQ ID NO: 4915086 - DNA, 25 bp, Homo sapien
tagaatattttctgcctggagttca

SEQ ID NO: 4915087 - DNA, 25 bp, Homo sapien
tttctgcctggagttcaatgtcagc

SEQ ID NO: 4915088 - DNA, 25 bp, Homo sapien
agaatattttctgcctggagttcaa

SEQ ID NO: 4915089 - DNA, 25 bp, Homo sapien
ctgcctggagttcaatgtcagcttc

SEQ ID NO: 4915090 - DNA, 25 bp, Homo sapien
ttttggcaccatagacagggagctc

SEQ ID NO: 4915091 - DNA, 25 bp, Homo sapien
gagctcaggagatcgcaggtgacca

SEQ ID NO: 4915092 - DNA, 25 bp, Homo sapien
tgaccatgcaaggtaatgacagcct

SEQ ID NO: 4915093 - DNA, 25 bp, Homo sapien
aatgacagccttgtgttggaatggg

SEQ ID NO: 4915094 - DNA, 25 bp, Homo sapien
ctggtgagtcttcctctaccaactc

SEQ ID NO: 4915095 - DNA, 25 bp, Homo sapien
gagtcttcctctaccaactccctta

SEQ ID NO: 4915096 - DNA, 25 bp, Homo sapien
gtgagtcttcctctaccaactccct

SEQ ID NO: 4915097 - DNA, 25 bp, Homo sapien
gtcttcctctaccaactcccttagc

SEQ ID NO: 4915098 - DNA, 25 bp, Homo sapien
agccaagcgagtccaggtcacagga

SEQ ID NO: 4915099 - DNA, 25 bp, Homo sapien
gtgtcctgtgcttgcaattacaatg

SEQ ID NO: 4915100 - DNA, 25 bp, Homo sapien
tgcctttgcagtatgagccaagcga

SEQ ID NO: 4915101 - DNA, 25 bp, Homo sapien
tctcctggtttccatgttactgctt

SEQ ID NO: 4915102 - DNA, 25 bp, Homo sapien
tttttcattctctccttgactgtgt

SEQ ID NO: 4915103 - DNA, 25 bp, Homo sapien
gaccgtaattcctaagtgtgtgtaa

SEQ ID NO: 4915104 - DNA, 25 bp, Homo sapien
atttagtgggttacttagtgttatg

SEQ ID NO: 4915105 - DNA, 25 bp, Homo sapien
tcaaacagagttccatcagggagtg

SEQ ID NO: 4915106 - DNA, 25 bp, Homo sapien
aatccatcaggacatgcaggaattt

SEQ ID NO: 4915107 - DNA, 25 bp, Homo sapien
agacaggtctgtgtagcaaattctc

SEQ ID NO: 4915108 - DNA, 25 bp, Homo sapien
tacaggagcatgaaacataacgcag

SEQ ID NO: 4915109 - DNA, 25 bp, Homo sapien
cataacgcagcctccaaattggtca

SEQ ID NO: 4915110 - DNA, 25 bp, Homo sapien
aaattggtcacttcctatttcttct

SEQ ID NO: 4915111 - DNA, 25 bp, Homo sapien
ctctacatattctattctcccagtt

SEQ ID NO: 4915112 - DNA, 25 bp, Homo sapien
tgtattggatatcgccccaaccgga

SEQ ID NO: 4915113 - DNA, 25 bp, Homo sapien
catcagggtggttgttcatccggta

SEQ ID NO: 4915114 - DNA, 25 bp, Homo sapien
caaagctacacagttgggacggtca

SEQ ID NO: 4915115 - DNA, 25 bp, Homo sapien
aagttatggaactgaagggcacctc

SEQ ID NO: 4915116 - DNA, 25 bp, Homo sapien
ctaaacggtgaaagctgactgaagc

SEQ ID NO: 4915117 - DNA, 25 bp, Homo sapien
caatgagctgtgtggaatgacggta

SEQ ID NO: 4915118 - DNA, 25 bp, Homo sapien
cacagactgatccagggaacccaat

SEQ ID NO: 4915119 - DNA, 25 bp, Homo sapien
caatgagaagggtctagcaatgagc

SEQ ID NO: 4915120 - DNA, 25 bp, Homo sapien
gtggcactgcacacttaggttttct

SEQ ID NO: 4915121 - DNA, 25 bp, Homo sapien
tacatgacccttttaattcacaggg

SEQ ID NO: 4915122 - DNA, 25 bp, Homo sapien
tactcagatagcaggtacatgaccc

SEQ ID NO: 4915123 - DNA, 25 bp, Homo sapien
gacagtgggtatagctattactcag

SEQ ID NO: 4915124 - DNA, 25 bp, Homo sapien
gttcatagtaatggttaacttcact

SEQ ID NO: 4915125 - DNA, 25 bp, Homo sapien
ttcatagtaatggttaacttcactc

SEQ ID NO: 4915126 - DNA, 25 bp, Homo sapien
tcatcgcagaaggtgttaatgtggc

SEQ ID NO: 4915127 - DNA, 25 bp, Homo sapien
tatggactcgagctgcttgttaaag

SEQ ID NO: 4915128 - DNA, 25 bp, Homo sapien
gagaagatttcatcgcagaaggtgt

SEQ ID NO: 4915129 - DNA, 25 bp, Homo sapien
atttgaggagaagatttcatcgcag

SEQ ID NO: 4915130 - DNA, 25 bp, Homo sapien
agctaggtaggcaacaaaccatagt

SEQ ID NO: 4915131 - DNA, 25 bp, Homo sapien
gctaggtaggcaacaaaccatagtg

SEQ ID NO: 4915132 - DNA, 25 bp, Homo sapien
ggacagccttaggataagctgacat

SEQ ID NO: 4915133 - DNA, 25 bp, Homo sapien
tggacagccttaggataagctgaca

SEQ ID NO: 4915134 - DNA, 25 bp, Homo sapien
gcatttggaatcagagccatccatc

SEQ ID NO: 4915135 - DNA, 25 bp, Homo sapien
gacatatgagtcagtcgtttcttct

SEQ ID NO: 4915136 - DNA, 25 bp, Homo sapien
gccatccatccagacatatgagtca

SEQ ID NO: 4915137 - DNA, 25 bp, Homo sapien
taaaataccagttaatgtgatttgc

SEQ ID NO: 4915138 - DNA, 25 bp, Homo sapien
tagaatgtcgatgtatatgaaatgt

SEQ ID NO: 4915139 - DNA, 25 bp, Homo sapien
tgaaatgttggttatgtgatccaca

SEQ ID NO: 4915140 - DNA, 25 bp, Homo sapien
gaaatgttggttatgtgatccacac

SEQ ID NO: 4915141 - DNA, 25 bp, Homo sapien
cttgaatccatagaatgtcgatgta

SEQ ID NO: 4915142 - DNA, 25 bp, Homo sapien
gtgccagtccccattcttgctagta

SEQ ID NO: 4915143 - DNA, 25 bp, Homo sapien
aggaaccattcctcatatcaataat

SEQ ID NO: 4915144 - DNA, 25 bp, Homo sapien
tatagagtactagtgtttgcttcaa

SEQ ID NO: 4915145 - DNA, 25 bp, Homo sapien
gtgatataattacatagtcttcttc

SEQ ID NO: 4915146 - DNA, 25 bp, Homo sapien
tctttcacatcaggatccaggttcc

SEQ ID NO: 4915147 - DNA, 25 bp, Homo sapien
aaagcaatcctggagaatacaacag

SEQ ID NO: 4915148 - DNA, 25 bp, Homo sapien
ttgatggcggatgtacaggaaagca

SEQ ID NO: 4915149 - DNA, 25 bp, Homo sapien
tatatgtggctggtcgcttcttggg

SEQ ID NO: 4915150 - DNA, 25 bp, Homo sapien
cacatttgcccctgggtgaggtaca

SEQ ID NO: 4915151 - DNA, 25 bp, Homo sapien
ttctcgtgatgattgccaaaaagaa

SEQ ID NO: 4915152 - DNA, 25 bp, Homo sapien
taattattttctcgtgatgattgcc

SEQ ID NO: 4915153 - DNA, 25 bp, Homo sapien
gtataatcacatttgcccctgggtg

SEQ ID NO: 4915154 - DNA, 25 bp, Homo sapien
tctatgtcagctacaatccatgttc

SEQ ID NO: 4915155 - DNA, 25 bp, Homo sapien
gcagtgatatgtaggtagcattcaa

SEQ ID NO: 4915156 - DNA, 25 bp, Homo sapien
gcattcaaaacaacttctctgtaag

SEQ ID NO: 4915157 - DNA, 25 bp, Homo sapien
ctgcagctcctacattgtatttatc

SEQ ID NO: 4915158 - DNA, 25 bp, Homo sapien
ctgcagtgatatgtaggtagcattc

SEQ ID NO: 4915159 - DNA, 25 bp, Homo sapien
tctaagaacaatctttaagtctcct

SEQ ID NO: 4915160 - DNA, 25 bp, Homo sapien
cccttgatttggtccttctggaaga

SEQ ID NO: 4915161 - DNA, 25 bp, Homo sapien
atcttcccagccaccgattaatcta

SEQ ID NO: 4915162 - DNA, 25 bp, Homo sapien
ctaagacctttgccccttgatttgg

SEQ ID NO: 4915163 - DNA, 25 bp, Homo sapien
aatccacagcatccatcagagacag

SEQ ID NO: 4915164 - DNA, 25 bp, Homo sapien
tctgagagcttagttttatatattg

SEQ ID NO: 4915165 - DNA, 25 bp, Homo sapien
ggaattccatgaagatccagctcac

SEQ ID NO: 4915166 - DNA, 25 bp, Homo sapien
ggactttggaacctgcaaatgcagt

SEQ ID NO: 4915167 - DNA, 25 bp, Homo sapien
catgcaggattttaacgatacttct

SEQ ID NO: 4915168 - DNA, 25 bp, Homo sapien
gagtataggaaaggctatcattaag

SEQ ID NO: 4915169 - DNA, 25 bp, Homo sapien
ggaaatcgtagcttgtggttgttat

SEQ ID NO: 4915170 - DNA, 25 bp, Homo sapien
tggttgttatcacaatctcttctcc

SEQ ID NO: 4915171 - DNA, 25 bp, Homo sapien
gctaacgtgtagctctcaccagttc

SEQ ID NO: 4915172 - DNA, 25 bp, Homo sapien
ctgctaacgtgtagctctcaccagt

SEQ ID NO: 4915173 - DNA, 25 bp, Homo sapien
tgctaacgtgtagctctcaccagtt

SEQ ID NO: 4915174 - DNA, 25 bp, Homo sapien
cttcaccaactattttgatgttcct

SEQ ID NO: 4915175 - DNA, 25 bp, Homo sapien
tacgcgtgctccaaaagagtcctca

SEQ ID NO: 4915176 - DNA, 25 bp, Homo sapien
cagtgaatgagccaaccagtacgcg

SEQ ID NO: 4915177 - DNA, 25 bp, Homo sapien
tgatgttcctactcagtatcccaac

SEQ ID NO: 4915178 - DNA, 25 bp, Homo sapien
ggatggtctactcctagtacccaga

SEQ ID NO: 4915179 - DNA, 25 bp, Homo sapien
cataggaatagggttcatcgctgaa

SEQ ID NO: 4915180 - DNA, 25 bp, Homo sapien
cagattatgaccaacaagtagaggc

SEQ ID NO: 4915181 - DNA, 25 bp, Homo sapien
tctgttgcaaaacgaaataggcagt

SEQ ID NO: 4915182 - DNA, 25 bp, Homo sapien
catatcttggatctgtgctatccct

SEQ ID NO: 4915183 - DNA, 25 bp, Homo sapien
aagccttcttgaccactgtgataaa

SEQ ID NO: 4915184 - DNA, 25 bp, Homo sapien
ggttaagaaacgttacagcatatct

SEQ ID NO: 4915185 - DNA, 25 bp, Homo sapien
cttggatctgtgctatccctgaagc

SEQ ID NO: 4915186 - DNA, 25 bp, Homo sapien
aagcacagcctcgaatataagatga

SEQ ID NO: 4915187 - DNA, 25 bp, Homo sapien
cacagcctcgaatataagatgagcc

SEQ ID NO: 4915188 - DNA, 25 bp, Homo sapien
gcctcgaatataagatgagccatgt

SEQ ID NO: 4915189 - DNA, 25 bp, Homo sapien
gaaaagcacagcctcgaatataaga

SEQ ID NO: 4915190 - DNA, 25 bp, Homo sapien
cccactgtaaagtgaatgatgttgt

SEQ ID NO: 4915191 - DNA, 25 bp, Homo sapien
tgatgttgtcatctatgtccaatcc

SEQ ID NO: 4915192 - DNA, 25 bp, Homo sapien
cttcccccactgtaaagtgaatgat

SEQ ID NO: 4915193 - DNA, 25 bp, Homo sapien
gttgtcatctatgtccaatccatct

SEQ ID NO: 4915194 - DNA, 25 bp, Homo sapien
ttaaatcttttctgttctgataggt

SEQ ID NO: 4915195 - DNA, 25 bp, Homo sapien
ggttcctggccaaaccgaaagtgca

SEQ ID NO: 4915196 - DNA, 25 bp, Homo sapien
caaattccctcggactcggttggca

SEQ ID NO: 4915197 - DNA, 25 bp, Homo sapien
tcggttggcattcccccatattctt

SEQ ID NO: 4915198 - DNA, 25 bp, Homo sapien
aaactgtattggtccctctatttat

SEQ ID NO: 4915199 - DNA, 25 bp, Homo sapien
caaatccagccactacattattctg

SEQ ID NO: 4915200 - DNA, 25 bp, Homo sapien
cattattctgtaaaactgtattggt

SEQ ID NO: 4915201 - DNA, 25 bp, Homo sapien
tcaatgcggtatcctgctcttccaa

SEQ ID NO: 4915202 - DNA, 25 bp, Homo sapien
tatagatcccatataaacctccatg

SEQ ID NO: 4915203 - DNA, 25 bp, Homo sapien
catatagatcccatataaacctcca

SEQ ID NO: 4915204 - DNA, 25 bp, Homo sapien
tcatatagatcccatataaacctcc

SEQ ID NO: 4915205 - DNA, 25 bp, Homo sapien
atatagatcccatataaacctccat

SEQ ID NO: 4915206 - DNA, 25 bp, Homo sapien
gcaatagaatttgcaggttacataa

SEQ ID NO: 4915207 - DNA, 25 bp, Homo sapien
ctgcaatagaatttgcaggttacat

SEQ ID NO: 4915208 - DNA, 25 bp, Homo sapien
aatagaatttgcaggttacataata

SEQ ID NO: 4915209 - DNA, 25 bp, Homo sapien
caatagaatttgcaggttacataat

SEQ ID NO: 4915210 - DNA, 25 bp, Homo sapien
tgtgtgatatagcagctggcatgta

SEQ ID NO: 4915211 - DNA, 25 bp, Homo sapien
aattttgtgtgatatagcagctggc

SEQ ID NO: 4915212 - DNA, 25 bp, Homo sapien
ggaaaaatggccattccattgtcaa

SEQ ID NO: 4915213 - DNA, 25 bp, Homo sapien
ccattgtcaaccagggtcacattat

SEQ ID NO: 4915214 - DNA, 25 bp, Homo sapien
tggagatctaggactccgatgagca

SEQ ID NO: 4915215 - DNA, 25 bp, Homo sapien
taggatcatcattagttaggacatc

SEQ ID NO: 4915216 - DNA, 25 bp, Homo sapien
agttaggacatcagagcaattaaac

SEQ ID NO: 4915217 - DNA, 25 bp, Homo sapien
cccagggctacttccaacaattaat

SEQ ID NO: 4915218 - DNA, 25 bp, Homo sapien
gctgaagcaaaggtaggccaacaaa

SEQ ID NO: 4915219 - DNA, 25 bp, Homo sapien
gagctgaagcaaaggtaggccaaca

SEQ ID NO: 4915220 - DNA, 25 bp, Homo sapien
gaagcaaaggtaggccaacaaatcc

SEQ ID NO: 4915221 - DNA, 25 bp, Homo sapien
ctttcggggtgccatgttatgagct

SEQ ID NO: 4915222 - DNA, 25 bp, Homo sapien
gcagtggagtttgaatcagaagatt

SEQ ID NO: 4915223 - DNA, 25 bp, Homo sapien
ccatcctggttcagtgaaagagcag

SEQ ID NO: 4915224 - DNA, 25 bp, Homo sapien
tggccaggcactaagttctttgagc

SEQ ID NO: 4915225 - DNA, 25 bp, Homo sapien
gattctaatcctagctgtgccaata

SEQ ID NO: 4915226 - DNA, 25 bp, Homo sapien
tcatttatggtttagggaccagcta

SEQ ID NO: 4915227 - DNA, 25 bp, Homo sapien
tgacaagcagaagtgttaaccaagg

SEQ ID NO: 4915228 - DNA, 25 bp, Homo sapien
tatttataacaggaatgagggtctg

SEQ ID NO: 4915229 - DNA, 25 bp, Homo sapien
gctatggcagggtgaccaccaaacc

SEQ ID NO: 4915230 - DNA, 25 bp, Homo sapien
gggacctcaacagagccttacaaga

SEQ ID NO: 4915231 - DNA, 25 bp, Homo sapien
tctaagtgtaagatcagaggaacct

SEQ ID NO: 4915232 - DNA, 25 bp, Homo sapien
caggtcaaaggctcaaaaatgggaa

SEQ ID NO: 4915233 - DNA, 25 bp, Homo sapien
tgcatttcagcccaactcagaggtg

SEQ ID NO: 4915234 - DNA, 25 bp, Homo sapien
gatatggaagaaccttttgcctcaa

SEQ ID NO: 4915235 - DNA, 25 bp, Homo sapien
tcacctgagagattatgtactcccg

SEQ ID NO: 4915236 - DNA, 25 bp, Homo sapien
gctatgcctaactaactgacaagag

SEQ ID NO: 4915237 - DNA, 25 bp, Homo sapien
tgtactcccgtccattaccacaagt

SEQ ID NO: 4915238 - DNA, 25 bp, Homo sapien
aaaacataaataatagataagtgat

SEQ ID NO: 4915239 - DNA, 25 bp, Homo sapien
aacataaataatagataagtgatta

SEQ ID NO: 4915240 - DNA, 25 bp, Homo sapien
cataaataatagataagtgattatt

SEQ ID NO: 4915241 - DNA, 25 bp, Homo sapien
ctaaaacataaataatagataagtg

SEQ ID NO: 4915242 - DNA, 25 bp, Homo sapien
tatatcaggcctatgtataaatatt

SEQ ID NO: 4915243 - DNA, 25 bp, Homo sapien
ttatatcaggcctatgtataaatat

SEQ ID NO: 4915244 - DNA, 25 bp, Homo sapien
atatcaggcctatgtataaatattt

SEQ ID NO: 4915245 - DNA, 25 bp, Homo sapien
cttatatcaggcctatgtataaata

SEQ ID NO: 4915246 - DNA, 25 bp, Homo sapien
agttgaattattcagttcattgttt

SEQ ID NO: 4915247 - DNA, 25 bp, Homo sapien
aaagttgaattattcagttcattgt

SEQ ID NO: 4915248 - DNA, 25 bp, Homo sapien
gaaaagttgaattattcagttcatt

SEQ ID NO: 4915249 - DNA, 25 bp, Homo sapien
ctgtggagaaaagttgaattattca

SEQ ID NO: 4915250 - DNA, 25 bp, Homo sapien
gagcatcgccttaggaattctgtag

SEQ ID NO: 4915251 - DNA, 25 bp, Homo sapien
caattcctacttggctgtttccgtc

SEQ ID NO: 4915252 - DNA, 25 bp, Homo sapien
aaaggagccatctatgtctctaaga

SEQ ID NO: 4915253 - DNA, 25 bp, Homo sapien
tctgcttgaggtatcacagaaccag

SEQ ID NO: 4915254 - DNA, 25 bp, Homo sapien
taataagatcaacataaccgttgcc

SEQ ID NO: 4915255 - DNA, 25 bp, Homo sapien
aagtcttcgagtttctgtgtcagga

SEQ ID NO: 4915256 - DNA, 25 bp, Homo sapien
tgccactctggaaggtacttacagg

SEQ ID NO: 4915257 - DNA, 25 bp, Homo sapien
taaccgttgcccattatagccactg

SEQ ID NO: 4915258 - DNA, 25 bp, Homo sapien
catgtatatccagcacaccagccat

SEQ ID NO: 4915259 - DNA, 25 bp, Homo sapien
ccttctctggcatgtatatccagca

SEQ ID NO: 4915260 - DNA, 25 bp, Homo sapien
tggcatgtatatccagcacaccagc

SEQ ID NO: 4915261 - DNA, 25 bp, Homo sapien
ggacagccttctctggcatgtatat

SEQ ID NO: 4915262 - DNA, 25 bp, Homo sapien
gactggtgccagtgaagtaaacttc

SEQ ID NO: 4915263 - DNA, 25 bp, Homo sapien
aacatcagtcgaagattctgaggac

SEQ ID NO: 4915264 - DNA, 25 bp, Homo sapien
cttgttatgatcaacattaagcaac

SEQ ID NO: 4915265 - DNA, 25 bp, Homo sapien
ctgaggactggtgccagtgaagtaa

SEQ ID NO: 4915266 - DNA, 25 bp, Homo sapien
gctgggcattccatattgtagtttt

SEQ ID NO: 4915267 - DNA, 25 bp, Homo sapien
tctgctgggcattccatattgtagt

SEQ ID NO: 4915268 - DNA, 25 bp, Homo sapien
tccaaacgttgaagtgtggaaaaga

SEQ ID NO: 4915269 - DNA, 25 bp, Homo sapien
taagttgttcacatagacatccaaa

SEQ ID NO: 4915270 - DNA, 25 bp, Homo sapien
ttgtacagatggttattaagttcac

SEQ ID NO: 4915271 - DNA, 25 bp, Homo sapien
tttgtacagatggttattaagttca

SEQ ID NO: 4915272 - DNA, 25 bp, Homo sapien
ctttgtacagatggttattaagttc

SEQ ID NO: 4915273 - DNA, 25 bp, Homo sapien
taaaagtcatcttctgttgcaacag

SEQ ID NO: 4915274 - DNA, 25 bp, Homo sapien
cattgcttatgaactgaataggagg

SEQ ID NO: 4915275 - DNA, 25 bp, Homo sapien
caaagtagttttcaccaaggacagt

SEQ ID NO: 4915276 - DNA, 25 bp, Homo sapien
gaaacaaatatcactgtggcagtgt

SEQ ID NO: 4915277 - DNA, 25 bp, Homo sapien
gggattagtaatagacatggacgaa

SEQ ID NO: 4915278 - DNA, 25 bp, Homo sapien
tagacatggacgaaatgttaaatcc

SEQ ID NO: 4915279 - DNA, 25 bp, Homo sapien
ctgatgtttcctaaaattacagctt

SEQ ID NO: 4915280 - DNA, 25 bp, Homo sapien
aattacagcttgtccaagagaacca

SEQ ID NO: 4915281 - DNA, 25 bp, Homo sapien
gacacgaaggccacgtgatgaacag

SEQ ID NO: 4915282 - DNA, 25 bp, Homo sapien
aatctgttgcctttaccgaaggctg

SEQ ID NO: 4915283 - DNA, 25 bp, Homo sapien
tcactaagagtgaggacacgaaggc

SEQ ID NO: 4915284 - DNA, 25 bp, Homo sapien
gctgccaccggctgagtgatcacta

SEQ ID NO: 4915285 - DNA, 25 bp, Homo sapien
ggcccaacagctgctaaacggaatt

SEQ ID NO: 4915286 - DNA, 25 bp, Homo sapien
ccactaaggccattgacttggttat

SEQ ID NO: 4915287 - DNA, 25 bp, Homo sapien
ccctcaaagttagtgcagtaattcc

SEQ ID NO: 4915288 - DNA, 25 bp, Homo sapien
gagtccttgagtatggccctcaaag

SEQ ID NO: 4915289 - DNA, 25 bp, Homo sapien
aggggatttccttcagtgcagtgac

SEQ ID NO: 4915290 - DNA, 25 bp, Homo sapien
gatcagcaaggggatttccttcagt

SEQ ID NO: 4915291 - DNA, 25 bp, Homo sapien
cagcaaggggatttccttcagtgca

SEQ ID NO: 4915292 - DNA, 25 bp, Homo sapien
gcaaggggatttccttcagtgcagt

SEQ ID NO: 4915293 - DNA, 25 bp, Homo sapien
tcagtttcatcccttcgtacttgac

SEQ ID NO: 4915294 - DNA, 25 bp, Homo sapien
agccccttcctagtgcccaggactg

SEQ ID NO: 4915295 - DNA, 25 bp, Homo sapien
ccttcctagtgcccaggactggaca

SEQ ID NO: 4915296 - DNA, 25 bp, Homo sapien
tcctagtgcccaggactggacaaaa

SEQ ID NO: 4915297 - DNA, 25 bp, Homo sapien
ttagagccccttcctagtgcccagg

SEQ ID NO: 4915298 - DNA, 25 bp, Homo sapien
caacaacattatccagtataaattc

SEQ ID NO: 4915299 - DNA, 25 bp, Homo sapien
atccagtataaattcaatcttataa

SEQ ID NO: 4915300 - DNA, 25 bp, Homo sapien
ccagtataaattcaatcttataatt

SEQ ID NO: 4915301 - DNA, 25 bp, Homo sapien
acaacattatccagtataaattcaa

SEQ ID NO: 4915302 - DNA, 25 bp, Homo sapien
tatgtacccacagttgatgctttgc

SEQ ID NO: 4915303 - DNA, 25 bp, Homo sapien
gccactgctagagacagactctgcc

SEQ ID NO: 4915304 - DNA, 25 bp, Homo sapien
ccaaccagacagctaattactacag

SEQ ID NO: 4915305 - DNA, 25 bp, Homo sapien
gactctgccagcaggctgaaagttc

SEQ ID NO: 4915306 - DNA, 25 bp, Homo sapien
gcaggatgagagtctataaaggttt

SEQ ID NO: 4915307 - DNA, 25 bp, Homo sapien
aactcaggagctatatgatttacta

SEQ ID NO: 4915308 - DNA, 25 bp, Homo sapien
tgcacttaatgaggcaatgcaaaat

SEQ ID NO: 4915309 - DNA, 25 bp, Homo sapien
tatttagtagcaaagaagaagccat

SEQ ID NO: 4915310 - DNA, 25 bp, Homo sapien
tagtgtttaaagctaattagtacat

SEQ ID NO: 4915311 - DNA, 25 bp, Homo sapien
tcagcctattcttcggaacagcact

SEQ ID NO: 4915312 - DNA, 25 bp, Homo sapien
gcccaacaaagtagctaataattct

SEQ ID NO: 4915313 - DNA, 25 bp, Homo sapien
tgctatagacttttgcctattgccc

SEQ ID NO: 4915314 - DNA, 25 bp, Homo sapien
taagcatccaccagttaagggaacc

SEQ ID NO: 4915315 - DNA, 25 bp, Homo sapien
gctgagtgtcacttgctggaaggct

SEQ ID NO: 4915316 - DNA, 25 bp, Homo sapien
tatacaagagacaacggtatgggct

SEQ ID NO: 4915317 - DNA, 25 bp, Homo sapien
tccagtaaacagtgaataagcatcc

SEQ ID NO: 4915318 - DNA, 25 bp, Homo sapien
catggcaaatgttcctcatgaaggg

SEQ ID NO: 4915319 - DNA, 25 bp, Homo sapien
taagtctcagcgtgaaatggcccat

SEQ ID NO: 4915320 - DNA, 25 bp, Homo sapien
tttgaagactaccttgtcagggacc

SEQ ID NO: 4915321 - DNA, 25 bp, Homo sapien
gtatcaatgctctctggacatggca

SEQ ID NO: 4915322 - DNA, 25 bp, Homo sapien
gacttgttcaagagctagatagcca

SEQ ID NO: 4915323 - DNA, 25 bp, Homo sapien
gaagcctaaagcagttaaaacagga

SEQ ID NO: 4915324 - DNA, 25 bp, Homo sapien
ggacatgtgaagatgtattgcccat

SEQ ID NO: 4915325 - DNA, 25 bp, Homo sapien
gccaacatttcaggtcttaggtaga

SEQ ID NO: 4915326 - DNA, 25 bp, Homo sapien
gctggtatagggcaccacaatgtca

SEQ ID NO: 4915327 - DNA, 25 bp, Homo sapien
gcaggagatttaggataaccaccaa

SEQ ID NO: 4915328 - DNA, 25 bp, Homo sapien
tgaagcatttccattcgggagggta

SEQ ID NO: 4915329 - DNA, 25 bp, Homo sapien
tagtagtaactcaaagatgcatgtg

SEQ ID NO: 4915330 - DNA, 25 bp, Homo sapien
cagtgtgtctgtagctactctctgg

SEQ ID NO: 4915331 - DNA, 25 bp, Homo sapien
tgtagctggttagactgcccacaag

SEQ ID NO: 4915332 - DNA, 25 bp, Homo sapien
gacttgcaagtacggcaacaagagg

SEQ ID NO: 4915333 - DNA, 25 bp, Homo sapien
taggaaaagtttcatcatgctaccc

SEQ ID NO: 4915334 - DNA, 25 bp, Homo sapien
tcagcaaccagaagtagacatgtct

SEQ ID NO: 4915335 - DNA, 25 bp, Homo sapien
tttagctcacaacatggaatagtgc

SEQ ID NO: 4915336 - DNA, 25 bp, Homo sapien
ggatgaaagagcagctgtcagaact

SEQ ID NO: 4915337 - DNA, 25 bp, Homo sapien
gaatagtgcttccaagaaatagagg

SEQ ID NO: 4915338 - DNA, 25 bp, Homo sapien
tgagactcattcattgagctacagc

SEQ ID NO: 4915339 - DNA, 25 bp, Homo sapien
ttgtgttcagtggtgaggttcagcc

SEQ ID NO: 4915340 - DNA, 25 bp, Homo sapien
catgatggacatcgtgactttgacc

SEQ ID NO: 4915341 - DNA, 25 bp, Homo sapien
cagcatctggcagtctaagaccttt

SEQ ID NO: 4915342 - DNA, 25 bp, Homo sapien
gggtcaattgcctaatagagaaatc

SEQ ID NO: 4915343 - DNA, 25 bp, Homo sapien
caaaatcaccatatactagttaggg

SEQ ID NO: 4915344 - DNA, 25 bp, Homo sapien
aaagctttgccgcacatagagtgac

SEQ ID NO: 4915345 - DNA, 25 bp, Homo sapien
tcctactggagaattttacttgctt

SEQ ID NO: 4915346 - DNA, 25 bp, Homo sapien
ctctagccccgcccccagccctcct

SEQ ID NO: 4915347 - DNA, 25 bp, Homo sapien
ctcctctagccccgcccccagccct

SEQ ID NO: 4915348 - DNA, 25 bp, Homo sapien
tcctctagccccgcccccagccctc

SEQ ID NO: 4915349 - DNA, 25 bp, Homo sapien
ccagccccgctcattcaaagccggg

SEQ ID NO: 4915350 - DNA, 25 bp, Homo sapien
ccgggcgcgcgctccgtagcagcct

SEQ ID NO: 4915351 - DNA, 25 bp, Homo sapien
ctgcgttgcctctgcgcagctgcca

SEQ ID NO: 4915352 - DNA, 25 bp, Homo sapien
gcgcgctccgtagcagcctgcgttg

SEQ ID NO: 4915353 - DNA, 25 bp, Homo sapien
cgctcacgcgcgctgcctgtctctt

SEQ ID NO: 4915354 - DNA, 25 bp, Homo sapien
ctcttcctcgagctcgcgctccgcc

SEQ ID NO: 4915355 - DNA, 25 bp, Homo sapien
gctcacgcgcgctgcctgtctcttc

SEQ ID NO: 4915356 - DNA, 25 bp, Homo sapien
cgcgctcacgcgcgctgcctgtctc

SEQ ID NO: 4915357 - DNA, 25 bp, Homo sapien
ccgcccgcccggcggaggctccgag

SEQ ID NO: 4915358 - DNA, 25 bp, Homo sapien
tggcgaatgctgcacgcctgggtcc

SEQ ID NO: 4915359 - DNA, 25 bp, Homo sapien
gtctcccacgcgtgagcggagcatg

SEQ ID NO: 4915360 - DNA, 25 bp, Homo sapien
tgggtcccgctcccagtcgcagttt

SEQ ID NO: 4915361 - DNA, 25 bp, Homo sapien
agaggtcaccctgacccggaaacag

SEQ ID NO: 4915362 - DNA, 25 bp, Homo sapien
gacgtgaaacgctctaagttgctgg

SEQ ID NO: 4915363 - DNA, 25 bp, Homo sapien
ttttcaggttatacaagccgacgcc

SEQ ID NO: 4915364 - DNA, 25 bp, Homo sapien
taaggtcacgcaaatttccctgagg

SEQ ID NO: 4915365 - DNA, 25 bp, Homo sapien
taaattgtggaaaaatcggcctgga

SEQ ID NO: 4915366 - DNA, 25 bp, Homo sapien
taaaggtttgagcagcggcccgtaa

SEQ ID NO: 4915367 - DNA, 25 bp, Homo sapien
aataaaggtttgagcagcggcccgt

SEQ ID NO: 4915368 - DNA, 25 bp, Homo sapien
gaaacagaagcggagtgtgagagct

SEQ ID NO: 4915369 - DNA, 25 bp, Homo sapien
aaggtttgagcagcggcccgtaaga

SEQ ID NO: 4915370 - DNA, 25 bp, Homo sapien
tagtatctgatcttgattgctctgt

SEQ ID NO: 4915371 - DNA, 25 bp, Homo sapien
tatctgatcttgattgctctgtaaa

SEQ ID NO: 4915372 - DNA, 25 bp, Homo sapien
tcttgattgctctgtaaaggcatca

SEQ ID NO: 4915373 - DNA, 25 bp, Homo sapien
tgatcttgattgctctgtaaaggca

SEQ ID NO: 4915374 - DNA, 25 bp, Homo sapien
gaaaagacctattatgcactaagaa

SEQ ID NO: 4915375 - DNA, 25 bp, Homo sapien
cacaaatctgggaatctattaaaga

SEQ ID NO: 4915376 - DNA, 25 bp, Homo sapien
aaaagtcatactcctgtcctgaaaa

SEQ ID NO: 4915377 - DNA, 25 bp, Homo sapien
taaattgaaagttaccatggagctc

SEQ ID NO: 4915378 - DNA, 25 bp, Homo sapien
tgttgctaggcaggtacaaaattta

SEQ ID NO: 4915379 - DNA, 25 bp, Homo sapien
taaataaccgaaactgggtgatggc

SEQ ID NO: 4915380 - DNA, 25 bp, Homo sapien
aataaccgaaactgggtgatggcca

SEQ ID NO: 4915381 - DNA, 25 bp, Homo sapien
taatctctttaggaatgagaatact

SEQ ID NO: 4915382 - DNA, 25 bp, Homo sapien
ccagcgaggagataaacaggttagt

SEQ ID NO: 4915383 - DNA, 25 bp, Homo sapien
gaaagttggtctgtctattcctaaa

SEQ ID NO: 4915384 - DNA, 25 bp, Homo sapien
cctgtcctgtccacgaaatttgaag

SEQ ID NO: 4915385 - DNA, 25 bp, Homo sapien
gtatagacagaaatacctattccga

SEQ ID NO: 4915386 - DNA, 25 bp, Homo sapien
gtctccacttaatttccgtcctctg

SEQ ID NO: 4915387 - DNA, 25 bp, Homo sapien
ctgcttaggaactgatgaataatca

SEQ ID NO: 4915388 - DNA, 25 bp, Homo sapien
gtagttggcaaagttatttggtctc

SEQ ID NO: 4915389 - DNA, 25 bp, Homo sapien
gatgaataatcaactgtagttggca

SEQ ID NO: 4915390 - DNA, 25 bp, Homo sapien
tccttcgatctttacactggtgggt

SEQ ID NO: 4915391 - DNA, 25 bp, Homo sapien
gtgcatcttcatcccaggaagtcca

SEQ ID NO: 4915392 - DNA, 25 bp, Homo sapien
cctaatagttggtgtcatgtcctta

SEQ ID NO: 4915393 - DNA, 25 bp, Homo sapien
cagttgttccaaagaattttgttgt

SEQ ID NO: 4915394 - DNA, 25 bp, Homo sapien
tgtgctcccatctgggatgccaaaa

SEQ ID NO: 4915395 - DNA, 25 bp, Homo sapien
ggcagatcttgtgtagctgctaatc

SEQ ID NO: 4915396 - DNA, 25 bp, Homo sapien
tgatgaataaaaggcagatcttgtg

SEQ ID NO: 4915397 - DNA, 25 bp, Homo sapien
ctaatctactagagaaacctgtgct

SEQ ID NO: 4915398 - DNA, 25 bp, Homo sapien
caagccttcagatgattgtagcccc

SEQ ID NO: 4915399 - DNA, 25 bp, Homo sapien
ggtgcacagcaaggaactgaggctt

SEQ ID NO: 4915400 - DNA, 25 bp, Homo sapien
aaagaaattcaagcagctccttgga

SEQ ID NO: 4915401 - DNA, 25 bp, Homo sapien
gaatccttcgaccacaatcaagcct

SEQ ID NO: 4915402 - DNA, 25 bp, Homo sapien
tcatgggatactctcttaaattctc

SEQ ID NO: 4915403 - DNA, 25 bp, Homo sapien
gcttgcctagaactgatgtatgact

SEQ ID NO: 4915404 - DNA, 25 bp, Homo sapien
tttctctcctcagtaagatgaggga

SEQ ID NO: 4915405 - DNA, 25 bp, Homo sapien
tattttggaaggaacaagaacagaa

SEQ ID NO: 4915406 - DNA, 25 bp, Homo sapien
aggtatctaagtcacctaattcaga

SEQ ID NO: 4915407 - DNA, 25 bp, Homo sapien
gccaggtatctaagtcacctaattc

SEQ ID NO: 4915408 - DNA, 25 bp, Homo sapien
cctgccaggtatctaagtcacctaa

SEQ ID NO: 4915409 - DNA, 25 bp, Homo sapien
ttttcctgccaggtatctaagtcac

SEQ ID NO: 4915410 - DNA, 25 bp, Homo sapien
gggtagttcatctaacacatagggc

SEQ ID NO: 4915411 - DNA, 25 bp, Homo sapien
cagtactgggcactatgctagatca

SEQ ID NO: 4915412 - DNA, 25 bp, Homo sapien
cacatagggctttcatggacatcat

SEQ ID NO: 4915413 - DNA, 25 bp, Homo sapien
aagttgtaacttctgacctagagga

SEQ ID NO: 4915414 - DNA, 25 bp, Homo sapien
aattataaagggctggctaggttat

SEQ ID NO: 4915415 - DNA, 25 bp, Homo sapien
agtaagataacgaagttttgacctg

SEQ ID NO: 4915416 - DNA, 25 bp, Homo sapien
gctggctaggttataaacaagtaag

SEQ ID NO: 4915417 - DNA, 25 bp, Homo sapien
gacctggttactagctgaaataata

SEQ ID NO: 4915418 - DNA, 25 bp, Homo sapien
aatattaactacagtgagtgaaatg

SEQ ID NO: 4915419 - DNA, 25 bp, Homo sapien
atgtatgtacagttctcagtcataa

SEQ ID NO: 4915420 - DNA, 25 bp, Homo sapien
tctgggggagctcaatattaactac

SEQ ID NO: 4915421 - DNA, 25 bp, Homo sapien
tacagtgagtgaaatgtatgtacag

SEQ ID NO: 4915422 - DNA, 25 bp, Homo sapien
tccttagaacgtgacttgtgaaata

SEQ ID NO: 4915423 - DNA, 25 bp, Homo sapien
tcttagtccttagaacgtgacttgt

SEQ ID NO: 4915424 - DNA, 25 bp, Homo sapien
cttgtgaaatagaagaaatattatc

SEQ ID NO: 4915425 - DNA, 25 bp, Homo sapien
gatttctcttagtccttagaacgtg

SEQ ID NO: 4915426 - DNA, 25 bp, Homo sapien
tttgttgttcggctgctctcttttc

SEQ ID NO: 4915427 - DNA, 25 bp, Homo sapien
ttcattagccgttgtgcttcctttt

SEQ ID NO: 4915428 - DNA, 25 bp, Homo sapien
tccttcttcattagccgttgtgctt

SEQ ID NO: 4915429 - DNA, 25 bp, Homo sapien
tgttgttcggctgctctcttttctc

SEQ ID NO: 4915430 - DNA, 25 bp, Homo sapien
acaaatgttgcttgggttgtggagc

SEQ ID NO: 4915431 - DNA, 25 bp, Homo sapien
tactttgggagaatcgtggtgtcct

SEQ ID NO: 4915432 - DNA, 25 bp, Homo sapien
gagatttctcctactggcatgataa

SEQ ID NO: 4915433 - DNA, 25 bp, Homo sapien
cactaagagttcaaggtactttggg

SEQ ID NO: 4915434 - DNA, 25 bp, Homo sapien
gaaatcataacagacagtacagttc

SEQ ID NO: 4915435 - DNA, 25 bp, Homo sapien
tgaaggaaatcataacagacagtac

SEQ ID NO: 4915436 - DNA, 25 bp, Homo sapien
cattatgcacattgaaggaaatcat

SEQ ID NO: 4915437 - DNA, 25 bp, Homo sapien
cacattgaaggaaatcataacagac

SEQ ID NO: 4915438 - DNA, 25 bp, Homo sapien
tctaatttaggtcaggtaaccatgg

SEQ ID NO: 4915439 - DNA, 25 bp, Homo sapien
tatcaaacgtaaacaataccagttc

SEQ ID NO: 4915440 - DNA, 25 bp, Homo sapien
gttcaaattagagggaatgtatgtc

SEQ ID NO: 4915441 - DNA, 25 bp, Homo sapien
gctaaagccctacaatttatctaat

SEQ ID NO: 4915442 - DNA, 25 bp, Homo sapien
gttttcctagccaagaacacaggta

SEQ ID NO: 4915443 - DNA, 25 bp, Homo sapien
gaactaaggcactcaaagataccac

SEQ ID NO: 4915444 - DNA, 25 bp, Homo sapien
caggtaacctacataacgtcagaca

SEQ ID NO: 4915445 - DNA, 25 bp, Homo sapien
gctggatgcatttcaactgcggtga

SEQ ID NO: 4915446 - DNA, 25 bp, Homo sapien
tagagtggtgttggaagctcgatcc

SEQ ID NO: 4915447 - DNA, 25 bp, Homo sapien
ctgtaggtaccttctgcccaatcac

SEQ ID NO: 4915448 - DNA, 25 bp, Homo sapien
tggtagcttgtagagtggtgttgga

SEQ ID NO: 4915449 - DNA, 25 bp, Homo sapien
ttggaagctcgatccagatgctggt

SEQ ID NO: 4915450 - DNA, 25 bp, Homo sapien
taatttgatggtgcagttaagaccc

SEQ ID NO: 4915451 - DNA, 25 bp, Homo sapien
tatagaagccacgtaagtatctggg

SEQ ID NO: 4915452 - DNA, 25 bp, Homo sapien
cacatacaaatgactgcacaggcgg

SEQ ID NO: 4915453 - DNA, 25 bp, Homo sapien
gaagagcttgcatgtcatttcccta

SEQ ID NO: 4915454 - DNA, 25 bp, Homo sapien
tgtgggcattcagtactcagagagg

SEQ ID NO: 4915455 - DNA, 25 bp, Homo sapien
aaaccggaggtatcttcaaaggcat

SEQ ID NO: 4915456 - DNA, 25 bp, Homo sapien
caaaccgcctcatgagagagctgga

SEQ ID NO: 4915457 - DNA, 25 bp, Homo sapien
gaaagcatgctcatgaccctgccgt

SEQ ID NO: 4915458 - DNA, 25 bp, Homo sapien
ttatctctggaagagcaggtcacgg

SEQ ID NO: 4915459 - DNA, 25 bp, Homo sapien
gttcgatgagatagtgacagccacc

SEQ ID NO: 4915460 - DNA, 25 bp, Homo sapien
gactttccatgtgattccccagaga

SEQ ID NO: 4915461 - DNA, 25 bp, Homo sapien
gctctctgagggacgaactgtgcct

SEQ ID NO: 4915462 - DNA, 25 bp, Homo sapien
caaattatgtggtaggagttgagca

SEQ ID NO: 4915463 - DNA, 25 bp, Homo sapien
taatgaacatccctacctgtaatcc

SEQ ID NO: 4915464 - DNA, 25 bp, Homo sapien
tataattacacacccacctgttgtc

SEQ ID NO: 4915465 - DNA, 25 bp, Homo sapien
ctgggttctagaccagaaaaggcac

SEQ ID NO: 4915466 - DNA, 25 bp, Homo sapien
agtctctccttcagatattgctgtc

SEQ ID NO: 4915467 - DNA, 25 bp, Homo sapien
gtctctccttcagatattgctgtca

SEQ ID NO: 4915468 - DNA, 25 bp, Homo sapien
tctctgttgtgctgccaggacttat

SEQ ID NO: 4915469 - DNA, 25 bp, Homo sapien
ccccaacgccactaagccttccatt

SEQ ID NO: 4915470 - DNA, 25 bp, Homo sapien
ccttgaacacatgtcagggttaaaa

SEQ ID NO: 4915471 - DNA, 25 bp, Homo sapien
tgctgccaggacttatcttggaaat

SEQ ID NO: 4915472 - DNA, 25 bp, Homo sapien
tgtggtccttgcacaggtgtcccaa

SEQ ID NO: 4915473 - DNA, 25 bp, Homo sapien
gccccagctcgagaaggaagacaga

SEQ ID NO: 4915474 - DNA, 25 bp, Homo sapien
gacagaagtaggagcgaggcatccc

SEQ ID NO: 4915475 - DNA, 25 bp, Homo sapien
caaggcaggcgtgcaggaactgttc

SEQ ID NO: 4915476 - DNA, 25 bp, Homo sapien
aactggatcttcctgagtgtttggc

SEQ ID NO: 4915477 - DNA, 25 bp, Homo sapien
attcagggaaactggatcttcctga

SEQ ID NO: 4915478 - DNA, 25 bp, Homo sapien
gagtgtttggcttcttgtactcacc

SEQ ID NO: 4915479 - DNA, 25 bp, Homo sapien
acatggcagcaacattattcaggga

SEQ ID NO: 4915480 - DNA, 25 bp, Homo sapien
caagagagagcctgttcgtgtgatt

SEQ ID NO: 4915481 - DNA, 25 bp, Homo sapien
cctctgtgtaggctgaaacacgatg

SEQ ID NO: 4915482 - DNA, 25 bp, Homo sapien
cacatagtttgaagtgggcctctgt

SEQ ID NO: 4915483 - DNA, 25 bp, Homo sapien
aattaacgctaattggcactgcaca

SEQ ID NO: 4915484 - DNA, 25 bp, Homo sapien
gttttggtccaatattgtccgagga

SEQ ID NO: 4915485 - DNA, 25 bp, Homo sapien
tcttgactgttgtgtaggcatttac

SEQ ID NO: 4915486 - DNA, 25 bp, Homo sapien
ttgtccgaggattcatcttgactgt

SEQ ID NO: 4915487 - DNA, 25 bp, Homo sapien
tgagggcgatggtttcattggaaca

SEQ ID NO: 4915488 - DNA, 25 bp, Homo sapien
gcagcacagctgcaataggcttgta

SEQ ID NO: 4915489 - DNA, 25 bp, Homo sapien
acacggactggcatatttgtaacat

SEQ ID NO: 4915490 - DNA, 25 bp, Homo sapien
gtattccaacatacacggactggca

SEQ ID NO: 4915491 - DNA, 25 bp, Homo sapien
gctgcaataggcttgtattccaaca

SEQ ID NO: 4915492 - DNA, 25 bp, Homo sapien
aagcctgtatctaagagcagccaag

SEQ ID NO: 4915493 - DNA, 25 bp, Homo sapien
tcacttgggcaattcgatgggttaa

SEQ ID NO: 4915494 - DNA, 25 bp, Homo sapien
cagccaagtaagctatatgaatgcc

SEQ ID NO: 4915495 - DNA, 25 bp, Homo sapien
tttcttccaccacctaagcctgtat

SEQ ID NO: 4915496 - DNA, 25 bp, Homo sapien
ctggtacaatctgttgcatggcatt

SEQ ID NO: 4915497 - DNA, 25 bp, Homo sapien
gggccagagggataaatacctggac

SEQ ID NO: 4915498 - DNA, 25 bp, Homo sapien
cagaaaaggggccagagggataaat

SEQ ID NO: 4915499 - DNA, 25 bp, Homo sapien
taaatacctggacctcactgtctgc

SEQ ID NO: 4915500 - DNA, 25 bp, Homo sapien
caactcctccctcgccaaaacctct

SEQ ID NO: 4915501 - DNA, 25 bp, Homo sapien
tctgtttcccaatttcaacaccaac

SEQ ID NO: 4915502 - DNA, 25 bp, Homo sapien
tgtttcccaatttcaacaccaactc

SEQ ID NO: 4915503 - DNA, 25 bp, Homo sapien
gcctctgtttcccaatttcaacacc

SEQ ID NO: 4915504 - DNA, 25 bp, Homo sapien
tggtgccctgttgaggcatgacaac

SEQ ID NO: 4915505 - DNA, 25 bp, Homo sapien
gtttgtggcacaagcaattaaggca

SEQ ID NO: 4915506 - DNA, 25 bp, Homo sapien
taaagtgaagtgagctgcaattcca

SEQ ID NO: 4915507 - DNA, 25 bp, Homo sapien
caaattataacctgactggtgccct

SEQ ID NO: 4915508 - DNA, 25 bp, Homo sapien
tagaaaagccgatgacctaggtgag

SEQ ID NO: 4915509 - DNA, 25 bp, Homo sapien
gacatggttagcagcatgccgtgca

SEQ ID NO: 4915510 - DNA, 25 bp, Homo sapien
tgtgtcaggcacatacatcagtcac

SEQ ID NO: 4915511 - DNA, 25 bp, Homo sapien
tgttactgtaccatgaccctagcca

SEQ ID NO: 4915512 - DNA, 25 bp, Homo sapien
gaactctgggcacgtcatttcaaac

SEQ ID NO: 4915513 - DNA, 25 bp, Homo sapien
caccctggtgagtgtggatgaactc

SEQ ID NO: 4915514 - DNA, 25 bp, Homo sapien
gatggaaacccactgctgctttgcc

SEQ ID NO: 4915515 - DNA, 25 bp, Homo sapien
ctgtaatcaattcctctgtgaggga

SEQ ID NO: 4915516 - DNA, 25 bp, Homo sapien
tgccggcctcccagaggtgtttatt

SEQ ID NO: 4915517 - DNA, 25 bp, Homo sapien
ccttcaatttatgccatgtgccggc

SEQ ID NO: 4915518 - DNA, 25 bp, Homo sapien
tcctggtaagccggtggaaggaaca

SEQ ID NO: 4915519 - DNA, 25 bp, Homo sapien
ttacccttcaatttatgccatgtgc

SEQ ID NO: 4915520 - DNA, 25 bp, Homo sapien
ccccgggtagagtggatgcctgagg

SEQ ID NO: 4915521 - DNA, 25 bp, Homo sapien
ggtagagtggatgcctgagggccct

SEQ ID NO: 4915522 - DNA, 25 bp, Homo sapien
ctgggcggcagatgtgcagggcgaa

SEQ ID NO: 4915523 - DNA, 25 bp, Homo sapien
atccgaggctgcgtgcggctggcgg

SEQ ID NO: 4915524 - DNA, 25 bp, Homo sapien
aggcgggcactgcggggcgagaagc

SEQ ID NO: 4915525 - DNA, 25 bp, Homo sapien
gcgggcactgcggggcgagaagcgg

SEQ ID NO: 4915526 - DNA, 25 bp, Homo sapien
aaggcgggcactgcggggcgagaag

SEQ ID NO: 4915527 - DNA, 25 bp, Homo sapien
cggggcgagaagcggcgggatgaga

SEQ ID NO: 4915528 - DNA, 25 bp, Homo sapien
ggcccctccgcgagagcaaggtaag

SEQ ID NO: 4915529 - DNA, 25 bp, Homo sapien
ccgcgccggctcagcgcagtctcct

SEQ ID NO: 4915530 - DNA, 25 bp, Homo sapien
tcgctccgtgctcgcaggtgcctcc

SEQ ID NO: 4915531 - DNA, 25 bp, Homo sapien
ctcagcgcagtctcctcgctccgtg

SEQ ID NO: 4915532 - DNA, 25 bp, Homo sapien
tctcagtcactccatccaacgccac

SEQ ID NO: 4915533 - DNA, 25 bp, Homo sapien
tctctgtgatgtcgcagcttttctc

SEQ ID NO: 4915534 - DNA, 25 bp, Homo sapien
gtctctctgtgatgtcgcagctttt

SEQ ID NO: 4915535 - DNA, 25 bp, Homo sapien
tccatccaacgccacccacttcaaa

SEQ ID NO: 4915536 - DNA, 25 bp, Homo sapien
tctcgggcgaggcagttgtggggag

SEQ ID NO: 4915537 - DNA, 25 bp, Homo sapien
cgggcgaggcagttgtggggagctg

SEQ ID NO: 4915538 - DNA, 25 bp, Homo sapien
tcgggcgaggcagttgtggggagct

SEQ ID NO: 4915539 - DNA, 25 bp, Homo sapien
ctctcgggcgaggcagttgtgggga

SEQ ID NO: 4915540 - DNA, 25 bp, Homo sapien
tccggtacgagagggatctctgcag

SEQ ID NO: 4915541 - DNA, 25 bp, Homo sapien
ttccaagtagaatccatcgcagcct

SEQ ID NO: 4915542 - DNA, 25 bp, Homo sapien
tgcgctgaccactgaaggcctttct

SEQ ID NO: 4915543 - DNA, 25 bp, Homo sapien
tgtgtcggtcctgacgcactggctt

SEQ ID NO: 4915544 - DNA, 25 bp, Homo sapien
tttaggcataaaggcactcaggctg

SEQ ID NO: 4915545 - DNA, 25 bp, Homo sapien
tcaagaaccgtaggcgtaggccacg

SEQ ID NO: 4915546 - DNA, 25 bp, Homo sapien
tgggttccaaaagtacagagctaag

SEQ ID NO: 4915547 - DNA, 25 bp, Homo sapien
tccccagttggacagattttcgagc

SEQ ID NO: 4915548 - DNA, 25 bp, Homo sapien
cagtttctttccttcgtgacgtgtt

SEQ ID NO: 4915549 - DNA, 25 bp, Homo sapien
ttccttcgtgacgtgttgtgaagca

SEQ ID NO: 4915550 - DNA, 25 bp, Homo sapien
cgtgttgtgaagcacgtcagctgct

SEQ ID NO: 4915551 - DNA, 25 bp, Homo sapien
gtgttgtgaagcacgtcagctgctc

SEQ ID NO: 4915552 - DNA, 25 bp, Homo sapien
acatgctcttatgggaaaacaggca

SEQ ID NO: 4915553 - DNA, 25 bp, Homo sapien
gggattgctcaaaggtttcagattg

SEQ ID NO: 4915554 - DNA, 25 bp, Homo sapien
gctctctaggcaagaagtttggcag

SEQ ID NO: 4915555 - DNA, 25 bp, Homo sapien
ttgaaaagcctcacacagctctcta

SEQ ID NO: 4915556 - DNA, 25 bp, Homo sapien
tgcttcccagttggctagacaaggg

SEQ ID NO: 4915557 - DNA, 25 bp, Homo sapien
ccagtttccaaagcctaattgattc

SEQ ID NO: 4915558 - DNA, 25 bp, Homo sapien
agtttccaaagcctaattgattcat

SEQ ID NO: 4915559 - DNA, 25 bp, Homo sapien
cgaccagtttccaaagcctaattga

SEQ ID NO: 4915560 - DNA, 25 bp, Homo sapien
gaccagtttccaaagcctaattgat

SEQ ID NO: 4915561 - DNA, 25 bp, Homo sapien
aagcacagcagttgccatggtgttc

SEQ ID NO: 4915562 - DNA, 25 bp, Homo sapien
taatccacatccacgttggtcaagt

SEQ ID NO: 4915563 - DNA, 25 bp, Homo sapien
cacagcagttgccatggtgttctct

SEQ ID NO: 4915564 - DNA, 25 bp, Homo sapien
caagtagagcttcctactcagaagc

SEQ ID NO: 4915565 - DNA, 25 bp, Homo sapien
cgttttgtgagagaagatgtggcat

SEQ ID NO: 4915566 - DNA, 25 bp, Homo sapien
ggcctgagaggcaagaacacaaagt

SEQ ID NO: 4915567 - DNA, 25 bp, Homo sapien
taaggcctgagaggcaagaacacaa

SEQ ID NO: 4915568 - DNA, 25 bp, Homo sapien
gacttggaggggcactcttaaggcc

SEQ ID NO: 4915569 - DNA, 25 bp, Homo sapien
gggcactcttaaggcctgagaggca

SEQ ID NO: 4915570 - DNA, 25 bp, Homo sapien
taggggcagggaaacttggagccat

SEQ ID NO: 4915571 - DNA, 25 bp, Homo sapien
tataggggcagggaaacttggagcc

SEQ ID NO: 4915572 - DNA, 25 bp, Homo sapien
ctataggggcagggaaacttggagc

SEQ ID NO: 4915573 - DNA, 25 bp, Homo sapien
ataggggcagggaaacttggagcca

SEQ ID NO: 4915574 - DNA, 25 bp, Homo sapien
tcatttactcggattttattatgtg

SEQ ID NO: 4915575 - DNA, 25 bp, Homo sapien
aagccactgaatagctgtaggtacc

SEQ ID NO: 4915576 - DNA, 25 bp, Homo sapien
gctgtaactacatcatttactcgga

SEQ ID NO: 4915577 - DNA, 25 bp, Homo sapien
caggcactgtgctagtcacagataa

SEQ ID NO: 4915578 - DNA, 25 bp, Homo sapien
gatatttgagtggttctatttgttc

SEQ ID NO: 4915579 - DNA, 25 bp, Homo sapien
gaccacttgttttatcaaaacaatc

SEQ ID NO: 4915580 - DNA, 25 bp, Homo sapien
tcagtaaggtaaggcctatagtgca

SEQ ID NO: 4915581 - DNA, 25 bp, Homo sapien
agggtcagtaaggtaaggcctatag

SEQ ID NO: 4915582 - DNA, 25 bp, Homo sapien
ggtaaggcctatagtgcataaagac

SEQ ID NO: 4915583 - DNA, 25 bp, Homo sapien
ccagcaaagcagggtatgtgttatt

SEQ ID NO: 4915584 - DNA, 25 bp, Homo sapien
atgacatttgcgagtggccagcaaa

SEQ ID NO: 4915585 - DNA, 25 bp, Homo sapien
tgacatttgcgagtggccagcaaag

SEQ ID NO: 4915586 - DNA, 25 bp, Homo sapien
taggagcataggagcaaaagtcata

SEQ ID NO: 4915587 - DNA, 25 bp, Homo sapien
gagcataggagcaaaagtcataaac

SEQ ID NO: 4915588 - DNA, 25 bp, Homo sapien
gcaaaagtcataaacaaggagagcc

SEQ ID NO: 4915589 - DNA, 25 bp, Homo sapien
taggagcaaaagtcataaacaagga

SEQ ID NO: 4915590 - DNA, 25 bp, Homo sapien
gctcacccaaaatcttgcagcctgt

SEQ ID NO: 4915591 - DNA, 25 bp, Homo sapien
gaattattaccaagtgccagaacag

SEQ ID NO: 4915592 - DNA, 25 bp, Homo sapien
ttttacagctgagaattgagtagct

SEQ ID NO: 4915593 - DNA, 25 bp, Homo sapien
caagtgccagaacagtaacccagta

SEQ ID NO: 4915594 - DNA, 25 bp, Homo sapien
gaagtagttctcgactctgaagaag

SEQ ID NO: 4915595 - DNA, 25 bp, Homo sapien
tcgactctgaagaagttatgagatt

SEQ ID NO: 4915596 - DNA, 25 bp, Homo sapien
tactgtgggtattagtactatagaa

SEQ ID NO: 4915597 - DNA, 25 bp, Homo sapien
tagtactatagaagtagttctcgac

SEQ ID NO: 4915598 - DNA, 25 bp, Homo sapien
ccatgttgccgctttgccttgtcca

SEQ ID NO: 4915599 - DNA, 25 bp, Homo sapien
ttacatccccatgttgccgctttgc

SEQ ID NO: 4915600 - DNA, 25 bp, Homo sapien
catgttgccgctttgccttgtccat

SEQ ID NO: 4915601 - DNA, 25 bp, Homo sapien
cttttacatccccatgttgccgctt

SEQ ID NO: 4915602 - DNA, 25 bp, Homo sapien
tctcttgcatcggtgcaccatttga

SEQ ID NO: 4915603 - DNA, 25 bp, Homo sapien
atacagcaacttcagttttgggttt

SEQ ID NO: 4915604 - DNA, 25 bp, Homo sapien
tttgacacgtgaagaatatttctag

SEQ ID NO: 4915605 - DNA, 25 bp, Homo sapien
ggtttacgtggtagaaatctcttgc

SEQ ID NO: 4915606 - DNA, 25 bp, Homo sapien
tacttccaatgctagatccaccttg

SEQ ID NO: 4915607 - DNA, 25 bp, Homo sapien
gaactatctagttgcagtccccaca

SEQ ID NO: 4915608 - DNA, 25 bp, Homo sapien
ccttgggaatgtgagagtccacact

SEQ ID NO: 4915609 - DNA, 25 bp, Homo sapien
cacaacgccttcagactcaagtata

SEQ ID NO: 4915610 - DNA, 25 bp, Homo sapien
taagccatgaggtactagaacacga

SEQ ID NO: 4915611 - DNA, 25 bp, Homo sapien
atcaaatgaatcgtgctgtgaggcc

SEQ ID NO: 4915612 - DNA, 25 bp, Homo sapien
tgtgctgaaccagatcccgaagggc

SEQ ID NO: 4915613 - DNA, 25 bp, Homo sapien
tgttcatagaacgtaaggctgcctt

SEQ ID NO: 4915614 - DNA, 25 bp, Homo sapien
acaagtctctcaggtacagcaggca

SEQ ID NO: 4915615 - DNA, 25 bp, Homo sapien
tgtgatagctcccaacaggttgaaa

SEQ ID NO: 4915616 - DNA, 25 bp, Homo sapien
gaggctccaagatgcccctttaaaa

SEQ ID NO: 4915617 - DNA, 25 bp, Homo sapien
ttccctgcatgatcaaagagccctt

SEQ ID NO: 4915618 - DNA, 25 bp, Homo sapien
gaaaggcattcccatgtgcagggcc

SEQ ID NO: 4915619 - DNA, 25 bp, Homo sapien
ttggttatcccaacactgcctctgc

SEQ ID NO: 4915620 - DNA, 25 bp, Homo sapien
tatcccaacactgcctctgcttggg

SEQ ID NO: 4915621 - DNA, 25 bp, Homo sapien
tggttatcccaacactgcctctgct

SEQ ID NO: 4915622 - DNA, 25 bp, Homo sapien
gttatcccaacactgcctctgcttg

SEQ ID NO: 4915623 - DNA, 25 bp, Homo sapien
ggtctaggagaaacaaatcgcctct

SEQ ID NO: 4915624 - DNA, 25 bp, Homo sapien
catggacgctcagcttgggtaagat

SEQ ID NO: 4915625 - DNA, 25 bp, Homo sapien
gactgaggcctcagaataccgtgaa

SEQ ID NO: 4915626 - DNA, 25 bp, Homo sapien
tggacatggccgataggaaagacag

SEQ ID NO: 4915627 - DNA, 25 bp, Homo sapien
aactggccaatggaggcattctgcc

SEQ ID NO: 4915628 - DNA, 25 bp, Homo sapien
tggaggctctagctcaaaaaagctg

SEQ ID NO: 4915629 - DNA, 25 bp, Homo sapien
tatcatccttgtacttaatgccaga

SEQ ID NO: 4915630 - DNA, 25 bp, Homo sapien
caaataggagccagttggaggctct

SEQ ID NO: 4915631 - DNA, 25 bp, Homo sapien
tggcaaagagccagccaagcatcac

SEQ ID NO: 4915632 - DNA, 25 bp, Homo sapien
gtggctggcaaagagccagccaagc

SEQ ID NO: 4915633 - DNA, 25 bp, Homo sapien
gtgagttgaggaggttgtggctggc

SEQ ID NO: 4915634 - DNA, 25 bp, Homo sapien
ttgaggaggttgtggctggcaaaga

SEQ ID NO: 4915635 - DNA, 25 bp, Homo sapien
tggaacctttacagctctgcaatag

SEQ ID NO: 4915636 - DNA, 25 bp, Homo sapien
caataggtcatgcagatggtgggac

SEQ ID NO: 4915637 - DNA, 25 bp, Homo sapien
ttcaggagcatcaacaggtggtccc

SEQ ID NO: 4915638 - DNA, 25 bp, Homo sapien
cacaggctacgtggactctactaac

SEQ ID NO: 4915639 - DNA, 25 bp, Homo sapien
gagcaatatcctcaagaagttgcag

SEQ ID NO: 4915640 - DNA, 25 bp, Homo sapien
accagaacagagcaatatcctcaag

SEQ ID NO: 4915641 - DNA, 25 bp, Homo sapien
tatcctcaagaagttgcagcaacct

SEQ ID NO: 4915642 - DNA, 25 bp, Homo sapien
gcaactgaagttacatttattaggt

SEQ ID NO: 4915643 - DNA, 25 bp, Homo sapien
ctgccctaaatccaccctttcctgg

SEQ ID NO: 4915644 - DNA, 25 bp, Homo sapien
agaggcacacagcagcttcatcctg

SEQ ID NO: 4915645 - DNA, 25 bp, Homo sapien
tgattgctgaatggaggtgggacct

SEQ ID NO: 4915646 - DNA, 25 bp, Homo sapien
gaggtgggacctgccctaaatccac

SEQ ID NO: 4915647 - DNA, 25 bp, Homo sapien
tccagggagtctagttacaaagtag

SEQ ID NO: 4915648 - DNA, 25 bp, Homo sapien
gtccagggagtctagttacaaagta

SEQ ID NO: 4915649 - DNA, 25 bp, Homo sapien
tgtccagggagtctagttacaaagt

SEQ ID NO: 4915650 - DNA, 25 bp, Homo sapien
acctcaagaactgtccagggagtct

SEQ ID NO: 4915651 - DNA, 25 bp, Homo sapien
aacagagtccttgaagttctccctg

SEQ ID NO: 4915652 - DNA, 25 bp, Homo sapien
aaacagagtccttgaagttctccct

SEQ ID NO: 4915653 - DNA, 25 bp, Homo sapien
gtgccacttcatgctaaagccagag

SEQ ID NO: 4915654 - DNA, 25 bp, Homo sapien
tgtgccacttcatgctaaagccaga

SEQ ID NO: 4915655 - DNA, 25 bp, Homo sapien
attgtgccacttcatgctaaagcca

SEQ ID NO: 4915656 - DNA, 25 bp, Homo sapien
ccacttcatgctaaagccagagctg

SEQ ID NO: 4915657 - DNA, 25 bp, Homo sapien
gcaagttgctggatgattgcaagac

SEQ ID NO: 4915658 - DNA, 25 bp, Homo sapien
gaaggcccagagtttgcgaaacagg

SEQ ID NO: 4915659 - DNA, 25 bp, Homo sapien
caggtaagggttcaaggctgactga

SEQ ID NO: 4915660 - DNA, 25 bp, Homo sapien
attgcaagacgctcgcagaaggccc

SEQ ID NO: 4915661 - DNA, 25 bp, Homo sapien
gctgatgatgatagaccccatgctg

SEQ ID NO: 4915662 - DNA, 25 bp, Homo sapien
taagaagttcctagtgttgtccaaa

SEQ ID NO: 4915663 - DNA, 25 bp, Homo sapien
tgctggaatcgagcgtcactggtct

SEQ ID NO: 4915664 - DNA, 25 bp, Homo sapien
tatagagatcccaggtatcagagtc

SEQ ID NO: 4915665 - DNA, 25 bp, Homo sapien
ttcatgtcgcaaaacaggctaagca

SEQ ID NO: 4915666 - DNA, 25 bp, Homo sapien
cacagatggcagagacctaccttag

SEQ ID NO: 4915667 - DNA, 25 bp, Homo sapien
taccttaggtagtaggcatggtctc

SEQ ID NO: 4915668 - DNA, 25 bp, Homo sapien
cacttagctatatctggacttggga

SEQ ID NO: 4915669 - DNA, 25 bp, Homo sapien
atataaccgtggagaccaagaacag

SEQ ID NO: 4915670 - DNA, 25 bp, Homo sapien
cagatcatcaagcatgtggtccctg

SEQ ID NO: 4915671 - DNA, 25 bp, Homo sapien
gtaattcctcctgatataaccgtgg

SEQ ID NO: 4915672 - DNA, 25 bp, Homo sapien
gtggtccctggacaggatctctgga

SEQ ID NO: 4915673 - DNA, 25 bp, Homo sapien
acttctccacagacttaatttgggg

SEQ ID NO: 4915674 - DNA, 25 bp, Homo sapien
atctactgtacacaagcgctaactt

SEQ ID NO: 4915675 - DNA, 25 bp, Homo sapien
tctccacagacttaatttggggaga

SEQ ID NO: 4915676 - DNA, 25 bp, Homo sapien
tactgtacacaagcgctaacttctc

SEQ ID NO: 4915677 - DNA, 25 bp, Homo sapien
acagctggccctagactccccgact

SEQ ID NO: 4915678 - DNA, 25 bp, Homo sapien
cctagactccccgactggctgtagc

SEQ ID NO: 4915679 - DNA, 25 bp, Homo sapien
tagactccccgactggctgtagcac

SEQ ID NO: 4915680 - DNA, 25 bp, Homo sapien
tggccctagactccccgactggctg

SEQ ID NO: 4915681 - DNA, 25 bp, Homo sapien
tgtgggaaccataacaggtgacctg

SEQ ID NO: 4915682 - DNA, 25 bp, Homo sapien
tttatgactcataccaactggccac

SEQ ID NO: 4915683 - DNA, 25 bp, Homo sapien
caaatgtggttgtgggaaccataac

SEQ ID NO: 4915684 - DNA, 25 bp, Homo sapien
caaccaggttgtgcggcagaggtcg

SEQ ID NO: 4915685 - DNA, 25 bp, Homo sapien
ttcgttttcctccgctttgtatcca

SEQ ID NO: 4915686 - DNA, 25 bp, Homo sapien
tcgttttcctccgctttgtatccac

SEQ ID NO: 4915687 - DNA, 25 bp, Homo sapien
tcctccgctttgtatccacctcagc

SEQ ID NO: 4915688 - DNA, 25 bp, Homo sapien
gacgaagatgagcatatgagtccat

SEQ ID NO: 4915689 - DNA, 25 bp, Homo sapien
tggacgaagatgagcatatgagtcc

SEQ ID NO: 4915690 - DNA, 25 bp, Homo sapien
tctggacgaagatgagcatatgagt

SEQ ID NO: 4915691 - DNA, 25 bp, Homo sapien
ctggacgaagatgagcatatgagtc

SEQ ID NO: 4915692 - DNA, 25 bp, Homo sapien
tcaggatttcacagagatacgctct

SEQ ID NO: 4915693 - DNA, 25 bp, Homo sapien
taaatttgcagtgacaggctcaaga

SEQ ID NO: 4915694 - DNA, 25 bp, Homo sapien
aagtgccctggatctattatgctca

SEQ ID NO: 4915695 - DNA, 25 bp, Homo sapien
tacgctctattcacatgatgaccac

SEQ ID NO: 4915696 - DNA, 25 bp, Homo sapien
cattggacgtagactctaattccat

SEQ ID NO: 4915697 - DNA, 25 bp, Homo sapien
catgtgttgactagagagaggagtt

SEQ ID NO: 4915698 - DNA, 25 bp, Homo sapien
aggagttggcagcacattggacgta

SEQ ID NO: 4915699 - DNA, 25 bp, Homo sapien
cttcatgtgttgactagagagagga

SEQ ID NO: 4915700 - DNA, 25 bp, Homo sapien
cactgtgccatacacaagtttcttt

SEQ ID NO: 4915701 - DNA, 25 bp, Homo sapien
ttccactgtgccatacacaagtttc

SEQ ID NO: 4915702 - DNA, 25 bp, Homo sapien
tccactgtgccatacacaagtttct

SEQ ID NO: 4915703 - DNA, 25 bp, Homo sapien
ctgtgccatacacaagtttctttcc

SEQ ID NO: 4915704 - DNA, 25 bp, Homo sapien
tcttgtcccccgaacatctcatttt

SEQ ID NO: 4915705 - DNA, 25 bp, Homo sapien
tctcttgtcccccgaacatctcatt

SEQ ID NO: 4915706 - DNA, 25 bp, Homo sapien
tgtcccccgaacatctcattttcat

SEQ ID NO: 4915707 - DNA, 25 bp, Homo sapien
cctctcttgtcccccgaacatctca

SEQ ID NO: 4915708 - DNA, 25 bp, Homo sapien
gcttccagagctgctcaagtcacac

SEQ ID NO: 4915709 - DNA, 25 bp, Homo sapien
tagcttccagagctgctcaagtcac

SEQ ID NO: 4915710 - DNA, 25 bp, Homo sapien
tccagagctgctcaagtcacacagt

SEQ ID NO: 4915711 - DNA, 25 bp, Homo sapien
ttccagagctgctcaagtcacacag

SEQ ID NO: 4915712 - DNA, 25 bp, Homo sapien
cagtttccatatttgaacgttgtgg

SEQ ID NO: 4915713 - DNA, 25 bp, Homo sapien
ctgcttataaggtcccacagtttcc

SEQ ID NO: 4915714 - DNA, 25 bp, Homo sapien
catatttgaacgttgtggagcccac

SEQ ID NO: 4915715 - DNA, 25 bp, Homo sapien
tactttcactgactgcttataaggt

SEQ ID NO: 4915716 - DNA, 25 bp, Homo sapien
ggcgcaggggtggagctttagccag

SEQ ID NO: 4915717 - DNA, 25 bp, Homo sapien
acctaggtccataggcacaggcgca

SEQ ID NO: 4915718 - DNA, 25 bp, Homo sapien
ccagggaccggctcttctctaccca

SEQ ID NO: 4915719 - DNA, 25 bp, Homo sapien
ccccctctcatatcatttcccccct

SEQ ID NO: 4915720 - DNA, 25 bp, Homo sapien
catggagaacatgatatttgcattg

SEQ ID NO: 4915721 - DNA, 25 bp, Homo sapien
tttctccacgtagagtatgtgcatg

SEQ ID NO: 4915722 - DNA, 25 bp, Homo sapien
cacagataaaagaggaactttctcc

SEQ ID NO: 4915723 - DNA, 25 bp, Homo sapien
tgtcaatttcatggagaacatgata

SEQ ID NO: 4915724 - DNA, 25 bp, Homo sapien
tcttagcagctctaggatgtttcag

SEQ ID NO: 4915725 - DNA, 25 bp, Homo sapien
taaacaccaaagattcggatgatcg

SEQ ID NO: 4915726 - DNA, 25 bp, Homo sapien
gaaggactaagtggttatccagaga

SEQ ID NO: 4915727 - DNA, 25 bp, Homo sapien
aacaattgccgtcttgaaaatggga

SEQ ID NO: 4915728 - DNA, 25 bp, Homo sapien
ccctcagggagaacgctgatgaaag

SEQ ID NO: 4915729 - DNA, 25 bp, Homo sapien
gatctcatgatattgaaggtttcca

SEQ ID NO: 4915730 - DNA, 25 bp, Homo sapien
aatgccctcagggagaacgctgatg

SEQ ID NO: 4915731 - DNA, 25 bp, Homo sapien
gaacgctgatgaaagttccatactt

SEQ ID NO: 4915732 - DNA, 25 bp, Homo sapien
gatcacatcgctcttgtgcctggaa

SEQ ID NO: 4915733 - DNA, 25 bp, Homo sapien
tggatcacatcgctcttgtgcctgg

SEQ ID NO: 4915734 - DNA, 25 bp, Homo sapien
gttgtggatcacatcgctcttgtgc

SEQ ID NO: 4915735 - DNA, 25 bp, Homo sapien
tccaggttgtggatcacatcgctct

SEQ ID NO: 4915736 - DNA, 25 bp, Homo sapien
aaaccgagggtttcatcagtgatca

SEQ ID NO: 4915737 - DNA, 25 bp, Homo sapien
tattagaacagatccggcagactgg

SEQ ID NO: 4915738 - DNA, 25 bp, Homo sapien
gatccggcagactggaaaaccgagg

SEQ ID NO: 4915739 - DNA, 25 bp, Homo sapien
actgcatattagaacagatccggca

SEQ ID NO: 4915740 - DNA, 25 bp, Homo sapien
gataatgctgaatccatctgaaaat

SEQ ID NO: 4915741 - DNA, 25 bp, Homo sapien
cagtatctcccttgataatgctgaa

SEQ ID NO: 4915742 - DNA, 25 bp, Homo sapien
catcacatagtaataattccacagt

SEQ ID NO: 4915743 - DNA, 25 bp, Homo sapien
taatttaacgaagagtaaaacatga

SEQ ID NO: 4915744 - DNA, 25 bp, Homo sapien
caaattcttcaaggcctagtttaat

SEQ ID NO: 4915745 - DNA, 25 bp, Homo sapien
attcttcaaggcctagtttaatcat

SEQ ID NO: 4915746 - DNA, 25 bp, Homo sapien
ctccaaattcttcaaggcctagttt

SEQ ID NO: 4915747 - DNA, 25 bp, Homo sapien
tctgcctctccaaattcttcaaggc

SEQ ID NO: 4915748 - DNA, 25 bp, Homo sapien
catcttcaatgtggaacacctttac

SEQ ID NO: 4915749 - DNA, 25 bp, Homo sapien
tcaatgtggaacacctttacttcac

SEQ ID NO: 4915750 - DNA, 25 bp, Homo sapien
tcttcaatgtggaacacctttactt

SEQ ID NO: 4915751 - DNA, 25 bp, Homo sapien
ttcaatgtggaacacctttacttca

SEQ ID NO: 4915752 - DNA, 25 bp, Homo sapien
tgggctgattcctaattgagattct

SEQ ID NO: 4915753 - DNA, 25 bp, Homo sapien
catccttctagatcctgaagtcagg

SEQ ID NO: 4915754 - DNA, 25 bp, Homo sapien
tattgcttgccaccataatcttaat

SEQ ID NO: 4915755 - DNA, 25 bp, Homo sapien
tgggttaccatatttcagagaagag

SEQ ID NO: 4915756 - DNA, 25 bp, Homo sapien
tttgattggccaacccagattatgt

SEQ ID NO: 4915757 - DNA, 25 bp, Homo sapien
tattttgattggccaacccagatta

SEQ ID NO: 4915758 - DNA, 25 bp, Homo sapien
ttttgattggccaacccagattatg

SEQ ID NO: 4915759 - DNA, 25 bp, Homo sapien
attttgattggccaacccagattat

SEQ ID NO: 4915760 - DNA, 25 bp, Homo sapien
tcacagctcaacagtagctttgaac

SEQ ID NO: 4915761 - DNA, 25 bp, Homo sapien
ggatcacagctcaacagtagctttg

SEQ ID NO: 4915762 - DNA, 25 bp, Homo sapien
caggatcacagctcaacagtagctt

SEQ ID NO: 4915763 - DNA, 25 bp, Homo sapien
cagctcaacagtagctttgaactcc

SEQ ID NO: 4915764 - DNA, 25 bp, Homo sapien
agctactgcacccggtggatgctat

SEQ ID NO: 4915765 - DNA, 25 bp, Homo sapien
ctactgcacccggtggatgctattt

SEQ ID NO: 4915766 - DNA, 25 bp, Homo sapien
gcacccggtggatgctattttaata

SEQ ID NO: 4915767 - DNA, 25 bp, Homo sapien
ctgcacccggtggatgctattttaa

SEQ ID NO: 4915768 - DNA, 25 bp, Homo sapien
tctccataagtagagttgtagtgca

SEQ ID NO: 4915769 - DNA, 25 bp, Homo sapien
ctccataagtagagttgtagtgcat

SEQ ID NO: 4915770 - DNA, 25 bp, Homo sapien
aaacttgtaccaattatgagaattc

SEQ ID NO: 4915771 - DNA, 25 bp, Homo sapien
caaacttgtaccaattatgagaatt

SEQ ID NO: 4915772 - DNA, 25 bp, Homo sapien
cagttgtcctgaaatgggcatggtt

SEQ ID NO: 4915773 - DNA, 25 bp, Homo sapien
cattgacagttgtcctgaaatgggc

SEQ ID NO: 4915774 - DNA, 25 bp, Homo sapien
catccacattgacagttgtcctgaa

SEQ ID NO: 4915775 - DNA, 25 bp, Homo sapien
gaaggatcatccacattgacagttg

SEQ ID NO: 4915776 - DNA, 25 bp, Homo sapien
tggcactgctaggagcaactgattt

SEQ ID NO: 4915777 - DNA, 25 bp, Homo sapien
tgctaggagcaactgattttgacat

SEQ ID NO: 4915778 - DNA, 25 bp, Homo sapien
cttttgatcaacacgataacaggaa

SEQ ID NO: 4915779 - DNA, 25 bp, Homo sapien
aacacgataacaggaatggcactgc

SEQ ID NO: 4915780 - DNA, 25 bp, Homo sapien
gcttgtatttaaagtccttaggaga

SEQ ID NO: 4915781 - DNA, 25 bp, Homo sapien
tttattcttcaggtagtttaccagc

SEQ ID NO: 4915782 - DNA, 25 bp, Homo sapien
cagcttgtatttaaagtccttagga

SEQ ID NO: 4915783 - DNA, 25 bp, Homo sapien
tattcttcaggtagtttaccagctt

SEQ ID NO: 4915784 - DNA, 25 bp, Homo sapien
ttatccgggtaaatgtgtgccaagg

SEQ ID NO: 4915785 - DNA, 25 bp, Homo sapien
aaggcactttcaaccatttatccgg

SEQ ID NO: 4915786 - DNA, 25 bp, Homo sapien
tcacacagtaatctcagagggatct

SEQ ID NO: 4915787 - DNA, 25 bp, Homo sapien
taataagtgtgcatagttttggacc

SEQ ID NO: 4915788 - DNA, 25 bp, Homo sapien
gattgctctgaccagcacttctatt

SEQ ID NO: 4915789 - DNA, 25 bp, Homo sapien
tacctaattagactcttggttttgc

SEQ ID NO: 4915790 - DNA, 25 bp, Homo sapien
tgattgctctgaccagcacttctat

SEQ ID NO: 4915791 - DNA, 25 bp, Homo sapien
ttattctgattcttggcattagtag

SEQ ID NO: 4915792 - DNA, 25 bp, Homo sapien
tagtagacaagccattatcgataag

SEQ ID NO: 4915793 - DNA, 25 bp, Homo sapien
gatggcgcaaggtatcgccaagcat

SEQ ID NO: 4915794 - DNA, 25 bp, Homo sapien
cattatcgataagatggcgcaaggt

SEQ ID NO: 4915795 - DNA, 25 bp, Homo sapien
tgtgcctctatggacaccccaagca

SEQ ID NO: 4915796 - DNA, 25 bp, Homo sapien
caagcacctttgttctacattccac

SEQ ID NO: 4915797 - DNA, 25 bp, Homo sapien
aatgtgcctctatggacaccccaag

SEQ ID NO: 4915798 - DNA, 25 bp, Homo sapien
acaatgtgcctctatggacacccca

SEQ ID NO: 4915799 - DNA, 25 bp, Homo sapien
tgtgccttagctgctcacgtttagg

SEQ ID NO: 4915800 - DNA, 25 bp, Homo sapien
ttcagggcatctttgttatcacagc

SEQ ID NO: 4915801 - DNA, 25 bp, Homo sapien
tgtatgctcactttgcctggctcca

SEQ ID NO: 4915802 - DNA, 25 bp, Homo sapien
tataacgcagttaggaagtgattgc

SEQ ID NO: 4915803 - DNA, 25 bp, Homo sapien
cagttgcttttatgatccaagggtc

SEQ ID NO: 4915804 - DNA, 25 bp, Homo sapien
gcagttgcttttatgatccaagggt

SEQ ID NO: 4915805 - DNA, 25 bp, Homo sapien
agttgcttttatgatccaagggtca

SEQ ID NO: 4915806 - DNA, 25 bp, Homo sapien
tttctaaataccgaagtagcttcat

SEQ ID NO: 4915807 - DNA, 25 bp, Homo sapien
ccacttgcatgggtcccttcagggc

SEQ ID NO: 4915808 - DNA, 25 bp, Homo sapien
ttaggtggttagtactgaagccacc

SEQ ID NO: 4915809 - DNA, 25 bp, Homo sapien
gttagtactgaagccaccagaggcc

SEQ ID NO: 4915810 - DNA, 25 bp, Homo sapien
tgcatgcaagaacatccacttgcat

SEQ ID NO: 4915811 - DNA, 25 bp, Homo sapien
ggctctggtcctatctggttctctc

SEQ ID NO: 4915812 - DNA, 25 bp, Homo sapien
ggcctatgccaaggtcttcatcttc

SEQ ID NO: 4915813 - DNA, 25 bp, Homo sapien
actctgttaactcttcctccgtctt

SEQ ID NO: 4915814 - DNA, 25 bp, Homo sapien
ctgctggtggcctatgccaaggtct

SEQ ID NO: 4915815 - DNA, 25 bp, Homo sapien
ggtcaattacttggcgacttagtcc

SEQ ID NO: 4915816 - DNA, 25 bp, Homo sapien
ggtacacctgttgtcatcactattt

SEQ ID NO: 4915817 - DNA, 25 bp, Homo sapien
gacacatatcttgagtgcatgtgca

SEQ ID NO: 4915818 - DNA, 25 bp, Homo sapien
ttgcataacacatgtgagattctag

SEQ ID NO: 4915819 - DNA, 25 bp, Homo sapien
gagattctagatgcaggtgttatgg

SEQ ID NO: 4915820 - DNA, 25 bp, Homo sapien
agagacaggttatcttgcattgatg

SEQ ID NO: 4915821 - DNA, 25 bp, Homo sapien
ttggctgcattccgaagaagagaca

SEQ ID NO: 4915822 - DNA, 25 bp, Homo sapien
ggctgcattccgaagaagagacagg

SEQ ID NO: 4915823 - DNA, 25 bp, Homo sapien
gctgcattccgaagaagagacaggt

SEQ ID NO: 4915824 - DNA, 25 bp, Homo sapien
agttattgcagtactggcggtttgc

SEQ ID NO: 4915825 - DNA, 25 bp, Homo sapien
ctggcggtttgctgccacagtggaa

SEQ ID NO: 4915826 - DNA, 25 bp, Homo sapien
ttaggaagcatctattaaatccatt

SEQ ID NO: 4915827 - DNA, 25 bp, Homo sapien
catttccaagtcagttattgcagta

SEQ ID NO: 4915828 - DNA, 25 bp, Homo sapien
tcattttaaactttagctgtctggg

SEQ ID NO: 4915829 - DNA, 25 bp, Homo sapien
aagattatgtgttgctttaccaggt

SEQ ID NO: 4915830 - DNA, 25 bp, Homo sapien
cagtctacggttaggttaaatctgc

SEQ ID NO: 4915831 - DNA, 25 bp, Homo sapien
accaccactgtgacaaaatgctctg

SEQ ID NO: 4915832 - DNA, 25 bp, Homo sapien
tatgtacggaatggatcttgccaaa

SEQ ID NO: 4915833 - DNA, 25 bp, Homo sapien
tgtacggaatggatcttgccaaagc

SEQ ID NO: 4915834 - DNA, 25 bp, Homo sapien
ctttatgtacggaatggatcttgcc

SEQ ID NO: 4915835 - DNA, 25 bp, Homo sapien
tacggaatggatcttgccaaagcat

SEQ ID NO: 4915836 - DNA, 25 bp, Homo sapien
tgagctaggattgtaccaccgaagt

SEQ ID NO: 4915837 - DNA, 25 bp, Homo sapien
aggattgtaccaccgaagtccagtg

SEQ ID NO: 4915838 - DNA, 25 bp, Homo sapien
gagctaggattgtaccaccgaagtc

SEQ ID NO: 4915839 - DNA, 25 bp, Homo sapien
gctaggattgtaccaccgaagtcca

SEQ ID NO: 4915840 - DNA, 25 bp, Homo sapien
tatacaacatgtatctgagccactt

SEQ ID NO: 4915841 - DNA, 25 bp, Homo sapien
cacttcatatcactcctcagggact

SEQ ID NO: 4915842 - DNA, 25 bp, Homo sapien
gaaaggtacaggtagtatcttctcc

SEQ ID NO: 4915843 - DNA, 25 bp, Homo sapien
gagtgatctctgaccaatgagttcc

SEQ ID NO: 4915844 - DNA, 25 bp, Homo sapien
ccatcctccaggacattagagagtc

SEQ ID NO: 4915845 - DNA, 25 bp, Homo sapien
gactcctcagacctagtcacttctg

SEQ ID NO: 4915846 - DNA, 25 bp, Homo sapien
gagtctagaagtcaatactccctgg

SEQ ID NO: 4915847 - DNA, 25 bp, Homo sapien
ttcagactcctcagacctagtcact

SEQ ID NO: 4915848 - DNA, 25 bp, Homo sapien
gatgctcaaacctagttctgtcctc

SEQ ID NO: 4915849 - DNA, 25 bp, Homo sapien
aatccatattgaaagggttctgaga

SEQ ID NO: 4915850 - DNA, 25 bp, Homo sapien
ttcaatggatgaagaaggataatcc

SEQ ID NO: 4915851 - DNA, 25 bp, Homo sapien
aatagaacattagtgaataccagta

SEQ ID NO: 4915852 - DNA, 25 bp, Homo sapien
taaaagtagccgtagcgcaaagcaa

SEQ ID NO: 4915853 - DNA, 25 bp, Homo sapien
tagccgtagcgcaaagcaagattgg

SEQ ID NO: 4915854 - DNA, 25 bp, Homo sapien
gcaagattggacacgtacatgtatg

SEQ ID NO: 4915855 - DNA, 25 bp, Homo sapien
tacaggtcataaaagtagccgtagc

SEQ ID NO: 4915856 - DNA, 25 bp, Homo sapien
cataccctatgccagaaaatatgcc

SEQ ID NO: 4915857 - DNA, 25 bp, Homo sapien
ttctttagttgctcataccctatgc

SEQ ID NO: 4915858 - DNA, 25 bp, Homo sapien
tggattttgtttactgttcttcttc

SEQ ID NO: 4915859 - DNA, 25 bp, Homo sapien
cctttagtaatatggtttggtggtg

SEQ ID NO: 4915860 - DNA, 25 bp, Homo sapien
gaacagaatggtcactctgctggag

SEQ ID NO: 4915861 - DNA, 25 bp, Homo sapien
ggagtgaagcgccaagaattgtaaa

SEQ ID NO: 4915862 - DNA, 25 bp, Homo sapien
caaagaattgaagattatagcacag

SEQ ID NO: 4915863 - DNA, 25 bp, Homo sapien
tattctcagtcttaccaagggtggt

SEQ ID NO: 4915864 - DNA, 25 bp, Homo sapien
aatttctcttagctgtaggctgtac

SEQ ID NO: 4915865 - DNA, 25 bp, Homo sapien
caccatggctttatagtcagttgtc

SEQ ID NO: 4915866 - DNA, 25 bp, Homo sapien
gggtcatcatattctctttaacaga

SEQ ID NO: 4915867 - DNA, 25 bp, Homo sapien
gccaatctagtaccattcaccatgg

SEQ ID NO: 4915868 - DNA, 25 bp, Homo sapien
gaatagctatcacaagtcctcaagg

SEQ ID NO: 4915869 - DNA, 25 bp, Homo sapien
aaagggctctggtcttgattcacga

SEQ ID NO: 4915870 - DNA, 25 bp, Homo sapien
ttcacgatagatagaagagctgctt

SEQ ID NO: 4915871 - DNA, 25 bp, Homo sapien
tagtaggcagaccaattaaagggct

SEQ ID NO: 4915872 - DNA, 25 bp, Homo sapien
gagaagattgtaaacatcttccaca

SEQ ID NO: 4915873 - DNA, 25 bp, Homo sapien
gagaagcaatgttgagaagattgta

SEQ ID NO: 4915874 - DNA, 25 bp, Homo sapien
gaccgcatttgcctaagagaagcaa

SEQ ID NO: 4915875 - DNA, 25 bp, Homo sapien
cccttgcgaccgcatttgcctaaga

SEQ ID NO: 4915876 - DNA, 25 bp, Homo sapien
acatagttattgactattgccatcc

SEQ ID NO: 4915877 - DNA, 25 bp, Homo sapien
attgccattttcacatagttattga

SEQ ID NO: 4915878 - DNA, 25 bp, Homo sapien
cttgagaatctactaaattcatact

SEQ ID NO: 4915879 - DNA, 25 bp, Homo sapien
ctttccaggaatataccttgagcat

SEQ ID NO: 4915880 - DNA, 25 bp, Homo sapien
tctttccaggaatataccttgagca

SEQ ID NO: 4915881 - DNA, 25 bp, Homo sapien
tgggagagtaatatgacttaaccat

SEQ ID NO: 4915882 - DNA, 25 bp, Homo sapien
tcagatttaataaggtcacactggt

SEQ ID NO: 4915883 - DNA, 25 bp, Homo sapien
caaatccttagccaattagacactg

SEQ ID NO: 4915884 - DNA, 25 bp, Homo sapien
ggtcacactggtattcgcaaatcct

SEQ ID NO: 4915885 - DNA, 25 bp, Homo sapien
gacctaaggcctgatatagtatatt

SEQ ID NO: 4915886 - DNA, 25 bp, Homo sapien
acttgtgttggatcaggagatgaag

SEQ ID NO: 4915887 - DNA, 25 bp, Homo sapien
gacttgtgttggatcaggagatgaa

SEQ ID NO: 4915888 - DNA, 25 bp, Homo sapien
tcataggacttgtgttggatcagga

SEQ ID NO: 4915889 - DNA, 25 bp, Homo sapien
taggacttgtgttggatcaggagat

SEQ ID NO: 4915890 - DNA, 25 bp, Homo sapien
tcaatagtgattatacttctctgtg

SEQ ID NO: 4915891 - DNA, 25 bp, Homo sapien
atagtgattatacttctctgtgaaa

SEQ ID NO: 4915892 - DNA, 25 bp, Homo sapien
gtgattatacttctctgtgaaataa

SEQ ID NO: 4915893 - DNA, 25 bp, Homo sapien
tgattatacttctctgtgaaataaa

SEQ ID NO: 4915894 - DNA, 25 bp, Homo sapien
ggttcttagatgattggcttccttc

SEQ ID NO: 4915895 - DNA, 25 bp, Homo sapien
gaaggcaatgtatcctgactactgt

SEQ ID NO: 4915896 - DNA, 25 bp, Homo sapien
catggctgtctggagggtacctcca

SEQ ID NO: 4915897 - DNA, 25 bp, Homo sapien
taagtgctacaaggttccagagtgg

SEQ ID NO: 4915898 - DNA, 25 bp, Homo sapien
gttgctgtgggtttataagtgggtg

SEQ ID NO: 4915899 - DNA, 25 bp, Homo sapien
gcagaagttgctgtgggtttataag

SEQ ID NO: 4915900 - DNA, 25 bp, Homo sapien
cagcagaagttgctgtgggtttata

SEQ ID NO: 4915901 - DNA, 25 bp, Homo sapien
agaagttgctgtgggtttataagtg

SEQ ID NO: 4915902 - DNA, 25 bp, Homo sapien
tcacacactcttgtgaatactgtca

SEQ ID NO: 4915903 - DNA, 25 bp, Homo sapien
ctcttgtgaatactgtcagttattc

SEQ ID NO: 4915904 - DNA, 25 bp, Homo sapien
cactcttgtgaatactgtcagttat

SEQ ID NO: 4915905 - DNA, 25 bp, Homo sapien
acacactcttgtgaatactgtcagt

SEQ ID NO: 4915906 - DNA, 25 bp, Homo sapien
cccgctggcatcaaagtctttagtt

SEQ ID NO: 4915907 - DNA, 25 bp, Homo sapien
ttttacattaggaggtctgaccggc

SEQ ID NO: 4915908 - DNA, 25 bp, Homo sapien
tctgaccggcattgtactagctaac

SEQ ID NO: 4915909 - DNA, 25 bp, Homo sapien
tggttagcttcactacatggcagca

SEQ ID NO: 4915910 - DNA, 25 bp, Homo sapien
atcttcagatttgcagtctaatgtt

SEQ ID NO: 4915911 - DNA, 25 bp, Homo sapien
cttcagatttgcagtctaatgttta

SEQ ID NO: 4915912 - DNA, 25 bp, Homo sapien
ccatcttcagatttgcagtctaatg

SEQ ID NO: 4915913 - DNA, 25 bp, Homo sapien
tccatcttcagatttgcagtctaat

SEQ ID NO: 4915914 - DNA, 25 bp, Homo sapien
ctagattggtggaattaaacccacg

SEQ ID NO: 4915915 - DNA, 25 bp, Homo sapien
aaacaccctaatcaagtggcttcaa

SEQ ID NO: 4915916 - DNA, 25 bp, Homo sapien
taacagctaaacaccctaatcaagt

SEQ ID NO: 4915917 - DNA, 25 bp, Homo sapien
tagattggtggaattaaacccacga

SEQ ID NO: 4915918 - DNA, 25 bp, Homo sapien
tcaattgaacgcaaatcaactactt

SEQ ID NO: 4915919 - DNA, 25 bp, Homo sapien
aaggactgcaagactccactctgca

SEQ ID NO: 4915920 - DNA, 25 bp, Homo sapien
agactccactctgcatcaattgaac

SEQ ID NO: 4915921 - DNA, 25 bp, Homo sapien
caattgaacgcaaatcaactacttt

SEQ ID NO: 4915922 - DNA, 25 bp, Homo sapien
ggaggatccaaaaacagtgtatatg

SEQ ID NO: 4915923 - DNA, 25 bp, Homo sapien
cagtgtatatggatacctctgtcct

SEQ ID NO: 4915924 - DNA, 25 bp, Homo sapien
aaacagtgtatatggatacctctgt

SEQ ID NO: 4915925 - DNA, 25 bp, Homo sapien
tggaggaggatccaaaaacagtgta

SEQ ID NO: 4915926 - DNA, 25 bp, Homo sapien
tgatgacctcttctacctaaagtct

SEQ ID NO: 4915927 - DNA, 25 bp, Homo sapien
aaagtctggatctgagtgtacccat

SEQ ID NO: 4915928 - DNA, 25 bp, Homo sapien
cagtaattgctatgatgacctcttc

SEQ ID NO: 4915929 - DNA, 25 bp, Homo sapien
gatctgagtgtacccattatgccct

SEQ ID NO: 4915930 - DNA, 25 bp, Homo sapien
actgtatggtttctttcaatacttc

SEQ ID NO: 4915931 - DNA, 25 bp, Homo sapien
catactccactaagaattcttgctg

SEQ ID NO: 4915932 - DNA, 25 bp, Homo sapien
aagaattcttgctgtgaccgatatt

SEQ ID NO: 4915933 - DNA, 25 bp, Homo sapien
gaccgatatttcagcacctcttcct

SEQ ID NO: 4915934 - DNA, 25 bp, Homo sapien
ctttaaactcatgatcaataagggt

SEQ ID NO: 4915935 - DNA, 25 bp, Homo sapien
taaactcatgatcaataagggtcat

SEQ ID NO: 4915936 - DNA, 25 bp, Homo sapien
tttaaactcatgatcaataagggtc

SEQ ID NO: 4915937 - DNA, 25 bp, Homo sapien
ttaaactcatgatcaataagggtca

SEQ ID NO: 4915938 - DNA, 25 bp, Homo sapien
gaggcttccctatacaaacacgatt

SEQ ID NO: 4915939 - DNA, 25 bp, Homo sapien
tgcactagaggtattgccaacctgc

SEQ ID NO: 4915940 - DNA, 25 bp, Homo sapien
tctctccagaggtgaggcaatatca

SEQ ID NO: 4915941 - DNA, 25 bp, Homo sapien
gtctagagttttattgaggcttccc

SEQ ID NO: 4915942 - DNA, 25 bp, Homo sapien
caccgcaccaggcatatcagttttt

SEQ ID NO: 4915943 - DNA, 25 bp, Homo sapien
ccgcaccaggcatatcagtttttaa

SEQ ID NO: 4915944 - DNA, 25 bp, Homo sapien
gcaccaggcatatcagtttttaaat

SEQ ID NO: 4915945 - DNA, 25 bp, Homo sapien
agtcaccgcaccaggcatatcagtt

SEQ ID NO: 4915946 - DNA, 25 bp, Homo sapien
ctttctggactttgttcctcagtca

SEQ ID NO: 4915947 - DNA, 25 bp, Homo sapien
tataccctgaataacatttccacct

SEQ ID NO: 4915948 - DNA, 25 bp, Homo sapien
ccacctcctctttctggactttgtt

SEQ ID NO: 4915949 - DNA, 25 bp, Homo sapien
ctataccctgaataacatttccacc

SEQ ID NO: 4915950 - DNA, 25 bp, Homo sapien
actctgtaatctcttattctctcca

SEQ ID NO: 4915951 - DNA, 25 bp, Homo sapien
tgtctgttgtgccaggggtcttctg

SEQ ID NO: 4915952 - DNA, 25 bp, Homo sapien
cagtatttgtctgttgtgccagggg

SEQ ID NO: 4915953 - DNA, 25 bp, Homo sapien
tcaaaactctgtaatctcttattct

SEQ ID NO: 4915954 - DNA, 25 bp, Homo sapien
gcagtttggaaatccaactcttcat

SEQ ID NO: 4915955 - DNA, 25 bp, Homo sapien
tgagtgagtaagttgagaaatctac

SEQ ID NO: 4915956 - DNA, 25 bp, Homo sapien
tccaactcttcatgagtgagtaagt

SEQ ID NO: 4915957 - DNA, 25 bp, Homo sapien
gactgcagtttggaaatccaactct

SEQ ID NO: 4915958 - DNA, 25 bp, Homo sapien
tgaagcgcttttggtgatagccagc

SEQ ID NO: 4915959 - DNA, 25 bp, Homo sapien
tccctgccagagacttttgatgaga

SEQ ID NO: 4915960 - DNA, 25 bp, Homo sapien
tgatgagagtttcttgccgctgcat

SEQ ID NO: 4915961 - DNA, 25 bp, Homo sapien
gctgccaaagctggtgaattcacca

SEQ ID NO: 4915962 - DNA, 25 bp, Homo sapien
caaccagagcacttttgccagtgcc

SEQ ID NO: 4915963 - DNA, 25 bp, Homo sapien
ctctgaaagcctctattgccctcac

SEQ ID NO: 4915964 - DNA, 25 bp, Homo sapien
tagtactttctctgaaagcctctat

SEQ ID NO: 4915965 - DNA, 25 bp, Homo sapien
tgccagtgcccaatgccatagtact

SEQ ID NO: 4915966 - DNA, 25 bp, Homo sapien
tctccaccagtagaggacgccaatg

SEQ ID NO: 4915967 - DNA, 25 bp, Homo sapien
tattagccaaggctcctctcagctg

SEQ ID NO: 4915968 - DNA, 25 bp, Homo sapien
tgcaggatgggcttaaaccttttaa

SEQ ID NO: 4915969 - DNA, 25 bp, Homo sapien
agcctagaatttacaacagtttggg

SEQ ID NO: 4915970 - DNA, 25 bp, Homo sapien
aacatatgttaacttctcattggtg

SEQ ID NO: 4915971 - DNA, 25 bp, Homo sapien
catatgttaacttctcattggtgat

SEQ ID NO: 4915972 - DNA, 25 bp, Homo sapien
aatgatgatgtgatgtaaaatccat

SEQ ID NO: 4915973 - DNA, 25 bp, Homo sapien
tcatcaacataatgcaaagtaactg

SEQ ID NO: 4915974 - DNA, 25 bp, Homo sapien
tgtagacagactcggatgaagtcca

SEQ ID NO: 4915975 - DNA, 25 bp, Homo sapien
cagactcggatgaagtccacagttt

SEQ ID NO: 4915976 - DNA, 25 bp, Homo sapien
cctgccaaatccactgtagacagac

SEQ ID NO: 4915977 - DNA, 25 bp, Homo sapien
atggaagacctcgtccctgccaaat

SEQ ID NO: 4915978 - DNA, 25 bp, Homo sapien
ccctgccatctctatgcctctcttc

SEQ ID NO: 4915979 - DNA, 25 bp, Homo sapien
cctgccatctctatgcctctcttct

SEQ ID NO: 4915980 - DNA, 25 bp, Homo sapien
tctgactgatgtaatcaattctagc

SEQ ID NO: 4915981 - DNA, 25 bp, Homo sapien
tgtaatcaattctagctccttttag

SEQ ID NO: 4915982 - DNA, 25 bp, Homo sapien
ctgatgtaatcaattctagctcctt

SEQ ID NO: 4915983 - DNA, 25 bp, Homo sapien
ttctagctccttttagatctttgag

SEQ ID NO: 4915984 - DNA, 25 bp, Homo sapien
gttgatgtatgtgaaggccttcttt

SEQ ID NO: 4915985 - DNA, 25 bp, Homo sapien
tatgtgaaggccttctttgcctcca

SEQ ID NO: 4915986 - DNA, 25 bp, Homo sapien
ctgttgatgtatgtgaaggccttct

SEQ ID NO: 4915987 - DNA, 25 bp, Homo sapien
tgtatgtgaaggccttctttgcctc

SEQ ID NO: 4915988 - DNA, 25 bp, Homo sapien
aataatatagcttgaactgtaatcc

SEQ ID NO: 4915989 - DNA, 25 bp, Homo sapien
tcgacataatatcaaagagagcagt

SEQ ID NO: 4915990 - DNA, 25 bp, Homo sapien
tatattgagaaagagtcggcagcag

SEQ ID NO: 4915991 - DNA, 25 bp, Homo sapien
tgataatctctgcaaagtaaatagt

SEQ ID NO: 4915992 - DNA, 25 bp, Homo sapien
actgagacaaagactcatgtagaat

SEQ ID NO: 4915993 - DNA, 25 bp, Homo sapien
tgagacaaagactcatgtagaatcc

SEQ ID NO: 4915994 - DNA, 25 bp, Homo sapien
ttcaatagccaattgaaaaactgag

SEQ ID NO: 4915995 - DNA, 25 bp, Homo sapien
caatagccaattgaaaaactgagac

SEQ ID NO: 4915996 - DNA, 25 bp, Homo sapien
ctattgcactttgtttgctacaagt

SEQ ID NO: 4915997 - DNA, 25 bp, Homo sapien
attgcactttgtttgctacaagttg

SEQ ID NO: 4915998 - DNA, 25 bp, Homo sapien
tgcactttgtttgctacaagttgtt

SEQ ID NO: 4915999 - DNA, 25 bp, Homo sapien
tattgcactttgtttgctacaagtt

SEQ ID NO: 4916000 - DNA, 25 bp, Homo sapien
tcaaactattacggctgtgcttcgg

SEQ ID NO: 4916001 - DNA, 25 bp, Homo sapien
attacggctgtgcttcggcatttcc

SEQ ID NO: 4916002 - DNA, 25 bp, Homo sapien
aaactattacggctgtgcttcggca

SEQ ID NO: 4916003 - DNA, 25 bp, Homo sapien
actattacggctgtgcttcggcatt

SEQ ID NO: 4916004 - DNA, 25 bp, Homo sapien
cctcaaatctgtagaatttgtcttc

SEQ ID NO: 4916005 - DNA, 25 bp, Homo sapien
ctcaaatctgtagaatttgtcttca

SEQ ID NO: 4916006 - DNA, 25 bp, Homo sapien
ctacctcaaatctgtagaatttgtc

SEQ ID NO: 4916007 - DNA, 25 bp, Homo sapien
tacctcaaatctgtagaatttgtct

SEQ ID NO: 4916008 - DNA, 25 bp, Homo sapien
gttatcttctgccacctttttgtca

SEQ ID NO: 4916009 - DNA, 25 bp, Homo sapien
cagagttatcttctgccaccttttt

SEQ ID NO: 4916010 - DNA, 25 bp, Homo sapien
agagttatcttctgccacctttttg

SEQ ID NO: 4916011 - DNA, 25 bp, Homo sapien
gagttatcttctgccacctttttgt

SEQ ID NO: 4916012 - DNA, 25 bp, Homo sapien
tttggcagcaggaggaagtcagtct

SEQ ID NO: 4916013 - DNA, 25 bp, Homo sapien
tggcagcaggaggaagtcagtcttc

SEQ ID NO: 4916014 - DNA, 25 bp, Homo sapien
ctttggcagcaggaggaagtcagtc

SEQ ID NO: 4916015 - DNA, 25 bp, Homo sapien
cagcaggaggaagtcagtcttcagc

SEQ ID NO: 4916016 - DNA, 25 bp, Homo sapien
aactcgatgattcagctgactgcct

SEQ ID NO: 4916017 - DNA, 25 bp, Homo sapien
tgttgaatacaactgtctcagggcc

SEQ ID NO: 4916018 - DNA, 25 bp, Homo sapien
tcagggcccttaggtgctaaagctc

SEQ ID NO: 4916019 - DNA, 25 bp, Homo sapien
ggtgaaaaagtctgcaatgtccatg

SEQ ID NO: 4916020 - DNA, 25 bp, Homo sapien
gtggaggagcttgtagttagtttag

SEQ ID NO: 4916021 - DNA, 25 bp, Homo sapien
ggagcttgtagttagtttagaggat

SEQ ID NO: 4916022 - DNA, 25 bp, Homo sapien
gaggagcttgtagttagtttagagg

SEQ ID NO: 4916023 - DNA, 25 bp, Homo sapien
agaattgtgtttgtcctgataatgt

SEQ ID NO: 4916024 - DNA, 25 bp, Homo sapien
gcatgctctctactctatctattag

SEQ ID NO: 4916025 - DNA, 25 bp, Homo sapien
aatacttggacatgaagtacttggg

SEQ ID NO: 4916026 - DNA, 25 bp, Homo sapien
gctttttagtatggactgtcaattt

SEQ ID NO: 4916027 - DNA, 25 bp, Homo sapien
ttctatctaacaattcaaacctcac

SEQ ID NO: 4916028 - DNA, 25 bp, Homo sapien
ctttggtgctggttttccctaagag

SEQ ID NO: 4916029 - DNA, 25 bp, Homo sapien
tggtgctggttttccctaagagaga

SEQ ID NO: 4916030 - DNA, 25 bp, Homo sapien
tggttttccctaagagagagaggag

SEQ ID NO: 4916031 - DNA, 25 bp, Homo sapien
ctggttttccctaagagagagagga

SEQ ID NO: 4916032 - DNA, 25 bp, Homo sapien
ctcagcctgcactttatcatgcaaa

SEQ ID NO: 4916033 - DNA, 25 bp, Homo sapien
gcctgcactttatcatgcaaatcgc

SEQ ID NO: 4916034 - DNA, 25 bp, Homo sapien
tatcatgcaaatcgctatcagcatt

SEQ ID NO: 4916035 - DNA, 25 bp, Homo sapien
cactttatcatgcaaatcgctatca

SEQ ID NO: 4916036 - DNA, 25 bp, Homo sapien
ctatctgattgttgacaaagccgac

SEQ ID NO: 4916037 - DNA, 25 bp, Homo sapien
ccaaatagcctggtactggaaaaag

SEQ ID NO: 4916038 - DNA, 25 bp, Homo sapien
aaataacaaagctgtaggcaccaca

SEQ ID NO: 4916039 - DNA, 25 bp, Homo sapien
caaagccgacaataataagcactga

SEQ ID NO: 4916040 - DNA, 25 bp, Homo sapien
tattttggctttggatgagataccc

SEQ ID NO: 4916041 - DNA, 25 bp, Homo sapien
tatgttagctcccatggtgctccct

SEQ ID NO: 4916042 - DNA, 25 bp, Homo sapien
cacaggatctgctgctataggccat

SEQ ID NO: 4916043 - DNA, 25 bp, Homo sapien
gatacccgttatgttagctcccatg

SEQ ID NO: 4916044 - DNA, 25 bp, Homo sapien
cataatcaatttctccttaccagtg

SEQ ID NO: 4916045 - DNA, 25 bp, Homo sapien
taatgcttgatccataatcaatttc

SEQ ID NO: 4916046 - DNA, 25 bp, Homo sapien
ccagtgctaatggtaggtattgaaa

SEQ ID NO: 4916047 - DNA, 25 bp, Homo sapien
ggtattgaaattagaggacatctcc

SEQ ID NO: 4916048 - DNA, 25 bp, Homo sapien
gatctcagacgtccagactctagaa

SEQ ID NO: 4916049 - DNA, 25 bp, Homo sapien
aagggaccacaggagctctcttgtc

SEQ ID NO: 4916050 - DNA, 25 bp, Homo sapien
tgaagatacaaggaggtctgcagtc

SEQ ID NO: 4916051 - DNA, 25 bp, Homo sapien
agatacaaggaggtctgcagtctgt

SEQ ID NO: 4916052 - DNA, 25 bp, Homo sapien
agtgtgatgtctttgaatgtacagg

SEQ ID NO: 4916053 - DNA, 25 bp, Homo sapien
taagaaagtgtgatgtctttgaatg

SEQ ID NO: 4916054 - DNA, 25 bp, Homo sapien
acatcatcattataagaaagtgtga

SEQ ID NO: 4916055 - DNA, 25 bp, Homo sapien
cattataagaaagtgtgatgtcttt

SEQ ID NO: 4916056 - DNA, 25 bp, Homo sapien
cactaggatgtatcactgcaaatgc

SEQ ID NO: 4916057 - DNA, 25 bp, Homo sapien
cccttgcagttgcatctggagggag

SEQ ID NO: 4916058 - DNA, 25 bp, Homo sapien
tccagacgggcggttgctgccatca

SEQ ID NO: 4916059 - DNA, 25 bp, Homo sapien
ggcgtataggtctggagtcaccctt

SEQ ID NO: 4916060 - DNA, 25 bp, Homo sapien
catagctaaactcgtattgtgcgga

SEQ ID NO: 4916061 - DNA, 25 bp, Homo sapien
tactcaaactgtcatatagtgctgc

SEQ ID NO: 4916062 - DNA, 25 bp, Homo sapien
tcaaggagaccccagtatctgttgc

SEQ ID NO: 4916063 - DNA, 25 bp, Homo sapien
ttacttattcaaactgtcactggtg

SEQ ID NO: 4916064 - DNA, 25 bp, Homo sapien
cactgctgacagccatccacaatca

SEQ ID NO: 4916065 - DNA, 25 bp, Homo sapien
ccactgctgacagccatccacaatc

SEQ ID NO: 4916066 - DNA, 25 bp, Homo sapien
actgctgacagccatccacaatcat

SEQ ID NO: 4916067 - DNA, 25 bp, Homo sapien
ttacttgagtaggatgactccatcc

SEQ ID NO: 4916068 - DNA, 25 bp, Homo sapien
ctctttagtaagctcgttaagtctt

SEQ ID NO: 4916069 - DNA, 25 bp, Homo sapien
tgccttgactgctgtaactctttag

SEQ ID NO: 4916070 - DNA, 25 bp, Homo sapien
tgtgtttaaccctctgccagtacca

SEQ ID NO: 4916071 - DNA, 25 bp, Homo sapien
atggctgaagtgtactccaatgtgc

SEQ ID NO: 4916072 - DNA, 25 bp, Homo sapien
ttatccctgaaagtgcagagtttct

SEQ ID NO: 4916073 - DNA, 25 bp, Homo sapien
catcggtgaagaattctatgtaaca

SEQ ID NO: 4916074 - DNA, 25 bp, Homo sapien
aaactgatgttcctcacatcggtga

SEQ ID NO: 4916075 - DNA, 25 bp, Homo sapien
tcccatgaagataactgatgactgc

SEQ ID NO: 4916076 - DNA, 25 bp, Homo sapien
ttctcccagttaatcttcactagca

SEQ ID NO: 4916077 - DNA, 25 bp, Homo sapien
ctcccagttaatcttcactagcatt

SEQ ID NO: 4916078 - DNA, 25 bp, Homo sapien
tctcccagttaatcttcactagcat

SEQ ID NO: 4916079 - DNA, 25 bp, Homo sapien
ttttctcccagttaatcttcactag

SEQ ID NO: 4916080 - DNA, 25 bp, Homo sapien
catgaagggcttcgtgctgtcctca

SEQ ID NO: 4916081 - DNA, 25 bp, Homo sapien
tactgactaattcctataggagaag

SEQ ID NO: 4916082 - DNA, 25 bp, Homo sapien
gaaatgttacctccaatgttagaga

SEQ ID NO: 4916083 - DNA, 25 bp, Homo sapien
gagacttaagtggaatcctgaaggc

SEQ ID NO: 4916084 - DNA, 25 bp, Homo sapien
ttccaaagatttgatcatcctgaat

SEQ ID NO: 4916085 - DNA, 25 bp, Homo sapien
tccaaagatttgatcatcctgaatc

SEQ ID NO: 4916086 - DNA, 25 bp, Homo sapien
tttgggcctcaaggaaatgtcattt

SEQ ID NO: 4916087 - DNA, 25 bp, Homo sapien
ctttgggcctcaaggaaatgtcatt

SEQ ID NO: 4916088 - DNA, 25 bp, Homo sapien
ttgttgggtcacttcttccccagaa

SEQ ID NO: 4916089 - DNA, 25 bp, Homo sapien
tttagtcaagcttctctgagccctc

SEQ ID NO: 4916090 - DNA, 25 bp, Homo sapien
ccccagaagaaagtagagtggaaga

SEQ ID NO: 4916091 - DNA, 25 bp, Homo sapien
tgagaatcaaagacccaccactgac

SEQ ID NO: 4916092 - DNA, 25 bp, Homo sapien
ctttaatggatgcaaggatgttcaa

SEQ ID NO: 4916093 - DNA, 25 bp, Homo sapien
gcaaggatgttcaatattatcaggc

SEQ ID NO: 4916094 - DNA, 25 bp, Homo sapien
agaacagtaaactttaatggatgca

SEQ ID NO: 4916095 - DNA, 25 bp, Homo sapien
cagtaaactttaatggatgcaagga

SEQ ID NO: 4916096 - DNA, 25 bp, Homo sapien
gcatcggattttccaggtccaaaga

SEQ ID NO: 4916097 - DNA, 25 bp, Homo sapien
gatctctggttactccaaaaggctc

SEQ ID NO: 4916098 - DNA, 25 bp, Homo sapien
caaaaggctctgattagctgaaaca

SEQ ID NO: 4916099 - DNA, 25 bp, Homo sapien
tctcctgggcagtaaagccaaattg

SEQ ID NO: 4916100 - DNA, 25 bp, Homo sapien
cactattaatgttgctcttagccat

SEQ ID NO: 4916101 - DNA, 25 bp, Homo sapien
cttgtggcagaagatgcgtagaata

SEQ ID NO: 4916102 - DNA, 25 bp, Homo sapien
tatttccttgcactattaatgttgc

SEQ ID NO: 4916103 - DNA, 25 bp, Homo sapien
gaagatgcgtagaatatttccttgc

SEQ ID NO: 4916104 - DNA, 25 bp, Homo sapien
atagttgcatctgttgaagatatcc

SEQ ID NO: 4916105 - DNA, 25 bp, Homo sapien
caacagtcctccaacgtcatattta

SEQ ID NO: 4916106 - DNA, 25 bp, Homo sapien
caacgtcatatttaactggtgatag

SEQ ID NO: 4916107 - DNA, 25 bp, Homo sapien
tatttaactggtgatagttgcatct

SEQ ID NO: 4916108 - DNA, 25 bp, Homo sapien
taggaagtcatctatcatacgttgc

SEQ ID NO: 4916109 - DNA, 25 bp, Homo sapien
tggtacgtccaacaggtcaattatc

SEQ ID NO: 4916110 - DNA, 25 bp, Homo sapien
gcatcataatcactttgtagttgta

SEQ ID NO: 4916111 - DNA, 25 bp, Homo sapien
caaccatgaaatgtcttaggaagtc

SEQ ID NO: 4916112 - DNA, 25 bp, Homo sapien
tctgataaaaatagccctggatcct

SEQ ID NO: 4916113 - DNA, 25 bp, Homo sapien
tattacaggataaggccaagagaaa

SEQ ID NO: 4916114 - DNA, 25 bp, Homo sapien
tccccaagaatatcacgctgtggtt

SEQ ID NO: 4916115 - DNA, 25 bp, Homo sapien
ggaaatggcaattactggaacagta

SEQ ID NO: 4916116 - DNA, 25 bp, Homo sapien
agtgttagggcttcacatatgagct

SEQ ID NO: 4916117 - DNA, 25 bp, Homo sapien
cactcatatgtttgcaagaggctga

SEQ ID NO: 4916118 - DNA, 25 bp, Homo sapien
tcatgttatgctggctgcgtcactc

SEQ ID NO: 4916119 - DNA, 25 bp, Homo sapien
tcgactcccatgtagtctagagggt

SEQ ID NO: 4916120 - DNA, 25 bp, Homo sapien
tctccactggaggataatctcgact

SEQ ID NO: 4916121 - DNA, 25 bp, Homo sapien
gcttcaaagagcatagtgtttcaca

SEQ ID NO: 4916122 - DNA, 25 bp, Homo sapien
tgtgagagtctcagatcagattgga

SEQ ID NO: 4916123 - DNA, 25 bp, Homo sapien
tgtagcttgtggcttaggaacacct

SEQ ID NO: 4916124 - DNA, 25 bp, Homo sapien
cattcttgaatcatggcctacagtc

SEQ ID NO: 4916125 - DNA, 25 bp, Homo sapien
tttaaaactatgttgcataccataa

SEQ ID NO: 4916126 - DNA, 25 bp, Homo sapien
tgaacacttggtggaacgtgtattt

SEQ ID NO: 4916127 - DNA, 25 bp, Homo sapien
gtaatagtcgtgatctgaaatgcat

SEQ ID NO: 4916128 - DNA, 25 bp, Homo sapien
tgataagtgtattgggtaatgcata

SEQ ID NO: 4916129 - DNA, 25 bp, Homo sapien
gttccatatctgttagcagtcctca

SEQ ID NO: 4916130 - DNA, 25 bp, Homo sapien
taattttcctcaccaaggttccata

SEQ ID NO: 4916131 - DNA, 25 bp, Homo sapien
gcaccaccaagcaaatcagcttgca

SEQ ID NO: 4916132 - DNA, 25 bp, Homo sapien
cagcaccaccaagcaaatcagcttg

SEQ ID NO: 4916133 - DNA, 25 bp, Homo sapien
tatccagctccccagtatgacccgt

SEQ ID NO: 4916134 - DNA, 25 bp, Homo sapien
cagtatgacccgtttccactgctgt

SEQ ID NO: 4916135 - DNA, 25 bp, Homo sapien
gattaatacctctaacctatccagc

SEQ ID NO: 4916136 - DNA, 25 bp, Homo sapien
tgttatgattaatacctctaaccta

SEQ ID NO: 4916137 - DNA, 25 bp, Homo sapien
taacttcagtatttcaggagacttt

SEQ ID NO: 4916138 - DNA, 25 bp, Homo sapien
acttcagtatttcaggagacttttc

SEQ ID NO: 4916139 - DNA, 25 bp, Homo sapien
cttcagtatttcaggagacttttcc

SEQ ID NO: 4916140 - DNA, 25 bp, Homo sapien
ttcagtatttcaggagacttttcca

SEQ ID NO: 4916141 - DNA, 25 bp, Homo sapien
gcagaaagattgttgcaccgaagaa

SEQ ID NO: 4916142 - DNA, 25 bp, Homo sapien
taaccacatgcaacattccctatgc

SEQ ID NO: 4916143 - DNA, 25 bp, Homo sapien
ttaggagttatacagggactgcagc

SEQ ID NO: 4916144 - DNA, 25 bp, Homo sapien
tgttgcaccgaagaagaggaactcc

SEQ ID NO: 4916145 - DNA, 25 bp, Homo sapien
tggataatgtgcacttgagagaaat

SEQ ID NO: 4916146 - DNA, 25 bp, Homo sapien
aatcttcttgatggataatgtgcac

SEQ ID NO: 4916147 - DNA, 25 bp, Homo sapien
tcttgatggataatgtgcacttgag

SEQ ID NO: 4916148 - DNA, 25 bp, Homo sapien
tgatttaaatcttcttgatggataa

SEQ ID NO: 4916149 - DNA, 25 bp, Homo sapien
ttctaattctagatctcattttaag

SEQ ID NO: 4916150 - DNA, 25 bp, Homo sapien
gctttgcacaacctatgtttcctgg

SEQ ID NO: 4916151 - DNA, 25 bp, Homo sapien
tcctgggtaaactgccatcctcttt

SEQ ID NO: 4916152 - DNA, 25 bp, Homo sapien
ggcactggttcaacaacgtaatttg

SEQ ID NO: 4916153 - DNA, 25 bp, Homo sapien
attctccactggcaagcttcttcag

SEQ ID NO: 4916154 - DNA, 25 bp, Homo sapien
agttttgtctggttcacgctcataa

SEQ ID NO: 4916155 - DNA, 25 bp, Homo sapien
ctcagttttgtctggttcacgctca

SEQ ID NO: 4916156 - DNA, 25 bp, Homo sapien
cagttttgtctggttcacgctcata

SEQ ID NO: 4916157 - DNA, 25 bp, Homo sapien
tctcagttttgtctggttcacgctc

SEQ ID NO: 4916158 - DNA, 25 bp, Homo sapien
aacactcagcacaaggtccttcttc

SEQ ID NO: 4916159 - DNA, 25 bp, Homo sapien
ttcggggaggcagccaaattcacca

SEQ ID NO: 4916160 - DNA, 25 bp, Homo sapien
aaatgactaaaaacactcagcacaa

SEQ ID NO: 4916161 - DNA, 25 bp, Homo sapien
caaggtccttcttcggggaggcagc

SEQ ID NO: 4916162 - DNA, 25 bp, Homo sapien
cctgccctccaaaaagtgtaatagc

SEQ ID NO: 4916163 - DNA, 25 bp, Homo sapien
tagatgttgaaccttgggagtaacg

SEQ ID NO: 4916164 - DNA, 25 bp, Homo sapien
tgggagtaacgtgacccactgccca

SEQ ID NO: 4916165 - DNA, 25 bp, Homo sapien
tagtccagtctagcccctgaggagg

SEQ ID NO: 4916166 - DNA, 25 bp, Homo sapien
gactgtggaaatagacaagaggctc

SEQ ID NO: 4916167 - DNA, 25 bp, Homo sapien
ctgtggaaatagacaagaggctcta

SEQ ID NO: 4916168 - DNA, 25 bp, Homo sapien
ggactgtggaaatagacaagaggct

SEQ ID NO: 4916169 - DNA, 25 bp, Homo sapien
gtggaaatagacaagaggctctagg

SEQ ID NO: 4916170 - DNA, 25 bp, Homo sapien
aaacccagtgaagagcagtgcttct

SEQ ID NO: 4916171 - DNA, 25 bp, Homo sapien
tctttttaaccactctcgcagatat

SEQ ID NO: 4916172 - DNA, 25 bp, Homo sapien
gcttctccaatagcatgcacacctg

SEQ ID NO: 4916173 - DNA, 25 bp, Homo sapien
tatcttcagaaaacccagtgaagag

SEQ ID NO: 4916174 - DNA, 25 bp, Homo sapien
taggtccatgggtttgtggaaacta

SEQ ID NO: 4916175 - DNA, 25 bp, Homo sapien
acaaaaataggtccatgggtttgtg

SEQ ID NO: 4916176 - DNA, 25 bp, Homo sapien
tggaaactatttgccacattttact

SEQ ID NO: 4916177 - DNA, 25 bp, Homo sapien
actatttgccacattttacttacct

SEQ ID NO: 4916178 - DNA, 25 bp, Homo sapien
tgacaatctcgtagagaacatacat

SEQ ID NO: 4916179 - DNA, 25 bp, Homo sapien
aactttttgacaatctcgtagagaa

SEQ ID NO: 4916180 - DNA, 25 bp, Homo sapien
tttgacaatctcgtagagaacatac

SEQ ID NO: 4916181 - DNA, 25 bp, Homo sapien
cttccgactagatatattgaattta

SEQ ID NO: 4916182 - DNA, 25 bp, Homo sapien
tgcccccgcaccctcagtcactccc

SEQ ID NO: 4916183 - DNA, 25 bp, Homo sapien
gtctgccctgcccccgcaccctcag

SEQ ID NO: 4916184 - DNA, 25 bp, Homo sapien
gggtctgccctgcccccgcaccctc

SEQ ID NO: 4916185 - DNA, 25 bp, Homo sapien
gccctgcccccgcaccctcagtcac

SEQ ID NO: 4916186 - DNA, 25 bp, Homo sapien
gcttctatttcgcatccctcaaatt

SEQ ID NO: 4916187 - DNA, 25 bp, Homo sapien
ctcccaggcttctatttcgcatccc

SEQ ID NO: 4916188 - DNA, 25 bp, Homo sapien
atccctcaaattccagcgtatgcaa

SEQ ID NO: 4916189 - DNA, 25 bp, Homo sapien
catccctcaaattccagcgtatgca

SEQ ID NO: 4916190 - DNA, 25 bp, Homo sapien
cttccgcgagctctgctgatgatga

SEQ ID NO: 4916191 - DNA, 25 bp, Homo sapien
attcccctagagccttccgcgagct

SEQ ID NO: 4916192 - DNA, 25 bp, Homo sapien
ttcccctagagccttccgcgagctc

SEQ ID NO: 4916193 - DNA, 25 bp, Homo sapien
ccttccgcgagctctgctgatgatg

SEQ ID NO: 4916194 - DNA, 25 bp, Homo sapien
tgatccactaaaacctagattaggg

SEQ ID NO: 4916195 - DNA, 25 bp, Homo sapien
aaagcaacataaagcaatgatccac

SEQ ID NO: 4916196 - DNA, 25 bp, Homo sapien
gcaatgatccactaaaacctagatt

SEQ ID NO: 4916197 - DNA, 25 bp, Homo sapien
cataaagcaatgatccactaaaacc

SEQ ID NO: 4916198 - DNA, 25 bp, Homo sapien
tggggctagcttccctgtgggactg

SEQ ID NO: 4916199 - DNA, 25 bp, Homo sapien
gtatgtctgttctaaaagggaccat

SEQ ID NO: 4916200 - DNA, 25 bp, Homo sapien
gggactggggtatgtctgttctaaa

SEQ ID NO: 4916201 - DNA, 25 bp, Homo sapien
agtagagagtggggctagcttccct

SEQ ID NO: 4916202 - DNA, 25 bp, Homo sapien
ttgtcgacataattctctggcagct

SEQ ID NO: 4916203 - DNA, 25 bp, Homo sapien
taaattgtcgacataattctctggc

SEQ ID NO: 4916204 - DNA, 25 bp, Homo sapien
tataaattgtcgacataattctctg

SEQ ID NO: 4916205 - DNA, 25 bp, Homo sapien
aattgtcgacataattctctggcag

SEQ ID NO: 4916206 - DNA, 25 bp, Homo sapien
ataagaatgtgactggatagcccct

SEQ ID NO: 4916207 - DNA, 25 bp, Homo sapien
gccttggttggactaaatcccttga

SEQ ID NO: 4916208 - DNA, 25 bp, Homo sapien
tatccttctgcgatctagaaactgc

SEQ ID NO: 4916209 - DNA, 25 bp, Homo sapien
tgaatgtgactgtatccttctgcga

SEQ ID NO: 4916210 - DNA, 25 bp, Homo sapien
tcagctcacctggtaaaggttgggc

SEQ ID NO: 4916211 - DNA, 25 bp, Homo sapien
atttacagttgagcagatgtcattc

SEQ ID NO: 4916212 - DNA, 25 bp, Homo sapien
gggccactgatattcctaagtggta

SEQ ID NO: 4916213 - DNA, 25 bp, Homo sapien
ccatctgtatgatctgtgtttctca

SEQ ID NO: 4916214 - DNA, 25 bp, Homo sapien
ctttcaaagagttcccagattgcta

SEQ ID NO: 4916215 - DNA, 25 bp, Homo sapien
gttcccagattgctaatccatccac

SEQ ID NO: 4916216 - DNA, 25 bp, Homo sapien
tcaaagagttcccagattgctaatc

SEQ ID NO: 4916217 - DNA, 25 bp, Homo sapien
aaagagttcccagattgctaatcca

SEQ ID NO: 4916218 - DNA, 25 bp, Homo sapien
cctctagtgttctcaccctcacatc

SEQ ID NO: 4916219 - DNA, 25 bp, Homo sapien
accctcacatcataagggtgaacat

SEQ ID NO: 4916220 - DNA, 25 bp, Homo sapien
ccctcacatcataagggtgaacatg

SEQ ID NO: 4916221 - DNA, 25 bp, Homo sapien
tctagtgttctcaccctcacatcat

SEQ ID NO: 4916222 - DNA, 25 bp, Homo sapien
tcagctacttaagacctgtggcccc

SEQ ID NO: 4916223 - DNA, 25 bp, Homo sapien
ctgtggccccaaatcattagtaata

SEQ ID NO: 4916224 - DNA, 25 bp, Homo sapien
tttgttcattctctcgtaagttatc

SEQ ID NO: 4916225 - DNA, 25 bp, Homo sapien
tcattatgtctagtcagccacagct

SEQ ID NO: 4916226 - DNA, 25 bp, Homo sapien
gaatatttatctcggattcttccta

SEQ ID NO: 4916227 - DNA, 25 bp, Homo sapien
ttagaatatttatctcggattcttc

SEQ ID NO: 4916228 - DNA, 25 bp, Homo sapien
aaatttgatcataattgcattcaga

SEQ ID NO: 4916229 - DNA, 25 bp, Homo sapien
ttgatcataattgcattcagaagta

SEQ ID NO: 4916230 - DNA, 25 bp, Homo sapien
tccatcacgattgtcttatgcattg

SEQ ID NO: 4916231 - DNA, 25 bp, Homo sapien
ccttgccgatctccatcacgattgt

SEQ ID NO: 4916232 - DNA, 25 bp, Homo sapien
tgtctcttctcccttgccgatctcc

SEQ ID NO: 4916233 - DNA, 25 bp, Homo sapien
gccgatctccatcacgattgtctta

SEQ ID NO: 4916234 - DNA, 25 bp, Homo sapien
tttgcaggtccataaatagaggcat

SEQ ID NO: 4916235 - DNA, 25 bp, Homo sapien
caatttgcaggtccataaatagagg

SEQ ID NO: 4916236 - DNA, 25 bp, Homo sapien
gcaggtccataaatagaggcattga

SEQ ID NO: 4916237 - DNA, 25 bp, Homo sapien
tgaacaatttgcaggtccataaata

SEQ ID NO: 4916238 - DNA, 25 bp, Homo sapien
agggcagttacctgagagaatatta

SEQ ID NO: 4916239 - DNA, 25 bp, Homo sapien
gggcagttacctgagagaatattac

SEQ ID NO: 4916240 - DNA, 25 bp, Homo sapien
accttccccacaagatataaaacat

SEQ ID NO: 4916241 - DNA, 25 bp, Homo sapien
cattccctgataggtcccccatgtg

SEQ ID NO: 4916242 - DNA, 25 bp, Homo sapien
tccctgataggtcccccatgtgtgc

SEQ ID NO: 4916243 - DNA, 25 bp, Homo sapien
cctagccccccattccctgataggt

SEQ ID NO: 4916244 - DNA, 25 bp, Homo sapien
cacatgtactgtggaactcgctgag

SEQ ID NO: 4916245 - DNA, 25 bp, Homo sapien
ggtgaaggcatagcatcttgacctc

SEQ ID NO: 4916246 - DNA, 25 bp, Homo sapien
cagaggcaccatgaaggtgaaggca

SEQ ID NO: 4916247 - DNA, 25 bp, Homo sapien
tgtactgtggaactcgctgagagcg

SEQ ID NO: 4916248 - DNA, 25 bp, Homo sapien
tctttcagcttttcaccaaagttat

SEQ ID NO: 4916249 - DNA, 25 bp, Homo sapien
tcagcttttcaccaaagttattttc

SEQ ID NO: 4916250 - DNA, 25 bp, Homo sapien
ctttcagcttttcaccaaagttatt

SEQ ID NO: 4916251 - DNA, 25 bp, Homo sapien
ttctttcagcttttcaccaaagtta

SEQ ID NO: 4916252 - DNA, 25 bp, Homo sapien
gtaacgtagctatattttgtctgaa

SEQ ID NO: 4916253 - DNA, 25 bp, Homo sapien
taatgcagtgtttaatctctctggg

SEQ ID NO: 4916254 - DNA, 25 bp, Homo sapien
ggccgtaattcccttatatagagag

SEQ ID NO: 4916255 - DNA, 25 bp, Homo sapien
tatgaggttgcgaaggcatatgaat

SEQ ID NO: 4916256 - DNA, 25 bp, Homo sapien
gactgttcacagtctatattctgcc

SEQ ID NO: 4916257 - DNA, 25 bp, Homo sapien
tgaattctccctgcattaaacacag

SEQ ID NO: 4916258 - DNA, 25 bp, Homo sapien
ctgtgttggttaagatttcaggact

SEQ ID NO: 4916259 - DNA, 25 bp, Homo sapien
gaattctccctgcattaaacacaga

SEQ ID NO: 4916260 - DNA, 25 bp, Homo sapien
tattcagaagtatcaagataggcat

SEQ ID NO: 4916261 - DNA, 25 bp, Homo sapien
cgcagtagagaagagagattgagcc

SEQ ID NO: 4916262 - DNA, 25 bp, Homo sapien
taggcatatgaactactctgatggg

SEQ ID NO: 4916263 - DNA, 25 bp, Homo sapien
ggattctggccaaaccaccctaaca

SEQ ID NO: 4916264 - DNA, 25 bp, Homo sapien
aatcctatccgaagaaggatgcaaa

SEQ ID NO: 4916265 - DNA, 25 bp, Homo sapien
cctatccgaagaaggatgcaaagtc

SEQ ID NO: 4916266 - DNA, 25 bp, Homo sapien
ttagaatcctatccgaagaaggatg

SEQ ID NO: 4916267 - DNA, 25 bp, Homo sapien
agaatcctatccgaagaaggatgca

SEQ ID NO: 4916268 - DNA, 25 bp, Homo sapien
ttgttcctaatcttgttgggcaagc

SEQ ID NO: 4916269 - DNA, 25 bp, Homo sapien
tcagtgctatggtgaatagaattag

SEQ ID NO: 4916270 - DNA, 25 bp, Homo sapien
tatatgtaagatgacgtcatctgca

SEQ ID NO: 4916271 - DNA, 25 bp, Homo sapien
tttcaatgtttgatgtcagctgtgg

SEQ ID NO: 4916272 - DNA, 25 bp, Homo sapien
tgttatagaacttgacatttttacg

SEQ ID NO: 4916273 - DNA, 25 bp, Homo sapien
ctttgttatagaacttgacattttt

SEQ ID NO: 4916274 - DNA, 25 bp, Homo sapien
ttgttaatgtttctgtcttttgcac

SEQ ID NO: 4916275 - DNA, 25 bp, Homo sapien
tttgttaatgtttctgtcttttgca

SEQ ID NO: 4916276 - DNA, 25 bp, Homo sapien
tgcaaacaactcatttgttctcatg

SEQ ID NO: 4916277 - DNA, 25 bp, Homo sapien
tctcatgggagaatcaacatgttcc

SEQ ID NO: 4916278 - DNA, 25 bp, Homo sapien
attgtgcggtgagaagccattctcc

SEQ ID NO: 4916279 - DNA, 25 bp, Homo sapien
tctcttttatcagggaattgtgcgg

SEQ ID NO: 4916280 - DNA, 25 bp, Homo sapien
aacaaattgtgaagggaagttacat

SEQ ID NO: 4916281 - DNA, 25 bp, Homo sapien
catgagttatacagaaattgctttg

SEQ ID NO: 4916282 - DNA, 25 bp, Homo sapien
aagtgtgtctttggttagctcttgc

SEQ ID NO: 4916283 - DNA, 25 bp, Homo sapien
gggaacttgacgtattgtattgaca

SEQ ID NO: 4916284 - DNA, 25 bp, Homo sapien
cgttagtgtgagcagcacatttggc

SEQ ID NO: 4916285 - DNA, 25 bp, Homo sapien
caagtccgaccttttttgctctcga

SEQ ID NO: 4916286 - DNA, 25 bp, Homo sapien
gaaggattcagttatgctttagctg

SEQ ID NO: 4916287 - DNA, 25 bp, Homo sapien
gataagctagctaccacgttagtgt

SEQ ID NO: 4916288 - DNA, 25 bp, Homo sapien
tgtgggaataactgtcaactgccgt

SEQ ID NO: 4916289 - DNA, 25 bp, Homo sapien
tcaactgccgtttgatcataacact

SEQ ID NO: 4916290 - DNA, 25 bp, Homo sapien
aggtgagttcaaagtttgtgggaat

SEQ ID NO: 4916291 - DNA, 25 bp, Homo sapien
tgagttcaaagtttgtgggaataac

SEQ ID NO: 4916292 - DNA, 25 bp, Homo sapien
tttcttcaagaatctgatctccttt

SEQ ID NO: 4916293 - DNA, 25 bp, Homo sapien
ctgatctcctttcaagggtttgtaa

SEQ ID NO: 4916294 - DNA, 25 bp, Homo sapien
tcctttcaagggtttgtaatcatga

SEQ ID NO: 4916295 - DNA, 25 bp, Homo sapien
ttttcttcaagaatctgatctcctt

SEQ ID NO: 4916296 - DNA, 25 bp, Homo sapien
atgtcagttttacaagctgccgatt

SEQ ID NO: 4916297 - DNA, 25 bp, Homo sapien
tcgtccacagtttccatccataaca

SEQ ID NO: 4916298 - DNA, 25 bp, Homo sapien
tacaagctgccgatttttctccttc

SEQ ID NO: 4916299 - DNA, 25 bp, Homo sapien
ttttagaaaattgtgatgtcagttt

SEQ ID NO: 4916300 - DNA, 25 bp, Homo sapien
aactctggacactgataccctgaga

SEQ ID NO: 4916301 - DNA, 25 bp, Homo sapien
tctttgttgccagtgattaatggaa

SEQ ID NO: 4916302 - DNA, 25 bp, Homo sapien
actgataccctgagaatgtgtttcc

SEQ ID NO: 4916303 - DNA, 25 bp, Homo sapien
tgattaatggaaactctggacactg

SEQ ID NO: 4916304 - DNA, 25 bp, Homo sapien
ctgtaagacctgttacgccaagcat

SEQ ID NO: 4916305 - DNA, 25 bp, Homo sapien
gcgtaagtgctatggtttcctgaat

SEQ ID NO: 4916306 - DNA, 25 bp, Homo sapien
tctgctgttatctgcgtaagtgcta

SEQ ID NO: 4916307 - DNA, 25 bp, Homo sapien
tacgccaagcattgcaggtgcatct

SEQ ID NO: 4916308 - DNA, 25 bp, Homo sapien
ttatgtgtgtagctgatttccccaa

SEQ ID NO: 4916309 - DNA, 25 bp, Homo sapien
tatgtgtgtagctgatttccccaaa

SEQ ID NO: 4916310 - DNA, 25 bp, Homo sapien
atgtgtgtagctgatttccccaaat

SEQ ID NO: 4916311 - DNA, 25 bp, Homo sapien
tccccaaatggttaccagagcttct

SEQ ID NO: 4916312 - DNA, 25 bp, Homo sapien
gcctttgtagcgactagactatggg

SEQ ID NO: 4916313 - DNA, 25 bp, Homo sapien
tgcgcaagaatccaataggcctttg

SEQ ID NO: 4916314 - DNA, 25 bp, Homo sapien
ttcccttgatttgcgcaagaatcca

SEQ ID NO: 4916315 - DNA, 25 bp, Homo sapien
taggcctttgtagcgactagactat

SEQ ID NO: 4916316 - DNA, 25 bp, Homo sapien
tctgataagtggctagctactggga

SEQ ID NO: 4916317 - DNA, 25 bp, Homo sapien
cactggtaccagaaataggaacgtt

SEQ ID NO: 4916318 - DNA, 25 bp, Homo sapien
gaaagccaaggaagtgggaaccaca

SEQ ID NO: 4916319 - DNA, 25 bp, Homo sapien
gagacacgacatgcctgctgggact

SEQ ID NO: 4916320 - DNA, 25 bp, Homo sapien
gggaatctcatgggtcctttctgtg

SEQ ID NO: 4916321 - DNA, 25 bp, Homo sapien
tgggaatctcatgggtcctttctgt

SEQ ID NO: 4916322 - DNA, 25 bp, Homo sapien
aataacttcagctactaatgctgtg

SEQ ID NO: 4916323 - DNA, 25 bp, Homo sapien
gtgatgcccataaccttcactgaca

SEQ ID NO: 4916324 - DNA, 25 bp, Homo sapien
catacaccttcattaaaagatacca

SEQ ID NO: 4916325 - DNA, 25 bp, Homo sapien
ttcactgacatcataatggagggtc

SEQ ID NO: 4916326 - DNA, 25 bp, Homo sapien
tgctcctcagaagattttgatcttg

SEQ ID NO: 4916327 - DNA, 25 bp, Homo sapien
tcctcagaagattttgatcttgatt

SEQ ID NO: 4916328 - DNA, 25 bp, Homo sapien
ctgctcctcagaagattttgatctt

SEQ ID NO: 4916329 - DNA, 25 bp, Homo sapien
gctcctcagaagattttgatcttga

SEQ ID NO: 4916330 - DNA, 25 bp, Homo sapien
cagcttcgtgggattttcctgttcc

SEQ ID NO: 4916331 - DNA, 25 bp, Homo sapien
aatacagcttcgtgggattttcctg

SEQ ID NO: 4916332 - DNA, 25 bp, Homo sapien
cagttaatacagcttcgtgggattt

SEQ ID NO: 4916333 - DNA, 25 bp, Homo sapien
attcagttaatacagcttcgtggga

SEQ ID NO: 4916334 - DNA, 25 bp, Homo sapien
cagctctacccttgtagtgcaaaaa

SEQ ID NO: 4916335 - DNA, 25 bp, Homo sapien
ctctacccttgtagtgcaaaaacag

SEQ ID NO: 4916336 - DNA, 25 bp, Homo sapien
gctctacccttgtagtgcaaaaaca

SEQ ID NO: 4916337 - DNA, 25 bp, Homo sapien
agctctacccttgtagtgcaaaaac

SEQ ID NO: 4916338 - DNA, 25 bp, Homo sapien
taaagttgctgtatgggcttcataa

SEQ ID NO: 4916339 - DNA, 25 bp, Homo sapien
aagagctgtgtagatttcactaatg

SEQ ID NO: 4916340 - DNA, 25 bp, Homo sapien
cataattgtatacttagacttaatc

SEQ ID NO: 4916341 - DNA, 25 bp, Homo sapien
taatcttcagattatactcaaagaa

SEQ ID NO: 4916342 - DNA, 25 bp, Homo sapien
aatttcactgacatcattaacaacc

SEQ ID NO: 4916343 - DNA, 25 bp, Homo sapien
cattaacaaccaatggtccaccagc

SEQ ID NO: 4916344 - DNA, 25 bp, Homo sapien
ggttgaatatccatttagaagataa

SEQ ID NO: 4916345 - DNA, 25 bp, Homo sapien
tacaattaatttgaaggcacttcca

SEQ ID NO: 4916346 - DNA, 25 bp, Homo sapien
aaccgtatggccaatattaggacta

SEQ ID NO: 4916347 - DNA, 25 bp, Homo sapien
tgtacaagaaagaaagtacggcagc

SEQ ID NO: 4916348 - DNA, 25 bp, Homo sapien
gaggacatagatccaaaccgtatgg

SEQ ID NO: 4916349 - DNA, 25 bp, Homo sapien
cactatcgctaggacagtatcaagg

SEQ ID NO: 4916350 - DNA, 25 bp, Homo sapien
ggattgatttgttactcctgataat

SEQ ID NO: 4916351 - DNA, 25 bp, Homo sapien
cttgatctccaggattgatttgtta

SEQ ID NO: 4916352 - DNA, 25 bp, Homo sapien
ccaggattgatttgttactcctgat

SEQ ID NO: 4916353 - DNA, 25 bp, Homo sapien
gatctccaggattgatttgttactc

SEQ ID NO: 4916354 - DNA, 25 bp, Homo sapien
tatccatgacaagagccagcatatc

SEQ ID NO: 4916355 - DNA, 25 bp, Homo sapien
gacatcgctcctgaggttgacatcg

SEQ ID NO: 4916356 - DNA, 25 bp, Homo sapien
tggctttggaacttgagacatcgct

SEQ ID NO: 4916357 - DNA, 25 bp, Homo sapien
gacatcgcatgggagtcaaccaaat

SEQ ID NO: 4916358 - DNA, 25 bp, Homo sapien
gtccttgtggcgggtgtcaactccc

SEQ ID NO: 4916359 - DNA, 25 bp, Homo sapien
ctttcggtccttgtggcgggtgtca

SEQ ID NO: 4916360 - DNA, 25 bp, Homo sapien
ccttgtggcgggtgtcaactcccat

SEQ ID NO: 4916361 - DNA, 25 bp, Homo sapien
ttcggtccttgtggcgggtgtcaac

SEQ ID NO: 4916362 - DNA, 25 bp, Homo sapien
gcagaggtggccggttgttgcgact

SEQ ID NO: 4916363 - DNA, 25 bp, Homo sapien
tcttccagatcatccgggaaagggg

SEQ ID NO: 4916364 - DNA, 25 bp, Homo sapien
gaggtggccggttgttgcgactcat

SEQ ID NO: 4916365 - DNA, 25 bp, Homo sapien
aagcttcatcttccagatcatccgg

SEQ ID NO: 4916366 - DNA, 25 bp, Homo sapien
cccgcacgtcatccgttatggcccc

SEQ ID NO: 4916367 - DNA, 25 bp, Homo sapien
gaacccgcacgtcatccgttatggc

SEQ ID NO: 4916368 - DNA, 25 bp, Homo sapien
gcacgtcatccgttatggcccccac

SEQ ID NO: 4916369 - DNA, 25 bp, Homo sapien
aacccgcacgtcatccgttatggcc

SEQ ID NO: 4916370 - DNA, 25 bp, Homo sapien
ggctggtcatgcgcagcgcacacac

SEQ ID NO: 4916371 - DNA, 25 bp, Homo sapien
tagaagatgtggctgcgggcccggc

SEQ ID NO: 4916372 - DNA, 25 bp, Homo sapien
gggcccggctggtcatgcgcagcgc

SEQ ID NO: 4916373 - DNA, 25 bp, Homo sapien
ctagaagatgtggctgcgggcccgg

SEQ ID NO: 4916374 - DNA, 25 bp, Homo sapien
cggagagccggacgacgccgcagcc

SEQ ID NO: 4916375 - DNA, 25 bp, Homo sapien
ggaccggagagccggacgacgccgc

SEQ ID NO: 4916376 - DNA, 25 bp, Homo sapien
accggagagccggacgacgccgcag

SEQ ID NO: 4916377 - DNA, 25 bp, Homo sapien
gaccggagagccggacgacgccgca

SEQ ID NO: 4916378 - DNA, 25 bp, Homo sapien
ataagagggtaggctccacggtttg

SEQ ID NO: 4916379 - DNA, 25 bp, Homo sapien
ccattggagcggatgtagggtttgc

SEQ ID NO: 4916380 - DNA, 25 bp, Homo sapien
ttgtatcctcggctggcccttcggt

SEQ ID NO: 4916381 - DNA, 25 bp, Homo sapien
ctggcccttcggtctctcgcgcgct

SEQ ID NO: 4916382 - DNA, 25 bp, Homo sapien
ctaatgatgcaaaacttcctccttt

SEQ ID NO: 4916383 - DNA, 25 bp, Homo sapien
ttactaatgatgcaaaacttcctcc

SEQ ID NO: 4916384 - DNA, 25 bp, Homo sapien
taattactaatgatgcaaaacttcc

SEQ ID NO: 4916385 - DNA, 25 bp, Homo sapien
cttccctaattactaatgatgcaaa

SEQ ID NO: 4916386 - DNA, 25 bp, Homo sapien
tacataaaccttggtgttatgaaga

SEQ ID NO: 4916387 - DNA, 25 bp, Homo sapien
taacttgccatactcacagaaggta

SEQ ID NO: 4916388 - DNA, 25 bp, Homo sapien
ttgtgcaacatcattgcttggtaca

SEQ ID NO: 4916389 - DNA, 25 bp, Homo sapien
agaaggtacagatataccctttggg

SEQ ID NO: 4916390 - DNA, 25 bp, Homo sapien
tttaggcaacatgaccttttgagaa

SEQ ID NO: 4916391 - DNA, 25 bp, Homo sapien
ttaggcaacatgaccttttgagaaa

SEQ ID NO: 4916392 - DNA, 25 bp, Homo sapien
ctttaggcaacatgaccttttgaga

SEQ ID NO: 4916393 - DNA, 25 bp, Homo sapien
ttatcaggggcttccgaaatggctt

SEQ ID NO: 4916394 - DNA, 25 bp, Homo sapien
ccgaaatggcttaaggatataaaat

SEQ ID NO: 4916395 - DNA, 25 bp, Homo sapien
attttaaagcaccaagcatacgcct

SEQ ID NO: 4916396 - DNA, 25 bp, Homo sapien
catacgcctggtaaggcaccagtac

SEQ ID NO: 4916397 - DNA, 25 bp, Homo sapien
caaaggaagaaagatcggctcaggc

SEQ ID NO: 4916398 - DNA, 25 bp, Homo sapien
cgttcaacgacgacggaaaggccag

SEQ ID NO: 4916399 - DNA, 25 bp, Homo sapien
gaggctttgcaccaccgagttgcta

SEQ ID NO: 4916400 - DNA, 25 bp, Homo sapien
gcatagtgccatctgagtagccaaa

SEQ ID NO: 4916401 - DNA, 25 bp, Homo sapien
catggacaacccgaagttgaaactg

SEQ ID NO: 4916402 - DNA, 25 bp, Homo sapien
tcaagaagatcagcctccctgaatt

SEQ ID NO: 4916403 - DNA, 25 bp, Homo sapien
attttcatggacaacccgaagttga

SEQ ID NO: 4916404 - DNA, 25 bp, Homo sapien
gacttggctgttgatgtgcgtgtgt

SEQ ID NO: 4916405 - DNA, 25 bp, Homo sapien
aaggtaacctttgtatttgagtcag

SEQ ID NO: 4916406 - DNA, 25 bp, Homo sapien
cccctcctgctgtagtttggacagg

SEQ ID NO: 4916407 - DNA, 25 bp, Homo sapien
tgctgtagtttggacaggcgcccct

SEQ ID NO: 4916408 - DNA, 25 bp, Homo sapien
taacctttgtatttgagtcagggcc

SEQ ID NO: 4916409 - DNA, 25 bp, Homo sapien
cagtcctcgcccataaggcgacagt

SEQ ID NO: 4916410 - DNA, 25 bp, Homo sapien
gtgtcccggggactgacacccacag

SEQ ID NO: 4916411 - DNA, 25 bp, Homo sapien
tggccatgtccggagctttcagccc

SEQ ID NO: 4916412 - DNA, 25 bp, Homo sapien
cttttacagacgcccgcccaggtgg

SEQ ID NO: 4916413 - DNA, 25 bp, Homo sapien
tggaaaagtggaaatcgcatcctct

SEQ ID NO: 4916414 - DNA, 25 bp, Homo sapien
aatcgcatcctctcccgcagttagt

SEQ ID NO: 4916415 - DNA, 25 bp, Homo sapien
agtggaaatcgcatcctctcccgca

SEQ ID NO: 4916416 - DNA, 25 bp, Homo sapien
gaaaagtggaaatcgcatcctctcc

SEQ ID NO: 4916417 - DNA, 25 bp, Homo sapien
tttccagggattctcgccagagcga

SEQ ID NO: 4916418 - DNA, 25 bp, Homo sapien
gtaccgcgaaggcacagatctctgg

SEQ ID NO: 4916419 - DNA, 25 bp, Homo sapien
cacgccagagcgtctttccagggat

SEQ ID NO: 4916420 - DNA, 25 bp, Homo sapien
gcgacttcgcgaaggatccacgttt

SEQ ID NO: 4916421 - DNA, 25 bp, Homo sapien
gcaatgacaaagaggcttagtggga

SEQ ID NO: 4916422 - DNA, 25 bp, Homo sapien
tggtcttaggtaggcctgaaccact

SEQ ID NO: 4916423 - DNA, 25 bp, Homo sapien
cgcctcggagtgtaagataaagtgg

SEQ ID NO: 4916424 - DNA, 25 bp, Homo sapien
tgaaccactcgggtggggctgaaaa

SEQ ID NO: 4916425 - DNA, 25 bp, Homo sapien
tttcttctggaatgtgaggtccatg

SEQ ID NO: 4916426 - DNA, 25 bp, Homo sapien
ccgttgtaaggattttgcaggttct

SEQ ID NO: 4916427 - DNA, 25 bp, Homo sapien
aggattttgcaggttctaatctaga

SEQ ID NO: 4916428 - DNA, 25 bp, Homo sapien
tgaaaaacctcagactggggagccg

SEQ ID NO: 4916429 - DNA, 25 bp, Homo sapien
gtaaaggagtgcctctctgaactgc

SEQ ID NO: 4916430 - DNA, 25 bp, Homo sapien
aacagtttattgtccagcttgcagc

SEQ ID NO: 4916431 - DNA, 25 bp, Homo sapien
tctgaactgcaatcgggccgcgtct

SEQ ID NO: 4916432 - DNA, 25 bp, Homo sapien
tgtcaacacaaactggacgcttctt

SEQ ID NO: 4916433 - DNA, 25 bp, Homo sapien
cattttttgaacaatcacctctcca

SEQ ID NO: 4916434 - DNA, 25 bp, Homo sapien
gatgccgctttcagtgaagctagtt

SEQ ID NO: 4916435 - DNA, 25 bp, Homo sapien
tcgaatagacgctatggatgccgct

SEQ ID NO: 4916436 - DNA, 25 bp, Homo sapien
tactcatggcagctcgaatagacgc

SEQ ID NO: 4916437 - DNA, 25 bp, Homo sapien
caagcctgcaatacttgaagacctg

SEQ ID NO: 4916438 - DNA, 25 bp, Homo sapien
tggatacatctgtccaggggtcaag

SEQ ID NO: 4916439 - DNA, 25 bp, Homo sapien
aaagtactaggattagatatttgga

SEQ ID NO: 4916440 - DNA, 25 bp, Homo sapien
tgaacctgtgaaaaaactgaagcac

SEQ ID NO: 4916441 - DNA, 25 bp, Homo sapien
ttagggttcagcctgcaggaatcca

SEQ ID NO: 4916442 - DNA, 25 bp, Homo sapien
ggaatccactgccatcacatcagag

SEQ ID NO: 4916443 - DNA, 25 bp, Homo sapien
cacatcagaggtcctgcatctcagg

SEQ ID NO: 4916444 - DNA, 25 bp, Homo sapien
tgctaagcgttgtcaaagagcagct

SEQ ID NO: 4916445 - DNA, 25 bp, Homo sapien
tctgcatcatgtggagtaggagtag

SEQ ID NO: 4916446 - DNA, 25 bp, Homo sapien
cctaaggtcatagaagaatttttag

SEQ ID NO: 4916447 - DNA, 25 bp, Homo sapien
tgcatcatgtggagtaggagtagga

SEQ ID NO: 4916448 - DNA, 25 bp, Homo sapien
tcagctttgccccatgaaagaggat

SEQ ID NO: 4916449 - DNA, 25 bp, Homo sapien
tgatgaatgcacatgaaaatgatca

SEQ ID NO: 4916450 - DNA, 25 bp, Homo sapien
tttccagcatgccagccagattttg

SEQ ID NO: 4916451 - DNA, 25 bp, Homo sapien
tcattgctgctatatgatgacagct

SEQ ID NO: 4916452 - DNA, 25 bp, Homo sapien
caggcctatgattcaactgctatga

SEQ ID NO: 4916453 - DNA, 25 bp, Homo sapien
ctactgcaccaaggtgttccatcct

SEQ ID NO: 4916454 - DNA, 25 bp, Homo sapien
tatagaaattttggacatagcaggc

SEQ ID NO: 4916455 - DNA, 25 bp, Homo sapien
taggcagtgcctaataccgaaagat

SEQ ID NO: 4916456 - DNA, 25 bp, Homo sapien
aatatagctgtataccaaagcactg

SEQ ID NO: 4916457 - DNA, 25 bp, Homo sapien
tattccaaagatctgtttagagcac

SEQ ID NO: 4916458 - DNA, 25 bp, Homo sapien
attcagactgtctgccattgttcag

SEQ ID NO: 4916459 - DNA, 25 bp, Homo sapien
tgtctcctatctgccatttctgttt

SEQ ID NO: 4916460 - DNA, 25 bp, Homo sapien
catgaagaactgaaggactagaagg

SEQ ID NO: 4916461 - DNA, 25 bp, Homo sapien
ggaagccacgttccacatttcatgg

SEQ ID NO: 4916462 - DNA, 25 bp, Homo sapien
aaataattcaatatgcaggtgtcca

SEQ ID NO: 4916463 - DNA, 25 bp, Homo sapien
ctggttctactaaatattatgagac

SEQ ID NO: 4916464 - DNA, 25 bp, Homo sapien
cttaactgttcatcatttcaggtga

SEQ ID NO: 4916465 - DNA, 25 bp, Homo sapien
ccattgtagtttgcctcagatgaaa

SEQ ID NO: 4916466 - DNA, 25 bp, Homo sapien
gatccatccatcactgtaaaagcca

SEQ ID NO: 4916467 - DNA, 25 bp, Homo sapien
gcagtgagtaagccaaactgccctg

SEQ ID NO: 4916468 - DNA, 25 bp, Homo sapien
atcagcatgccatcctgcaacaagc

SEQ ID NO: 4916469 - DNA, 25 bp, Homo sapien
taaaagccatcagcaggttttgcag

SEQ ID NO: 4916470 - DNA, 25 bp, Homo sapien
ttgattcaggagcatatcagatgta

SEQ ID NO: 4916471 - DNA, 25 bp, Homo sapien
tgattcaggagcatatcagatgtat

SEQ ID NO: 4916472 - DNA, 25 bp, Homo sapien
cttcagttcaatcccttgattcagg

SEQ ID NO: 4916473 - DNA, 25 bp, Homo sapien
cttcttcagttcaatcccttgattc

SEQ ID NO: 4916474 - DNA, 25 bp, Homo sapien
tacacatagcattcttgtctcttcc

SEQ ID NO: 4916475 - DNA, 25 bp, Homo sapien
atcagacattgcagccatggagatg

SEQ ID NO: 4916476 - DNA, 25 bp, Homo sapien
catcagacattgcagccatggagat

SEQ ID NO: 4916477 - DNA, 25 bp, Homo sapien
caagctccatgtaagcatcatttgc

SEQ ID NO: 4916478 - DNA, 25 bp, Homo sapien
tgccagagccacagatatcacctgt

SEQ ID NO: 4916479 - DNA, 25 bp, Homo sapien
gtgcctgcattctatcagaccaagc

SEQ ID NO: 4916480 - DNA, 25 bp, Homo sapien
caccatggtctgattgccagagcca

SEQ ID NO: 4916481 - DNA, 25 bp, Homo sapien
caaggcaggtcttactcctgcaagg

SEQ ID NO: 4916482 - DNA, 25 bp, Homo sapien
aaggcaggtcttactcctgcaaggt

SEQ ID NO: 4916483 - DNA, 25 bp, Homo sapien
aggcaggtcttactcctgcaaggtc

SEQ ID NO: 4916484 - DNA, 25 bp, Homo sapien
ggcaggtcttactcctgcaaggtct

SEQ ID NO: 4916485 - DNA, 25 bp, Homo sapien
ttaaaggtcttgagttgtggattct

SEQ ID NO: 4916486 - DNA, 25 bp, Homo sapien
taaaggtcttgagttgtggattctg

SEQ ID NO: 4916487 - DNA, 25 bp, Homo sapien
aggtcttgagttgtggattctggat

SEQ ID NO: 4916488 - DNA, 25 bp, Homo sapien
aaggtcttgagttgtggattctgga

SEQ ID NO: 4916489 - DNA, 25 bp, Homo sapien
ttttctcggagattggatgattccc

SEQ ID NO: 4916490 - DNA, 25 bp, Homo sapien
caccacactgttttggaacgttttg

SEQ ID NO: 4916491 - DNA, 25 bp, Homo sapien
ttggatgattcccttttccaagccc

SEQ ID NO: 4916492 - DNA, 25 bp, Homo sapien
ggcctaatagttttctcggagattg

SEQ ID NO: 4916493 - DNA, 25 bp, Homo sapien
tctgagtggaaatcagtactgatag

SEQ ID NO: 4916494 - DNA, 25 bp, Homo sapien
gcaaaaatgactccattctgagtgg

SEQ ID NO: 4916495 - DNA, 25 bp, Homo sapien
caaaaatgactccattctgagtgga

SEQ ID NO: 4916496 - DNA, 25 bp, Homo sapien
aatcagtactgatagtgtgcaaggt

SEQ ID NO: 4916497 - DNA, 25 bp, Homo sapien
tagatcaagtggtcttggtctaggt

SEQ ID NO: 4916498 - DNA, 25 bp, Homo sapien
taagaggtcactttaaggcgagttc

SEQ ID NO: 4916499 - DNA, 25 bp, Homo sapien
ctgagataacaagctggtaagaggt

SEQ ID NO: 4916500 - DNA, 25 bp, Homo sapien
cttggtctaggtcctggtcctgaga

SEQ ID NO: 4916501 - DNA, 25 bp, Homo sapien
cagccctactgtccctttttccatt

SEQ ID NO: 4916502 - DNA, 25 bp, Homo sapien
caggtctttatttagtgcctttgta

SEQ ID NO: 4916503 - DNA, 25 bp, Homo sapien
tctgttcctaacagcatgctgttct

SEQ ID NO: 4916504 - DNA, 25 bp, Homo sapien
tcttatctgtcagcaggtctttatt

SEQ ID NO: 4916505 - DNA, 25 bp, Homo sapien
tcattgacaagctcaatttgtttct

SEQ ID NO: 4916506 - DNA, 25 bp, Homo sapien
caagctcaatttgtttctccgattt

SEQ ID NO: 4916507 - DNA, 25 bp, Homo sapien
gacaagctcaatttgtttctccgat

SEQ ID NO: 4916508 - DNA, 25 bp, Homo sapien
ttgacaagctcaatttgtttctccg

SEQ ID NO: 4916509 - DNA, 25 bp, Homo sapien
gccaacctaaaattcagcactcagt

SEQ ID NO: 4916510 - DNA, 25 bp, Homo sapien
tgagaatgtgggagctacgaaaaat

SEQ ID NO: 4916511 - DNA, 25 bp, Homo sapien
tttcaaggagcaacaataagactga

SEQ ID NO: 4916512 - DNA, 25 bp, Homo sapien
cagcaaattgaacactatggagagg

SEQ ID NO: 4916513 - DNA, 25 bp, Homo sapien
gatgcagagtcagcgagaatgcaca

SEQ ID NO: 4916514 - DNA, 25 bp, Homo sapien
cagatgcagagtcagcgagaatgca

SEQ ID NO: 4916515 - DNA, 25 bp, Homo sapien
gagtcagcgagaatgcacagttcat

SEQ ID NO: 4916516 - DNA, 25 bp, Homo sapien
tgcagatgcagagtcagcgagaatg

SEQ ID NO: 4916517 - DNA, 25 bp, Homo sapien
ttttaacccaagcaacaccctctgc

SEQ ID NO: 4916518 - DNA, 25 bp, Homo sapien
ccgtggtggagaaagggccgtatgt

SEQ ID NO: 4916519 - DNA, 25 bp, Homo sapien
cacagatccacttccgtggtggaga

SEQ ID NO: 4916520 - DNA, 25 bp, Homo sapien
gatccacttccgtggtggagaaagg

SEQ ID NO: 4916521 - DNA, 25 bp, Homo sapien
tccgtggtggagaaagggccgtatg

SEQ ID NO: 4916522 - DNA, 25 bp, Homo sapien
cattgctgccaatgaataaggagga

SEQ ID NO: 4916523 - DNA, 25 bp, Homo sapien
aaactaagaggagattcagtgccat

SEQ ID NO: 4916524 - DNA, 25 bp, Homo sapien
taaggaggaattatgttcccttggc

SEQ ID NO: 4916525 - DNA, 25 bp, Homo sapien
tatggatttgcaaaactaagaggag

SEQ ID NO: 4916526 - DNA, 25 bp, Homo sapien
aacgagagttgtccctgtctgaggc

SEQ ID NO: 4916527 - DNA, 25 bp, Homo sapien
cagttccctcggtagtattctaacg

SEQ ID NO: 4916528 - DNA, 25 bp, Homo sapien
gaatgctagctttgcactcaagata

SEQ ID NO: 4916529 - DNA, 25 bp, Homo sapien
gacttgggagataggtagccatcat

SEQ ID NO: 4916530 - DNA, 25 bp, Homo sapien
acaatcacttgaaataactcaccac

SEQ ID NO: 4916531 - DNA, 25 bp, Homo sapien
cagtagtaagacaaggggagagagt

SEQ ID NO: 4916532 - DNA, 25 bp, Homo sapien
tcacttgaaataactcaccaccttc

SEQ ID NO: 4916533 - DNA, 25 bp, Homo sapien
aatcacttgaaataactcaccacct

SEQ ID NO: 4916534 - DNA, 25 bp, Homo sapien
agcctgaatcagaaactccatacat

SEQ ID NO: 4916535 - DNA, 25 bp, Homo sapien
cagcctgaatcagaaactccataca

SEQ ID NO: 4916536 - DNA, 25 bp, Homo sapien
gatattcatgggcttttgaataatc

SEQ ID NO: 4916537 - DNA, 25 bp, Homo sapien
ccacagaaaagagggggagatattc

SEQ ID NO: 4916538 - DNA, 25 bp, Homo sapien
tcttgtagcatggtagcagagctca

SEQ ID NO: 4916539 - DNA, 25 bp, Homo sapien
ttgaataatcttgtagcatggtagc

SEQ ID NO: 4916540 - DNA, 25 bp, Homo sapien
tccactttgtaaagctgatactcat

SEQ ID NO: 4916541 - DNA, 25 bp, Homo sapien
tttccactttgtaaagctgatactc

SEQ ID NO: 4916542 - DNA, 25 bp, Homo sapien
ttccactttgtaaagctgatactca

SEQ ID NO: 4916543 - DNA, 25 bp, Homo sapien
agtttccactttgtaaagctgatac

SEQ ID NO: 4916544 - DNA, 25 bp, Homo sapien
tagcaaggcaatgaactaggccagt

SEQ ID NO: 4916545 - DNA, 25 bp, Homo sapien
caaggcaatgaactaggccagtgct

SEQ ID NO: 4916546 - DNA, 25 bp, Homo sapien
aatgaactaggccagtgcttccagt

SEQ ID NO: 4916547 - DNA, 25 bp, Homo sapien
tggatagcaaggcaatgaactaggc

SEQ ID NO: 4916548 - DNA, 25 bp, Homo sapien
tttcccctcacagtggatggtagac

SEQ ID NO: 4916549 - DNA, 25 bp, Homo sapien
acagtggatggtagaccttgggaca

SEQ ID NO: 4916550 - DNA, 25 bp, Homo sapien
ttttcccggattctaacttcagtga

SEQ ID NO: 4916551 - DNA, 25 bp, Homo sapien
ccttgggacagtcatgcacttgtca

SEQ ID NO: 4916552 - DNA, 25 bp, Homo sapien
tcctatgcaatatatctaaattgaa

SEQ ID NO: 4916553 - DNA, 25 bp, Homo sapien
gaagcttgtgtatcatccattatca

SEQ ID NO: 4916554 - DNA, 25 bp, Homo sapien
agtgattgttggcacatcctatgca

SEQ ID NO: 4916555 - DNA, 25 bp, Homo sapien
taatggtaccagataaaattataga

SEQ ID NO: 4916556 - DNA, 25 bp, Homo sapien
acaaatactcctgtgtatgggcaaa

SEQ ID NO: 4916557 - DNA, 25 bp, Homo sapien
ttagacaaatactcctgtgtatggg

SEQ ID NO: 4916558 - DNA, 25 bp, Homo sapien
gacaaatactcctgtgtatgggcaa

SEQ ID NO: 4916559 - DNA, 25 bp, Homo sapien
ttgtgactagttgtataacaggtta

SEQ ID NO: 4916560 - DNA, 25 bp, Homo sapien
gccttataatggacatgtgtgctca

SEQ ID NO: 4916561 - DNA, 25 bp, Homo sapien
tgtgtgctcataatgtgaggtacat

SEQ ID NO: 4916562 - DNA, 25 bp, Homo sapien
tcatatgtgatgttatttgataaaa

SEQ ID NO: 4916563 - DNA, 25 bp, Homo sapien
tattgccttataatggacatgtgtg

SEQ ID NO: 4916564 - DNA, 25 bp, Homo sapien
ttctcctatgttatatttgtagttt

SEQ ID NO: 4916565 - DNA, 25 bp, Homo sapien
caccaaagcaaagtcacctagattt

SEQ ID NO: 4916566 - DNA, 25 bp, Homo sapien
tatttcatgaattatgtctttggtg

SEQ ID NO: 4916567 - DNA, 25 bp, Homo sapien
gtgttgcatctaaaatgtcatcacc

SEQ ID NO: 4916568 - DNA, 25 bp, Homo sapien
aactgtcaaagaaacactaggcttg

SEQ ID NO: 4916569 - DNA, 25 bp, Homo sapien
aatatcccactcatgaactagcaga

SEQ ID NO: 4916570 - DNA, 25 bp, Homo sapien
gagcacccaagattcataaaccaaa

SEQ ID NO: 4916571 - DNA, 25 bp, Homo sapien
taaagagatcaacccatgagagaat

SEQ ID NO: 4916572 - DNA, 25 bp, Homo sapien
ttacgcaatggtgcctgatctgcaa

SEQ ID NO: 4916573 - DNA, 25 bp, Homo sapien
cctgatctgcaatccattcattcat

SEQ ID NO: 4916574 - DNA, 25 bp, Homo sapien
ggtgcctgatctgcaatccattcat

SEQ ID NO: 4916575 - DNA, 25 bp, Homo sapien
cttacgcaatggtgcctgatctgca

SEQ ID NO: 4916576 - DNA, 25 bp, Homo sapien
atcacctcctgtttctctaacaagt

SEQ ID NO: 4916577 - DNA, 25 bp, Homo sapien
gaactgtaaatgtcagcatcacctc

SEQ ID NO: 4916578 - DNA, 25 bp, Homo sapien
cagtcagtgttgtctgtgcattgca

SEQ ID NO: 4916579 - DNA, 25 bp, Homo sapien
aatactgactttttcgatttcacag

SEQ ID NO: 4916580 - DNA, 25 bp, Homo sapien
aacaagacagacatatgtgcggagt

SEQ ID NO: 4916581 - DNA, 25 bp, Homo sapien
gatgttatctccacgagctttaaca

SEQ ID NO: 4916582 - DNA, 25 bp, Homo sapien
tgcggagtatacagatcccaatgga

SEQ ID NO: 4916583 - DNA, 25 bp, Homo sapien
cacgatgttatctccacgagcttta

SEQ ID NO: 4916584 - DNA, 25 bp, Homo sapien
aggtcgtaggttcatctttctcatg

SEQ ID NO: 4916585 - DNA, 25 bp, Homo sapien
cacggcaccaaatttcatgcacgtc

SEQ ID NO: 4916586 - DNA, 25 bp, Homo sapien
ctcatggagcaaagaacaggaggac

SEQ ID NO: 4916587 - DNA, 25 bp, Homo sapien
gagtcacggcaccaaatttcatgca

SEQ ID NO: 4916588 - DNA, 25 bp, Homo sapien
ggccatctgggcctatatgtgcaag

SEQ ID NO: 4916589 - DNA, 25 bp, Homo sapien
atctgggcctatatgtgcaagtcac

SEQ ID NO: 4916590 - DNA, 25 bp, Homo sapien
ccatctgggcctatatgtgcaagtc

SEQ ID NO: 4916591 - DNA, 25 bp, Homo sapien
aggatgagccagtaaaatgactttt

SEQ ID NO: 4916592 - DNA, 25 bp, Homo sapien
tactatatacggtgaacccagaaaa

SEQ ID NO: 4916593 - DNA, 25 bp, Homo sapien
tggaaatttgtaaacctaacatata

SEQ ID NO: 4916594 - DNA, 25 bp, Homo sapien
cagaactaaaagacaaatctgtaca

SEQ ID NO: 4916595 - DNA, 25 bp, Homo sapien
tagtaatagtatagaatgagtgaca

SEQ ID NO: 4916596 - DNA, 25 bp, Homo sapien
tggtcagtctgaggacctgaagtca

SEQ ID NO: 4916597 - DNA, 25 bp, Homo sapien
aaacaggcgttgtgtgagctacatg

SEQ ID NO: 4916598 - DNA, 25 bp, Homo sapien
ggtcagtctgaggacctgaagtcat

SEQ ID NO: 4916599 - DNA, 25 bp, Homo sapien
gcgttgtgtgagctacatggctgtt

SEQ ID NO: 4916600 - DNA, 25 bp, Homo sapien
ctgcagttgagacatttggaagttc

SEQ ID NO: 4916601 - DNA, 25 bp, Homo sapien
tgcagttgagacatttggaagttct

SEQ ID NO: 4916602 - DNA, 25 bp, Homo sapien
tccagttgccagatttccagcacgt

SEQ ID NO: 4916603 - DNA, 25 bp, Homo sapien
ccttggtccagttgccagatttcca

SEQ ID NO: 4916604 - DNA, 25 bp, Homo sapien
tccagcacgtgtagcaagttcctgt

SEQ ID NO: 4916605 - DNA, 25 bp, Homo sapien
cacagatgggatgcggcttaggaat

SEQ ID NO: 4916606 - DNA, 25 bp, Homo sapien
cacttaagcagtacttagtatatat

SEQ ID NO: 4916607 - DNA, 25 bp, Homo sapien
tcacttaagcagtacttagtatata

SEQ ID NO: 4916608 - DNA, 25 bp, Homo sapien
taaatcacttaagcagtacttagta

SEQ ID NO: 4916609 - DNA, 25 bp, Homo sapien
aatcacttaagcagtacttagtata

SEQ ID NO: 4916610 - DNA, 25 bp, Homo sapien
tgtattttgggccttcagaatcacc

SEQ ID NO: 4916611 - DNA, 25 bp, Homo sapien
tacataatgtctggtgtctgaccac

SEQ ID NO: 4916612 - DNA, 25 bp, Homo sapien
taatgtgtatgtgcctgacaacaga

SEQ ID NO: 4916613 - DNA, 25 bp, Homo sapien
cagaaaatctgtaagtgcatagcta

SEQ ID NO: 4916614 - DNA, 25 bp, Homo sapien
gaagaacaaatcactccaacaggat

SEQ ID NO: 4916615 - DNA, 25 bp, Homo sapien
ttaagatacaaagtccgaagaacaa

SEQ ID NO: 4916616 - DNA, 25 bp, Homo sapien
tccgaagaacaaatcactccaacag

SEQ ID NO: 4916617 - DNA, 25 bp, Homo sapien
aagatacaaagtccgaagaacaaat

SEQ ID NO: 4916618 - DNA, 25 bp, Homo sapien
aatgtttccaacacctaggcagtgc

SEQ ID NO: 4916619 - DNA, 25 bp, Homo sapien
taggcctcattaaaatagcagctcc

SEQ ID NO: 4916620 - DNA, 25 bp, Homo sapien
gggttctaatctctcaggtcatctc

SEQ ID NO: 4916621 - DNA, 25 bp, Homo sapien
taggcagtgctaggcatattttgag

SEQ ID NO: 4916622 - DNA, 25 bp, Homo sapien
ggtgtatataccttctctcagttag

SEQ ID NO: 4916623 - DNA, 25 bp, Homo sapien
gacaaaaagcataggtgcagtttcc

SEQ ID NO: 4916624 - DNA, 25 bp, Homo sapien
caaatgtatccgtggtagacagaat

SEQ ID NO: 4916625 - DNA, 25 bp, Homo sapien
caaaattcgcagtccgtggtgtata

SEQ ID NO: 4916626 - DNA, 25 bp, Homo sapien
ataaaagcatatgtccttacaaata

SEQ ID NO: 4916627 - DNA, 25 bp, Homo sapien
aagcatatgtccttacaaatacttg

SEQ ID NO: 4916628 - DNA, 25 bp, Homo sapien
agcatatgtccttacaaatacttgt

SEQ ID NO: 4916629 - DNA, 25 bp, Homo sapien
gaaataaaagcatatgtccttacaa

SEQ ID NO: 4916630 - DNA, 25 bp, Homo sapien
agggggtggcgctcatcagggaggc

SEQ ID NO: 4916631 - DNA, 25 bp, Homo sapien
gggtggcgctcatcagggaggctcg

SEQ ID NO: 4916632 - DNA, 25 bp, Homo sapien
gagcagggggtggcgctcatcaggg

SEQ ID NO: 4916633 - DNA, 25 bp, Homo sapien
ggtggcgctcatcagggaggctcgg

SEQ ID NO: 4916634 - DNA, 25 bp, Homo sapien
tctccttttagcagtagacagtctt

SEQ ID NO: 4916635 - DNA, 25 bp, Homo sapien
gaggagcctcaaccaatgaggattg

SEQ ID NO: 4916636 - DNA, 25 bp, Homo sapien
caaacttctaggctgtgtctcacaa

SEQ ID NO: 4916637 - DNA, 25 bp, Homo sapien
gacagtcttcaactacagcaggagg

SEQ ID NO: 4916638 - DNA, 25 bp, Homo sapien
taggagaactgcaaatttaccctct

SEQ ID NO: 4916639 - DNA, 25 bp, Homo sapien
gcactatatagtgctatacagagta

SEQ ID NO: 4916640 - DNA, 25 bp, Homo sapien
gaactaaaaagtactatgaagcata

SEQ ID NO: 4916641 - DNA, 25 bp, Homo sapien
taattgcataagcactacatgagca

SEQ ID NO: 4916642 - DNA, 25 bp, Homo sapien
ggtgtttagggctgataaactatat

SEQ ID NO: 4916643 - DNA, 25 bp, Homo sapien
tctccaatagttatactaaaggtgt

SEQ ID NO: 4916644 - DNA, 25 bp, Homo sapien
taaatattaattagggatactgatg

SEQ ID NO: 4916645 - DNA, 25 bp, Homo sapien
gatgatgactctctactaatatttt

SEQ ID NO: 4916646 - DNA, 25 bp, Homo sapien
cttttatgcacctttctgccaatct

SEQ ID NO: 4916647 - DNA, 25 bp, Homo sapien
catttccattatgcaccaaatattc

SEQ ID NO: 4916648 - DNA, 25 bp, Homo sapien
tctgcaggtttctcaaagtgaccat

SEQ ID NO: 4916649 - DNA, 25 bp, Homo sapien
ttccattatgcaccaaatattctgc

SEQ ID NO: 4916650 - DNA, 25 bp, Homo sapien
ccaaatattctgcaggtttctcaaa

SEQ ID NO: 4916651 - DNA, 25 bp, Homo sapien
aacaggtatcctgacttcttctcag

SEQ ID NO: 4916652 - DNA, 25 bp, Homo sapien
tatagagacccataagcctctgggc

SEQ ID NO: 4916653 - DNA, 25 bp, Homo sapien
gcatcttccttttggaccccttcat

SEQ ID NO: 4916654 - DNA, 25 bp, Homo sapien
tggaccccttcatggaacaggtatc

SEQ ID NO: 4916655 - DNA, 25 bp, Homo sapien
ccagtggtgataatcgagaaaatgc

SEQ ID NO: 4916656 - DNA, 25 bp, Homo sapien
actggatctgctccatgagtagaag

SEQ ID NO: 4916657 - DNA, 25 bp, Homo sapien
cttttcttgaagaaccagtggtgat

SEQ ID NO: 4916658 - DNA, 25 bp, Homo sapien
catgagtagaagtacttttcccaac

SEQ ID NO: 4916659 - DNA, 25 bp, Homo sapien
cttaatggaaggaattaggtgtaat

SEQ ID NO: 4916660 - DNA, 25 bp, Homo sapien
taatggaaggaattaggtgtaatat

SEQ ID NO: 4916661 - DNA, 25 bp, Homo sapien
gaaggaattaggtgtaatattctgc

SEQ ID NO: 4916662 - DNA, 25 bp, Homo sapien
ggaattaggtgtaatattctgcttc

SEQ ID NO: 4916663 - DNA, 25 bp, Homo sapien
tacatcagaatacagggcagcaggt

SEQ ID NO: 4916664 - DNA, 25 bp, Homo sapien
tttcaaggaagtccgtgattaacag

SEQ ID NO: 4916665 - DNA, 25 bp, Homo sapien
gtgattaacaggaacgagagcagac

SEQ ID NO: 4916666 - DNA, 25 bp, Homo sapien
atacatcagaatacagggcagcagg

SEQ ID NO: 4916667 - DNA, 25 bp, Homo sapien
agagatgtgaacatgacgcaggcat

SEQ ID NO: 4916668 - DNA, 25 bp, Homo sapien
gatgtgaacatgacgcaggcatgat

SEQ ID NO: 4916669 - DNA, 25 bp, Homo sapien
gaacatgacgcaggcatgatcctac

SEQ ID NO: 4916670 - DNA, 25 bp, Homo sapien
catgttagatatagtaagagatgtg

SEQ ID NO: 4916671 - DNA, 25 bp, Homo sapien
gttagtcttttaggcatccaataag

SEQ ID NO: 4916672 - DNA, 25 bp, Homo sapien
caataagaatatccacaaagagctg

SEQ ID NO: 4916673 - DNA, 25 bp, Homo sapien
ccatgtaatttagttagtcttttag

SEQ ID NO: 4916674 - DNA, 25 bp, Homo sapien
gcatccaataagaatatccacaaag

SEQ ID NO: 4916675 - DNA, 25 bp, Homo sapien
taagataagggtgtagcaataagcc

SEQ ID NO: 4916676 - DNA, 25 bp, Homo sapien
aaggtgacatttattctaatgagag

SEQ ID NO: 4916677 - DNA, 25 bp, Homo sapien
cagccagatgttgtaagatgatgta

SEQ ID NO: 4916678 - DNA, 25 bp, Homo sapien
ggtgtagcaataagccacagccaga

SEQ ID NO: 4916679 - DNA, 25 bp, Homo sapien
ctctgctataggcagctccggtctg

SEQ ID NO: 4916680 - DNA, 25 bp, Homo sapien
tgacagcaggtgtttttcactgtgg

SEQ ID NO: 4916681 - DNA, 25 bp, Homo sapien
gctagatgtggatttggtccctaaa

SEQ ID NO: 4916682 - DNA, 25 bp, Homo sapien
tgcctggtatctgctgtagcctctg

SEQ ID NO: 4916683 - DNA, 25 bp, Homo sapien
cttcttgaatatcttcacttttctc

SEQ ID NO: 4916684 - DNA, 25 bp, Homo sapien
ttcttgaatatcttcacttttctcc

SEQ ID NO: 4916685 - DNA, 25 bp, Homo sapien
gaatatcttcacttttctccaagac

SEQ ID NO: 4916686 - DNA, 25 bp, Homo sapien
tatcttcacttttctccaagaccat

SEQ ID NO: 4916687 - DNA, 25 bp, Homo sapien
gctcagagtcacattctctccttat

SEQ ID NO: 4916688 - DNA, 25 bp, Homo sapien
ttgctcagagtcacattctctcctt

SEQ ID NO: 4916689 - DNA, 25 bp, Homo sapien
cttccatattttgctcagagtcaca

SEQ ID NO: 4916690 - DNA, 25 bp, Homo sapien
tcagagtcacattctctccttattg

SEQ ID NO: 4916691 - DNA, 25 bp, Homo sapien
gtacttgaagaataccacccaacat

SEQ ID NO: 4916692 - DNA, 25 bp, Homo sapien
tacttgaagaataccacccaacatc

SEQ ID NO: 4916693 - DNA, 25 bp, Homo sapien
tttgtggcattgcctgtttcttgaa

SEQ ID NO: 4916694 - DNA, 25 bp, Homo sapien
tgtggcattgcctgtttcttgaatc

SEQ ID NO: 4916695 - DNA, 25 bp, Homo sapien
ttgtggcattgcctgtttcttgaat

SEQ ID NO: 4916696 - DNA, 25 bp, Homo sapien
ctggcaggtattttcgggagacact

SEQ ID NO: 4916697 - DNA, 25 bp, Homo sapien
aaacagtggattcacaatctgtatc

SEQ ID NO: 4916698 - DNA, 25 bp, Homo sapien
taagacagtccttctggcaggtatt

SEQ ID NO: 4916699 - DNA, 25 bp, Homo sapien
acagtggattcacaatctgtatcct

SEQ ID NO: 4916700 - DNA, 25 bp, Homo sapien
aaaggggcaccagaatcttggagga

SEQ ID NO: 4916701 - DNA, 25 bp, Homo sapien
cttttcttccgatatggagaggtag

SEQ ID NO: 4916702 - DNA, 25 bp, Homo sapien
aacttttcttccgatatggagaggt

SEQ ID NO: 4916703 - DNA, 25 bp, Homo sapien
acttttcttccgatatggagaggta

SEQ ID NO: 4916704 - DNA, 25 bp, Homo sapien
tagaaaccacctttaggctccttca

SEQ ID NO: 4916705 - DNA, 25 bp, Homo sapien
cagttggctgatgccaatattctgt

SEQ ID NO: 4916706 - DNA, 25 bp, Homo sapien
ttctctcttgacatcaacagttggc

SEQ ID NO: 4916707 - DNA, 25 bp, Homo sapien
tccttcagtaacaggcaaacctcta

SEQ ID NO: 4916708 - DNA, 25 bp, Homo sapien
tattgtctgatagtttcttatattt

SEQ ID NO: 4916709 - DNA, 25 bp, Homo sapien
ttttattgtctgatagtttcttata

SEQ ID NO: 4916710 - DNA, 25 bp, Homo sapien
ctgcgtaggtccctgtttttcccat

SEQ ID NO: 4916711 - DNA, 25 bp, Homo sapien
tggctggaatgcatctatatataat

SEQ ID NO: 4916712 - DNA, 25 bp, Homo sapien
tatataattgaacatcacacttagt

SEQ ID NO: 4916713 - DNA, 25 bp, Homo sapien
taattgaacatcacacttagtcttc

SEQ ID NO: 4916714 - DNA, 25 bp, Homo sapien
accaagatggctggaatgcatctat

SEQ ID NO: 4916715 - DNA, 25 bp, Homo sapien
tttctgcagcggcttgcgattccat

SEQ ID NO: 4916716 - DNA, 25 bp, Homo sapien
ttgttccatagaggagatgctgctt

SEQ ID NO: 4916717 - DNA, 25 bp, Homo sapien
ggcttttgttccatagaggagatgc

SEQ ID NO: 4916718 - DNA, 25 bp, Homo sapien
tccatattccagacaggcactttct

SEQ ID NO: 4916719 - DNA, 25 bp, Homo sapien
gtgctttcagtgtgttgcctcttcc

SEQ ID NO: 4916720 - DNA, 25 bp, Homo sapien
tgcagcaagtctccatcaatgtcct

SEQ ID NO: 4916721 - DNA, 25 bp, Homo sapien
caggtttgtgctttcagtgtgttgc

SEQ ID NO: 4916722 - DNA, 25 bp, Homo sapien
tcaatgtcctcaggtttgtgctttc

SEQ ID NO: 4916723 - DNA, 25 bp, Homo sapien
caacacttgttggataggtagcaga

SEQ ID NO: 4916724 - DNA, 25 bp, Homo sapien
tccataattatgttgggccgagcaa

SEQ ID NO: 4916725 - DNA, 25 bp, Homo sapien
ggtagcagaggcagacgttccaatt

SEQ ID NO: 4916726 - DNA, 25 bp, Homo sapien
gattcttagtggtatggccttcaca

SEQ ID NO: 4916727 - DNA, 25 bp, Homo sapien
tgcagtggcgtgactgcaagctccg

SEQ ID NO: 4916728 - DNA, 25 bp, Homo sapien
agtgcagtggcgtgactgcaagctc

SEQ ID NO: 4916729 - DNA, 25 bp, Homo sapien
ggagtgcagtggcgtgactgcaagc

SEQ ID NO: 4916730 - DNA, 25 bp, Homo sapien
tggagtgcagtggcgtgactgcaag

SEQ ID NO: 4916731 - DNA, 25 bp, Homo sapien
tggtgttgcctaagttgtctctcag

SEQ ID NO: 4916732 - DNA, 25 bp, Homo sapien
gaatggtgttgcctaagttgtctct

SEQ ID NO: 4916733 - DNA, 25 bp, Homo sapien
ggtgttgcctaagttgtctctcagg

SEQ ID NO: 4916734 - DNA, 25 bp, Homo sapien
aatggtgttgcctaagttgtctctc

SEQ ID NO: 4916735 - DNA, 25 bp, Homo sapien
ggtccttactttcacttagccatgg

SEQ ID NO: 4916736 - DNA, 25 bp, Homo sapien
ttagagttcaggaatcaggcccaac

SEQ ID NO: 4916737 - DNA, 25 bp, Homo sapien
gttagaagacaggtcatatccaggg

SEQ ID NO: 4916738 - DNA, 25 bp, Homo sapien
gctcagaggaattgtcaggaaagac

SEQ ID NO: 4916739 - DNA, 25 bp, Homo sapien
tttctgtcaagagcatctcagtggg

SEQ ID NO: 4916740 - DNA, 25 bp, Homo sapien
ctttctgtcaagagcatctcagtgg

SEQ ID NO: 4916741 - DNA, 25 bp, Homo sapien
aagcttcagatttgaaccatctgca

SEQ ID NO: 4916742 - DNA, 25 bp, Homo sapien
gcttcagatttgaaccatctgcaca

SEQ ID NO: 4916743 - DNA, 25 bp, Homo sapien
tgaagcttcagatttgaaccatctg

SEQ ID NO: 4916744 - DNA, 25 bp, Homo sapien
tcagatttgaaccatctgcacatac

SEQ ID NO: 4916745 - DNA, 25 bp, Homo sapien
tccctctctacctgatccattgaga

SEQ ID NO: 4916746 - DNA, 25 bp, Homo sapien
tacatcccacttgattgaggtgaat

SEQ ID NO: 4916747 - DNA, 25 bp, Homo sapien
tttcttgtagtgtccttgtgtggct

SEQ ID NO: 4916748 - DNA, 25 bp, Homo sapien
catatgttccagtatccttgtatcc

SEQ ID NO: 4916749 - DNA, 25 bp, Homo sapien
ccagatattagttgtttgtcatagg

SEQ ID NO: 4916750 - DNA, 25 bp, Homo sapien
aaacgtctgtgcatgttctttgccc

SEQ ID NO: 4916751 - DNA, 25 bp, Homo sapien
ggctgatgtcttgaagagtttttcc

SEQ ID NO: 4916752 - DNA, 25 bp, Homo sapien
taagatgatgcctccgaatttgttc

SEQ ID NO: 4916753 - DNA, 25 bp, Homo sapien
caagcattctatgtgagcttgagaa

SEQ ID NO: 4916754 - DNA, 25 bp, Homo sapien
caacaagaagttaggtctttactgg

SEQ ID NO: 4916755 - DNA, 25 bp, Homo sapien
gaatgtgtactctgttgtcattaga

SEQ ID NO: 4916756 - DNA, 25 bp, Homo sapien
gaatgtgatctatctttacaagcat

SEQ ID NO: 4916757 - DNA, 25 bp, Homo sapien
tatagatcattgtacagactttggt

SEQ ID NO: 4916758 - DNA, 25 bp, Homo sapien
actttggtttatactcagagtgaat

SEQ ID NO: 4916759 - DNA, 25 bp, Homo sapien
agggccttatagatcattgtacaga

SEQ ID NO: 4916760 - DNA, 25 bp, Homo sapien
tcattgtacagactttggtttatac

SEQ ID NO: 4916761 - DNA, 25 bp, Homo sapien
gaaatccagtatatataattgggca

SEQ ID NO: 4916762 - DNA, 25 bp, Homo sapien
taagtcggtatgtattctcccaaac

SEQ ID NO: 4916763 - DNA, 25 bp, Homo sapien
aacacttactcctgcgctgcctaat

SEQ ID NO: 4916764 - DNA, 25 bp, Homo sapien
ccaaaccttctctatacttatgtaa

SEQ ID NO: 4916765 - DNA, 25 bp, Homo sapien
cactctttaagggaatgctactgct

SEQ ID NO: 4916766 - DNA, 25 bp, Homo sapien
ctttaagggaatgctactgcttttc

SEQ ID NO: 4916767 - DNA, 25 bp, Homo sapien
gcaagccacatctcaatgccctcat

SEQ ID NO: 4916768 - DNA, 25 bp, Homo sapien
gctactgcttttcagcaagccacat

SEQ ID NO: 4916769 - DNA, 25 bp, Homo sapien
taagtgggtaatgccatctggttcc

SEQ ID NO: 4916770 - DNA, 25 bp, Homo sapien
cacatgctcttgtttgttcgcttta

SEQ ID NO: 4916771 - DNA, 25 bp, Homo sapien
ttcgctttacagctagtgtagtggg

SEQ ID NO: 4916772 - DNA, 25 bp, Homo sapien
gaaagcttgtatatcatccgggtaa

SEQ ID NO: 4916773 - DNA, 25 bp, Homo sapien
tccggacatctatagaactactaag

SEQ ID NO: 4916774 - DNA, 25 bp, Homo sapien
gaactactaagtgctagactattgg

SEQ ID NO: 4916775 - DNA, 25 bp, Homo sapien
tctttgacagtccacacttgccaaa

SEQ ID NO: 4916776 - DNA, 25 bp, Homo sapien
tgtgctttgcctccggacatctata

SEQ ID NO: 4916777 - DNA, 25 bp, Homo sapien
ttgtattaggtaattggtacttcat

SEQ ID NO: 4916778 - DNA, 25 bp, Homo sapien
tttgaattatgtgtaattttctgaa

SEQ ID NO: 4916779 - DNA, 25 bp, Homo sapien
tttgtattaggtaattggtacttca

SEQ ID NO: 4916780 - DNA, 25 bp, Homo sapien
caaacctaaaaactgaaaattgcat

SEQ ID NO: 4916781 - DNA, 25 bp, Homo sapien
aactgaacttctgcacttggttata

SEQ ID NO: 4916782 - DNA, 25 bp, Homo sapien
tctgcacttggttatattgaaaaca

SEQ ID NO: 4916783 - DNA, 25 bp, Homo sapien
gagaaagtccgattctcccaccaag

SEQ ID NO: 4916784 - DNA, 25 bp, Homo sapien
gaacctacgatgtcagaattctcca

SEQ ID NO: 4916785 - DNA, 25 bp, Homo sapien
cgatttatttcttggttgactgata

SEQ ID NO: 4916786 - DNA, 25 bp, Homo sapien
ttttgaaagattacacatttcctgg

SEQ ID NO: 4916787 - DNA, 25 bp, Homo sapien
taattgtcccgatattgctgtcaca

SEQ ID NO: 4916788 - DNA, 25 bp, Homo sapien
tgctgtcacatgtggagaccacttg

SEQ ID NO: 4916789 - DNA, 25 bp, Homo sapien
ggaagatcccctccttcaatggaag

SEQ ID NO: 4916790 - DNA, 25 bp, Homo sapien
ggactggtattcttagagccttttg

SEQ ID NO: 4916791 - DNA, 25 bp, Homo sapien
cgtattctgccaattaggactggta

SEQ ID NO: 4916792 - DNA, 25 bp, Homo sapien
ctaggttagggaaccagtgtctagc

SEQ ID NO: 4916793 - DNA, 25 bp, Homo sapien
tgtcgaattgtaatcaccagcacta

SEQ ID NO: 4916794 - DNA, 25 bp, Homo sapien
tgttctgccacatgaagatgtgtct

SEQ ID NO: 4916795 - DNA, 25 bp, Homo sapien
cacaggtggaatgataagctttggc

SEQ ID NO: 4916796 - DNA, 25 bp, Homo sapien
tggactcacacagctagagatgtta

SEQ ID NO: 4916797 - DNA, 25 bp, Homo sapien
ttcactactgctaccgtcataggag

SEQ ID NO: 4916798 - DNA, 25 bp, Homo sapien
ggagacttgcttgattttctgctgc

SEQ ID NO: 4916799 - DNA, 25 bp, Homo sapien
aggagacttgcttgattttctgctg

SEQ ID NO: 4916800 - DNA, 25 bp, Homo sapien
actactgctaccgtcataggagact

SEQ ID NO: 4916801 - DNA, 25 bp, Homo sapien
ttggcatagtagatcacttctttga

SEQ ID NO: 4916802 - DNA, 25 bp, Homo sapien
tggcatagtagatcacttctttgaa

SEQ ID NO: 4916803 - DNA, 25 bp, Homo sapien
aataaccctctggatgaactgcttc

SEQ ID NO: 4916804 - DNA, 25 bp, Homo sapien
ataaccctctggatgaactgcttca

SEQ ID NO: 4916805 - DNA, 25 bp, Homo sapien
tcagagacattttgattagttatta

SEQ ID NO: 4916806 - DNA, 25 bp, Homo sapien
tcaatcagagacattttgattagtt

SEQ ID NO: 4916807 - DNA, 25 bp, Homo sapien
aatcagagacattttgattagttat

SEQ ID NO: 4916808 - DNA, 25 bp, Homo sapien
cagagacattttgattagttattac

SEQ ID NO: 4916809 - DNA, 25 bp, Homo sapien
gacattcgaccaaatgctgaatgat

SEQ ID NO: 4916810 - DNA, 25 bp, Homo sapien
gctgacattcgaccaaatgctgaat

SEQ ID NO: 4916811 - DNA, 25 bp, Homo sapien
tctggctgacattcgaccaaatgct

SEQ ID NO: 4916812 - DNA, 25 bp, Homo sapien
tgcctctggctgacattcgaccaaa

SEQ ID NO: 4916813 - DNA, 25 bp, Homo sapien
tacacccggctaaagcaatccattg

SEQ ID NO: 4916814 - DNA, 25 bp, Homo sapien
caaaatgcgtggctgtctgtgagca

SEQ ID NO: 4916815 - DNA, 25 bp, Homo sapien
caatccattgagtgggagataagca

SEQ ID NO: 4916816 - DNA, 25 bp, Homo sapien
tccctgtctttgttacacccggcta

SEQ ID NO: 4916817 - DNA, 25 bp, Homo sapien
caaatgcaactctccaagagctcat

SEQ ID NO: 4916818 - DNA, 25 bp, Homo sapien
gcaactctccaagagctcatttgga

SEQ ID NO: 4916819 - DNA, 25 bp, Homo sapien
ctccaagagctcatttggaaaaaat

SEQ ID NO: 4916820 - DNA, 25 bp, Homo sapien
tgtctctccagctgccaaaagtcat

SEQ ID NO: 4916821 - DNA, 25 bp, Homo sapien
ggttggtgaaaatttgctcctctag

SEQ ID NO: 4916822 - DNA, 25 bp, Homo sapien
taatgtggaaaaagtggttggtgaa

SEQ ID NO: 4916823 - DNA, 25 bp, Homo sapien
tggatattgaatgccctctctgtgt

SEQ ID NO: 4916824 - DNA, 25 bp, Homo sapien
ctttgagggagccacccacttggat

SEQ ID NO: 4916825 - DNA, 25 bp, Homo sapien
aagtcccttcagagtaaggaccctg

SEQ ID NO: 4916826 - DNA, 25 bp, Homo sapien
tgctgggcttggtaaggcttgctct

SEQ ID NO: 4916827 - DNA, 25 bp, Homo sapien
gagttgtgtactctgctctctttgc

SEQ ID NO: 4916828 - DNA, 25 bp, Homo sapien
cactggtcctgttgcgagttgtgta

SEQ ID NO: 4916829 - DNA, 25 bp, Homo sapien
ttcctcttaagggtgtctgatatta

SEQ ID NO: 4916830 - DNA, 25 bp, Homo sapien
ctctggtattccttgctctgactga

SEQ ID NO: 4916831 - DNA, 25 bp, Homo sapien
tggctctgtagactggcatccacag

SEQ ID NO: 4916832 - DNA, 25 bp, Homo sapien
tgtggtctctggtcgtgtggcttac

SEQ ID NO: 4916833 - DNA, 25 bp, Homo sapien
tggagtccggttgaaaaggccagag

SEQ ID NO: 4916834 - DNA, 25 bp, Homo sapien
cctggagtccggttgaaaaggccag

SEQ ID NO: 4916835 - DNA, 25 bp, Homo sapien
ctggagtccggttgaaaaggccaga

SEQ ID NO: 4916836 - DNA, 25 bp, Homo sapien
acaaaatcctccacaactgagaact

SEQ ID NO: 4916837 - DNA, 25 bp, Homo sapien
aatcctccacaactgagaactttat

SEQ ID NO: 4916838 - DNA, 25 bp, Homo sapien
cctgtcagctgagttctcctactcc

SEQ ID NO: 4916839 - DNA, 25 bp, Homo sapien
cctccacaactgagaactttatttt

SEQ ID NO: 4916840 - DNA, 25 bp, Homo sapien
catgtagctcacaccaggctccttt

SEQ ID NO: 4916841 - DNA, 25 bp, Homo sapien
tgcatgtagctcacaccaggctcct

SEQ ID NO: 4916842 - DNA, 25 bp, Homo sapien
tttctgccggttctgacatcacaag

SEQ ID NO: 4916843 - DNA, 25 bp, Homo sapien
cttttctgccggttctgacatcaca

SEQ ID NO: 4916844 - DNA, 25 bp, Homo sapien
ctgtgttagagccagagttaggatt

SEQ ID NO: 4916845 - DNA, 25 bp, Homo sapien
aaaagtggtctgtgttagagccaga

SEQ ID NO: 4916846 - DNA, 25 bp, Homo sapien
tgttagagccagagttaggatttgg

SEQ ID NO: 4916847 - DNA, 25 bp, Homo sapien
tggtctgtgttagagccagagttag

SEQ ID NO: 4916848 - DNA, 25 bp, Homo sapien
aagttaagatgccaccctcaccaca

SEQ ID NO: 4916849 - DNA, 25 bp, Homo sapien
tgccaccctcaccacactgacacat

SEQ ID NO: 4916850 - DNA, 25 bp, Homo sapien
agatgccaccctcaccacactgaca

SEQ ID NO: 4916851 - DNA, 25 bp, Homo sapien
aagatgccaccctcaccacactgac

SEQ ID NO: 4916852 - DNA, 25 bp, Homo sapien
gtcgttggggtcaaagtcttccagc

SEQ ID NO: 4916853 - DNA, 25 bp, Homo sapien
ttcagtagtaggcatgtcaatgggt

SEQ ID NO: 4916854 - DNA, 25 bp, Homo sapien
tagtaggcatgtcaatgggtcgttg

SEQ ID NO: 4916855 - DNA, 25 bp, Homo sapien
caatgggtcgttggggtcaaagtct

SEQ ID NO: 4916856 - DNA, 25 bp, Homo sapien
ggaacagaagaactgtgggaagaat

SEQ ID NO: 4916857 - DNA, 25 bp, Homo sapien
aagaatgttgtttgaagctttggca

SEQ ID NO: 4916858 - DNA, 25 bp, Homo sapien
actgtgggaagaatgttgtttgaag

SEQ ID NO: 4916859 - DNA, 25 bp, Homo sapien
gttgtttgaagctttggcatatgtt

SEQ ID NO: 4916860 - DNA, 25 bp, Homo sapien
gaagcaggcaagtgagcgtgagcct

SEQ ID NO: 4916861 - DNA, 25 bp, Homo sapien
agaagcaggcaagtgagcgtgagcc

SEQ ID NO: 4916862 - DNA, 25 bp, Homo sapien
agcaggcaagtgagcgtgagcctcc

SEQ ID NO: 4916863 - DNA, 25 bp, Homo sapien
aagcaggcaagtgagcgtgagcctc

SEQ ID NO: 4916864 - DNA, 25 bp, Homo sapien
tgcaaaatgtcctatacgcttttct

SEQ ID NO: 4916865 - DNA, 25 bp, Homo sapien
cgtgtgttttgtacaagcacagagg

SEQ ID NO: 4916866 - DNA, 25 bp, Homo sapien
ttacccagattttagccgcttctca

SEQ ID NO: 4916867 - DNA, 25 bp, Homo sapien
cccttctgtatgaaacagtttctcg

SEQ ID NO: 4916868 - DNA, 25 bp, Homo sapien
caacatttctttctcgcgcggtgta

SEQ ID NO: 4916869 - DNA, 25 bp, Homo sapien
ctatggttcaggagttgccaggtct

SEQ ID NO: 4916870 - DNA, 25 bp, Homo sapien
cacgttattaaacttcctgccgagt

SEQ ID NO: 4916871 - DNA, 25 bp, Homo sapien
tgccaggtctgaggccacgttatta

SEQ ID NO: 4916872 - DNA, 25 bp, Homo sapien
ggagtcgtgagtattacatttgtta

SEQ ID NO: 4916873 - DNA, 25 bp, Homo sapien
gtcgtgagtattacatttgttagtc

SEQ ID NO: 4916874 - DNA, 25 bp, Homo sapien
cgtgagtattacatttgttagtcat

SEQ ID NO: 4916875 - DNA, 25 bp, Homo sapien
gagtcgtgagtattacatttgttag

SEQ ID NO: 4916876 - DNA, 25 bp, Homo sapien
tttgcttagctttttcagtgtctga

SEQ ID NO: 4916877 - DNA, 25 bp, Homo sapien
gcttagctttttcagtgtctgacat

SEQ ID NO: 4916878 - DNA, 25 bp, Homo sapien
ttctttttgcttagctttttcagtg

SEQ ID NO: 4916879 - DNA, 25 bp, Homo sapien
ctttttgcttagctttttcagtgtc

SEQ ID NO: 4916880 - DNA, 25 bp, Homo sapien
tagtactgccttaatccattttcaa

SEQ ID NO: 4916881 - DNA, 25 bp, Homo sapien
ctagtactgccttaatccattttca

SEQ ID NO: 4916882 - DNA, 25 bp, Homo sapien
agtactgccttaatccattttcaag

SEQ ID NO: 4916883 - DNA, 25 bp, Homo sapien
gtactgccttaatccattttcaagg

SEQ ID NO: 4916884 - DNA, 25 bp, Homo sapien
tatccaaaaatctgcacttacgtgt

SEQ ID NO: 4916885 - DNA, 25 bp, Homo sapien
tggactatccaaaaatctgcactta

SEQ ID NO: 4916886 - DNA, 25 bp, Homo sapien
aaatctgcacttacgtgttttccac

SEQ ID NO: 4916887 - DNA, 25 bp, Homo sapien
caaaaatctgcacttacgtgttttc

SEQ ID NO: 4916888 - DNA, 25 bp, Homo sapien
cagatgtagcatcagaagtttgtaa

SEQ ID NO: 4916889 - DNA, 25 bp, Homo sapien
ctctttctcacttgtagcgccaaac

SEQ ID NO: 4916890 - DNA, 25 bp, Homo sapien
tatcagatgtagcatcagaagtttg

SEQ ID NO: 4916891 - DNA, 25 bp, Homo sapien
gcgccaaactcagtgtgttctgaca

SEQ ID NO: 4916892 - DNA, 25 bp, Homo sapien
tcagtgtgtctcccggtaaccatcc

SEQ ID NO: 4916893 - DNA, 25 bp, Homo sapien
cagtgtgtctcccggtaaccatcca

SEQ ID NO: 4916894 - DNA, 25 bp, Homo sapien
agtgtgtctcccggtaaccatccac

SEQ ID NO: 4916895 - DNA, 25 bp, Homo sapien
ggacatgatggctgctatgccttca

SEQ ID NO: 4916896 - DNA, 25 bp, Homo sapien
taataggcattagccagtctaacca

SEQ ID NO: 4916897 - DNA, 25 bp, Homo sapien
gcagcatccatctttatactcatca

SEQ ID NO: 4916898 - DNA, 25 bp, Homo sapien
gatggctgctatgccttcagcttca

SEQ ID NO: 4916899 - DNA, 25 bp, Homo sapien
aaaccgaattatgctcatctctggg

SEQ ID NO: 4916900 - DNA, 25 bp, Homo sapien
cgcaagggccctaatattagcaggt

SEQ ID NO: 4916901 - DNA, 25 bp, Homo sapien
tgtggaaaggtttgaggtaaatcgc

SEQ ID NO: 4916902 - DNA, 25 bp, Homo sapien
caggttaggcctataggttgccaga

SEQ ID NO: 4916903 - DNA, 25 bp, Homo sapien
ctctgctgcaggcttgggtgatcca

SEQ ID NO: 4916904 - DNA, 25 bp, Homo sapien
aggcttgggtgatccagaatttcca

SEQ ID NO: 4916905 - DNA, 25 bp, Homo sapien
ggtgatccagaatttccaaagagca

SEQ ID NO: 4916906 - DNA, 25 bp, Homo sapien
tccagaatttccaaagagcagtgtc

SEQ ID NO: 4916907 - DNA, 25 bp, Homo sapien
ccactgcatgtggactgaacaaaac

SEQ ID NO: 4916908 - DNA, 25 bp, Homo sapien
gagtccgggtcaccaatggaggtca

SEQ ID NO: 4916909 - DNA, 25 bp, Homo sapien
gggtgaagaatcaagcagccagtga

SEQ ID NO: 4916910 - DNA, 25 bp, Homo sapien
caaaacctctggtactcagtgtcga

SEQ ID NO: 4916911 - DNA, 25 bp, Homo sapien
catccaacactccactttgatcaca

SEQ ID NO: 4916912 - DNA, 25 bp, Homo sapien
tccaacactccactttgatcacata

SEQ ID NO: 4916913 - DNA, 25 bp, Homo sapien
atcatccaacactccactttgatca

SEQ ID NO: 4916914 - DNA, 25 bp, Homo sapien
ccaacactccactttgatcacatat

SEQ ID NO: 4916915 - DNA, 25 bp, Homo sapien
aaattcacgtgattatctcagtaga

SEQ ID NO: 4916916 - DNA, 25 bp, Homo sapien
tttgacaatgttagtcacttcttca

SEQ ID NO: 4916917 - DNA, 25 bp, Homo sapien
ggaataaagggcaaaattcacgtga

SEQ ID NO: 4916918 - DNA, 25 bp, Homo sapien
gggcaaaattcacgtgattatctca

SEQ ID NO: 4916919 - DNA, 25 bp, Homo sapien
aacagctggttcttctctcaactta

SEQ ID NO: 4916920 - DNA, 25 bp, Homo sapien
gaagcaacagctggttcttctctca

SEQ ID NO: 4916921 - DNA, 25 bp, Homo sapien
tgaagcaacagctggttcttctctc

SEQ ID NO: 4916922 - DNA, 25 bp, Homo sapien
agctggttcttctctcaacttacgg

SEQ ID NO: 4916923 - DNA, 25 bp, Homo sapien
gatccttggttgaaaggcaccatag

SEQ ID NO: 4916924 - DNA, 25 bp, Homo sapien
tgtaaatatcaactaggcagccaat

SEQ ID NO: 4916925 - DNA, 25 bp, Homo sapien
ttaaactgtcagttcccaaaggcca

SEQ ID NO: 4916926 - DNA, 25 bp, Homo sapien
tagggcggactatttgacaaccaca

SEQ ID NO: 4916927 - DNA, 25 bp, Homo sapien
ggtggaattctatcagcaggcaact

SEQ ID NO: 4916928 - DNA, 25 bp, Homo sapien
gagaagaagatagaaggacgcccgt

SEQ ID NO: 4916929 - DNA, 25 bp, Homo sapien
taagcttcactctgtcctacaccgg

SEQ ID NO: 4916930 - DNA, 25 bp, Homo sapien
tcaagtcgtctttggtgagccagta

SEQ ID NO: 4916931 - DNA, 25 bp, Homo sapien
ctaaagcagtactggactggccatt

SEQ ID NO: 4916932 - DNA, 25 bp, Homo sapien
acctgttaagtcaaaaccatcttgg

SEQ ID NO: 4916933 - DNA, 25 bp, Homo sapien
aatggcgccctctcaatttagtctt

SEQ ID NO: 4916934 - DNA, 25 bp, Homo sapien
gaaggtccagggcaatgaaagaaaa

SEQ ID NO: 4916935 - DNA, 25 bp, Homo sapien
gcatgctgctaacactactaattgg

SEQ ID NO: 4916936 - DNA, 25 bp, Homo sapien
tacattatggctacagggaatacac

SEQ ID NO: 4916937 - DNA, 25 bp, Homo sapien
ggcgttttaccatagctcttagcac

SEQ ID NO: 4916938 - DNA, 25 bp, Homo sapien
tatatggaccattagaagcactctt

SEQ ID NO: 4916939 - DNA, 25 bp, Homo sapien
gaggattcttgttgattcaattcat

SEQ ID NO: 4916940 - DNA, 25 bp, Homo sapien
tgtatacagtaaaggagaggattct

SEQ ID NO: 4916941 - DNA, 25 bp, Homo sapien
tacagtaaaggagaggattcttgtt

SEQ ID NO: 4916942 - DNA, 25 bp, Homo sapien
tatacagtaaaggagaggattcttg

SEQ ID NO: 4916943 - DNA, 25 bp, Homo sapien
gaacgtcattgaagcaccagcataa

SEQ ID NO: 4916944 - DNA, 25 bp, Homo sapien
ttctgcaaagggtatcttgtgccag

SEQ ID NO: 4916945 - DNA, 25 bp, Homo sapien
gattgattggcaatttttggaccac

SEQ ID NO: 4916946 - DNA, 25 bp, Homo sapien
tgtgccagggttgaacagaacgtca

SEQ ID NO: 4916947 - DNA, 25 bp, Homo sapien
taaagccgcttaccattcaagttag

SEQ ID NO: 4916948 - DNA, 25 bp, Homo sapien
catctggctgtagcaaaacgctgcc

SEQ ID NO: 4916949 - DNA, 25 bp, Homo sapien
aatggtttcctctctgcgggtctga

SEQ ID NO: 4916950 - DNA, 25 bp, Homo sapien
ccagccgccaagtgaaatgcaggga

SEQ ID NO: 4916951 - DNA, 25 bp, Homo sapien
gacatttgtaatgctaagttttcaa

SEQ ID NO: 4916952 - DNA, 25 bp, Homo sapien
gtaaggcattttccagtaaccagtg

SEQ ID NO: 4916953 - DNA, 25 bp, Homo sapien
cagttttgtcacatattgttgcaca

SEQ ID NO: 4916954 - DNA, 25 bp, Homo sapien
ccagtaaccagtgttgtattacaaa

SEQ ID NO: 4916955 - DNA, 25 bp, Homo sapien
acagccagtttgtgtcttaatgggc

SEQ ID NO: 4916956 - DNA, 25 bp, Homo sapien
tttctagatccacagccagtttgtg

SEQ ID NO: 4916957 - DNA, 25 bp, Homo sapien
tcagaagtttccttcgacataagct

SEQ ID NO: 4916958 - DNA, 25 bp, Homo sapien
tccttcgacataagctcttcggcat

SEQ ID NO: 4916959 - DNA, 25 bp, Homo sapien
ttaaatcattgagtgggttttgcca

SEQ ID NO: 4916960 - DNA, 25 bp, Homo sapien
caagaagctgttctaagaataacat

SEQ ID NO: 4916961 - DNA, 25 bp, Homo sapien
ataaagcttacatttgccacttgcc

SEQ ID NO: 4916962 - DNA, 25 bp, Homo sapien
tcaagtaacttgtaaattggaatgc

SEQ ID NO: 4916963 - DNA, 25 bp, Homo sapien
atcagtgaagtgtggaatagtggaa

SEQ ID NO: 4916964 - DNA, 25 bp, Homo sapien
atcttcatggggaatttctgtaggc

SEQ ID NO: 4916965 - DNA, 25 bp, Homo sapien
tcattccttatcagtgaagtgtgga

SEQ ID NO: 4916966 - DNA, 25 bp, Homo sapien
tgtggaatagtggaatcttcatggg

SEQ ID NO: 4916967 - DNA, 25 bp, Homo sapien
tgatagtatgaagccttacatggac

SEQ ID NO: 4916968 - DNA, 25 bp, Homo sapien
tagcactgctaaacgagatagcact

SEQ ID NO: 4916969 - DNA, 25 bp, Homo sapien
ttgtaatcgtcgagatagcactgct

SEQ ID NO: 4916970 - DNA, 25 bp, Homo sapien
tgatggatgtagaactcctcccaca

SEQ ID NO: 4916971 - DNA, 25 bp, Homo sapien
tacattcttcactgtgcctttgcat

SEQ ID NO: 4916972 - DNA, 25 bp, Homo sapien
gttttccttcactacattcttcact

SEQ ID NO: 4916973 - DNA, 25 bp, Homo sapien
aagaactgttttccttcactacatt

SEQ ID NO: 4916974 - DNA, 25 bp, Homo sapien
cttcactacattcttcactgtgcct

SEQ ID NO: 4916975 - DNA, 25 bp, Homo sapien
tggcttagaatagatggagatagca

SEQ ID NO: 4916976 - DNA, 25 bp, Homo sapien
ctggcttagaatagatggagatagc

SEQ ID NO: 4916977 - DNA, 25 bp, Homo sapien
gctggcttagaatagatggagatag

SEQ ID NO: 4916978 - DNA, 25 bp, Homo sapien
gacaatcgaattctttgggctgata
